United States Patent Application Publication US 2019/0348154 A1 - sequence listing, part 128

SEQ ID NO: 486830 - DNA, 1311 bp, Shigella sonnei
atgagaaaaatagtggccatggccgttatttgcctgacggctgcctctggccttatctctgcttatgcggcgcaactggctgacgatgaggcgggactacgcatcagactgaaaaacgaattgcgcagggcggataagcccagtgctggcgcgggaagagatatttacgcatgggtacagggaggattgctcgatttcaatagtggttattattccaatattattggcgttgaaggcggggcatattatgtttataaattaggtgctcgtgctgatatgagtacccggtggtatcttgatggtgataaaagttttggctttgccctaggggcagtaaaaataaaacccagtgaaaatagcctgcttaaatcaggtcgcttcgggacggattatagttatggtagcttaccttatcgtattccgttaatggctggcagttcgcaacgtacattaccgacagtttctgaaggagcattaggttattgggctttaacaccaaatattgatctgtggggaatgtggcgttcacgagtatttttatggactgattcaacaaccggtattcgtgatgaaggggtgtataacagccagacgggaaaatacgataaacatcgcgcacgttcttttttagccgccagttggcatgatgataccagtcgctattctctgggggcatcggtacagaaagatgtttccaatcagatacaaagtattctcgagaaaagcataccgctcgacccgaattatacgttgaaaggggagttgctcggcttttacgcgcagctcgaaggtttaagtcgtaataccagccagcccaatgaaacggcgttggttagtggacaattgacctggaatgcgccgtggggaagcgtatttggcagtggtggttatttgcgccatgcaatgaatggagccgtggtggataccgacattggctatcccttttcattaagtcttgatcgtaaccgtgaaggaatgcagtcctggcaattgggcgtcaactatcgtttaacgccgcaatttacactgacatttgcacagattgtgactcgcggctatgaatccagtaaacgagatgtgcggattgaaggcgcgggtatcttaggtggtatgaactatcgggtcagcgaagggccgttacaagggatgaatttctttcttgctgccgataaagggcgggaaaagcgcgatggcagtacgctgggcgatcgcctgaattactgggatgtgaaaatgagtattcagtatgactttatgctgaagtcagaaataacgccggagagaaaaacctccggcgtttcagattgttga

SEQ ID NO: 486831 - DNA, 231 bp, Shigella sonnei; identical to SEQ ID NO: 463432

SEQ ID NO: 486832 - DNA, 1005 bp, Shigella sonnei; identical to SEQ ID NO: 463433

SEQ ID NO: 486833 - DNA, 564 bp, Shigella sonnei; identical to SEQ ID NO: 463434

SEQ ID NO: 486834 - DNA, 198 bp, Shigella sonnei; identical to SEQ ID NO: 81716

SEQ ID NO: 486835 - DNA, 492 bp, Shigella sonnei; identical to SEQ ID NO: 463435

SEQ ID NO: 486836 - DNA, 375 bp, Shigella sonnei; identical to SEQ ID NO: 476243

SEQ ID NO: 486837 - DNA, 375 bp, Shigella sonnei; identical to SEQ ID NO: 476242

SEQ ID NO: 486838 - DNA, 1821 bp, Shigella sonnei
gtgtgccacttcagtggtgtatccgatgatcttaaagaatatggactcaacctacaggactataacaagtacttaaaacaggctgatggtggtatgcaggctgtgatccacaccttttacgccatgcgtgatgcaggtaaatcacagagtgaaatagttaacgtaatggaaacgttagccagtgactcaagccacatgattagtactcttcagcagttcaataatgaggctcaagctacagcctatatccagtcacaaaatgctgaagtaactaatgatgctgctgaaaaatatgctgaattcgataaaaaccttgggaaacttactaccagcattaaaggtactattgctgatggcctatcacctttagttaatgccatgaacagtgtctatgatgctgcaaatcaaaaacctcacgaggcaggtttgtttgaagatctgaatgaacgtattaaaacttccaagggttctctacaggatatgttggatatctgggaaaaattacgtacagcaggggcattaaactaccagggtgcagcactcaatactggcatcatggatgataagggcaacaagggtaatgagttcgctcaggctaaggcacgtttagaagaactggcaaacaacctaaagtccgatgttgcggttgctaccgctcctactggcggatgggttgatcaggcaaaagaagctgaagatgcagcgaagaagttagaacaacaacgtaaacaggcagaagcggcacaaaaggcggcagatgcaaaacgcctacaggctcaacgtaatctggaagctgctcttgctcaagttggggaagatggttttcaggtacgtctacagcagttcgacagacaacaaaaggcacttcttaaaaccatcaccgatagtgctcaagtactcggtatcaatcctgatgaaatgctaaagaacgctactgcatatggtgctaaacaacgtactgatttactgaattcaatggttggttatcaagatcctaatcagggtctgaaagataccaatgctcttattggttccggtctactcaatgacaatcagaaggggtatctggcacagcaacagaatcagcgtatcaatggtggtaatccattagcctataacgataccgatcagaagttgaaagataacgctgatgctatgaatgctgaacttcagcagaatgagttgttgctgaaaggccatgaggactatgagaaacgtaaagctgagatcacggcaaagtacaatgcacaggccatccaaatcagtaaccagaatgcacaggatcagttaagtatcttctcaagtactgcacagtcactatcacagggcatggttgatgcgtttggggaaagtagtggggctgcacaagctgcatttaccctaagtaagagcataagcattgcacagacagtactttcaattcagtcagcattggcccaagcactcgctaccccttggccagcttcattggcaaactatgcacaagtactttcacttggtatgtcgattattagtactgcaaagggtgctgctgctggtcagttccatggcggggtagatgaactaccagcaagttatgacaacaaatcatttgtacttaagcagggcgagagagtggtgcagcctgaagcgaataagaaattaacagcattcttggataaacaagaaggtggaagtacttcaggtgatattaccgttaacgcaccattgatcatccagggtgatgtagctgatgatgacaagaaatttaatgagatgcttaagaaacacgccaatagtgtttctcaagctgtgagaagtagtcaaaaacgtaatacataa

SEQ ID NO: 486839 - DNA, 573 bp, Shigella sonnei
ttgttacctcgaatatcttctttctttatttatttaaaaacctcgattcgtattttttttaacaggcttgattggcaggctgcatccgtcatcgttgctatgttgttatttgcaggccaaataggctataacgcatatgataaatggaaagaaagttcagatgatgtttttaagatgcgtgtaatcttattgagcgaaatcaacaataaccttttagctcttgctactggtggcgatgagtctcaggtgttaggcacatatgaaatatgtattcctcttccaactgaagatacagaagctattaaaagagtagcaactgccgtttcttatttgcatgatgatgtatattattcccaattagaaaaattagcatcactcccaaaaaaagaagtagatgccatcgtaaagagttattattcattatcgagattacgtactctttcaacacagcttgcatacaatattaaatactcaccacctaaagttaaattattgcgggaagagtattacaatctctataccctttcatcttctctttcacaatatttgtcttatcacacggaaaatccctaa

SEQ ID NO: 486840 - DNA, 558 bp, Shigella sonnei
atggcatccttttcaaatcaaataaaagtaacgaactttcaaattaaaagtactgaaccgatctattctaatcaaacatggacaggtcaacgtatcatgagaagtactggaattcaatactatcaaattcagttcacccttaattttaatcctgcatcactaaatgaagtgaatagctttttagctcaatatgcacagggcaaacctttcactatgtcattggggcttgcaggtacatattacggtaaacagactggtgcagtaaccgctactgctctcactaaaccgggtaatatggttgtacctatcagtactaacacattagctgtgggtgagtgggtacagttttccaatcacaataagctatatcgaatcgtagaacgtaccagtacttcaattactattttccctgctctacaaaatacagtacaggcaagtgaagcactcaaatataacaatctcatgatcgaggctgtattagatccagacaatgattattcattgcctattgggaacatcatgaatattacattgaaagcaacggagaatatcatctaa

SEQ ID NO: 486841 - DNA, 624 bp, Shigella sonnei
atggactcaggtatatatactaatgctaatcttcttaagtactggaagttagtcagaggtacaaccaagacaagattaacactaatggaaattatgagcttaggcgttaatgttacttgttttgatgtactaccaaaaggtactaatggttttcactggacggattcactaattgatatagatctggatggttataagtacataagtttccccgacattatcagtggttcattaccttcatattctgaacaaaagggcatgtctaatgatgctatcaattttaaaattagcaatgtaaacgcctcggttcgtgctcttgcccttggtggtttcttgaaagatgcacagatgaatatcaagttagtaattctcaatccatatgatagtactgtaattgattcaatgctcatgtttacggggtttattgactatgtacaggcagtaactgatccaaatcagaagcaaaacgaaatgactatatatgtgaattctgtctataagaaattagacagacaacctgcattaattgccgccaactcagtatatcaatcttactatagaaatgatgagtactttagtctgttaggtcaagttaatcaaaatcagaactggaaatacaagtaa

SEQ ID NO: 486842 - DNA, 405 bp, Shigella sonnei
atgaaaaatctacataatgaagtaatgagtattattcagtactcaattgataacccatataagtatggtgataacgattgcaacattatagtactacgccttattgatttaattaatggtactacacagttaactaatcgccagtattcgagcattaaagaaggtatagcaggtttaaacaaggaaggatggaaccatacaggggaaattgttgaagcgtactgtaagccagtacaagccactatagacggtgatatctggttagatcctgacaacccattaattatggcagtagtggcatctggtcgggtacttggagtaaatgctgatcatgatggtttcgaacttcaaccaaaaccaacagagggaacatattacagagtaaggaaacagagagatgggtaa

SEQ ID NO: 486843 - DNA, 3303 bp, Shigella sonnei
atgggtaagagtttagggggcttttttggagccataattacggcagttgtcgtcgcggctgctgtgtacttttcaggaggtacagcattagcagcaataggttggggtgcagcagccggatctttgtcattagttgcaagttctatgttaggtcaaatcggggtttctggatacggtgatgtagcagactcactaagtagaagtacttcaccaactactggattacccgttatatacggtggagaactaccacataaaaatggtgtatcaggcggttccttcatcctaaccggaagcatagtagcctggtacaacgtaccaaattctgattctcagtacttattctcagaacaggctgtagcatatgctggtgtagaaaagcatatcgagcaaatctatattgataatgagccagtacttgcagtaccgattacagcagagggtgtagtacctaaagaaagtattgcagcgaagtaccagaactatttgcaattagaagtacgatttggtggtgactatacgagtactaaaactcttgctgcaaaatatgctggttcgaaatggacaaataaatttcttggtaagggtattgttagtatcagtaccgttatcttaaaaactcaagattcattagaaaataatattcttgttaatgatcaattcgctttaactgtagaaatgaaagggcaggtgatttatgattttgttgatggtacttataaagcaagtagtaaccctccttcaattatctatgattacttaacaaattcaatctatggtatgggtattgatccatcattgattaataccgatacgtttgcagaaaccgcagcatattgtgatgcttttgaatattatgctaatggtgctatcagttatcaaaaaacctataaagataatattgaaaatatctgtcagtcatttggcggcatcatgtatgtacatgccggacaaatctgtattaccacagaccgcaaatcggtatccgtagcctcatttgatgagcgtaacatggtaggggcggtacaggtttctacttctggcggtactgactacttcaacgtagtcgattgcaagtttactaaccctgaatcgatgtacaccactgacgtagtacgtatcccttccgatatcactacggatgaagcagtacagcatgatggacaggtcatagcattatcacgcgattactcatggtcatatgatcaagaggtgattgcaaaaatggctaacgttgatgtactcaaggctaagtatgccctgcgtactatcagcttcaccacaagtgaaggttgggatctcgaagtatgggatgcgatcaatgtcagcaatgaagaactcgctatctcaggcaaatttaaagtactcaataaagatatcagcaccgatcaagagaacgttggctatgtaaccatcacggcagtagaagcacctgatgcaatgtatgatggtattgatccgggtatctggtcgcctggtggggtaattaacttccctgaactacaggtactaccgccaacgaacctacaggcagtacgtaaggggaatactacttctggttcaatcgtggatcttacctgggatgcttcaccagatccgtatctgcgtgggtactatgtttactaccgtcttaacggttccagtacctggacgtatgcggggcagactggcgtacagaagcttgattatgaattatttggattgtctgatactgcaagctacgacttttcggtagaggcttacaacaacttagggctggtatccaagaagctttccctaactggcattgttccaacattcaactttgcactacctgcggtaacgcgtgtagtactgacaaataaaacagaatcagcgtatgtaactgactcaccagatttcaatattgcctgggattcacaaaaagatatcagagtgaataaccgatcatttagtgagtacttcaagtattacgttattaaaatctatgacggtactaaattagtagatacattctatacgcaaagtaatgcctttaatttcactcttgaaatgaaccgtctgaaagtacgtaagcctaccattggtattatcgcacagggatttaatgatggtacatattcagaggaagtgaaaataaccgtagagaataaacagtgtggtttagtagaggatgttagctttacgggtggttttggtaatttgtttgcttcatggactaaatctactgaacgtgattatgcaggtgcgattatcagtattgttaatggtactaatacacgtatattcaccagttatgcacctgaatttgattcaataccaaacatcactgatggtgagtataaggttaagatgggattctttgatgtgtttggtactgatgatattcaatattgtccagaacaaacaatcagtatcaactccaagtaccagtttaccgaagatgatgcagaggcaattaacgggattcttgatttagaagatcgcctgactggtaccattaatgatgcggtcaaaattgccaataagaataccagtactgttatcagtgcatcagaggcacgtaccaatgataaaatcactgccagtgagaaaacgttaagtactcagatcactggggtaaatagttccttatcacagaaacttagcaccgttgaaagtactgccaatggtaacaaggccagtatccagacactatcccagacggtaacggataacaacaaagctcagactacagcagtctcacagctacgtagtgatgtgaatggacagattgccactgttaaccagtcaatgagtactaaagccgataaatctactgtagatgctcagtactcactatcagtacaggctaatggcacggtagctggtatgcgtcttgttgcgagtagtggaacgagtaacaactcagcaatctatttcgctgcgaacaagttcatagtctccggtactgacactgctactgtaggtggtactgcaccatttgccatagtcaacggtactacatacttgaagacggcaatgatacaggcggcaagtatcggtactggttacatcgctgatgcggcaattaccaatctaaaactggcctccggctcagtgaatacattaaacgtggttgatggttgtataactacagccaaaatctcaaatactattcaaagtactaattacgtagcaaataaaacaggctggcaaatcaataaagcaggtacgatcctaatcaatggaacgggtggtactggtagaatggtaatcagtaataatattattcaaatctatgacaataataatacgttacgtgtacgtatgggtttatggtaa

SEQ ID NO: 486844 - DNA, 165 bp, Shigella sonnei
atgaaatctaatgaacgtactttcaatagtaccagtactaacccattcagtattagcggaaaagaaacaattggaatgaagaaaaggatttacaggagtaagagctatggcacagggattacaatgttggaatgcagcgggtgtattagtagtagatctgactga

SEQ ID NO: 486845 - DNA, 297 bp, Shigella sonnei
atggcacagggattacaatgttggaatgcagcgggtgtattagtagtagatctgactgattataacatacgttttatgggtacttatactgtcaaggctacttctgcacagacctatactgtatcagtaccaaatatgaaaactacaggctggtttgtacactatgcccccgccagtgatacctttaatgagtggtcagccttttgtaataatgggtcatttactgcggtttatttgccaacatatgcaccgttagctggtaactacacttttaacgtatataagtggacggcgtaa

SEQ ID NO: 486846 - DNA, 657 bp, Shigella sonnei
atggcaggtttcgaggtatataattcagcgggtgcactgactatagatagtactaacaagtcgataatgacgggtgcagtaaaggccatgggaaatctaactgatacgggatactacacaggctttacctgtgccttcggtaatggtggatcgctcggtttcgttatgccatcagtagtagctaacaggaacacaacacagtactggttccagatacagaaagacggggcatggtgtttccctggtgcctatatgttccagcctggcatgggcaggttcatgacaagtagtcacacggctacccccacatctggttttcttgatgtgttcagtgaagaaggtactttaatctggtctgctgcatcagcggcaacaatgccacgtatcaggggatttttgacagcacctgcggctaccgatctcagtactgccattacggtaacgtctccagtagctgatccctggttctgctggtcacaatgtccggggaacatatcagatgatggtacagtaattgggtactctggtctggttatcaggcgtaattccagtacttcattcagtctacagtacgtttcaaagaaccagaaaacctaccgccaggcaatggggaataatggtatccagatagcattggcgacatttacagggtattaa

SEQ ID NO: 486847 - DNA, 375 bp, Shigella sonnei
atgcgtaagaaagaaaataaagcaaaaaaagaaaaattccgtcaatttttccctgagaattatgatattgggatctcattgaatgaagagaatcaattaaggcttttttcaaagcggaatgattctcaagatgagagcttatgcaagtacgaattttccaacaaaattaaagttcagtacatttttttgccgtattcttctgaaattcaagttataacagatgagtttccgctaacggaggcaggctgtcaggagtgtactcaagctttcaaacatccaatatcaatggaactaattgaagagataaaagaagcaaaatgttcagttactggacttgtcatttattcgaaacctatactaaaacttattagctaa

SEQ ID NO: 486848 - DNA, 1935 bp, Shigella sonnei
atgctccgtcctatttgttatgagcgagtatcaagcattcagcaagttgatatgggtaaaggtttggacgaccaacgatcatcattgactgcatacttagataaaaatgctgataagttcactgacgaaaggattttcattactgatgcggggctttccgcattcaaaaatgccaatatctctccagagtctcagcttgggatatttttgcaagatgtgggcaaccgcaagtacggcgtaggtgacgcacttgtggttttatcgctggatcgtctatcgcgtcgatcaagctgggccgaaagtactatccagtacatcgtgaatagtgggattgagattcacgatatctctacaaaccttgtgttacgggttgatgatcctatgtcaaaaattcacatggaactgatacagcacagttcacacaatgagtcattgatgaaatcggtacgtgcaaaattggcatgggataacaaaatcacacgtgcagtacagaacggggaagtaatctccaaccgtatgcctaattggttgagaaatgtagataacaagtaccaagttataccggaacaggcagaactgattgttaaatgtttcatgtggtatagggaagggttgagtactggcgagattgttaaacgtatcggtagaaagtggcagatggtcactgtgtccaggctgatacgtgatcgccgtttgttgggcgagcatgaacgttacaacggtgaggtagtaccaaacgtttacccgaaaatcatcgacgaagagttgttcctgacagcgaatagaatgatggatcgcgttatgttggagaagaagaagccagcagaggatctattacttgaaccagaagttgtccgagagatttttaaactttatgagacaggccttggttcaggggcgattgtaaaacgcttgccgaaagggtggagtaccgtcaatgtactgagggtactacgtgataagaaagtagttaccatgaagattatcgataacctcacctttgaacgggctaatgagaagttatcgcggaatggtatagctaatcgtatccgtaaggacattaccattgctcaggatgattacattactaacctcttcccgaagatgctgaaatgcggtcactgtgggggcaatattgcaattcactataatcatgtacgaactaagtatgttatttgtcgtaacagggaagaaaagaagatctgcgatgctaaatctatccagtacatgagaattgaaaagaacattctacagcttgtcaaaaatgtagacttcaataaattgatgatggaaggtaagtcggattcagattcattgcttgcatcattgcgagaagagttaagtactttacagaaagaggcagaaacctatcaggttaaaattaatgaacgtaaggcagcaggtaagaaagcctcgttaccattaatgacgggtttaactgaggtacaggatagaattgaagaaatagaatctgagatattaaattcaaagaacatcaaagaaatccctgtatttgatttcgatattaataaagtacttgatccattgaatgtcgagttacgtgcaaagttacggaaagaagtaagattagtactgaaatctgttaagtactgggtttttgaaaagcgtatatttgtacagttggaatacttcaatgatgtcctatcccatacgcttgtgattgataacaagcggggcgggggtgaagtactacatgagatcgtaatctctgaaacaagcggcgagcgtgtctacactgtcaatgaagagggcaaaaccgttttcattgcctccgttacatctggtactgatatgtggtcgcttgccattagccgtaccaaaatacttgatgatgttggattgtatcttaatcttctcaagcgtgaaaaatttgagatcattgttaatgaagatatgattgattggatggattaa

SEQ ID NO: 486849 - DNA, 747 bp, Shigella sonnei; identical to SEQ ID NO: 485201

SEQ ID NO: 486850 - DNA, 189 bp, Shigella sonnei; identical to SEQ ID NO: 463227

SEQ ID NO: 486851 - DNA, 531 bp, Shigella sonnei
gtgaacgacaaagaactgattaaagaaatcaaagagcgtatcagcagtttggatgtgcgagacaatgttgaacgccgtgcttatgaaattgctctggcatcgctgacagcagagccggtggcgtggaaggtaaccttcacgcaaattgaccgtgaatataacacgttcactggtatgtattctgacaaagcagaagtcgaacggtgggtgcggctgcataaagcatgtaattttcgggcagatataacaccgctttataccgcccagccagtgccggtaactccggatgcctggataagctgtagtgagcgaatgccagaaatgggagagcgacaatgctatgtgttagcagctgactttaaaaacaactacccaccaaacatccccaacactcaggtcggcgtatatggcgactggtttaatgatggcaatcccacttgggatgacggtgatggcgaagacctgtatctcaaagaggtaacccactggatgcagctaccagaaccgccgcaggaggttaaccgtggctaa

SEQ ID NO: 486852 - DNA, 723 bp, Shigella sonnei
gtggttaacaatattgcaaatcactcttcgtttccggctgtaacaatcgacagccagatgctgttgaaaatggtcaatgaagctcgcaagttatatggagagccatcagtacgtaacaacaaattcatcgagaaaattgaggatgaattggaaggcgagacctacacaaaaagtgtaggtcggaaaaacggggctgacattgatgttatctccatgactatcaagcaggcgcttcgtgttgctgctcgcgaatctaaagcagttcgccgaacacttgtagacaaacttgaaagtatgcaggaagcgcacattaaaagcggtaaatcagcgagtggacttgttgagtatcgtcaagcgcgaacactgaaaatgacggttgaagctgttaccaatctgttcgatttgatgccaaatcttgcgccggaagcaaagcagactgctgcggcaagcataatcaacccgctcgttggttttaatgcaatacctcttccggcaatagaagagcattactactcagcaggggaggtcgcagagcagctcggagtaacggcaaacaagattggtcgcattgctaacgcaaacaacctcaaaactgagcagtacgggaagttcttcctggataaatctgcgcattccagcaagcaggttgaaacatttcggtacaacgaggctggagtgcacaaaatagaggaactcatcgaaggagagcgaaaggctgcatga

SEQ ID NO: 486853 - DNA, 624 bp, Shigella sonnei
atggccagtcaactcatccccgtattcaacggcactatatccaacgaaacaactcttctcgttaatgcccgtgatttacacgaatttttggaagtacgtcgtgacttctctacatggattaaaaatcgcataacagaatacggctttgccgttgatgtcgattacattttggttcaccaaaacagggggatcaaaggacgtggaggcgatcgccgtagcaaagactatcacctcaccctcgatacagccaaagaaacggcgatggtcgagcgtaacgaaaaaggccgccagatacgccgatacttcatcgagtgcgaaaagaaacttcgcagcatgcaaccagcgcagcaattcacagacgaagaaatcatcctcctttgctatatgcaggtacagatggagaatgcgcaggacatctgcaaacgtctgtacccgatattgaaggaactgaactcatcatacacgagcaagctgtatgacatcgcgtttgaaactttttacacggtgacgaaaaacagagatgtactgctaagggaggcgacacgacttgaccaagcaagcgcccttttcgaacgggcaaaaccaatgctgaaaagccttcgggcgagacaattcgaattttaa

SEQ ID NO: 486854 - DNA, 591 bp, Shigella sonnei; identical to SEQ ID NO: 485374

SEQ ID NO: 486855 - DNA, 174 bp, Shigella sonnei
atggcaaaccatcgaggcggttccggcaattttgcagaagaccgcgaaagagcatcagaagcaggtaaaaaaggtggacagcacagcgggggtaatttcaagaatgacccgcagcgcgcatctgaagcaggtaaaaaaggtggcaagagcagtcacggcaaaagcgacaactag

SEQ ID NO: 486856 - DNA, 771 bp, Shigella sonnei
atgtttgacacaaagcaaattagatactcaggtaaagatggtatctattttcaccttagagataatgtggaatcttttcttgccttaacagctactgaacagatggactatgactcaccgatgatggtgacaactcaggctatgcaatcggggcaaactatcactgataatgttcagagagcacctaagaccatctctattagcggtgttgtagtggttgattcgacgggttcagttctattaaccagacaggggcaacttgtagaaacctttatttctacggttgaacaatggcgagaccagaagcaaatcatcactattgtttgtagagatggaatagctatcactgatagtatcattactcagtttaaagcgagtaaagagcataccattgctaacggtcttcgtattcagatgaccttccaaggtgtagagtttcgttcaatcgtaggtcagactgatgtttcggctgctactggaaagaccgctaccacgaatgatggcggtgctaccagtaaaaagaacaccggaaacactacaacgagccttggaagccctatgctgacctgtaaagagctttttggctattcggcaagtgagttatcagatgaagcgctaaaagcccgtgtaacgtgctctaagagcgttagcgttaaaaatggtgagagcaccttctcagatgccgctaatgagcaagcttcaaaggtgcttaagccgggtaatgctctgcgaaagtactctgtgaaccctaacaagaagggcacttattga

SEQ ID NO: 486857 - DNA, 189 bp, Shigella sonnei
atggaaagcttctggggaacgctgaaaaatgagagcctgagccactatcgttttaataaccgggatgaagccatctcagtaatacgggaatacattgagattttctacaatcgtcagcgtcgtcactctcgtctggggaatatatccccggcagccttcagggaaaaatatcatcagatggctgcttaa

SEQ ID NO: 486858 - DNA, 2034 bp, Shigella sonnei; identical to SEQ ID NO: 485243

SEQ ID NO: 486859 - DNA, 624 bp, Shigella sonnei
atgaacgacgtgttcctgaaacgcctgacggctcccaccattaccagcggcggtaatcctccggcattttccctgacaccggacggaaaactgaccgctaaaaatgcagatatcagtggcagtgtgaatgcgaacgccgggacgctcaacaatgtcacaattaatgagaactgtcagattaaggggaaactgtcagccaaccagattgaaggcgatatagtcaaaacagtgggtaaggcttttccgcgggactcccgggcaccggagcggtggccatcagggaccattaccgtcaggatttatgacgatcagccttttgacaggcaaattgttattccggcggtggcattcagcggcgctaaacatgagcgggagaataacgatatttattcgtcatgccgcctgatagtacggaaaaacggtgctgaaatttataaccgtaccgcgctggataatacgctgatttacagtggtgttattgatatgccagctggtcgcggccacatgacgctggagttttcggtgtcagcatggctggtgaataactggtatcccacagcaagtatcagcgatttgctggttgtggtgatgaagaaagccaccgcaggcatcagtatcagctga

SEQ ID NO: 486860 - DNA, 561 bp, Shigella sonnei
atgacagagcagaagcgaccggtactgacactgaagcggaaaacggaaggggagacgcctgtccgcagccggaaaaccatcatcaatgtcaccacgccaccaaagtggaaggtgaaaaagcagaagctggccgagaaagcagcccgggaagcagagctggcggcaaaaaaagcgcaggccagacaggcactgtccatttatctgaacctgcccacgctggatgaggccgtgaataccctgaaaccctggtggccgggattatttgacggtgacaccccccggcttctggcctgcggtatccgggacgtgttactggaagacgtggcgcagcggaatatcccgctctcgcataaaaaactgcgcagggcgctgaaggccatcacccgttcagaaagctatctgtgtgccatgaaagccggtgcctgccggtatgacacggaagggtatgtgacggagcatatttctcaggaggaggaagcgtatgcggcagcgcgtctggataaaatccgccgccagaaccggataaaggcagaacttcaggccgtgcttgatgagaaataa

SEQ ID NO: 486861 - DNA, 1413 bp, Shigella sonnei
atgaaaataacgacagtcgacgtatgcataatttgcggaatttttccgttgctgattttgccccaattgcctgggacattagcccttgcgtttctgactctcttcgcctgcgtactggcatttatacctgttaaaaccgtccgttatatcgcgctgacgttgctgtttttcgtttggggcatattatcagcaaagcaaattttgtgggcaggagaaaccttaactggcgcgacgcaggatgcaattgttgagatcactgctactgacggcatgaccactcattacggtcaaattacttatctacaaggtcgacgtatattccctgcgccaggccttgtgctgtatggcgaatatcttccgcaagcggtttgtgccggacaactgtggtcaatgaaactcaaagttcgtgccgttcatggtcaacttaatgatggcggctttgatagccagcgttatgccattgcccagcatcagccgctcaccggccgctttctgcaggcaagtgttattgaaccgaattgtagcctgcgtgcacagtatctggcgtcactacaaacaacgctgcaaccctatccgtggaatgcggttattcttggtttaggtatgggggaacggttatccgtccccaaagaaatcaaaaatatcatgcgcgatactggaacggcgcatttaatggcgatatcgggattgcacatcgcttttgcggtgttgctggctgccggactcattcgcagtggacaaatttttctgcctgggcgctggatccactggcaaataccattaattggtgggatctgctgtgctgctttttatgcctggttgacgggaatgcaacctcctgcattgcgtaccgtggtggcgcttgctacgtggggaatgcttaagttaagtgggcgacagtggagtggctgggatgtatggatatgttgtctggcggcaattttgctgatggatcctgttgccattctctcgcaaagtttatggctctctgccgctgcggtcgcggcactgattttttggtatcagtggtttccctgtcctgagtggcaactgccgccggtattgcgtgcagttgtttccctcatccatctgcaactgggtatcacacttctgcttatgcccgtgcaaatcgtcatatttcatggcattagtctgacctcgtttattgcaaatctattagcaattcccttggtgacatttatcacggttccgttgatcctcgccgcgatggttgtgcatttaagcgggccgttaatcctggagcaagggttatggtttcttgccgaccggtctttggctttacttttctgggggttaaagagtttgccagaagggtggatcaacattgctgaacgttggcaatggctatcattggatttgcccctatatttccagacatctgttatcacttaa

SEQ ID NO: 486862 - DNA, 381 bp, Shigella sonnei; identical to SEQ ID NO: 458903

SEQ ID NO: 486863 - DNA, 345 bp, Shigella sonnei
atgagagtatttaaagatacgcagtgtgatgcgtttctaaatgctttcggtcagtctatccaaacttgtacgggaagtacttttacaggaatagtagaagtacttcccgtttctattgaggcggcaggtggatttatcgaaagcgtggaaacatacctaacaatcagaaaggacgatctaataaccgcaaacgtggcaattggtacagtactaatcattgatggtgtaaaccagacaatctataacattgaagatgatctatcaggtatggttaattgctatttccgtacttctgtagactggccccctgaatctccagacaaccagtatcacttaaataagtga

SEQ ID NO: 486864 - DNA, 1839 bp, Shigella sonnei
atgaaaaaccagaagagggaactaacgaaacccctacaggcgattaatacagaatcgcgtaccatcgaagtagcgttttgttcagaaacccctgtagaacgtgaaatcaacggtcaaatctataacgaaattcttctatgtggttccagtaacgcagacctaacccgccttaataacaatggggcagtactctttaaccataaccgtgatgatcttattggtgctgtagttgatgcacgagtggatgctgatcgcgttggtagagctacattacgaattagcagtaccgccaacgatgaatgggaaatgattcaggaaggcgtactaacccatattagcattggctataacattaatgattatcaaattgatggtaataatatctatgttaccaactacgaaatttatgaaatctcattagtaacagtacctgccgatcctaccgttggggtaggtcgttcaatggactcacaacttgcattgaaatcactaaataaagaaggtgaaacaattcaagagggtcaaatggatatggataatccagaaaacgaaaaggaatcaattgttgatagtactgaagaagtaaatgaaacaattgaagaggcattagtagagccatcggtcgaatatgcagaagaaatcaaacaagaattaagtgatgaagaacttttagaaattatctctactcgacctgatttgctcaataaagtacatggtgaagaaccagaaagtataaatagtacagaagatactgaacgtgttcgtgaattagaagcactcggtaaagtacttaatattgatgtatctgaagcaattgaaacaggaatttcaatttcagatttcaaacgtcaattgaatgacattaaacaaaatcctcttcatgataaggaaatcaaagaaatggataataaaaatctattaaaagatatggtacgtgccattaaaactggcgataaatctgctcttgaagcatatgaacgtggtattaatggttttgtacgtgcggctgtaccaagtactaatactactaccgctgctggcgttgtagctgatgacctacaagatcaatacattccagaactactaaaaatttctgcacttggtgaactaaacaccactgtttattctggccttgcaggtcgcggtactctaagtattccaaaagcggctggtgtatctccggtatttaaattctatggtgaagcagaagcacaggatgattctattgcaagctttactaaagtaaccctaagccctaaagcttttggtggtgctattccactatccaaacaagcaattctaacggctccaaatattgaatcatttgtacaaagtgaactactacggtatgccgctcagggtcttgagcaaaatgtaatggataaagtagttgccgctgctccggtgttcaatgttgaaactgctggttctattactcttgaagatgttcagggtgcagtagcgaagctggcacaggctaacgttgatatgcgtggcgttaaagctgttatgaacgctaaaaccctaagtaccctacgtcagattgcagtacttgataacactgctgctaaagcaatggttgaaggttatcgcagtactgaaatgtggcttgctgatgaagtacgtgtagtgatttctgaattcgtagcagatggtactattctaatgggcgatttctccaatgtaattctcgctaattgggaagggcaggaagtagattatgacgatacatcctatcgttcaagtaacactatcgtatatcgcgtatgggattactcagatatcgcacttgcacactctgaagctttcgtaaatatcgttattggtaaagcagaataa

SEQ ID NO: 486865 - DNA, 1509 bp, Shigella sonnei
atgttctggaataagaaaaataaaaattcagaaactaaacccaagaagattaaacaggaacgttccttaaaacaaagtaccttaaaacgagatctacaggcagtacgcaacacatcagtaatgaacttcggattcaattcaaactcaggcagcaatatcaacttccttctgatgaaagcactacctaccttcagggctttctcacgtgatgcagtacttaagaatcctattggtcgtaagtacatgaacctatcggtagatggcgttgtaggctctgatggcctgtacgttaaaccttcagtagagattgacggtactgaagaagaaatcaacggaatcaatctaaccttggaaaagctctttgaccgttgggcatatgatgctgatcgttttagtgttgatggctcattaagttttgacctgtttcagcagaacgcagagaaggtaagggtccaggatggtgaatgctttattcgtatacacaatattaataataccatcaagttagaaattctcgatacggttcgtttgcttcagttaaataatcaacgtttgagtaatggtaattatattagtaatggtattgaatttgataaatggcataagccagttaattactatttctgtaaattcgatcctgttacctatacttatatcactggcgattatgaagtaattcccgctgcggaaatctgtcactactttattgctgatcaacaaggccaggaacgcggattgccggacatggttgcaacttccaaattaatggaagatctcaagaacttcactgaggctgcgttaactgcgaaacgtgtatctgcatcgtcaatggcttttattaccaataataacgacactaccagtactgatctgttaggggctgatgaacgagaagaagttacaccagtatatacagagtattttgaagctggctttattggtgagttagccgaagggcaggatattaaaactgttacacctactaatggtgttgatgggattgatcaatttaccaatgaattgatgaatcagatctcgatgggtctgaacataacaaagcaagccttattatctgatacatccaatgcttcatttagtgcaagccgacttactgagaaattacaacaaactacattccgtacccgtactaatgtactaatcagtaaagtacttaaaccaatttatatcgcctggttaaagaacgaaatgctaaataacaataagttaaatctaagtttctcgagctttgatgatcttatttgtgctcggtatatttctcaaaagccaattagtttagatcctgtaaaggatatacaggctgaactactccagttagaagcaggtattaaatctaaaacacaggttattgctgagttaggcggtgatccagtgaaggtattagcagaggtacaggcagaaaaggataaagaaaataaaaacaaggaagtaatccaggatggaaatgaaaaaccagaagagggaactaacgaaacccctacaggcgattaa

SEQ ID NO: 486866 - DNA, 531 bp, Shigella sonnei
atgacacttctaccagaaaagatctacatggtatcgaatcccatggatctaacggtattagtacccgctgctactattcttgttattagttttacatcatctggaaaaagtacctcattagataatttaaatggtagtacttcaaaagaatttacggttgtattagatatgagtacagcacaggaattactattctgtactcaaatatctaatggtcaaaccagtacttttacttctgaagtcattaatccattactttatacttctgagtactcccaattaaaacagatgatcagtgaaattgatcaggttatagctaataaaattgcaggcggtgctaattactcaataacaattaataataagactcttgtaagtgaatcattatcatcgcttgaatcaatgcgggaacgctatgtaaaacgtgctaatgctctatttgtgaaaatgaatggcggtactttctctaatggcggtaaaccaatcaagagtattacggttttcaggcctaagccagggagtacacgctaa

SEQ ID NO: 486867 - DNA, 1461 bp, Shigella sonnei
atggtgaacggtacttttatctattggttgaacctcaacacgccggggaaccttcgcggtatcacaacacgctgtgttctgttagatgaggtcagtagctgcgaaatcactgatgaagggaacccaatcaaactggcagaagcacgtaccagtaccttcggtagtgactcactggtggttgtatcttccacgccattgtataaagacgatttaatcaatgctgagtacaacctcagtgataaacgtaggtactttgttactcacacatgcggtcatgaatatacttttgaatgggaacaagtagcgtttgaatttaagcaattagaaaatggtagatccattcctaatagtactactactcgtttgttatgccctcattgcaatgagggaatagatgaacatacacggcatcagatggttgataatggtcgatggattgcaactaatccagatggggaaccgggtgtagtagggtatcaaatcagtagaatgtattcacctctgaatactattactgaaatggtttcaaagtttgctgatgctctatataacttcaatcttcaaaccttttacaataacgaattgggcttgccattcgaagatgagtatcaaaaagaattagatattctccaattagaatccctacgagaagatgaatttaacctttataaaattcctgaaagtaccttagcgttgtgtatttcagttgatcagcagggtgataggctggaaagtctgcttttaggttttgatgaaaagaacatttatgtacttgggcatgagtttttctactcccacgattgtacgaagattgaagccccagcttggaaggatttagatcagttttgccgtcaggatttcagtactgtatcaggtcgcatagtacctacactggctgtgttcattgatgcagggaacggtaacgctacggatactgtgaaaaaattcactacacgttggagtaagtatcatccgatcaagggtagcagctccactactggtgaactattcaagaccagtactcaggcggggtacaaactacagatcctaaacgtacatgaacagaagaacacgatacgccgcctcctgaacctgatgctatccagtgaggcagataacgccccggttaagctccgcttcagtagtaccttaccatcagatttctttgagcaactttcagcagaggagttaaaacccgctggtggtaagttggtatggcgattaaagaaaggtcaaagaagaaatgaggctttagacctaatctgttatggaatgatcgccatagcatatgcccaatcaaaattaggtactcaaccattcaggaagttacgcgattataaagcacaggaaaccactaaatacgagataaataaagtagaagaaccaaaaccagaaacagtacaaaaaccaaaacggaatagacgtactggaatgggatcaaactggttcggtaaaagataa

SEQ ID NO: 486868 - DNA, 189 bp, Shigella sonnei; identical to SEQ ID NO: 463227

SEQ ID NO: 486869 - DNA, 1854 bp, Shigella sonnei
atggcatttaaacactatgacgtggtcagggcggcatcgccgtcagaccttgcgaaacgactgacacaaaaactgaaggagggctggcagccgtttggtagtccggtggccataaccccttataccctgatgcaggcgattgcagcagaaggtgatgtggtcgtcagtggtgcaactgagccggagtggtactacgtcatcgtactggccgggcaatccaatgccatggcttacggtgaaggtcttccgcttccggattcatacgatgcgccccatccgcgcattaagcaactggcccgtcgtaacacagtgactcccggtggtgaagtatgcgtatttaacgacatcattcctgctgaccattgtctgcatgatgttcaggatatgagtacgattaaccatccccgggctgacctgagcaaagggcagtacggctgtgtcggacagggcttacatattgccaaaaaactgcttccgtatatccctaataatgcggggatcctgctggtaccatgctgttgtggtggttcggcattcacccagggcacggaggggacattcagcgagtccacgggggccagtcaggattcggctcgctggggagtgggtaagccgttatatcaggatctgcttttccgcacgaaggcagcattgcagaaaaacccgaaaaacgttttgctggcgatatgctggatgcagggggaattcgatatgacgaatgccagttacgcccagcagccagcagcatttcttgcaatggtacagcagttccgtgctgaccttgccgggctggcggcgcagtgtcacggtggaagtccggcatcagtcccctggatttgtggcgacacgacatacgcgtggaaacaagaacacggtacgcaatatgaagtggtatatggtgcatataaaggtaaagaatcccagcagatttattttgttccctttatgaccgatggtagcggagttaatacaccgacaaacaacccgtcagaagatcctgatattgccgggtctggttattacggttcggcatcccgaacgaacaaaaactgggtatcatcaaatcgcccgacgcatttcagctcatgggcgcgtcgtggcattattcccgatcgtatggcaactgctattctgaacgtagccggtcgcaccttagccttcattagtggtaaggcaccggaaatcaaaccctcgcccggcggcgacacgccatcggggccgtctgaagatgcatccatacgcacaatctccctgttgccgacagccggagacgctgctgcgcagggctggagcattaagaatggcggagttcagttgtcagatggtgtatttaagatcaccaagcagagcaataaagcctggtccctgacgcgcccggtggatgacgcagtctccctgctgacacggggtggcagactgagctgtaagtttcgactgtcaggcgcactgaccaacaaccagttcggtctgggaatttatctgtataccgatgtagcgttacctgacgtcgtggcgatgaccgggactggtaacccgttcctgatgtcgttcttcacccagaccacagacggcaaactgaatctgatgcatcacaagaaagcaggaaacacaaagttgggcgagttcgggaattacagtaacgactggctgacgctggagctggtgttcaccgccggcagtgccacggttactccgaaactgaatggagtggctggcccggcattccaggtcataaaagacagtctgacactggggctgaatgcgctgacgctgacggatattaccaaaaatgcagcgtatggcgttgagatagaaagtctggtgctggagataaatgcaccggcatcatcataa

SEQ ID NO: 486870 - DNA, 189 bp, Shigella sonnei; identical to SEQ ID NO: 463227

SEQ ID NO: 486871 - DNA, 642 bp, Shigella sonnei
atgaacgacgtgttcctgaaacgcctgacggcccccaccattaccagcggtggaaatccatcggcattttccctgactccggacggaaagctgaccgctaaaaatgcggatatcagtggcagtgtgaatgcgaacgccgggacgctcaacaatgtcacggtaaatgaaaactgtacgattaagggcatgctggaggcgactcaggtcagaggtgacttcgttaaagctgtatccaaatcatttccgaaacaggctggtacgtggggtaacacggaaacaccaaacgggacggttacagtcaccataagcgatgatcataactttgaccgccagattattattccgcccattatttttaacggtatagcgtatgacgatccggggagcggaaataacccaggaggcacgcgatacacgggttatggttttgaagttcgcaaaaacggcgtattaatcgcatccagagaaactaaaggtgccattcccggtagttacagtgcagttattgatatgcctagtggtggtggtagcgtcactctggagtttaagattttccagaaaggcaatcagggggcaggcaatatcaccgactgtacggtgattgtgaccaaaaaagcggcttccggcatcagtattcgttga

SEQ ID NO: 486872 - DNA, 363 bp, Shigella sonnei
atggttaacaaaagaggcttatcacctgaagaatactttagtttagatcctgatgtactcaatatgcttatgatctacgatacttttatagaaccatccggtacgcagattgaaatgatgaaacatgcgtaccagtgttactacaccactatcagtaatggcaacctaacaccagaagcaaggaaaagtatcaaggtacaggattttgattttcttgatgtgcttagtgatagtactaagagtacttcagagaaagctgaagaaagaaaattaaaaactaaagaggctcaatccaatgatattaaatctataggggagttaattaaatctcaggtattaggaaagaaaaagaatggcaaataa

SEQ ID NO: 486873 - DNA, 300 bp, Shigella sonnei
atgaatttaaacgaattgaagaaaaaactacaaccagaattaaaaccacatgaagtaatgggtgaaatcatctttattcatcgtccaaatggtcaggatttccagaaatgcactgatgtggctaaaactctaatcctatgtgtaaaagatgaaaatggtgatcctatcttcgcagaagaagatattgatggacgaattaatgttaactctattgattttgtaatccagaatgaaatttactcagcaattattgctttaatcaatactgcgaaacctgtagatgaagtagaaaaaaagtaa

SEQ ID NO: 486874 - DNA, 474 bp, Shigella sonnei
atggctatggatattttttccggtgctaaccttactgtagaagtaggttcaagtgctggtaaaacagttgctactgactttgtagaagtaccagaggtaaacaccttcagtacttcaggctttgaaagtactgtaattagcgtaaaaacattcaataatgcttatgatcgtaagctattgggtactaagtcaatcccggacatttctcttgcagttaactacttaccagataatgcagtacatcagaatttagaacaacttgcagacgatcagaaacgttgtcaggtaaaactaagctattttaccgatgcaactaaaaaagaaggtttctttgtaatttatacctgctttgtttcaagtaccactatcggtggtgataaagatgaagtagtaactaagactttcacccttgcagttgatggtgaagcaattgattcaggtctgattactccaaaaccagaatcgggcgaataa

SEQ ID NO: 486875 - DNA, 354 bp, Shigella sonnei
atgcaagctcaaggtacatcaggtcgtgagtttaaaagagacataactccagcaaatccagttgaagcattagatcggataatgtcacaagatttagtaacgtttatctacaaggatgatgaacaagaaagggttaggtttggtgttatcgccgaagatgctgagttgactgctccgcagtacattaagcatgatgaagaaacagttgaaatagaaggggagattgtcactcgtgatcatccacgtgttgatttaaatccaatagtgatggacttgatgggagctattcaagcccaacaagaagaaattaatcagctaaaagatttagtacaacagctattaaataataaataa

SEQ ID NO: 486876 - DNA, 1704 bp, Shigella sonnei
atgagtgatattttctcaggaagagaattatcagtacagtataatgctgatattggtaacagaacaccacagggagcaggcaatgtagtaattaaacagattaatacttttccaaccttaacaataaattcagaagcaaataattttgaaacgtatgatagtgattacaggacagtactactatctgataaatcagtagcaccatttgatattgtagttaactacctacctgatgatcctacacatcaattcttggataatgccgctaagtctcagcagcttttccagatcatcattcagtaccagatgaataaggatgaaaataccattacttatgcgatggtgaatggttatatcacctcttataagttggacggtgataaaggttcagtagtaaccaaggcatacagttttgccccacatgatgtgatcgcacgtgcaatgaccattaacgcactatcgccaatctatcagggggactacggtttaggttcgaacactacggatgtacctcagtactcaccatcagtacctacgggtaacagcttcatcaaagtaccatcatctcaagcaggcaatcctgccggggcggatctgatgggagtagggcttgtagatggcactactgtaagttctcttgcgatgacaaagacgggtactctaagtatctatgcaaagaacgctacaaccgcctggacacgcatatataccgctacacagatggacgggcgatacgtaccccttacacgtaccatcaacggccatgcactcacggccaatttagtactgaacagtgaagatacaggttcagtacctgatacacgtactgtgaatggtaagcctctaagtgaggatgtagtacttaccagtactgataccggctctgtaccagatacacggacagttaatggtcatgtactcagtgaagatatagtactgagtagtgaagatacaggttcagtacctgacacgcgtacagtgaacggtcatgtacttagtgaaaatgtagtactgagtagtgaagatacaggttcagtacctgatacacgtatggtcaacggtcatgtactcagtgaggatgtagtacttaccagtactgatgttggcttagggaaggttacagatgatgcccagcttacgatagcaggtaatctaagtgatctgggggacgtggaagaagcacgtattaaccttgctgtttactcaatggatgaagtagatgcagaggtaacggctttagctgacagtattacttcccttgattccgcttccatgaagaaagcgagtaacctttctgatctatccagtctctctacagcacgtactaacctacaggtgaaccgtttgactcagggtgctacgtacaccgatctgatgagtaatgacctgactaaccgtatccgaattcaggataacggggcatggggtgcaagtactggtactggatggattgctttaggtataggtcagggggggacaggggctacagatgctttgagtgctcgcctaaactttcaggtggatcgctttaatcaaggtagtaatttaacaactattaaatccgctgattcttccgctgcattagtggtttatgatggagggcaatggggttcagctacatatattgcgggtgctttcactggctggaaagcattagcaattccgcagggcggtactggtgttaagactcaggctgagttatag

SEQ ID NO: 486877 - DNA, 393 bp, Shigella sonnei
atgatgttagtacaaaaagtacggaatacgatgaagcagcttatcaatgctactaagaatctgacagtatcacgtgatgttgatgtatttgaacaaattgcttttgattactcattaacgagtttaagtttcagcaatgaacgccgggcaggtaactttgcaattcagtatctgatttcccctaaaccagaatcaggtaatacagccccatccatcacttatgatcagattattagtacttttgataaagagaaaacttcagcattcagtgatgcaggtttaataatgctttcgtgttcttatgaacaatccgatattgtcacagatcctataactggctcggtttccctatcctttacgataaatattcaagttacggaaaagacaagataa

SEQ ID NO: 486878 - DNA, 675 bp, Shigella sonnei; identical to SEQ ID NO: 57050

SEQ ID NO: 486879 - DNA, 2019 bp, Shigella sonnei; identical to SEQ ID NO: 57049

SEQ ID NO: 486880 - DNA, 354 bp, Shigella sonnei; identical to SEQ ID NO: 57048

SEQ ID NO: 486881 - DNA, 327 bp, Shigella sonnei
atgagaactgctatcggggtcgctttggtgtcaatgactttgcttgccgggtgcggtggcagcgcaggcgaccagtttctagggaaatgggtcggcgtcaagaacgacaagcacgtgctcgagatcgagcgaaacggcgacagctacatggtgcggaacaccgagcctagcccgttcacgggcaagacgcggaccacgaacctaccggccaccttgcaggatgatgttctacaggtgtcggtcggattcggcgctatatcgctcgccatcgacggcaaatcgggcaacctgaccgatggaaggatggagtatcggcggcaggaatag

SEQ ID NO: 486882 - DNA, 765 bp, Shigella sonnei; identical to SEQ ID NO: 6031

SEQ ID NO: 486883 - DNA, 246 bp, Shigella sonnei
atggattatcactatttctattgtgtgaagtatcaggaaggttcattagaagcacattatgaacgaattggtgatccagaagtattaggtactattacatggaatggaaattacctaatcgacggattaccaatggtaatgtttgtactggctgctgaagatgaacataaggaatgtttaaaccgtttgctaatcgtatgtgagaaggcgagggatgaatataggctaaatgctactggcctctaa

SEQ ID NO: 486884 - DNA, 555 bp, Shigella sonnei
atgaaccctaaaatcacttggagattaattccaaattcaaaacattactacgtatctgaaaatggcgatgtttacaatgataaaacaaaacagtatatagctacgaaaaacccatctaatggatacaaaaaagtttctattaatggcaaatcactatatgtacatgttttggtttgtactttattcaatggtgctaaacccattggaggaagatacactgtagatcatatcgaccgcgataaaatgaataacaaagcaaaaaatttacgttgggtaactcagaaggttaataattccaatagaaagcataaaggtactcgtactcaaaagcttactctaaagcaatggttaatgattgttggagagtaccttaaaggacaattatctcaatatgcaatcactaaatggtttttaaatcaaactggtattaatatttgccctcagaatataggtaagttattcaaaggtactacctattcaaaatggtacacaacatatcttacgaataagcaaagacaaagaatacaaagcctaaccattcaacgtaaaccataa

SEQ ID NO: 486885 - DNA, 462 bp, Shigella sonnei
atggcaaaaacctattcaacttttgataacagaaacataaaagcactaattagccagtacaagctatataaagatatcccatgcgaagacatcaagaacatcatgaaggactcagtagctaaacttaaagtgagagataagattagtgtatatgatgtgtttgcagtattgagtaatgaagatgaattacggaatgatttactattcaatactatcaatgctattaaagtacaacagaataagaaacaagtaaaagaacgtatgatcaggtactatggggcagcgatcacggatgcagcaaaacgaatagagcagtatatgttggcacacccaaacgcactgccagcaccagtatatggacaaagaacactaacatataaagagtttggtaaactattggaactacaaaaacaaggtgactttattgatgacatgatcgagtacttaaagggcttgcgttaa

SEQ ID NO: 486886 - DNA, 744 bp, Shigella sonnei
atgaacagaaaacaattcatccagtcgcatggtgctacttgtagtaactggacttggagttggtcatttgtgaaccacgacaagaaaatggttatctttggtgcatgggatgtacaaaaagagcaagaaagatcagtcattctgagggagcggtggaaaaccaaagttgtggagggaaaggaaagaaaaaatcttggatatattcaagctattgaacacattcaattgatagctgaaggttatgagctttacacgtttgatatggagcagggacgaaacgatgagaatagagatgtagctgttatcaaacggttcactccaaaacttgaaaaacgttaccttcggaaagaaggaacagtttggtatgcagactttttacctaatccatttccagatgaaattacctcacctgaaaactacgctgagggtgcaaaaaagcaagttacagtaaactcctacgagcgtgatccaaaagcacgacaggcttgtattgaccatcatggtacttcctgcgggtgttgtgagtttaactttgagaaagtctatggtgaacacgccaagggctttatacacgttcatcatatcaaaccgctacacacagtaggcgaggattacgaggtaaatccaattactgatatggttccactttgtccaaactgtcacgcaatggtacatcgcggtaacgaagtattaagtgtcgaaagtttaaaagcactgttgtttaaagacagcaataaaatttga

SEQ ID NO: 486887 - DNA, 474 bp, Shigella sonnei
atgagcataacaacaatagcagctacatataaagatgtgttaactattgctttttcggcgttgtcatttattattgcatgtacttccttatacttctccggtagggcagcatggcatgatagatcaaggctaaaaataacagctgacctcgtctacgagtcttttgatgaggaaccttataaaatcgaggtgatagtgatcaatgttggtaggcgtgatgcagttttggaagggatgctttgccattatgaaaaaggcattaggagccattcatctccaaaagagagcattgttattaaagaaaagcaaagaaaaaaatttgaattggtaagctcagacttagtcacgatagataatgaatgtgatatttgtcatttagaagatataactattttagatgtggaggggaatgaacataaaatccctaactctcacagactcattgcattacttaagcaagataaaaagacttaa

SEQ ID NO: 486888 - DNA, 669 bp, Shigella sonnei
atggattgtagaaaattaaatatcgttcttttatcgaccgtagcagtattactggttgttgtaattttagtactaataaaatcactctttgttggttctgaaggtttcgagtggggatcggttagtgactgggttagttctattgccaatctcattatggctggagcagccctatatgcagcatggaacgctaaaaattggtttcaaactaaaataaaggaaaatgctttaaatcaagttactaagttctggactaattgcgatcttttttcgttggagatgttgaaaacatatgaaaatatatgcaaccttaacaatactgaaccagatatagaaccaaaaaatttcgcacatttagttaaaactgaacgagaagttatcgatctattaaacattaagttagcctcattaaaaagcgaattgcaatcacttaccttttggaaagtatcgccaaaagatgaagctatattcaataattatttcttcagtaatcaaattgctttaggaacattgagggaagcgataagttttgatataaatgacattcatgatagatatcattacaatgtcagctatggaaagttattagtagatacatttgatagtttaatagaagcacatgcaaccttgaaaaaggacatgaataacttattcgttttctctaattag

SEQ ID NO: 486889 - DNA, 312 bp, Shigella sonnei
atgagcaaagacggctatgatccatccattacgcgaggggttcagaagttctcacataacggtcgctgggcaaccgtgtgttattggggatctgcactaacagaatttcattatggggatagggtattcttccagaatcagtacagggaatactggttaggtactatagagagagattgttttgtacttacctgtgaaacaccactaataagtgttattgatgggttagcatatctatctgctgagtaccggatgaatcaaagcagtgaagaaggtgattggttctgtgatcagggggaactacccttctga

SEQ ID NO: 486890 - DNA, 267 bp, Shigella sonnei
atgaacattgataattgggcaataccgataacaagtttgggtggtcagttgctgggggttgagttggtcagccatgtagaacgcgagggaatcaggcagatcggcctatgggaagaagaagtacttcatgggcaactaatgcttattgaaagcaaggcggcatggttcagggataacggtttgtattgtgtgattactactggccgtggtgaaccatacgagtacttaccattccttcggcagatgtgtcaacgccacgatgtttga

SEQ ID NO: 486891 - DNA, 420 bp, Shigella sonnei; identical to SEQ ID NO: 57047

SEQ ID NO: 486892 - DNA, 1014 bp, Shigella sonnei; identical to SEQ ID NO: 29928

SEQ ID NO: 486893 - DNA, 828 bp, Shigella sonnei; identical to SEQ ID NO: 28366

SEQ ID NO: 486894 - DNA, 780 bp, Shigella sonnei; identical to SEQ ID NO: 239573

SEQ ID NO: 486895 - DNA, 828 bp, Shigella sonnei; identical to SEQ ID NO: 28366

SEQ ID NO: 486896 - DNA, 429 bp, Shigella sonnei; identical to SEQ ID NO: 13784

SEQ ID NO: 486897 - DNA, 189 bp, Shigella sonnei; identical to SEQ ID NO: 463227

SEQ ID NO: 486898 - DNA, 483 bp, Shigella sonnei
atgttggataaaattcgcaatctggactgttcagcaaaattcactgagcacaattttgtgtcgagcgaatacaccgactcaaccgggcgcaaactcccaatgtaccaaatcaccaaaaacggcttcgttttcctggtgatgggcttcacgggcaaaaaagccgccgcattcaaagaggcatacattgctgagttcgaccgcatggaggccgaactgcgccagaataacaccccacctgctgacaagatgattccgggtgatggtcgcactctggttgttcacttcgacaaattcggcaatgtcgaattcaccgaaaccgttcctgatggcgcactggtctgtcccctggagactttccggttttatctggaaaaacagggatggactcttgttaaccggggcgcaattaaaaatatgactgtggaacaattacttttgaggtgtactggcaatagcggacactaccatttgttctttttttaa

SEQ ID NO: 486899 - DNA, 504 bp, Shigella sonnei; identical to SEQ ID NO: 485763

SEQ ID NO: 486900 - DNA, 315 bp, Shigella sonnei
atgggccttgattgggttccgtttagtttccaaaaagaaccaatggatatagctcaagagcgaagtactaaaaagattgtacttcaatcttgttcccagcttttgaaaactacagtactacaatcaattgcatttaacctaatggctaatgatccctgtaactttgcttttggtagtagttctgaatcagaagtgaagaaattcaaggatggtaaatttcttccagctattgaaaccagttcagtactaaagccgttagtaaccgataagaatgtggatttgcccctatatttccagacatctgttatcacttaa

SEQ ID NO: 486901 - DNA, 546 bp, Shigella sonnei
atggatatctcattaaggtcattagcgagacagtacggatacgatgaatctacagttcgaacttgggtagaaaagggaatgccgacagacactgattcaaacgcaagaagttggattgtagataatgtactaaagccgttgcgtgatactaatacaaaagaacaaattgaacaagagcgtttgaagaagctttcagcagaacggcagttagcagaattagaattagcagaaaagaatgggctggtggtcagtactgaatatatagaacaggtactaacggaatatctattccaggtcaaaacagcagtgcgtgcaataccatcaaaaacttatcttgaattatttgcacaatcagatgcaaaggatttacgcgatgtattaagaacgcatattgataaaacattataccaattaggctcaatggaatttgagttacccgatgacatggaagtaatagaggatggaaacaaacaagaagaaattaacgaggatactgaagaaagtactaccgacgatacaaccgccgaagatacagaaaacgagtga

SEQ ID NO: 486902 - DNA, 564 bp, Shigella sonnei
atgtcagaccgtaacaatgatttttctctgttagtaaaattgctgaacggatttttgaagaaagatgagataaaaaaaagactatattctttcgtgaaaaaagaaactaatgattgggaaaagtggctgcaaatagaatttgctcattatctaacttcaaaaaggaagtacgagctacatcgtgaagttacgatatacctcgatccaatagattatcctgatagtaaacttgctaaagtagatttgatactgcgtgaaaaatccacaccctctgatgattatatttttattgagtttaaatgtactaaaggtgtagtaccattagttaggggcttaaatgctgacaaaaataaaattagtgctataagacagtgtaactacaaaatgcgtaattatcttggtgtcggatttcatcttttttgtgaaccagatgatatcgagtttatggaaaagtacgtaactgaagaacttaaaggctcttacgccgtgtttaaattatgcgagtgtccagtaagatataattgccaatgtgaatttaatgaaattggtgtggtacttttttaa

SEQ ID NO: 486903 - DNA, 441 bp, Shigella sonnei
atgaaaattacagtcgataatatctctgaaatgtttgcaggaactaaagaactactaatcggtggcttaataacaggtatcgtcggagtacttattttaactcgtgttagtggttatgaatacgttaaagtacctttaatgttagtaatgatattcttactaactgtagttcctggttttattgctatgcttttttcaccactaacgaaagtatttgcaaagatatttgatattaaaagcagtaatatactttgccgcattttctcatttctatatttcatcttgtatatggctattactttcttggtgactaattttatattcactaccgcaatgtcattacacggcggggatggtgggttgagagcatgttttgcaattggctgttttgtcgttgcagttgagcagacaagaaaattctatagtttgcttatcaagtaa

SEQ ID NO: 486904 - DNA, 270 bp, Shigella sonnei
atgggaaaggtaatggtgattttgttagtactggctggggtactcttcaacattgcaggtgaggatgcaccccagccacagtacacggacaatgagaaccagaacgctatggatttcgcacagtcactaatcaagggtaagtacccatgcgatatggtgactatggatagtactgagaatggtacaggacgtattgatgtacggtgtgatggtaagtaccagtatgagatcatccggcatgatggacaatggcaggtagtatcgaagtaa

SEQ ID NO: 486905 - DNA, 363 bp, Shigella sonnei
atgaaaaaattactaattgggttactgattgcccttagtactggatgtactactacgcacagcttcatggataaagcttacgttggctatgtagatgacaaggccgtagtactgtttgatgcaggaacacgtaatggggtgaagtactaccgtcctcagttccagagtgattgcggtcgcatctataacaagatctatcatgatgacaatacaagtactggatgcctcatacgagattcccgcattgctgaactacatccctatagagagcatgtaagtaaggtagtaccacatcagaccgatagtgttcacgattggttagaaggggtcaattcaccatcccatatcctcgacaatctatag

SEQ ID NO: 486906 - DNA, 309 bp, Shigella sonnei
atgacaagggatatgaaagtacataaccagcagtggcttgatgatctcggtgtacatggtggttctgctattcctctggttacaggtgatttcgaggttgcccgattaaatagaaggtacacagaagagaacattgaccgtctgatctttccagtactcataaaaagcattcgccagtactgcgagaaggtgatcgtacccgtcagagataaaacgtattacccaattctcagagaggccggtgtatgggcggtacagggagagttcaggccaatgcgttttgagcaatgtgaaaaattaataggataa

SEQ ID NO: 486907 - DNA, 189 bp, Shigella sonnei; identical to SEQ ID NO: 463227

SEQ ID NO: 486908 - DNA, 261 bp, Shigella sonnei
atgaaaatcgaagaattacgtgaaatttttagtgaagatggcctctatactgtgcgcgttgagaatggcgctattgtcagccactgccgtattaaatgtttacagtctcaacaaaggaagagtggagctgcgttaattcattttgtggatgggcttgtgacggatggttttatttcgcgtgcaaatgaatttgtcacatcgttgccgtctctgaaagaagctgggattaaggctggtttttctgcttttgaagatgagtga

SEQ ID NO: 486909 - DNA, 381 bp, Shigella sonnei; identical to SEQ ID NO: 485303

SEQ ID NO: 486910 - DNA, 939 bp, Shigella sonnei
atgagtcaattaaacagcgtctgggtctttagcgataatcctgaacgttatgctgaactgtttggcggcgcgcagcaatggggccaacaggtgtatgccattgtacaaaataccgaccaggcgcaggcagttatgccttatggtccaaaatgtatttatgttcttgagcaaaatgatgcgctgcaacgtactgaaaattacgccgaaagcattgctgccctgctgaaagataacccccccgctatgttgctgctggccgcgacgaaacgtggtaaagcgctggcagcacggttaagtgtgcaactgaatgcggcgctggtgaacgatgccacggcagtggatattgtcgatggtcacatttgcgccgaacaccggatgtatggcgggttagcgttcgctcaggaaaagatcaacagcccgctggcgatcattacccttgcacccggtgttcaggaaccgtgcaccagtgatacctctcatcagtgcccgacagaaacggtaccttatgttgccccgcgtcatgaaattctctgtcgcgaacgccgtgcgaaagcggcaagcagcgtggacctgagcaaagcaaaacgtgtggttggcgtcggtcgtggtctggcagcgcaggatgacctgaaaatggtccacgaactggcggcggtgctgaatgctgaagtcggctgttcacgtccaattgccgaaggcgagaactggatggagcgtgaacgttatatcggtgtctccggcgtgttgctgaaatccgatctctacctgacgctggggatctccgggcagatccagcatatggttggcggcaacggcgcaaaagtgattgtcgccatcaataaagataaaaatgcgccaatcttcaattatgccgactacggtctggtgggcgatatctacaaagtcgtccctgccctgattagccagttgagccgctaa

SEQ ID NO: 486911 - DNA, 630 bp, Shigella sonnei
atgtcggatgacaaatttgatgccattgtggtcggtgcgggcgttgctggtagcgttgccgcactggtcatggcgcgagccgggctggatgtcctggtgatagaacgcggcgacagtgccggatgtaaaaacatgaccggcgggcgtctttatgcccacacacttgaagcaatcattccaggctttgcagtatcagcgccggtagaacgcaaggtcacacgcgagaaaatctccttcttaaccgaagaaagcgccgttaccctcgattttcaccgcgagcagccagatgttccgcaacacgcatcttataccgtattgcgtaatcgtctggacccgtggttgatggaacaagccgagcaggcgggcgcgcagtttatcccaggcgttcgcgtcgatgcgctggttcgtgaaggaaacaaggtaactggcgtgcaggctggggatgatattctcgaagcgaatgtggtgattctggctgatggcgttaactcgatgcttggccgctcgctgggaatggttcccgcttccgatccgcatcattacgctgttggtgttaaagaggttattggcctcacaccagaacagatcaacgatcgctttaatattacgggcgaggaaggtgccgcctag

SEQ ID NO: 486912 - DNA, 630 bp, Shigella sonnei
atgggtggcggattcctctataccaacaacgattccgtatcgttggggctggtttgtggattgggtgatatcgcccatgcgcaaaaaagcgtgccgcaaatgctggaagattttaaacaacaccccgccattcgcccactaattagcggcggcaaactgcttgaatattccgcgcatatggtgccggaaggcggtctggcgatggtgccgcaactggttaacgagggcgtgatgatcgttggtgacgccgcaggcttctgtctgaatttgggttttacggtccgcggcatggatttagccattgcatcggctcaggctgccgccacaacggtgatcgccgccaaagaacgcgaggatttctccgccagcagtctggcgcaatacaagcgtgagctggaacaaagctgcgtcatgcgtgatatgcagcattttcgcaagatcccggcgctgatggaaaacccgcgcctgtttagccaatacccacgaatggtagccgacatcatgaacgagatgttcaccatcgacggcaaaccaaaccagccggtacgaaaaatgatcatgggacatgcgaagaaaattgggctgatcaacttgctgaaagatggcattaagggagcaaccgcgctatga

SEQ ID NO: 486913 - DNA, 294 bp, Shigella sonnei
atgagccagaacgctacggttaacgtcgacatcaaattaggcgtcaataaattccatgttgatgagggccacccgcatatcattctggcggcaaatcccgacatcaatgaattccgtaaattaatgaaagcctgccctgccggactttataagcaggatgacgccggcaacattcattttgattctgccggttgtctggagtgcggcacctgtcgggtgctgtgcggtaacactattctcgaacagtggcaatatcccgcaggcaccttcggtattgattttcgctacggctaa

SEQ ID NO: 486914 - DNA, 987 bp, Shigella sonnei
atgaaagtgacattaacgttcaacgaacaacgtcgtgcggcgtatcgtcagcaagggctatggggcgatgcttcgctggccgattactggcagcagaccgctcgtgcgatgccagacaaaattgccgtggtcgataatcatggtgcatcgtacacctatagcgcgctcgatcacgccgcgagctgtctggcaaactggatgttagcgaagggtattgaatcaggcgatcgcatcgcatttcaactgccaggctggtgtgaatttaccgttatctatcttgcctgcctgaaaaccggtgcggtttccgtgccgctgttgccttcctggcgggaagcagaactggtgtgggtgctcaataagtgtcaggcaaaaatattctttgcaccgacgttgtttaaacaaacgcgtccggtagatttaatcctgccgctgcaaaatcagcttccacaactacaacaaattgtcggcgtggacaaactggctcccgccacctcttccctctcattaagtcagattatcgccgacaatatcccactgaccacggcgataacgacccacggcgatgaattagctgcggtgctgtttacctccggaaccgagggtctgccaaagggcgtaatgctaacgcataacaatattctcgccagtgagcgggcttattgcgcgcggctgaatctgacctggcaggatgtctttatgatgcctgcgccacttggtcacgcaacgggatttctgcatggcgtaacagcaccatttttaattggtgctcgcagcgtgttgttagatattttcactcctgatgcatgtctcgcgctgcttgagcagcagcgttgcacctgtatgctcggcgcaacgccgtttgtctatgatcttttgaatttactagagaaacaacccgcagacctttcagcgctgcgcttctttctttgcggcggtaccacaatccccaaaaaagtggcgcgcgaatgccagcagcgctggcattaa

SEQ ID NO: 486915 - DNA, 282 bp, Shigella sonnei
gtggtgaatctcgatgatcctttgtcgcgctttatgcacaccgatggttacgctgccgcaggtgtagagattaaagtggtcgatgacgcacgcaagaccttaccgccaggttgcgaaggtgaagaagcctcgcgtggccccaatgtgtttatggggtattttgatgaacctgaattaaccgcccgtgcgctggatgaagaaggctggtattacagcggcgatctctgccgtatggatgaggctggctatataaaaattacggtaatgactccaacttattga

SEQ ID NO: 486916 - DNA, 276 bp, Shigella sonnei
gtgttacagacggcattggctttacgcttacatttaagtgatactggttgtctggagattcagggggccagtctagtggtacgccgtctgcgtttctccggccctaagacatcaatcatctgtactccaatgactagtctaaaaactagtattaagactatcacttatttaagtgatactggttgtctggagattcagggggccagtctagtaaactcccgtcctgtcacgttatctgtctggttcaccgtaacatcatcaaccacactgctgtaa

SEQ ID NO: 486917 - DNA, 342 bp, Shigella sonnei
atggaaaaagaccagaagaatgagaatacattacagctggcaattattagccgcataaaaatgttttatcgccccacgaacctggcaatggcacctgaagaagcgcctgcaatgcttcggtttcgtcgtagcggtagcaaactcactcttattaatccaacgccctatttcattaccgtaacaaatatgaaagcaggaaatagcaatctcccaaacaccatggtgccgccaaaaggtgaagtatcggtggatatcccgcatgctgcaaccggggatatcagttttcagacgatcaatgattacggtgcattaactccgcgtattaaggcaaccatgcagtaa

SEQ ID NO: 486918 - DNA, 210 bp, Shigella sonnei
atgacagcctttcgtgccgcatttaaggcatatcgtatgcatcaggtgttaatactgcctcgctttgcacggcttaccattgcccttggcttagcaactgcggtatttcccgttgacgcagagtattattttaatccacggtttttaagcaatgatcttgctgaatctgtcgatttatccgcctttacggtgatgctgccaacttactga

SEQ ID NO: 486919 - DNA, 189 bp, Shigella sonnei; identical to SEQ ID NO: 463227

SEQ ID NO: 486920 - DNA, 264 bp, Shigella sonnei
atggcaaaagtaattattgaaattaaaaatacagtatctggaattaaaggacggaatttgcgcaccagcattgcggtggacggtagtgcggaactggacggtgatgagggtacacttgctggcatggtggcgttactggtgcttaataaaagccagaaaataattaatgagtcagcccatgaagctatcgagattttgaaaaacgatggtgtcattaccggtggccgtgtcactgaaatggctgttgaaaaaacatgccactga

SEQ ID NO: 486921 - DNA, 228 bp, Shigella sonnei; identical to SEQ ID NO: 469002

SEQ ID NO: 486922 - DNA, 951 bp, Shigella sonnei; identical to SEQ ID NO: 469003

SEQ ID NO: 486923 - DNA, 1320 bp, Shigella sonnei
atgccttcctatgatgttgtccggtatgccatgaaaaaactgccggaagtagtgaaacaaaaagggcgcgttaccggcagtgaataccgtcagcttgaaggattcacccgccgcgactggacagctatgccggtgaattatgtctggattggtgacggtcacggtatgaagctgaaatgtgcgcatccgatccacgggcgtccattctcaccggaagtcacgtttgtgatcgatggtggaacacggtttgttgttggctggagtcttgaccttgccgaaaacgtgttcgccgttgccggtgcgatacagcacggcattcgcaaccacggaaaaccgttcctgtattactcggataacggttccggtgaaacggctgacatgctggacaaagaggtcgtgggtattctgccacgcctggggattaaacaccctaccggtattgccggtaatccacagggacgcggcattattgaacgcctgaaccggacactgccgatgcgtatagccaggaggtatcgcacctattttggcaagggtgctgaccgggaatcgttgcgtgtacttaaccgtgatctgcgttcagcgtttaacgccctgcaacaggacaagcctctgaacgaccgccagaaagcggcaatgcgcgagctgccatcgtgggcggagcttattgaggctattcgtgaaggcgtggaatggtacaacaaccgcccgcattctgagctgccgatgaaaccgaacggacggcattacagcccggcagagttcagaaaaaaacgcctggcggaagaagacaccgaaattgagtggctgagtgatcttgagctgcgcgacatgttccgcccaatggtggaacgaccggtaagacgctgcgaaattcagtggctgaacaatatttactacgcgccggagttgcgtgacgaacacggtcgcaaagtgcttatcagttatgacattcatgacgccgagcgaattacggtacgtcgcaaggacggcagctttatctgtgaggcgatatggaacggcaataaacgcgcagcctttgctgtcagtgctgaatatcacaaacaacagcagcgtattaaaggaatgcgcaaacgcgctgaggaaaaaattcgtgatgctgaagatgaaggtattcagattctggaacacaaacaggctgaaccctggctgagtaatgtttatcgcccggttggtaatgtggtggcagttcagcaaccggaatatgaagaagagcatgacgaagaatttgaacgcgatttccggctggggatgcaaaaactttttgccatgcaggaagaagatgatccgctggcctga

SEQ ID NO: 486924 - DNA, 2955 bp, Shigella sonnei
ttgcgtaaatcctatggactgacaacgaaattcagtagattgacgctgggtgttttgctggcactaagcggttcagcgtctggtgcgagtctggaagttgataatggtcagattaccaatattgatactgatgttgcttatgatgcctacctggttggctggtatggcactggagttcttaatattttggctgacggtaatgcctacttaaccactattactaccagcgtcattggcgctaatgaggattcggagggtaccgttaatgttttgggtggcacctggcgattgtatgatagcggaaataatgcaaggcctttaaatgtgggtcaatccggaacggggacgctgaatattaaacagaaaggtcacgttgatggaggctatttaagactaggttcctcgacaggaggcgtcgggacggtcaatgttgagggagaagactctgttctgacgaccgaattattcgaaatagggagttacggtacgggctcattaaatattacggataagggttacgtcacgagttcaatagtcgccattttaggatatcaagcgaacagtaatggtaaggttatcgttgaaaagggtggcgagtggctaataaaaaataatgattcctcaattgaatttcaaattggtaatcaaggagctggggaggcgactattcgcgagggtgggctgattacggctgaaaatacgattatcggtggcaatgccaccggtatcggaaccctgaatgtgcaggatcaagactctgtcatcacggtacgcagactctataatgggtatttcggtaatggcacagtcaatatttccaataatggtctgattaataacaaagaatattcattggtgggcgttcaggacggttcccacggtgtcgtcaacgtgaccgataaagggcattggagtttcctcggaacaggcgaagctttccgctatatctatatcggtgatgctggtgacggtgaacttaatgtctcgcgtgaaggtaaagtagattcgggaattatcactgcggggatgaaagaaacaggcacaggcaacattactgttaaggataagaactccgttatcactaatctcggaactaatcttggttatgacggccacggcgaaatgaatatcagtaatgaggggcttgttgtcagcaacggaggaagctcactcggttatggagaaaacggcgtcgggaatgtcagcatcaccacgggggggatgtgggaggtcaataagaatgtctataccaccattggtgttgcgggcgtcggaaacctcaatattagcgatggcggtaagtttgtatcgcaaaatattacttttttgggcgataaagcaagcggtatcggcacactgaacctgatggatgcgacatcatcgttcgatactgtgggtatcaatgtcggtaattttggtagcggtatcgtaaatgtcagtaatggtgccacccttaattcaacgggctatggatttatcggaggaaatgcctccggtaaggggatagttaatatttcaacggacagtctctggaatttaaagacatcatctactaacgcacaattgctacaggtcggtgtattaggcacgggtgaactgaatattaccaccggaggtatagttaaagcgcgtgatacacagatagctctcaatgacaaaagtaagggcgacgtgagggtggatgggcagaactctcttcttgaaacattcaatatgtacgtagggacatctggtacgggtacgttaaccctgacgaatagcggcacgctgaatgtcgaaggtggagaagtttacttaggtgtttttgaacctgctgtaggaacgctaaacattggtgcagctcacggtgaggcggcggcagatgccgggtatataaccaacgcgacgaaagtagagtttggttctggcgaaggtgtttttgtctttaatcatactaataacagtgatgccggctaccaggtcgatatgctgattacaggtgacgataaagacggaaaagtgatccatgatgcaggccatacggtgttcaatgcagggaatacttatagcggtaaaacgctggtcaatgacggcctcctgaccattgcgtctcatacggcagatggggtaacgggcatgggttcgagtgaagtcaccattgcaagccccggtacgctcgacattctcgcatcaacgaacagtgcaggagattacacgctgaccaatgcgctcaaaggcgatggcttgatgcgagtgcagctgtcatcctacgacaagatgtttggctttacccatgcaacagggactgaattcgccggtgttgcccaactgaaagacagaaccttcactctggaacgcgacaacaccgctgcgcttactcacgcgatgttgcagtctgacagtgaaaataccacatcggtaaacgtgggagagcaatccattggtggactggccatgaatggcggtacgctcattttcgatacggatattcctgctgcgacgcttgcagagggatatatcagcgtcgatacgctggttgtcggcgcgggtgactacacctggaaaggccgtaactatcaggtaaacgggacgggcgacgtgcttatcgacgtgcctaaaccgtggaatgatcccatagcgaataaccctctgacgacgctcaatttgctggaacacgatgatagccatgtcggcgttcaactggtgaaggcgcaaacggttattgggtcgggtggctcattaacgttacgtgatttacagggcgacgaggtggaagcggacaaaacgttacacattgcgcaaaacggaacggtggtcgccgagggtgattatggattccgcctcacgaccgcaccaggtgatggtttgtacgttaactatgggctgaaagcgctgaacatccatggtgggcaaaagctgacgttagccgaacatggcggagcctatggcgcaacggccgatatgtcggcaaaatag

SEQ ID NO: 486925 - DNA, 510 bp, Shigella sonnei
atgcgtattgaaaatgcaatggttgactcaggtaaaatgtatggctcccataaattatttaatacatcagttcctggtttgtattacacattattaatttcaaacatgtggtcagcttacggtaccgtaactaacgttagttcacctgggatatacattggtgactctgcagaacaatatttttcgtggtataatccaagcgaagacgtgttatattggagttgcaataatgcgaatagcacccgtaaatactgggctgtaggtggtatttatcagacccttacaattgaattctatacagatacaaactttgatccaacagtaactcaacagatcaaattatccagctcatcaaattatctgtattcatttaaagcctatggcgcaggccaaggtataaatgagcatagttattttatcaaaatcgatttcgatctgctcaatgtcaagttgactaatcccacttgttttaccgctatgcttagtggggtaatgactccaacttattga

SEQ ID NO: 486926 - DNA, 381 bp, Shigella sonnei; identical to SEQ ID NO: 458903

SEQ ID NO: 486927 - DNA, 375 bp, Shigella sonnei
gtggcgcttgaagagcttcgctggggcgcgtttggtgatgtgatacgtcagggtgaaacaggccaggttaaccagttactggatatcctcagacataaagcattaacgcaaatggcacaggagaatggcggtagcgcaacagtacgtctgaacacactggactggcttggtggtcagagccgggaacaggctgataacgaatggcatgaagcggttaactggctgggggactggtgcagtgaagagcggcatcctgtgatctggtcaaccacacaggctgcagaacacttaccggttcgtatgccccgtctctgctctgcagaacgcctctctgaaagtatggttgatgaaatatttcagaagggggaggcatga

SEQ ID NO: 486928 - DNA, 1071 bp, Shigella sonnei
atgagtacagaaatgaaaacggggctggtgctgtccggcggcggggcggtgggcgcttatcaggcgggagtggttaaggcactggcagagtgcggcgcacagatcagtatggtctcaggagccagtatcggggctctcaatggtgccattatcacggcctctcccgatctgtcagaagccgccttacgcctggaggcgctctgggatcatctggggaataatcaggttctgtcggtaaacagatcggtttacttttcattgctgaaaaaactggttcaggccatgaacctctgccagatccccggacgtgcgggcgcactgcttacgacgctttttcgccatatatcgacaatcaacgggttcgacaatccgatgattcagccgctgttgtcagatgagcccctgacagcgctgatggatcattatcttgatacagatgctctggccgacgggctaccgctgtacgtgtcgctgtaccccacagaaggaggcatgcaggatattattgactgcattcgtgctgaactgggtgccggaaccacgaaaaacgctgtttttcagcatatccagagtctgccccgcgggcagcagaaagaagccttactggcgtcagccgcgctgcctctgctgttccgtccccgcgaggttcagggaacaatgtacggtgatggtgggatgggcggatggcgaaacaggcaggggaatactcccgtgacgccactggtggatgccggatgcaatatggtgattgtgacgcatctgagtgacggttctttatgggatcgtcgggcttatccggacaccacaatccttgaaatccgtccccggaaaaggttgaaacaaatcggggacgaaggcaaaagtggcggtctgctcagttttacatcggcacataccgacgcctggcgtcagcagggctacgaggacacgatgctgacgatggagcatatccggaaaccgctggcagcacgtcaggcactgacccggtcagagacggtattgcagaaaagcctggagataactgaaggtgcagattcggcactgagaaacgcgatggcccggattaaataa

SEQ ID NO: 486929 - DNA, 354 bp, Shigella sonnei
atgttcagtatcggtaatgtttctattaactgcacgattaatccagaagacaacaatttgctaccacactatgtgtggatttacggtcatacctccacccagctaaatcagtacgattctgatattatttttatcatcaacgataaaaagtatccggccccatctgtcgacggaacacgaatgaataagaatgcatgggtatactttatcgatgctatcagtgaagccacgcaattcgacgttttagtaaacggtaagaaagtcgacagctataccgcaaatatcaaaaatgtgaaaaagactttgggtaacaaattctacgacagctgctggaacacctggttccaggaataa

SEQ ID NO: 486930 - DNA, 540 bp, Shigella sonnei
atgaactggcattatgaaaaaaatggtgtacgttatgataacgtaacagaggaagatattatcgaacgtatccggcgtggtgaactgaatgcatcaacactggtgtggcaacagggcatgctggaatggcagccagtttcagccacatcactggcggaaatactgaaacaaagtgaagttcccccagcccttccgggtcaccgcattcccggaggcgttgtctggacgctggcatttgcccctttgattgggtacatacttgagatgtggactgcagggctgaacggtatgtcatttgaacgggcttatgatgcagtcagcgaaggccagtactggtttatctctctgattctgaatattgctctgggatatctggatgaacgaaaactccgtaaatctggtgttgatactgcaacatttggctggctggcatggttgatcccggtttatctgtggcgtcgggcaaaaatcctcggacaaaaacctgcgtatttctgggtctggttggttatgctgatactggtgttatttacggtctga

SEQ ID NO: 486931 - DNA, 195 bp, Shigella sonnei
gtgtccgttaaactcaggctacctcactcttccgatatcattggcagccatttcggttcggtgtttgatgccacgcaaacggaaattaccgccgtgggcgatttacaactggtgaaaacggtcgcctggtacgataacgaatatggcttcgtcacgcagcttattcgcaccctcgaaaaattcgctaaactctga

SEQ ID NO: 486932 - DNA, 189 bp, Shigella sonnei; identical to SEQ ID NO: 463227

SEQ ID NO: 486933 - DNA, 381 bp, Shigella sonnei; identical to SEQ ID NO: 462769

SEQ ID NO: 486934 - DNA, 132 bp, Shigella sonnei
atgcagttagctcatgtggataaaaattccatcaggggtacctataatcatgccctgtatctcgatggccgccgtgaaatgatgcaatggtacgctgattacattgattcactctccagccgggaaagttaa

SEQ ID NO: 486935 - DNA, 1500 bp, Shigella sonnei
gtgacgctcaatacttctcaggtcagttactatatgactcagcgtaagaaaggtataactcagcatatctcggccatgaaggctggtatctcagtccgttctggtcgtcggatcgaaaaaggagagtgggcaaaaaacagtgttcggcactggcgcacacgcaaagatcctctggaagctgtgtgggacagcatgcttgttcctctgttgaaagagaggccggctctgacaccaacaactctgctggagatgctacaggataaatatcccggccagtaccccaacagccttcgaagaacaatgcaacggcgggtccgcgaatggaagctacagtatggtgcagagcaggaggtcatgttccgccagcgacatcagcccggtctgcgaggtctgtcggactttactgaactgaaaggtgtagttgtcaccatcgccggtaagttgttggcgcataagttgtatcacttccgtctggaatggagccactggagctggatgcgggttgtgctgggtggtgagagcttctctgctctggctgaaggtctgcaggaagccctcggacaactgggcggagtgccggtagaacataaaacggacagcctgagggcagcatggaaacaacagggcgaagatggacgccgcgagctgactgagcgttatgctgctctctgtcagcactacggaatgcagggcgtacacaataatgccggtcggggccacgaaaatggctcggttgaaagtgcccacggacatctgaaaaggcgtatctgtcaggcgctgatactgcggggcagtaacgacttcagcaccatagaagaatatcaggccttcatcactcagcaggttatgcggcacaaccgtaacaatcaggatctggtcaaggaagaacgtcttcatctgaaaccgctgccgcttcgtcgcagtgctgactatgatgagctgactgtgagggttagccgcagcagtaccatcaatgtgaagcacgtcgtctacagcgtaccttcccggcttgtaggtcaactgttacgggtccggttatgggacgatcgtctgagctgttacgttggcagcagcgaggtcatgagctgcccacgtgtcagaccagaaaaagggaagacgcgggcccgtcgtatcgacttccgacatgtgatcgacagtctggcaaaaaagcccggtgcgttctgccatgcaacgctgagaaatgacatcctgccagacgatgaatggcggaggctgtggcgtcgcttatgtaatcatctggaacccgacatggcaggcaggctgatggtacatgctctgaaactggctgcaggatacgacgatatctcagtcgtggcaaaaggtatggagcagatgctgaataccccgggaaacgtggatctgcaccggctgatgcgcttcctgggtataaaggaaaaggcgttgccggtagtcaatgtgaaacagcataacctgagcagttatgagcaactactgcgtggcaagggaggttcgcagtga

SEQ ID NO: 486936 - DNA, 756 bp, Shigella sonnei; identical to SEQ ID NO: 13499

SEQ ID NO: 486937 - DNA, 288 bp, Shigella sonnei
atgtcggggtgggacgggcccgtggcttcaagatcacttgcagtccgcaacactcacgccttggcaaaagccgggttcatcacgattcgcaatctacttgaggggcgcgttgagggcggcagcgcggcggcgctggcgctggccgaggcgttgcacaacctgccggagccggggaacacgttcctgcaaaagctcacgctggatcggttgcaggagttcaccgagagctatccgcacttggcgctcatgctcaattccgccgccgcaaagccggagccgacagcatga

SEQ ID NO: 486938 - DNA, 345 bp, Shigella sonnei; identical to SEQ ID NO: 57068

SEQ ID NO: 486939 - DNA, 651 bp, Shigella sonnei; identical to SEQ ID NO: 310700

SEQ ID NO: 486940 - DNA, 219 bp, Shigella sonnei
atgttcaacatcgccctttcccgcctgctgaacgccgcctatggccctactcgctgcctcgcaagtgtcggcgcatgggttttcggcttctatggctgcttgatcctcgcaatggcaatggccgccgggcaggtcgccgagagcttcccggtctacggcaagccgctggcgctcgccactggcctagttatcctgcgccgcctcgcgcggcgacattga

SEQ ID NO: 486941 - DNA, 264 bp, Shigella sonnei; identical to SEQ ID NO: 57070

SEQ ID NO: 486942 - DNA, 381 bp, Shigella sonnei; identical to SEQ ID NO: 458903

SEQ ID NO: 486943 - DNA, 825 bp, Shigella sonnei
atgggtaaaacaatcagtataaaggtcctgttcggtatttatcttctattaatggcaggcaaagtttttgccttcagttgtaatgtcgatggcgggtcaagtattggagcaggtacaacctctgtttatgttaatctcgaccctgtaatacagccgggccagaatctggttgtagacttgtctcagcatataagttgctggaatgattacggcggctggtacgacactgatcatataaacctggtacaaggctcagctttcgcaggctccctacagtcatataaaggatcgctgtactggaataatgtgacctaccccttcccgttgacgacaaataccaacgtattggatattggtgataagacaccgatgccattaccgttaaaactctatattaccccagttggggcggccggtggagttgtcataaaagcgggggaagtcattgcccgtattcatatgtataaaattgcaacattaggaagcggaaatccgcgtaattttacgtggaatattatttcaaataacagtgttgttatgccaacaggcggctgcaccgttgatagtcgtaatgtcactgtggatctcccggactttcctggaagcgcagaaataccccttggcgtatattgctcaagcgaacaaaagctctcattttatctttcgggtgccaccactgacagtagccgacaagtgtttgctaacacagcacctgatgcaacaaaagcatcgggagtgggtgtcactctaatgcgtaatggaaaaatactggctacgggagaaaatgtctccctggggactaatgccagtcagttaagcaactga

SEQ ID NO: 486944 - DNA, 333 bp, Shigella sonnei
atggtagtgtccgctattgccagtacacctcagtggggtgtcttactggcttataatctggtgagatatcagatgattaaaatggcggaacatctgaaaggttactggccgaatcaactgagtttctcagaatcatgcggaatggtgatgagaatgctgatgacattgcagggcgcttcaccgggacgtataccggagctgatgcgcgatcttgcaagtatgggacaacttgtgaaattaccgacgagaagggaaagggccttcccgagagtggtaaaggagaggccctggaaataccccacagccccgaaaaagagccagtcagttgcttaa

SEQ ID NO: 486945 - DNA, 189 bp, Shigella sonnei; identical to SEQ ID NO: 463227

SEQ ID NO: 486946 - DNA, 1593 bp, Shigella sonnei
atggtagtgtccgctattgccagtacacctcagtattacgaagcaaaaaatgacaaagtaagaaaacgcctcggtattaaaggcggtttttactgggctgaagcgaaaaaattatccattgccatctcccgtggtgctgttgcgattgacgatgctggctacgatgaagatgactttaaaaaacctgttcgcgtcaatttgcccgttgttggtgacctcccaccagaaggcgtgtttgatacggaattctgcaaccgttacgaaaaaggcggggaagatggcatcacaatggtatttatcgcatcttctccctctgttcaggacaaaccagccagcactgacaataccaacgtcaacggcgaagacatgacagaaattgaggagaacatgctcctgccagtttccggtcaggaactgcccattcgctggcttgctcaacacggcagcgaaaaaccggtaacgcacgtttcacgcgacggactccaggcattacacattgctcgggctgaagaactaccggctgttactgccctggctgtttcccacaaaaccagcctgctcgacccgctggaaattcgcgatctccacaaactggttcgtgacactgacaaagttttccctaatcctggtaattcaagcctgggactgataactgcttttttcgaagcatacctgaacgctgactacaccgatcgaggactgctgacaaaagagtggatgaagggtaatcgtgtttcacacatcactcgcacggcttccggtgctaatgctggcggcggaaacctcaccgatcgcggcgaaggtttcgtacacgatctgacgtcactggcgcgcgacgtagccactggcgtactggcccgttcaatggatctggacatctataaccttcatccggcacacgctaaacgcattgaggaaattatcgctgaaaataaaccgcccttttctgttttccgcgacaaattcatcaccatgcctggcgggctggattattcccgcgccatcgtggttgcgtccgtaaaagaagcaccaattgggatcgaggtcatccccgcgcacgtcactgaatatctgaacaaggtactgactgaaaccgatcatgccaaccctgatccggaaatcgtggatattgcctgcggtcgctcctctgccccgatgccgcagcgtgtaacagaagaaggaaaacaggatgatgaagaaaaaccgcaaccatcttgcgcaatggcagatgaacaggcaacggctgaaacagtggaaccggatgcaactgaacatcatcaggacacgcagccgctggatgctcagtcacaggtaaatgctgttgatgcgaaatatcagaaactgcggacagaactccatgaagcccggaaaaacattccgcccaaaaatcctgtcgatgcagacaaattactggctgcctctcgcggagaatttgttgaagggattagcgacccgaatgattcgaaatggattcccggtcatcatatctcctcaaatgaagtcaaaaaaacggaaaataaagtgcgacagactgaagataaacagcaccagaacagcgaaccggaggagcgaactgaggtgtactggcaatag

SEQ ID NO: 486947 - DNA, 189 bp, Shigella sonnei
atggaaacgttattaccaaacgttaatacgactgaaggttgttttgaaattggtgtcactatcagtaacacggtatttactgaagatgccattaacaagagaaaacacgaacgggagtcattaaataaaatatgcattgtttcaatgctggctcgtttgcgtctgatgcaaaaaggatgctggcgatga

SEQ ID NO: 486948 - DNA, 192 bp, Shigella sonnei
atgaatacagcatttgcactcgttctgaccgttattcttaatacgggcgaaccagctgaactggttaccggagtatacaactccatgaaagaatgcgtggctgctgcagctgaacagaaaattcccggtaactgttatccggttgataaaatcattcaccaggataataaagaagtcccggcaggtctttaa

SEQ ID NO: 486949 - DNA, 1062 bp, Shigella sonnei
atgagtaaagtctttatttgcgccgccattccggacgaaaaggcaacaaaagaagaaggcgctaaacctgtagccactgccattgaagccggcgacgaacgccgcgcccgcgcaaaatttcactggcaattcctggaacattatccggctgctcaggactgcgcttataaatttattgtctgcgaggataaacctggtataccccgccctgccctcgattcctgggatgctgaatatatgcaggaaaaccgctgggatgaggagtctgcttcctttgtcccggttgagactgaatccgaaccgatgaacgtcacttttgacaagctggcccctgaagtacagaacgctgtcatggttaagttcgacacatgtgaaaacatcaccgttgatatggtgattagcgcgcaggaactgttgcaggaagacatggcaacattcgacggacatatcgttgaagcgttgatgaaaatgccagaagttaacgccatgtgtccggagattaaactgcatgccatcgggtggattaagcataaatgtaagcctggtgcaaaatggccagaaattcaggcagagatgcgcatctggaaaaaatgtcgcgaaggtgaacgcaaggaaaccggaaaatacacgtctgttgttgatctcgcccgtgccagagccaatcaacagcacactgaaaattcaacaggaaaaatcagcccggccattgctgccattcatcgcgaatacaagcagacatggaaaacactggatgacgaactggcctacgctctctggcctggtgatgtggatgccggaaacattgacggcagcatccatcgctgggcaaaaaatgaagttatcgacaacgaccgcgaagactggaagcgtatctcggcatcaatgcgcaaacagcctgatgcccttcgctacgaccgccagactatttttggccttgtccgtgaacgtccgatcgacattcacaaagaccctgtggcactgaacaaatacattactgaatacctgactacaaagggcgtgtttgaagatgaaggaacaaatcagagcgcaactgatacttga

SEQ ID NO: 486950 - DNA, 189 bp, Shigella sonnei; identical to SEQ ID NO: 463227

SEQ ID NO: 486951 - DNA, 537 bp, Shigella sonnei; identical to SEQ ID NO: 486147

SEQ ID NO: 486952 - DNA, 621 bp, Shigella sonnei; identical to SEQ ID NO: 479960

SEQ ID NO: 486953 - DNA, 621 bp, Shigella sonnei
gtgccgcgccttcgcctgttcgccattctctgtttcgattctcaggagcggcgtgaagctccccggctggtataccgtctggatacttgcgtggtgggtctgtatcgtcgtcagcctgtcaccgtcccacccgtaccatgtcacctccggtttacgcgacagcgacatccaccccgtcaggtcacgctcccgccgccatacccgttttcccgtccggcggcccagcgggtcatagaggtaccggctctccacctgtggttcgccgtgctgtatccgcgtgtagaacaccaggcggtgctggctgtcgtagtgatagtggtgggtgcgctcgtcgtgcatccggataaccccttccgggatacggtccgtcttctccgccagcctgccgtattcatcgtagcgatagacatagtgcgcatcttccgcgatgcggttatccggccacgccgtgagggtgctgtccgggtgcagttccgggtccggcagccgatttcctgccgggtctgttgcatacgggatatcgatatccaggttcgctgccgtggtgtggacgcccgtcagcctccccgtgtcgctgtaacggtactcccggctctcctgcgggccactgatgcggattag

SEQ ID NO: 486954 - DNA, 546 bp, Shigella sonnei
atgttgcatttaaaaaatattactgcgggtaatccgaaaactgcggaacaataccagatgacaaaaaaatatgatattacctggcttttttcggaggacgacaaaaactggtatgaagaactgaagaatttcgccagcgacacaattaaaatagcttacaccggagacgggcgcgtggtgtgggtcggtaaggatgtgacaggcattgaaccccgtaacgccagtgttattgaagttcctgatattaccgccaaccgccgcattaccgcgccgggttactggttttaccgcaatgatgaatttgtctttgactacagactcaaagcggaagatgagcgtgatgcccttctggctcaggtcagtgcccggacaggggaatgggaagaagacctgctgctggggctaatcagcgacgaagaccgggaaaagctgaaagcctgtcgtatttacgcgaaatcgctgcaggcgatggatttcagcaccatcacagataaagccacatataacgccatcaactggccggagcgtcccgatgccgcagcttaa

SEQ ID NO: 486955 - DNA, 375 bp, Shigella sonnei
gtggcacttgaagagcttcgctggggcgcgtttggtgatgtgatacgtcagggcgaaacaggccaggttaaccagctactggatattctcagacataaagcattaacgcagatggcacaggagagtggcggtagtgcaaccgtgcgtctgaacactctggactggcttggtggtcagggccgggagcaggcagataacgagtggcatgacgcgattaactggctgggggactggtgcagtgaagagcagcatccggtgatctggtcaaccacgcaggctgcagaacacttaccggttcgcatgccccgtctctgctctgcagaacgcctctctgaaagtatggtcgatgaaatatttcagaagggggctgcatga

SEQ ID NO: 486956 - DNA, 1071 bp, Shigella sonnei; identical to SEQ ID NO: 484295

SEQ ID NO: 486957 - DNA, 1533 bp, Shigella sonnei
atgaataaaatatactcccttaaatatagtgctgccactggcggacttattgctgtttctgaattagcgaaaagagtttctggtaaaacaaaccgaaaacttgtagcaacaatgttgtctctggctgttgcaggtacagtaaatgcagcaaatattgatatatcaaatgtatgggcgagagactatcttgatcttgcacaaaataaaggtattttccagcccggagcaacagacgtaacaatcactttaaaaaacggagataaattctctttccataatctctcaattccggatttttctggtgcagcagcgagtggcgcagctaccgcaataggaggttcttatagtgttactgttgcacataacaaaaagaaccctcaggccgcagaaactcaggtttacgctcagtcttcttacaaggttgttgacagaagaaattccaatgattttgagattcagaggttaaataaatttgttgtggaaacagtaggtgccaccccggcagagaccaaccctacaacatattctgatgcattagaacgctacggtatagtcacttctgacggttcaaaaaaaatcataggttttcgtgctggctctggaggaacatcatttattaatggtgaatccaaaatctcaacaaattcagcatatagccatgatctgttaagtgctagtctatttgaggtcacccaatgggactcatacggcatgatgatttataaaaatgataaaacatttcgtaatcttgaaatattcggagacagcggctctggagcatacttatatgataacaaactagaaaaatgggtattagtcggaacaacccatggtattgccagcgttaatggtgaccaactgacatggataacaaaatacaatgataaactggttagtgagttaaaagatacctatagtcataaaataaatctgaatggcaataatgtaaccattaaaaacacagatataacattacaccaaaacaatgcagataccactggtactcaagaaaaaataactaaagacaaagatattgtgttcacaaatgggggagatgtcctgtttaaggataatttggattttggtagcggtggtattatctttgacgaaggccatgaatataacataaacggtcagggatttacatttaaaggagcaggaattgatatcggaaaagaaagcattgtaaactggaatgcattgtattccagtgatgatgttttacacaaaataggccccggtactctgaatgttcaaaaaaaacagggggcaaatataaagataggtgaaggaaatgttcttcttaatgaagaaggaacatttaacaatatataccttgcaagcggaaatggtaaggtaatactaaataaagataattcccttggcaatgatcaatatgcggggatattttttactaaacgtggtggcacgctagatttaaatggacacaatcagacttttactagaattgccgccactgacgatggaacaacaataactaactcagatacggtgatgctgccaacttactga

SEQ ID NO: 486958 - DNA, 228 bp, Shigella sonnei
atgatactttggtctgtgaaaaaagaaaccgatatccggcgtggaaggcattgtgttttcctgatgcatgttcacctggtctttgtcactagataccgacgccagatttttgactatgacgcgacagaaaaactacgcacttacttttcaaatgtatgtgcttattttgaagctgaactggttgaaatggatggcgaaccagatcacgtccatttgttaattaactaa

SEQ ID NO: 486959 - DNA, 501 bp, Shigella sonnei; identical to SEQ ID NO: 83644

SEQ ID NO: 486960 - DNA, 840 bp, Shigella sonnei; identical to SEQ ID NO: 349077

SEQ ID NO: 486961 - DNA, 723 bp, Shigella sonnei
atggcgcgactgtcgcaactggcggggaaccagcgggtcatcctcacgcccactgtaacgatcgctttcctgctcgcgttgtttcagcagggcttcagcctgttcaacctcacgacgcagtttttcagaacgggttccgaacagcatccggcgcagtttttctatctgagcccgcagatgctctatttctcgctcatcttcttcgatcttttcttcggcacgtgccagtgcagagcgcaggaaggcctccgtctcttcaaccagactcagttgctggtctttctgacggagggcttcagcctgctcagagagcagcctttccagctcagcgatgcgaatgaggtatttctgactcatggccgtttttataatccggcccggcgttttttacaacattgtcagtgcgttaaggcgggatgtttttggctgacgccagtccagcttatcgaggagcattgccagttgcgagcgggtaatggatatcttaccgtcacgcaccgcaggccagataaactgaccttcctcaaggcgtttggtgaacaggcacagaccatcagcatcagcccacaggattttaatcgtgtctccccgtcggccacggaagataaacaggtgaccggagaaggggttatcatccagcacatgctgtatctgctcccccagaccgttgaaggatttacgcatatcagtaacgccggcaacgagccagatacgggtacctga

SEQ ID NO: 486962 - DNA, 189 bp, Shigella sonnei
atgtataaaattacagccactattgaaaaggaaggtggttctcctgccagctggacaagatactcaaagaaaaaactaacgaaatcagaatgcgaaaaaatgctctcaggggaaaaagaagcaggcgcttccagagagcagaaagtaaaactgataaattttaattgcgagaaacttcagtcctcgtga

SEQ ID NO: 486963 - DNA, 1098 bp, Shigella sonnei
atggcgctttttcaacgagcaataaacacacaggcctatctaaaagcaggaattatggggtttgctggcgacggcaaaacctacacagcaagcgaactggctattggtctggtaatgcttatgcggcaacggggaattgaagctggtaaccgcccggtaatgtttctggacacagaaacaggctctgactgggttaaaccccgctttgatgcggaaaatatcgaattatttacggcaaaaacccgctcgtttgttgatctgcttgaagccattaatgaagcggaaagcagcggttccgtaatgatcatcgactccatcagtcacttctggaccggattatgcgacgagtatgccagacgccgaaaccgtaaacgaggactggaattttcagactgggcgtggctcaaacaggagtggcgacgctttaccgatcgatttgttaacagtcaggcgcacattattatgtgcgggcgtgcaggatatgagtatgactttttcgaaggtgatgatggcaaacgccagttggcaaaaaccggtataaaaatgaaagcagaaacagaaaccggttatgaaccctccatcctgatccagatggagaagcaaatgaacatagaaaccggtcaggtgtggcgcaccgccagaatactaaaagatcgctccacccgtattgatggacaggtattttcaaacccaacatttaaaaactttcttcctcatatcgagtttcttaacctgggaggtgaacacctcggcatcgatacctcacgggataacagtgaattatttgccaacgacggtacaccgacatggctaaaagaaaagcgtgcaaaagaaatcgcacttgatgaaattatcgagttgctcaacaaacaccatgggggcaccagtaacgacgccaaacgcgcaaaagctgatttgctggaaaaaacattcacctcccgctcatgggaaagaatcaaaggtatggactggccgacaatcaaagctggtcgtaatgcactatggattgaactggaaggcgttgaatatgcattcccggatccacaaacacaaaacgaaacgcaacaagcaggatacgatgagaatattccggtgtaa

SEQ ID NO: 486964 - DNA, 1029 bp, Shigella sonnei
atgacgccgctgaatgatgccctgtacagttatgtgatgaacacccgcaaggttcacactgatgacacaccagtaaaagtactggcaccgggcaggaagaaggcgaaaacaggatatatctggacgtatgtccgggatgaccgaaatgccggttcgccagaacctccggcggtctggttcgcctactcaccggaccatcagggtaaacatccggagcaacaccttcgtcccttccggggtatcctgcaggcagatgcgttcgcaggttacgatcggctgttcagtgccgaacgtgaaggcggcgcgttgacggaagcaggatgctgggctcatgcgcggcgcaaaatccacgatgtatatatcagtaccaaaagcgcgacggcggaagaagcactgaaactaatcggcgaactgtacgccattgagcacgaaatacgcgggttgccggtgtctgaacgcctggcggtcaggcaaatgcagagtaaaccgctactgacttccctgtataagctgatgcaggagaaagaacacacgttatcgaaaaaatgccgtctgagagatgcgttccggtatatcaggaagcactgggttgcgttgtgcaacttctgtgatgacggtctggcggaggcggacaataacacagcggaaagagcgcttcgtgcagtctgtctcggaaagaaaaattacgtgttcttcggtagcgatcacggcggcgagcgtggtgcactgttgtacgggctgatcggcacctgccggttgaatggtatcgatccggaagcgtatctgcgccatatcctgagcgtactgccggaatggccttccaaccgagttgacgaactcctgccatggaacgtagtactcactctaataaataagcgtcaatacggtgctccgttgacgcttacgaattattgctggagtggcattaggctttgtgattgcgccaatgattatttagcactatcaaacatcagtatcgatggtttatacacaataaagacagatatggcggaatatagtctgttgtaa

SEQ ID NO: 486965 - DNA, 1449 bp, Shigella sonnei
atggcctacctgacgatatggcagggcgatgacgtacagcgccgggtgaaaggtgtggtgacctggtttgaactgggggagaacgacaaaaaccagatgctgtacagcatgaaggtatgcccaccgctgtggcgcacagggctgcgccagaacttccgtatcttccagaatgaggacatcgaaagcatcctcgcgacgatcctgaaggaaaacggtgtgaccgagtggagtccgctgttcagcgagccgcatccttcccgtgagttttgtgtccagtacggcgaaactgattacgatttcctgtgccggatggcggcggaggaaggcatcttcttttatgaggagcacgcgcaaaaaagtaccgaccagagcctggtcctgtgcgacaccgtgcgttatctgccggagtcctttgagatcccctggaacccgaacacccgtaccgaggtaagtaccttctgcatcagccagttccgctacagcgcacaaatccgtccttcttccgtggtgaccaaagactacacctttaaacgacccggctgggcagggcgttttgatcaggaaggccagtaccaggattaccagcgcacacagtatgaagtgtatgactaccccggacgtttcaagggtgctcacgggcagaactttgcccgctggcagatggatggctggcgcaacaacgcagaagtggcgcgcggaacaagccgttctccggagatatggccgggacggagaattgtgctgacggggcatccgcaggcgaacctgaaccgggaatggcaggtggtggcaagtgaactgcacggcgagcagccgcaggcggtgccgggacgcagtggttcaggaaccacgctgaataaccactttgcggtaataccggcagaccggacatggcggccacagccgttgctgaaaccgctggtggatggcccgcagagcgccgtcgtgacgggaccggcaggcgaggaaatcttctgtgatgaacatggccgcgtgcgggtgaaatttaactgggaccgctataacccgtcaaaccaggacagttcatgctggatccgtgtggcacaggcgtgggcaggcaccggattcggtaaccttgcgataccgcgcgtgggtcaggaggtcattgtggacttcctcaacggcgatccggaccagccgattattatggggcgtacctaccaccaggaaaaccgcacacccggtagcctgccggggacgaagacgcagatgaccattcgttcgaaaacctataagggcagcgggtttaatgaactgaagtttgacgatgcgacagggaaagaacaggtctacatccacgtgcagaagaacatgaacaccgaggtgctgaataaccgcaccacggatgtgataaacaaccatgccgaaaaaataggtaacaaccaggcgatcaccgttaccaataaccagatgcaaaatggcatctga

SEQ ID NO: 486966 - DNA, 348 bp, Shigella sonnei; identical to SEQ ID NO: 485869

SEQ ID NO: 486967 - DNA, 459 bp, Shigella sonnei; identical to SEQ ID NO: 486154

SEQ ID NO: 486968 - DNA, 1287 bp, Shigella sonnei
atgcaaaacagaaaatggattttgtcctcgctggtaatgacttttttcggcatccccatactgacgcaatttttggcggcggttgttgctatgctgggtgtcggacttgccggtattattgaagtttgtaatatccttatcacgccaacaagttaccttctgctcaacatttttatgctggcgctgggcgcattaatgctatttttctcggggcgagtatgggcaggcgatagtgcaccagaaaaaagagaaatagccgtctggcgacaatgtctttttttagtacccggtttattaatcctggttggctggataatcgcgctgcatctggcagattatcaatttcaccagatgggatcgggttggttggctgatcttatgctcccctggctgggcgttttgttagtctcagtagtcggaggtgagtactggtggatagtcattatacccgttggcgcgcatatcagtttttcgctggggtacggccggccaaccagacatcctttaaccggtacatccgggctacgttgccgtaattccctcctgtttatccttctcatgcttggttttgtcgctggttatcagggttatttatataaacagctcaatcccggtgtcggtgtgcgcgaaaatattgatacctgggcctggcgacccgataaactcaataatcaactgacaccactgcgtggtaaaccgcaaattcagtttacgcaaaactggccgcgactcgatggtgctacggcggcgtacccaatttatgcctctgcattttatgctttaagcgttataccggaagattttcacaccagggaatatctggagagctctcgtacccccgatgcgtataacaggattgttaaaggtgatgctgatattatttttgtggcgcaaccttccggtgggcagaaaaaacgcgctgaggaatcgggcgttactttgctgtacacgccttttgcccgtgaagcgtttgttttcatcgtcaatgcggataatccggttaattccctgactgaacaacaggtgcgtgacatcttcagtggtgcaattaccaactggcgtactgttggcggtaacgatcaggagatccagacctggcaacgcccggaagactctggtagccagacggtgatgcaatcccaggtcatgaaaaatgtccgcatgatctcgccgcaggaaacagaagtggcaagtatgatggagggaatgattaaagtcgttgccgaataccgtaatacaaacaacgcaataggttacaccttccgggtaatgactccaacttattga

SEQ ID NO: 486969 - DNA, 225 bp, Shigella sonnei
atgaacgccgataaaaatataaaactgctagcgattaacggtattgcaccgactgccgaaaacattcgcaacggcaaatatccctatatcgtcgatgcctttatggtaacgcgggaaaatacgacgtcagagacacaaaaattgttggagtggtttttaacgccgcagggacagagtttggtggaagatgtaggttatgtcccgatgtataagacgctaccttaa

SEQ ID NO: 486970 - DNA, 1155 bp, Shigella sonnei; identical to SEQ ID NO: 485796

SEQ ID NO: 486971 - DNA, 285 bp, Shigella sonnei
gtgcgcacagttgataactatatcgccctgctctgttcgttgttacgttttgcgtatcagtcgggatttatatcaaccaaaccatttgaaggagtaaaaaaattacagcgaaacagaataaagcctgacccgttatctaaaacagaattcaatgcattaatggaaagtgaaaaaggacagagccaaaacttgtggaaatttgccgtttactccgggcttcgtcacggggaactggcagctctggcgtgggaggatgtggatttcgagaagggaattgtgaggtag

SEQ ID NO: 486972 - DNA, 216 bp, Shigella sonnei
atggcacaagtaatctttaatgaagagtggatggttgaatacggcctgatgcttcgcactggtctgggtgccagacaaattgaagcataccgccagaactgttgggtggaaggcttccacttcaaacgagtatctcctttagggaagccagacagtaagcgagggattatctggtacaactatccgaagataaatcagtttatcaaagactcatga

SEQ ID NO: 486973 - DNA, 960 bp, Shigella sonnei
gtgttgcaggaggacacgggggtgacgcttccggcggagctggcggtgatgctggggaggctggagcgggaactgcgtgcgggtgcggtgagtgcggagagtgaggcatggcttgcgcagtgcgggctgacggtggagcagatggaaagccagatggaggcggaatacatcccggagcggaggctgcatctttaccactgtgaccaccggggactgccgcaggcgctcatcagcccggaaggggaaacggcgtggcgcggggagtatgacgagtgggggaaccagcttaatgaggagaacccgcatcacctgtaccagccgtaccgtttgccggggcagcagtatgatgaggagtcgggactgtattacaaccgtcaccggtactacgatccgttgcaggggcggtatatcacccaggatccgatagggttgaaggggggaataaatctatacacgtatccactggcaccaatacgttacactgatccactggggttagaacgagttataagtgtatatgggcctcccgctccagaccgggcaggtgctgaaactcctcttgttcttactgatatgactggaggagtgactatttattatgatcctgaaacaggtgattcaatgacttttgatagtagcaatagaattgatcgtcgttctcaacgtggtgctggtgatccatatacaggtgaagtcgttggttgtgagacaaatggatcaggaatatcggcagcatatggcacaacgaagatctatactacagatactagagcaagatggctacatggtgggggatcatcgttgcgcgatccttatgctcctcgacaaggctggaaaccaactatgggatgtacccgtgcacagaatgaagatgtagatgagttgtgtaagaaagtgacaagttggatgtattcgcatcctggagagagaattagatatgaacgttttaagacacgttaa

SEQ ID NO: 486974 - DNA, 789 bp, Shigella sonnei
atgttgaatgtagctattgaaaaccagaacgggtggaattatagtgcacctgcaccttataaaacgggtgccgggcgtggaaacccgaacgttactcgagcgcatagccgcgctgaagcggtttttttatgcgtaatgcacagctccattcaaattatggtgggatgtgcagggcagtcgcaagactggccgggttctcgagtgaccggtatttccacccctgtacgtctcaccacccttatggtcgtggaaaacctcggtggtgagttaattaacttatcactcgaggatgccatcatggctactatccctgccctttctcaccctgacgtaaccatcgaaaatggtcgcgctgtcactacgtctattgcgatcgcagagttctttggcaagcgtcacgacaatgtgttacgtgccatcgcaaatactgaatgctcacctgaatttaacgccctcaattttgaggacgtcacctacactgacgccaaaggcgaaaaacgcccgatgtaccaaatcaccaaaaacggcttcgttttcctggtgatgggattcactggcaaaaaagccgctgcatttaaagaagcctacattgctgagttcgatcgcatggaggccgaactgcgccagaataacaccccacccactgacaaaataattccaggcgatggccgcaccctggttgttcacttcgacgaacgcggcaacatcagattcaccgaaaccgttcctgatggcgcacgggtctgtaccatggagactttccggttggtaatgactccaacttattga

SEQ ID NO: 486975 - DNA, 318 bp, Shigella sonnei
atgagcagaaaaacccaacgttactctaaagagttcaaagccgaagctgtcagaacggttcctgaaaatcaactttcgatcagtgaaggcgcttcccgattatctcttcctgaaggcactttaggacaatgggttaccgccgccagaaaagggctcggtactcctggttcccgcacggtggctgaactggaatctgaaattctgcaactgcgtaaggcgttaaatgaagctcgccttgagcgagatatattaaaaaaagcaacagcgtattttggtaagcgtcaacggaacaccgtattgacgcttatttattggtga

SEQ ID NO: 486976 - DNA, 621 bp, Shigella sonnei; identical to SEQ ID NO: 479960

SEQ ID NO: 486977 - DNA, 588 bp, Shigella sonnei
ttggccgacgcatcaactgagtttgatgttggtcagcaacatctgtcactctccgttccgcaaatttatgttggcagaatggctcgcggctatgtttctcctgatctgtgggaagaaggaataaatgcagggcttctaaactatagttttaatggtaattctattaataatcgtagtaaccataatgcaggaaaatcaaactatgcatatttgaatttacagagtggcatcaacattggtagttggcgactacgcgataactcaacgtggagttataacagtgggagtagcaattcatctgacagcaataaatggcagcatatcaatacgtcggctgaacgtgacattattcccttacgctcacggttaacggtaggtgatagttataccgatggcgatatttttgatagtgtgaactttcgtggcctcaaaataaattcaacagaagcgatgttgcccgatagacaacatggtttcgctccggtgattcatggtattgcctggatttgcccctatatttccagacatctgttatcacttaacccattacaagcccgctgccgcagatattcccgtggcgagcgataa

SEQ ID NO: 486978 - DNA, 327 bp, Shigella sonnei; identical to SEQ ID NO: 486130

SEQ ID NO: 486979 - DNA, 897 bp, Shigella sonnei
gtgatccacggtattgctcgtggtactgcacaggtcactattaaacaaaatgggtatgacatttataatagtacggtgccgccggggccttttaccatcaacgatatctatgccgcaggtaatagtggtgacttgcaggtaacgattaaagaggctgacggcagcacgcagatctttaccgtaccctattcgtcagtcccgcttttgcaacgtgaagggcatactcgttattccattacggcaggagaataccgtagtggaaatgcgcagcaggaaaaaacccgctttttccagagtacattactccacggccttccggctggctggacaatatatggtggaacgcaactggcggatcgttatcgtgcgtttaatttcggtatcgggaaaaacatgggggcactgggcgctctgtctgtggatatgacgcaggctaattccacacttcccgatgacagtcagcatgacggacaatcggtgcgttttctctataacaaatcgctcaatgagtcaggcacgaatattcagttagtgggttaccgttattcgaccagtggatattttaatttcgctgatacaacatacagtcgaatgaatggctacaacatcgaaacacaggatggtgttattcaggttaagccgaaattcaccgactattacaatctcgcttataacaaacgcgggaaattacaactcaccgttactcagcaactcgggcgcacatcaacactgtatttgagtggtagccatcaaacttattggggaacgagtaatgtcgatgagcaattccaggctggtttaaatactgcattcgaagatatcaactggacgctcagctatagcctgacgaaaaacgcctggcaaaaaggacgggatcagatgttagcgctgatatga

SEQ ID NO: 486980 - DNA, 381 bp, Shigella sonnei
atgctgggagcggtggaacgccgcttcggcaacgatcttccgtcgtctccagtggagtggctgacggataatggtttatgctaccgggctaatgaaacacgccagttcgcccggatgttgggacttgaaccgaagaacacggcggtgcggagtccggagagtaacggaatagcagagagcttcgtgaaaacgataaagcgtgactacatcagtatcatgcccaaaccagacgggttaacggcagcaaagaaccttgcagaggcgttcgagcattataacgaatggcatccgcatagtgcgctgggttatcgctcgccacgggaatatctgcggcagcgggcttgtaatgggttaagtgataacagatgtctggaaatatag

SEQ ID NO: 486981 - DNA, 477 bp, Shigella sonnei; identical to SEQ ID NO: 486133

SEQ ID NO: 486982 - DNA, 561 bp, Shigella sonnei
atgctttattatcccattgatctaattgaaaagttccaaaatctttatgcgataaccgatcaaattcgtaacacgacaggtttctgcttacctcagaattccgagttaatatattgttgggagcaactaaaaacatctatttcccgaggcttctcaacgcaaattcaggaacacttagcaatgggcgttctactttcattaggagcacatcatgttaattgtttacttttatcagatagtaaacaatcattaataagtcgttgttataacctaatgctatccgaacctggaacaaaatggacagcaaacaaggtagcgagatatctctacatttctgtttccacattgcatcgccgtctggcaagcgagggagtaagttttcaaagtatattggacgacgtgaggttaaataatgcgttgtctgctatacaaacgacagtaaaacccatcagcgagattgccagggaaaatggttacaagtgtccttctcgttttactgaaaggttccataatcgttttaagataacaccaagagagctaagaaaagcgtccagagagtaa

SEQ ID NO: 486983 - DNA, 303 bp, Shigella sonnei; identical to SEQ ID NO: 458125

SEQ ID NO: 486984 - DNA, 381 bp, Shigella sonnei; identical to SEQ ID NO: 458903

SEQ ID NO: 486985 - DNA, 372 bp, Shigella sonnei
gtgctggatgcactggagcaggcgttatgggcccgtcgaccgtccggcacggtccatcacagtgataaaggttctcagtatgtatcgctggcctacacacagcggcttaaggaagccggattactggcatcaacaggaagtacaggcgactcgtatgacaacgcgatggcggagagcatcaatggtctttacaaagcggaggtaatacaccgtaagagctggaaaaaccgtgcagaagtggaactggccatactcacgtgggtggactggtataacaatcgacgattgctggaaaggctgggccatactcctccggcagaagcagaaaaagcttattatgcttccatcggaaacgatgatctggcagcctga

SEQ ID NO: 486986 - DNA, 327 bp, Shigella sonnei; identical to SEQ ID NO: 486130

SEQ ID NO: 486987 - DNA, 372 bp, Shigella sonnei; identical to SEQ ID NO: 485640

SEQ ID NO: 486988 - DNA, 189 bp, Shigella sonnei; identical to SEQ ID NO: 463227

SEQ ID NO: 486989 - DNA, 990 bp, Shigella sonnei
ttggagtcattacccgattactgggcttccggacaaaatcgtagcaattactctattggctacagtaacagtgcatcctggggcagctacagtgtcagtgcccagcgttcatggaatgaagacggcgacactgacgatagcgtttatctcagtttcaccattcctattgaaaaattacttggcactgaacaacggacttcaggtttccagagtattgatactcaaatgagcagtgactttaagggtaataaccaactcaacgtcagtagcagtggctatagtgataacgctcgcgtcagttatagcgtaaatactggctatacgatgaataaagccagcaaagatttgagttatgttgggggttatgccagctatgaatcaccgtggggaaccctggcaggttcagtttctgcaaatagcgataacagtcgtcaagtgtctctcagcaccgacggtggttttgtattgcatagcggcggcctgaccttcagtaatgacagttttagcgactccgatacactggcggtagttcaggctccaggtgctcaaggagcgcgaataaattatggcaacagtactatcgatcgatggggttatggtgtcaccagcgctctttctccttatcatgaaaaccgtatcgcgctggatatcaacgatcttgagaacgatgttgaattaaaaagtaccagtgcagtagctgtaccgcgtcagggttcagtcgtctttgctgattttgaaaccgtgcaagggcaatcagccattatgaacatcacacgaagtgatggtaaaaatattccatttgctgcagatatttatgatgagcaaggcaatgtcattggtaatgttggacagggtggacaagcatttgttcgtggcattgagcagcagggaaatatcagcattaaatggctcgaagaaagtaaacccgtaagttgtcttgcgcattatcaacaaagttcagaagcagaaaaaatagcgcaatctaggtaa

SEQ ID NO: 486990 - DNA, 777 bp, Shigella sonnei
ttgatttacgtcaagaaaggggtagcaaggtttaccatcgattcttcgttatatgtcgcgcacgccgatgacattgtggtgatagaacgtggcaggctgcatgcggtggcctctgacgttaacgatccagcaacgacgtgtacctgtgcgctgtacggctttcagtttcagggggctgaggaaaatcagctactgcaaccgcattcttgcccggtaattgccgcagggcagggaaaagaagtcattaaaaccttatttaatgagctaagtgtgattttgccgcaaagtaaaaatagccaaacatcttcgttatgggatgcatttgcctatacattagcaattctttactacgaaaactttaaaaatgcttatcgttcggagcaggggtatattaaaaaagatgttctgataaaagatattcttttctatctgaataataattatcgcgaaaaaatcactttagaacagttatcgaaaaaatttcgtgccagcgtcagttatatttgccatgaatttaccaaagagtatcgtatttcccctattaactatgttattcaacggcgtatgacggaagcaaaatggtcactcactaatactgaattatcacaggcagagatctcctggcgtgtgggttatgaaaatgtcgatcactttgccaaactgtttttgcgccatgtcggttgttcgcccagcgattaccgtaggcaatttaaaaattgttttgcggaacaagaaatcttatctgaatttcctcaaccggtaagtcttgccggataa

SEQ ID NO: 486991 - DNA, 738 bp, Shigella sonnei
ttggcccgggcatgggcatctgcccgcgatgatttacggcatgcaaggcaacgtctgaaatcgtttcttctggttcatggggtccattatgtcgggcgagcagattggggccctgcacaccgacgctggctcagcaaatactcattcgaaagtccctggcgacaattagcttttgacgaacaccgtcgtacaatagaagatcggcaggcacaatgtgaacggctggaatccgccctgaaggaggccgttaccgaatggaggctgtatccggtagtagaggcgctgcaagccatgcgagggattcagtttattactgcggttggattaatttctgaactgggtgatctgacccgttttgaacatccacgacaactgatgtcatggtttggtatcacgccatcagaatattcatcgggtggaagcagacatcagggcagcattaccaaagccggaaacagctatgccagaaagctattggtcgaggcagcgtggagttaccgtcatccggcacgcatcagtccggcaatacaaaaaaggcaggaaaatttaccccgccccgtcattgacagagcatgggatgctcaactcaggctttgtaagaggtatcgaaaacttcaggccaaaggaaagaatgtcaatattacaattgttgctgttgcacgtgagctggcgggttttatctgggatatgggccgaatagcaatgtctgtcgcacaacaaccacaatgtcacaaataa

SEQ ID NO: 486992 - DNA, 621 bp, Shigella sonnei; identical to SEQ ID NO: 479960

SEQ ID NO: 486993 - DNA, 570 bp, Shigella sonnei
atgcaccgtctctctgtagcggaacaatacaaagctattgcacaggctagagagatagcaaaacaatatgagcaaggggctatcagcctggcgcgtatgaatagtcagatgaaacgcctacaacagcaacaacgtaagattaatggcaacagaaaagctcaatttgcccccgttaagggaggatcagggaattccgccacgatgggcgctctgttatttggaggcgctacggctgctgctggcgtgatggctgttagtaaaacctctgaatttatggctaacagctttgctaatgctgaaacagaaggggagctaatccaacgtgcaaggcttggtggagttgattacaacttacttaataatcttgagcgttgggcgtatgacaacgggatcgatagcctccagggtgatccgggacgcagaaaaatactagatgccatcggtaaagatgtaaaggaacgcgctaccaaaagctatgacgaggctgaatatgtagttgataagaaaacagggaaaggcatatggaagggcggtgattctggtattaacactgaggtgtactggcaatag

SEQ ID NO: 486994 - DNA, 468 bp, Shigella sonnei; identical to SEQ ID NO: 19402

SEQ ID NO: 486995 - DNA, 189 bp, Shigella sonnei; identical to SEQ ID NO: 463227

SEQ ID NO: 486996 - DNA, 621 bp, Shigella sonnei; identical to SEQ ID NO: 479960

SEQ ID NO: 486997 - DNA, 348 bp, Shigella sonnei; identical to SEQ ID NO: 485869

SEQ ID NO: 486998 - DNA, 381 bp, Shigella sonnei
atgcagaaaaatgtgactcccggcaggcgaaaaggctgccctaattatcctcccgaatttaaacagcagctcgttgctgcctcctgtgaacccgggatatccatctcaaaacttgctcttgaaaatggcattaacgccaatctgttgttcaaatggcgacaacaatggcgcgagggaaagctgctattaccttcttcagagagcccccagctacttcctgtgactctcgatgcagctgccgaacagccagaatcgctcgcagaggacccgaaaaccctcagtatcagcagtgaggtaacgttccggcacgggacgctccgcttcaatggcaatgtcagcgaaaagctcctgactctgctgatacaggaactgaagcgatga

SEQ ID NO: 486999 - DNA, 348 bp, Shigella sonnei; identical to SEQ ID NO: 485869

SEQ ID NO: 487000 - DNA, 279 bp, Shigella sonnei
atgaacgacatctcttctgacgacatcttcctgctgaaacagcgcctggccgaacaggaagcgctgatccacgccctgcaggaaaagcttagcaaccgggagtgcgtattccgctctattcgatcacggattggcatcgaagttcgatcagcgattcgcatccattcgatcaaccgggaacttaactttttctaccgctttttaactcgttttttcgctgctttccactgtcgggggatttttcctcagggactctccctgaaggaccactctgtgtga

SEQ ID NO: 487001 - DNA, 432 bp, Shigella sonnei
ttggatgagatcagcaaagccattaacgatgccgatagtggaatttccgctagtatcgttaaagtcaaagatggtaactatcaattggtattgaccgccagtgaaggtctggccaataaaatgaccatatctgttgagggtgacagtaaattaaatgatctgctggcttatgacagcaagaccaacaccgggaatatgaaggaactggttaacgcgcaaaatgcacagctaaacgttaacggtatcgatattgaacgttcaagtaacaaaattaccgatgctcctcagggagtgactctcgatttgaccaaaaaagtcactgacgtccgggtcacggtgacaaaaagcaacgataaagcaaccgaagcaattaaaggctgggtggattcatataactccctcattgacacctttaacaccctgacaaaatga

SEQ ID NO: 487002 - DNA, 258 bp, Shigella sonnei; identical to SEQ ID NO: 485585

SEQ ID NO: 487003 - DNA, 327 bp, Shigella sonnei; identical to SEQ ID NO: 485848

SEQ ID NO: 487004 - DNA, 354 bp, Shigella sonnei
atgctactgctggataagctgcgtgagcagtacggggtcggaccgctatgcagcgaactgcatattgccccgtcaacgtattaccactgtcagcaacagcgacatcatccggataaacgcagtgcccgtgcgcagcgcgatgactggctgaagaaagagatacagcgcgtatacgatgaaaatcacaaggtatacggtgtaaagtctggcgtcagttgttacgggaaggtatcagagtggccagatgcactgtggcacgtctcatggcggttatgggacttgccggtgttctccggggtaaaaaggtccgtacgaccatcagccggaaagccgttgccgcaggcgaccgcgtaa

SEQ ID NO: 487005 - DNA, 513 bp, Shigella sonnei; identical to SEQ ID NO: 485852

SEQ ID NO: 487006 - DNA, 216 bp, Shigella sonnei; identical to SEQ ID NO: 485850

SEQ ID NO: 487007 - DNA, 189 bp, Shigella sonnei; identical to SEQ ID NO: 463227

SEQ ID NO: 487008 - DNA, 495 bp, Shigella sonnei
ttggcccgggcatgggcatctgcccgcgatgatttacggcatgcaaggcaacgtctgaaatcgtttcttctggttcatgggggccattatgtcggacgagcagattggggccctgcacaccgacgctggctcagcaaatactcattcgaaagtccctggcgacaattagcttttgacgaacaccgtcgtacaatagaagaccggcaggcacaatgtgaacggctggaatccgccctgaaggaggccgttaccgaatggaggctgtatccggtagtagaggcgctgcaagccatgcgagggattcagtttattactgcggttggattaatttctgaactgggtgatctgacccgttttgaacatccacgacaactgatgtcatggtttggtatcacgccatcagaatattcatcgggtggaagcagacatcagggcagcattaccaaagccggaaacagctatgccagaaagctattggtcgaggcagcgtggtga

SEQ ID NO: 487009 - DNA, 234 bp, Shigella sonnei
atgccattctatttcaggaaggagtgtccgttaaactcaggctacctcaataatgaaactggcgaagatgaactcaactggaaaaaacaggtgttgattgcggcggtttacggtttatgtgcgaatcctgcgtgcatagcctatgcgcctgcaatccctgacatcgcaatgatgattgccaacaagcttgaaaattttggagtgaccagtgatgagcgcttacccgatttttga

SEQ ID NO: 487010 - DNA, 303 bp, Shigella sonnei; identical to SEQ ID NO: 484410

SEQ ID NO: 487011 - DNA, 303 bp, Shigella sonnei
atgatggtcagatattatatcagttctgctgatttaaccgctgagaagtttgcgacagcgattcgaaatcactggcacgtggagaataatctgcactggcgtctggacgtggtaatgaatgaagacgactgcaaaataagaagaggaaatgcagcagaattattttcagggatacggcacattgctattaatgttttgacgaatgataaggtattcaaggcagggttaagacgtaagatgcgaaaagcagccatggacagaaactatctcgcgtcagtccttgcggggagcggactttcgtaa

SEQ ID NO: 487012 - DNA, 498 bp, Shigella sonnei; identical to SEQ ID NO: 486152

SEQ ID NO: 487013 - DNA, 189 bp, Shigella sonnei; identical to SEQ ID NO: 463227

SEQ ID NO: 487014 - DNA, 348 bp, Shigella sonnei; identical to SEQ ID NO: 485869

SEQ ID NO: 487015 - DNA, 177 bp, Shigella sonnei; identical to SEQ ID NO: 485877

SEQ ID NO: 487016 - DNA, 189 bp, Shigella sonnei; identical to SEQ ID NO: 463227

SEQ ID NO: 487017 - DNA, 189 bp, Shigella sonnei; identical to SEQ ID NO: 463227

SEQ ID NO: 487018 - DNA, 213 bp, Shigella sonnei; identical to SEQ ID NO: 485717

SEQ ID NO: 487019 - DNA, 189 bp, Shigella sonnei; identical to SEQ ID NO: 463227

SEQ ID NO: 487020 - DNA, 261 bp, Shigella sonnei; identical to SEQ ID NO: 485837

SEQ ID NO: 487021 - DNA, 189 bp, Shigella sonnei; identical to SEQ ID NO: 463227

SEQ ID NO: 487022 - DNA, 861 bp, Shigella sonnei; identical to SEQ ID NO: 5314

SEQ ID NO: 487023 - DNA, 396 bp, Shigella sonnei
gtgagttttcgttccactgagcgtcagacccctattattcatctgctgcaggctcctgctccgaacattctccttgcaccactttgcctgctgctgacatgtcctctcgtacaccgcaccggcagactgattgccccctggttaccccgtgatgaaacaacggcgctcaccgaggaggcattcatcggctgtatggccaccatcactggttatcacgcagtggcgggttccccctgtgaaggtcgcttcacagaccgcttcgggcaggttcattacctgttgctggagccggaggccgggaaagaattcagacgaggagacaaagtgattattgtctgccgtctttccggttcccgctggctgggcgaactgaatccctggccggatgttctttaa

SEQ ID NO: 487024 - DNA, 321 bp, Shigella sonnei; identical to SEQ ID NO: 9361

SEQ ID NO: 487025 - DNA, 816 bp, Shigella sonnei; identical to SEQ ID NO: 6090

SEQ ID NO: 487026 - DNA, 540 bp, Shigella sonnei; identical to SEQ ID NO: 19206

SEQ ID NO: 487027 - DNA, 705 bp, Shigella sonnei; identical to SEQ ID NO: 8686

SEQ ID NO: 487028 - DNA, 504 bp, Shigella sonnei
gtgaagaagcctaagcatgacctgacccacgtccgacatgatcccgcgcactgtttggcacctggcctgttccgcagcctcaagcgtggcgatcgcaaacgctgcaagctggacgtgacctacacctttggcgaggacgaatccatgcgtttcgtcggattcgaacctctcggggccgatgatatgcgtcttttgcaaggcatcgtggcccttggcggcccgaacggcatcttgctaaccccggaaccgaccagtgagacggggcgacagctacggctattccttgaaccccgtttcgaagccattgagcaagacggcttggtggttcgtgagagcctgaccaaactgctctcagaaacgggcatgacggatagcggcgacaacatcaaggcgctcaaagccagcctgctgcgcatgtcgaacgtcaccatccttgtgacgaagggacggcggcaagccgcgttccacctgatgagtcatgcttttgggcactgttgcaaatag

SEQ ID NO: 487029 - DNA, 828 bp, Shigella sonnei; identical to SEQ ID NO: 13642

SEQ ID NO: 487030 - DNA, 222 bp, Shigella sonnei; identical to SEQ ID NO: 13641

SEQ ID NO: 487031 - DNA, 1203 bp, Shigella sonnei; identical to SEQ ID NO: 52387

SEQ ID NO: 487032 - DNA, 276 bp, Shigella sonnei; identical to SEQ ID NO: 473762

SEQ ID NO: 487033 - DNA, 2013 bp, Shigella sonnei
atggctatgtcagacgaggcgatgtttgccccgccgcaaggaataacaattgaagcggtaaacggaatgctcgcggagcggttagcgcagaaacacggtaaggcgtctttattacgcgccttcatcccgctgccgccgccgttcagcccggtacaacttattgaactgcatgttctcaaaagcaacttctattaccgctaccatgatgatggcagcgatgtgacggcaacaacagagtatcagggcgagatggtcgattattcgcgtcacgccgtccttctcggcagtagtggaatggcggagctacgctttattcgcacccacggctgccgttttactccccaggattgcacactgtttaactggctggcgcggataatcaccccggttctgcaatcatggctcaatgatgaagaacagcaggtggcgctgcgtttgctggagaaagatcgcgatcatcatcgggtactggttgatattactaatgcagtgctgtcacatcttgatctcgacgatctgatcgctgacgtcgctcgtgagatccatcattttttcggtctggcttcagtcagtatggtactgggcgatcatcgaaagaacgagaagtttagcctgtggtgcagcgatctttctgcctcacattgtgcgtgtctgccacgcaatatgcctggcgacagtgtattgctgacacaaacgctacaaacccgacaaccgaccttgacgcaccgtgcagatgatctgtttctctggcaacgcgacccgttattactcttacttgcatctaacggctgcgaatctgcgctccttataccgcttacctttggcaaccatacaccgggtgcattgttgctggcgcatacctcttccactctctttagtgaggaaaactgtcagctactacaacacatagccgatcgcatcgctattgccgttggcaatgccgatgcctggcgtagcatgaccgatttgcaggaaagtttgcagcaagaaaaccaccagcttagcgagcagctcctttcgaatctgggcgtcggtgacattatctatcaaagccaggcaatggaagacctgctccagcaggtagatattgtggcgaagagcgacagtacagtgttgatttgtggtgaaaccggaaccggcaaagaggtgatcgccagagcgatccatcaacttagcccgcgacgcgacaagccgctggtcaaaatcaactgcgctgccatccccgccagtcttctggaaagtgagttattcggtcatgacaaaggggcgtttactggtgcgattaatacccatcgtggtcgttttgaaattgccgatggcggcacgttgtttcttgatgaaattggcgatctgccgttagaacttcagcctaaactgctgcgcgtattgcaggagcgggagattgagcgtctcggcgggagtagaacgatcccggtgaatgtcagagtcattgccgccaccaaccgtgatttgtggcaaatggttgaagatcgccagtttcgcagcgatctcttttatcgcctgaatgtcttcccactggaattgccgccgctacgcgaccgtccggaagatatccctcttttagcaaagcatttcacgcaaaaaatggcgcgccatatgaatcgttcaattgacgccatcccgaccgaggcgctacgccagttgatgtcgtgggactggccgggcaacgtgcgcgagctggaaaacgtgattgagcgagcggtactgctgactcgcggtaacagtctgaatttacatcttaatgtccgacaaagccatttactgccgacgctaaatgaagattcagcgcttcgcagttcaatggcgcagttgctgcacccgacgacgccagagaatgacgaagaagaacgtcagcgcattgttcaggtattgcgagaaaccaatggcattgttgccgggccccgtggcgcggcgacacgattagggatgaagcgcaccacgctgctgtcacgaatgcagcgtctggggctctcggttcgcgaggtgttgtaa

SEQ ID NO: 487034 - DNA, 1608 bp, Shigella sonnei; identical to SEQ ID NO: 482098

SEQ ID NO: 487035 - DNA, 2736 bp, Shigella sonnei
atgacgcatctggaactggttcccgtcccgcctgtcgcgcaactggcgggcgtgagccagcattatggaaaaaacgttgcgctgaacaatattactctcgatattccggcccgctgtatggtcgggctgattggtccggatggcgtcgggaagtcgagcttattgtcgttgatttccggtgcccgcgtcattgagcagggcaatgtgatggtgctgggcggcgatatgcgcgacccgaggcatcgccgcgacgtctgcccgcgcatcgcctggatgccgcaggggctgggcaaaaacctctaccacaccttgtcggtgtatgaaaacgtcgattttttcgctcgcctgttcggtcacgacaaagcggagcgggaagtgcgaattaatgagctgctgaccagcacggggttagcaccgtttcgcgatcgtccggcagggaaactctccggcgggatgaagcaaaaacttgggctgtgctgcgcgttaatccacgacccggaactgttgatccttgatgagccaacaacgggggttgacccgctctcccgctcccagttctgggatctgatcgacagtattcgccagcggcagagcaatatgagcgtgctggtcgccaccgcctatatggaagaggccgaacgcttcgactggctggtagcgatgaatgccggagaagtgctggcaactggcagcgccgaagagctacggcagcaaacgcaaagcgctacgctggaagaagcatttataaatctgttaccgcaagcgcaacgccaggcgcatcaggcggtagtgatcccaccgtatcaacctgaaaacgcagagattgccatcgaagcgcgcgatctgaccatgcgttttggttccttcgttgccgttgatcacgttaatttccgcattccacgcggggagatttttggttttcttggttcgaacggctgcggtaaatccaccaccatgaaaatgctcaccggactgctgcccgccagcgaaggtgaggcgtggctgttcgggcaaccggttgatccaaaagatatcgatacccgccgtcgggtgggctatatgtcgcaggcgttttcgctctataacgaactcaccgtgcggcaaaaccttgagttacatgcccgtttgtttcacatcccggaagcggaaattcccgcaagagtggctgaaatgagcgagcgttttaagctcaacgacgttgaagatgttctgccggagtcattgccgctcggcattcgccagcggctttcgctggcggtggcggtgattcatcgcccggagatgttaatcctcgatgagcctacttctggtgtcgatccggtggcgagggatatgttctggcagttgatggtcgatctctcgcgccaggacaaagtgactatcttcatctctacccactttatgaacgaagcggaacgttgcgaccgcatctcactgatgcacgccggaaaagtgcttgccagcggtacaccgcaggaactggttgagaaacgcggagccgccagtctggaagaggcatttatcgcctatttgcaggaagcggcagggcagagcaacgaagccgaagcgccgcccgtggtacacgacaccacccacgcgccgcgtcagggatttagcctgcgccgtctgtttagctacagccgccgcgaagcgctggaactgcgacgcgatccagtacgttcgacgctggcgctgatgggaacggtgatcctgatgctgataatgggttacggcatcagtatggatgtggaaaacctgcgctttgcggtgctcgaccgcgaccagaccgtcagtagccaggcgtggacactcaacctctccggttcccgttactttatcgaacagccgccgctcaccagttatgacgagcttgatcgtcggatgcgtgcgggcgatatcacggtggcgattgagatcccgcccaatttcgggcgcgatatcgcgcgtggtacgcctgtggaactcggcgtctggatcgacggagcgatgcccagtcgtgccgaaacggtaaaaggttacgtgcaggcaatgcaccagagttggcttcaggatgtggcgagccgacaatcgacacccgccagccaaagcgggctgatgaacattgagacgcgctatcgctataacccggacgtaaaaagcctgccagcgattgttccggcggtgatcccgcttctgctgatgatgatcccgtcaatgctaagcgcccttagcgtggtgcgggaaaaagagctagggtcgattatcaacctttacgtgacccccaccacccgtagcgaatttttgcttggcaaacagctgccgtacatcgcgctggggatgctgaactttttcctgctctgcggcctgtcggtgtttgtgtttggcgtaccgcataaaggcagtttcctgacgctcaccctggcggcgctgctgtatatcatcattgccaccggaatggggctgctgatctccacctttatgaaaagccagattgccgccattttcggaacggcgattatcacgttgatcccggcgacacagttttccgggatgatcgatccggtagcttcgctggaagggcctggacgttggatcggcgaggtttacccgaccagtcattttctgactatcgcccgcggaacgttctcgaaagcgctggatctgactgatttgtggcaactttttatcccgttgctgatagccatcccgctggtgatgggcttaagcatcctgctgctgaaaaaacaggagggatga

SEQ ID NO: 487036 - DNA, 273 bp, Shigella sonnei
atgagaaccaaggtacaggctttacggaagaaaaaaaatacattggatcaaatatttaaaactcctgttcctcaagggatcaagtggtctgatatagagtcactggttaaagcattaggcggagaaattaaggaaggaagaggttcgcgttgtaagttcatactaaatatgagcgttgcgtgtttccatcggcctcatccgtcgccagataccgataaaggcgctgtagaaagcgtgcgtgactggttactaagtataggggtaaaaccatga

SEQ ID NO: 487037 - DNA, 360 bp, Shigella sonnei
atggaagagcgtactgaattgctgcgtgcgaacgaccacgaaggcttaaaagcactggaaaaacagtgtctggcacagaacgcgcaacacaaagactggcattgtactgaagagatgatggaactgacccgtgatggcgaagccctgtacatgcactgcctgccagctgatatcagcggcgtatcctgcaaagaaggtgaagtgactgaaggcgtattcgaaaaataccgtatcgctacctacaaagaagccagctggaagccttatatcatcgccgcgatgatcctgtcccgtaaatacgccaaaccaggtgcactgctcgagcaactgctgaaagaagcgcaagaacgcgtgaaataa

SEQ ID NO: 487038 - DNA, 912 bp, Shigella sonnei
atggaacaacgccacatcaccggcaaaagccactggtatcatgaaacgcaatccagtactgcggagtatgacgttctgcctctggtcccggaagccgcaaaggtcagcgatccctttctgctcgacgtgatccttgatgaagaaacgctggctcccttcctttcatggctggtccctgcgcgcgttcttgcagtggaattgttccctgaccagcttaccgtgacccgttcacagaccttcaccgcttatgaacgcttgtctacggccctgacggttgctcaggtttgcggcgtccagcggttatgtaactactattcggcgcgacttacgccgctccccgggcctgattcctccaggaaaagcaatcataggttggcacaaatcacgcaatatgcccgccaactggctagctcgccttctattatcgacaaccgatcgcgccagcatctgaatgacgtcggtcttactgcctgggactgtgtgatcattaaccaaatcattggttttattggctttcaggcgcggaccattgcgacatttcaggcttatctcgggcacccggtacgctggttacccggtctggaaatacaaaactacgccgacgcgtcactgtttgctgatgaatcaatacgctggcgaagcagctatgaggtggaaaaactacctgaagagtacacaaaaagttcaacagcagaactttgccaactggccgaaacactctctctccaccctatttcactttcccttctcgaaaggttgttaaacagtacacgggttaatacacagccggataataagcttgcggcgttgttatgcgcgcggataaatggcagtcctgcttgttttgccgcctgtatggattcatcaaatgaatataaaaatcagcccccttctgcgcaagggcgaaaatga

SEQ ID NO: 487039 - DNA, 258 bp, Shigella sonnei
atgaatataaaaatcagcccccttctgcgcaagggcgaaaatgaaattaaccaatgggctgaccgtcattctgttgagcacgctaccgttcaggcgatacaatggctgacccgagcacccgatcgctttagcgccgcccagttcagccctttactcgaacacgaaaaatcatcaacgcagattattaatctgctggtatggagcgggctgtgtggctggataaatcgcttaaaaatcgcgttgggtgagacatattaa

SEQ ID NO: 487040 - DNA, 144 bp, Shigella sonnei; identical to SEQ ID NO: 470873

SEQ ID NO: 487041 - DNA, 639 bp, Shigella sonnei
ttgattattttctttgccgcattggtggcagtgatatcgggtaccagttgcctctatctggtacgcagagtgattaatcgtggtattgtggagaaagaagccatcattaataaccattttgaacgcgtactggatggcgggcttttcttttcggctgccgatgtcaaaaaactctacagtatgtataactcggcgttcctggacgacctgaccaaagcaatgggcagaaaatcctttgacgaagatttaaaagcgctgccggaaaaaggcggttatttgtgcctgtttgacgtcgataaattcaaaaacattaacgacaccttcggtcatttgctgggcgatgaagtgttgatgaaagtggtgaaaatccttaaatcacagatcccggtagataaaggtaaaatctaccgcttcggcggtgacgaatttgcggtgatttatacgggtggaacgctggaagagttgctatcgattctaaaagaaatcgttcatttccaggtgggaagcattaatttaagtaccagtatcggtgtagcgcattcaaatgaatgtaccaccgtcgaacgcttgaaaatgctggcggatgagcggctgtataagagtaagaaaaacggcaggggtcagattagctggcagtaa

SEQ ID NO: 487042 - DNA, 465 bp, Shigella sonnei
atggatagccatacgctgattcaggcgctgatttatctcggttcggcagcgctgattgtacccattgcggtacgtcttggtctgggatcggtacttggctacctgatcgccggctgcattattggcccgtgggggctgcgactggtgaccgatgccgaatctattctgcactttgccgagattggggtggtgctgatgctgtttattatcggcctcgaactcgatccacaaaggctgtggaagctgcgtgcggcagtgttcggcggtggcgcattgcagatggtgatttgcggcggcctgctggggctgttctgcatgttacttgggctgcactggcaggtcgcggaattgatcggcatgacgctggcgctctcctctacggcgattgccatgcaggcgatgaatgaacgcaatctgatggtgacgcaaatgggtcgcagtgcctttgcggtgctgctgttctag

SEQ ID NO: 487043 - DNA, 1503 bp, Shigella sonnei; identical to SEQ ID NO: 469035

SEQ ID NO: 487044 - DNA, 1110 bp, Shigella sonnei; identical to SEQ ID NO: 486656

SEQ ID NO: 487045 - DNA, 2808 bp, Shigella sonnei
atgaagactcttgatatccgggtcgctttcagcgccgttgacaggctgacccggcctgccgaaaacgcccgccgcctgatggggcagtttggtgactccatccagcgaacgcagggggcgatcaaaaatctcgagcgtcaggcgcgttcatttgagcgcgcccgtgacgctgtcagtaaagcggatgcgggcatcgtgaaagcacgacgccagcttaacgcccttaatcagttacaacgcacgggtacagtgctcagcgaaaaacaacaaaagctgatgcagcagttaagcacccggcttgaacgcctgaatgaatcgcgcacacgggaaattcagaaaatgcgggaacttggcggagagctgaaacgccacggcatttccctgacaggcagcgataacaccatccagcaggccatcagacgcaccgaacagtacaacaaccagcttgaacgcgaacggcaggcgcttgcgcgtgtaacgcgggcgcgtgagcggtattcgcgcgcgcaggaaaccgcaggaaaactgaaaacaggtggtgcgctggcaattggtgcggcagcggctggcggctatgctgccgggcgttttttgcagcctgcgatcgggttcgggaaagagatgtcccgcgttcaggcgctgacgcgaatcgaccagaacagcccacagtttaaggcgctgcgtgagcaggcgttaaaacttggctctgaaacgcagttcaccgctggagatgccgccagtggacaggcatttcttgcaatggctggtttcacaccgcaggccattcaggctgcgcttcccggcgtgctgagcatggcaacggctggcggtatggacctcggcgagacggcggatattggttccaatatcctgacgcagttcggcctctctgctgaccagatggaccgggtcggtgacacacttaccgcagcgtttacccgtaccaacactgaccttcgcgcactgggcgaaaccatgaaatatgcaggtccggtggcgggtaagctgggaatatcgctggagcaggccgcagcgatggcgggcgtgctggcgaagatgggtatcagggggagtgatgcaggtacagcgttgcgtaaaagcctggccaatctgtcatcaccgccaaaggcagcggcagaagcactgaaagagctgggggtgtcagttgctgacgccaaaggcaaaatgcgcccgatggagaatgtgctggccgatctctataaagccacccgcaaatacggggaggttgaccgggtatcgttctttaaggacattgccggagaagaggctttcacatcatttatgggcctcgttgatgcggcaggtgacggcttcttagccaaactgagaaaagaacttgaaggcgcgcgcggtgaggcagaacgcacggcaaaggttatggccaataaccttgatggcaacctgaaatcactcggcagtgcatgggaaggtctgcgtattcgcatcagtgatctggttgacggtccgctgcgttctgtcacgcagtggctcacgcgggttgtctcaaaggtgacggcgctggcgcaggcccacccggcactgacgcgccagttactgatagcgggaggcgcactgctggcgacaacagcaacggttggttcgttgtctctggttattggggtgcttcacgggaagctggctacgttgcgtctcggtttttctctcctgaccgaatcaatgaatgttgtcagggttctgcctgcattatggggaatggtgacgggttccgtttctttacttggtggcgctatcggggcgctgttcagtccggttagtcttatcgtggctgcgcttgccggagctgccgttcttatctggaaatactgggatcccatcagggcattttttgccggggtgttcagcgggattatggaaaggctgaccccgttgcgcgaaacctttgaacggtttggccctgtttttgatgtcgtgcgcgatgggattattcaggtctttaactggtttaaatcgctgctgtcaccgatggagtccagcaaggaaacgctggataaatgtgccagtgctggcgagatattcggtaacgttcttggcggtgcgttacaacttgttctgacacctgcaaaaatgctactggatacgctggcgtggatacttgaaaaacttggcgtccttccggatgaagcggaaagggcgcgcaagaaaatcgaagacgcacagcgtgcggccattcttcaggacaaggttgccttgcttcagggggacctggcgaaaatcaatccgccgaagcctgtggaaaatggcaatggcaccggaggtgataaacccaaagacaacaaaccgctcacagacagcaataccgggacgctacgcagactcagtaaaattgctgataacacaggtaagctggttgatgagacgaaaaaacgcattggccccggcgatattgtctttaagaacctgccccgcgcacttgctgttcgtggggagtggcaggagcggaagattgcgcaggtcagtaagcctgcccccgcaattaatatcacacccgtggtcccggctccgctgcctccggcgctggtccctgttgttgcggccagctcccgcccggtggcggaggccatacgctctccagtggcatcagttcctgtaacttcccgtaaccgggagcctgttgcctccggatttggtggtgaaattcatgttcatctgcataacgttgttacgcagaatccccgcgaactggcgaaactggtcggtgaaatggtcagggcagaaatggaacggcgcgcccgtgccgggcgtggcagtttttacgataaagattga

SEQ ID NO: 487046 - DNA, 630 bp, Shigella sonnei
gtggaagttattggcactcgcggcgcaatgaccatacgcgttaccacgccgagcacgtccagcggtggcggaattactaacgctcaattcacttatattaatcatggtgatgcttacgctcctggctggcgacgagactacaacacgaaaaatcaacaacctgcatttgctttagggcaaacaggaagcactgtcggaaatgataaagctgttggctggaactggaatagcggggtctataacgcaaacattggtggcgcatcgacattaatcctccacttcaatatgaatacggggagctgccctgctgtacagttccgcgtgaattacaggaacggcggtattttttatcgttcagcgcgtgatggttatggctttgaagctgactggtcagagttttacaccacaacccgcaaaccctctgcgggagatgttggtgcatatacgcaggcagaatgtaactcaaggtttattacaggtattcgccttggtggtctgttatctgttcagacatggaatggtcccggatggtatgacaggtcaggttatgtcgttacgggttcagttaacggaaaccgtgatgaattaattgatacaactcaggcaaggcctgaggtgtactggcaatag

SEQ ID NO: 487047 - DNA, 1539 bp, Shigella sonnei
atggcttttgcctcattaattgaacgccagcgcattcgcctgctgctggcgttattattcggtgcctgcggaacgctggccttctctccttacgacgtctggcctgcggcgattatttcgttgatggggcttcaggcgttgacctttaaccgccgtccactccagtctgccgctattggcttttgctggggatttggcctctttggcagcggtattaactgggtctatgtcagcatcgcgacctttggcggaatgcctggcccggttaacatcttcctggtggtgctgctggcggcgtatttgtcgctgtataccggactgtttgctggcgtgctgtcgcgtctgtggccgaaaaccacctggctgcgcgtggcgattgccgcccctgctctctggcaagtgaccgagtttctgcgcggttgggtactgacaggcttcccgtggttacagttcggctatagccagattgatggcccgttaaaagggctggcaccgataatgggcgtggaagccattaacttcctgctgatgatggttagtggcctgctggcactggcgttggtcaaacgcaactggcgtccgctggtggtggccgtcgtgctgtttgccctacccttcccgctgcgttacatccaatggtttaccccgcaaccggagaaaaccattcaggtttcgatggttcagggcgatattccgcaatcactgaaatgggatggagatcagcttcttaatacgctgaagatttactacaacgcaacggctccgctgatgggcaaatcatcgttgattatctggccggagtcggcgataaccgatctggaaattaatcagcaaccgttcctcaaagcactggacggtgagttgcgcgataaaggtagctcgctggtaaccgggattgtcgacgcgcgtctcaataagcagaaccgctacgatacctacaacaccatcatcatactgggtaaaggtgcaccatacagctacgaatcagccgatcgctataacaaaaaccatctagtgccgtttggcgagtttgtcccgctggagtcgattctgcgtccgttagcaccgttctttgatctgccgatgtcgtcgttcagccgtgggccatatatccagccgccgctgtcggtaaatggtattgagcttactgcggctatttgctacgagatcattctcggcgagcaagtgcgcgataacttccgcccggataccgactatctgctgactatctccaacgatgcgtggtttggtaagtctattggtccatggcagcacttccagatggcgcgaatgcgtgcgctggagctggcgcgcccactgttgcgcagcaccaacaacggcattacggcggtgattggcccgcagggggaggttcaggcgatgatcccgcagttcacccgcgaggtgttgaccactaatgtgacaccgaccaccggactcacaccgtatgcacgtaccggcaactggccactgtgggtgctgacggcgctgtttggttttgccgctgtgttgatgagtctgcgagcacgtaaacgttga

SEQ ID NO: 487048 - DNA, 2103 bp, Shigella sonnei
atggctaacggttggacaggtaatatattaagagtcaatctcacgacaggaaatattaccctcgaagattccagtaagtttaaaagttttgtcggtggcatgggcttcggctacaaaattatgtatgacgaagtaccgccaggcacgaaacctttcgatgaagcgaataaattagtctttgctaccggcccattaactggatctggtgccccctgtagttctcgcgtaaatatcacctcactttctacttttaccaaaggaaatttagtcgtcgatgcccatatgggtggcttttttgcagcgcaaatgaaattcgctggatacgacgtcattattatcgaagggaaggcgaaatcaccggtatggctgaagattaaagatgacaaagttagcctggaaaaagccgatttcttatggggaaaagggacgcgcgcaacgacggaagaaatttgtcgattgaccagtccggaaacctgtgtggcggctattggtcaggctggggaaaaccttgttcctctctctggcatgttgaatagccgtaaccacagcggcggtgcgggaactggcgcaataatgggttcgaaaaacctgaaagcgattgcggttgaagggacgaaaggggtcaacattgccgatcgtcaggagatgaagcgtctcaacgattacatgatgactgaacttattggtgcgaataacaaccatgtcgtgccaagtacgccgcaatcgtgggcagagtattcagatcccaagtcacgttggacagcacgtaaagggctgttttggggcgcggctgaaggtggtccgattgaaacgggggaaattccgccaggcaatcagaacacggtcggctttcgtacctataaatccgtttttgacttaggtccggcggcagagaaatacacagtaaaaatgagtggctgccactcttgcccgatccgttgtatgacccaaatgaatattcctcgggtgaaagagtttggcgtgcccagcacaggtggtaacacttgtgtagccaactttgtccataccaccatcttcccgaacggtccgaaagattttgaagataaagacgatggtcgtgtgattggtaacctggtgggtctgaatctgttcgatgactacggcctatggtgtaactacgggcagttgcatcgcgactttacctattgttacagcaaaggtgtgttcaagcgtgttctgcctgctgaagagtatgcggaaattcgctgggatcaactggaagcgggtgacgttaacttcattaaagatttttactaccgtctggcgcatcgtgtgggtgagctgagtcacctggctgatggttcatatgccatcgcagaacgctggaatttgggtgaagagtactggggctacgcgaaaaataaactctggtcgccgtttggctatccggttcaccatgccaatgaagcgtcagcgcaggtcggttccattgttaactgtatgttcaaccgtgactgcatgacgcatacccatatcaactttattggttccggcttgccattgaaactgcaacgtgaagtggcgaaagaactttttggttctgaagatgcttacgatgaaaccaaaaactacacgccaatcaatgacgcaaaaattaaatatgcaaagtggtcgctgttgcgggtctgtttgcataacgccgtcaccctgtgcaactgggtctggccaatgaccgtttcgccgctgaaaagccgtaattaccggggcgatctggcgcttgaagccaaattcttcaaagcgatcaccggcgaagagatgactcaggaaaaattagatttagctgcagagcgtatctttacgttgcatcgtgcctacacggtaaaactgatgcaaaccaaagatatgcgtaatgaacacgatcttatctgttcctgggttttcgacaaggatccgcagatcccggtctttactgaaggtactgacaaaatggatcgtgacgatatgcatgcttcgctcacgatgttctacaaagaaatgggctgggacccacagcttggttgtccaacccgcgaaacattgcagcgtctggggctggaagatattgccgccgatctggcagcacacaatctactgcctgcgtaa

SEQ ID NO: 487049 - DNA, 786 bp, Shigella sonnei; identical to SEQ ID NO: 482305

SEQ ID NO: 487050 - DNA, 354 bp, Shigella sonnei
atggaaattaatgagtcgcgcaccgtcctgaaaacggaagacaacagctactcgtttgacgtttttattgatgcccgcggacagcgtccgcttaaagtgaaagatattcctttccctgggctacgcgagcaattacagaaaacaggggatgaaatccctgatgttggcgaagattatacgttacagcaacccgaagatattcgtggacgcgtagcgttcggcgcgttgccctggttgatgcacgaccagcctttcgttcagggacttacggcatgtgcagaaattggtgaggcgatggctcgggcggtcgtaaagcctgcatcccgtgctcgtcggcgtctttcgtttgattaa

SEQ ID NO: 487051 - DNA, 180 bp, Shigella sonnei
atgtggctggccgaaaatgaaggggtgaagttctggctcaatgtgctgactgaactgaaaaaacgcggttggtcgccctaccttttcatcaagccagtagtctgcccaccactgcatcatttctctgcgcttatcgagatactgagcatggttgtaaattcagctaacccagtgcgttga

SEQ ID NO: 487052 - DNA, 237 bp, Shigella sonnei
atggctggtttaaggaataacaacaacacacagaatgcacagtgggctgattatgtgggtgacattcttcggggggctcagccgataaaccagctagtacctcagcacccttatcttaacgacgtcccactcattgatgagttaaggcatcagaacactcatcatgttattctcttgacacttgatgttgcaaaaaaaaaaaaaaaaaaaaatactcagcccaataacatcatttga

SEQ ID NO: 487053 - DNA, 573 bp, Shigella sonnei
atgttttgcgaagaaaaagtagctcaaatggctgcatacctacttcttaagcgaggtgggcgcatggcatatctgaaattgatgaagctgctctatctgtctaaccgcaagtcgattttgaagcatggcaggatgatcggcgaagatagcctttactctatgaaatttggtccagtcatgtcgaatacgctgaacttgattcgtggtaaggctgaaggtattggtgactactggtacaacctgatagagacgaacgggcatgatgtgttgttgcgttcagatccgagggaaatggatgcagacgaggtctttgatgagttgagccgtgcagatatccggattttagatgaaatctattctctgtatgggcatatgaaccgatttgatctcgcaaacatgacgcatttagaaagcgtttgtccagagtggcacaatcctggcaattctcgtaagcctatagacctgaaagaaatgctgatcagtgagggtaaaagcgaggatgaggctaatcgtataattggcaaaatggaagaatctcagaaacttaaggaattttctttgcaattatcatga

SEQ ID NO: 487054 - DNA, 420 bp, Shigella sonnei
atgacggattatcagccatacaggaaaggaactgtgcttgccccaactgggccatgcaatcatcttcatgtgatttgtaatgatcctgtttattaccccgttaacgattgttattgtgttttagttgttaatatttctagtatcaaggatggtgtcccccacgatccgtcttgcgtcttgaattctggtgatcatcgctttatcaagcatccaagttatgttgtttacgctgaagctataatttggcgagtggataacatggttagaaagcagcgatcgggtgagatttccgttcatgatgatatgccagaagctacattcaatagaattctggacggttttgatatatctgatgaagttacgccaaagaaccttaaatttaaaaataaatattgcgtatcatctattgatgatgagtaa

SEQ ID NO: 487055 - DNA, 174 bp, Shigella sonnei
atggaagatcaaaaagcaaccaagccacaggttaagttcgacacaatgaaagcattcgcaggtatgggtgctgctgttgaagttctgatgaaggctgctcctaatgcgttcactcacgctactgtctctggtaaagagcagcagggtaagcttcgtcgtcgcaaagcagcatga

SEQ ID NO: 487056 - DNA, 282 bp, Shigella sonnei
atgaataccttgtttttactgatggctgaattcaataccccaaacattgaactctcagcagttagtcaaaaatactttggtatgagtccagccacagcagaagcaaaagcaaacgcttgtaagttgcctgtacctacatatcgcatcggtacatcacaaaaagcaaaacgttgcatcaatattcaggatcttgcggaatacatagacaaaagacgagaagaaggacgtatcgagtgggaacaggtcagaacaggcaaacagaagggcaaagaacatcactaa

SEQ ID NO: 487057 - DNA, 753 bp, Shigella sonnei; identical to SEQ ID NO: 25886

SEQ ID NO: 487058 - DNA, 825 bp, Shigella sonnei
atgtctcagaacttagacgcaaccgcaattaatcaaatccatgcccttatttctgctcagggtgttaatgaaattatcagtaagattggtgccgatgctgtggcattgcctgagaatttccgcattcatgatctggaaaaattaaatttaaatcgcttccgtttccgtggtgcgctttccactgccagcatcgatgactttactcgttattctaaagatcttgcagatgaaggcacccgctgctttatcgatgctgataatatgcgtgccgtcagtgttcttaacctgggtactattgatgaaccaggtcacgcagataacaccgccactctcaaactgaaaaagacagctccgttctctgctctgttgtctgttaatggcgagcgtaactcccagaagtcactggcagaatggattgaagactgggccgactaccttgtgggctttgatgctaatggtgacgccattcaggcaaccaaagcggctgcggcgatccgtaaaatcacaattgaagcgaaccagaccgctgattttgaagataatgacttcagcggcaaacgctccctgatggagtctgtcgaagcgaagaccaaagacattatgccagtggcatttgaatttaaatgcgttccgtttgaaggtctgaaagaacgtccgtttaaattacgcctcagcattatcactggcgatcgtcctgtactggttctgcgcattattcagctggaagcggtacaggaagaaatggctaacgaatttcgtgatctgcttgttgagaaattcaaagacagcaaagtagaaacctttattggtactttcaccgcctga

SEQ ID NO: 487059 - DNA, 363 bp, Shigella sonnei
atggctagcgaacgcagtactgatgtgcaggcatttattggggagctggacggcggcgtatttgaaaccaaaatcggcgcagttctcagtgaagtcgcttccggtgtgatgaacacgaaaaccaaaggtaaggtctcactcaacctggaaatcgaaccatttgatgagaaccgtgtgaaaatcaaacacaaactctcatatgttcgcccgactaaccgcgggaaaatttccgaagaagacaccaccgaaacgccgatgtatgtcaatcgcggtggtcgcctgactattctgcaggaagaccagggacaattactgactcttgccggtgaacctgacggaaaactccgcgcagcaggtcattaa

SEQ ID NO: 487060 - DNA, 675 bp, Shigella sonnei
atgaaaacagtccatgacatccggcggtctaacgccagaaaactgagagatggtgttggcgggaattcttcctttgccaccatgattgatcgcgagccaacccagaccagcaggtttatgggagatggtgcaactaaaaatatcggtgacagcatggcacggcacatcgaaaaatgtttcgacctgcctgtcggatggcttgatcaagaacaccagacaacgaacatcacaaaaaaacctgacgtttcaatcactaacaaacaaataacgttagtccctgtcatatcatgggtacaggccggagcatggaaagaagttggctattctgaggttgatttgagcacagcagaaacttatccctgccctgtaccctgtggcgaaatgacttatatcttgcgggtgattggtgattcaatgattgatgagtaccgcccgggagacatgatttttgttgatcctgaagtccctgcctgccacggtgacgacgttattgcattgatgcacgatacaggcgaaaccaccttcaagcggttgatagaagatggaacacagcgttatctcaaagcattaaacccaaactggcctgagccttacattaagattaacggtaattgctctataattggtacagtgattttctcaggaaaaccaagaagatacataataaaggcctaa

SEQ ID NO: 487061 - DNA, 201 bp, Shigella sonnei
atgaaagcgtattgggactctttaaccaaagaacagcagggtgagttggccggaaaagttggctcaacaccaggctacttacggctggttttcaatggttataaaaaagccagttttgtgctggctaaaaaacttgagcaatgcacgtcaggtgcaattacgaaatctgacttaagaccggatatctatccgaaagattaa

SEQ ID NO: 487062 - DNA, 552 bp, Shigella sonnei; identical to SEQ ID NO: 96295

SEQ ID NO: 487063 - DNA, 837 bp, Shigella sonnei
atgaacagtttaacggcaaataaccgtttgtcgcaacagctggtggtcagcgtcgctgaacacctgttgttacggcatgaatgcagattaccaaatcacctggctgtaagtaaccacagagaactttacctgactgtggggggcgagttgtgcaggaacttaaccgctggtttcgtgacggaagaggactttatgttcatgttattcgttgggagccagaaacacagcgcgttatctatcttcgcaaagactacccgcatgagtgctttagtcctttgtggaaattcaggcgtgattttgttgagtgtgaaggaccaccagcacattgattctgccattccgggacgttacactgttcaggcaccttataaagcgggtgccgggattggcgtcctggaattgatcaaggcgatatatgacgcgccagcgtcttttttatcgtccgcatttgctcacatcaaagttatggtgggctgggcgggggcatcgaaagatgcgccggtttccttgatcaccggttacgccaaccccgttcagttcaccaccagcgaaattggcgtttccggtggtggaagtatttcaccgatcaaggaggctgccatcatggctactgtcccagccctcactcgtctgaatgatgaagacttacataaactcagttatgtaacaactgcactacgtgctctgcgcaaggtaactctttcggatccgcaggcacatcaggttctggtagaaacccttcttaacttgcaagctgaacgtattcgtctggcggataaggctaattttcatattcaccgtctcctgaatatcagcggagggcatcgtcatgcttaa

SEQ ID NO: 487064 - DNA, 237 bp, Shigella sonnei
atgcttaatccgttgatcctcaatatttgccgtttgcttcagcgtaaaaaaatatcaattcctacagttgggcagtggtacaccacgcctgcagggcatgttctacgtgttagcctggttgaccgtgaatgccagaaggtgatttgtgaaccgctgggccgtaattaccgcgtcagtatgccgcttatagcctttcgctccggaaaaaacatgaagcatctcggaggtgcagcatga

SEQ ID NO: 487065 - DNA, 819 bp, Shigella sonnei
atgagtatggagctgatggttaaagcgatgaaaattcgagtgggtaatccattgcgaaaactggttctgatcaagctggctgataatgccagcgatcagggtgagtgctggcccagctaccagcatattgctgaccagtgcgaaattagcaaacgttctgtgatgaatcatattgcggccctttgtgagtccgggctggtaaaaaaagtcacccggaaaggtgaaaaaggtaactcaagtaatatctatctccttcatctggatggtgcaggagattcactagggggtagtgcaaataattcactatctggtgcagcaaattcaccaggtagtgcaggagttgcaccagggggtagtgcaggagattcacccagaaccagtcactcttttgaaccagtcaaagaaccagtcaatgaaccaatagctgttggtgcatcagttgatgagtccgtgcgagttcgttcaaaccgaccggaatactctccggagtttgagcaggcatggctggcatatcccaaacgtgctggtggcaattcaaaatctgcagccttcaaagcctggaaagcccgtttgaatgagggagtaaaccccgaaaccatgctggaaggtgtgaaacgctacgcgggatgggtatctgcgatgggtaacagcggcacacaatttgtgaaacaggctgtcacgttctttggtccggatcgtcatttcgaagaattctgggaagttcctgcggtatctgcagccagacgcgaggacccgtacttcaaagccagttacgacaacgtggactacagccagatcccggcaggattcagggggtga

SEQ ID NO: 487066 - DNA, 489 bp, Shigella sonnei
atgagtcttttgaatgaagttcagaaattcattgaagcccatccggggtgtacttccggagacattgcggatgcttttgcaggttactcacggcagcgcgttctgcagtcagcaagcaagttacgtcagagtgggcgtgtggctcaccgttatgaaggagatacacgcagacatttcccacgcctgactgagagagcgcaggagccggaaccacaaccagttcgtgaaaccagacctgtgcgcaatttctatgtcggcactaacgatccccgggtgattttgtgcctgacccgccaggcggaagaactggagtccaggggcttataccgtcgtgctgcaacggtgtggatggcggcattccgtgaaagccactcccagccagaacgaaacaattttctggcgcgtcgtgagcggtgcttacggaaaagcagcaagcgcgctgcatcgggtgaagagtggtatctgtcagggaattacgtgggggcttaa

SEQ ID NO: 487067 - DNA, 654 bp, Shigella sonnei
atgagtaataaatattgccaggcgctggtggagctgcggaacaaaccagcccatgaactgaaggaagtgggcgatcagtggcgcacgccggataacattttctggggaattaacaccctgtttggcccgtttgttctggatctgttcactgatggtgataacgccaaatgtgccgcttattacactgcggaagacaacgcgctggcgcatgactggtctgaacgtcttgcggagcttaaaggtgctgcctttggtaatcccccgtacagccgcgccagtcagcatgaagggcaatacatcaccggcatgcgttacatcatgaagcatgccagtgccatgcgtgataagggcggacgctatgttttcctgatcaaagctgccaccagcgaagtgtggtggccggaagatgcagatcatattgcttttattcgcgggcgtattggttttgaactgcctgcctggtttatcccgaaggacgagaagcaggtgccgacaggcgctttcttcgctggtgctattgctgttttcgacaagacctggaagggaccggcaatcagctacatcgggcgcgatgaacttgaggcatgtggtgaggcgtttctggcgcaggttcgccagcaggcggaaaaactggtcagggagatggcggcatga

SEQ ID NO: 487068 - DNA, 327 bp, Shigella sonnei
atgacgacgttaactcaatgccagcagcaggtgctggatatgctgatttcttaccagaaagaacgtggcttcccgccaaccaatcaggaggtggcaaccatgctgggataccgttcagtgaatgcagcggtggaacatcttcgcgcactggagaaaaaaggcgtcatcacgataaagcgtggcatggcccggggtatcactcttcataccgcggtgaaggacgacgacagcgaggcggtcgggattatccgctcactgcttgccggtgaggaaaacgccaggctgcgtgcaacccactggttacatgagagaggcctgaaagtatga

SEQ ID NO: 487069 - DNA, 390 bp, Shigella sonnei
atgaagctgatcctgcctttcccgcccagcgtgaacacgtactggcgacaccccaacaaaggggcatttgctggtaagagcctgataagcgcggcggggcgaaaatttcagagcgcggcgtgcgcagcaatagttgagcagttacgtcgtctgccaaaaccaacgtcggcacctgcttcagtggagatcgtgttgtttcctccggataaccggatccgcgatctggacaactataacaaggcgctgtttgacgccctgacccacgcgggggtgtgggaagacgacagccaggtgaaaagaatgctggtggagtggggaccggttatccagaaagggaaggtcgagatcactatcagtaagtatgagaaaccggcgggtgcagccgcctga

SEQ ID NO: 487070 - DNA, 810 bp, Shigella sonnei
atgaataatctgatggtcattgatggtattgaagttcgtcgtgatgcttatgggcgttacagcctgaacgatctgcacagggcagccgggggagaacaaaaaaaccgcccgaaatactggctctccaataagcaaacctgtgaattgattgaacaacttttcaccgagggtggaattccgcctctggaacaaaatcaaccagttagcgtcattaatggcggaaataaccaggggacgtatgtctgcaaagaactggtgtatgcctatgcaatgtggatcagcccgtcattccatctgaaggtgatccgtactttcgacatggtaaccagcgcaccggaaaaattatccggacaggctgctgacaagatgcaggctggcgtgatcctgctggactttatgcgccgggaattaaatctgtctaactcatcagtgcttggagcctgtcagaagcttcaggaggctgttggcttaccgaatctggcaccgcgctatgccattgatgctcctgctgacgcgcctgatggctcaagtcgccccacgctgtcgctgagtgcactgctgaagcagtatggtatccgcctgacggctaatcaggcatatcaccagatggtgaagctggggatcgttgaacaacgcgaacgatacagccgtaccgcgattaacaacatcaaaaaattctggtcgctgacggcgaaaggctgcatgttcggcaagaacatcaccagtcctgcaaatccgcgcgagacgcagccgcatttcttcgaatcccgattccctgagctgttaaagctgctcgataccgttcattga

SEQ ID NO: 487071 - DNA, 990 bp, Shigella sonnei
gtgagagcactactgacccctgaaattgccccgcgtatggggatcgtattgttcaggccaggttcagagctgatgcccctgtttatgcaggggcgtgttctgctggagcctgagccggaacgttattcatctttcgccagtggtgccgttccggcggcatcacaaccgctggcggatgatcctgccgttcgggccgtgttccgcaatgaggcagtgatccgtcgtgctggtggcgtggaatgtcttgaaagctggttacttcgtgaaaaaggctgccagtggcctcattccgactggcacagcgagaacatgaccacaatgcgacacgctccgggcgcaatccgtctgtgctggcactgcgataaccagctgcgcgatcagttcacggaacggctggaatcaatggcaacggataactgtgcccgctgggtgttgtctgttgtgcgtcgggatctcggttttgatgatagtcacgttgtgacaatgccggaactgtgctggtggctgattcgtaatgacctggcggatgccttaccggaaagtgcagcccgtaaggcactgagattaccaaagcctgttgtgccgtctgtcacccgggaaagtgaccttgtgccttcggttcctgccaccagcatcatccaggataaggcaaaaaaggtgctggcgctgaaagtggatccggagtcgccggagtcttttatgttacgcccaaaacgccgccgctgggttaatgaaaagtacacgcgctgggttaagacacagccgtgtgcatgttgtggaaagcctgctgatgatccccaccacctgataggccacggtcagggtggaatgggtacaaaagcgcatgacctctttgtgttgcctttgtgcagaaagcatcacgacgagctgcatgcggataccgtggcatttgaagagaagtatggctcccagctggagctgatatttcgttttatcgatcgtgcgctggcaattggcgtattggcgtaa

SEQ ID NO: 487072 - DNA, 753 bp, Shigella sonnei
atgaaccttgaagccttaccaaaatattactccccaaaatctccaaaattgagcgatgacgcaccggcgacaggctcaggtggtttaacgattacggatgtgatggctgcgcaggggatggtgcagtcgaaagcaccgcttgggtttgccttattcctggcaaaagttggtgttcaggatcctcaatttgcgattgaaggtctgctcaattacgcgatggcactggataacccgacattgaacaaattgagtgaagaaacccggttacagatcatcccttaccttgtgaattttgcctttgctgattattccaggtctgcggcaagtaaggctcgctgtgagcattgtgctggtactggatttcataatgtattgcgcgaagtggtgaaacactccagaagcggggaatctgttatcaaggaagagtgggtgaaggaactatgtcagcattgccatggtaagggagaagtcagcacagcgtgcagagggtgtaagggtaaaggtattgtcctggatgaaaaaagaacccggcttcatggtgtgcctgtttataagatttgtgggcgttgcaatggcaaccggtttagccgtttaccaaccacactggcgcggcatcatgtccagaaactggtaccggacctgacggattatcagtggtacaaaggatatgcagacgttattaataaactggttacaaagtgctggcaggaagaagcgtatgctgaatcgcaattgagaaaagtgacaagatag

SEQ ID NO: 487073 - DNA, 417 bp, Shigella sonnei
atgaaaaaggtattaatagcagcgataggtttttgtttagttggttgtgcaggtatgaaattacctgagtattcgcaagttaaagcaagtccgtattatacagattgccgtgcgtttgccatggatgtttataaaaatgatggatacagcaaaattgcgaaaactactatccttagcatggatgatgtgaaagctagatatattgtgacagggtgtgtagttgctatggggaaaaacactgtagaggaaatcaaagctgatctctctgctaaagggagttcttttgggcttatcagtggagcttgttctagtgcggcatgtcgggttgatgtagagcagcaaatgaacgcttatgtacttggtagttattatgctgcaaataaaaaattcccggataaaatgaaagcagagttttaa

SEQ ID NO: 487074 - DNA, 204 bp, Shigella sonnei; identical to SEQ ID NO: 4411

SEQ ID NO: 487075 - DNA, 1053 bp, Shigella sonnei
atgaaaaatactgtaaaaataaacagtgttgatttaatcaacgctgattgcctgcattttattcagtccctgcctgatgattccattgacctgattgttaccgatccgccttacttcaaggtgaaacccaacggttgggacaatcagtggaaaggggacgaagattaccttaagtggctggaccactgtctggcccagttctggcgggtgttgaaacctgccggaagcctttacctgttctgtgggcatcgcctggcatctgatattgagatcatgatgcgtgaacgtttcaacgtgcttaaccatatcatctgggcgaagccgtccggacgttggaatgggtgtaataaagaaagtctgcgcgcatattttcctgccacagagcgcgttctgtttgctgaacattaccaggggccatatcgcggcaaaagtgacggctatgcggcaaaagaaagggaactcaaacagcacataatggcaccgctgatatcgtatttcagggatgctcgtgccgaactgggtataacggcaaaacaaattgccgaagccacaggtaagaaaaatatggtttcccactggtttggtgccagtcagtggcagttgccgaatgaggctgactatcggaagttacaggcactgttttcccgtatagcggcagagaagtttcaggaacaacaactggaacaaccacaccaccagctggtggcatcttatgattcactgaatcgtaaatattctgaattgctggatgagtttaaatctctccggcgctatttctccgtatcagtctccgtgccttataccgatgtctggatgcataaacccgttcagttctacccggggaaacatccgtgtgagaaaccggcggatatgctcaggcaaataatcaatgccagtagtcgaccaggtgatctggttgctgatttttttatgggatccggttccacaataaaagcagcaatggcgctggggcgtcgggccttaggtgttgagcttgagtcagagcggtttaatcagacagtgaaagagataaacgagctggtggggaaataa

SEQ ID NO: 487076 - DNA, 216 bp, Shigella sonnei; identical to SEQ ID NO: 7411

SEQ ID NO: 487077 - DNA, 351 bp, Shigella sonnei
atgactcaaaactatgaactgattgtgaaagggatccgcaattttgagaataaagttacggtaactttagcgttacgggacaaaaaacgctttgacggtgaaatttttgacctggacatctcgctggaccgtgttgaaggtgcagcgctggagttttatgaggcagcagccagaaggagcatcagacaggtcttcctggatgttgctgccgggttatgtgaaggggatgagcagtcgccggaaaagcgccccgtaattttagatgcgcagaatgtttggataacctacaaaggaaagctaccaggaagaattactggttctctgaagactcctccggaatcacaaccttaa

SEQ ID NO: 487078 - DNA, 534 bp, Shigella sonnei
atgaacgcaaaaatcagatacggcctgtcggctgccgttctggcactgattgccgtcggtgcgcccgcgcctgatattctcgaccagtttctggatgaaaaagaaggtaaccacacaacggcataccgcgatgggtccggcatctggaccatctgtcggggtgccacgatggtggatggaaaacccgtttttcccggtatgaaactgtcgaaggaaaaatgcgaccaggtcaacgccattgagcgtgataaggcgctggcatgggtggagcgcaatattaaagtaccactgaccgagccacaaaaagcgggtatcgcgtcattttgtccctataacattggccccggtaagtgttttccgtcgacgttttataagcggctgaatgctggtgatcgtaaaggtgcatgcgaggcgattcgctggtggataaaagatggtgggcgcgattgccgcatacgttcaaataactgctatggacaggttattcgtcgtgaccaggaaagcgcattagcctgttgggggatagatcagtga

SEQ ID NO: 487079 - DNA, 468 bp, Shigella sonnei; identical to SEQ ID NO: 96309

SEQ ID NO: 487080 - DNA, 177 bp, Shigella sonnei; identical to SEQ ID NO: 3601

SEQ ID NO: 487081 - DNA, 2037 bp, Shigella sonnei
atgagtaccacaacacgaaaatttaaaaccattatcactgatactggtgccaaaaaattagctcaggcagccgcgtcagatggtaagcctgtccgcctgacacatatggccgtgggtgacggcggcggtactttacccacgccagacagcaagcagacccgtcttgtgcatgaggtgtggcgacataccgttaatcgcgtcaccctggacgcaacacatcagaaccacattattgcggagctggttattcctcctgaaacgggcggattctggatccgggaaattggtgtgtttgatgagcacggcgatttgatcgcggtaggcaatactgccgaaagttacaagccaaccgttgccgaaggatccggacgtgcacaaacatttcgcaccattctgaccgtatccagcactgccactgtggcgcttaccgtggataacaccatggtgatggccacagtgaattacgtggatgacaaactgaaagagcatgaacagtcacgacgtcacccggacgcctcgctgaccgcaaaaggccttgtccagctcagcaacgccaccaacagcacgtctgaaacgctggcagcgacaccaaaagccgttaaggcagtaatggatgaaacgaacaagaaagccccattaaacagcccggcactgaccggaacgccaacaacaccaactgcgcgacagggaacgaataatacccaaatcgcaagcacggctttcgttatggctgcgattgccgcacttgtagactcttcgcctgatgcactgaacacactgaacgagctggcggcggcgctgggcaacgacccgaattttgcgaccaccatgactaacgcgcttgcgggtaagcaaccgaaagatgccactctgacggcgctggcggggcttgctactgcggcagacaggtttccgtattttacggggaatgatgtcgccagcctggcaaccctgacaaaagtcgggcgggatattcttgcgaaatcgaccgttgccgccgttatcgaatacctcggtttacaggaaacggtaaacaaggctggtaacgccgtccaaaagacaggcgatatcttgtccggtgggcttacttttgaaaacgactcaatccttgcctggattcggaatactgactgggcaaagattggttttaaaaatgatgccgacagcgatactgattcatacatgtggtttgaaacaggcgacaacggcaatgaatatttcaaatggagacaccgcatcattggcacccggcctaaagacctgatgaatcttaaatggaatgctttgtctgttcttgttaaagcccttttcagcagtgaagtgaaaatatcgacagtcaatgcactgaggatatttaattcatcttttggtgccatttttcgccgttctgaagaatgcctgcatatcatccctacacgagagaatgagggagaaaatggtaatatagggccattacgcccctttacgcttaatctcagaactggccggataagcatggggcatggtctggttgttacaggagatatatttgcaaaccgttttgcaattaacagtagtaccggcatgtggattcatatgcgtgaccagaatgttattctgggccgtaatgcggtatccaacgatggtgcgcaggcattgcttcgccaggaccataccgaccgtaaattcgtaattggtgggctggggaataagcaatttggcatctacatgattaataactcaaggacagccaatggcaccgatggtcaggcgtacatggataataacggtaactggctttgtggtgcgcaagttattcccggcaattatggcaattttgactccagatatgtgaaagatgtccggcttggctcacagcaatattatggtgtgaataactggcaaacatggaatttccagtgcccttcaggtcatgtattgtctggtattaatgttcaggatacaggcaaaaactctgccgataatatagctggcgtttattacagacccgttcaaaagtatataaatggcacatggtataatgtagcgagcgtttaa

SEQ ID NO: 487082 - DNA, 1053 bp, Shigella sonnei; identical to SEQ ID NO: 486677

SEQ ID NO: 487083 - DNA, 1053 bp, Shigella sonnei
atgagcagaaaaaataaaaaagtgcgcatgagttcacgcattgatctcgctgatgcgctcaggaaagaatcgtcgctcagtgcattcacatttgatggtccttaccgcctgaccgggcatgacctgctggacaatatgtactgtgctgataacgggcggtggtatgaaaccccggtggactggtacggtctggcaagagctgcccggcaaacgtcctggcatcagtctgcgctttactttaagcgcaatgtattgctcggctgctatattccgcacccgctgctttcccggcaggatttctcggcgctggcgctggcgctggactggtttgtgttcggtaacgcattccttgagcttcgaagcaatatgctcggcgaaccgcttaaattacggcacgccctggcgaaatacatgcgacgcggaagcgatcttgaatcatggtggtatgtgcaggatggcaaggatgcgtttcagtttcgccctggcaaagtgtgccacctgatgaatcctgacattaaccaggaaatctacggcatgccggaatatctcggcgcattactctcggccagcctgtctcattcggcggacatgttcagaaaactgtattacgacaatggatcccacgccgggtgcatcatctacatcggtgcagcgcaggtaaaccgcgaaagcatggactccctgaaagaaacgttacagggtgcgcgtggtggtggtgcgtttaaaaacgtgctcatccatgcgcccaacgggggcaaagagggggtgcaaattttgccgttccagcagatcactgcaaaggatgagttcatgaatgttaaggcggcatcccgtgatgatgtgctggctgtgcaccgcgttccgccgcaactgatgggggcgatgccgggcgaaaaaagtgcgtttggtgatgtggagaaggccgcgcgggtttacgcaattaacgagctgatgcccgtcatggaggccatgaagcacatcaatgactggcttggcgaagaggtgatccgctttaacccttacgcactgttagacacccagcccacatcctga

SEQ ID NO: 487084 - DNA, 408 bp, Shigella sonnei
atgaacagaaaacagaaacaagagttgaaatacttcttacgtaaagaaattgccaggcttgaagatgcagagtcacaatcatcagaaattccgttcggaatggatatcaacgacgcccgtatgcttcaggcataccgtatagctcaggctgcactacagacaaaaccgttaaataacatacatgaaaagtatgattattttacggataccgcttgcttgctgacatcagaagaacaaaagatagcccaacttttaggcgacacatggaacctgtatttaacattgccagttgagcatccaatgggtagagatgaattttgccgggcaattcatcattgccaaaatatggtgttggcacgcccggccatcagggcgctggctaggaaggggcaaggctataaaagataa

SEQ ID NO: 487085 - DNA, 2304 bp, Shigella sonnei
atggggatgagtgcgttcccctctttcatgacgcaggcgacgccagcaacgcaaccactgatcaatgctgagccagctgtagccgcccagacggaacaaaatccgcaggtggggcaagtgatgccgggcgtgcagggcgctgatgcgccagtcgtggcgcagaacggtccttcgcgtgatgtgaagctgacctttgcgcaaattgcgccgccgccgggcagcatggtgctacgtggcattaacccgaacggcagcattgagtttggtatgcgcagcgatgaagtggtgacgaaggcgatgctcaacctcgaatacacgccatcgccatcgttactgcctgtccagtcgcagttaaaggtttatctcaatgatgagctgatgggcgtgctgccagtgaccaaagaacagttgggtaaaaaaacgctggcgcaaatgcccattaacccactgtttattaccgacttcaaccgtgtgcggctggagtttgtcggccattatcaggacgtgtgcgaaaacccggccagcaccacgctttggctggatgttgggcggagcagtggactggatctgacctatcagaccctgaatgtgaagagtgacctgtcacacttcccggtgccattctttgacccgcgcgataaccgtactaacaccttgccgatggtctttgcgggtgcgccggatgttgggctgcaacaagcatctgccattgtcgcctcgtggtttggttcgcgttctggctggcgtgggcagaacttcccggtgctctataaccaattgccggatcgcaatgccattgtctttgcaaccaacgacaaacggccggacttcctgcgcgatcatccggcggtaaaagccccggtgattgagatgattaaccatccgcagaatccttacgtcaaactgctggtggtgtttggtcgtgacgacaaagacctgttgcaggcagcgaaaggtatcgctcagggtaacattctgttccgtggtgaaagcgtggtagtgaatgaagtgaaaccgctgctaccgcgtaagccgtacgatgcgccgaactgggtacgtaccgatcgtccggtcacatttggcgaactgaaaacctatgaagaacagttacaatccagcggtcttgagccagcagcgattaacgtttcgctaaacctgccgccggatctctacctgatgcgcagtaccggcattgatatggatattaattaccgctacaccatgccgccggtgaaagacagttcgcggatggatatcagcctgaataaccagttcctgcaatccttcaacctgagcagtaaacaggaggcgaaccgcctgctgctgcggattccggtattacaaggtttgctggatggcaaaacggatgtctctattccggcgctgaaactgggcgcgaccaaccagctgcgcttcgactttgagtatatgaacccgatgccgggcggttcggtggataactgtattaccttccagccggtgcagaatcatgtggtgattggtgacgattccaccatcgacttctcgaagtattaccacttcatcccgatgccggatctacgcgcctttgctaacgcgggcttcccgttcagccggatggcggatctgtcgcaaaccatcaccgtgatgccgaaaacgcctaacgaagcacagatggaaacgttgctgaatactgttggttttatcggcgcacagacgggcttcccggcgattaatctgacggtgaccgatgatggcagcaccattcagggcaaagatgccgacatcatgatcatcggtggtatcccggacaaattaaaagacgataagcagatcgacctgttggtgcaggcgaccgaaagctgggtgaaaacaccgatgcgccagaccccgttccccggcattgtgccggacgagagcgatcgcgcggcagaaacccagtcaacgctgacctcttccggtgcgatggcggcggtgattggcttccagtcgccgtataacgaccagcgcagcgtgattgcgctgctggcagatagcccacgcggttatgaaatgcttaacgatgcggtgaacgatagcggcaaacgcgccaccatgttcggttcggtcgcggtgatccgcgagtccggtatcaacagcctacgtgttggcgacgtttattacgtaggtcatctgccgtggttcgagcgcttgtggtatgcgctggcaaaccatccgattctgctggcggtgctggcggcaatcagtgtgatattgctggcatgggtactgtggcgtctgctgcgaattattagtcgtcgtcgtcttaacccggataacgagtaa

SEQ ID NO: 487086 - DNA, 1413 bp, Shigella sonnei
atgaatgcgactgcagcccagacaaaatctcttgagtggcttaatcgcctgcgtgcgaatccgaaaattccattgattgttgccggttccgcggcagtggcggtcatggtcgcactgatcctgtgggcgaaagcccccgactaccgcacattattcagcaatctttccgatcaggatggtggcgcaattgtcagccaactgacgcaaatgaatattccttactgcttcagcgaagccagcggcgctattgaagttccggcagataaagttcacgaactgcgtctgcgcctggcacaacaaggtttgcccaaaggcggcgcggtcggtttcgaactgcttgatcaggaaaagtttggtatcagccagttcagcgaacaggtgaattatcagcgggcgctggaaggcgagctttctcgtaccatcgaaactatcggcccggtaaaaggggcgcgcgtacatctggcaatgccgaaaccgtctttattcgtccgtgaacaaaaatccccttctgcatcggtgacggtaaatctgttacccggccgcgcactcgatgaagggcaaattagcgccattgtgcacctggtttccagcgccgttgctggtctgccgccgggaaacgtcacgctggtggatcagggcggacatctgttaacccagtccaataccagcgggcgcgatcttaatgacgctcagttgaaatatgccagcgatgtcgaaggccgtattcagcggcgtattgaagcaatcctgtcgcctattgttggtaacggtaatattcacgcccaggtcacggcgcaactggacttcgccagtaaagaacaaacggaagaacagtatcgccctaacggtgatgaatctcatgcggcgcttcgttcacgccagcttaatgagagcgagcaaagcggttccggttatccgggcggcgtaccgggggcgttgtcgaatcaaccggcacctgcgaataacgcgccaatcagcacgcctccggcaaatcaaaataaccgccagcagcaggcgagcaccaccagcaatagcgggccgcgtagcacacagcggaatgaaaccagtaactacgaagtcgatcgcaccattcgtcataccaaaatgaacgtgggcgatgtgcaacgtctgtcagtcgcggtagtggtgaattacaaaaccttgccagacggtaaaccattgcctctcagcaacgaacagatgaagcaaattgaagatctgacccgcgaagcgatgggcttttctgaaaaacgcggtgactcgctcaatgtcgttaactcgccgttcaatagcagtgacgaaagcggcggagaactgccgttctggcaacagcaagcgtttatcgatcagttgctggctgccggtcgctggtggcgtggctgctgtggcggaaagcggtacgcccgcagttaa

SEQ ID NO: 487087 - DNA, 1098 bp, Shigella sonnei
atggcgtactataacatagagaaacgactaaaatccgatggcacaccacgctatcgctgtaatgtgattatcaaagaaaaaggtgttatcacttacagggaaagcaaaacattccctaaacatgctcatgccaaaacatggggcgcacagaaagtgatggaattagatctatatggcattccatcatcaaatgctgttgacggacttacagtccgtgacttactacacaaatatttaaatgacccaaatgccggaggtaaagcaggccgtactaaaagatatgtgctggaactgcttatggatagtgacatctccgcgatcaaactatctgaactgacagaaaatgacgtaattgaacattgcaggctaagaaacaacgctggtgcaggcccagcaacagtcagccacgatgttagttatcttggcagtgttctggatgcggcaaaacctgtatacggaatcaattacacatcaaacccggcgaaaagcgctcgtccatatctacttaaactcggtttgattggtaaatcaaaccgtcgtaatcgtagaccagcatctgatgaactgaacatgctcattgaaggccttcaacaacgatctactcataaatgctcaaaaattccgttcgttgatatcctcaaattttctgtgtggtcctgtatgcgaatcggagaagtatgccggttacgatgggaagatctcgaccaggaacaaaaatctatactagtaagagacaggaaagatccacgtaaaaaggaaggcaaccatatgaaagttgccttgcttggggaagcctgggatatcgtccagcgacaacccaaaaaatcagaattcatttttccatataacagcacttctgttaccgcaggatttcagagggtaagaagcaaattaggtattaaagatctgagataccatgatttgcgtagagaaggggcaagtcgcttatttgaggctggttttagtattgaggaagtcgctcaggttacagggcatcgttcattaaacgtgctatggcaggtatataccgaactgtatccgaaatctttacataatcgttttgaagaactccaaaggagcagaaataagacctcttga

SEQ ID NO: 487088 - DNA, 249 bp, Shigella sonnei
atgcgtattgaaatctgcatagccaaagaaaaaatgactaaaatgccaaccggtgctgtggatgcgttaaaggaagaattaacccgacgcatcagtaaacgttatgacgatgtagaagtgatcgtaaaagccaccagcaacgatggcctttctgttacgcgcaccgctgataaagattcagctaaaacttttgttcaggagactctgaaagatacctgggagtctgctgacgagtggtttgttcattaa

SEQ ID NO: 487089 - DNA, 168 bp, Shigella sonnei
atgcgcaagaggaaaaacctgccccatccctttgaattattacaatttaatgatcttaaagtcaatacaagtgaatggtgtccagagatgatgaacttaatgaacaaaccactcgtcagcagactcccaggtatctttcagagtctcctgaacaaaagttttagctga

SEQ ID NO: 487090 - DNA, 552 bp, Shigella sonnei
atgcatgacaatatttggtttacatataaagcacgtatccaagcgcaccatcgactagaatggcttgaaaaacactctcaatttatcctcgtttggtatgctatattgagtgcggtactttcaattgtaacgttgcgatttccaaaggttctaggagataatacagatgtcgttgcggcgatactttcagtggctctactgggtatttctctgatcgtatctaacctagattttcgtggtcgagcaatagccatgagaaggaattatattgcactacagcgactctattttgacattaccaccagtcaacagttatctcttgaacagaaagaaaaatattttaatttgctcaatgaggttgagaatcaccgtgacatagatgataaaatttcaagggtaactcaagttggacttaagacgaggatccccacacaaaaagaaaaaataattgttattttatggatattacttcgaatatttattactgccgcactttatatactcccattaatatatctttggattgactatgactgcaagcagaatttttaa

SEQ ID NO: 487091 - DNA, 1371 bp, Shigella sonnei
atgactgcaagcagaatttttaaaaagtcattctcgaaaaaaaatcttctaaaagtatactctgaaaaaatcaaagaatcaggagcgattggcatagatcggattcgcccatcaaaacttgatttgacaataaaaaatgagatcactttcatttttgaaaaggttaattctggcaattacaaatttacagcatataaagaaaaattaatatctaaaggcgctaactctacacccagacagatttccataccaactgctagggacagaattactcttagagctctctgtgaatgccttacggaaatatatcctaagtccagattaaaactaccacatacagtaattgactcattgaaagaagcattaaacaacagtctatatgctgaatatgcaaaaatagatcttaaaagtttctatccttcaattgaacataaattgataattaatgcaataaaaaataaaattagaaaaaaagaaattagacagttaataacatcatcattaatcgtgcctactgtaagtggaaccacaggaagcaaaggtatccctaataataccagaggagtacctcagggattagcgatatcaaacattttagctgaaatatcactatctaatttcgatgatgaaatcaataaaatgcatgacatatggtacatgcgatacgttgatgacattcttattttaacaccaaaatatcaagcaacaaaaatagcttctcatatcattgataagcttcaatcattaaatttaaacccacatccattaaatgaagagaactcaaaatccaaagtaggcagcttggatgaaagtttcaactttttgggctaccacataaaaaatcgagaattattgataaaacatgagagcattcttagatttgagtcatccttagcaaaaatttttactgcatatagacacgctctactacaagctaaaaataagcgcgataaagaacgagctgttgcatattgtcagtggaaactaaatcttagaattacgggatgtgtgtttgaaggtaaacgattgggatgggtatcgtacttctcacaaataacgtcaacagctcaacttcgagctgttaatcatacgatcaataatcttatccgccgattcggcctttcatcagaaataaaaccaaagtctttgattaaaactttctatgaactccgcaggggtagagcggagacttttaaatacatacctaactttgacaatctacatatatctcagaaacgagaaattgtttctatgtggatagggaaagagaatgaaaaaaaacttagcaatagtgaaatagagagaaaatttaaatttaaaattgcgaaatcagtaaaagagcttgaagaggacatttcagggatatcatag

SEQ ID NO: 487092 - DNA, 2034 bp, Shigella sonnei
gtggcgcttgaggatgcgagcacgacgaaaaaggggatagtacagctcagtagtgcgactaatagcacgtctgaaacgctggcggcaacgccaaaggcagtaaaagcagccaatgacaatgctgagaaacgtctgcagaaagaccagaacggcgctgatatacccgataagggacgcttcctgaacaacattaacgcggtcagtaaaacagactttgctgataagcgtggtatgcgttatgtgcgggttaacgctcctgcaggtgcaacatctggaaaatattaccctgttgttgttatgcgttctgctggctcagtaagcgaactggcatcaagggtcattatcaccacggcaacgcgaatcgcaggcgatccgatgaataactgcgagtttaacggatttgttatgcctggtggctggactgacagggggcgttatgcttatggaatgttctggcaatatcaaaacaatgaacgagccatccactcaataatgatgagtaataagggcgatgatttgcgctctgtgttctatgttgatggcgctgctttccctgtttttgcgtttctcgaagatggcctgtcaatatccgcacctggtgctgatctcgttgttaatgatacgacctataagtttggggcaacaaatccggcgactgaatgtatcgcggcggacgttatccttgattttaagagtgggcgtggtttttatgagtctcattcgttaatcgttaacgataacttgtcgtgcaaaaaactttttgccacagacgaaattgtagcgcgtggtggtaatcagattcgaatgataggtggggagtatggtgcattatggcgtaatgatggcgctaaaacttacctgctgcttaccaatcaaggtgatgtttatggtggctggaatacattaagaccgtttgttattgataacgcaaccggcgaactggttattggaaccaaactgtctgcaagtctgaacggtaacgcattgacagcaacaaagctgcaaacgccaagactggtttctggtgttgagtttgatggttccaaagatattactttaaccgccgcgcatgtggctgcttttgccagaagggcaacggatacatatgccgatgcggatggtggcgttccatggaatgccgaatcaggcgcttacaatgtcacccgctctggcaacagctatattctggttaacttctataccggagtcggaagttgccggaccttgcagatgaaggcgcattacagaaatggtggtctgttctaccgttcttcaagagacggttatggttttgaggaagactgggcagaagtttatacctcgaaaaatcttccaccagaaagctacccagtcggtgcaccaatcccgtggccatcagataccgttccgtctggttatgccctgatgcagggacagacttttgacaaatctgcctacccgaaacttgcagccgtttatccgtcaggtgtgatccctgatatgcgtggctggacgattaagggcaaacctgccagtggtcgggccgtattgtctcaggaacaggacggcattaaatcgcatacccacagcgccagcgcatccagtacggatttggggacgaaaaccacatcgtcgtttgattacggcactaaatccacgaataacactggtgcgcatacccatagtttaagtggcagcacgaatgcagctggtaatcacagccatagagatggccgtcgatttaaccccagtgtttttaaagatacttatcaatatggttatacaagctcaggtcaaaatacctggggtgtacaaggctcagtaggtatgtctacggggtggttagcgaataccagtacagatggtaatcatagccactcactgtccggcacagcagcatctgcaggtgcacacgcgcatactgtcggtattggtgctcatacgcactccgttgcgattggttcacatggacataccatcaccgttaacgctgcgggtaacgcggaaaacaccgtcaaaaacatcgcatttaactatattgtgaggcttgcataa

SEQ ID NO: 487093 - DNA, 738 bp, Shigella sonnei
gtggcgctgcccttcgctgcggacgcttgtctggtcgcctcatcttttgaagcagacgccgatgatgccgatgacgccgccgaactggcggacgatgcggcagccgtttttgaggattctgcgctggtctccgacgctttcgcgttcgtctccgatgtcttcgctgcggaagcagacctcgctgctgcactggcctgttcagtggcttcgccagccttcgttgtggctgttgaagcggacgatgcggcgctttctgccgattttccggcggcgctagcactggctgaggcctgcccggcacttgttgacgctgcactggcagacgacgcagccgctgtttttgagcctgctgctgcggaggcactctgtgctgctgccgtttcagaggacttagcgtttgtctcagacgtctttgccgccttcgcggaattgcctgctgccgttgccgaggaagcggcactactggcgcttgatgatgcgttcgtttctgatgatttcgctgcctcttttgaggccgccgcatcccgggctgaggtggctgcttctgacgccttcgtggtcgcggcggatgcagaagtggctgctgattgttgtgacgctgccgcattcgtttctgacgttttcgccgcagcggcactggtgaccgccgcgctttttgaggactctgcagcggcagcacttttttccgcttcagtggcctttgttgatgccgttcctgcgctggaagacgctgactga

SEQ ID NO: 487094 - DNA, 153 bp, Shigella sonnei
atgttgcagataatgttatttttgatacatacgcgttataaatatcaaaaacacaaaccagataaatatcttatcaatatacaacaaagtttgaattattcaatttatagcagcacaaccaaacgccaaaaaaataataaccaagagctataa

SEQ ID NO: 487095 - DNA, 276 bp, Shigella sonnei
gtggcttctgtttctatcagctgtccctcctgttcagctactgacggggtggtgcgtaacggcaaaagcactgccggacatcagcgctatctctgctctcactgccgtaaaacatggcaactgcagttcacttacaccgcttctcaacccggtacgcaccagaaaatcattgatatggccatgaatggcgttggatgccgggcaactgcacgtattatgggcgttggcctcaacacgattttacgtcacttaaaaaactcaggccgcagtcggtaa

SEQ ID NO: 487096 - DNA, 456 bp, Shigella sonnei
atgataaaacggacgttattagcggcggccatttttagcgcattgcccgcttatgccgggttaacttccattaccgcgggctacgattttaccgattattctggcgatcatggcaaccgtaatttagcgtatgctgaactggtggcgaaagttgaaaacgcaacgctgctttttaatctttcccaggggcgtcgtgattatgaaactgaacatttcaatgccactcgcggtcagggtgcggtctggtataaatggaataactggctgacaacccgaacgggtattgcctttgcggataatacgccggtctttgcccgccaggattttcgtcaggatttaacctggccctgttgccaaaaacgcttttcacgaccggttatcgctacactaaatattacgatgatgtcgaagtcgatgcctggcaaggcggcgtatcactctatactggcccggtga

SEQ ID NO: 487097 - DNA, 1473 bp, Shigella sonnei
atggtcgtggcttctggtgcctgggcggtaaagcggcaaaaaaactaccgtgaaaagtcggtggatgtggcgggttatgatgaacttgctgcctttgatgaggatattgaacaggaaggctctccgacgttccttggcgacaaacgtattgaaggctcggtctggccaaagtccatccgtggctccacgcccaaagtgagaggcacctgccagattgagcgtgcagccagtgaatccccgcattttatgcgttttcatgttgcctgcccgcactgcggggaggagcagtatcttaaatttggcgacaaagagacgccgtttggcctcaaatggacgccggatgacccctccagcgtgttttatctctgcgagcataatgcctgcgtcatccgccagcaggagctggactttactgatgcccgttatatctgcgaaaagaccgggatctggacccgtgatggcattctctggttttcgtcatccggtgaagagattgagccacctgacagtgtgacctttcacatctggacagcgtacagcccgttcaccacctgggtgcagattgtcaaagactggatgaaaacgaaaggggatacgggaaaacgtaaaaccttcgtaaacaccacgctcggtgagacgtgggaggcgaaaattggcgaacgtccggatgctgaagtgatggcagagcggaaagagcattattcagcgcccgttcctgaccgtgtggcttacctgaccgccggtatcgactcccagctggatcgctacgaaatgcgcgtatggggatgggggccgggtgaggaaagctggctgattgatcggcagattattatgggccgccacgacgatgaacagacgctgctgcgtgtggatgaggccatcaataaaacctatacccgccggaatggtgcagaaatgtcgatatcccgtatctgctgggatattggcgggattgacccgaccattgtgtatgaacgctcgaaaaagcatgggctgttccgggtgatccccattaaaggggcatccgtctacggtaagccggtggccagcatgcctcgtaagcgaaacaaaaacggggtttaccttaccgaaatcggtacggataccgcgaaagagcagatttataaccgcttcacactgacgccggaaggggatgaaccgcttcccggtgccgttcacttcccgaataacccggatatttttgatctgaccgaagcgcagcagctgactgctgaagagcaggtcgaaaaatgggtggatggcaggaaaaaaatactgtgggacagcaaaaagcgacgcaatgaggcgctcgactgcttcgtttatgcgctggcggcgctgcgcatcagtatttcccgctggcagctggatctcagtgcactgctggcgagcctgcaggaagaggatggtgcagcaaccaacaagaaaacactggcagattacgcccgtgccttatccggagaggatgaatga

SEQ ID NO: 487098 - DNA, 507 bp, Shigella sonnei
gtgaatatatcgaacagtcaggttaacaggctgcggcattttgtccgcgccgggcttcgctcactgttcaggccggagccacagaccgccgttgaatgggcggatgctaattactatctcccgaaagaatccgcataccaggaagggcgctgggaaacactgccctttcagcgggccatcatgaatgcgatgggcagcgactacatccgtgaggtgaatgtggtgaagtctgcccgtgtcggttattccaaaatgctgctgggtgtttatgcctactttatagagcataagcagcgcaacacacttatctggttgccgacggatggtgatgccgagaactttatgaaaacccacgttgagccgaccatccgcgatattccgtcgctgctggcgctggctccgtggtatggcaaaaagcaccgggataacacgctcactatgaagcgtttttccaatggtcgtggcttctggtgcctgggcggtaaagcggcaaaaaaactaccgtga

SEQ ID NO: 487099 - DNA, 1959 bp, Shigella sonnei; identical to SEQ ID NO: 236354

SEQ ID NO: 487100 - DNA, 522 bp, Shigella sonnei; identical to SEQ ID NO: 236356

SEQ ID NO: 487101 - DNA, 426 bp, Shigella sonnei; identical to SEQ ID NO: 236421

SEQ ID NO: 487102 - DNA, 813 bp, Shigella sonnei
atgcgttttctgccacccaatggttctcgcgccagtaaaccccgtttcgacctgcccagcgccgtgatgaacgcgttaaccttcggcctgcttatcactgcgttgagtggtttcgctcaggggcaatcgctgacgttaattgctgcggaactggtggtaatggttgttgttggtattttctttattcgccgccagctttctcttcccgtaccgctgctaccggtggatttactgcgtatcccgctgttttcactttctatttgcacatctgtttgctctttctgcgcacaaatgctggcaatggtttccctgcccttttacctgcaaaccgtgctcgggcgtagtgaagtcgaaacaggtttacttctgacaccgtggccgttagcaacgatggtgatggctccgttggcaggctatttgattgaacgcgtacatgcaggattgctgggtgctctagggttgttcatcatggctgcggggctttttcccctggttctgctgcccgcgtcacctgcggatatcaatattatctggccgatgatcttatgtggcgctggatttggcttgttccagtcacccaataaccacaccattattacctccgctcctcgcgaacgtagcggtggagccagtggcatgttaggaacggctcgtctactgggtcagagtagcggcgcggcactggtggcgctgatgctaaatcagttcggtgataatggtacgcacgtttcgctgatggctgcggctattctggcagtgattgctgcctgtgtcagtggtttacgtatcactcagccacgatccagggcataa

SEQ ID NO: 487103 - DNA, 744 bp, Shigella sonnei; identical to SEQ ID NO: 484615

SEQ ID NO: 487104 - DNA, 324 bp, Shigella sonnei
atgactagtctaaaaactagtattaagactatcacttatttaagtgatactggttgtctggagattcagggggccagtctaattatccacaaaagccgggaaacacagagctggctgaaggagaacccgaagttcagggtcatttatcagccggtttactcgccatgggtgaatcatgttgaacggctatggcaggcacttcacgacacaataacgcgtaatcatcagtgcagctcaatgtggcaactgttgaaaaaagttcgccattttatggaaaccgtcagcccattccccggaggcaaacatgggctggcaaaagtgtag

SEQ ID NO: 487105 - DNA, 519 bp, Shigella sonnei
atggatttagagggtgagaataaacataaatacagcgacggtacctatattgaaggtggcctggagatgaagtacggctcctggttcggcctgatttacggcgaaggctggaccgtgcaggccgaccacgacggcaatgcctgggtgccagaccatagctggggtggtttcgagggcggaattaaccgtttctatggcggttatcgtaccaatgatggcaccgaaatcatgctcagtctgcgtcaggattcctcgctggatgacctgcaatggtggggcgatttcacccccgatctgggctacgtcattcccaatacccgcgacattatgactgcgctgaaggtacagaacttaagcggcaactttcgttatagcgtcaccgcgactcctgccggacatcatgatgaaagcaaagcctggctacattttggcaaatacgatcgctatgacgacaaatacacctatccggcaatgatgaacggttacatccagtatgaccttgccgaaggcatcacctag

SEQ ID NO: 487106 - DNA, 882 bp, Shigella sonnei
atgatgcatgcctgtggtcatgatggacataccgccattgggcttgggctggcgcatacccttaaacaattcgagtccggactacatggcgtcatcaaactgatttttcagcctgcagaggaaggtacgcgtggcgcgcgggcgatggtcgatgcaggtgtcgtagatgatgttgattattttactgccgtgcacattggcactggcgtacctgcgggcaccgtggtgtgcggcagtgataattttatggcaaccaccaaatttgacgcgcacttcaccggtaccgccgctcacgcaggcgcaaaaccagaagacggtcacaatgccttgttggcggcagcacaagccactcttgcactgcatgcaatcgccccgcacagcgaaggagcttccagagtaaacgtgggcgttatgcaggcaggaagcggtcgtaacgttgttcctgcctcggcgttgctgaaagtggaaacacgcggggccagcgacgtcattaatcaatatgtttttgaccgtgcacaacaagcgattcagggcgcagcaaccatgtatggtgtcggcgttgaaactcgtctgatgggtgcagctaccgccagttctccttcgccgcaatgggtcgcatggttgcaaagtcaggcggctcaggtcgcgggggtcaatcaggccattgaacgtgttgaagcgcctgcgggttccgaagatgccacattaatgatggcccgcgtgcagcaacatcaagggcaagcctcctacgtggtgtttggcacacagctggcggcaggtcatcacaacgaaaaattcgattttgacgagcaggttctcgctattgccgtcgaaacgctggcgcgcaccgcgctcaattttccctggacgcgaggtatctga

SEQ ID NO: 487107 - DNA, 486 bp, Shigella sonnei
ttgccagtaacggcgattctcattcagttgtcggttcaggctctccgtcagcgcctgctcggcctttctgtagtcatccgtgttatatgttcctttctgctcactatcccgcctcaactgctccagctgttgctggtatttctggcgaagactcagttgtacctgatatcgctgccgctgctgatcacccatacccaccgtggcgatatccaggtcatgttgctgacgctgagcgcgctcttcttcagccagttgactggtcagctgaattgtttttttcttcagctcgttgagtgccgtctgtttctgaagctcctgctgttttacatccagcagcgtcagtgcctgaatcagttcatctttacgggccagcacactcttttcatctgccgtcagttttttcccgtccaggtcgctgatgcgctgctgcagagccagaagctgtttatgcgcttctgtcatcctttccgtggcaatgcctgctga

SEQ ID NO: 487108 - DNA, 396 bp, Shigella sonnei
atgcagctcattgtccagagccttcgcggcatttacaggatcatccttcagccgcttaaactgatttatggtatcgctgaccgactggccaaccgatcgctccatctgtgcggcagctctcgccaccataccgatatcgtttccacgaaatgcaccactccccaccacctgagccagcgcaccggctgcagcatgttgcgtaataccattcccggaaatagcacgactgagcgtccacagctgcccggcagtgactccggcataatgccccgtcagcgacaactggcggttaaattcttccccctccttctgaccgtcataccaggctttacccagaccatagacagccgcggcaataccgccaataaccccgcccagcatcatgcctttcggtga

SEQ ID NO: 487109 - DNA, 318 bp, Shigella sonnei
atgcggcttgcccgggagttccggcgggcagactggcggcggatgctgtcggaaatgtcggccactgagcttggtcagtggggcgattatttccggatgcagagcttcagtgatgtgtggatggatgcgcagtttgcctcgctgaaggcattgatcgtgagaatggtgtccggcagcagtgatgctgcggtggctgatttcagccttttaccggaagagaacgggataccggagcgaacggacgaagaactgatgcatcttggggaaggtatttccggaggtgtgcgttatggaccagatagccaacctggtcattga

SEQ ID NO: 487110 - DNA, 387 bp, Shigella sonnei
atgtttctgaaacaggacacgtttaattatgaaaaacagtccgtggtgctcagtgagctgtccgggctgcagagaattgaatatctgacgtttgttcagcagcgaacggcaaagtttgatgccggggagggagaactgccggaggctgaacgacagattgcttttctgcggatggggatggatatcaatgcctggctggtttcccgctcactgtggaatgcggaacagtctcaggatgttgagacgctttacgcatccgttattacaacatggtcgtatgatgccctgggtgcgggggcggagatggttctgtcgctgagcggtatgggggccattgataatgccggggatttggagcatgaggggctgacgccggaaaagtcctga

SEQ ID NO: 487111 - DNA, 744 bp, Shigella sonnei
atgaccacaccaaatccactggcaaaaacgaaaggtgcgggaacgacgttctggatgtataccggcaagggcgatgcgtttgcgaaccctttatcggacactgactggctgcgtcttgcgatggtgaaggatctgcaacctggcgaaatgaccgctgatgcagaagatgacacttatctcgatgatgaagatgcagactggaaaacgacaacccaggggcagaaatccgttggtgatacttcggcgacgctggcctggcgtccgggtgacagcgggcagaaaaaactggttcagttgttcgactccggtgaagtctgcgcgtttcgtatcaaatatcccaacggtactgttgatgttttccgtggctggctgagttcactgggtaaaaccattgcctcaaaagacgtgatgacccgcacagtgaaaatcagcggtgtggggcgtccgtatctggcagaggaaggcactgaaacagtgagcgttaccgggctgacggtggcaccggcatctgccagtgtaaaagtgggagcaaccaccacgctgacctttacagtaaaacctgacggagccagtgacaaagcgatcagtgtgcattcgacagatccacagactgccacggtgaccctgaacgggcttgtggccacggtgaaaggcgtgaagcagggcagtgtcagcattgtgggcatgaccgctgacgggaattttgtggcagtggctacggtgactgtcagcgcagcaggttaa

SEQ ID NO: 487112 - DNA, 402 bp, Shigella sonnei
atgaaccgacatacacaaatccgccaggtcgtactggcacgccttcgggaacagtgtggagacagcgccacgttttttgacgggcttccggcatttgttgatgcgcaggaactgcctgccgtggcggtgtggctgagtgatgctcagtacaccggaaaaatgacggatgaagatgactggcaggctgttctgcatattgctgtcttcatccgggcacaggcaccggattcagagctggatatgtggatggagagcaccattttcccggccttgaatgatgtaccagcactttccggactcatcgacaccctgatcccactcggttttaactatcaacgtgataatgagatggccacctgggcgatggcggaaatcacgtaccagatcacgtacacgaattaa

SEQ ID NO: 487113 - DNA, 579 bp, Shigella sonnei
atgaaggggcttgagaatgccatccgcaatctgaacagccttgatacccgtatggtgccacaggccagcgcatgggcgataaaccgtgtggcacagaaagcggtctcggttgccacccggcaggttgccgggaataccgttgcgggagataaccaggtgaaagggatccccctgaaactggtacgtcagcgtgtccgggtgtttaaagccagtccgtcaggaaaaatgacggccaggatccgcgttaaccggggcaatctgcccgccattaagctggggacagcccgggtcagactggcccggcgtggtggaaaactgcagtaccgtggcagtgtgctgaaggtgggtaaatatcttttccgggatgcgtttattcagcaactggcgaatggtcgctggcatgtgatgcggcgtattgatggcaaaaatcgttaccccattgatgtggtgaaaatcccgctgtccggaccgctgacacaggcatttgaagatgcccgcgaccgcatcattgctgcggaaatgccgaaacagctggggtatgcactgaaacaacaactgaggttatggctgacccgatga

SEQ ID NO: 487114 - DNA, 276 bp, Shigella sonnei; identical to SEQ ID NO: 4471

SEQ ID NO: 487115 - DNA, 324 bp, Shigella sonnei
atggcaaagaattttgtagaagaaggaaaaacggtggcgattgttgccagtgcagccatcagcagcggagatctggtgcaggtgggtgatgtttttgcggtggcactgaccgatattccacagggtgaaacaggcgacggcctgaccgaaggtgtgtttatgctgcctaagctgaaaacggatgacatgaaaacgggtaagaaggtttatctgaagtccggaaaagttcagctgactaacagcggctctgatccgctggtcggggttgtctgggcagatgccggaaccagtgcagaagaagtgccggtaaaactcaatgtctga

SEQ ID NO: 487116 - DNA, 2028 bp, Shigella sonnei
gtgccgcaacgaaacgacaggagccgcagcacaccgacgaccagtccgaagaataattcctggttcaggatgcaggctggtcaccagagtgacgcggatatttatatttatgacgagattggtttctggggtgttacagcgaagcagtttatcagtgatctgaatgcactgggcgatatcacccacattaatctccatattaattcaccgggtggcgatgtctttgaaggcatcgccatttttaatgcgctgaaaacacatggtgcgtccattaccgtttatgtcgacggtgtggcggcgtcaatggcgtcggtcattgcgatggtgggaaacccggtcattatgccggaaaacaccttcatgatgattcataaaccatttggctttacgggcggtgatgcggaggacatgcgcacctatgccgacctgctcgataaggttgaggcggttctgttacccgcttatgcacagaaaaccgggaaaaccaccgatgaaattgctgccatgctggcggatgagacctggatgtccggtgccgaatgtctggcacagggatttgctgatcaggtgacgccagccgttaaggcaatggcatgtattcagtcaaaacgtacagaggaatttaaaaagatgccggaatccattcgaaacatgattactccgccacgcaacagtgctccacgcgtacaggatgatgaacctgcagcctcccggacgccagtgcaggcagcagcacccgtggtggatgaaaacagtatccgtgcgcaggtactggcagagcaaaaagcgcgtgtaaacggtattaatgatctgtttgccatgtttggcgggcgttatcagacgctgcaggctcagtgtcttgccgatcctgaatgttcgctggagcaggcccgcgaaaagctgttgaacgagatggggcgcgagtccacgccatccaataaaaataccccggctcatatttatgccggaaacggtaattttgtgggggacgggatccgccaggcgctgatggcgcgtgccggatttgaaaaaaccgaacgtgataatgtctacaacgggatgaccctgcgtgaatatgcccgtatgtcactgactgaacggggtattggggtttccagttataacccgatgcagatggtcggtgcggcgttcacacacagtacgtctgacttcggtaatattctgctggatgttgcgaacaaagccattctgcagggctgggaagatgcccctgaaacctatgaacagtggacgcggaaaggtcagttgtctgattttaaaattgcccatcgtgtgggtatggggggcttcagtgctctgcgtcaggtgcgtgaaggggcggaatataaatacgtcaccaccggagataaacaggccactattgcactggcgacctatggcgagctgttcagtatcacccgtcaggccattatcaatgatgatctgaatatgctgaccgatgtcccgatgaaactgggccgtgcggcgaaatccactattgccgatctggtttatgccattctgacgtctaacccgaaaatctccacagataatgtaagtctgttcgataaagcgaaacatgcaaacgtactggatagcgctgcaatggacgtggcatcgctggataaagcccgccagttgatgcgcgttcagaaagagggggagcgtcatctgaatattcgtcctgcgttcgtactggtaccgacggcgatggagtctgttgctaaccaggtcattcgctcctcaagtgtcaagggggctgacattaacgccggtattattaacccggtgaaagattttgcgaccgttattgcagagcctcgtcttgatgataacagccagaccaccttctacctggctgcgtcaaaaggctccgatacgattgaagtggcttatctcaacggtgtggatacgccatatattgatcagatggagggcttcagtgtggatggcgtgacaacgaaagtgcgtattgacgccggtgtcgcgccagttgatcaccgcggtctggtgaaatgtacggcgtaa

SEQ ID NO: 487117 - DNA, 1509 bp, Shigella sonnei
atggcaattcttgatgatgtgattggcgttttttcaccaggatggaaagcggcaaggctgcgttcccgtgcggtgatccaggcttatgaggccgtaaaaacgacgcggacacacaaaggccggcgggaaaaccgaactgccgaccagttaagccagtacggggccgtgtcgttacgtgagcaggcccgttaccttgataacaaccacgatctggttattggtgtatttgacaagctggaagaacgggtggtggggaaaaacgggattattgtcgagccacatccggtattacgcaatggggccattgcccgtgacctggctgcggagattcgcacccgatggagtgaatggtctgtcagcccggaagtcaccgggcagtttacccgtccgatgctggaacgtctgatgctgcgtacctggctgcgcgatggtgaggtgtttgcccagatggtttccgggcgcataaacagcctgacgccttctgccggtgttcatttctggctggaggcgctcgagccggactttattcccatgaccagtgatgagagcaacaggctgaatcagggcgtgtttgttgatgactgggggcgtcccgaaaaatatctggtgtataaaagccgtcccgtatccggacggcagatggaaaccaaagaagtggatgcagagcgaatgctgcatcttaaatttgttcgccgtctgcaccagatgcgcgggacgtctttgttgtccggtgtgctgatccgcctcagtgccctgaaagattatgaagattatgagctgactgcagcaaggatcgccgctgctctggggatgtacatccgcaaaggcgacgggcagagctatgaaccggatggtaatggcagcaaggataaggaacgcgagcttaccattcagccaggcattatttacgacgatctgaaaccaggcgaagaaatcggaatggtgaagtcggatcgccccaatcctaaccttgaaacttttcgtaatggtcagttgcgtgccgtggcggcgggcagtcgtctgagtttttccagtacagcgcgcaactataacggcacttacagcgcccagcgtcaggagctggttgaatctactgatggctacctgatcctgcaggactggtttattggtgccgtcacccgcccgatgtatcgtgcatggctgaaacaggctgtggcatccggtgttatcaggctaccccgcgatcttgaccgttcttcactgtataccgcggtgtattccggaccggtgatgccgtggattgaccctgttaaggaggctgaggcctggaaaatccagattcgtggtggagcggcgacagaatcagactgggtacgtgcaggtggtcgtaatccggatgatgtcaaacgtcggcgcaaggccgaaattgatgaaaaccgcaagctggatctggtatttgataccgatccggccagtgataaaggaggcagcagtgccgcaacgaaacgacaggagccgcagcacaccgacgaccagtccgaagaataa

SEQ ID NO: 487118 - DNA, 213 bp, Shigella sonnei; identical to SEQ ID NO: 4467

SEQ ID NO: 487119 - DNA, 1794 bp, Shigella sonnei
atgacggaggaaaaagcccgcgaacactccaaaaaacgactcgccagaacgtttcgcgtcagcccggaagtggtcagtcgcctgagtccgaacaaaaatgacaacaacgtttatgacagaacattccttgctggtaactacctgaaaatcggctggccgtcagtcaatatcatgtcctcatcagattataaatgcgtcgcgctgacggattatgaccgttttccggaagatattgatggcgagggggatgctttctctcttgcctcaaaacgtaccacaacatttatgtccagtggtatgacgcttgtggagagttcccccggcagggatgtgaaggatgtgaaatggcgacggacttcaccgcatgaggctccaccaaccacggggatactgtcgctctataaccgtggcgatcgccgtcgctggtactggccctgtccacactgtggtgagtattttcagccctgcggcgatgtggttgctggtttccgtgatattgccgatcccgtgctggcaagtgaggcggcttatattcagtgtccttcctgttcaggacggattatgcctgaacacaaacgtgagctgaacggacgtggggtctggttgcgggatggtgaatccatcaatgcggatggcagtcgttatggtgatccccgacgctcacgtattgcgtcattctggatggagggtccggcagctgcttaccagacactctcgcaactcgtttacaaactgcttactgcagaacaggaatacgagacaaccggaagtgaagaaacactcaagacggttatcaataccgactggggattaccttatcttccccgcgccagcatggagcaacgaaaaagtgaactgcttgagcagcgggcagagccagttccttcccgcagtgtgccggatggcgttaatttccttgtggcgacagtggatgtgcaggcgggacgtcatcgccgttttgtggttcaggtaacgggctatggcagccgtggcgaacgctggattattgatcgttacaacatcacgcagtcattgcgcggtgacagcgacggggagagccagcgaattgatccggccagctatccggaagactgggatgtcctgctgacggatgtttttcataaaagctggccgctggcctccgatccttctcaacaaatgcgactgatggcaatggcggtggactccggcggtgaagacggggtcactgataatgcctataaattctggcgtcgttgccgtcgtgatggccttggtaaacgtatttacctgtttaagggcgacagcatccggcgcgcaaaactgatcacccgtacattccctgataacaccggacgaacgggccgacgggcgcaggccgcaggtgatgtgccgctctggcttcttcagacggatgcactgaaagaccgggtgaataacgcgttatggcgtgactcgccaggtcccggctatgtgcatttccctgactggctggggagctggttttacgacgaactgacgtatgaagagcggagcagtgacgggaaatggagtaagccgggtcgcggtgccaacgaagcttttgacctgatggtgtatgccgaggctctggtcattctgcatggatacgaaaagatccgctggccggatgcaccggagtgggcgagccgggaaacctggctggagtgtgtcccggacagtaccgaaccgtcaccctcaccggaaccggtatccacgcctgttaaaaaacaaaaacggaagaaaacagtaactgacgatgttaacccctggctgacttccggaggatggttatga

SEQ ID NO: 487120 - DNA, 381 bp, Shigella sonnei; identical to SEQ ID NO: 35582

SEQ ID NO: 487121 - DNA, 903 bp, Shigella sonnei
atgtctggaaatataggggcaaatccatcgcataccttttataacgattcattcagccataaagaacttggcgtaaccgtcggaggcctgaacaccgataccataaacagcgcggttaacgggcgttgggatgggcaatacggaaatgtctacgctaccgtatctgatagttatgaccgtaagaatcatgatcatctttcggcctttacgggcacttatagctctacgctggctgtcagttgctatggcgttaatttgggagccagtggtacagacgatttgctgggtgcggtactggtggatgtgaaaggcttctctgaacaggatgaagagagtcaggatctgcaactcgaagcgcgggtggcaggcagccgaactttgcagcttggtcaaagtgacagtgtgttgttcccttatcctggatttcagtctggttttgttgaggttaacgacagtagccagggcaatcagcaggggacaacaaacatcattaacggtgcagggaatcgtgaattaatgttgttgcctggcaagctgcgctatcgcgaagtgtctgccagctttaactacaactatatcggtcgtttattactgccggcagcggtgaaaaaattcccgattgtggggctgaacagcgccatgttactggtagctgaagatggaggatttacacttgaaattaacggcagcgaaaaagagctctatctgctttccgggcagcaattccttaagtgtccactgagtgttgtaaagaaacgcgccagcattcgttacagcggagatgttacttgtagtgtggtgacttattcacaattaccggagtcgattcaggttcaggcacagttgaaacagcctaaattacgtggaaacgttcagacggcgcaaagggaggttgcaccatga

SEQ ID NO: 487122 - DNA, 1482 bp, Shigella sonnei
atgatgaagaaaacgcccacctctacgaaagactccttacccaacaaggagatgaatgatttgccccggctggcgagcgcggtgctgccactgtgttcgcaacatcccggtcagtgtggtcttttccctctggagaaaagtctggatgcgtttgccgcccggtatcgtctggccgaaatggcagagcatacgctggatgttcagtattacatctggcaggacgatatgtcgggtcggttactgttttccgccctgttagccgcagcaaagcgtggcgttcgcgtccgtttgttgctggacgacaacaatacgcccggacttgacgatattttacgcttgcttgacagccatccccgcattgaagtccggctttttaatcctttctcgtttcgcttgctgcgtccgcttggttatatcaccgacttttcccgtctcaatcgccgtatgcacaataaaagtttcactgtcgatggcgtggttaccctggtgggaggacgaaatattggtgatgcctattttggggcaggggaagagccacttttttcggatttagatgttatggcaataggacccgtggtagaggacgttgccgatgatttcgcccgctactggtattgcaaatcggtttcacccttacagcaggtgctggatgtcccggaaggtgaaatggcggatcgcatcgagttacccgcctcctggcataacgatgccatgacgcatcgttacttacgccaaatggaatccagtccgtttataaatcatctggttgatggaacgttgccgcttatctgggcgaaaacacgtttattaagtgatgatccggcgaaaggggagggcaaggcaaaacggcattcactgttaccgcagcgcctgtccgatatcatgggctcacccagtgaacgcatcgatattatctcttcctattttgtaccgacacgcgcaggtgtggcgcaactcttacggatggtgagaaaaggggtaaagattgcgatcctaaccaattctcttgccgctaacgatgttgctgtcgtccatgccggatacgcgcgctggcgcaaaaaattgctccgctatggcgtggaattatatgaactcaagccgacgcgtgaacaaagtagtacgttacacgatcgcggcataaccggtaattccggagccagcctgcatgctaaaacttttagcatcgatggtaaaacggtgtttatcggctctttcaatttcgatccgcgttcaacattgctcaatactgaaatgggcttcgtgatagagagcgaaacgctggcacagttaattgataaacgctttattcagagccagtatgatgcggcctggcagctccgtctggacaggtggggacggatcaactgggttgatcgtcatgcaaagaaagagattattctcaaaaaagaacccgccaccagtttctggaagcgggttatggtcagactggcgtcgatattgcccgtggaatggttattgtaa

SEQ ID NO: 487123 - DNA, 342 bp, Shigella sonnei
atggcttcaaactggataaagctcgaggttattacgccggataagccggaaatattcaggcttgctgagattctgaatattgatccagatgccgcattagggaaggttattcgcttctgggcatgggcggatcaacaaatgatagacggtaatgcagattgtaacgctcgcggcgttacaaaaagtgcaatagatcgcatcacttttatgtctggttttgctgatgcgttaattcaggttggatggctggtcgaaaatgacggtgggctttctctacctaactttgaacgtcataacggaaaaagctctaaaaaaaacgggcggttacaaacgagcgagtaa

SEQ ID NO: 487124 - DNA, 600 bp, Shigella sonnei
atggcacatatacaactggtcaaacaaacctcttccggattacttctcccggcgacgccggagagttgcgattttctgcatcaaatcaaaataggtgagtggatacacgcagactttaagcatgtgtgtaactacgcattccacaagcgttttttcaaactcctgcaactgggtttcgattactggactccggtcggtggggcgatcacgcctcgcgaacgaaaactggtgtccggtttcgttgattacctgtgtgaatcagtaggccgggaacatacgccagctctgagcgaagccgcagagcaatatctgaatacagttgcgacacgcagaaccagtgatacggcattgctaaagtcgtttgaggctttccgcgagtgggtagccattcaggccggattttacaccgagcatttttatccggacggtagccgtgggtgtcgggcgaaatctatcgcgtttgcgaatatggacgaaaccgagtttcagcaggtttataaatctgttctgaatgtgctgtggaactggattctgttccgtaaattttcctctccggaacaagtcgaaaatgtggccgcgcagctgctggagtttgcgtaa

SEQ ID NO: 487125 - DNA, 291 bp, Shigella sonnei; identical to SEQ ID NO: 485715

SEQ ID NO: 487126 - DNA, 423 bp, Shigella sonnei
gtgctggtcgccagtagcgcggtgaccaaagatcatattctgctggcagccgatgtgcgcctggcgctgcggcgcagcattacccatccgttcgttcgcaagcaggagctgacggtgtataccctgaataatgagctggaaaatctgctgactaacctagtgaatcaggcgcaacagggcggtaaagtgatgctcgacagcgtgccagtggacccgaatatgctcaaccagttccagagcacgatgccacaggtgaaagagcagatgaaagcggcggggaaagacccggtgctgctggtgccaccgcagctgcgccctttgctggcgcgttatgcaaggttgtttgcgccggggctgcatgtgctgtcgtataacgaagtgccggacgagctggagttgaagattatgggggcgttgatgtaa

SEQ ID NO: 487127 - DNA, 189 bp, Shigella sonnei; identical to SEQ ID NO: 463227

SEQ ID NO: 487128 - DNA, 861 bp, Shigella sonnei; identical to SEQ ID NO: 5314

SEQ ID NO: 487129 - DNA, 558 bp, Shigella sonnei; identical to SEQ ID NO: 7707

SEQ ID NO: 487130 - DNA, 3006 bp, Shigella sonnei; identical to SEQ ID NO: 10984

SEQ ID NO: 487131 - DNA, 684 bp, Shigella sonnei
atgacgcaaatcgaatcgaccgtgaccagcctgcaccgtgaggctgaagcacagttccggcctgaactggaaaaaatcgtcaggggtatcgaaacaggttttcgtggtacggccctgtatgccacagaaaatattgccggacgtatcaatgcccgcctggaggacgagggcttcactgtaaaaatcactttcccggcagtcagccagttacagaccaggatcgcggtaaaaacaaatctgagtgcgcttatggaggaaagaactgagacagtcacccgtcgccgtcggcagagtggtttctggggaaagatttgtggagcgtttggcaccagtgactggggctgggaaaactataaggagaatgtgagccgcagtgtgatcaatatcaactcggtcaggaaggaagtgatgtcactgacccgggcatatttcggggagttgcaggcatccattgagcagaatattaaccagcccgtccgccaggagatcgatgattttttctgtacattcagggaaaaagtcgaacagctacgtaacacactcattcagagctctgaagatcataaacgcgatcagcaggcacaggagcagcttacggagcgccttcaggcattaaatgaaagggttcccgagctgattactgacagtaaggcgttaagggaagaactggagacactgctgtga

SEQ ID NO: 487132 - DNA, 1566 bp, Shigella sonnei; identical to SEQ ID NO: 477306

SEQ ID NO: 487133 - DNA, 420 bp, Shigella sonnei; identical to SEQ ID NO: 19219

SEQ ID NO: 487134 - DNA, 315 bp, Shigella sonnei; identical to SEQ ID NO: 461090

SEQ ID NO: 487135 - DNA, 420 bp, Shigella sonnei
atggaaaaagaaaacgaaaaaattgccgctagtaggctcaatgacaaaattgcaatgcgtcttaaagagcgcaggcagaagcttggtttatctcaaggaaaacttgctgaaatctgcggatggacgcaatcgcgtataggtaactatgaggcgggcagcagaaatgttggagtacatgacgctgtcgtattgggaaaggcacttggcatatctcctcctgagctcctctttggagaacaggaatcttctgaattgtggttaaatgaatcccaacgaaaacttcttgagttgtttaaccagctaccgggctcagaacaacaacgaatgattgagctatttgaagtccggctaaaagaaatcgatgagtatgtagaaaaatatttgagaggcaggattaaagataatcccccaccggaataa

SEQ ID NO: 487136 - DNA, 243 bp, Shigella sonnei
atgaacaaaatttcaacatatcgaaaacagcttgggctgtctcaaagacaacttgctgttcagttagggtggatacaaagccgactggcaaattacgaagcaaattttcgtacccctggactagaggagtgcagaaaaattgtttctacccttaatcggcttggcgctcattgtggacttgacgatgtattccccccagacggtaagcatagcgaaaacagcataggagcggttgattcatga

SEQ ID NO: 487137 - DNA, 423 bp, Shigella sonnei
atgaaaatcaggcatgagcacatcgaatcagtgttgttagccctggcagccgaaaaagggcaggcgtgggtcgctaacgcaattactgaagaatatctgcgccaggggggcggcgaattgccccttgtaccaggcaaggactggaacaatcagcagaatatctatcaccgttggttgaaaggtgaaacgaaagcgcaaagggaaaaaattcagaaactgatccctgcggttctggcaattcttccgcgcgagctgcgtcaccgactctgcatcttcgataccctggaacgccgtgcattactggcggcgcaggaagcgttgagtacggcaattgatgcgcatgatgatgcagtccaggccgtttaccggaaagcgcatttcagcggcggcgggtcttccgacgattctgtcattgttcattaa

SEQ ID NO: 487138 - DNA, 1200 bp, Shigella sonnei
atgctgtttgtgcttattctaagcaaccgggcagcatcatacggggcaattatggccgcattaccatacatgcaactgtacatagctgattacctggctgacaccatgcatttgtcagcagaggagcacggcgcgtatttgttgctgatgttcaattactggcaaacaggaaagccaatacccaaaaacaggttggcaaaaattgcccgtctgactaacgagcgatgggttgatgttgaaccatccttgcgggagtttttttgtgataacggcgacgaatggatgcatcttcggattgaggaagatctggcatctgtcagagaaaaattaaccaaaaaatcagccgcaggaaaagcatctgttcaggccagaagaagcagaaaggaagcagatgttcaaacaaaacaagagagaaatttaacaggtgttcaaacagatgttggagtgatgttcgaacatgatgccaacacaaaggcaactaataaagatacagataaagatctaaaaacagatctaacccatcccaaacccttcccttccggaagggagtttcgggattttgtggctggagtgcttgaggggagattatctggcggtactgcagcggaattttgtaattctgcggtggttgcgttgcaggctgctggcctggatgtctgtcgtgagtatccggtgccagagcgtggtgacggttgcggagggcggattgatatcgtcgtgactgacaggaacggtgtccggtgtgggagcgagcttgaccgaaattctccgcgacagaaatcactgctcaaaatcggtgctgttgaaaccgggatatgtgtcttgcggcgcagtgatatcgcaaggcacaccgagcagggaattctggttatcggtggggctgttcgccagaaaaaatttgacccgttgtcagttgatctgcccgactggttgccagaaacactctggcatgagtgggtccagttcaggcaggcattgcgaaaaccgattcgaacggagcagggcgctaacggggcgatacgggaactggaaaaattccgtcagcagggttttacacctgagcaggtgattcgacacagcatcgccaatgaataccagggtctgttcgcgccgaaaggtgttcggcctgagacgttgctccgacaggttaacaccgtctcgttgccggacagtgcgatcccgccaggcttcagggggtaa

SEQ ID NO: 487139 - DNA, 747 bp, Shigella sonnei
atgaaaaatattgcgacaggaggcgttctggagcgtatccgcagactgaccccaccacatgtaaccgccccattcagaacggttgcggagtggcgcgagtggcaacttgctgaaggccagaaacgttgcgaggagatcaaccgcctgaatcgtcagttgcgggtggaaaaaatcctgaaccgctccggcatccagccgttgcaccggaagtgttcgtttgcgaattaccgggcgcagaacgacggtcagcgacatgcactgagtcaggcgaaatccatagctgacgaactgatgacaggctgtacgaattttgtgttcagcggtaagcccggcaccggaaaaaatcatcttgcagacgcgattggcaaccggctgatggcgaaggggcgtagcgtgattatcgtcaccgtgtccgatgtcatgagcgtgttgcatgagagctacgacaacggcaaatccggtgaaaaatttttacaggagctttgtggtgttgacctgctggtcctggatgaaattggcatgcagcgggatacgaaaaacgagcaggtggtactgaaccagattgttgatcgccggacggcatcgttacgcggtgtggggatgctgacaaatattaaccatgcagcgatgaatacacttctcggcgagcgggtgatggatcgcatggtcatgaacggcgggcgctgggtgaattttaactgggagagctggcgtccgaatgttagccattcgagggttgttaagtag

SEQ ID NO: 487140 - DNA, 417 bp, Shigella sonnei
atggcgaaaccttttactcccgaacagcgggaagaactgaagacgcgaattgtggaactcgtgcatcaggacggtcgggtcacgattcggcagttgtcagatgaaacaggtatcagtcgtgcgtctgtcggtcgcttatgcatggaactggtcgcaagtggtgatgtatataattctggctacggggtatttccctctgaacaggctcataaagactggcaaaactcccgcaaaaagctatcgagggtaaaggtgaagaaaccggttgtggttgatcctgaccttatctggtcattaccagacggagaaatacgccgctacgacaggcgcctgaatataatctgtcgcgagtgccggaagagcgaagctatgaggtgtactggcaatagcggacactaccatttgttctttttttaa

SEQ ID NO: 487141 - DNA, 738 bp, Shigella sonnei
gtggcgctgcccttcgctgctgacgcctgtctggtcgcctcatcttttgaagcagacgccgatgatgccgatgacgccgccgaactggcggacgatgcggcagccgtttttgaggattctgcacgggtttccgacgctttcgcgttcgtttcggatgtcttcgctgcggaagctgacctcgctgctgccgtggcctgctcagtggcttcgccagccttcgttgtggctgttgaagcggatgatgcggcgctttctgccgattttccggcggcggtggcactggctgaggcctgcccggcacttgttgacgcggcgctggcagacgacgcagccgctgtttttgagcctgccgcagctgaggcactctgtcccgctgccgtttcagaagacctggcgttcgtctcggacgttttggccgccttcgcagaatttgcagccgccgtcgccgaggaagctgcgctactggcgcttgatgatgcgttcgtttctgatgattttgccgcctcttttgaagccgacgcatcccgggctgaggtggcagcttctgacgctttcgtggtcgcggtggatgcagaagtggctgctgattgttgtgacgctgccgcattcgtttctaacgttttcgccgcaccggcactggtagccgccgcgctttttgaggactctgcagcggcagcactttttgaggcttcagtggcctttgttgatgccgttcctgcgctggaagacgctgactga

SEQ ID NO: 487142 - DNA, 189 bp, Shigella sonnei; identical to SEQ ID NO: 463227

SEQ ID NO: 487143 - DNA, 543 bp, Shigella sonnei
atgctgaaacgcccgcatggcaccgtttttccagtcgccctgcgccacttccagttcctgccagtagcgtttgttttcattcagttgtcgcttcaggctccccttcagcacctcctcagccctccggtagtcctccgtcccgtaagtgcctttctggcgactgtcattctcaagctgttgcaactgttgccggtattcctgccggatgcgcaactgtgcctggtagcgctgccgctgcttatcccccatacctgcagtggcaatatccagattgtgctgctcacgcagtgcacgttctttgtctgccagctggctggtcagctgaaccgttttttttctcaggtcgttaagcgctgtctgtttctgcagctcctgctgtttcacatccagcagcgtcagcgcctgaatcagctcattcttacgggtcagcacactcttttcatctgccgtcagctttttcccgtccaggtcgctgatgcgctgctgcagggccagaagctgtttatgcgcttcagtcatcctttcagtggcaatgcctgctga

SEQ ID NO: 487144 - DNA, 1836 bp, Shigella sonnei
atggaccagatagccaacctggtcattgatttggggattgatgcggcagagtttaaaaatgaaattccccgtatcaaaaaccttctgaatggtgcagccagcgatgcagaacggtcttctgcccgtatgcagcgttttatggagcgtcagactcaggcggcccggcagacaatgcaggcggcttcttcggctgcaacagcagcatcagcccatgcgcagacggtggaaaagaacgcacgggctcatgaacgcatggcccgtgaggtggaacaaacccgtctgcgcgtggatgccctgaatcagaaaatgctcgaggaacaggcgcaggccagggcactggcggaggcgcaggataaagcggctgccgccttttatcgccagattgacagtgtgaaacaggccggtgcggggcttcaggaattacagcgtattcagcagcagatccgacaggccagaaacagtggcggggttggtcagcaggattatctggcgctgatttcggagatcacggcgaaaacccgtgccctgacgcaggcagaggaacaggccacccggcagaaagcggcgtttatccgccagcttaaagagcaggcaacccgccagaatctgtcgtcttctgagttgcttcgcgccagggcggctcagctgggggtaagcagtgctgcagaagtgtatatccgcaaaatggagcgggcaggaaaagccacacattcgctggggctgaaaagtgcggcagcccggcgggagctgggggtgttaatcagtcagatggcgcgcggcaattttggtgcgctgaggggatccgggataacgctggctaaccgtgccggatggacaggcgcactgatgtcgccgaaaggcatgatgactggcggcgttattggcggacttgtcgcggcggtcctgggtctgggtaaagcctggcatgacggccggaaggagggcgaggaatttaaccgtcagctggcgctgacgggacattatgccggtgtcactgtcgggcagttgtggaaactcagccgggccatatccgggaatggtatcacgcaacatgcggcagccggtgcgctggcacaggtggtgggcagtggggcatttcatggaaacgatattggtatggtggcgaaagctgccgcacagatggagcgatcggttggccagtcggtcagcgataccataaatcagtttaagcggctgaaggatgatcctgtaaatgccgcgaaggcgctggacaatgcgctgcattttttgactgccactcagcttgagcagatacgcgtccttggggagcaggggcggtccagtgatgcggcccggatcgccatgtctgcgctggcagaggaaaccggtaaacgcacatctgatattgataataatctcaatgcgctgggtagtacgctgcaaaccttgtctgactggtggaagcagttctgggatgcggccatgaatattggtcgtgaagactcgctggatgcgcagattgatgcgttacaggaaaaaattcagcgcgcgaaaaaatatccgtggacaaacgcctccacacaggtggagtacgatcagcagcgtcttaacgatcttcaggagaaaaaacgccggaaggatttgcaggatgcaaaagcgcaggcagaacggaattaccaggagcaacagaaacgccggaatgctgaaaatgccgcgctgaaccggatgaatgaaacggaagctgcacgacatcagcgtgaaaatgaacgttacgaaaaagccattaagaaaaatacacgggcaacccgtaatgatgaggccacccggttattgctgctgccagacagtcagcaggcattgccactgaaaggatga

SEQ ID NO: 487145 - DNA, 318 bp, Shigella sonnei
atgcggcttgcccgggagttccggcgggcagactggcggcggatgctgtcggatatgtcggccactgagcttggtgagtggggcgattatttccggatgcagagcttcagtgatgtgtggatggatgcgcagtttgcctcgctgaaggcattgatcgtgagaatggtgtccggcagcagcgatgctgcggtggctgatttcagccttttaccggaagagaacgggataccggagcgaacggacgaagaactgatgcatcttggggaaggtatttccggaggtgtgcgttatggaccagatagccaacctggtcattga

SEQ ID NO: 487146 - DNA, 387 bp, Shigella sonnei; identical to SEQ ID NO: 463158

SEQ ID NO: 487147 - DNA, 717 bp, Shigella sonnei; identical to SEQ ID NO: 483199

SEQ ID NO: 487148 - DNA, 543 bp, Shigella sonnei
gtgaaaacgggggctgaagccatccgggcactggccacacagctcccggcgtttcgtcagaaactgagtgacggctggtatcaggtgcgcattgccgggcgtgatgcaggtgaaaccgaattgtctgcccgtcttaatgagccgctggcaaatggtgcagtgatccacatagtaccgcgtctggtgggagctaaaagtggcggtgtgtttcaggcggtgctgggggcggctgttatggcggttgctatatggatgccgggggtaggaattatggcgagtaatctgctgttttctctcggtgccagtatgacgcttggcggtgttgcacagatgctggcaccgaaagccagaactccccgtacacagacaacggataacggtaagcagaacacgtatttctcgtcactggataacatggttgcccagggcaatgttctgcccgttctgtacggtgaaatgcgcgtggggtcacgtgtggtttctcaggagatcagcacggcagacgaaggggatggtggtcaggttgtggtgattggtcgctga

SEQ ID NO: 487149 - DNA, 600 bp, Shigella sonnei
atggctccggaggactggctgcgggcacaaatgcagggtgagattgtggcgctggtccacagtcatcccggtggtctgccctggctgagtgaggctgaccggcggctgcaggtgcagagtgatttgccgtggtggctggtctgccggggggcgattcacaagttccgctgtgtgccgcatctcaccgggcggcgctttgagcacggggtgacggactgttacacgctgttccgggatgcttatcatctggcagggattgagatgccggattttcatcgcggggatgactggtggcgtaacggtcagaatctctatcttgacaatatggaggtgacgggtttttaccgtgtcgcactgacagaggcacagccgggcgatgtgctgctgtgctgttttggttcatcggtgccgaatcatgccgccatttactgcggtgacggcgggctgctgcaccatattcctgaacaactgagcaaacgagagaggtacaccgacaaatggcagcgacgcacacactccctctggcgtcaccgggcatggcgcgcatctgcctttacggggatttacaacgatttggtcgccgcatcgaccttcgtgtga

SEQ ID NO: 487150 - DNA, 699 bp, Shigella sonnei
atgcaggatattccacaggaaacacatcatgagacgacacgcctcactcagtcagcccaggtggtgctctgggaaatcgatctgacagaggtcggtggtgaacgttattttttctgtaatgagcagaacgaaaaaggtgagccggttacctggcaggggcggcagtatcaggcataccccattcaggggacgggatttgaactgaacggcaagggcagtgctgcccgtccgacactgacggtttctaacctgcacggaatggtcaccgggatggcggaagacctgcagagtctggtcggcggaacggtggtcaggcgtaaggtttacgcccgttttctggatgcggtgaacttcgtcaacggaaacagcgacgccgatccggaacaggaggtgatcagccgctggcgcatcgagcagtgcagcgaactgagcgcggtcagtgcctcttttgtgctggccacaccaacggagacggatggcgcggttttcccggggcgtatcatgctggcgaatacctgtatgtggacttaccgttctgatgagtgtggttacacgggcagggcagtggctgacgagttcgacaaaccaacgacggatatccggaaggacaaatgcagcaagtgtatgcgcgggtgtgagttgcgcaacaataccggtaatttcggcggtttcctttccatcaataaactttctcagtaa

SEQ ID NO: 487151 - DNA, 600 bp, Shigella sonnei
atgcgtaaagtttgtgcagccattttgtccgcagccatctgtctggccgtatccggtgcgcctgcatgggcgtctgaacatcagtccacgctgagcgccgggtatcttcagacccatactgatatgccaggcagcgatgacctgaagggcattaacgtgaaataccgttatgagtttacggacacgctggggctgattacgtcattcagttatgccaacgctgaagatgagcaaaaaacgcattacagcgatacccgctggcatgaggattccgtgcgtaaccgctggttcagcgtgatggcggggccgtctgtgcgcgtgaatgaatggttcagcgcgtatgcgatggcgggcgtggcttacagccgtgtgtcgaccttctccggggattatctccgcgtaactgacaacaaggggaaaacgcacgatgtgctgaccgggagtgatggcggtcgccacagcaacacgtctctggcgtggggggctggcgtgcagtttaacccgaccgaatccgtggccattgaccttgcttatgaaggttccggcagtggtgactggcgcactgacggtttcatcgtgggtgtcggttataagttctga

SEQ ID NO: 487152 - DNA, 369 bp, Shigella sonnei
atgactgcccgctggttcaggcgggctttttgtggggtgaatatggcagtaaagatttcaggtgtactgaaagatggggcgggtaaacctgtcgtaaattgtgcgattgaactgcgggccagaagaaccagtccgaccgttgtggcacacgttgttgccacttgcgtgacggacaataacggtgcttatgtgattgaggctgagccggggtattacgaggttgcgcttcactgtaacggctggcagccaacccgtgtcggggatattgatgtggcaccgactgatgcaccggggacactgaacgcgtttctgaatgcaccaaaggatggtgatttacgtccggaggtgatgaagtgtcagcgccagtga

SEQ ID NO: 487153 - DNA, 549 bp, Shigella sonnei
gtgaaaacggggtccgaagccatccgggcgctggccatgcagatcccggcgtttcgtcagaaactgaatgagggctggtatcaggtgcgcattgccgggcgtgatgcaggcgaaaatgaattatctgcccgtcttaatgagccgctggcaaatggtgccgtgatccacatcgtgccgcgtctggcgggagctaaaagtggcggtgtgtttcaggtggtgcttggggcggcgctgattgcggtggcatggtggaaccctgtgggctggctgggggccgcggctgtatcgggcatgtatgcggcaggggccagtatgatcctgggcggagtggcgcagatgctggcaccgaaagccaggacgcccacggcagccagtacagataacggcaaacagaacacctatttctcctcactggataacatggttgcccagggcaatgttctgcctgttctgtacggtgaaatgcgcgtggggtcacgtgtggtttctcaggagatcagcacggcagacgaaggggatggtggtcaggttgtggtgattggtcgctga

SEQ ID NO: 487154 - DNA, 600 bp, Shigella sonnei
atgtcgccggaggactggctgcaggcagaaatgcagggtgagattgtggcgctggtccacagtcaccccggtggtctgccctggctgagtgaggccgatcggcggctgcaggtgcagagtgatttgccgtggtggctggtctgccggggggcgatttacaagttccgctgtgtgccacatcttaccgggcggcgctttgagcacggggtgacggactgttacacgctgttccgggatgcttaccatctggcggggattgagatgccggattttcatcgcgaggatgactggtggcgtaacggtcagaatctctatctggataatctggaggccacagggctgtatcaggtgccgttgtcagcggcgcagccgggcgatgtgctgctgtgctgttttggttcatcggtgccgaatcatgccgccatttactgtggtgacggcgagctgctgcaccatattcctgaacaactgagcaaacgagagaggtataccgacaaatggcagcgacgcacacactccctctggcgtcaccgggcatggcacgcatctgcctttacggggatttacaacgatttggccgccgcatcgaccttcgagtga

SEQ ID NO: 487155 - DNA, 699 bp, Shigella sonnei
atgcaggatattccacaggaaacacatcatgagacgacacgcctcactcagtcagcccaggtggtgctctgggaaatcgatctgacagaggtcggtggagaacgttattttttctgtaatgagcagaacgaaaaaggtgagccggtcacctggcaggggcgacagtatcaggcgtatcccattcaggggacgggatttgaactgaacggcaagggcagtgctgcccgtccgacactgacggtttctaacctgcacggcatggtcaccgggatggcggaagatctgcagagtctggtcggaggaacggtggtccggcgtaaggtttacgcccgttttctggatgcggtgaacttcgtcaacggaaacagtgacgccgatccggagcaggaggtgatcagccgctggcgcatcgagcagtgcagcgaactgagcgcggtgagtgcctcttttgtactgtccacgccgacggaaacggacggtgccgtttttccgggacgtatcatgctggccaacacctgcacctggacctatcgcggcgatgagtgcggttatcacggtccggcggtcgcggatgaatatgatcagccgacgtccgatatcacgaaggataaatgcagcaaatgcctgagcggctgtaagtttcgcaataatgtcggcaactttggcggcttcctttccattaacaaactttcgcagtaa

SEQ ID NO: 487156 - DNA, 1332 bp, Shigella sonnei
atgaaggctgaaatcagccgtagaagtctgatgaaaacctccgcacttggcagccttgcgctggcaagcagtgctttcactctgccattttcccaaatggttcgggcggcagaggctccggtagaagagaaagcggtctggagttcctgcaccgttaactgcgggagccgctgtctgttacgtttgcatgtgaaagatgacaccgtgtactgggtggagtatgatacgacaggtgacgacgtctacggtaatcatcaggttcgcgcgtgtttacgcgggcgctctatccgccgacggatgaatcatcctgataggttgaaatatcccatgaagcgcgtcggcaagcgcggtgaaggtaaatttgaacggataagttgggacgaagccctggataccatcagtgataatcttcggcggatcctaaaagattacggcaatgaagctgtacatgtcctgtacggaacaggtgtagatggcggaaacatcaccaactcaaacgtcccgtaccgtctgatgaactcttgcggtggttttctcagtcgctatggcagctacagtaccgcacagatcagtgccgcaatgagttatatgttcggtgccaatgatggcaacagcccggatgatatcgccaatacgaaactggtcgttatgttcggaaataacccggcagaaacgcggatgagcggtggtggtgtcacttactacgtcgagcaagcccgcgaacgttcaaacgcacgcatgatcgtcatcgatccacgttataacgacacagctgccgggcgtgaagatgaatggctgcccattcgccctggcaccgatggcgcactggcctgtgcgattgcctgggtactgattactgaaaacatggtcgatcagccatttctcgacaaatattgtgttggttacgatgaaaaaacgctgcccgccaacgcaccacgtaacgcgcattataaagcctatattctgggcgaagggcctgacggcatagctaaaacgccggaatgggcagcaaaaatcaccagcatcccggcagaaaaaattatccagttggcacgagagatcggttcagcaaaacctgcttatatttgtcagggttgggggccacaacgacactccaacggcgaacaaacatcccgcgctattgccatgctttccgttctcaccggtaacgtcggcataaacggcggcaactcaggcgtacgcgaaggtagctgggatctgggggtagaatggttcccgatgctcgagaatcctgttaaaacgcagatttccgtctttacatggactgatgccatcgaccatggtacggaaatgaccgcgacccgtgggtaa

SEQ ID NO: 487157 - DNA, 921 bp, Shigella sonnei
gtgtccgttaaactcaggctacctcaatatgccgacattctgctgccagacctgatgaccgttgagcaggaagatattattcctaacgactacgccggtaacatgggatatctcattttcctccagcctgtcaccagcgaaaaattcgaacgcaaaccgatttactggatcctgagtgaagtcgcgaaacgtcttggacctgacgtctatcaaaagttcactgaaggtcgcacgcaggaacaatggttacaacatctgtacgccaaaatgcttgccaaagatccggcgttaccgtcttacgacgaactgaaaaaaatgggtatctataagcgtaaagatcccaatggtcattttgtcgcctacaaagcatttcgtgacgaccccgaggcaaatccacttaaaacgccttccggtaagattgaaatttattccagcaagctggcggaaattgcccgtacctgggaactggaaaaagatgaagtgataagcccactgccagtttatgcctcaacctttgaaggctgggactcccctgaacgtagtaccttcccactgcaactgtttggtttccattacaaatcccgtactcactcgacctacggcaacattgatgtcctgaaggcagcctgccgtcaggaagtgtggatcaaccctatagatgcacagaaacgtgggattgccaccggcgatatggtgcgggtgtttaaccatcgtggcgaagttcggctaccagccaaagtaacaccacgcattctccctggggttagcgctatgggccagggagcctggcacgaggccaatatgtctggcgataaaatcgaccatggcggctgtgtgaatacgctaaccactctgcgcccttcaccactggcgaagggaaacccgcagcacactaatctggtcgagatcgaaaaaatataa

SEQ ID NO: 487158 - DNA, 1041 bp, Shigella sonnei; identical to SEQ ID NO: 13976

SEQ ID NO: 487159 - DNA, 381 bp, Shigella sonnei; identical to SEQ ID NO: 13977

SEQ ID NO: 487160 - DNA, 324 bp, Shigella sonnei
atgacaaaacgaagtggaagtaatacgcgcaggcgggctatcagtcgccctgttcgtctgacggcagaagaagaccaggaaatcagaaaaagggctgctgaatgcggcaagaccgtttctggttttttacgggcggcagctctcggtaagaaagttaactcactgactgatgaccgggtgctgaaagaagttatgcgactgggggcgttgcagaaaaaactctttatcgacggcaagcgtgtcggggacagagagtatgcggaggtgctgatcgctattacggagtatcaccgtgccctgttatccaggcttatggcagattaa

SEQ ID NO: 487161 - DNA, 150 bp, Shigella sonnei; identical to SEQ ID NO: 13978

SEQ ID NO: 487162 - DNA, 267 bp, Shigella sonnei; identical to SEQ ID NO: 80745

SEQ ID NO: 487163 - DNA, 603 bp, Shigella sonnei; identical to SEQ ID NO: 236359

SEQ ID NO: 487164 - DNA, 846 bp, Shigella sonnei
atgttgaatgtagctattgaaaaccagaacgggtggaattatagtgcacctgcacctcataaaacgggtgccgggattgctaccccgaagtcattcacggcgcataaccgcgctcaggcggtttttttatgcgtaatgcacagccacattcaaattatggtggggcgtgcggggcagtcgcaagactggccgggttccgtgatgaccggttgtagcaaccctgtacgtctcaccacccatgagattgctacctccggtggtgagttaatcaaattcatcgcggaggctgccatcatggctactaccctttctcacccttgtgtaaccgtagaaaacggtcgcgctgtcactacgtctgttgcggttgcagagttcttccacaaacgacacgacaatgtgttacgtgccatcgcaaatattgaatgctcagataaatttactgccctcaattttgaagcgagcgaatacaccgactcaatcgggcgcaaactcccaatgtaccaaatcaccaaaaacggcttcgttttcctggttatgggcttcactggcaaaaaagccgctgcattcaaagaagcctacattgctgagttcgaccgcatggaggccgaactgcgccagaataacaccccacctgctgacaagatgattccgggtgatggtcgcactctggttgttcacttcgacaaattcggcaatgtcgaattcaccgaaaccgttcctgatggcgcactggtctgtaccctggagactttccggttttatctggaaaaacagggatggactcttgttaaccggggcgcaattaaaaatatgactgtggaacaattactcaaaattcattgttga

SEQ ID NO: 487165 - DNA, 189 bp, Shigella sonnei
atggagacgttattaccaaacgttaatacgtctgaaggttgttttgaaattggtgtcactatcagtaaccctgtatttactgaagatgccattaacaagagaaaacacgaacgggagctattaaataaaatatgcattgtttcaatgctggctcgtttacgtctgatgccaaaaggatgtgcacaatga

SEQ ID NO: 487166 - DNA, 192 bp, Shigella sonnei; identical to SEQ ID NO: 468722

SEQ ID NO: 487167 - DNA, 276 bp, Shigella sonnei
atgattaccagttatgaagccactgttgtaactactgatgacattgttcacgaggttaatctggaaggaaagcgtattggctacgtgattaagacagaaaataaagaaaccccattcactgtggttgatatcgacggtccatcaggcaacgttaaaacacttaacgatggtgtaaaaaaaatgtgtctggtgcacataggaaagaatctgcccgcagaaaaaaaagccgaatttctggcaactctgattgcaatgaaattaaaaggtgaaatctga

SEQ ID NO: 487168 - DNA, 1074 bp, Shigella sonnei
atgaaaaatccctattaccctaccgcacttgggttgtattttaattacctggtgcatggtatgggcgtcattttgatgagcctgaatatggcctcgctggagacactttggcagactaatgccgcgggtgtctcgatagttatctcatcgctgggcattggtcgattaagtgtcttgctttttgcaggattattatccgatcgctttggtcgccgcccttttatcatgctcgggatgtgctgctatatggccttcttttttggcatcctgcagaccaataacatcattatcgcttatgtttttggctttctggcgggaatggcaaacagttttctcgatgcaggcacttatcccagtttgatggaagcttttccacgctcacctgggacagccaatattttaattaaagcatttgtttccagcggacaatttttattaccgctaatcattagcctgttagtgtgggctgaactgtggttcggttggtcctttatgattgctgcaggcattatgtttattaacgctctgtttttataccgttgtacgttcccaccccatccgggtcgtcgcttacctgtcataaagaaaaccaccagctctacggaacatcgctgttcaattatcgatttagccagttataccttatatggctatatctcaatggcaacgttttatctggttagccagtggctggcacagtacggacaatttgttgcaggcatgtcatacactatgtcgatcaaactactcagtatctacaccgtgggttcgctgctttgtgtatttattaccgctccactcattcgtaataccgttcgcccaacaacattactgatgctgtacacctttatctcatttattgctctgtttaccgtctgcctgcatcccacattttatgtggtgataatatttgcttttgtcattggttttacctctgctggaggtgttgtgcaaattggcctgacgttaatggctgaacgtttcccttacgctaaaggtaaagctacagggatctattacagtgcgggcagtattgcgacctttactattccgttgattacggctcatcggtga

SEQ ID NO: 487169 - DNA, 189 bp, Shigella sonnei; identical to SEQ ID NO: 463227

SEQ ID NO: 487170 - DNA, 327 bp, Shigella sonnei; identical to SEQ ID NO: 485698

SEQ ID NO: 487171 - DNA, 150 bp, Shigella sonnei; identical to SEQ ID NO: 485699

SEQ ID NO: 487172 - DNA, 189 bp, Shigella sonnei; identical to SEQ ID NO: 463227

SEQ ID NO: 487173 - DNA, 303 bp, Shigella sonnei; identical to SEQ ID NO: 486108

SEQ ID NO: 487174 - DNA, 336 bp, Shigella sonnei
atgcggctcgctgaacagcggactccactcggtcacaccgttttccttcaggatcgtcgcgaggatgctttcgatgtcctcattctggaagatacggaagttctggcgcagccctatgcgccacagcggtgggcataccttcatgctgtacagcatctggtttttgtcgttctcccccagttcaaaccaggtcaccacacctttcacccggcgctgtacgtcatcgccctgccataccgtcaggtaggccattttgtccagcacctgcgcaaattcaagggagagaaactgctggctgaccagagagagatcgagggaaaagagcgaagagagtga

SEQ ID NO: 487175 - DNA, 285 bp, Shigella sonnei; identical to SEQ ID NO: 486971

SEQ ID NO: 487176 - DNA, 189 bp, Shigella sonnei; identical to SEQ ID NO: 463227

SEQ ID NO: 487177 - DNA, 123 bp, Shigella sonnei
atgagcgcttacccgatttttgatcgtattgaagaaatggcatgggctcgtcactaccagcagatcgttcgtgaagaaaaagaaacggaactggcggacgacctggaaaaaggtctgaggtag

SEQ ID NO: 487178 - DNA, 423 bp, Shigella sonnei
gtgcgacagactgaagataaacagcaccagaacagcgaaccggaggagggaacaccctgcaatcagactggcgaggataactgccctgactgtggcgcggtgatgggagacgcaacttatcaggaaacttttgacgaaaaaaaaccagatgaagcacaggaagaagagccgaagaaaacggaaaaagctgatgatttgttaccggagaacgctggcagcgatcagcataatgatagcaataatgaaactggcgaagatgaactcaactggaaaaaacaggtgttgattgcggcggtttacggtttatgtgcgaatcctgcgtgcatagcctatgcgcctgcaatccctgacatcgcaatgatgattgccaacaagcttgaaaattttggagtgaccagtgatgagcgcttacccgatttttga

SEQ ID NO: 487179 - DNA, 303 bp, Shigella sonnei; identical to SEQ ID NO: 484410

SEQ ID NO: 487180 - DNA, 1320 bp, Shigella sonnei
gtgtgtccgggagggattacctatgctaacccggtgaacccggtgaacccggtgctgggtgcgaaggtgcttccgggcgagacggaccttgcgctgccctgcccgctgccgtttattcttttccgtgcctacagcagctaccggaccagaacacccgcgccggtgggggtgtttggtcccggctggaaagcgcccttcgatatccgcttacagatacgcgatgaaggcctgatactcaacgacagcggcggcaggagcattcactttgagccgctgtttcccggcgagataagctacagccgcagcgagtcactctggctggcgcggggcggagtggcggcgcagcacagttcgcagccgctaagcgcgctctggcaggtgctgccggaagatgttcgcctgagtccgcatgtgtacctggcgacaaacagccttcaggggccgtggtggatactcagctggccggagccgcccgcataccgggtactgacggtcgtggtggatggcttcgggcgctcactgactttccaccgggcggcggagggtgacgtggcgggcgcggtgacgggggtgacggacggcgcgggccgccgttttcacatggcgctgagcacgcaggcgcagcgggcggaagcgtcccgtaaacagcgcgcctcttccttatcttccccggccagtccccgttctgtttcctcttctcaggttttccccgacacgctgcccgccggtacagagtacggtgccgataacggtatccggctggaggcggtatggctgacacacgacccggcatacccggatgaacagccgactgcgccgctggcgcgctacacgtacacggccggtggtgaactgcgggcggtgtatgaccgcagcgggacgcaggttcgcgggtttacttatgatgcggagcacgccgggcggatggtggcgcaccattatgcggggaggccggagagccgctaccggtatgatgataccggtcgggtgacggagcaggtcaacccggaggggctggactaccgctttgagtacggagagagccgggtaatcatcacggacagcctgaaccggcgggaggtgctgtacacggaaggcgagggtggcctgaagcgggtggtgaagaaggagcatgccgacgggagcatcacccgcagcgagtatgatgaggcggggaggctgaaggcgcagacggatgcggcggggcggcggacggagtaccggctgcatatggcgtctggaaagcagacttcagtggtactgccggacggcaggacggcaggacggtacggtatggttacaacaaccagttgcaactga

SEQ ID NO: 487181 - DNA, 537 bp, Shigella sonnei
gtgatcgctgagatatttcagggaggctttgtagtcttccagcaacagttcagcaaagtccatttcgaagccgcgacgacacataatgcgcatcaccacgatgtcggtggcttcaccgccgagagtgaaggccggaacctgccagccgcgcagacgcagacgttcagagaggtcgtacagggtgtatcccggatcttcaccatctttcagtttgaagcaaaccgccgggatgccttcgtccgggcgaccggcacagatgaactcatacggccccagtttggcgatctcatccgccagataggcagcgacctggtaggaagcattctgtactttggtatagccttcacgaccgaggcgcaggaattcatagtactgtgcaattacctgacccgccgggcgggagaagttgatggcaaaagtaccaatttgaccacccaggtagtcaacgttgaacaccagttcctgcggcagcgcttcttcgtcacgccagataacccagccgcagcccagcggagccagaccgaatttatggcctga

SEQ ID NO: 487182 - DNA, 189 bp, Shigella sonnei; identical to SEQ ID NO: 463227

SEQ ID NO: 487183 - DNA, 447 bp, Shigella sonnei; identical to SEQ ID NO: 486126

SEQ ID NO: 487184 - DNA, 303 bp, Shigella sonnei; identical to SEQ ID NO: 484410

SEQ ID NO: 487185 - DNA, 687 bp, Shigella sonnei
gtgaatatttatttcatgagtcagcaaaaaaaattacacctcaaacgactggcgggcttttgcagagaatcagaaatggccggacgaagaagaaactcaaacacacgtgatctaccacccaatctttacaatcgaggtggatattatagttatcgtgacccacgttcaggaagggagtttggaatcggaagagacaaaagaattgcagttaatgaggctattgcggcaaatatggaattattatccacgcaacatataagcttactggatagaataaaaggtaatagcgtaacattattctgcgagctgatattaaatttcagaaatgaaatagagcgtagacaattaagcacaaacaccatgaaaagacacaaccagaggttgaaaatcataagtgaatactttggtggtgttccggttaaaaatataggcataagggaggtgtacagctttcttgaaatcagagcagctgggagtaaatttgctattgctaaccagtacagggcgcttttatcagacatttttaaaacagctatagcttctggtcttgccgaagaagatccagcttctgcaaccaggccattcagaactgaagtgaagcgcagtcgactgttaattgacgagtatctgttaatcaggaaaatagcagacgtccagaacgaatggtttgaggtgtactggcaatag

SEQ ID NO: 487186 - DNA, 189 bp, Shigella sonnei; identical to SEQ ID NO: 463227

SEQ ID NO: 487187 - DNA, 642 bp, Shigella sonnei
atgaacgacgtgttcctgaaacgcctgacggcccccaccattaccagcggtggaaatccatcggcattttccctgactccggacggaaagctgaccgctaaaaatgcggatatcagtggcagtgtgaatgcgaacgccgggacgctcaacaatgtcacggtaaatgaaaactgtacgattaagggcatgctggaggcgactcaggtcagaggtgacttcgttaaagctgtatccaaatcatttccgaaacaggctggtacgtggggtaatacggaaacaccaaacgggacggttacagtcaccataagcgatgatcataactttgaccgccagattattattccgcccattatttttaacggtatagcgtatgacgatccggggagcggaaataacccaggaggcacgcgatacacgggttatggttttgaagttcgcaaaaacggcgtattaatcgcatccagagaaactaaaggtgccattcccggtagttacagtgcagttattgatatgcctagtggtggtggtagcgtcactctggagtttaagattttccagaaaggcaatcagggggcaggcaatatcaccgactgtacggtgattgtgaccaaaaaagcggcttccggcatcagtattcgttga

SEQ ID NO: 487188 - DNA, 642 bp, Shigella sonnei
atgaatgaagtgttcctgaaacgcctgacggcccccaccattaccagcggcggtaatcctccggcattttccctgacatcagacgggagactgacggcgaaaaatgcggatatcagtggcagtgtgaatgcgaactcaggaacgctcaacaatgtcacgattaaccagaactgtacgattaagggcatgctggaggcgacccaggtcagaggagatttcgttaaagctgtatcaaaagccttcccgaaaaaagtcggtacgtggggtaacacggaaacaccaaacggtacggttacagtcaccatcagcgatgatcataactttgaccgccagattattattccgcccattatttttaacggtatagcgtatgacgatccggggagcggaaataacccaggaggcacgcgatacacgggttatggttttgaagttcgcaaaaacggcgtattaatcgcatccagagaaactaaaggggccattcccggtagttacagtgcagttattgatatgccgagtggcaggggaagcgtcactctggagtttaagattttccagaaaggcaatcagggggcaggcaatatcaccgactgtacggtgattgtgaccaaaaaagccgcttccggcatcagtattcgttga

SEQ ID NO: 487189 - DNA, 789 bp, Shigella sonnei; identical to SEQ ID NO: 485823

SEQ ID NO: 487190 - DNA, 189 bp, Shigella sonnei; identical to SEQ ID NO: 463227

SEQ ID NO: 487191 - DNA, 303 bp, Shigella sonnei
atgagcagaaaaacccaacgttactctaaagagttcaaagctgaagctgtcagaacggttcttgaaaatcaactttcgatcagtgaaggcgcttcccgattatctcttcctgaaggcactttaggacaatgggttaccgccgccagaaaagggctcggtactcctggttcccgcacggtggctgaactggaatctgaaattctgcaactgcgtaaggcgttaaatgaagctcgccttgagcgagatatattaaaaaaagcaacagcgtattttgcacaggagtcgctgaaaaatacgcgttaa

SEQ ID NO: 487192 - DNA, 654 bp, Shigella sonnei; identical to SEQ ID NO: 476867

SEQ ID NO: 487193 - DNA, 303 bp, Shigella sonnei; identical to SEQ ID NO: 21213

SEQ ID NO: 487194 - DNA, 189 bp, Shigella sonnei; identical to SEQ ID NO: 463227

SEQ ID NO: 487195 - DNA, 234 bp, Shigella sonnei
atgagcagaaaaacccaacgttactctaaagagttcaaagccgaagctgtcagaacggttcttgaaaatcaactttcgatcagtgaaggcgcttcccgattatctcttcctgaaggcactttaggacaatgggttaccgccgccagaaaagggctcggtactcctggttcccgcacggtggctgaactggaatctgaaattctgcaactgcgtaaggcgttaaatgttggataa

SEQ ID NO: 487196 - DNA, 483 bp, Shigella sonnei; identical to SEQ ID NO: 486898

SEQ ID NO: 487197 - DNA, 189 bp, Shigella sonnei
atggaaagcttctggggaacgctgaaaaatgagagcctgagccactatcgttttaataaccgggatgaagccatctcagtaatacgggaatacattgagattttctacaatcgtcagcgttgtcactctcgtctggggaatatctccccggcagccttcagggaaaaatatcatcagatggctgcttaa

SEQ ID NO: 487198 - DNA, 189 bp, Shigella sonnei; identical to SEQ ID NO: 463227

SEQ ID NO: 487199 - DNA, 189 bp, Shigella sonnei; identical to SEQ ID NO: 463227

SEQ ID NO: 487200 - DNA, 429 bp, Shigella sonnei
gtggcgcaggcgcagcagagtgccggggctgcagccggaaacgcacggcagacggcgcaggatgtggcggcagccgcaacggcccgtgatgatgcacaacgttttgcggagaaagcccgacaggatgcaaccgtcacagctgaggacagaaaggccactgcggaagatgtgacaagcacaggagcaaatgcagccgcagccggacagagcgcacaggatgccgcaggttatgcccgcgcagcagaacaggccaaaaatgacattgatgctgcgctgaccggcactctgaaaatggctaaccatctgtcagaaatcgcagcagcaggcgaaaaggcacaacagaagtcccgggatagtctggggctgaaaagtgcagccacgatggaagcacagagcgacatttacgaccggacaaaaggcctgaggtag

SEQ ID NO: 487201 - DNA, 483 bp, Shigella sonnei; identical to SEQ ID NO: 483872

SEQ ID NO: 487202 - DNA, 243 bp, Shigella sonnei
atggctgccctgcccgtaagttggatccagatgctggcaggtctggcgctgttgagtaccattggcggcagtttgtatcaggcgctgcataatgagcgtgagcgcgacgcggcggtggtggcatttctggtaacggcaagtggattgacgctggtcgggattggttctgcgttctggggattaattgccggaggcgtttgttacgtggtgttgaatttaatcgctgacagaaaccgatattga

SEQ ID NO: 487203 - DNA, 216 bp, Shigella sonnei; identical to SEQ ID NO: 485850

SEQ ID NO: 487204 - DNA, 480 bp, Shigella sonnei; identical to SEQ ID NO: 464934

SEQ ID NO: 487205 - DNA, 354 bp, Shigella sonnei; identical to SEQ ID NO: 466835

SEQ ID NO: 487206 - DNA, 327 bp, Shigella sonnei; identical to SEQ ID NO: 486146

SEQ ID NO: 487207 - DNA, 573 bp, Shigella sonnei
atgatcactgaccttatattacacaatcatcccaggatgaaaacaatcactttaaacgacaaccatattgcacatttaaacgccaaaaacactacaaaactggaatatttaaacttaagcaataacaatttactgccaaccaatgacattgatcaactaatatcatcaaaacatctttggcatgtattagttaacggcatcaacaatgatccacttgcacaaatgcagtactggactgcagtaagaaatataattgatgacactaatgaagtgaccattgatttatcaggacttaatttaaccactcaaccaccagggctgcaaaacttcacatctatcaatcttgataataaccaactcacacattttgatgcaaccaactacgatagactcgtaaagctaagtctgaatagtaatgctcttgagtcaataaattttcctcaaggcagaaatgtaagtattacacatatatctatgaataataatgctctcagaaatattgatatagataggctttcatcagttacttattttagtgcggcacataatcaactaaatagctgcgcggaatag

SEQ ID NO: 487208 - DNA, 294 bp, Shigella sonnei; identical to SEQ ID NO: 13522

SEQ ID NO: 487209 - DNA, 210 bp, Shigella sonnei; identical to SEQ ID NO: 9340

SEQ ID NO: 487210 - DNA, 666 bp, Shigella sonnei
gtggtggcaagtgaactgcacggcgagcagccgcaggcggtgccgggacgcagtggttcaggaaccacgctgaataaccactttgcggtaataccggcagaccggacatggcggccacagccgttgctgaaaccgctggtggatggcccgcagagcgccgtcgtgacgggaccggcaggcgaggaaatcttctgtgatgaacatggccgcgtgcgggtgaaatttaactgggaccgctataacccgtcaaaccaggacagttcatgctggatccgtgtggcacaggcgtgggcaggcaccggattcggtaaccttgcgataccgcgcgtgggtcaggaggtcattgtggacttcctcaacggcgatccggaccagccgattattatggggcgtacctaccaccaggaaaaccgcacacccggtagcctgccggggacgaagacgcagatgaccattcgttcgaaaacctataagggcagcgggtttaatgaactgaagtttgacgatgcgacagggaaagaacaggtctacatccacgtgcagaagaacatgaacaccgaggtgctgaataaccgcaccacggatgtgataaacaaccatgccgaaaaaataggtaacaaccaggcgatcaccgttaccaataaccagatgcaaaatggcatctga

SEQ ID NO: 487211 - DNA, 291 bp, Shigella sonnei
atgccaacgtatctcgccagagtagaactatataatgctgagccagaggattacgaagggcttcataaatatatgctctcactaggattcaggagaacgatcccccatggagatggttcgtataatcaactcccggacggaacttatgtttccgaaaagggcggtgatatttatcaaattcgcagccagatatctgactatgcagaccgactatccaggtatcgcgcgtctgtttttgtttgcgaattcagtcaatgcgcatggtatttataccccgccaagacccggtga

SEQ ID NO: 487212 - DNA, 204 bp, Shigella sonnei
atgggctggcaaaagtgtagcggtattaagcgcagctatttagaagatgcaaaacgcctccagcaactggagccaaatgcaggcactggggcacgcatctggctggctaaagaagcgctggaatctggcgattatgatagcgaagaagccttctacaaagcagaaggccgtacaggatattcaccgggtcttggcggggtataa

SEQ ID NO: 487213 - DNA, 303 bp, Shigella sonnei
atgagcagaaaaacccaacgttactctaaagagttcaaagccgaagctgtcagaacggttcctgaaaatcaactttcgatcagtgaaggcgcttcccgattatctcttcctgaaggcactttaggacaatgggttaccgccgccagaaaagggctcggtactcctggttcccgcacggtggctgaactggaatctgaaattctgcaactgcgtaaggcgttaaatgaagctcgccttgagcaagatatattaaaaaaagcaacagcgtattttgcacaggagtcgctgaaaaatacgcgttaa

SEQ ID NO: 487214 - DNA, 285 bp, Shigella sonnei
gtggcttctgtttctatcagctgtccctcctgttcagctactgacggggtggtgcgtaacggcaaaagcactgccggacatcagcgctatctctgctctcactgccgtaaaacatggcaactgcagttcacttacaccgcttctcaacccggtacgcaccagaaaatcattgatatggccatgaatggcgttggatgccgggcaactgcacgcattatgggcgttggcctcaacacgattttacgtcacttaaaaaactcaggccgcagttgtcagcgccagtga

SEQ ID NO: 487215 - DNA, 396 bp, Shigella sonnei
gtggcgcaaataaaagaaggcgcgacagtggcgatccccaacgacccgaccaaccttggtcgcgcacttttactgttgcaaaaagagaagctaattactctgaaagagggaaaagggttattacctaccgcgctggatataaccgataatcctcgtcatttgcagattatggaactcgagggggcgcagctcccgcgcgtactggatgatcccaaagttgatgtagcgattatcagcaccacttacattcagcagacagggctttctccggtgcacgacagcgtatttattgaagataagaattcgccgtatgtgaatattttggtggcacgggaagataataagaatgcagaaaacgtgaaggaatttctgcaatcttatcaatcacccgggtga

SEQ ID NO: 487216 - DNA, 252 bp, Shigella sonnei
gtgccgtcgaactataatccgcagacgcggcaatacagcggtatctgggacggaacgttaaaaccggcatacagcaacaacatggcctggtgtctgtgggatatgctgacccatccgcgctatggcatggggaaacgtcttggtgcggcagatgtggataaatgggcgctgtatgtcatcggccagtactgtgaccagtcggtgccggacggttttggcggcacggagccgcgcatcacctgtaatgcgtag

SEQ ID NO: 487217 - DNA, 303 bp, Shigella sonnei; identical to SEQ ID NO: 487011

SEQ ID NO: 487218 - DNA, 423 bp, Shigella sonnei; identical to SEQ ID NO: 481884

SEQ ID NO: 487219 - DNA, 261 bp, Shigella sonnei
atgggggaagcgggacctgaagccattctgccactgcgtcgcggtgctgatggtaagctggggggtgtggcggatactggtggttcaggcatggtgatgtttgccccgcagtacaacattgagatcaataacgatggcacgaacgggcagataggtccggctgccctgaaggtggtttatgacctcgggaaaaaagcggccgcggactttatgcaacagcaggcccgtgatggtggccggttaagtggagcataccggtaa

SEQ ID NO: 487220 - DNA, 165 bp, Shigella sonnei
atgaccaaacgcaaaatggctgaactgctgaatgatgcacacccgaaatggagtttaagaacctgtgaaagacgcattgagcattggctaaaggtggcagaatttattttgtacaaaccaatggttatggcttttggtatagagaaaaaagttattgctttttga

SEQ ID NO: 487221 - DNA, 189 bp, Shigella sonnei; identical to SEQ ID NO: 463227

SEQ ID NO: 487222 - DNA, 303 bp, Shigella sonnei
atgagcagaaaaacccaacgttactctaaagagttcaaagccgaagctgtcagaacggttcctgaaaatcaactttcgatcagtgaaggcgcttcccgattatctcttcctgaaggcactttaggacaatgggttaccgccgccagaaaagggctcggtactcctggttcccgcacggtggttgaactggaatctgaaattctgcaactgcgtaaggcgttaaatgaagctcgccttgagcgagatatattaaaaaaagcaacagcgtattttgcacaggagtcgctgaaaaatacgcgttaa

SEQ ID NO: 487223 - DNA, 147 bp, Shigella sonnei; identical to SEQ ID NO: 465857

SEQ ID NO: 487224 - DNA, 180 bp, Shigella sonnei; identical to SEQ ID NO: 461173

SEQ ID NO: 487225 - DNA, 285 bp, Shigella sonnei; identical to SEQ ID NO: 486588

SEQ ID NO: 487226 - DNA, 2142 bp, Shigella sonnei
atgtcaaccggattacgtttcacgctggaagtggacggcctgccaccggatgcttttgcggtggtctcctttcatctgaaccagtcactctcttcgctcttttccctcgagctctctctggtcagccagcagtttctctcccttgaatttccgcaggtactggacaaaatggcctacctgacgatatggcagggcgatgacgtacagcgccgggtgaaaggtgtggtgacctggtttgaactgggggagaacgacaaaaaccagatgctgtacagcatgaaggtatgcccaccgctgtggcgcacagggctgcgccagaacttccgtatcttccagaatgaggacatcgaaagcatcctcgcgacgatcctgaaggaaaacggtgtgaccgagtggagtccgctgttcagcgagccgcatccttcccgtgagttttgtgtccagtacggcgaaactgattacgatttcctgtgccggatggcggcggaggaaggcatcttcttttatgaggagcacgcgcaaaaaagtaccgaccagagcctggtcctgtgcgacaccgtgcgttatctgccggagtcctttgagatcccctggaacccgaacacccgtaccgaggtaagtaccttctgcatcagccagttccgctacagcgcacaaatccgtccttcttccgtggtgaccaaagactacacctttaaacgacccggctgggcagggcgttttgatcaggaaggccagtaccaggattaccagcgcacacagtatgaagtgtatgactaccccggacgtttcaagggtgctcacgggcagaactttgcccgctggcagatggatggctggcgcaacaacgcagaagtggcgcgcggaacaagccgttctccggagatatggccgggacggcgaattgtgctgacggggcatccgcaggcgaacctgaaccgggaatggcaggtggtggcaagtgaactgcacggcgagcagccgcaggcggtgccgggacgcagtggttcaggaaccacgctgaataaccactttgcggtaataccggcagaccggacatggcggccacagccgttgctgaaaccgctggtggatggcccgcagagcgccgtcgtgacgggaccggcaggcgaggaaatcttctgtgatgaacatggccgcgtgcgggtgaaatttaactgggaccgctataacccgtcaaaccaggacagttcatgctggatccgtgtggcacaggcgtgggcaggcaccggattcggtaaccttgcgataccgcgcgtgggtcaggaggtcattgtggacttcctcaacggcgatccggaccagccgattattatggggcgtacctaccaccaggaaaaccgcacacccggtagcctgccggggacgaagacgcagatgaccattcgttcgaaaacctataagggcagcgggtttaatgaactgaagtttgacgatgcgacagggaaagaacaggtctacatccacgtgcagaagaacatgaacaccgaggtgctgaataaccgcaccacggatgtgataaacaaccatgccgaaaaaataggtaacaaccaggcgatcaccgttaccaataaccagatccagaacattggcgttaatcagatacagacggttggtgtcaaccaggtggaaacggtgggcagtaaccagattatcaaagtgggatcaaaccaggttgaaaaggtggggatcattcgtgcgctgacggtgggtgtggcttaccagacgacggtaggcggcattatgaatacctcggtggcgttgttgcagtcctcacaggtagggctgcataaatcactgatggtgggaatgggctacagcgtcaatgtagggaataacgtcaccttctcggtgggcaagacgatgaaggaaaacaccggacaaacagcagtttattctgccggtgagcatcttgaactctgctgtggtaaggcaaggctggtgctgacgaaggacggaagcatatttctcaacggtacgcacattcatctggaaggggagtcggatgtgaacggtgatgcgccagtgattaactggaactgtggtgccacacaacctgtaccggatgcgcctgtgccgaaagatttaccccccggaatgccggatatgcggcaattttga

SEQ ID NO: 487227 - DNA, 963 bp, Shigella sonnei
atgttgctctgcccgctcctggccggggcgaatcacccgggtctgctgtccgtccgacagcgtgacactgtcaccggaaactgctgtcaccgtccagacactgttggccacataaccgcgctcccggtcactcttcgtgaagcgcatccggtcaccggttcccacccggatggtgtccggggtgtacagtgtgacgccttcagccaccgcctcccggggcgaaatcagccgcgtgttaccttccgcatcctccagggttatcagcccgtcatccttgctgataccggcaatccggtgatacacactatccaccagggcaagggcatccgggttattctcccaggtggagagacgacgcagttctccgtcacgtatattcgctgtgttcaggacaggcaccatgacctgctctttgcccagctcaccggccttttcccgtgcatcatgaatcatgctgttcagtacgcgccggtcctcattcaggtgtgtgacaatcagcgtctgctcccgtgcttccggtgtcctgccggtatagtcgcggacaatggcttcatacagtgtcatggggacatccgggaaagcctcgcctttcagcatcgccttctgctgcgcttctgccagtttcgcttcctggctgtgactgaactccgtcacggagtgctccggtgcccatgcgccctccagacgtggcacctgagacggtttcacactctcaagcccggacagtgccctttccacatcccggttaatcaggctgtataccgcctcccgcagttccggcgtctgacgcacaatctccttcatgatggccacatcggcggcactgcgcatctgctggagacggaaaggctgaccgggcgcgatggcctgcaactggtccgtgtcaccgctggccactgcacgaccaccaccggccgcaatcagggcgtatgcccgtgccatgtcggtattgcccaccattga

SEQ ID NO: 487228 - DNA, 159 bp, Shigella sonnei
atgaatggcctgctgtgccggcgtgtgaagccctgctttctgcagactgatagcggtttccagcaatgtctcaccggcacgcgcctttatctgctcagaaaccaccgtaaaggagggatggcgggcaagtttttccgcagtacgggtttcatccagtga

SEQ ID NO: 487229 - DNA, 651 bp, Shigella sonnei
gtggcgatagcccacatatgcggccttcgatgtgtaggttttggtaaataccaggtggccaaccacgctgaatcccgcatttttccaggcggccataaagcgatcgacgcggttccagccatagaagctcaccatcagcgcatcttttttcagcacgcggtacatttcattacaggccggttgcagccattcatcggttttatcgccggcgatggtacgcccctgacggtcacggaaaccgacgagatatggcgggtcggtgaggatgaaatcgacagcattgcccggaaacgtggccataacacgcacgcagtcaccctggataaaacgggacataacagcactccttctcttacagagggcaccgggagggcgcccctgtggtgcccgttccccgctgcctgtgggctgttcaccgcgtccggtaacgggtcatgccgaccgtggaataccgcagccgtcgtctttttgacggcgaggatatgccgcgaaagcggcttgaagggcgttcatcagaaaagggcgacgggctggcgtacactgtcaccgacgccagccaggagcggtaaaagcgcccgtcccgtgcccgccggacgcgggacactgaccacaggcagcgtttatgccgcgccgcgtcagccggcgcagtaa

SEQ ID NO: 487230 - DNA, 267 bp, Shigella sonnei
gtgagaccatcaattatcttcgcaaccgccgagtatgtaaagcgtctgcgtgaagagtgcctgcgggagaataaacccctgcaccgccatacccgcttcagacgtcaggagctggcacaggatgagattaacccggacgtcctggcgatgagcggtcatatcgccagacgctgcagtgagcagaagcgggtacgtatccccgctatgaaagtcagcgaatggggccacctgctccgcgcgcttgaaattgagcgggtctgccactga

SEQ ID NO: 487231 - DNA, 726 bp, Shigella sonnei; identical to SEQ ID NO: 484972

SEQ ID NO: 487232 - DNA, 3432 bp, Shigella sonnei; identical to SEQ ID NO: 485336

SEQ ID NO: 487233 - DNA, 303 bp, Shigella sonnei
atgatgccggaatatgaaggcggattctggcacttcatccgcctgccggacggtggcggttacatgatgccggatggcgaccgtttccacatggtgaacggtgcaaactggtttgaccgtaccgtgagtgctgatgccgcaggaatcattctcacttcccttgtgattaaccgccagttgtggctgtaccacgacagcggggatgcaggactgacccagctttaccggatgcgcgatgcgcagttgtggcgtcacatcgaatttcaccctgaatgcaacgcgatttacgcagcactggactga

SEQ ID NO: 487234 - DNA, 840 bp, Shigella sonnei; identical to SEQ ID NO: 5268

SEQ ID NO: 487235 - DNA, 234 bp, Shigella sonnei; identical to SEQ ID NO: 5269

SEQ ID NO: 487236 - DNA, 561 bp, Shigella sonnei
atgagcaatcttttacaaatgggaacggacttcgagaagaaactgaaagagcgagccgcttctaccgagaacatgctgaacagcgagttcaggaagctagaagagtctgtagacaaggcactgagcttaaacaggcagaaaatcagagacgctatcagcgaacatacaacatccgtgaaacagcaactggatacgctgagcaccaccgtgagcacgcagctcagcaccacagaggccgaactgtcccggcagcagaaaaacctgctctggcaggtgatcaaagggcgggtactgtttccggcgctgaccgcgctcagcgtcacgggcggcattttcctggggtgctgggggctgattcagtggcaggaaagcaggattgcgaaaaatatcttgaccatcagagagcaggaaaacacgctggcgaaactcgaggcaaaaacctggggggtgacgttcgtcaatggcgagaacgggaaatttctggtgctgccggacggggtgaaaggggaaaacacctggacggtgggcgacaagaacgccgtgaggctggtcagggagtaa

SEQ ID NO: 487237 - DNA, 339 bp, Shigella sonnei
atgaaacgcgagaagatgctcacgatacgggttagcgatgaggagcacgcccggttactggaacgctgcgagggtaaacgactggcagaatggatgcggcgggtctgtctgggggagccggttgcgcgcacaggaaaactgccgacactatcgccgccattgctgcggcatctggctgccatcgggaacaatctgaaccagacagcccggaaggtgaacagcggccactggtcttcgattgaccgggttcatgtggtggccgctttgatggccatcgagggtgaattgcgccagttgcggcaggctgtcagggaacaggggggacgggatgatagttaa

SEQ ID NO: 487238 - DNA, 192 bp, Shigella sonnei; identical to SEQ ID NO: 5272

SEQ ID NO: 487239 - DNA, 1041 bp, Shigella sonnei; identical to SEQ ID NO: 485547

SEQ ID NO: 487240 - DNA, 1254 bp, Shigella sonnei; identical to SEQ ID NO: 484085

SEQ ID NO: 487241 - DNA, 1035 bp, Shigella sonnei; identical to SEQ ID NO: 486086

SEQ ID NO: 487242 - DNA, 2004 bp, Shigella sonnei; identical to SEQ ID NO: 485651

SEQ ID NO: 487243 - DNA, 213 bp, Shigella sonnei; identical to SEQ ID NO: 486092

SEQ ID NO: 487244 - DNA, 435 bp, Shigella sonnei
atgaaaactgaactgaccctgaatgccctgcagtccatgaacgcacaggaatatgaagatatccgtgctgcgggaagcgatatgcgccgtaatctcactcacgaggtgatgcgtgaagtggacgcaccggctaactggatgatgaatggcgagtatggcagtgagttcgggggctttttccccgtccaggttcgtttcacgccagcccacgaacgtttccacctggcattatgttcgccgggagacgtctctcaggtctgggtgctggttctggtgaatgccggtggtgagccgtttgcggtggttcaggtgcagcggcggtttgcaccggaagctgtcagccattcactggcactggcggcgtcactggatgcgcaggggtacagcgttaacgacatcattcatatcctgatggcggaaggaggtcaggcatga

SEQ ID NO: 487245 - DNA, 822 bp, Shigella sonnei
atgcgattagcttcccgttttggtcggtataattccatccgccgtgaacgtcctttaacggatgatgaattaatgcagtttgtgccttcggtgttttccggtgataaacatgagtcccggagtgaacgttatacgtatattccaacaatcaatatcatcaataagttacgtgatgaaggtttccagccattctttgcctgtcagagtcgggttcgtgatttgggacgtcgcgaatacagtaaacatatgttacgtcttcgcagggaagggcatattaacgggcaggaagttcctgaaattatcctgcttaattcacatgatggttcatccagttatcagatgatccccggaatttttcgttttgtctgcacaaatggcctggtgtgcggaaataattttggcgaaatccgcgttccacataaaggtgatattgtcgggcaggttatcgagggagcgtatgaagtgctcggtgtctttgataaggtcactgataatatggaggcgatgaaagaaattcatcttaacagtgacgagcaacatttatttggcagagctgcactgatggtcaggtatgaagatgaaaataaaacgccggtgacgcctgaacagataattactccccgtcgtcgggaggataaacagaacgatctctggacaacctggcagcgggttcaggagaatatgataaaaggtggattatcggggcgaagtgcctccgggaaaaataccaggacaagagccattacaggtattgatggtgatataagaatcaacaaagcattatggatgattgccgaacagttcagggagtggaagtcgtga

SEQ ID NO: 487246 - DNA, 288 bp, Shigella sonnei; identical to SEQ ID NO: 5261

SEQ ID NO: 487247 - DNA, 540 bp, Shigella sonnei; identical to SEQ ID NO: 486341

SEQ ID NO: 487248 - DNA, 234 bp, Shigella sonnei; identical to SEQ ID NO: 28326

SEQ ID NO: 487249 - DNA, 480 bp, Shigella sonnei; identical to SEQ ID NO: 464934

SEQ ID NO: 487250 - DNA, 345 bp, Shigella sonnei; identical to SEQ ID NO: 485793

SEQ ID NO: 487251 - DNA, 303 bp, Shigella sonnei; identical to SEQ ID NO: 21213

SEQ ID NO: 487252 - DNA, 303 bp, Shigella sonnei; identical to SEQ ID NO: 21213

SEQ ID NO: 487253 - DNA, 303 bp, Shigella sonnei; identical to SEQ ID NO: 484410

SEQ ID NO: 487254 - DNA, 447 bp, Shigella sonnei; identical to SEQ ID NO: 486126

SEQ ID NO: 487255 - DNA, 321 bp, Shigella sonnei
atggaaatatctctgaccgatcatgaaatcaggaccgtcctggcgcgcctggaggacatcccggaagaccagcggattgagtccggtatttcttccgccgcagcgatggagattatcagcaacgtgagcgaaaaccgcctggtgaccgtctctgctgaactgctggcgtccctgattcagaccgctgaacaggcactgtggaaacgtgagtgggccgcccgtgataacggcctcgccgtcccggaatgcgtcacccgccgtcaggcagtgattaatcaggcccgcaccctgctgaaaaacaacacacacgaaaacaactga

SEQ ID NO: 487256 - DNA, 738 bp, Shigella sonnei; identical to SEQ ID NO: 486991

SEQ ID NO: 487257 - DNA, 276 bp, Shigella sonnei; identical to SEQ ID NO: 484087

SEQ ID NO: 487258 - DNA, 216 bp, Shigella sonnei; identical to SEQ ID NO: 485850

SEQ ID NO: 487259 - DNA, 561 bp, Shigella sonnei; identical to SEQ ID NO: 485315

SEQ ID NO: 487260 - DNA, 261 bp, Shigella sonnei
atgctggcagtcagccaccgactgtaccgggcggaagacagagcggaacgtctggcgctggtcgcctgcctgctggctgttattccggcgcttaaccttgccaccagtgatgcagcggcggtggccggtcttgtgatgacggtgctgaccgttggtctggtgtcgtgtgcaggaaaatcattaccccgtttctggcccggggattttttcccggtattctacgcctgtcatctggctgtgctgggcgttctggcgctgtga

SEQ ID NO: 487261 - DNA, 522 bp, Shigella sonnei; identical to SEQ ID NO: 485834

SEQ ID NO: 487262 - DNA, 303 bp, Shigella sonnei; identical to SEQ ID NO: 21213

SEQ ID NO: 487263 - DNA, 327 bp, Shigella sonnei; identical to SEQ ID NO: 485848

SEQ ID NO: 487264 - DNA, 432 bp, Shigella sonnei; identical to SEQ ID NO: 487001

SEQ ID NO: 487265 - DNA, 303 bp, Shigella sonnei; identical to SEQ ID NO: 484410

SEQ ID NO: 487266 - DNA, 372 bp, Shigella sonnei; identical to SEQ ID NO: 11381

SEQ ID NO: 487267 - DNA, 303 bp, Shigella sonnei; identical to SEQ ID NO: 21213

SEQ ID NO: 487268 - DNA, 495 bp, Shigella sonnei
ttggcccgggcatgggcatctgcccgcgatgatttacggcatgcaaggcaacgtctgaaatcgtttcttctggttcatgggggccattatgtcgggcgagcagattggggccctgcacaccgacgctggctcagcaaatactcattcgaaagtccctggcgacaattagcttttgacgaacaccgtcgtacaatagaagaccggcaggcacaatgtgaacggctggaatccgccctgaaggaggccgttaccgaatggaggctgtatccggtagtagaggcgctgcaagccatgcgagggattcagtttattactgcggttggattaatttctgaactgggtgatctgacccgttttgaacatccacgacaactgatgtcatggtttggtatcacgccatcagaatattcatcgggtggaagcagacatcagggcagcattaccaaagccggaaacagctatgccagaaagctattggtcgaggcagcgtggtga

SEQ ID NO: 487269 - DNA, 252 bp, Shigella sonnei; identical to SEQ ID NO: 485878

SEQ ID NO: 487270 - DNA, 378 bp, Shigella sonnei; identical to SEQ ID NO: 476066

SEQ ID NO: 487271 - DNA, 348 bp, Shigella sonnei; identical to SEQ ID NO: 485869

SEQ ID NO: 487272 - DNA, 336 bp, Shigella sonnei; identical to SEQ ID NO: 485874

SEQ ID NO: 487273 - DNA, 276 bp, Shigella sonnei; identical to SEQ ID NO: 485876

SEQ ID NO: 487274 - DNA, 252 bp, Shigella sonnei
atgcgcgactggtggcagccgacgaaagcaaacttcttcggacacctgaaaaagccgcagattatcgcagccctgaatgaggcaggactgtccggtgctgcacgggacgcggagaagatgaagaaaggcgatgcggctgaacatgcagagcaccatatgaaagacaaccgctgggtgcctggctggatgtgtgcaccacgcccacagacggatgccactgaacgcaccgataacctggctgatgccgcctga

SEQ ID NO: 487275 - DNA, 252 bp, Shigella sonnei
atgcgcgactggtggcagccgacaaaagcaaacttcttcggacacctgaaaaagccgcagattatcacagccctgaatgaggcaggactgtccggtgccgcacgggacgcggagaagatgaagaaaggtgatgcggctgaacatgcagagcaccatatgaaagacaaccgctgggttccaggctggatgtgtgcaccacatccacagacagatgccactgaacgcaccgataacctggctgatgccgtctga

SEQ ID NO: 487276 - DNA, 261 bp, Shigella sonnei
atgctggcagtcagccaccggctgtaccgggcggaagacagaacggaacgtctggcgctggttgcatgcctgatggctgttattccggcgcttaaccttgccaccagtgatgccgcggcggtggccggccttgtgatgacggtgctgaccgttggtctggtgtcctgtgcagggaaatcattaccccgtttctggcccggagattttttcccgacgttctatgcctgtcatctggctgtgctgggcgttctggcgctgtaa

SEQ ID NO: 487277 - DNA, 222 bp, Shigella sonnei; identical to SEQ ID NO: 486481

SEQ ID NO: 487278 - DNA, 222 bp, Shigella sonnei; identical to SEQ ID NO: 486477

SEQ ID NO: 487279 - DNA, 1446 bp, Shigella sonnei
atgaaagggaaatctgcattaactcttctgctcgctggtatattttcgtgcggcacatgccaggcgacaggggcagaagtgacgagtgaatctgtatttaacattcttaattccacgggggcagcaacagataaaagttatttatcgttaaatccagataagtaccctaattatcgtcttctgattcactcagccaaattaaaaaatgaaataaagagccactataccaaagacgaaattcaagggttgttaacattaacagaaaacacacgaaagttaacgttgacggagaaaccctggggaacatttattcttgcttctactttcgaagatgacaaaacagcggcagaaacccactatgatgctgtctggctgagggatagtttatggggctatatggcattagtatcagatcagggaaatagtgtagccgcaaaaaaggttctgctcaccctgtgggattatatgtctacgctcgaccagattaagcggatgcaggacgtcattagcaaccccaaacgactggatggagttcccgggcaaatgaatgctgtgcatatccgatttgacagcaactcccccgtgatggcagatgtgcaggaagaaggcaagccgcagctgtggaaccataaacaaaatgatgcgttaggtctttatcttgatctccttatacaagcaatcgacactggtacaattaacgctgaagattggcaaaaaggtgaccgattaaaatcggttgcgctgctgattgcttatctggataaagccaatttctatgttatggaagattccggagcatgggaagaagatgcccgattaaacacatcttccgttgcactggtgacctctggactggaacgtttgtcgaacttactctcgaagaaagactctgtttttgtctctgatttactacgcgaagctaaagccaatgaactggatgaacctctttcaacaacgaggttgaaccacctcatagataaaggttatgaaagaataacgttacagcttgatttagggggagaatccccaggttatctggaaaaagataaacattacagagaagccgatgcggctttacttaatgttatttatcctgcaaatcttgcaaagataaacaccagaagaaaagagcaggttctaaaaatagttaaaaaactagcaggtccgtatggtataaaaagatacgagaaggataattatcagtcggcaaatttttggttcaatgatattaaaaccgataccgatcaaaattcacatgcgaaaagagatggatttgcccctatatttccagacatctgttatcacttaacccattacaagcccgctgccgcagatattcccgtggcgagcgataacccagcgcactatgcggatgccattcgttataatgctcgaacgcctctgcaaggttctttgctgccgttaacccgtctggtttgggcatga

SEQ ID NO: 487280 - DNA, 276 bp, Shigella sonnei
gtggcttctgtttctatcagctgtccctcctgttcagctactgacgggggggtgcgtaacggcaaaagcactgccggacatcagcgctatctctgctctcactgccgtaaaacatggcaactgcagttcacttacaccgcttctcaacccggtacgcaccagaaaatcattgatatggccatgaatggcgttggatgccgggcaactgcacgcattatgggcgttggcctcaacacgattttacgtcacttaaaaaactcaggccgcagtcggtaa

SEQ ID NO: 487281 - DNA, 2244 bp, Shigella sonnei
atgaaactgaatgcaacttatataaaaatgcgtgataaatggtgggggcttccgctgttcctgccttctttaatcttgcccattttcgcccacattaatactttcgcgcatatttcttccggtgaggtttttctcttttatctgcctctggcactgatgatcagcatgatgatgtttttcagctgggcggcattgccagggatcgccttagggatttttgtccgcaaatatgcagagctgggtttttacgaaacgctatcattaacggctaattttattatcattatcattctctgttggggcggttacagggtctttactccccggcgtaacaacgtttcacatggtgatacccgtttaatttcccagcgtatattctggcagattgtgtttcctgcaacgctgtttctgatacttttccagtttgctgcatttgtaggattactggcgagcagagaaaatctggtcggtgtcatgccttttaacctcgggactttaatcaattatcaggccttactggtgggtaatctgatcggtgtcccgctgtgctacttcatcattcgggtagtgcgaaatccattttatttacgtagctattattcgcaattaaaacagcaggttgatgccaaagtcaccaaaaaagagttcgcgctctggctactggcattaggtgctttattgttgctgttatgcatgccgttaaatgaaaaaagcacaatttttagcaccaattataccttgtcattattgctgcccctgatgatgtggggagcgatgcgctatggttataagctgatttcgctgctctgggcggtcgtgttgatgatcagcatccacagctatcaaaattacattcccatttatcctggctataccacgcagctgaccataacctcctccagttatctggtattctcttttattgtcaattatatggctgtactggcaacccgtcagagagcggtagtcagacgcattcagcggcttgcgtatatggacccggtggttcatctgccaaatgttcgcgccctgaatcgcgcgttgcgtgatgctccctggtctgcgctttgttatttacgcatccctggcatggaaatgctggttaagaactatggcatcatgctgcggattcaatacaagcaaaaactttctcactggctgtcacccttgctggaaccgggtgaagatgtttatcagctttcgggtaacgatctcgcgctgcgactgaatacagaatcgcaccaggagcgcattaccgcactggatagtcatctcaagcaatttcgtttcttttgggatgggatgccgatgcaaccgcagattggcgtcagttactgctatgtgcgctcgccagtgaatcatatctacctgctgctgggagagctaaatacggtcgccgaactttccatcgtgaccaacgccccggaaaatatgcagcgtcgcggggcaatgtatttgcaacgcgaattgaaagataaagtcgcgatgatgaatcgactacagcaggcgctggaacacaaccattttttcctgatggcccagccgattaccggtatgcgtggtgatgtttaccatgaaattcttctgcgcatgaaaggtgagaatgatgaactgatcgtccccgatagcttcttgccggtcgcgcacgaatttggtttatcgtcgagtatcgacatgtgggtcattgagcatacgctgcaatttatggctgaaaacagagcgaagatgcccgctcaccgttttgctattaatctgtctccaacctcggtatgtcaggctcgttttcctgttgaagtcagtcagttgctggctaaatatcagattgaagcgtggcaacttatttttgaagtcaccgaaagtaatgctctgaccaatgttaagcaggcgcaaatcaccttgcagcatcttcaggaattaggctgccagattgcgattgatgatttcggcaccggctacgccagctatgcacggcttaaaaatgtgaatgccgatctgcttaaaattgacggcagctttatccgcaatattgtgtcaaatagtctggattatcagattgtggcgtcgatttgccatctggcgcgaatgaagaaaatgcgggtagtggcagagtacgttgaaaacgaagagatccgcgaggcggtgctctctttggggatcgattatatgcagggttatcttattggtaagccgcagccgttaattgatacgttgaatgaaatcgaacccattcgcgaaagtgcctga

SEQ ID NO: 487282 - DNA, 480 bp, Shigella sonnei
atgaatattgtggtgcttatttccggcaacggaagtaatttacaggcaattattgacgcctgtaaaaccaacaaaattaaaggcaccatacgggcagttttcagcaataaggccgacgcgttcggccttgaacgcgcccgccaggcgggtattgcaacgcatacgctcatcgccagcgcgtttgacagtcgtgaagcctatgaccgggagttgattcatgaaatcgacatgtacgcacccgatgtggtcgtgctggctggttttatgcgcattctcagcccggcgtttgtctcccactatgccgggcgtttgctgaacattcacccttctctgctgccgaaatatcccggattacacacccatcgtcaggcgctggaaaatggtgatgaagagcacggtacatcggtgcatttcgtcaccgatgaaactggacggtggcccggttattttacaggcgaaagtcccggtatttgctggtga

SEQ ID NO: 487283 - DNA, 1419 bp, Shigella sonnei; identical to SEQ ID NO: 486709

SEQ ID NO: 487284 - DNA, 492 bp, Shigella sonnei
atgatcgattcgaatgccaaactgcgatcgattcagatgccattttgcaagcccggcacgataccagtgcaactgatagtcgaaagactgctcaaagaaaatctgctccagcttttcgatggcctcgtcactgaaaaaattctttttcggtttgcgacgcccgcctttgttgcggttagcgatgttcggattaaggtctgcctcgttgccggtctggctgtagcggtttacccgtgccagtcgttcaatctggcgtccgagcaggtcaatttccttgaagtcaccgccggttttctgcggtttgatgatgagctgggtcagccgcgcttccagactcatttcgacacggctgatgggggcaacactgtcccagccgtcgcgctgtttccagctctgcaccgtcgggcgtttcatctgcaacatggcggcaatctgcggcacggaaaacccctgccagtacagcagcgccgcctgacgacgcgggtcgtgtaa

SEQ ID NO: 487285 - DNA, 336 bp, Shigella sonnei
atgaaaatacagatgattactgatgctgatttaatggctgcaaccttaatttccagtggcatgtcagaacaaaaggtaaatgattttctggataatgtcgtataccaacgctatgagcaggccagagaaaatttaatttcagaaaaacgcacgatgattgccgaatcattaagtccagcctggattattgaggaattacgaaaaatcattgccagccaggataaagtagcggcagttgccgccctcgatgtgctacatcgaatgagtaaagagctattcaacaccgaattaattttaaatccggggggacataatgagccgcacatccctgattaa

SEQ ID NO: 487286 - DNA, 363 bp, Shigella sonnei
atgagtaaacgtatttatgacgacccgaaatatcgggctgaaatgcgggcgcaactggttgtcagtggatatacgccagagcaggccgatgcaacactgacggaactgatgggtgagcgtccatttgatgaagctgaatatgaatactggctgaagcagttcaggctggaaattctggaaaacaccacactgccatcgctgataagaataataaaaagcgttatcgacaatgcctgctacaacggtgattgcctggctgcagcaattgcgacccatgctctggtgaatctgctggaggttaccggcgcagttttcctgaatccagaaaaggtattaagagatgaaaatacagatgattactga

SEQ ID NO: 487287 - DNA, 540 bp, Shigella sonnei
gtgattgatgcaaaagttctgaacggtgtcagcacattattacgggcttacgggcgtctgacctgcggggttctggctgaaaaaatgaatatgctgccctcgtcaatggtgtatttcctgcgtgatgcggttgatgccggagtgctcaccgaatgcaacggattttatgacgttccgcgccctcgtctgacgtcacctgtaaggcgaaacacaacggagctgccaggggttgatgatgctgcatggtgcacgttccgtcgttctttgccttggctggaaggtaacgccattccggcactggcaaaagaatttgcgacaggcgtactgacctgcgagtcggtttacatcgttgctgaagtggatgacgagatgtgcaaacagggaatgccccgttttgtgatggcgtatatcgatatccggctgggtcgttttatttgtggctccagtggctggaatatcaccgaccacgtcctgcgctatctcattcttgattattcaccggttccggcggaaacacaggaaatcagcgggcatgattaa

SEQ ID NO: 487288 - DNA, 420 bp, Shigella sonnei
atgaacgtcaaaatccgaaatgaaatccgggcattaattcggattaaagagcgtaataacaatggtggagacttgcgcgaatttatttgtgcgcgcgaagttgaggggtatggcgaaaagacttacctgattgcatttgaccattacagcatttgtgcgcgttattgcggagaggcggtattccgcgccattacgtttggcaatgccttcaatgtggatttatgggaatacgtcatggaccgcgaatacatctgcgcgtcagacccgaaagcccgtgaaatgtggcagcgtatctggcgcgattaccggttaatggcaaaaggctgggcgcgctgctgttattcctcgcttgtcctgaaagcggttcagttatcgctgcggcatattccggcatcactgcgcgagcctctgttgtactga

SEQ ID NO: 487289 - DNA, 297 bp, Shigella sonnei; identical to SEQ ID NO: 5319

SEQ ID NO: 487290 - DNA, 423 bp, Shigella sonnei; identical to SEQ ID NO: 466983

SEQ ID NO: 487291 - DNA, 981 bp, Shigella sonnei; identical to SEQ ID NO: 239462

SEQ ID NO: 487292 - DNA, 336 bp, Shigella sonnei; identical to SEQ ID NO: 26838

SEQ ID NO: 487293 - DNA, 705 bp, Shigella sonnei; identical to SEQ ID NO: 8686

SEQ ID NO: 487294 - DNA, 705 bp, Shigella sonnei; identical to SEQ ID NO: 8686

SEQ ID NO: 487295 - DNA, 804 bp, Shigella sonnei; identical to SEQ ID NO: 6089

SEQ ID NO: 487296 - DNA, 837 bp, Shigella sonnei; identical to SEQ ID NO: 6088

SEQ ID NO: 487297 - DNA, 591 bp, Shigella sonnei; identical to SEQ ID NO: 305136

SEQ ID NO: 487298 - DNA, 234 bp, Shigella sonnei; identical to SEQ ID NO: 21645

SEQ ID NO: 487299 - DNA, 126 bp, Shigella sonnei; identical to SEQ ID NO: 474461

SEQ ID NO: 487300 - DNA, 678 bp, Shigella sonnei; identical to SEQ ID NO: 474460

SEQ ID NO: 487301 - DNA, 543 bp, Shigella sonnei; identical to SEQ ID NO: 464540

SEQ ID NO: 487302 - DNA, 921 bp, Shigella sonnei
atgaacaaaatatttaaagttatctggaaccctgcgacagggaattatactgttaccagcgaaacggcaaaaagccgtggcaagaaatctgggcgcagtaagctgttaatttctgcgctggttgcgggtggaatgttgtcgtcgtttggggcattggcgaatgccgggaatgacaacggccagggtgttgattacggtagtggatcagctggcgacagctgggttgctataggcaaaggggcgaaagcaaatacttttatgaacaccagtggttccagtactgctgtgggttatgacgctatagctgaaggccaatatagctctgccatcgggtcaaaaacccatgcgattggtggtgcatcaatggcctttggggttagtgcaatatcagaaggcgatagaagtatagcactgggtgcctcttcgtattcattgggccaatactcaatggccctcggccgttattcaaaagcattgggtaaattgtctattgctatgggggactcttccaaagcggaaggagcaaacgccattgccctgggaaatgccactaaagctactgagattatgagtattgctcttggcgacaccgccaatgcgtcaaaagcgtattcaatggcgctgggagcaagtagcgtcgcatctgaagaaaacgcaattgccctggggcgtagcagtgtagctagcggtactgacagcctcgcatttggcagacaatcacttgccagcgcagcgaacgctattgcgataggtgctgagaccgaagccgctgaaaatgcaactgctattggcaataatgcgaaggcaaaagggactaatagcatggcaatggggttcggaagccttgccgataaagtcaatactatcgcattaggaaatggcagccaggctctggcagataatgcaatcgccataggctag

SEQ ID NO: 487303 - DNA, 483 bp, Shigella sonnei; identical to SEQ ID NO: 483872

SEQ ID NO: 487304 - DNA, 2817 bp, Shigella sonnei
ttgcaattagaagtacgatttggtggtgactatacgagtactaaaactcttgctgcaaaatatgctggttcgaaatggacaaataaatttcttggtaagggtattgttagtatcagtaccgttatcttaaaaactcaagattcattagaaaataatattcttgttaatgatcaattcgctttaactgtagaaatgaaagggcaggtgatttatgattttgttgatggtacttataaagcaagtagtaaccctccttcaattatctatgattacttaacaaattcaatctatggtatgggtattgatccatcattgattaataccgatacgtttgcagaaaccgcagcatattgtgatgcttttgaatattatgctaatggtgctatcagttatcaaaaaacctataaagataatattgaaaatatctgtcagtcatttggcggcatcatgtatgtacatgccggacaaatctgtattaccacagaccgcaaatcggtatccgtagcctcatttgatgagcgtaacatggtaggggcggtacaggtttctacttctggcggtactgactacttcaacgtagtcgattgcaagtttactaaccctgaatcgatgtacaccactgacgtagtacgtatcccttccgatatcactacggatgaagcagtacagcatgatggacaggtcatagcattatcacgcgattactcatggtcatatgatcaagaggtgattgcaaaaatggctaacgttgatgtactcaaggctaagtatgccctgcgtactatcagcttcaccacaagtgaaggttgggatctcgaagtatgggatgcgatcaatgtcagcaatgaagaactcgctatctcaggcaaatttaaagtactcaataaagatatcagcaccgatcaagagaacgttggctatgtaaccatcacggcagtagaagcacctgatgcaatgtatgatggtattgatccgggtatctggtcgcctggtggggtaattaacttccctgaactacaggtactaccgccaacgaacctacaggcagtacgtaaggggaatactacttctggttcaatcgtggatcttacctgggatgcttcaccagatccgtatctgcgtgggtactatgtttactaccgtcttaacggttccagtacctggacgtatgcggggcagactggcgtacagaagcttgattatgaattatttggattgtctgatactgcaagctacgacttttcggtagaggcttacaacaacttagggctggtatccaagaagctttccctaactggcattgttccaacattcaactttgcactacctgcggtaacgcgtgtagtactgacaaataaaacagaatcagcgtatgtaactgactcaccagatttcaatattgcctgggattcacaaaaagatatcagagtgaataaccgatcatttagtgagtacttcaagtattacgttattaaaatctatgacggtactaaattagtagatacattctatacgcaaagtaatgcctttaatttcactcttgaaatgaaccgtctgaaagtacgtaagcctaccattggtattatcgcacagggatttaatgatggtacatattcagaggaagtgaaaataaccgtagagaataaacagtgtggtttagtagaggatgttagctttacgggtggttttggtaatttgtttgcttcatggactaaatctactgaacgtgattatgcaggtgcgattatcagtattgttaatggtactaatacacgtatattcaccagttatgcacctgaatttgattcaataccaaacatcactgatggtgagtataaggttaagatgggattctttgatgtgtttggtactgatgatattcaatattgtccagaacaaacaatcagtatcaactccaagtaccagtttaccgaagatgatgcagaggcaattaacgggattcttgatttagaagatcgcctgactggtaccattaatgatgcggtcaaaattgccaataagaataccagtactgttatcagtgcatcagaggcacgtaccaatgataaaatcactgccagtgagaaaacgttaagtactcagatcactggggtaaatagttccttatcacagaaacttagcaccgttgaaagtactgccaatggtaacaaggccagtatccagacactatcccagacggtaacggataacaacaaagctcagactacagcagtctcacagctacgtagtgatgtgaatggacagattgccactgttaaccagtcaatgagtactaaagccgataaatctactgtagatgctcagtactcactatcagtacaggctaatggcacggtagctggtatgcgtcttgttgcgagtagtggaacgagtaacaactcagcaatctatttcgctgcgaacaagttcatagtctccggtactgacactgctactgtaggtggtactgcaccatttgccatagtcaacggtactacatacttgaagacggcaatgatacaggcggcaagtatcggtactggttacatcgctgatgcggcaattaccaatctaaaactggcctccggctcagtgaatacattaaacgtggttgatggttgtataactacagccaaaatctcaaatactattcaaagtactaattacgtagcaaataaaacaggctggcaaatcaataaagcaggtacgatcctaatcaatggaacgggtggtactggtagaatggtaatcagtaataatattattcaaatctatgacaataataatacgttacgtgtacgtatgggtttatggtaa

SEQ ID NO: 487305 - DNA, 276 bp, Shigella sonnei; identical to SEQ ID NO: 484087

SEQ ID NO: 487306 - DNA, 597 bp, Shigella sonnei
atgtcagcccggtcacgctcctgcccggcaatttccctgacagcctgctctgttttgccatccggcaggtcaggtttgttctctgccatttttctgacaatttcatctgcgcggcgttccgtttcacggcggatggcctcttcagcctgccgctgtgccagcacctctgccgtgaccggttcgccatttccggctcccggctggacgctgctgtccgggatatccccccacacgcgaccaccggtgatggcaccgggattccacggacgaccttcaccggcaattcttaccaccacaccgctgtcaggattatcacgggcaatccggacaccatcctgcatattatcagccagcaggctctctccgttacggctgccctgcagggccacgaactgcgcatccccgctgcctttcacccgtccttcaccgctgaatccccgcagcccgtttccgtcatccgtggtcagtgggttcagccagataccggcggacctgccgttacggtcaaacgccggcagtgccacatacggctgcggatatttacgtcccggagcaataaaccgtgcaggactgtctcccccggccagccccgcctga

SEQ ID NO: 487307 - DNA, 570 bp, Shigella sonnei
atggcctgctgtgccggcgtgtgcagcccggctttctgcagactgatagcggtttccagcgatgtctcaccggcccgcgcctttatctgctcagaaaccaccgtaaaggagggatggcgggcaagtttttccgcagtacgggtttcatccagtgaggaatacagccggacatcacgaccgctgcgggccagaccgttcagggtggcgttgtccattgccatctgtgtgacggaggcaaacaccgtcgcactgtcactgacggaatgcccgggcgtttccacccagccgttctccagcttcagtgccgtgaacggtgaatcgctcacaggcagggaggccggttcagcccgccccggcacaacaaccgtcatcgcatcttcactgacggatgccacctgcaggcggtcaccgccggagacgcggagtccgggaattttccctgtcaccctcagtcgctcgccgtctgccaccggcattttttccggccggaacagcgaccagctgctgtccagggaggaaatacgcaccacctgcgtttcgccctgcgcatcccgcagggtcaggctgtga

SEQ ID NO: 487308 - DNA, 498 bp, Shigella sonnei; identical to SEQ ID NO: 154001

SEQ ID NO: 487309 - DNA, 393 bp, Shigella sonnei; identical to SEQ ID NO: 24317

SEQ ID NO: 487310 - DNA, 282 bp, Shigella sonnei; identical to SEQ ID NO: 472318

SEQ ID NO: 487311 - DNA, 258 bp, Shigella sonnei
atgaaagtcatattcacttctaatcgtcttgttgattttcttatccggcttttgattacagcgattgtcatttctccggtaattatctggtcgtgggatacggtaaaagaaaccacggcagacgagatgcttgccgctgctttcgttatcctttactccggtgtgctcctgtttattctgtatttttgtttttctgccctgactggcctgcagaaagctgatgaaagaaaaaatgatgaaaggaatgaagatgaataa

SEQ ID NO: 487312 - DNA, 306 bp, Shigella sonnei
atggcaacaatggacagtaaatatattcagcacctcaggaaaataggtgctgtgctgctcaggctgataagcagaacattaaaattatttccttttggtcttgtaatagtgcccgttatattattttattttgcacctgacagttttctcgctgaaattattcatgaatggaagaaggcagatatatcagaacaagtgacacttgtcagattatatctgaaggtgacatttacatgtgtgtttatggctgtttttctcaattatcttttttctgatgagttcatgcctgtaaatagcagaaagtga

SEQ ID NO: 487313 - DNA, 276 bp, Shigella sonnei; identical to SEQ ID NO: 486783

SEQ ID NO: 487314 - DNA, 276 bp, Shigella sonnei; identical to SEQ ID NO: 484087

SEQ ID NO: 487315 - DNA, 231 bp, Shigella sonnei
gtgacgcgcaggccgctggcgtggggtgaagccgatatcactgcgatcaaacgtctttccgatatgggcttcaaagtcaccgtcaccggtggcctggcgctggaagatctgccgctgttcaaaggcattccaattcatgtgtttatcgccggtcgcagcatccgtgatgccgcttctccggttgaagccgcgcgtcagttcaaacgttccatcgccgaactgtggggctaa

SEQ ID NO: 487316 - DNA, 342 bp, Shigella sonnei; identical to SEQ ID NO: 466452

SEQ ID NO: 487317 - DNA, 1641 bp, Shigella sonnei; identical to SEQ ID NO: 484636

SEQ ID NO: 487318 - DNA, 384 bp, Shigella sonnei; identical to SEQ ID NO: 7741

SEQ ID NO: 487319 - DNA, 366 bp, Shigella sonnei
atgaatactgttttaagtgttcagggtgcttctgcgcccgttgaaaagaaatcgtttttttctaaattcactcgtctgaatatgcttcgcctggctcgcgctgtgatccctgctgctgttctgatgatgttcttcccgcaactggcaatggccgcccagggggcaggtcaggacctgatgcagagtggtaactccacggttaaggcgaccttcggtaaggactccagtgttgttaaatgggttgttctggctgaagtcctggtcggtgcggtcatgtacatgatgaccaaaaacgtcaagttcctggccggttttgccatcatctctgtatttattgctgtgggtatggccgtcgttggcctctga

SEQ ID NO: 487320 - DNA, 312 bp, Shigella sonnei
atgtcgggagacgagaataaacttaagaaatatcgtttcccggaaacactgaccaaccagagccgctggtttggcctgccactggatgaactgatccccgcagcagtctgtattggctggggtatcacaacatcaaaatatctgttcggtattggtgcagcggttctggtttatttcgggattaaaaaactgaaaaaagggcggggcagttcctggttacgagacctgatttactggtatatgccaacagccctgctgcgcggtatttttcataatgttcccgattcgtgtttccggcagtggattaaatag

SEQ ID NO: 487321 - DNA, 585 bp, Shigella sonnei; identical to SEQ ID NO: 235305

SEQ ID NO: 487322 - DNA, 348 bp, Shigella sonnei; identical to SEQ ID NO: 75646

SEQ ID NO: 487323 - DNA, 669 bp, Shigella sonnei
atgagtaataacccacttgaggccgtcactcaggcggttaactccctcgtcacagcactgaaactgcctgacgaatcagcaaaggccaatgaagtgctgggcgaaatgagcttcccgcagttcagccgtctgctgccgtaccgtgattacaaccaggagtccggcctgttcatgaatgacaccacgatgggctttatgctggaagccattcccatcaatggtgcgaatgagtccattgtggaggcgctcgatcatatgctgcgcaccaaactgccgcgcggtattccgttgtgtatccatctgatgtccagtcagctggttggtgacaggattgaatacgggctgcgtgagttctcctggtcaggtgaacaggctgaacggtttaacgccattacccgtgcctattatatgaaagcggcagcgacacagttcccgctgccggaggggatgaatctgcccctgaccctgcgccattaccgggtgtttatctcgtactgttctccctcgaagaaaaaaagccgggccgacattctggaaatggaaaatctggtgaaaatcatccgtgcctcttttcacggcgcaaaaatcaccacacagacagtggatgcacaggctttcatcgagatacttcaggcattaaatgatgctcattcagcaaaggaacattaa

SEQ ID NO: 487324 - DNA, 315 bp, Shigella sonnei
atggatacacaacggaataccgcgcggcagtttggtgcgcagcatatgatcgagcgcctccacaatggactcattcgcaccattgatgggaatggcttccagcataaagcccatcgtggtgtcattcatgaacaggccggactcctggttgtaatcacggtacggcagcagacggctgaactgcgggaagctcatttcgcccagaacttcattggcctttgcggattcgtcaggcagtttcagtgctgtgacgagggagttaaccgcctgagtgacggcctcaagtgggttattactcatatgagtattccttag

SEQ ID NO: 487325 - DNA, 261 bp, Shigella sonnei
gtgatactggttgtctggagattcagggggccagtctatgaagtacgtgtagtgatttctgaattcgtagcagatggtactattctaatgggcgatttctccaatgtaattctcgctaattgggaagggcaggaagtagattatgacgatacatcctatcgttcaagtaacactatcgtatatcgcgtatgggattactcagatatcgcacttgcacactctgaagctttcgtaaatatcgttattggtaaagcagaataa

SEQ ID NO: 487326 - DNA, 276 bp, Shigella sonnei; identical to SEQ ID NO: 484087

SEQ ID NO: 487327 - DNA, 276 bp, Shigella sonnei; identical to SEQ ID NO: 484087

SEQ ID NO: 487328 - DNA, 1281 bp, Shigella sonnei
gtgaaacatctgacagaaatggtgagacagcacaaagcgggcaaaacaaatggaatttatgccgtttgttccgcacatccgctggtgctggaggctgcaatccgctacgccagtgcaaaccaaacgccgttactgattgaagcaacctccaatcaggtagaccagttcggcggttataccggaatgacgcccgccgattttcgcggctttgtttgtcagctcgccgactcgttgaatttcccgcaggatgcgttgattctgggtggtgaccatctggggccaaaccgctggcaaaacctgccagccgctcaggcaatggccaatgccgatgatttgattaaaagctacgttgcggcaggattcaaaaaaatccaccttgattgcaacatgtcctgtcaggacgatccaattcccttaactgatgacatcgtggctgaacgcgccgcccgtctggcgaaagtggcggaagaaacctgtcgcgaacactttggcgaagccgatctggagtatgtcattggtaccgaagtgccggtacctggcgacgcgcatgaaaccttaagcgagctggcggtcaccacgccggatgccgcccgcgccacgctggaagcccatcgtcacgcctttaaaaagcagggtctgaatgccatctggccacgcatcattgccctggtggttcaacccggcgtcgaattcgatcacaccaacgttattgattatcagcccgccaaagcgaccgccttaagccagatggtcgaaaactacgaaacgctgatattcgaagcgcactctacagattatcaaacgccgcaatcgctgcgccagctggtgattgatcactttgccattctgaaagttggcccggcgctgaccttcgccctgcgtgaagccctgttttctctggcggcgattgaagaagaactggtgccagcaaaagcctgttccggtctgcgtcaggtgctggaaaacgtgatgctcgaccggccggaatactggcaaagccactaccacggtgacggcaacgcgcgtcgtctggcgcgtggttatagctactcggatcgcgtgcgctattactggccggacagccagattgatgacgctttcgctcatctggttcgtaatctggcggattcaccaattccgctaccgctcatcagccagtatctgccgctgcaatacgtgaaagttcgctccggcgagctgcaaccgacgccacgggaactcattatcaaccatattcaggacatcctggcgcagtaccacacagcctgtgaaggccaataa

SEQ ID NO: 487329 - DNA, 474 bp, Shigella sonnei; identical to SEQ ID NO: 471938

SEQ ID NO: 487330 - DNA, 780 bp, Shigella sonnei
atggaaatcagtctgttgcaggcattcgcgttgggcattatcgcctttatcgctggcctggatatgtttaacggcctaacccatatgcaccgcccggtggtcctcggcccgttggtcgggctggtacttggcgatctgcataccggaattttaaccggcggtacgctggaactggtgtggatggggctggccccgctggcgggcgcacagccgcctaacgtgattatcggtactatcgtcggcacggcgtttgccattactactggcgtgaaacccgatgtcgcagtcggtgtcgccgtacctttcgctgtcgcagtacagatggggattaccttcctgttctcggtgatgtctggcgtgatgtctcgctgcgaccggatggcggagaacgccgatactcgcggcattgaacgcgtgaactatctggcactgctggcactcggcactttctattttctctgcgctttcctgcctatctacttcggcgcggaacatgcaaaaaccatcattgatgtcctgccgcaacgattaatcgacggcctcggcgtcgcgggcggcatcatgccagcaatcggttttgccgtgctgctgaaaatcatgatgaaaaacgtctacatcccctacttcatcctgggctttgttgccgcagcctggctcaagttaccggtgctggctattgctgccgctgcgctggcgatggcgctgatcgacctgctgcgtaaatctcctgaaccgactcaaccttcggcacagaaagaggaatttgaagatggcatctaa

SEQ ID NO: 487331 - DNA, 879 bp, Shigella sonnei
atggcatctaatcaaaccaccctgccgaacgtcagtgaaaacgaagaaacattgctgactggcgtcaatgaaaacgtgtatgaagatcagagcattggcgcggagctgacgaaaaaagatatcaaccgcgtcgcctggcgttccatgttgttacaagcgtcttttaactacgaacgtatgcaggcttctggctggttgtacggtctgctgcctgctctgaaaaagatccacactaataaacgcgacctggcgcgcgccatgaaggggcatatgggtttcttcaatacccatccgtttctggtgacgtttgttatcggcattatccttgcgatggagcgttctaagcaggacgttaacagtattcagagcaccaaaattgccgtcggtgcgccgcttggcgggattggcgatgcaatgttctggctgacgctactgccgatttgtggcgggataggcgcaagcctcgcgctacaaggctctattcttggcgcagtcgtctttattgtgctgttcaacgtggtacacctggggctgcgttttggtctggcgcattatgcttaccgcatgggcgtggcggcgattccactcattaaagcgaataccaaaaaagtcggccatgctgcgtcaatcgttggaatgacggtaatcggcgcactggtggcaacctatgttcgtttaagcaccacgctggaaatcacagcgggcgacgcagtggttaagttacagactgatgttattgacaaactgatgcctgccttcttaccgctggtctacaccctgaccatgttctggctggtacgccgcggctggagtccgctgcgcctgattgcagtgaccgtggttctcggcatcgtcggtaaattctgccatttcctttaa

SEQ ID NO: 487332 - DNA, 435 bp, Shigella sonnei
atgttaagtattattttgacagggcatggcgggtttgccagtggcatggaaaaagcaatgaagcaaatcctcggcgatcaatcgcagtttattgccatcgattttcccgaaacctcaagcaccgcgctgcttacatcgcagcttgaagaggccatcgcccaactggattgtgaagacggcattgtttttctgacggatttgctgggcggcacgccgtttcgcgtagcttcaacgctggcgatgcaaaaaccgggctgtgaagtgattaccggcaccaatttgcaactgctactggagatggtgctggagcgcgaagggttaagcggtgaagagttccgtgtgcaggcgctggagtgtggacaccgtgggctgacctgtctggtggacgagttaggccgctgccatgaggaatgtccggtcgaggaaggaatatga

SEQ ID NO: 487333 - DNA, 1134 bp, Shigella sonnei
atgacacacgttctgcgcgccagaaggctgctgactgaagagggatggctcgatgaccatcagttgtgtattactgacggtgtcatcgcagcaatcgaaccgattccagtgggcgtgactgaacgcgatgcggaactgctctgccctgcttacatcgacacccatgtacacggtggtgcgggcgttgatgtaatggatgacgcgccggatgtgttcgacaagctggcaatgcacaaggcacgcgaaggtgtcggcagttggttaccgaccaccgtaaccgcgccgcttaataccattcatgcggcgctgaaacgtattgctcaacgttgccaacgcggcggacctggtgcgcaagtgctggggagttatctcgaaggaccgtacttcacgccgcagaataaaggcgcgcatccgccggagttgtttcgcgagcttgaaattgccgagctggatcagttgattgccgtttctcagcacaccttacgtgtggtagcgctggcaccggaaaaagaaggggcattgcaggccatccgccatcttaaacagcaaaacgtaagggtgatgctggggcatagcgcggcggcctggcaacaaacccgcgccgcatttgatgctggtgccgacggcctggtgcattgctataacgggatgacaggtttacatcaccgcgaaccgggaatggttggcgcgggattaacggacaagcgcgcctggctggaactgatagccgatggtcatcatgtgcatccggcggcaatgtcgctgtgttgttgctgtgcgaaagagagaatcgtactgatcaccgacgcgatgcaggccgctgggatgccggatggtcgctatacgttatgtggtgaagaagtgcagatgcacggtggcgttgtccgtaccgcgtccggtgggctggcgggcagtacgctatctgtcgatgcagcagtgcgcaacatggtcgagttaacgggcgtaacgcctgcggaagccatccatatggcgtcgctgcatccggcgcgaatgctgggtgttgatggtgttctgggatcgcttaaaccgggcaaacgcgccagcgtcgttgcgctggatagcgggctgcatgtgcaacaaatctggattcagggtcaattagcttcgttttga

SEQ ID NO: 487334 - DNA, 1155 bp, Shigella sonnei
atgccagaaaattacacccctgctgccgccgcaaccgatacatggactgaagaagagatccgccatcagcctcgcgcatggatccgttcactcaccaacatcgacgcgctacgttccgcgctcaataacttccttgaaccgttactgcgcaaagagaatctgcggatcatcctgaccggagccggaacgtcggcatttatcggtgacatcatcgcgccgtggctcgccagccataccggtaaaaacttcagcgccgtaccgaccaccgatctggtcaccaatccgatggactacctgaatccagctcatccgctgctgttgatctccttcggtcgatccggcaacagcccggaaagcgtcgccgccgtggaactggcaaatcaatttgtacccgagtgctatcacctgccgatcacctgcaacgaagcgggcgctctttaccaaaacgcgatcaacagcgataacgcgtttgccctgctgatgcccgcagaaacgcacgatcgcggctttgcgatgaccagcagcattaccaccatgatggccagctgcctcgcggttttcgcacctgagacgatcaacagccaaaccttccgcgatgtggcggatcgttgccaggcgatcctgacctcactgggtgatttcagcgaaggtgtgtttggttatacaccgtggaaacggatcgtttatctcggcagcggtggcttacagggcgcagcacgcgagtcggcgctgaaagtgctggaactgactgcgggtaaactggcggccttctatgattccccaaccggattccgtcatggcccgaaatcgctggtcgataacgaaacgctggtggtggtatttgtctcaagccacccttacacccgtcagtatgatcttgatctgctggctgaacttcgccgtgacaaccaggcaatgcgcgtaatcgccatcgccgcggaaagcaccgacgttatcgccgctggcccgcatatcatcctgccgccatcccgtcactttatcgacgttgagcaggcattttgcttcctgatgtacgcccagacgtttgcactgatgcagtcgctgcacatgggcaatacgccggataccccatcagccagtggcaccgttaaccgcgtggtgcaaggcgtaatcattcatccgtggcaggcataa

SEQ ID NO: 487335 - DNA, 861 bp, Shigella sonnei
atgagcattatctccaccaaatatctgttacaggacgcccaggccaatgactacgcggtgcctgcctttaacattcataacgccgagacgatccaggcgatcctcgaagtgtgcagtgaaatgcgatcgccggtgatcctcgccggaacgccggggacctttaaacatatcgcgctggaagagatctacgccctgtgtagcgcctattccacaacctacaacatgccactggcgctgcatctcgaccaccacgaatcgctggatgatattcgccgtaaagtccacgcaggcgtgcgcagtgcgatgatcgacggcagccacttcccgtttgccgagaacgtaaagctggtgaaatcggttgtcgacttctgccactcccaggattgcagcgtggaagcagaactgggccgcctgggcggtgttgaagatgacatgagcgttgacgccgaaagtgcattcctgaccgatccacaagaagctaaatgctttgtcgaactgactggcgtcgacagcctggcggtagcgattggtacggcgcacggcttatacagcaaaacgccgaagattgatttccagcggctggcggaaattcgtgaagtggtggatgttcctctggtgctgcatggtgccagcgatgttccggatgaatttgtccgtcgcactattgaacttggcgtcacaaaagtgaacgttgccacagaattaaaaatagccttcgctggcgcggttaaagcctggtttgcggaaaatccgcagggtaatgatcctcgttattatatgcgcgtcggaatggatgcgatgaaagaagttgtcagaaataaaattaatgtctgtggttcagcgaatcgaatttcagcataa

SEQ ID NO: 487336 - DNA, 276 bp, Shigella sonnei
gtggcttctgtttctatcagctgtccctcctgttcagctactgacggtgtggtgcgtaacggcaaaagcactgccggacatcagcgctatctctgctctcactgccgtaaaacatggcaactgcagttcacttacaccgcttctcaacccggtacgcaccagaaaatcattgatatggccatgaatggcgttggatgccgggcaacagcacgcattatgggcgttggcctcaacacgattttacgtcacttaaaaaactcaggccgcagtcggtaa

SEQ ID NO: 487337 - DNA, 189 bp, Shigella sonnei; identical to SEQ ID NO: 463227

SEQ ID NO: 487338 - DNA, 771 bp, Shigella sonnei
atgtttgacacaaagcaaattagatactcaggtaaagatggtatctattttcaccttagagataatgtggaatcttttcttgccttaacagctactgaacagatggactatgactcaccgatgatggtgacaactcaggctatgcaatcggggcaaactatcactgataatgttcagagagcacctaagaccatctctattagcggtgttgtagtggttgattcgacgggttcagttctattaaccagacaggggcaacttgtagaaacctttatttctacggttgaacaatggcgagaccagaagcaaatcatcactattgtttgtagagatggaatagctatcactgatagtatcattactcagtttaaagcgagtaaagagcataccattgctaacggtcttcgtattcagatgaccttccaaggtgtagagtttcgttcaatcgtaggtcagactgatgtttcggctgctactggaaagaccgctaccacgaatgatggcggtgctaccagtaaaaagaacaccggaaacactacaacgagccttggaagccctatgctgacctgtaaagagctttttggctattcggcaagtgagttatcagatgaagcgctaaaagcccgtgtaacgagctctaagagcgttagcgttaaaaatggtgagagcaccttctcagatgccgctaatgagcaagcttcaaaggtgcttaagccgggtaatgctctgcgaaagtactctgtgaaccctaacaagaagggcacttattga

SEQ ID NO: 487339 - DNA, 342 bp, Shigella sonnei; identical to SEQ ID NO: 466452

SEQ ID NO: 487340 - DNA, 243 bp, Shigella sonnei; identical to SEQ ID NO: 7701

SEQ ID NO: 487341 - DNA, 324 bp, Shigella sonnei; identical to SEQ ID NO: 239471

SEQ ID NO: 487342 - DNA, 216 bp, Shigella sonnei; identical to SEQ ID NO: 474374

SEQ ID NO: 487343 - DNA, 519 bp, Shigella sonnei; identical to SEQ ID NO: 474373

SEQ ID NO: 487344 - DNA, 435 bp, Shigella sonnei; identical to SEQ ID NO: 474371

SEQ ID NO: 487345 - DNA, 234 bp, Shigella sonnei; identical to SEQ ID NO: 466988

SEQ ID NO: 487346 - DNA, 3858 bp, Shigella sonnei
atgaataaaatttattcactgaaatatagtcatattacaggtggattagttgctgtttctgaactgacccggaaagttagtgtcggtacatcaagaaagaaagttatcctcggtattattttatcctcaatatatggaagttatggcgaaacagcatttgcagcaatgctggatataaataatatatggacccgcgattatcttgaccttgctcaaaacagaggagagttcagaccgggtgcaacaaatgttcaattaatgatgaaagatggaaagatatttcattttccagaactacctgtacctgatttttctgctgtttccaacaaaggtgcaacaacatcaattggaggtgcgtacagtgttactgcgactcataacggtacacagcatcatgcaataacaacacagtcatgggatcagacagcatataaagcaagtaacagagtatcatctggcgacttttcggttcatcgtctgaataaattcgtcgtggaaacaacaggggttacggagagtgccgacttctcactttctcccgaagatgcgatgaaaagatatggcgtaaactacaacggtaaggaacaaataattggcttcagagcaggtgccggaacaacctcaacgatattaaacggcaaacaatatctgtttggacaaaactataatcccgacttgttaagcgcaagtctttttaatctggactggaaaaacaagagttacatttataccaacagaaccccttttaaaaactcaccaatttttggcgatagtggttctggttcttatctatatgataaagaacaacaaaaatgggttttccatggtgttaccagtacagttggttttctcagtagtaccaatatagcctggacaaactactcgttatttaataatattctggtaaacaatttaaaaaagaatttcacaaacactatgcagctggatggtaaaaaacaagagttatcatcgattataaaagataaggacctgtctgtctcaggaggaggggaattaacgctcaagcaggataccgatcttggcattggcgggcttatattcgataagaaccagacatataaagtgtacggaaaagataagtcttataaaggtgccgggatagatattgataataataccaccgttgaatggaatgttaagggcgttgccggagataatctgcataaaataggtagtggtactctggatgtaaaaatagcacagggaaataaccttaaaataggtaatgggactgtcatccttagtgctgaaaaagccttcaataaaatttacatggccggaggtaaaggtacggtaaaaataaatgccaaagacgctttaagcgaaagcggtaatggcgaaatctattttaccagaaatggcggaacactggatctaaacggctatgaccagtcatttcagaaaatcgcagcaacagatgcgggaacaaccgtaacgaactcaaacgtgaagcaatcaacattatcacttactaatactgatgcatatatgtaccatgggaatgtatcaggtaatataagcataaatcatattatcaatactacccagcaacataacaataatgccaatctgatctttgatggctcagtcgatatcaaaaacgatatctctgtccggaatgcacagttaacattacaaggacatgcgacagaacatgccatatttaaagaaggcaataacaactgtccaattccttttttatgtcaaaaagactattctgctgccataaaggaccaggaaagcactgtaaataaacgttacaatacggaatataagtccaacaatcagatagcctctttttcccagcccgactgggaaagtcgtaaatttaatttccggaaattaaatttagaaaacgcaaccctgagtataggccgggatgctaatgtaaaaggacacatagaggctaaaaactctcaaattgttctgggaaataaaactgcatacattgacatgttctcaggaagaaacattactggcgaaggttttggattcagacaacagcttcgctccggggattcagcaggcgaaagtagtttcaacggcagtctgagtgctcaaaacagcaaaataactgttggtgataaatcaactgttactatgactggtgcattatccttaattaatacagacctgattatcaacaaaggagctactgttaccgcccagggaaaaatgtatgtagataaagctattgaactggccggaaccctgacattaacaggcacccctacagaaaataataaatacagcccggcaatctatatgtcagatggatataatatgacagaagatggtgctacgttaaaggctcaaaattatgcctgggtcaatggtaatataaaatcagacaaaaaagcatctattctgtttggtgttgaccagtataaagaagataacctggacaaaaccacacacacaccgctggctacaggtttgctgggtggctttgatacttcttataccggaggtattgatgctcctgctgcctcagccagcatgtataacaccttatggagagtaaacggacagtcagccctgcaatcattaaaaacccgcgacagtcttttgttgtttagtaacatagagaattcgggtttccatactgtgacagtaaacacactggatgccactaatactgctgtgattatgcgggctgatctgagccagtctgtaaatcaatcggataaactcattgttaaaaatcagttaaccggaagcaataacagtctgtcggtcgatatacagaaagtgggaaataataactcaggattaaacgttgacctgataacagccccaaaaggaagcaataaagagatatttaaagccagtactcaggccataggtttcagcaacatatctcctgtgatcagcacgaaagaggatcaggaacataccacgtggaccctgaccggatataaggtggctgaaaatacagcatcttccggtgcagcaaaatcgtatatgtccggtaattacaaagccttcctgacagaagtcaacaacctgaataaacgaatgggggatctgcgtgacaccaatggcgaggccggtgcatgggcccgcatcatgagcggagcaggttcagcttctagtggatacagtgacaactacacccatgtgcagattggtgtggataaaaaacatgagctggatggacttgaccttttcactggtctgactatgacgtataccgacagtcatgccagcagtaatgcattcagtggcaagacgaagtccgtcggggcaggtctgtatgcttccgctatatttgactctggtgcctatatcgacctgattagtaagtatgttcaccatgataatgagtactcggcgacctttgctggactcggaacaaaagactacagttctcattccttgtatgtgggtgctgaagcaggctaccgctatcatgtaacagaagactcctggattgagccgcaggcagaactggtttatggggccgtatcaggtaaacggttcgactggcaggatcgcggaatgagcgtgaccatgaaggataaggactttaatccgctgattgggcgtaccggtgttgatgtgggtaaatccttctccggtaaggactggaaagtcacagcccgcgccggccttggctaccagtttgacctgtttgccaacggtgaaaccgtactgcgtgatgcgtccggtgagaaacgtatcaaaggtgaaaaagacggtcgtattctcatgaatgttggtctcaacgccgaaattcgcgataatcttcgcttcggtcttgagtttgagaaatcggcatttggtaaatacaacgtggataacgcgatcaacgccaacttccgttactctttctga

SEQ ID NO: 487347 - DNA, 501 bp, Shigella sonnei; identical to SEQ ID NO: 469039

SEQ ID NO: 487348 - DNA, 1203 bp, Shigella sonnei
gtgctgacggggcatccgcaggcgaacctgaaccgggaatggcaggtggtggcgagcgatcttcacggcgaacagccgcaggcggtaccgggacgcaggggttcaggcaccacgctggagaaccattttgcggtaatcccggcagacagaacatggcggccacagccgttgatgaaaccgctggtggatggcccgcagagcgccgtcgtgacgggaccggcaggcgaggaaatcttctgtgatgaacatggccgcgtgcgggtgaaatttaactgggaccgctataacccgtcaaaccaggacagttcatgctggatccgtgtggcacaggcgtgggcaggcaccggctttggcaacctggcgataccgcgtgtgggtcaggaggtgattgtggacttcctcaacggcgacccggaccagccgattattatggggcgtacctaccaccaggaaaaccgcacacccggcagcctgccggggacgaagacgcagatgaccattcgttcgaaaacctataagggcagcgggtttaatgaactgaagtttgacgatgcgacagggaaagaacaggtctacatccacgcgcagaagaacatgaacaccgaggtgctgaataaccgcaccacggatgtgataaacaaccatgctgaaaccattggcaacaatcagatgattgcggttaccaacaatcagatagagacggtgggcgttaaccagatagagacggtgggcagtaaccagataattaaagtgggttctgttcaggtggaaacgattggacttgttcgtgcgctgacggtgggcgtggcgtatcagacgacggtaggtggcattatgaacacctcggtggcactgatgcagtcctcgcagatcggtttgcataaatcgttgagggtcgggctgggttatgacgtcaaagtcggaaataacgttaccttcaccgttggtaaaacgaaaaaggatgataccgggcagaccgcgatttactccgccggtgagcatctggagctctgctgtggtaaggcaaggctggtgctgacgaaggacggacaaatttttctcaacggcacaaaaattcatttgcagggtaaggagcaggttaatggtgactcactgttgattaactggaactgtgcagcctcgaaatccccaccgaagacccctgatgaaaagcaggatacgccggatatgagagagtactga

SEQ ID NO: 487349 - DNA, 777 bp, Shigella sonnei
atgccgcagcatcacaaaaatcggcagccacttctgcatccacagcgaccacgaaggcgtcagaagctgccacctcggcacggggtgcggcggcctcaaaagaggcagcgaaatcttcagaaacgaatgcatcatcaagtgccagtagtgcagcttcctcggcaacggcggcaggaaattccgcgaaggcggcaaaaacgtccgagacgaacgctaagtcttctgaaacagcagcgggacagagcgcctcagctgcggcaggttcaaaaacagcggctgcattatctgccagtgccgcgtcaacaagtgccgggcaggcctcagccagtgccaccgccgccggaaaatcggcagaaagcgccgcatcatccgcttcaacagccacaacgaaggctggcaaagccactgagcaagccactgcagcagcgaggtctgcttctgcagcaaaaacctctgaaacaaatgcaaagacttcagcagacaatgctgcttcctctaaggcagcagccgcatcgtcagccagttcagcggcgtcatcggcatcatctgcgtctgcttcaaaagatgaggcgaccagacaagcgtcagcagcgaaaggtagtgccacgacagcaacaacgaaagcatcagaggcggcaggcagtgcgacggctgcatctcagagcaaagttgctgctgaatccgcggcaacgcgcgccgagacagcagcaaaacgggcagaggatattgcatccgccgtggcgctggaggatgcgagcacgacgaaaaaggggatag

SEQ ID NO: 487350 - DNA, 270 bp, Shigella sonnei
atgctgccgcagcatagcgatattgaaatagcctggtatgcttcgatacagcaggagccgaatggctggaagaccgtcaccacacagttctacatccaggaatttagtgagtatattgcgccactgcaggatgctgtagatctggagatcgcaacggaggaagaaaactcgttgctggaagcctggaagaagtatcgggtgttgctgaaccgtgttgatacatcaactgcacctgatattgagtggccggaagaaccagacacaatgtaa

SEQ ID NO: 487351 - DNA, 1566 bp, Shigella sonnei; identical to SEQ ID NO: 486798

SEQ ID NO: 487352 - DNA, 282 bp, Shigella sonnei
atgctgaatgctgaagagatgggcatcaattcccagaacgtcgatgaaaaagcggctaatccagcaacgcctgatatggcacatctgctgggtaaagaaggcgattacggcaaggatctgaagctggataataaatgggcctataacatcatcaaacaggtgggtaactactcggaaattttcgagcgtaacgtaggttcagaaagcccgctgaaaattaaacgtgggcaaaataatctctggaataacggcggtattcagtacgcgccgcccgtgcgttaa

SEQ ID NO: 487353 - DNA, 342 bp, Shigella sonnei; identical to SEQ ID NO: 466452

SEQ ID NO: 487354 - DNA, 342 bp, Shigella sonnei; identical to SEQ ID NO: 466452

SEQ ID NO: 487355 - DNA, 309 bp, Shigella sonnei
atgcgcttatggtgtatggtgtatggtgtcggtgatggcggcgctggccccggtgaggaacatatagaacgattaacacgtatacgcaatattgatggcttacctcatgttgatttcagccgtgttgataagttcttcacttacgccgacgcctttcgcgaaagcttgcccattatttcaggtgaactttatttcgaggctcatcaagggtgctttacatcagagtcagcaactaaagctcataatcgaaatatggaaaataaattacatgatgctgaatttggtgatgctgccaacttactgatttag

SEQ ID NO: 487356 - DNA, 1386 bp, Shigella sonnei
atgtaccttactgataatattatcaaactgtcgaataaaataggtcagcgtgtttatactgttgtctctgaaatgtcgattgaagcatggataacaaaagaaccgcagccttttgtttatcgccgtagcggcgcttaccagaaactcaccattggctcagactggggtcaactgtttgactgtgcctggatgcgagtttatggtaaacgtccagcagataaatttagacacaaactcgtcgctctcgttgatatcggtggcgaaggtcttattgtggataagaatggttcccccatctgcggcatcacgaataaagcatcatcttatggcgtaccgccagataaaccaggtaaatgggtggttgacctttctctcgttagtgaaaatgacgaggttgagttttggattgatgctgcctgcaacgatttatttggctatgttactaatggagggattattactgatgttcatatcgcgacacgtaatcaactactgaaatccctttattatgatattgaggtgcttttcgactggattaatgatggtcagaagtttgaatccatacatcctaaaggtatcaccccagaacaatttattgccaaaagaagtgagcgtactgacgaaatcataagtactctcgaatatattgataatacgttaattacctttagcaatgaagaaataattaaatgtcaaattgcaatccaatccataatcaataaaaacaataatccttcagagttcaggattatggctactggtcatgcccatttagatatagcgtggatgtggcctttaagagaaggacgcagaaaagcaataagaacatttgccaccgcccttgcaaacattgaaaaatatcctgattacatttttggcgctagtcagtaccaactttttcactggataaaaaaagattatccctatttcttcgaaaagttaaaaaaacaaatcgccgcaggccgctttgagttacaaggttgcttctgggtcgaatgcgatttaaatctggtaagtggtgaatcgctgataaggcaaatcatgcatgggacacgattcacactgcagaatttttcaaaaaagataaattatgtctggcaaccggatgtctttggattccccgcaacgcttccacaaattctcaaaaaatcaggcattaactatattgcatcgcaaaagctctcacaaaacaagattaataaatttaataattaccttttccgctggcagggcctggatggctcagaaattctgatgcataactttcctgaagacacttatgatagccgagcacgtgctcgctctttagaatatattgaacaaaactataatgaaaaagagatctgtccctatgcgcttatggtgtatggtgtatggtgtcggtga

SEQ ID NO: 487357 - DNA, 1869 bp, Shigella sonnei; identical to SEQ ID NO: 485525

SEQ ID NO: 487358 - DNA, 963 bp, Shigella sonnei
ttgcgtaaatcctatggactgacaacgaaattcagtagattgacgctgggtgttttgctggcactaagcggttcagcgtctggtgcgagtctggaagttgataatggtcagattaccaatattgatactgatgttgcttatgatgcctacctggttggctggtatggcactggagttcttaatattttggctgacggtaatgcctacttaaccactattactaccagcgtcattggcgctaatgaggattcggagggtaccgttaatgttttgggtggcacctggcgattgtatgatagcggaaataatgcaaggcctttaaatgtgggtcaatccggaacggggacgctgaatattaaacagaaaggtcacgttgatggaggctatttaagactaggttcctcgacaggaggcgtcgggacggtcaatgttgagggagaagactctgttctgacgaccgaattattcgaaatagggagttacggtacgggctcattaaatattacggataagggttacgtcacgagttcaatagtcgccattttaggatatcaagcgaacagtaatggtaaggttatcgttgaaaagggtggcgagtggctaataaaaaataatgattcctcaattgaatttcaaattggtaatcaaggagctggggaggcgactattcgcgagggtgggctgattacggctgaaaatacgattatcggtggcaatgccaccggtatcggaaccctgaatgtgcaggatcaagactctgtcatcacggtacgcagactctataatgggtatttcggtaatggcacagtcaatatttccaataatggtctgattaataacaaagaatattcattggtgggcgttcaggacggttcccacggtgtcgtcaacgtgaccgataaagggcattggagtttcctcggaacttttttaagattttacagtcgcttgaactctcaatga

SEQ ID NO: 487359 - DNA, 189 bp, Shigella sonnei; identical to SEQ ID NO: 487165

SEQ ID NO: 487360 - DNA, 453 bp, Shigella sonnei
atgaatttattggtgaaggtgacgcatatattccgcctcatacaggtctgcctgcaaacatcgtggcatctcgttgaagatcatcggggtaaaacggtttatgacgtggcttccggcgacgcgttatttatttctgaactcggctcattaccggaaaatgtcacctggttatccccggaaggggagtttcagaagtggaacggcacagcctgggtgaaggatacggaagcagaaaaactgttccggatccgggaggcggaagaaacaaaaaacagcctgatgcaggtagccagtgagcatatagcgccgcttcaggatgctgtggatctggagatcgcaacggagaaagaaaccttgttgctggaagcctggaaaaagtatcgggtgttgctgaaccgtgttgatacatcaactgcaccggatattgaatggccagtagcacctatagggtaa

SEQ ID NO: 487361 - DNA, 1719 bp, Shigella sonnei; identical to SEQ ID NO: 485613

SEQ ID NO: 487362 - DNA, 1593 bp, Shigella sonnei; identical to SEQ ID NO: 486946

SEQ ID NO: 487363 - DNA, 654 bp, Shigella sonnei
atgtttgttggtcagggcgatcagatattcatgaacgacgtgttcctgaaacgcctgacggctcccaccattaccagcggcggtaatcctccggcattttccctgacaccggacggaaaactgaccgctaaaaatgcagatatcagtggcagtgtgaatgcgaacgccgggacgctcaacaatgtcacaattaatgagaactgtcagattaaggggaaactgtcagccaaccagattgaaggcgatatagtcaaaacagtgggtaaggcttttccgcgggactcccgggcaccggagcggtggccatcagggaccattaccgtcaggatttatgacgatcagccttttgacaggcaaattgttattccggcggtggcattcagcggcgctaaacatgagcgggagaataacgatatttattcgtcatgccgcctgatagtacggaaaaacggtgctgaaatttataaccgtaccgcgctggataatacgctgatttacagtggtgttattgatatgccagctggtcgcggccacatgacgctggagttttcggtgtcagcatggctggtgaataactggtatcccacagcaagtatcagcgatttgctggttgtggtgatgaagaaagccaccgcaggcatcagtatcagctga

SEQ ID NO: 487364 - DNA, 600 bp, Shigella sonnei
atgcgtaaagtttgtgcagccattttgtccgcagccatctgtctgtccgtatccggtgcgcctgcatgggcgtctgaacatcagtccacactgagcgcggggtatcttcatgcccgtacgaacgctcccggcagcgataatctgaacgggattaacgtgaaataccgttatgagtttacggacgcgctggggctggtgacgtcattcagctatgcaggagacaagaatcgccagctgacccgttacagcgatacccgctggcatgaagattccgtgcgtaaccgctggttcagcgtgatggcggggccgtctgtacgcgtgaatgaatggttcagcgcgtatgcgatggtgggtgtggcttacagccgtgtgtcgactttctccggggattatctccgcgtaactgacaacaaggggaaaacgcacgatgtgctgaccggaagtgatgacggtcgccacagcaacacgtctctggcgtggggggctggcgtgcagtttaacccgaccgaatccgtgaccattgaccttgcttatgaaggttccggtagtggtgactggcgaacggatgcatttattgttggtatcggataccgtatctga

SEQ ID NO: 487365 - DNA, 381 bp, Shigella sonnei; identical to SEQ ID NO: 458903

SEQ ID NO: 487366 - DNA, 825 bp, Shigella sonnei; identical to SEQ ID NO: 486943

SEQ ID NO: 487367 - DNA, 1455 bp, Shigella sonnei; identical to SEQ ID NO: 485766

SEQ ID NO: 487368 - DNA, 858 bp, Shigella sonnei
atgcgtgactgccattcttcagatgataaagacgtcattgcaattgatggaaaaacgctccggcactcttatgacaagagtcgccgcaagggagcgattcatgtcattagtgcgttctcaacaatgtacagtctggtcctcgggcagatcaagacggatgagaaatccaatgagattacagccattcctgaacttcttaacatgctggatattaaaggaaaaatcatcacaactgatgcgatgggttgccagaaagatattgcagagaagatacaaaaacagggaggtgattatttattcgcggtaaaaggaaaccaggggcggctaaataaagcctttgaggaaaaatttccgctgaaagaattaaataatccagagcatgacagttacgcaatcagtgaaaagagtcacggcagagaagaaatccgtcttcatattgtttgcgatgtccctgatgaacttattgatttcacgtttgaatggaaaggactgaagaaattatgcgtggcagtctcctttcggtcaataatagcagaacaaaagaaagagccagaaatgacggtcagatattatatcagttctgctgatttaactgcagaaaagttcgccacagcaatccgaaaccactggcacgtggagaataagctgcactggcgtctggacgtggtaatgaatgaagacgactgcaaaataagaagaggaaatgcagcagaattattttcagggatacggcacatcactattaatattttgacgaatgataaggtattcaaggcagggttaagacgtaagatgcgaaaagcagctatggacagaaactatctggcgtcagtccttgcggggagcgggctttcgtaa

SEQ ID NO: 487369 - DNA, 372 bp, Shigella sonnei; identical to SEQ ID NO: 11381

SEQ ID NO: 487370 - DNA, 282 bp, Shigella sonnei; identical to SEQ ID NO: 485308

SEQ ID NO: 487371 - DNA, 195 bp, Shigella sonnei; identical to SEQ ID NO: 485310

SEQ ID NO: 487372 - DNA, 225 bp, Shigella sonnei; identical to SEQ ID NO: 486969

SEQ ID NO: 487373 - DNA, 342 bp, Shigella sonnei; identical to SEQ ID NO: 466452

SEQ ID NO: 487374 - DNA, 780 bp, Shigella sonnei
atgaaaataataacctgctttaagctggtgcctgaagaacaggacattgttgtcactccagaatacaccctgaatttcgacaatgccgacgccaaaatcagccagttcgatctcaatgccattgaagctgcaagccagcttgcaacagatgacgatgagatagccgcgctgaccattggtggctcattgttgcagaactcgaaagtgcgcaaagacgtgctatcccgcgggccgcacagcctgtatttggtgcaggatgcgcaacttgaacatgcactgcctctcgataccgcaaaggcgctggcggcagcagttgaaaagatcggcttcgatttactgatctttagtgaaggttccggcgacctttatgcccagcaggttggcttgctggtcggagaaattctgcaacttccggtgattaatgcagtgagtgctattcagcgtcagggcaatacactggtgattgaacgcacgcttgaagatgatgttgaagttattgagctctctgttccagccgtgctctgcgtcacctccgatattaacatgccacgtattccttcgatgaaagccattctcggcgcgggtaaaaaaccggtaaatcagtggcaggcaagtgatattggctggagccagagcgcgccacttgctgaactgaccggcattcgcgtaccgccgcaaacagaacgtaagcacatcattctcgataacgattcgccggaggccattgccgagctggtggaacatctgaagaaagccctggtgatgctgccaacttactga

SEQ ID NO: 487375 - DNA, 177 bp, Shigella sonnei; identical to SEQ ID NO: 460341

SEQ ID NO: 487376 - DNA, 858 bp, Shigella sonnei
atgcgtgactgccattctacagatgataaagacgtcattgcaattgatggaaaaacgctccggcactcttatgacaagagtcgccgcaggggagcgattcatgtcattagtgcgttctcaacaatgcacagtctggtcatcggacagatcaagacggatgagaaatctaatgagattacagctatcccagaacttcttaacatgctggatattaaaggaaaaatcatcacaactgatgcgatgggttgccagaaagatattgcagagaagatacaaaaacagggaggtgattatttattcgcggtaaaaggaaaccaggggcggctaaataaagcctttgagaaaaaatttccgctgacagaattaaataatccagcgcatgacagttccgcaatgagtgaaaagagtcacggcagagaagaaatccgtcttcatattgtttgcgatgtccctgatgaacttattgatttcacgtttgaatggaaagggctgaaaaaattatgcgtggcagtctcctttcgctcaataatagcagagcaaaagaaagagcccgaaatgatggtcagatattatatcagttctgctgatttaaccgctgagaagtttgcgacagcgattcgaaatcactggcacgtggagaataatctgcactggcgtctggacgtggtaatgaatgaagacgactgcaaaataagaagaggaaatgcagcagaattattttcagggatacggcacattgctattaatgttttgacgaatgataaggtattcaaggcagggttaagacgtaagatgcgaaaagcagccatggacagaaactatctcgcgtcagtccttgcggggagcggactttcgtaa

SEQ ID NO: 487377 - DNA, 348 bp, Shigella sonnei; identical to SEQ ID NO: 485869

SEQ ID NO: 487378 - DNA, 123 bp, Shigella sonnei; identical to SEQ ID NO: 487177

SEQ ID NO: 487379 - DNA, 423 bp, Shigella sonnei
gtgcgacagactgaagataaacagcaccagaacagcgaaccggaggagggaacaccctgcaatcagactggcgaggataactgccctgactgtggcgcggtgatgggagacgcaacttatcaggaaacttttgacgaaaaaaaaccagatgaagcacaggaagaagagccgaagaaaacggaaaaagctgatgatttgttaccggagaacgctggcagcgatcagcataatgatagcaataatgaaactggcgaagatgaactcaactggaaaagacaggtgttgattgcggcggtttacggtttatgtgcgaatcctgcgtgcatagcctatgcgcctgcaatccctgacatcgcaatgatgattgccaacaagcttgaaaattttggagtgaccagtgatgagcgcttacccgatttttga

SEQ ID NO: 487380 - DNA, 561 bp, Shigella sonnei; identical to SEQ ID NO: 486982

SEQ ID NO: 487381 - DNA, 951 bp, Shigella sonnei; identical to SEQ ID NO: 485807

SEQ ID NO: 487382 - DNA, 381 bp, Shigella sonnei; identical to SEQ ID NO: 458903

SEQ ID NO: 487383 - DNA, 249 bp, Shigella sonnei
atgaatgaaggattcttaactaaaaaggatttgaaagactttgccaataactctgctggtttaatttcaaaagctgtcaacggaatggtgaaaaagggctataccgacgcacagatcggtagtcgtctggaagatttagcggacgacctcctcttaacttctaaatattggcaaagatcagccagagaggtgcaggcaagcattacccagcaaaaagccgccggacaatggctaacagaaacacagtag

SEQ ID NO: 487384 - DNA, 348 bp, Shigella sonnei; identical to SEQ ID NO: 485869

SEQ ID NO: 487385 - DNA, 249 bp, Shigella sonnei
atggctgccctgcccgtaagttggatccagatgctggcaggtctggcgctgttgagtaccattggcggcagtttgtatcaggcgctgcataatgagcgtgagcgtgagcgcgacgcggcggtggtggcatttctggtaacggcaagtggattgacgctggtcgggattggttctgcgttctggggattaattgccggaggcgtttgttacgtggtgttgaatttaatcgctgacagaaaccgatattga

SEQ ID NO: 487386 - DNA, 234 bp, Shigella sonnei; identical to SEQ ID NO: 487009

SEQ ID NO: 487387 - DNA, 486 bp, Shigella sonnei
gtgggcagtaaccagattatcaaagtgggatcaaaccaggttgaaaaggtggggatcattcgtgcgctgacggtgggtgtggcttaccagacgacggtaggcggcattatgaatacctcggtggcgttgttgcagtcctcacaggtagggctgcataaatcactgatggtgggaatgggctacagcgtcaatgtagggaataacgtcaccttctcggtgggcaagacgatgaaggaaaacaccggacaaacagcagtttattctgccggtgagcatcttgaactctgctgtggtaaggcaaggctggtgctgacgaaggacggaagcatatttctcaacggtacgcacattcatctggaaggggagtcggatgtgaacggtgatgcgccagtgattaactggaactgtggtgccacacaacctgtaccggatgcgcctgtgccgaaagatttaccccccggaatgccggatatgcggcaattttga

SEQ ID NO: 487388 - DNA, 177 bp, Shigella sonnei; identical to SEQ ID NO: 28511

SEQ ID NO: 487389 - DNA, 189 bp, Shigella sonnei; identical to SEQ ID NO: 463227

SEQ ID NO: 487390 - DNA, 570 bp, Shigella sonnei; identical to SEQ ID NO: 486993

SEQ ID NO: 487391 - DNA, 354 bp, Shigella sonnei; identical to SEQ ID NO: 487004

SEQ ID NO: 487392 - DNA, 348 bp, Shigella sonnei; identical to SEQ ID NO: 485869

SEQ ID NO: 487393 - DNA, 303 bp, Shigella sonnei; identical to SEQ ID NO: 485854

SEQ ID NO: 487394 - DNA, 276 bp, Shigella sonnei
gtggcttctgtttctatcagctgtccctcctgttcagctactgacggggtggtgcgtaacggcaaaagcactgccggacatcagcgctatctctgctctcactgccgtaaaacatggcaactgcagttcacttacaccgcttcccaacccggtacgcaccagaaaatcattgatatggccatgaatggcgttggatgccgggcaactgcacgcattatgggcgttggcctcaacacgattttacgtcacttaaaaaactcaggccgcagtcggtaa

SEQ ID NO: 487395 - DNA, 342 bp, Shigella sonnei; identical to SEQ ID NO: 466452

SEQ ID NO: 487396 - DNA, 348 bp, Shigella sonnei; identical to SEQ ID NO: 485869

SEQ ID NO: 487397 - DNA, 366 bp, Shigella sonnei; identical to SEQ ID NO: 10065

SEQ ID NO: 487398 - DNA, 336 bp, Shigella sonnei; identical to SEQ ID NO: 485874

SEQ ID NO: 487399 - DNA, 342 bp, Shigella sonnei; identical to SEQ ID NO: 466452

SEQ ID NO: 487400 - DNA, 342 bp, Shigella sonnei; identical to SEQ ID NO: 466452

SEQ ID NO: 487401 - DNA, 1185 bp, Shigella sonnei
gtgtctaaagaaaaatttgaacgtacaaaaccgcacgttaacgttggtactatcggccacgttgaccacggtaaaactactctgaccgctgcaatcactaccgtactggctaaaacctacggcggtgctgctcgcgcattcgaccagatcgataacgcgccggaagaaaaagctcgtggtatcaccatcaacacttctcacgttgaatacgacactccgacccgtcactacgcacacgtagactgcccggggcacgccgactatgttaaaaacatgatcaccggtgctgctcagatggacggcgcgatcctggtagttgctgcgactgacggcccgatgccgcagactcgtgagcacatcctgctgggtcgtcaggtaggcgttccgtacatcatcgtgttcctgaacaaatgcgacatggttgatgacgaagagctgctggaactggttgaaatggaagttcgtgaacttctgtctcagtacgacttcccgggcgacgacactccgatcgttcgtggttctgctctgaaagcgctggaaggcgacgcagagtgggaagcgaaaatcctggaactggctggcttcctggattcttacattccggaaccagagcgtgcgattgacaagccgttcctgctgccgatcgaagacgtattctccatctccggtcgtggtaccgttgttaccggtcgtgtagaacgcggtatcatcaaagttggtgaagaagttgaaatcgttggtatcaaagagactcagaagtctacctgtactggcgttgaaatgttccgcaaactgctggacgaaggccgtgctggtgagaacgtaggtgttctgctgcgtggtatcaaacgtgaagaaatcgaacgtggtcaggtactggctaagccgggcaccatcaagccgcacaccaagttcgaatctgaagtgtacattctgtccaaagatgaaggcggccgtcatactccgttcttcaaaggctaccgtccgcagttctacttccgtactactgacgtgactggtaccatcgaactgccggaaggcgtagagatggtaatgccgggcgacaacatcaaaatggttgttaccctgatccacccgatcgcgatggacgacggtctgcgtttcgcaatccgtgaaggcggccgtaccgttggcgcgggcgttgttgctaaagttctgggctaa

SEQ ID NO: 487402 - DNA, 219 bp, Shigella sonnei
atggggaatctttaccggagtgtgagccaaatcactcgcgataagtttgagcgaacaatgccacaggcgtattgttgttgggcttataatttctccggtaaggaataccatgtatacgcgaaatttattatccggtgcgccgtaagccgtctcgggggtacccatgagcaagccgcacttatggcaggaggcgcggggcactggtggagacacagctaa

SEQ ID NO: 487403 - DNA, 336 bp, Shigella sonnei; identical to SEQ ID NO: 82465

SEQ ID NO: 487404 - DNA, 867 bp, Shigella sonnei
atgacgacaaataagacttccctttctcgcttaacaaaagtgagacatcgaaatgaattgaattcaacgctgtcaacattgcctatggctgctaaaaaagtcttatttttagccatgtgccagataaactctaaaaatgaattcgatgatgatcacatattttatgtgacagttgccgattacattaaatgggttcaggttaagcctgatgcggcttatcttgctttgagggatggctctaatatattagatacgacgcttcttaagctgaaacatgatgaaatattagaactgagtagtgatttgggatttaagttcactaaaagtaatgtacctgattcaatgaatttgagtctgactgttttttctacttattacaggaatgaaggtagagtggggatcaagtttacaaaagaagcgaaaagatttttatgtaaacttattggtgaagaaaaacgttatacaacgcaagttttattatctgttgttcgactgacaagtgttaatgctgcatcactatatcaactcattcgtaaaatatatagtaataattctcgcgcgaatagttttgaaatgacaatagatgaacttaaagatgaattgaatctttatacaataggggcggggggggtgaaggattataagtatccagattatcctgcttttaaaagagatgttcttaataaatcagtaaaagaaatcatgaaacatacggaagtaaagaacttaagtttcgtagtttcagaaaaaattgggagaaaagtttataaattaaaattctcttatacaattggttatgagggcgataccagggaagactcagagtttactaatatgtttgataaaatgtacccacctgaaaattga

SEQ ID NO: 487405 - DNA, 405 bp, Shigella sonnei; identical to SEQ ID NO: 12977

SEQ ID NO: 487406 - DNA, 528 bp, Shigella sonnei
atgatatttaaccgtaataaaaaacgagatgaacaacataattctgctgttgttttgccatcaactgaaaacgtattctctgattttattaagaataatccagctttgataaccaatgcttttacagctattggggaggttgattgttttactaaagtacccttactctcaaataaggaatcagagtttttaggcattctttcacgtaatattatacctgattattccgtttttcccaaaatacggctcattgaatttgttcgtcctcatggtagcgaggaagctgtaaaagatttaatccgtgaagtgcagaatataacctgtgattttgtcctgaaatcatatgatgaaacagtcctggctgttatccagtttggtgaaaccgcaaccgtcagacagcaaaagaaaaaactgattatccagcgtgtgtgtgctatgacaggaatttcttttttcgaatttaaaaatactgtcgatatgatgggaagcgaagacttttgtcagttcctgcgggatgatgaggagtaa

SEQ ID NO: 487407 - DNA, 216 bp, Shigella sonnei
atggaacactgcatcgttgatttaggcattatgaactatcatcctgtcattacatggacagtacctgttgcatttttctttttagtagtgctggctggtatagtattcaatattggcaggaaaagtaatctaatcgttttcatcctggcaatgttgctcccagtaacaacggttttcatttttatgttactgggcggtaagatcaatatgtgctga

SEQ ID NO: 487408 - DNA, 252 bp, Shigella sonnei
atgcttatgaaggccattaaatctgtattcaatttttacatgctctatttgcagccttttattggagtggttcttgcgggttatggagtatggaaattttcaggtgacagtatctcagcattactggaaccagcatcgtactttgtcattggaactgttgttttgtttgtatggtatatagcatggcaaaaagaacgttctaaagaagaagagtttaaatcaagtataaaaccagaagattttgtgaagtga

SEQ ID NO: 487409 - DNA, 270 bp, Shigella sonnei
atggcaaagctggaactaccagaactagaacaaaaccaggaagtgaacgccacaaaatttgttcaggacgcaggaaaacgccccacagagaacaaaacaaaactggcttcattccgcataccgaatgaattgcttgaattcattgataacgaatcaaaaagactgcatcgtcccaagacaaaaataatcaaagcagcattactggcttatcaggatctggacgaaaacgaactcattaatttgtggttcagagctgacagaaatgattag

SEQ ID NO: 487410 - DNA, 648 bp, Shigella sonnei
atgattatcgtaatcggtggtgataaaggcggcacaggtaaatcacatctggcaaccaacgtaacagtttgcctctcacaacagggaaagagaacggggcttgttgaaacagacctgaatggctcgaccaaaaaatggaataaacgcagagaacaggccggattaccgcccgtcgcgttaaatgaagcctatggcgacatcagtgccaaaataacaaaaatggcggatgtggcagaaatcctcattatagatactgccggatatgacagcacggagttcagaactgcactaaaagttgcagacatagtgattgtcccgatcgacccgcttgcccaggtggaagcagacagtcttcagactgtgacaaaaattgtcagggatgcgcaaaaaataaatcccaggctggctgcacatgtgctcctgtataaatgccagccaaatacgttcagtgaacaacaggaattaagagactctctcaacagccatgattactggcttaaaccaatgaaaagcacggtttcttttctccgggcctttgtaagagcaatgaatcagggaatgggggttcacgagttaaaaagtaatgttagcggtgccagccaggcaaaagcacaaatcgaacttttactgaaagaactggaactgtaa

SEQ ID NO: 487411 - DNA, 180 bp, Shigella sonnei
atggattttatgagcattttggggcgctgtttacttcttcctttccctgttgcgatgtttgtcggttgcctgtttcctggcatcgatgatcgcttatccggaatgcttatgagtgttgctgtgggatgtttatcgtggtatgtcaccagaccgaagaaccaacagacaaaggccgagtaa

SEQ ID NO: 487412 - DNA, 207 bp, Shigella sonnei
atggccagcgcaaccggcagcatcgaccgcaacaaaaaaactgaaagagaatgcccctcaaatgagggagaaaaaacggaagtgcagccgaacgacaggcgcaaaaaagcccgactggtgagatcgggcttattgctttccggtgctgtcgccgttgcaaacgcgctgattgcaattctggaactgattcgccagttcatcgactga

SEQ ID NO: 487413 - DNA, 189 bp, Shigella sonnei; identical to SEQ ID NO: 40095

SEQ ID NO: 487414 - DNA, 258 bp, Shigella sonnei; identical to SEQ ID NO: 40094

SEQ ID NO: 487415 - DNA, 465 bp, Shigella sonnei
atgagcgaactgactaaagaagatgaatacggcattatcagccgtactatgatgaatattcgttcattgcgtgtttttgcccgtgaagttgattttgagcaattgctcgaaatgcaggaaaaactgaacgttgttgttgaagaacgtcgtgaagaggctgaacgtgaagcggttgaacgccaggaacttgaagccaaacgtcagcaggccattgaatacatcatatctttaggtcttgatcccgaatcactccttgctcctgtaacagcagatacagtaaaaaccaggcggaaagccaaaggcggagtaagaaaggctaaataccgctttaaggatgaaaatggcgagatcagagaatggtctggtaatggcaagcgtccgcttgctttacagaagctgcttgatgagggccatttcatggaagatttcctcattgacaaactgcaacctgggcaggttgaataa

SEQ ID NO: 487416 - DNA, 2154 bp, Shigella sonnei
atgaaactttttatcgcagaaaaacccgcagtagcaaatgatattgttaaggcacttggtggcaattttacccgccatgatggctggtttgaaagtgataacgccattgtgactaactgttttggtcatattatcgaatcacaaccgccggaaaactataatcctgaatacaaagcctggaaggttgaaacgcttcctttacgtctttatcccgtgaagtatcagcctgttgaaagtgccgcaaaacaggttaaaacgattctcgaacttatcagacgtggagacgtgactgaaattgttcacgctggcgatcctgatgatgagggacagttacttgttgatgaagtcctggaatatgcaggcaacacaaaacccgtaaagcgcgttctgattaacgacaacacgcttccggcagtgaaaaaggcactggcaaatcttaaagataatcgtgatttcaaagggctttaccttaaggcgctggcgcgttcagttgctgatgccgtctatggcttctccatgacgcgtgcttacaccattcctgcaaaagccagaggatatcagggcgttctgtctgtcgggcgcgtccagactcccgttcttggcctgattgtgaatcgtacccgtgctaaccagaaccataaatccagtttttactacaccatgaccggagtctttcagcgtggtgctgatgttatcagggcgaactggaagccaggggaatttgctccgctgacagaccgtaaattacttgataaagcgtgggcagacggaacggcagcctcccttgcaggaaaaccggctacagttgaagcggcagcaactgatgataaaaaaacggctgcaccgttgccctttaacctggtacgactccagcaatacatgaacaaaaagttcaaaatgacggcacaaaaaacgctggatattacgcaacaattacgtgaaaaatataaagcgattacttataaccgctctgattgctcatatttatctgatgaacaattcagcgaagcgccgcaggttatcgatgccctgaaatcagtctttcctcagtcgctggatattgattcttcacgtaaaagcaaagcgtttaacagtgcaaaggtgactgcgcatactgctataatcccgaccgccagtgtgcctgatgttaacgcactcagcaccgacgagcgcaatgtttacctggcgatcgcacaacactatcttgttcagttcatgcctgaaaaagcataccaggaagtatcggttgccattcagtgtggtgatgagtcgttctgtgcccgtgccagaaaaacaactgacagcggatttgaggcgtttcttggcgcggaaaccacagacgaaggtgaatcagaagataatgatgattccgcttttgaactgctctgtaaaattcgcacaggagaaacactgacgacaaaagaagttattgttaatgagaagaaaacaacaccgccgccgttattcaccgaagcctccttgcttgctgcgcttgttcgtgtcgcggattttgtcactgacccaacgattaaaaaattgttgaaggataaggataaagacaaaaaagatgaacatggtggcattggtacgccagctacccgcgcagccattctggaaacgctgaagaaaagaaactatatcacgctggaaaaagggaaacttattcctactgataccggatatgcgcttattgatgccctgcctggtatagcggttaatcctgatatgacagcattatggtctgaaaagcaggctgccatagaaaatggcgatctgacggttgaacagtttattaatgatctgtacggtgaactgacaggcatgatttctgatgttgacctgggcgagatgaagattgaacccgctgcgccagcagggcagtttcaacgcctggactctccctgcccttcctgtggtaaacatattgttatcaggccgaaaggttatttctgtaccggatgtgaatttaaaatctggagtgagttttatggtaagaaaatcacccaggcacaggccgaaaaactggttaaatcagggaaaaccgatttgattaagggatttaaaaagaaaagtggtggaacgtatgatacagttcttgtccttgaggataagaaaacagggaaactgggttttccggcaagggctaagaagtga

SEQ ID NO: 487417 - DNA, 762 bp, Shigella sonnei
atgatgacaaaacatgataaagaacgattcaataaaagaattggtggtgaagttcagattagtgctgatatccgtgtcagtgatttcatgacagaaggtgcagcttacgtcactataacggaatcaactgaatcatccctgtatgagcgagtctgccagtatgccttgcaacatggtgaagatttgcaggggatgtttaagaatgaaaaatatgaatatatgtcctgctttgttcgtgatgtagcagcattcagagctaattttgaaagcgaggatcttttaaaacctctgtttaatcatgataaaggtgatactgttgagtttgttatcagcgttcctgaaaaaagagtcgaggattacggtgatatagtcagaaaagagttcgtagatataattcagagtcatgtaataactattaataataagctctggaagaaatacgtaaaacaagccatgacgggggcaactttatatattggttttgatattaacacaggtgaaatggtggaccctgaagatgaacgtgacaccatattaaaatcatcacgtcaggagtttgtcagaacaacgacttttgattcatttcagccctatttctatgttgaacgtttgtattctggcgcaaaagaaataggcaatatcaatggttttaatgtctggttcaatgaaagaggattttatttttactggaatgaagaaacggaattcctgattgagagctggttgacgttccctgcatatccgtatggctggtttaaatga

SEQ ID NO: 487418 - DNA, 513 bp, Shigella sonnei
atgaggatttttttaagcgtaattttattcctgtttactgcttttcagtctgcaaatgcaggtggaatacctggtgctttagcaggaattctttctacattaaaccaggaaatccaggggaaagttattcgtgttctcgatggcgatacaatcgaagttttacaggacaaaaagcccgtcaggattcgcctggcaaacatcgatgcaccggagaaaaaacaggctttcgggcgctggtcagcaaatcagcttaaagctctgcttgcagcacagcctgttacggtgacgtacacgcagacagaccgctacggacgcattatcggtcatgtgttcacgacgaacggcacggatgccagccgctttatggttcagtctggcgctgcatgggtatatgaacgttacaacgtggatgagtcattaccggctctacaacgggaagcgcaggaacaaaaacgcggtttgtgggccgatgcaaatccggttccaccgtgggaatggcgtatcagaaattaa

SEQ ID NO: 487419 - DNA, 435 bp, Shigella sonnei; identical to SEQ ID NO: 468504

SEQ ID NO: 487420 - DNA, 240 bp, Shigella sonnei
atgagcgaaatccgatttgtaactctggcatccgacattaacaatattaaagaagtttattctgatgatgagttaaaacgtttgctggaagctgttaatcagaattgcccagccagaattgtgttgggtagtgtggagaaggggaaagaagtaccactcaagtggtgttttaggacaatgccagagcgtatttcagttgaagaaatcaatgaggttaaaatttatccagagttattctga

SEQ ID NO: 487421 - DNA, 420 bp, Shigella sonnei; identical to SEQ ID NO: 12957

SEQ ID NO: 487422 - DNA, 1818 bp, Shigella sonnei; identical to SEQ ID NO: 476400

SEQ ID NO: 487423 - DNA, 1029 bp, Shigella sonnei
atgaatggcgttattcctgtcagcattagcaataaatcgctcgatttttataaaaatcaagtattccagtcttttcttgatattgaagggctaacagaaattgctgtcaaccgtcctggtgaaatctggacggaaattaatggtgactggacattccataataatgacagtgtgacctttgatttttgtaaacgtttttctcagacgctggcatcatttcggggagatgaaatcggcgataccaagccattactttcagcaacactggaatcaggagaacgtgtacaggtcgtttttcctcctgcatgtgagagaaatactatttcaatcaccatacgtaaaccatcgacacggcagataacgcataaagaatatgtggcgaacggtttttatgattatgtccagtcaggaaaaaaacacaggacatacgatgatgagcttcttgatttattcagagcgagaaatatcgctgcttttatggagcttgccgtagcagcagggaaaaccattgtatttgccggagcaacgggttccggtaaaacaacatatatgaagagtcttatcgatttcataccattgaatacacggctgattacgattgaagatgcagaggaaatcaaattttttatccataaaaattatgtgcatcttttttacccttcggaatccggcagtgattccggctctatcataacagcagcgaaattaatcaaatcctgtttgaggatgaaacctgacagaattttactggcggaaattaaaggtggcgatgcctgggattttgtgaaagttgctggttctggtcacagtggaagcatgacgtccattcacgcggcctcggcaaaagatgccatcattcagatggtgacaaaatgttatcagaacagagaatgtcagaatcttccttttgatgttcttcgtaaaatcattatggacagtattgatattgttgttcatgtaggcagggatggtgttgtcaggcatatgagcgacatctattacaaaggggctgaatgtgaaaacttttaa

SEQ ID NO: 487424 - DNA, 1110 bp, Shigella sonnei; identical to SEQ ID NO: 476398

SEQ ID NO: 487425 - DNA, 807 bp, Shigella sonnei
gtgagctataacggtgctaatacaaccgttatccggtcaaagacaggatttctcacatcagttgtttttgatgaaggcgaggctgttatcagtgcaaaggctggttttcctgccggatgggaaatctcaaccgatgataatgttgtttacatcaatccgcgtcccgttgttcaggaacaggaaggcgatgaaggcgaaaaactgaaaaaagttttccagccaacagaaaaggaatgggatacgaatctttttgtcagaacaacaaagcggatttacagtctggatctaatccttctgtcagaagaaaaacaagcgcaacctgcttatgttgtacaattccgctatccatcagaaatagcgaaaaagaatgcagaagaagtaaggctggcaaaagaaaaacaggaaaaactcagacagaagaaactgattgctgaaagttttgaaaaagccgatgcgcctaaaaactggaattatttcatgcgagtcaatgaaaaatatgacagccgtcgtatcgcccctgattttgcttatgataatggcatatttacctttttaggttttaactcagggaaagtattcccagctccatttgctgtaagagatggtcaggaacagacacttgcttttaatgtggaaacaaaaggcaagtataaaattatggttatccacaacgttaatgacaaatttgttttacgctatggaaacagcgttgttggtgttgtgaataaatctttcggaaaagtactaaccgaccagaggaatacatcttctcctgcgatagaacgtgttgaggtgaataatgactga

SEQ ID NO: 487426 - DNA, 687 bp, Shigella sonnei
atgagtgaaaaaatcgaaaagaagattgagacagctaaatccttcgaaagacaactctatgcagaaaatgaacggtctaagaaaaatgcatggcgtgttgcagcggcagcatcattactgtccttatgtcttggggctgcaatttgtgttcttgtgccattaaaagaaaaagagcttgctattgtggctgttggcgaaaaaacaggccgtacagaactgattactcaggttaaacaggaacagattctgcaatctgaagcacttgggcggtattttgtaaacacgtatattactttacgtgaaggttataattatccgtctcttcagtatgattatgagactgtacagctatatagctcgaatacagtaaaggacgattatcttcgtctctataacagcgatatggctcctgataaaatttatcataataacggttcttacgttgcggttgaggtcatctccaatattatttctgacgcaaccgcgccagataaactggcctctgtgcgctttaaaaaaacgacgagaaacttcacgaccggacaggtttcagtttcatactggacggctcgtgtgacatatcgttttgaaccagaaaagtcggttaaaagttccagtcgtgagcttaatcctctcggttttactgtaaccagttaccagacagatcgggaagtcaggggggaatga

SEQ ID NO: 487427 - DNA, 180 bp, Shigella sonnei
atgaatatcatgaaacgttttttttatgtgatgtccctgaactggatactgacgtttgttgataaacatatcacctccggatggagcaggaagagaaagctaataacccagcttgttattttaatcacgggaattaccttatttaaggtcttaggtggaatcagtcagagctggttgtga

SEQ ID NO: 487428 - DNA, 1080 bp, Shigella sonnei
atgtcattctttgttaaatataatacaaccgttatggaagcaattgataaggttggatctacttatcaaagtcaattcacacaagatataatgtcattagtgacagcatctgtcacgttatatgtactatggaaaggctatcaaatactcgccagtaaaactcagactccgatgcaggatttagtttgggatttatcaaaatttgcgatcataatcatgtttataacaaatgcagatggatatttgacagcggcaaccaatgcattgcaaggcatgaaagatgggctttctggcggagttagcgcatggcaaaccttagataacttatgggagaaaacacaaaatcttgcggaaaaggtatatcaaaaagacactgatttcattcctttggctggcgcattaggtatggcgcttgtttgggctggttcacttattttaatgacaattagtgctgttgtttttttaactgccgatattacgatgaaattccttattataacagcgccaatatttattttctgtctgatgttcggttttattagagttatgtttaataactggttgcaatcgctattttctagcatcctgactgtgttatttgccagtttagtaattcggatagctatggattttcagggggatatattgcaacaagtatctaatgcgacacccaatagtaatgttatgaccgtaagtgcaatgggatttttagccggattgttgggagctttattggttcttatagctaaaagttttgctgtccagttagcaggtgcaggtgttgaaggtgctgttcagggcgcagccatgatggggctgggtgccgctggtatggctactggtaagtctctgatgcttggcggtcgcgctggtttaggttttggcttagggatggccggaagaacgggcatgaattctttatcagggaaagcagggaatctgatgggacgtggtgcgcgaacagccgctgaatgggcgggtgaaaagggatatcaggcgctggctccgacaggtgctttggggatgaaggctagaagacttgcatccctggaaaaagcgcgagcgaggaatgccgcatga

SEQ ID NO: 487429 - DNA, 717 bp, Shigella sonnei
atgaaacgtgtaaaaacatttatgctgatatcattattgacggcttcattttatagcagcgcaggtattccggttgctgtagatgccagtccggaatgggctgttgaagccgcaagatggacagaacgactcaaacaatggtctgaaactgcgcaacattatcagagtcagattcaggcatataaagaccagttagcaacggcaacaggtataaggaatattgcggcattcacaaatgaactaagtaatctgcaatcagaactgacaaatatttataagcaggggaacagttatatttctgattttaccagtaatcccgaaggtgcattaagcagtcaggcaaaaaatctgttcagcaagtatggagccttcgatatgtgcactacaggctatgaacgcaatgataatctctgtaaagcacgggttgtgtcaaaggctgccagtattgaacagggaaatgagataaataagcagttatcaagtgcaatgtctcagattcagagtttaagtactcgaattgaggcttcaaaggatatgaaagaatcccaggatttggctaacgcattacaggcacagtcgttaaaaatgcaggcgataaaaatgcagtatgatgtctggaatagtaaaaatcaggctgacacggagatgttgaaagaacaacaaagggctgaatataagcaacaacagatgaacgcaccaatacctaagattcaatga

SEQ ID NO: 487430 - DNA, 2748 bp, Shigella sonnei
atgtctacactttataaagcgatgacacgccctgctatgtatgtgggtgttcctgtcgtccctcttactgtggttgcaggggcgttatttctggcgggggtttatatcagcaagctgatctggctggctattcctgtcgcagtttttattctcagaatgataactaagcaggacgaccacatttttaatctttactttcttaagttgaaaatgctcggaaactcagtgtgtaatcgtttttttggcgcacgagcgttcctctccggacaatatgaagctgttgaaattgatgagtttgttaatgccatgaaactgaatgagcgaatcactactggtaaatatataccctattcaagccatgttgataaaaatattgtcaaaacaaagaacggtgattatgtggcgacatggcaactgatggggattaactttgagtcaatctctgcggagatgttagaaactattgactcacaggttgccactcttgttcgttcattttccggactgcccgtttcattttataaccattcatgcagggcgagtttttatgatgcctttaccacaaaatcaggtaataaatatgctgatataatatcagattgttactatggttcgatgaagaaaaataaattcaaggggaacactctttactttacgctgatctacagaccagatgggcgtgtagaaaaactggaaaaacgcaaaaaaagtattaaagaaaagaaagatgatattaacattcatgtgaagagaatgaatgaaatgattaatacattctctggcgctcttgataaatttacctgtaaacttcttggtatgtatgaggagaacggaaaggtattttcttctcaactgtcattctataattatcttctgacagggaagttgcaaaaaatcagagtcactgattctccggtgtataacgttcttggtggagtggatgtattttttaatcatgataccggacagatatgccgcattgatggaaataaattctttcgttctattgaaattaaagatttctgtagtgagactgcatccggtgtttttgatgtgctccagtattctgatgctgactatattattacgcattcatatacatccatgagcaaatcagaagcattgagtaccattaaacgtgcggaaaaacagttaaagagtacagaagatgatgcggttactcaattgcaggaactggaaaaggcaaaaaatgatattgtgtccggtgatatatcctttggttactaccatttcacgctaatggtaatggcggacagtatcagggagcttgacgaatctgtaagtaaaattacggcagactttactgacctgggcattattccggcattgtcaaccatgtcattgccagcggcatattttgcccaacttccggcggtttttcatttaaggccgcgtttatctccggtatcgaatgtaaattttgttgaactggcatcattccataatttctaccaggggaaacgcgataaaaactgctggacagaagcggttgctattctcaaaacaccaagcaaacaggcgtattatctgaatttacataactcagtactgtttaaagatgaaacaggtgaaaagaatcttgctaatactaaagttataggaacggcgggttcaggtaagacaatgtttctgtcatatcttgcctgttcattacagaaatacaataaccccgaaacttttgctgattctgcaaaaaataagaagttaacgtgtgtctttcttgataaggacagaggggctgaattatgtatccgaatgcttggtggggaatattacaccgtaaaaagcggtgagccgacaggatggaatccttttgctctggaggcaacaaaacgtaaccgtatttttgtcaagcaactgatggagattctgtgtaccagaaatggtgaaagattatcgacaagagaaagattgcttattagcgaaagtgttgatgctgtgatggattttcctcctggcgaaatgcgggaatatggcattaccagaatgcttgagcatcttatgcagagagatgatcgggatgagcaggagaacgggattatccttcgtttgtcccaatgggctaatggtcaggctcatggctgggtttttgataatgctaaagacacattcaatattcagcatgtcaataattttggcattgatggcaccgagtttcttgatgatccgatggtatgtgcaccaattactttctatctgctgtatcgcattacgcagcttctggacggtcggcgtcttgttatcttcctggatgagttctggaaatggctacaggatgaagcattcagcgattttgtctataacaagctgaaaacaattcgtaagctgaacgggctggttattccggcaactcagtctccagatgaaatactgaagaataagatttcacgggctgtggttgaagtatgtagcaccagtatttatctggctaaccctgatgccgattacaatgactatgtagaagggcttaagctgacaccagaagaatttaatattgttaaaaatcttgatccaatgtcgagacaattcctgattaaaaaaagcagtcttaaaaagggggatggtaaatcattttcagcacttgcgacactcgatttatcgggacttggtggatatctgaaaatattgtctgccagtgcagataatctggaaatttttgaaagtatttatcatgaaggaatggagcctgatgactgggttcctgaatatctcgaacgggcaatctga

SEQ ID NO: 487431 - DNA, 327 bp, Shigella sonnei
atgtcatttaagaaatcagtatgtaatcgtatcagttcatctgtcactgctgtaatgcagcgtaaaaataaggtagttatggcagtagccggggcaacagtcgcatcaccggcctttgcggatggattttcaaaagcggaaacactgctgcaaaaggtcaaaacagggcttagtggcctttcactggtaacggtgactattgcctgtctgtgggtcggctacaaggttctgtttggtggaagcacgattcgtgaatgctcacctatcatcatcggggcaattgttatcgccagtgcggctgaagttgcatcaatgatggttaactaa

SEQ ID NO: 487432 - DNA, 621 bp, Shigella sonnei
atggcgtctttattcccagccttgttgctgtgtgcggcgtcagttcatccggatacgataaatgatattgcacgggtcgagagtggcttcaatccttatgctgtggctgaaattattcctgaaagggaacgcggtagctatggcaaaagtgttatcagtcatatgcccaaaagtaaggaggaagctctaacagttatcagagaaattgaaaacagaaaaagacgttattctgtcggattgatgcagattaccaacagtaatttttctttttattccacgtccgcagaaaaactccttgatccgtgtgaaaacttgtctgttttcgaaaagattatcgtggattgttataaacgagggaggagcctggagaatgcgcttagttgttactatacaggaaattttagtaacggtaagcgaaaagaaaaagaatttaataatacaagttatgttgagcgaattggttatacagggaacgaaaaaaaatatgttgtaccaggtacaagaagcaacgggggagaacagcgaaaaaatcgttcacacaatgcgtcagttatctggcccgaaaccattctgaaatctgcttttgttgataactcacatccaacaaaagttattaattaa

SEQ ID NO: 487433 - DNA, 177 bp, Shigella sonnei; identical to SEQ ID NO: 12970

SEQ ID NO: 487434 - DNA, 234 bp, Shigella sonnei; identical to SEQ ID NO: 19714

SEQ ID NO: 487435 - DNA, 267 bp, Shigella sonnei; identical to SEQ ID NO: 80380

SEQ ID NO: 487436 - DNA, 1230 bp, Shigella sonnei
atgggtgtgtatgtagaacaggaataccgtattaaacgcgctaaagggacagggcgtgatccgaaatctcctaagttatcaggaagacatatacatgccagtaaatcggcttttaatcataaagtcagacatggcgcagacaagaaagcatatacctggacgccaacaaaagaagtcacttttaaaatcactggttcagggaaaacagccgcaggtatcaaaaacggtattgattacattacccgtaatggtgaacttgaggcttactgttatgatggaaaaggttcagagcaaacagggaaaggagaagactttaacagggagtttacttcaactttatctaaaggaaatgattactccaggacatatcgtggagaaaacatcgatcatgtgaaaaacatggtcttttcaccaccaccagaagttggagtaagcagggaagacgctctgaaagctacggtagaatttcttaaagagacttatccaaaccatgctttcgttgccgtataccatgatgataaagaagatcatcctcatgtacatgttaatattaaacttcgtgatgaagaaacaggaagaagattaagacttactaaatctgaaaccaggaagttcagaaacggttttcatagaaaactgaaaggtatgggatatgatgttaccgctacctggaaaaaagatcccgaacgtaaacgggagattgagcgattacaggctgaaaatccgaaaagactccggaatgtttacaaggtggtggattttggggagacttcatatcagaataaggcaggggaaaaacgaacacctttcctcacttatgaaactttaaaaggtggaaaacaggttacgatttggggtaaagacctgaaaaatcatttcgagtctgaaaagctccagccaggaacgcttatcaaagtaaaaaaactggctcctacgcttgtacgtagtccaatgtttaatgatgatggaactgttgcaggctacagggaaacgcatcgcaataactggcagattgaaaatattgcccttgagcggaacagagaacgtcaggttcatgagcgtgaaaccaggcagccggaagagagcgacgttaaaaagcagctatccagaaaacatgagcaaggtcacaatatcgggtttgctcttgaacacgggtttacaaaggattcagaagaacataaaaaactaagaatacagcaagagaggaactggaaaggcctgggattttaa

SEQ ID NO: 487437 - DNA, 405 bp, Shigella sonnei
atgaaagttcttgatataccaacaaagccagtatctattcctgttaagaatgaggctgcaaaaccagtttttacttatctctaccctcatgaaatagaacttgttaaacgtaatgctgcccttcacggcatgagcatgagcagagaaattgctattcgtgtgcgtcagtctttgttaaagaatgaagtctgtctttaccctgatgaagttaaggaacttaaaaaactatcaactgctgtagatcgtgttggtcgcaacattcattttatcataaaaggtgaaagattctgtacggttaacgatcctgatttcagaaaagacgttattgaagtgattgaactgtgtaagcaaattgattcaaaacttgaaacgttaaccaagagtgttgttaaccgatttgggtga

SEQ ID NO: 487438 - DNA, 228 bp, Shigella sonnei; identical to SEQ ID NO: 12412

SEQ ID NO: 487439 - DNA, 252 bp, Shigella sonnei; identical to SEQ ID NO: 12411

SEQ ID NO: 487440 - DNA, 3594 bp, Shigella sonnei; identical to SEQ ID NO: 482874

SEQ ID NO: 487441 - DNA, 615 bp, Shigella sonnei; identical to SEQ ID NO: 482875

SEQ ID NO: 487442 - DNA, 360 bp, Shigella sonnei; identical to SEQ ID NO: 372517

SEQ ID NO: 487443 - DNA, 267 bp, Shigella sonnei; identical to SEQ ID NO: 11114

SEQ ID NO: 487444 - DNA, 381 bp, Shigella sonnei; identical to SEQ ID NO: 458903

SEQ ID NO: 487445 - DNA, 3858 bp, Shigella sonnei; identical to SEQ ID NO: 484798

SEQ ID NO: 487446 - DNA, 396 bp, Shigella sonnei
atgatcagaccgctgctgatggtgttcgggttcttttttgcatcagtcgccatcgtggccggcggcacaatcctgaatgcgctgtatgctgctgcactgatgaatgtccagataaactctgtgacgggcgtgttcagcatggcgggatttttgatgatttatgcccgcgcctgtaccacactggttgcagccgtttttgcgcttcaggcttatctgcctgaccatgtaattaattttctgggcggacgtgacggtgttaatatgctggggaatatggtttcttcagtcaaagatattattgccggaggtaataccaatatgcgcagaacacctggcgttcgtgaagaaaaactgaaaaatattaatagagatgataaagacggaataaaacaataa

SEQ ID NO: 487447 - DNA, 954 bp, Shigella sonnei; identical to SEQ ID NO: 485125

SEQ ID NO: 487448 - DNA, 360 bp, Shigella sonnei; identical to SEQ ID NO: 372517

SEQ ID NO: 487449 - DNA, 324 bp, Shigella sonnei
gtgtggctgacgcacgacccggaatacccggagaatttacctgccgcgccgctggtgcgctatggctggacgccgcgcggcgaactggcggcagtgtatgaccgcagcaaacaggtgcgcagctttacttacgatgataaataccggggccggatggtggcgcaccgtcacacgggccggccggaaatccgttaccgttacgacagcgacgggcgggtgacagaacagctaaacccggcaggcttaagctacacgtatcagtatgagaaggaccgcatcaccatcaccgacagcctgaaccgccgtgaagtgctgcacacgtag

SEQ ID NO: 487450 - DNA, 435 bp, Shigella sonnei; identical to SEQ ID NO: 487244

SEQ ID NO: 487451 - DNA, 276 bp, Shigella sonnei; identical to SEQ ID NO: 484087

SEQ ID NO: 487452 - DNA, 381 bp, Shigella sonnei; identical to SEQ ID NO: 458903

SEQ ID NO: 487453 - DNA, 1326 bp, Shigella sonnei; identical to SEQ ID NO: 486455

SEQ ID NO: 487454 - DNA, 435 bp, Shigella sonnei
atgaaaactgaactgaccctgaatgtattacagaccatgagcgcacaggaatatgaagatatccgggctgccggaagtgatgaacgccgtgagctgacacacgccgtgatgcgggagctggatgcgccggacaactggacgatgaacggcgagtatggcagcgagtttggcggatttttccccgtccaggttcgtttcacgcctgcccacgaacgttttcacctggcgttatgttcaccgggcgatgtctctcaggtctggatgctggttctggtgaattgtggtggacagcctttcgccgtcgttcaggtgcaacatatcctcacgcctgtcgcgatcagtcacacgctggcgcttgccgcgacactggatgcgcagggatacagtgttaacgacatcatccatatcctgatggcagaaggatgtcaggcatga

SEQ ID NO: 487455 - DNA, 720 bp, Shigella sonnei
atgagcgcacgttcacgggcactgatccccctcagcgcagaacaacaggccgccatgcaggcggtggctgtcacagaacaacgtcgtcgtcagggacgcacactttcagcatggccttatgccaccgctttctttcgctgcctgaatggcagtcgccggatttcgctgaccgatctccgcttttttgcccctgcgctgacgaaggaggaatttcatggcaaccgtctcctgtggctggctgccgtggataaactgattgaaagttttggggaagtctgtgttcttcccctgccatccgatgcggggcacagtctgttcccgtccgtgccttttcgtgaaggtgagcgtcgtcgtcagaaaaccacgctgacagagcagaaatacagccgccagcgggaacgtgaggcagaacgacgggaactggaataccagacatgttttgctcaggcgcagattgaccttgcgtttcatactcccgccacggtcggaagctggttgtcccgctggtctggtgttgttgaggagcatgatctggaaacgattttctgggggtggtgcgggcgttttccatcactgtcatcatttgaccggtttttctggcaggaggaaccactctggcggctgatttttgaagccggtgaggccggtcgtggtgcaccggtacaggtacgtgcacttgagcagtggatgatcccgaacaagctggagaacgtaatatga

SEQ ID NO: 487456 - DNA, 597 bp, Shigella sonnei
atgatgaaatcagacgaaaaataccaggttcccgcgtggatgcgacctctgttgccgttgctctgcaacaccggggggaacgatccggaagaactgctgaatgatacagaaaccactgccagtgcgaatgttgtccgttatgtactgatagttgctgtgcggtcgcaggttgatctgctgcagcttctgtacaggaaagggctgttgcgcacagagataccaggtggcttttcaccggaagaagcgcaggcactcctggataatctggtgcgcagccatatcagcaaggcgctgtcgggcgagcgaatggcagcccgtgacagaaatgccgatctggcctggattggacagcaactggtcgatgccgcctggtttgtccgtgccacactggaagcgcatgggatgagcgtcggaaatgagagtccccctgctccgccggagacaatgccggacatacagacacgggaactggtgatgttgatcaagcgactggcatcatcgctgaaagcggtgaaaccggacagttgtgtggtgcgtgaagcgcaggactggctgcgcgacagaaaacttgtgagcatcacggatgttcttcggtga

SEQ ID NO: 487457 - DNA, 2214 bp, Shigella sonnei; identical to SEQ ID NO: 485713

SEQ ID NO: 487458 - DNA, 990 bp, Shigella sonnei; identical to SEQ ID NO: 462674

SEQ ID NO: 487459 - DNA, 153 bp, Shigella sonnei; identical to SEQ ID NO: 38791

SEQ ID NO: 487460 - DNA, 381 bp, Shigella sonnei; identical to SEQ ID NO: 458903

SEQ ID NO: 487461 - DNA, 1032 bp, Shigella sonnei; identical to SEQ ID NO: 482375

SEQ ID NO: 487462 - DNA, 381 bp, Shigella sonnei; identical to SEQ ID NO: 458903

SEQ ID NO: 487463 - DNA, 342 bp, Shigella sonnei
atgaactcatgtagaaccatcactcattatcgacatgagtcatttgcgcacgaaagaatctactcttctgtgatgcagttatacaaaggtaacaggaaagaagaaattcatacattattgagtcaaaatagagcttatcataaaactcgttatttatggaatgttctacttaatggtgattttgaactattaaatcaattagttgaaagcaatgaaaaagaattgaatgattgtaatctttctggcaagagagataaaagacgagcaaaaatattagcatcaaaaaattatattctctggaggatggtaagactggtaaataggaaaaagaataaacgttag

SEQ ID NO: 487464 - DNA, 657 bp, Shigella sonnei
  misc_feature (612)..(621): n is a, c, g, or t
atgagcaatgattaccctttagtatccataataataccgacgtataattcatctgattacattactgaaactctaacgaaattagaaaaacaaacttacccaaattttgaaattgttattgttaatgatggttctaaagataacacatcaaacgttttgagagagtatgggttaacccactctcgattaattattatcaataaagaaaatggcggtgtttcgtctgccaggaatacaggtatccgcaaggcgcaaggacagtttatatgttttatggatgatgatgatgagatagatcctaactatctgctgaagatgtataccagacaacatgagacgggaggggatgcgatttattgtgggctttatggccattatataaaagatggtgttacttactcacctataaatacagagtttaatgaaggatctttacttttcgactttttttataaaaaggttagattccatatagggtgcttgtttataagaaaacaacttctggaagagaataatcttttttttgatgaagatttacgactaggagaagatctggattttatctatcgactgctaattacatgcgatatgtatgcggttccatattatatnnnnnnnnnnatatgtataagcataactatagagaaaattccttaa

SEQ ID NO: 487465 - DNA, 276 bp, Shigella sonnei; identical to SEQ ID NO: 484087

SEQ ID NO: 487466 - DNA, 543 bp, Shigella sonnei
atgtacaccttcatgagttcatgccagcgtgatgagtggaacagccagctgatgagcgacacctgtcctgaaatcaccctggacaatgtactggcaacattccgccatcttaatgccagcaagatgcagacgtttgaacaggggctgattgatgtctaccggaaattgtcatgggattacagaaccaataatccctgccgtctgggtaagaaaataattattgaaaacctactgtaccgctggagtaacgggcgtgtgacgctggactgcagcggacgggaggcactggatgacctggtacgtccgttttatctgctggaggggcgcaacgttcctgacttcaggaacagcatcggggcgcagtatggtgaatttctcgggaacggtgacaatgtcggtaagctgttagaaggggaatattttacggtgcgtggctaccagaaagggaccgtacacattgtctttaagcgttctgaccttgttgaaaaactgaatgatattattgcacggcattatcctggtgcattgccgccacgagtctga

SEQ ID NO: 487467 - DNA, 810 bp, Shigella sonnei
gtgcgttcactgcgtgcaggagatctttctgctgtctacgtacccggcattgaagatgaggcattccgggatttggcccgggcatgggcatctgcccgcgatgatttacggcatgcaaggcaacgtctgaaatcgtttcttctggttcatggggtccattatgtcgggcgagcagattggggccctgcacaccgacgctggctcagcaaatactcattcgaaagtccctggcgacaattagcttttgacgaacaccgtcgtacaatagaagatcggcaggcacaatgtgaacggctggaatccgccctgaaggaggccgttaccgaatggaggctgtatccggtagtagaggcgctgcaagccatgcgagggattcagtttattactgcggttggattaatttctgaactgggtgatctgacccgttttgaacatccacgacaactgatgtcatggtttggtatcacgccatcagaatattcatcgggtggaagcagacatcagggcagcattaccaaagccggaaacagctatgccagaaagctattggtcgaggcagcgtggagttaccgtcatccggcacgcatcagtccggcaatacaaaaaaggcaggaaaatttaccccgccccgtcattgacagagcatgggatgctcaactcaggctttgtaagaggtatcgaaaacttcaggccaaaggaaagaatgtcaatattacaattgttgctgttgcacgtgagctggcgggttttatctgggatatgggccgaatagcaatgtctgtcgcacaacaaccacaatgtcacaaataa

SEQ ID NO: 487468 - DNA, 381 bp, Shigella sonnei; identical to SEQ ID NO: 458903

SEQ ID NO: 487469 - DNA, 537 bp, Shigella sonnei; identical to SEQ ID NO: 486147

SEQ ID NO: 487470 - DNA, 423 bp, Shigella sonnei
atgtactgtactgttaaagaaattatccgcgatgtactggatacagacgtgccggacagtgaatgcgtttttgccgtggtgctgacccgtggggatgtgcgccatatggctcaggactggaacctgtcagacgatgagctggaaaccgtcatgcagcggctggacgatgcctttgagcatggtgcggatgtcagcattgttcacgacgttgttcgtgagctgatggaagaaaagcgcgccagccgtcaggtgacagttccggcggtgatgctggaaaaagtgatggcgctggcaggcagtgaaatgaagcgcctgtatgccgtcgggagtgagaacgggggcgacggtgacgcattcgtcagggaggaacgcgaagcaatggacgttgtgttacaggcgctggacggggagaagatgtcatga

SEQ ID NO: 487471 - DNA, 426 bp, Shigella sonnei
atgcaatatgcgaaacctgtcactctgaacgttgaagagtgcgaccgtttgtcttttctgccttacctgtttggccaggattttctgtatgccgaagcgtctgtgtacgcgctggcgaaaaaaatgatgccggaatatgaaggcggattctggcacttcatccgcctgccggacggtggcggttacatgatgccggatggcgaccgtttccacatggtgaacggtgcaaactggtttgaccgtaccgtgagtgctgatgccgcaggtgtcattctgacctctcttgtgattaaccgccagttgtggctgtaccacgacagcggggatgcaggactgacccagctttaccggatgcgcgatgcgcagttgtggcgtcacatcgaatttcaccctgaatgcaacgcgatttacgcagcactggactga

SEQ ID NO: 487472 - DNA, 216 bp, Shigella sonnei; identical to SEQ ID NO: 485850

SEQ ID NO: 487473 - DNA, 618 bp, Shigella sonnei
atgttactcatcaaccgtcacggcggcgtactgccgccgctcctggcctccgccattcagaaactgaccggaaccggggcggaactggtactgtctggcagtcagtggcagtcgctgccggtacttccggcagacggaacacaggtgtttttcccgtatgccggagaatggctgaccgaagacgaaatcagggcagttcttgatgcagtgcgcgatgcggtacgcagtgtcagttgccgggtggcagaagatgcgcagcgtatcagggcggcgctgaccacaaccggtcagacgttgctgacccgccagacccgccgctttcgcctggtggtgaaggaaagcgatcacccctgctggctcgatgaggacgacgaaaacctgcccgtggtgctcgatgccatcctgaaccggggcgcacgtttttcggcggtggaaatgtatctggtcagcgattgtattgagcatatcctgtccagtgggctggcctgcgatgtgctgcgtataccggatgaaccgccccgccggtggtttgaccgtggtgttctgcgggaggtggtccgggaaggccgggctgaaatccgcagcatggcggatgccctcgcaaaaatccggggctga

SEQ ID NO: 487474 - DNA, 261 bp, Shigella sonnei; identical to SEQ ID NO: 485837

SEQ ID NO: 487475 - DNA, 276 bp, Shigella sonnei; identical to SEQ ID NO: 484087

SEQ ID NO: 487476 - DNA, 570 bp, Shigella sonnei; identical to SEQ ID NO: 485859

SEQ ID NO: 487477 - DNA, 522 bp, Shigella sonnei; identical to SEQ ID NO: 485834

SEQ ID NO: 487478 - DNA, 477 bp, Shigella sonnei; identical to SEQ ID NO: 485853

SEQ ID NO: 487479 - DNA, 303 bp, Shigella sonnei; identical to SEQ ID NO: 486153

SEQ ID NO: 487480 - DNA, 372 bp, Shigella sonnei; identical to SEQ ID NO: 11381

SEQ ID NO: 487481 - DNA, 234 bp, Shigella sonnei; identical to SEQ ID NO: 486433

SEQ ID NO: 487482 - DNA, 303 bp, Shigella sonnei; identical to SEQ ID NO: 485854

SEQ ID NO: 487483 - DNA, 171 bp, Shigella sonnei
atgctcaatacaatcgctgaccagatacatttccaccgccgaaaaacgtgcgtcccggttcaggatggcatcgagcaccacgggcaggttttcgtcgtcctcatcgagccagcaggggtgatcgctttccttcacgaccaggcgaaagcggcgcgtctggcgggtcagtaa

SEQ ID NO: 487484 - DNA, 303 bp, Shigella sonnei; identical to SEQ ID NO: 487011

SEQ ID NO: 487485 - DNA, 192 bp, Shigella sonnei
atgaatatcagcacagaaacccgcgaaattctgcgtaattacagggccgtgattaatgcgcggcgtcgtgagatggggcagaaaccgctcactaccgcgcagattgttgatgaaatctgcgattttgtggtgaatcagcaggcggttttcctgggcggtcactatatccttcagggcagcagaaacaggtaa

SEQ ID NO: 487486 - DNA, 345 bp, Shigella sonnei
atgccttacacggcgaaacgatatcagacagaaaacggtgaggttccgtacaccgactggatgaaaaaattaagacgtaaagaccagaccgcagcgttaaaggtggattccagaattgcccgcgctatgggcggaaattttggagatcataaattcgaaagggacggtgtatgggaattacgggttgattacggtcctggttacagggtttattattcaatcgaagatggcgaaataattcttctgctcattggagggaataaaaaaactcagacagtcgatttagataaagccgttagttatctgcaagattttaaaaagaggtcaaaaaatgacagccactaa

SEQ ID NO: 487487 - DNA, 318 bp, Shigella sonnei; identical to SEQ ID NO: 8580

SEQ ID NO: 487488 - DNA, 216 bp, Shigella sonnei
atggagatcatcaataacgtgagcgaaaaccgccaggtgaccgtccctgctgaactgctggcgtccctgattcagaccgctgaacaggcattgtggaaacgtgaatgggccgcccgggatcatggcctcgccgtcccggaatgcgtcacccgccgtcaggcggtgattaatcaggcccgcaccctgctgaaaaacaacagacacgaaaacgactga

SEQ ID NO: 487489 - DNA, 216 bp, Shigella sonnei
atggagatcatcaataacgtgagcgaaaaccgccaggtgaccgtccctgctgaactgctggcgtccctgattcagaccgctgaacaggcattgtggaaacgtgaatgggccgcccgggatcatggcctcgccgtcccggaatgcgtcacccgccgtcaggaggtggttaatcaggcccgcaccctgctgaaaaacaacacacacgaaaacgactga

SEQ ID NO: 487490 - DNA, 285 bp, Shigella sonnei; identical to SEQ ID NO: 486588

SEQ ID NO: 487491 - DNA, 267 bp, Shigella sonnei
atgttggggcttgaaccgaagagcacggcggtgcggagtccggagagtaacggcatagcagagagcttcgtgaaaacgataaagcgtgactacatcagtgtcatgcccaaaccagacgggttaacggcagcaaagaaccttgcagaggcgttcgagcattataacgaatggcatccgcatagtgcactgggttatcgctcgccacgggaatatctacggcagcaagccagtaatgggttaagtgataacaggtgtctggaaatatag

SEQ ID NO: 487492 - DNA, 207 bp, Shigella sonnei; identical to SEQ ID NO: 485404

SEQ ID NO: 487493 - DNA, 282 bp, Shigella sonnei
atgattgaagaattgcgcgcagatcctgattatgcaaacgcttatcttgctaatgccctggaagaaataaacgagcctggtggtttaggcggttttcttgttgcgctacgtcaggtaatcgaggcgcgaggggggatttccgaagccgccaggaaatcggggcttgcccgtcagagtatttaccgcgcattatcccccaacggtaacccgaccatcacaacgcttgcacaacttacatcggtagccggattacagttcactctcagtaaatccagccactaa

SEQ ID NO: 487494 - DNA, 381 bp, Shigella sonnei; identical to SEQ ID NO: 458903

SEQ ID NO: 487495 - DNA, 1446 bp, Shigella sonnei; identical to SEQ ID NO: 487279

SEQ ID NO: 487496 - DNA, 738 bp, Shigella sonnei
atgacatcagacaatatcgctgaatatgttggtgagaataatcaatttactgagaagcctgtaactgaataccccccggtgatacaggataatacagtgaccactaaagactatctgtacagcaataatattgatactgaccttttagtggttatcggagggcttattgttatattgtttctcatgatgcttatcatgtactttattaattctctcaggcataaggaattaactgaaatactgacaaaaatatcttttcctgaaaaatccgggagcaattcgcttaaaccggaagcggtcagctgtaatttgttgtccctgtgtgtgctggcaccggtattctgtacacccagaaagctggcagaagtctccagggagatcatcgtggcgagtgcgcaggaaattgcatggacgccggggagcagtcgtattgatggtcatcagggcgaaaatattacctggtctctgtcatcgcagtctcctgccgataagtatgatctcatcaataaaacgtcccgtgtttctcctgacagtggccgtttttatgaaccggacacagttctggatcaccgtgaacgggtacgcctttttattcagatccagtttccgcacgggagtgactggtctgaagtattgcgcctgactgacattgttacagagaaggtctcttccggcagggctgcaggcgggtatcaccaccggcatacagggtacacctggtctgtttctgtgaattaa

SEQ ID NO: 487497 - DNA, 1374 bp, Shigella sonnei
atgcctcgcattaaacctcttctggttctttgtgccgttttactgacggtcacacccgcagcgtcagcggatgtgaacagcgacatgaatcagttctttaacaagctgggcttcgcctccaataccacacagccgggcgtctggcaggggcaggccgccgggtatgcctatggtggctccctgtatgcccgcacccaggtcaaaaatatccagctgatttccatgacgctgccggatatcaatgccggatgtggcggcatcgacgcctatctcggctcgttcagttttattaatggcgatcagttgcagcgttttgttaagcagattatgagcaatgctgccggttacttttttgaccttgccctgcagacaacggtgccggaaataaaaaccgcaaaagacttcctgcagaaaatggcaagtgacattaacagtatgaacctcagttcctgtcaggtggcacaggggcttgtgggggggctgttccctcagacgcaggaatctcagcagaaagtttgtcaggacattggcagtgaaagcaatatcttcgccgactgggccgcatctcgtcaggggtgcacggtcggagggcagtcctcatctgttcgtgacaaagccagcgacaaggacaaggagcgggtgctgaaaaaccagaatatcatatgggaggcgctgaaaaaaaacagaatgtttgacggcaacaaagagttgaaagaatttatcatgacgctcaccggtacgctgatttttggggaagacagcgagattacccccctgccggcgcgtaccactgaccgcgatatcctccgggcgattatggaggggggaacggcaaaaatttaccactgcaacgattcggacaagtgtctgaaggtggtggcggatgcaaatgtgaccatcgcccgggataaagccctgaagtcacagattacaaaactgctcaccagtattcagaataaagcagtgagtgacactccgcttgacgcccgggaacaggggtttatttccagcaccaccattcccgtttttaaatatctgattgacccgcagatgctcggtgtgtccaacagcgtcgtttaccagctgacggactatatcggctacgacatcatgctccagtacattcaggaactgcttcagcaggcccgggccatgattgccaccgggaactatccgcaggctgtgatggacaatgttctggagaatctgaatcaggcacagcaacagattgccattttccagagtcaggtacaggtccagcaggatgcgctgctggttgtcgaacgtcagatgagctacatgcgtcagcagctttccgcccgtatgctcagccgttaccagaacaactatcacttcggagggaattcactgtga

SEQ ID NO: 487498 - DNA, 267 bp, Shigella sonnei; identical to SEQ ID NO: 11114

SEQ ID NO: 487499 - DNA, 357 bp, Shigella sonnei; identical to SEQ ID NO: 476252

SEQ ID NO: 487500 - DNA, 882 bp, Shigella sonnei; identical to SEQ ID NO: 476251

SEQ ID NO: 487501 - DNA, 210 bp, Shigella sonnei
atggcaaaaacaaaacaggaatggctgtatcagttacggcgatgttcatcagtcaatacgctggaaaaaattattcataaaaacagagacagtttattaaacagtgaacgtgaatcatttaattcagcagcagaccaccggttagcggaattaatcaccggaaagttatatgacaggataccaaaagagatatggaaatatgtaaggtaa

SEQ ID NO: 487502 - DNA, 1146 bp, Shigella sonnei
gtggcgatcggccttgagttaagccgcgtgacccaacaaatcaatgacagtcgctggagcattatctggtcggtattatttggcatgctggtcggactgattggcacctgcattctggttaaggtactgaaaaaaatccttttcggcctggaaccctacgaaatctccacgctgtttgagcaacgccaggccatgttgcagtctatcaaagaaggcgtcgttgccgtggacgatcgcggcgaggtcacgctgatcaacgatgccgcacaagaattgctgaattaccgtaagtcgcaggacgatgagaaactgtcgacgctcagccactcatggtcacaggtggtagatgtctcggaagtgttacgcgacggtacgccgcgccgcgacgaagagattacgattaaagaccggctattactgatcaacaccgttccggtgcgcagtaatggcgttatcatcggtgccatttcaaccttcagggacaaaaccgaagtacgtaaactgatgcagcgactcgacggtctggtcaactatgccgacgcacttcgtgaacgatcccacgaatttatgaataaattgcacgtgattctcggattattgcatctgaagagttataagcagttggaagattacattctaaaaacagccaataactatcaggaagagattggctctctgctgggtaagatcaaatctccggttatcgctggttttttaatcagcaagattaatcgcgcgaccgatttaggccatacgctgattttaaacagtgaaagccagctgccagacagcggcagtgaggaccaggtcgcgacgctgattaccacattgggaaatctgatagaaaacgcgctggaagcattagggccggaacccggtggcgaaattagcgtaacattgcactaccgtcacggctggctgcactgcgaagttaacgatgatggaccggggatcgcacccgacaaaatcgatcacatttttgacaaaggtgtctcgacaaaaggaagcgagcgaggcgtcggtttagcacttgtcaaacaacaggtagaaaatctcggcggcagcatcgccgtggaatcggaacccgggattttcacacaattttttgtccagataccctgggacggggagaggtcgaacagatga

SEQ ID NO: 487503 - DNA, 1470 bp, Shigella sonnei; identical to SEQ ID NO: 482803

SEQ ID NO: 487504 - DNA, 567 bp, Shigella sonnei; identical to SEQ ID NO: 482802

SEQ ID NO: 487505 - DNA, 657 bp, Shigella sonnei; identical to SEQ ID NO: 463703

SEQ ID NO: 487506 - DNA, 783 bp, Shigella sonnei; identical to SEQ ID NO: 482384

SEQ ID NO: 487507 - DNA, 1074 bp, Shigella sonnei; identical to SEQ ID NO: 482383

SEQ ID NO: 487508 - DNA, 162 bp, Shigella sonnei; identical to SEQ ID NO: 261922

SEQ ID NO: 487509 - DNA, 606 bp, Shigella sonnei; identical to SEQ ID NO: 482381

SEQ ID NO: 487510 - DNA, 1590 bp, Shigella sonnei
atgacgttgtctccttatttgcaagaggtggcgaagcgccgcacttttgccattatttctcacccggatgccggtaagactaccatcaccgagaaggtgctgctgttcggacaggccattcagaccgccggtacagtaaaaggccgtggttccaaccagcacgctaagtcggactggatggagatggaaaagcagcgtgggatctccattactacgtctgtgatgcagtttccgtatcacgattgcctggttaacctgctcgacaccccggggcacgaagacttctcggaagatacctatcgtaccctgacggcggtggactgctgcctgatggttatcgacgctgcaaaaggtgttgaagatcgtacccgtaagctgatggaagttacccgtctgcgcgacacgccgatcctcacctttatgaacaaacttgaccgtgatatccgcgacccgatggaactgctcgatgaagttgagaacgagctgaaaatcggctgcgcaccgatcacctggccgattggctgcggcaagctgtttaaaggcgtttaccacctttataaagacgaaacctatctctatcagagcggtaaaggccacacgattcaggaagtccgtattgttaaagggctgaataacccggatctcgacgctgcggttggtgaagatctggcacagcagctacgtgacgaactggaactggtgaaaggcgcgtctaacgagttcgacaaagaattgttccttgcgggcgaaatcactccggtattcttcggtactgcgctgggtaacttcggcgttgatcatatgctggatggcctggtggagtgggctcctgcgccgatgccgcgtcagactgatacccgtaccgtagaggcgagcgaagacaaatttaccggcttcgtatttaaaattcaggccaacatggacccgaaacaccgcgaccgcgtggcgtttatgcgcgtagtatccggtaaatatgaaaaaggcatgaagctgcgccaggtgcgtactgcgaaagatgtggttatctccgacgcgctgacctttatggcgggcgaccgttcgcacgttgaagaagcgtatccgggcgatatcctcggcctgcacaaccacggcactattcagatcggcgacacctttacccagggtgagatgatgaagttcaccggtattccgaacttcgcaccagaactgttccgtcgtatccgcctgaaagatccgctgaagcaaaaacagctgctcaaagggctggtacagctttccgaagagggcgcggtgcaggtgttccgtccgatctccaacaacgatttgatcgttggtgctgttggtgtgctgcagtttgatgtggtggtatcgcgcctgaagagcgaatacagcgttgaagcagtatatgaatcagtcaacgttgccactgcccgctgggtagaatgtgcggacgcgaagaaattcgaagagttcaagcgtaagaacgaaagccaactggcgcttgatggcggcgataacctcgcttacatcgctaccagcatggtcaacctgcgcctggcgcaggaacgttatcccgacgttcagttccaccagacccgcgagcattaa

SEQ ID NO: 487511 - DNA, 678 bp, Shigella sonnei; identical to SEQ ID NO: 482379

SEQ ID NO: 487512 - DNA, 447 bp, Shigella sonnei; identical to SEQ ID NO: 482378

SEQ ID NO: 487513 - DNA, 414 bp, Shigella sonnei; identical to SEQ ID NO: 460331

SEQ ID NO: 487514 - DNA, 1032 bp, Shigella sonnei; identical to SEQ ID NO: 482376

SEQ ID NO: 487515 - DNA, 465 bp, Shigella sonnei; identical to SEQ ID NO: 485249

SEQ ID NO: 487516 - DNA, 618 bp, Shigella sonnei
gtggcttgccccgaggtcatcaactggcaggaggaacaggagggtgcatgcttggtgataacggcaattccgggagtaccggcggctgatctgtctggagcggatttgctcaaagcgtggccgtcaatggggcagcaacttggcgctgttcacagcctatcggttgatcaatgtccgtttgagcgcaggctgtcgcgaatgttcggacgcgccgttgatgtggtgtcccgcaatgccgtcaatcccgacttcttaccggacgaggacaagagtacgccgcagctcgatcttttggctcgtgtcgaacgagagctaccggtgcggctcgaccaagagcgcaccgatatggttgtttgccatggtgatccctgcatgccgaacttcatggtggaccctaaaactcttcaatgcacgggtctgatcgaccttgggcggctcggaacagcagatcgctatgccgatttggcactcatgattgctaacgccgaagagaactgggcagcgccagatgaagcagagcgcgccttcgctgtcctattcaatgtattggggatcgaagcccccgaccgcgaacgccttgccttctatctgcgattggaccctctgacttggggttga

SEQ ID NO: 487517 - DNA, 498 bp, Shigella sonnei
atgtcgccatcattacgcaaggctgttgcagctgctattggtggtggggctgttgctatagcatctgtgttaatcactggcccaggtggtaacgatggtctggaaggtgtcagctacataccatacaaagatatcattggtgtatggactgtatgtcacggacacaccggaaaagacatcatgctcggtaaaacgtataccgaagcagaatgcaaagccctcctgaataaagaccttgccactgtcgccagacaaattaacccgtacatcaaagtcgatataccggaaacaacgcgcggcgctctttactcgttcgtttacaacgtgggcgctggcaatttcagaacatcgacgcttcttcgcaaaataaaccagggcgatatcaaaggcgcatgtgaccagctacgtcgctggacatatgctggcggtaagcaatggaaagggctgatgacccgtcgtgagattgagcgtgaagtctgtttgtgggggcagcaatga

SEQ ID NO: 487518 - DNA, 465 bp, Shigella sonnei; identical to SEQ ID NO: 475005

SEQ ID NO: 487519 - DNA, 498 bp, Shigella sonnei
atgtcgccatcattacgcaaggctgttgcagctgctattggtggcggggctgttgctatagcatctgtgttaatcactggcccaggtggtaacgatggtctggaaggtgtcagctacataccatacaaagatatcattggtgtatggactgtatgtcacggacacaccggaaaagacatcatgctcggtaaaacgtataccgaagcagaatgcaaagccctcctgaataaagaccttgccactgtcgccagacaaattaacccgtacatcaaagtcgatataccggaaacaacgcgcggcgctctttactcgttcgtttacaacgtgggcgctggcaatttcagaacatcgacgcttcttcgcaaaataaaccagggcgatatcaaaggcgcatgtgaccagctacgtcgctggacatatgctggcggtaagcaatggaaagggctgatgacccgtcgtgagattgagcgtgaagtctgtttgtgggggcagcaatga

SEQ ID NO: 487520 - DNA, 447 bp, Shigella sonnei
atggcctttttgcattggcgcagaaaaaaatgccgggtgcgacgctggcgcgtcttctccagcctgggcaggcacggcaggggcagcttattcctccacatacgccagattcagcaacggatacgagaaggccatcctgacggatggcctttttgcattggcgcagaaaaaaatgccgggtgcgacgctggcgcgtcttctccagcctgggcaggcacggcaggggcagcttattcctccacatacgccagattcagcaacggatacgagaaggccatcctgacggatggcctttttgcattggcgcagaaaaaaatgccgggtgcgacgctggcgcgtcttctccagcctgggcaggcacggcaggggcagcttattcctccacatacgccagattcagcaacggatacggtttccccaaatcgtccacctcagagcgtcccgtaa

SEQ ID NO: 487521 - DNA, 657 bp, Shigella sonnei; identical to SEQ ID NO: 463703

SEQ ID NO: 487522 - DNA, 657 bp, Shigella sonnei; identical to SEQ ID NO: 463703

SEQ ID NO: 487523 - DNA, 723 bp, Shigella sonnei
atgaaggtacgcgatcgcattgttgccgacggtattgacgatcctcactttgatgccagcaatgttggtgagtatctgcaagcggcggaagtgaacgccatgcttgacgatcccgatgcactatttatcgacatgcgtaaccactatgagtatgaagtggggcactttgaaaacgcgctcgaaattccggcagataccttccgtgagcagctgccaaaagcagtcgagatgatgcaggcacataaagataaaaaaatcgtcatgtactgcaccggcggcattcgttgtgaaaaggccagtgcctggatgaaacataacggattcaacaaagtctggcatatcgagggcggaattattgaatacgcccgtaaggcgcgcgagcagggcttgccggtgcgttttattggcaaaaattttgtttttgacgagcggatgggcgaacgtatatcggatgagattatcgcgcattgccaccagtgcggcgcgccgtgcgacagccataccaactgtaaaaatgatggctgccacctgctgtttattcagtgtccagtatgcgcggaaaaatacaaaggttgttgtagtgagatttgctgcgaagaaagcgcgttaccgccagaagaacagcgacgccgtcgggcaggacgtgaaaatggcaataagatctttaataagtctcgtggacgtctgaatacaacactgggcattcctgatccaacagaataa

SEQ ID NO: 487524 - DNA, 315 bp, Shigella sonnei
gtgaagtggtgttactcactgcgctggaaactgccttatccctgtcctggcgagcatgaactggtttcagaagtggtggaggcggggcagcctgcaccggcatccgttatgtcacgctgggttgccggagcagggtatgcggtctgtctggattttatttctgaccgcccggtgcgccgctggagcgaagaacgtaaggctgcggtacgacggcggaatctggagaaacgtatcaacaggcatgcaccactgtttgcggatgaactgatagcccgtgaactggctgaacgaccggattattttcagggaaagtga

SEQ ID NO: 487525 - DNA, 153 bp, Shigella sonnei; identical to SEQ ID NO: 38791

SEQ ID NO: 487526 - DNA, 498 bp, Shigella sonnei
atgtcgccatcattacgcaaggctgttgcagttgctattggtggcggggctgttgctatagcatctgtgttaatcactggcccaggtggtaacgatggtctggaaggtgtcagctacataccatacaaagatatcattggtgtatggactgtatgtcacggacacaccggaaaagacatcatgcctggtaaaacgtataccgaagcagaatgcaaagctctcctgaataaagaccttgccactgtcgccagacaaattaacccgtacatcaaagtcgatataccggaaacaacgcgcggcgctctttactcgttcgtttacaacgtgggcgctggcaatttcagaacatcgacgcttcttcgcaaaataaaccagggctatatcaaaggcgcatgtgaccagctacgtcgctggacatatgctggcggtaagcaatggaaagggctgatgacccgtcgtgagattgagcgtgaagtctgtttgtgggggcagcaatga

SEQ ID NO: 487527 - DNA, 2214 bp, Shigella sonnei; identical to SEQ ID NO: 485713

SEQ ID NO: 487528 - DNA, 1275 bp, Shigella sonnei; identical to SEQ ID NO: 21523

SEQ ID NO: 487529 - DNA, 600 bp, Shigella sonnei
atgcgtaaagtttgtgcagccattttgtccgcagccatctgtctgtccgtatccggtgcgcctgcatgggcgtctgaacatcagtccacactgagcgcggggtatcttcatgcccgtacgaacgctcccggcagcgataatctgaacgggattaacgtgaaataccgttatgagtttacggacgcgctggggctgattacgtccttcagttatgcaggagacaagaatcgccagctgacccgctacagcgatacccgctggcatgaagattccgtgcgtaaccgctggttcagcgtgatggcggggccgtctgtacgcgtgaatgaatggttcagcgcgtatgcgatggtgggtgtggcttacagccgtgtgtcgactttctccggggattatctccgcgtaactgacaacaaggggaaaacgcacgatgtgctgaccggaagtgatgacggtcgccacagcaacacgtctctggcgtggggggctggcgtgcagtttaacccgaccgaatccgtgaccattgaccttgcttatgaaggttccggtagtggtgactggcgaacggatgcatttattgttggtatcggataccgtatctga

SEQ ID NO: 487530 - DNA, 561 bp, Shigella sonnei
atgacagagcagaagcgaccggtactgacactgaagcgaaaaacggaaggggagacgcctgtccgcaggcggaaaaccatcatcaatgtcaccacgccaccaaagtggaaggtgaaaaagcagaagctggccgagaaagcagcccgggaagcagagctggcggcaaaaaaagcgcaggccagacaggcactgtccatttatctgaacctgcccacactggatgaggccgtgaacatcctgaagccctggtggccgggattgtttgacggtgacacaccccggcttctggcctgtggtatccgggacgtgttactggaagacgtggcgcagcggaatatcccgctctcgcataaaaaactgcgcagggcgctgaaggccatcacccgttcagaaagctatctgtgtgccatgaaagccggtgcctgccggtatgacacggaagggtatgtgacggagcatatttctcaggaggaggaagtgtatgcggcagcgcgtctggataaaatccgccgccagaacaggataaaggcagagcttcaggccgtgcttgatgagaaataa

SEQ ID NO: 487531 - DNA, 642 bp, Shigella sonnei; identical to SEQ ID NO: 486871

SEQ ID NO: 487532 - DNA, 483 bp, Shigella sonnei; identical to SEQ ID NO: 483872

SEQ ID NO: 487533 - DNA, 465 bp, Shigella sonnei; identical to SEQ ID NO: 483873

SEQ ID NO: 487534 - DNA, 381 bp, Shigella sonnei; identical to SEQ ID NO: 458903

SEQ ID NO: 487535 - DNA, 381 bp, Shigella sonnei; identical to SEQ ID NO: 458903

SEQ ID NO: 487536 - DNA, 333 bp, Shigella sonnei
atgtctggaaatataggggcaaatccaaccacctatggggatggttatatctctaacaaagcacaaagttttgaagtggtggcgcaatatcaattcgacttcggcttgcgcccatcactcgcttacctgaaatcgaaaggcagagatctgggccgctacggcgaccaggacatgattgagtatatcgacgttggtgcgacgtatttcttcaacaaaaatatgtcgacctatgttgattataaaatcaacctgattgatgaaagcgactttacccgtgccgtagatattcggaccgataacatcgtcgctacgggcattacctatcagttctaa

SEQ ID NO: 487537 - DNA, 1455 bp, Shigella sonnei; identical to SEQ ID NO: 485766

SEQ ID NO: 487538 - DNA, 381 bp, Shigella sonnei; identical to SEQ ID NO: 458903

SEQ ID NO: 487539 - DNA, 345 bp, Shigella sonnei; identical to SEQ ID NO: 485793

SEQ ID NO: 487540 - DNA, 684 bp, Shigella sonnei
atgtcccgttttatcctgggtgactgcgtgcgtgttatggccacgtttccgggcaatgctgtcgatttcatcctcaccgacccgccgtatctcgtcggtttccgtgaccgttccgggcgcaccatcgccggcgataaaaccgatgaatggctgcaaccggcctgtaatgaaatgtaccgcgtgctgaaaaaagatgcgctgatggtcagcttctacggctggaaccgcgtcgatcgctttatggccgcctggaaaaatgcgggattcagcgtggttggccacctggtgtttaccaaaacctacacatcgaaggccgcatatgtgggctatcgccacgaatgcgcctacatcctggcaaaaggacgtccggcgctgcctcagaagccattgcccgacgtgctgggctggaaatattcaggcaatcgtcatcacccgactgaaaagcccgttaccagcctgcaaccgctcattgagagcttcacacacccgaacgcgattgtgctggacccgtttgcaggcagcggctcaacctgtgtggccgccctccagtccggacgccggtatatcggtatcgagctgcttgaacagtatcaccgtgccggacagcaacgactggccgccgtgcaacgggccatgcagcagggggccgcgaatgataactggtttgaaccggaggctgcgtaa

SEQ ID NO: 487541 - DNA, 393 bp, Shigella sonnei; identical to SEQ ID NO: 485788

SEQ ID NO: 487542 - DNA, 249 bp, Shigella sonnei; identical to SEQ ID NO: 25922

SEQ ID NO: 487543 - DNA, 381 bp, Shigella sonnei; identical to SEQ ID NO: 458903

SEQ ID NO: 487544 - DNA, 654 bp, Shigella sonnei; identical to SEQ ID NO: 476867

SEQ ID NO: 487545 - DNA, 303 bp, Shigella sonnei; identical to SEQ ID NO: 458125

SEQ ID NO: 487546 - DNA, 381 bp, Shigella sonnei; identical to SEQ ID NO: 458903

SEQ ID NO: 487547 - DNA, 372 bp, Shigella sonnei
gtgctggatgcactggagcaggcgttgtgggcccgtcgcccgtctggcaccatccatcacagcgataaaggctctcagtatgtgtcactggcctataaggcgcgactaaaagaagcaaaactgctggcatcaacagggagtactggtgactcgtatgacaacgcgatggcagagatcatcaagggcctttacaaagcggaggtaatacaccgtaagagctggaaaaaccggacagaagtggagctggccacactcacgtgggtggactggtataacaatcgacgattgctggaaaggctgggccatatcccaccggcagaagcagaaaaagcttattatgcttccatcggaaatgatgatctggcagcctga

SEQ ID NO: 487548 - DNA, 372 bp, Shigella sonnei; identical to SEQ ID NO: 486985

SEQ ID NO: 487549 - DNA, 303 bp, Shigella sonnei; identical to SEQ ID NO: 21213

SEQ ID NO: 487550 - DNA, 378 bp, Shigella sonnei; identical to SEQ ID NO: 476066

SEQ ID NO: 487551 - DNA, 810 bp, Shigella sonnei
gtgcgcatcggtgcccccaccggcgtggcctgttcggtgtgccccggcggggtgacgtccggccatccggtcaatccgctgctcggtgcgaaggtccttcccggtgaaaccgacatcgccctgccctccccgctgccgttcatcctctcccgcacctacagcagttaccggacaaaaacgcccgcgccggtggggagcctcggccccggctggaaaatgcctgcggatatccgcttacagctgcgcgataacacactgatactcagtgataacggcggcagaagcctgtattttgagcacctgtttcccggtgaggacggttacagccgcagcgaatcactctggctggtgcgcggcggcgtggcgaaactggatgaaggtcaccggctggccgcactctggcaggcgctgccggaagaactccgcttaagtccgcatcgttatctggcgacaaacagtccgcaggggccgtggtggctgctcggctggtgtgagcgggtgccggaagcggatgaggtgctgcctgcgccgctgccgccgtaccgggtactgaccgggctggtggaccgcttcgggcgcacacagacgttccaccgcgaagccgccggtgaattcagcggcgaaatcaccgacgtgacggatggtgccgggcgtcacttccggctggtactgaccacgcaggcgcagcgggcagaagaagcccggcagcaggccatttccggcgggacggaaccgtccgcttttcctgataccctgccgggttacaccgaatatggccgggacaacggcatctgtctgccgtgtggctga

SEQ ID NO: 487552 - DNA, 210 bp, Shigella sonnei; identical to SEQ ID NO: 485798

SEQ ID NO: 487553 - DNA, 738 bp, Shigella sonnei; identical to SEQ ID NO: 486991

SEQ ID NO: 487554 - DNA, 276 bp, Shigella sonnei; identical to SEQ ID NO: 484087

SEQ ID NO: 487555 - DNA, 570 bp, Shigella sonnei; identical to SEQ ID NO: 485859

SEQ ID NO: 487556 - DNA, 381 bp, Shigella sonnei; identical to SEQ ID NO: 458903

SEQ ID NO: 487557 - DNA, 381 bp, Shigella sonnei; identical to SEQ ID NO: 458903

SEQ ID NO: 487558 - DNA, 504 bp, Shigella sonnei; identical to SEQ ID NO: 485763

SEQ ID NO: 487559 - DNA, 177 bp, Shigella sonnei; identical to SEQ ID NO: 485877

SEQ ID NO: 487560 - DNA, 459 bp, Shigella sonnei; identical to SEQ ID NO: 486154

SEQ ID NO: 487561 - DNA, 252 bp, Shigella sonnei; identical to SEQ ID NO: 485878

SEQ ID NO: 487562 - DNA, 474 bp, Shigella sonnei
gtgtctttcccgtatgccggagaatggctgaccgaagacgaaatcagggcagttcttgatgcggtgcacgatgcggtacgcagtgtcagttgccgggtggcagaagatgcgcggcgtatcagggcggcgctgaccacaaccggtcagacgttgctgacccgccagacgcgccgctttcgcctggttgtgaaggaaagcgatcacccctgctggctcgatgaagacgacgaaaacctgcccgtggtgctcgatgccatcctgaaccggggcgctcgtttttcgtcggtggaaatgtatctggtcagtgagtgtgtggagcatatcctgtccagtgggctggcctgcgatgtgctgcgtatacctgatgaaccgtcccgtcgctggtttgaccgggatattctgcgggaggttgttatggaggcacggaatgaaatccgcagcatggcggatgcactggcaaaaatccggaaatga

SEQ ID NO: 487563 - DNA, 234 bp, Shigella sonnei
atgagcgaatatttcagaatatttcaggggctgcctgacggctcctttacccgcgaacaggctgaagccgttgccgcacagtaccggaatgtctttatcgaggatgatcagggaacgcattttcgcctggttgtccgtcaggatggcacgttgatctggcgctcctggaattttgaggacggtgccgggtactggatgaaccggtacatcagggatttcgggattcttaagtaa

SEQ ID NO: 487564 - DNA, 348 bp, Shigella sonnei; identical to SEQ ID NO: 485869

SEQ ID NO: 487565 - DNA, 495 bp, Shigella sonnei; identical to SEQ ID NO: 487268

SEQ ID NO: 487566 - DNA, 234 bp, Shigella sonnei; identical to SEQ ID NO: 15508

SEQ ID NO: 487567 - DNA, 147 bp, Shigella sonnei; identical to SEQ ID NO: 465857

SEQ ID NO: 487568 - DNA, 315 bp, Shigella sonnei; identical to SEQ ID NO: 33595

SEQ ID NO: 487569 - DNA, 312 bp, Shigella sonnei; identical to SEQ ID NO: 484092

SEQ ID NO: 487570 - DNA, 684 bp, Shigella sonnei
atgtcccgttttatccagggtgactgcgtgcgtgttatggccacgtttccgggcaatgctgtcgatttcatcctcaccgacccgccatatctcgtcggtttccgtgaccgtcaggggcgtaccatcgccggcgataaaaccgatgaatggctgcaaccggcctgtaatgaaatgtaccgcgtgctgaaaaaagatgcgctgatggtgagcttctatggctggaaccgcgtcgatcgctttatggccgcctggaaaaatgcgggattcagcgtggttggccacctggtatttaccaaaacctacacatcgaaggccgcatatgtgggctatcgccacgaatgcgcttacatcctggcaaaagggcgtccggcgctgcctcagaagccattgcccgacgtgctgggctggaaatattcaggcaaccgccatcacccgacggaaaagcccgttaccagcctgcaaccactgattgagagcttcacacatccgaacgcgattgtgctggacccgtttgcaggcagcggctcaacctgcgtggccgccctccagtccggacgccggtatatcggtatcgagctgcttgaacagtatcaccgtgccggacagcaacgactggccgccgtgcaacgggccatgcagcagggggccgcgaatgataactggtttgaaccggaggctgcgtaa

SEQ ID NO: 487571 - DNA, 234 bp, Shigella sonnei; identical to SEQ ID NO: 28326

SEQ ID NO: 487572 - DNA, 561 bp, Shigella sonnei; identical to SEQ ID NO: 486400

SEQ ID NO: 487573 - DNA, 3417 bp, Shigella sonnei; identical to SEQ ID NO: 485369

SEQ ID NO: 487574 - DNA, 960 bp, Shigella sonnei; identical to SEQ ID NO: 485466

SEQ ID NO: 487575 - DNA, 1554 bp, Shigella sonnei; identical to SEQ ID NO: 485569

SEQ ID NO: 487576 - DNA, 597 bp, Shigella sonnei; identical to SEQ ID NO: 485523

SEQ ID NO: 487577 - DNA, 498 bp, Shigella sonnei; identical to SEQ ID NO: 485680

SEQ ID NO: 487578 - DNA, 2214 bp, Shigella sonnei; identical to SEQ ID NO: 485713

SEQ ID NO: 487579 - DNA, 846 bp, Shigella sonnei; identical to SEQ ID NO: 485759

SEQ ID NO: 487580 - DNA, 696 bp, Shigella sonnei
gtggaggaaatcagtctgccactgctgacgaaaatgtcttccgaacgcacgctggcagtccaggcagcactgatgcagcaaccggacaaatctcttgcactgctggcatggacgctctgcctgaatgtgtttgacagcggagcgtacagtaaaccagcacaaatcagcctggaatgtaaacattattcgctgaccagcgatgcgccgtcagggaaggaaggtgccgcattcctggcgctgatggcagaaaaagcccgtcttgcggccctgttaccggagggatggtcacgggacatgacgacgttcctgtcactcagtcaggaggtgctgttatccctgctcagtttctgcaccgcatgcagccttaacggtgtccagacccgcgagtgtggtcgcacgtcacgcagtccgcttgactcactggagagcgccatcggttttcacatgcgcgactggtggcagccgacgaaagcaaacttcttcggacacctgaaaaagccgcagattatcgcagccctgaatgaggcaggactgtccggtgccgcacgggacgcagagaagatgaagaaaggcgatgccgctgaacatgcagagttccatatgaaagacaaccgctgggtgcctggctggatgtgtgcaccacgcccacagacggatgccactgaacgcaccgataacctggctgatgccgcctga

SEQ ID NO: 487581 - DNA, 438 bp, Shigella sonnei
atgatgaataccgaactgacactgaatgccctgcagaccatgaatgcccaggaatatgaagaaatccgtgctgcgggaagcgatatgcgccgtaatctcactcacgaggtgatgcgtaaagtggacgcaccggctaactggatgatgaacggagagtatggcagcgagttcgggggctttttccccgtccaggttcgtttcacgccagcccacgaacgtttccacctggcattatgttcgccgggagacgtctctcagctctggatgctggttctggtgaatggtggtggacagcctttcgccgtcgttcaggtgcaacatatcttcacgcctgtcgctatcagtcacacgctggcgcttgccgcgacacttgatgcgcagggatacagtgttaacgacatcatccatatcctgatggcagaaggatgtcaggcatga

SEQ ID NO: 487582 - DNA, 501 bp, Shigella sonnei
atgtctgttgttgcacctgctgtatacgttggaacctggcacaaatacaactgtggaagcatcgccggacgctggtttgacctgaccacgtttgatgatgagcgcgactttttcgccgcctgccgtgctcttcaccaggatgaagccgatcctgaactgatgtttcaggattatgagggattcccggggaatatggcctctgaatgccatatcaactgggcctgggttgaaggcttccgccgggcacgggatgaaggctgcgaagaggcttatcgtctctgggtggatgataccggtgagacggattttgacagcttccgcgatgcctggtggggcgaggctgacagtgaggaggcttttgcggttgagttcgccagtgataccggcctgctggctgacgtgccggagacggtggcgctctattttgactatgaggcgtatgcgcgggatttattcctggactccttcacctttattgacggtcatgtgttccgtcggtga

SEQ ID NO: 487583 - DNA, 303 bp, Shigella sonnei; identical to SEQ ID NO: 485775

SEQ ID NO: 487584 - DNA, 303 bp, Shigella sonnei; identical to SEQ ID NO: 484410

SEQ ID NO: 487585 - DNA, 303 bp, Shigella sonnei; identical to SEQ ID NO: 458125

SEQ ID NO: 487586 - DNA, 315 bp, Shigella sonnei; identical to SEQ ID NO: 33595

SEQ ID NO: 487587 - DNA, 483 bp, Shigella sonnei; identical to SEQ ID NO: 37538

SEQ ID NO: 487588 - DNA, 315 bp, Shigella sonnei; identical to SEQ ID NO: 33595

SEQ ID NO: 487589 - DNA, 501 bp, Shigella sonnei; identical to SEQ ID NO: 486470

SEQ ID NO: 487590 - DNA, 474 bp, Shigella sonnei
gtgtttttcccgtatgccggagaatggctgaccgaagacgaaatcagggcagttcttgatgcagtgcgcgatgcggtacgcagtgtcagttgccgggtggcagaagatgcgcagcgtatcagggcggcgctgaccacaaccggtcagacgttgctgacccgccagacccgccgctttcgcctggtggtgaaggaaagcgatcacccctgctggctcgatgaggacgacgaaaacctgcccgtggtgctcgatgccatcctgaaccggggcgcacgtttttcggcggtggaaatgtatctggtcagcgattgtattgagcatatcctgtccagtgggctggcctgcgatgtgctgcgtataccggatgaaccgccccgccggtggtttgaccgtggtgttctgcgggaggtggtccgggaaggccgggctgaaatccgcagcatggcggatgccctcgcaaaaatccggggctga

SEQ ID NO: 487591 - DNA, 474 bp, Shigella sonnei
gtgtctttcccgtatgccggtgagtggctggcagaggacgaaatcagggcagttcttgatgcggtacgcgatgcagtacgctgtgtcagttaccaggtggcagaagatacgcggcgtatccgggcggcgctgaccacaaccggtcagacgttactgacccgccagacgcgccgctttcgcctggtcgtgaaggaaagcgatcacccctgctggctcgatgaggacgacgaaaacctgcccgtggtgctcgatgccatcctgaaccgggacgcacgtttttcggcggtggaaatgtatctggtcagcgattgtattgagcatatcctgtccagtgggctggcctgcgatgtgctgcgtataccggatgaaccgccccgccggtggtttgaccgttgtgttctgcgggaagttgtccgggaagcccgggccgaaatccgtagcgtggcggatgccctggcaaaaatcaggggctga

SEQ ID NO: 487592 - DNA, 327 bp, Shigella sonnei; identical to SEQ ID NO: 485848

SEQ ID NO: 487593 - DNA, 543 bp, Shigella sonnei; identical to SEQ ID NO: 486137

SEQ ID NO: 487594 - DNA, 504 bp, Shigella sonnei
atgccgggcaactgcacgcattatgggcgttggcctcaacacgattttacgtcacttaaaaaactcaggccgcagtcggtaacctcgcgcatacagccgggcagtgacgtcatcgtctgcgcggaaatggacgaacagtggggctatgtcggggctaaatcgcgccagcgctggctgttttacgcgtatgacagtctccggaagacggttgttgcgcacgtattcggtgaacgcactatggcgacgctggggcgtcttatgagcctgctgtcaccctttgacgtggtgatatggatgacggatggctggccgctgtatgaatcccgcctgaagggaaagctgcacgtaatcagcaagcgatatacgcagcgaattgagcggcataacctgaatttgaggcagcacctggcacggctgggacggaagtcgctgtcgttctcaaaatcggtggagctgcatgacaaagtcatcgggcattatctgaacataaaacactatcaataa

SEQ ID NO: 487595 - DNA, 387 bp, Shigella sonnei; identical to SEQ ID NO: 485857

SEQ ID NO: 487596 - DNA, 498 bp, Shigella sonnei; identical to SEQ ID NO: 486152

SEQ ID NO: 487597 - DNA, 480 bp, Shigella sonnei; identical to SEQ ID NO: 464934

SEQ ID NO: 487598 - DNA, 372 bp, Shigella sonnei; identical to SEQ ID NO: 11381

SEQ ID NO: 487599 - DNA, 315 bp, Shigella sonnei; identical to SEQ ID NO: 33595

SEQ ID NO: 487600 - DNA, 279 bp, Shigella sonnei; identical to SEQ ID NO: 11573

SEQ ID NO: 487601 - DNA, 315 bp, Shigella sonnei; identical to SEQ ID NO: 33595

SEQ ID NO: 487602 - DNA, 501 bp, Shigella sonnei; identical to SEQ ID NO: 486470

SEQ ID NO: 487603 - DNA, 192 bp, Shigella sonnei; identical to SEQ ID NO: 487485

SEQ ID NO: 487604 - DNA, 192 bp, Shigella sonnei
atgaatatcaacacggaaacccgcgaaattctgcgtaattacagggctgtgattaatgcgcggcgtcgtgaaatggggcagaaaccgctcaccaccgcgcagattgttgatgaaatctgcgattttgtggtgaatcagcaggcggttttcctcggcggtcactacatcttacagggcagcagaaacaggtga

SEQ ID NO: 487605 - DNA, 303 bp, Shigella sonnei; identical to SEQ ID NO: 21213

SEQ ID NO: 487606 - DNA, 2706 bp, Shigella sonnei; identical to SEQ ID NO: 484556

SEQ ID NO: 487607 - DNA, 597 bp, Shigella sonnei; identical to SEQ ID NO: 485523

SEQ ID NO: 487608 - DNA, 2214 bp, Shigella sonnei; identical to SEQ ID NO: 485713

SEQ ID NO: 487609 - DNA, 504 bp, Shigella sonnei; identical to SEQ ID NO: 485763

SEQ ID NO: 487610 - DNA, 504 bp, Shigella sonnei; identical to SEQ ID NO: 485763

SEQ ID NO: 487611 - DNA, 294 bp, Shigella sonnei
atgactagtctaaaaactagtattaagactatcacttatttaagtgatactggttgtctggagattcagggggccagtctggctcataagacgccccagcgtcgccatagtgcgttcaccgaatacgtgcgcaacaaccgtcttccggagactgtcatacgcgtaaaacagccagcgctggcgcgatttagccccgacatagccccactgttcgtccatttccgcgcagacgatgacgtcactgcccggctgtatgcgcgaggttaccgactgcggcctgagttttttaagtga

SEQ ID NO: 487612 - DNA, 837 bp, Shigella sonnei
atgccccgtcagcacaattcgccgtcccggccatatctccggcgaacggcttgttccgcgcgccacttctgcgttgtttcgccagccgtccatctgccagcgggcaaagttctgcccgtgggcacccttgaaacgtccggggtagtcatacacttcatactgtgtgcgctggtaatcctggtactggccttcctgatcaaaacgccctggccagccgggacgtttaaaggtgtagtctttggtcactacggaagaaggacggatttgtgcgctgtagcgaaactggctgatgcagagggtacttacctcggtacgggtgttcgggttccaggggatctcaaaggactccggcagataacgcacggtgtcgcacaggaccaggctctggtcggtacttttttgcgcgtgctcctcataaaagaagatgccttcctccgccgccatccggcacaggaaatcgtaatcagtttcgccgtactggacacaaaactcacgggaaggatgcggctcgctgaacagcggactccactcggtcacaccgttttccttcaggatcgtcgcgaggatgctttcgatgtcctcattctggaagatacggaagttctggcgcagccctatgcgccacagcggtgggcataccttcatgctgtacagcatctggtttttgtcgttctcccccagttcaaaccaggtcaccacacctttcacccggcgctgtacgtcatcgccctgccataccgtcaggtaggccattttgtccagtacctgcgcaaattcaagggagagaaactgctggctgaccagagagagatcgagggaaaagagcgaagagagtga

SEQ ID NO: 487613 - DNA, 468 bp, Shigella sonnei; identical to SEQ ID NO: 19402

SEQ ID NO: 487614 - DNA, 303 bp, Shigella sonnei; identical to SEQ ID NO: 487011

SEQ ID NO: 487615 - DNA, 303 bp, Shigella sonnei; identical to SEQ ID NO: 485854

SEQ ID NO: 487616 - DNA, 672 bp, Shigella sonnei
atgtttgttggtcagggcgatcagatattcatgaacgacgtgttcctgaaacgcctgacggcccccaccattaccagcggtggaaatccatcggcattttccctgactccggacggaaagctgaccgctaaaaatgcggatatcagtggcagtgtgaatgcgaacgccgggacgctcaacaatgtcacggtaaatgaaaactgtacgattaagggcatgctggaggcgactcaggtcagaggtgacttcgttaaagctgtatccaaatcatttccgaaacaggctggtacgtggggtaacacggaaacaccaaacgggacggttacagtcaccataagcgatgatcataactttgaccgccagattattattccgcccattatttttaacggtatagcgtatgacgatccggggagcggaaataacccaggaggcacgcgatacacgggttatggttttgaagttcgcaaaaacggcgtattaatcgcatccagagaaactaaaggtgccattcccggtagttacagtgcagttattgatatgcctagtggtggtggtagcgtcactctggagtttaagattttccagaaaggcaatcagggggcaggcaatatcaccgactgtacggtgattgtgaccaaaaaagcggcttccggcatcagtattcgttga

SEQ ID NO: 487617 - DNA, 387 bp, Shigella sonnei; identical to SEQ ID NO: 485857

SEQ ID NO: 487618 - DNA, 303 bp, Shigella sonnei; identical to SEQ ID NO: 484410

SEQ ID NO: 487619 - DNA, 348 bp, Shigella sonnei; identical to SEQ ID NO: 485845

SEQ ID NO: 487620 - DNA, 444 bp, Shigella sonnei; identical to SEQ ID NO: 482956

SEQ ID NO: 487621 - DNA, 480 bp, Shigella sonnei; identical to SEQ ID NO: 464934

SEQ ID NO: 487622 - DNA, 270 bp, Shigella sonnei
atggcgacgctggggcgtcttatgagcctgctgtcaccctttgacgcagtggtgatatggatgacggatggctggccgctgtatgaatcccgcctgaagggaaagctgcacgtaatcagcaagcgatatacgcagcgaattgagcggcataacctgaatctgaggcagcacctggcacggctgggacggaagtcgctgtcgttctcaaaatcggtggagctgcatgacaaagtcatcgggcattatctgaacataaaacactatcaataa

SEQ ID NO: 487623 - DNA, 267 bp, Shigella sonnei
atggcgacgctggggcgtcttatgagcctgctgtcaccctttgacgtggtgatatggatgacggatggctggccgctgtatgaatcccgcctgaagggaaagctgcacgtaatcagcaagcgatatacgcagcgaattgagcggcataacctgaatctgaggcagcacctggcacggctgggacggaagtcgctgtcgttctcaaaatcggtggagctgcatgacaaagtcatcgggtattatctgaacataaaacactatcaataa

SEQ ID NO: 487624 - DNA, 480 bp, Shigella sonnei; identical to SEQ ID NO: 464934

SEQ ID NO: 487625 - DNA, 480 bp, Shigella sonnei; identical to SEQ ID NO: 464934

SEQ ID NO: 487626 - DNA, 480 bp, Shigella sonnei; identical to SEQ ID NO: 464883

SEQ ID NO: 487627 - DNA, 267 bp, Shigella sonnei
atggcgacgctggggcgtcttatgagcctgctgtcaccctttgacgtggtgatatggatgacggatggctggccgctgtatgaatcccgcctgaagggaaagctgcacgtaatcagcaagcgatatacgcagcgaattgagcggcataacctgaatctgaggcagcacctggcacagctgggacggaagtcgctgtcgttctcaaaatcggtggagctgcatgacaaagtcatcgggcattatctgaacataaaacactatcaataa

SEQ ID NO: 487628 - DNA, 480 bp, Shigella sonnei
gtggcggacctgacgtatgttgccacacaggagggatggttgtacctcgctggcatcaaagatgtttatacgtgcgaaattgtcggctacgccatgggagagcgcatgacaaaagagctgacaggtaaagccctgtttatggcgctcaggagccagcgcctacctgccgggctaatccaccactctgatcgaggttcacagtactgcgcatacgattaccgggtcatacaggagcagtctggtctgaaaacatcaatgtcgcgtaaaggtaactgttacgacaacgctccgatggaaagcttctggggaacgctgaaaaatgagagcctgagccactatcgttttaataaccgggatgaagccatctcagtaatacgggaatacattgagattttctacaatcgtcagcgtcgtcactctcgtctggggaatatctccccggcagccttcagggaaaaatatcatcagatggctgcttaa

SEQ ID NO: 487629 - DNA, 1086 bp, Shigella sonnei; identical to SEQ ID NO: 486649

SEQ ID NO: 487630 - DNA, 216 bp, Shigella sonnei
atgggcgtgattggcggcgcgcgctgtcagtatcacctgcgccagattctggttttcctcgatgcaatggtgatgaacaagccggaatttatgggcggcgtgattcagaacaaagttgatcggcaaaccggagaagtgattgatcagggtacgctggaccacctgaccgggcaattgaccgcatttggtgagtttattcagcgagttaagttctaa

SEQ ID NO: 487631 - DNA, 303 bp, Shigella sonnei; identical to SEQ ID NO: 21213

SEQ ID NO: 487632 - DNA, 1026 bp, Shigella sonnei; identical to SEQ ID NO: 485458

SEQ ID NO: 487633 - DNA, 717 bp, Shigella sonnei; identical to SEQ ID NO: 485546

SEQ ID NO: 487634 - DNA, 1158 bp, Shigella sonnei; identical to SEQ ID NO: 485367

SEQ ID NO: 487635 - DNA, 504 bp, Shigella sonnei; identical to SEQ ID NO: 485368

SEQ ID NO: 487636 - DNA, 567 bp, Shigella sonnei; identical to SEQ ID NO: 468535

SEQ ID NO: 487637 - DNA, 315 bp, Shigella sonnei; identical to SEQ ID NO: 485391

SEQ ID NO: 487638 - DNA, 480 bp, Shigella sonnei; identical to SEQ ID NO: 464934

SEQ ID NO: 487639 - DNA, 216 bp, Shigella sonnei; identical to SEQ ID NO: 485679

SEQ ID NO: 487640 - DNA, 480 bp, Shigella sonnei; identical to SEQ ID NO: 464934

SEQ ID NO: 487641 - DNA, 480 bp, Shigella sonnei; identical to SEQ ID NO: 464934

SEQ ID NO: 487642 - DNA, 765 bp, Shigella sonnei; identical to SEQ ID NO: 485646

SEQ ID NO: 487643 - DNA, 1110 bp, Shigella sonnei; identical to SEQ ID NO: 486112

SEQ ID NO: 487644 - DNA, 480 bp, Shigella sonnei; identical to SEQ ID NO: 464934

SEQ ID NO: 487645 - DNA, 396 bp, Shigella sonnei
atggtcgcagtggtacaggtgaatttttcgcgccggcgtgtataccgggtccatctggctttgcatctgcgccaccgtcaggccgcacgatgccagccagcggcggctttcctcactcacccggtcagccaggatttcactttccagccggtcgagcatctgcaccagcaccggcgggaacaccacactgccaccgtcttcgccgccggactgctgaagggcatccgccaggctgcggcgctgcgttttcgccagctcaccggtggcagtttcgaccctgatgagtggcgtgaagctccccggctgataaatcgtctggatgcgggttctgtcgttctgtattgtggtcagccggtcgccgtcccagccgtaccaggtcacttgcggtttccgtga

SEQ ID NO: 487646 - DNA, 480 bp, Shigella sonnei; identical to SEQ ID NO: 464934

SEQ ID NO: 487647 - DNA, 276 bp, Shigella sonnei; identical to SEQ ID NO: 484087

SEQ ID NO: 487648 - DNA, 480 bp, Shigella sonnei; identical to SEQ ID NO: 464934

SEQ ID NO: 487649 - DNA, 480 bp, Shigella sonnei; identical to SEQ ID NO: 464883

SEQ ID NO: 487650 - DNA, 480 bp, Shigella sonnei; identical to SEQ ID NO: 464934

SEQ ID NO: 487651 - DNA, 345 bp, Shigella sonnei; identical to SEQ ID NO: 485793

SEQ ID NO: 487652 - DNA, 393 bp, Shigella sonnei; identical to SEQ ID NO: 485788

SEQ ID NO: 487653 - DNA, 528 bp, Shigella sonnei
atggcagttcgtggcattaacaaggtcattcttgtcggtcgtctgggaaaagatccggaagtccgttacatcccaaacgggggcgcagtggcaaacctgcaggtggccacgtcagaaagctggcgtgacaaacagacgggggagatgcgggagcagacagaatggcatcgcgtggtgctgttcggcaagctcgcggaagtggctggtgagtatctgcgcaagggcgcgcaggtctacatcgaggggcaactccgtacccgtagctgggaagataacggtatcacccgttacgtcactgaaattcttgttaagaccacgggcaccatgcagatgctgggacgtgccgcaggtactcagactcagccggaagaggcgcaacagttcagcggtcagcctcagccggaatcacagccggaaccgaaaaaaggtggcgcgaaaacgaaaggccgtggacgtaaggccgcgcagcccgagcctcagcagccgtctgaacccgcgtatgacttcgatgacgacattccgttctaa

SEQ ID NO: 487654 - DNA, 375 bp, Shigella sonnei; identical to SEQ ID NO: 485586

SEQ ID NO: 487655 - DNA, 258 bp, Shigella sonnei; identical to SEQ ID NO: 485585

SEQ ID NO: 487656 - DNA, 480 bp, Shigella sonnei; identical to SEQ ID NO: 464934

SEQ ID NO: 487657 - DNA, 480 bp, Shigella sonnei; identical to SEQ ID NO: 464934

SEQ ID NO: 487658 - DNA, 480 bp, Shigella sonnei; identical to SEQ ID NO: 464934

SEQ ID NO: 487659 - DNA, 303 bp, Shigella sonnei; identical to SEQ ID NO: 458125

SEQ ID NO: 487660 - DNA, 267 bp, Shigella sonnei; identical to SEQ ID NO: 11114

SEQ ID NO: 487661 - DNA, 513 bp, Shigella sonnei
atgtaccgcgtgctgaaaaaagatgcgctgatggtcagcttctacggctggaaccgcgtcgatcgctttatggccgcctggaaaaatgcgggattcagcgtggttggccacctggtgtttaccaaaacctacacatcgaaggccgcatatgtgggctatcgccacgaatgcgcctacatcctggcaaaaggccgtccggcgctgcctcagaagccattgcccgacgtgctgggctggaaatattcaggcaatcgccatcacccgacggaaaagcccgttaccagcctgcaaccgctcattgagagcttcacacacccgaacgcgattgtgctggacccgtttgcaggcagcggctcaacctgcgtggccgccctccagtccggacgccggtatatcggtatcgagctgcttgaacagtatcaccgtgccggacagcaacgactggccgccgtgcaacgggccatgcagcagggggccgcgaatgataactggtttgaaccggaggctgcgtaa

SEQ ID NO: 487662 - DNA, 366 bp, Shigella sonnei; identical to SEQ ID NO: 13003

SEQ ID NO: 487663 - DNA, 480 bp, Shigella sonnei; identical to SEQ ID NO: 464934

SEQ ID NO: 487664 - DNA, 528 bp, Shigella sonnei; identical to SEQ ID NO: 487653

SEQ ID NO: 487665 - DNA, 372 bp, Shigella sonnei; identical to SEQ ID NO: 11381

SEQ ID NO: 487666 - DNA, 480 bp, Shigella sonnei; identical to SEQ ID NO: 464934

SEQ ID NO: 487667 - DNA, 513 bp, Shigella sonnei; identical to SEQ ID NO: 485852

SEQ ID NO: 487668 - DNA, 480 bp, Shigella sonnei
gtggcggacctgacgtatgttgacacacaggagggatggttgtacctcgctggcatcaaagatgtttatacgtgcgaaattgtcggctacgccatgggagcgcgcatgacaaaagagctgacaggtaaagccctgtttatggcgctcaggagccagcgcccacctgccgggctaatccaccactctgatcgaggttcacagtactgcgcatacgattaccgggtcatacaggagcagtttggtctgaaaacatcaatgtcgcgtaaaggtaactgttacgacaacgctccgatggaaagcttctggggaacgctgaaaaatgagagcctgagccactatcgttttaataaccgggatgaagccatctcagtaatacgggaatacattgagattttctacaatcgtcagcgtcgtcactctcgtctggggaatatctccccggcagccttcagggaaaaatatcatcagatggctgcttaa

SEQ ID NO: 487669 - DNA, 765 bp, Shigella sonnei
atgattgtgctgcttgaccagtacactgccaacggcacttacggccggtattttaactctgatgagccgtccctgcgggatgacgcaaaaatggtggtgctggagctgggcggactggaagaccgtccgtcactgctggttgcggtgatgttcagccttatcatttacatcgagaaccggatgtaccgcacgccgcgtaccctcaagaaactgaacgtcattgatgaaggctggcgtctgctggacttcaaaaatcgtaaagttggtgagtttattcaaaaaggttaccgcacctgtcgccgtcataccggtgcctatatcaccatcacacagaacatcgtcgactttgactctgacaaggcatccagcgcagcccgtgcggcatggggtaactcctcctacaaaattatcctcaaacagagtgcgaaggagttcgcgaaatataaccagttattcccggatcagttccagccactgcagcgcgacatgattggtaagtttggtgcggccaaagaccagtggttcagttccttcctgctgcaggtggaaaaccattcctcctggcaccgtctgtttgtggacccgttaagccgtgccatgtacagctctgacggcccggattttgagtttgtgcagcagaaacgcagagagggtatgagtattcatgaggcggtgtggcagctggcgtggaagaaatcggggccggagatggcttcgctggaggcctggctggaagaacatgagaaatacaggagtgttgcatga

SEQ ID NO: 487670 - DNA, 480 bp, Shigella sonnei; identical to SEQ ID NO: 464934

SEQ ID NO: 487671 - DNA, 480 bp, Shigella sonnei; identical to SEQ ID NO: 464934

SEQ ID NO: 487672 - DNA, 570 bp, Shigella sonnei; identical to SEQ ID NO: 485859

SEQ ID NO: 487673 - DNA, 480 bp, Shigella sonnei; identical to SEQ ID NO: 464934

SEQ ID NO: 487674 - DNA, 480 bp, Shigella sonnei; identical to SEQ ID NO: 464934

SEQ ID NO: 487675 - DNA, 348 bp, Shigella sonnei; identical to SEQ ID NO: 485869

SEQ ID NO: 487676 - DNA, 378 bp, Shigella sonnei; identical to SEQ ID NO: 476066

SEQ ID NO: 487677 - DNA, 276 bp, Shigella sonnei; identical to SEQ ID NO: 485876

SEQ ID NO: 487678 - DNA, 1119 bp, Shigella sonnei
atgtcaccgaggccacgaaaaaacagcactgacgtagccggtctttacgaaaagtttgatcgcagaactggcagagtttactaccagtataaaaatcctgtgactggaaaatttcacggactcggaacagacaaaggtaaggcagaaaaaatcgcttccacagccaatcagcgaatagctgcagcagaagctgaatatttcatgcgcaaaattgatgaaagtccgtcagcaacaaaacgtcggggtatcagattaaaggcatgggttgatcgatatctgaaaatacaggacacgcgactgaaaaatggagatattgcagctacaactcacaaagaaaaaactcgaatggctgcatacctggtttcccgtctgggaaaccacccattgaaagaactggaagtaagagactttgcattaatactggatgagtggctggataaagacatggtcagcacagcgagagtaaatcgtggattatgggttgatatttataaagaagcacagcatgcaggggaagttcctcctggatggaatcctccggaggctacccgtaaaccgatccctaaagtaaccagagccaggctcaccatggaagactggcaaaaaatttacaatgcaacgcctgaaaaacactttatccgtaacgcaatgcttcttgcgattgttactggtcagcgccgtgatgacatttgccacatgcgtttttcagatgtgtggaacgaacacttgcatatcacccagggaaaaaccggaatgcgtctggcattaccgcttacactacgctgtgatgccattgggataacgttaaaagaagttattgatgggtgccgagacagaatattaagtccatatctaatccatagtcggcaccagaaacaaccgaagccgatgagtaaagacaacctgagcgactactttgccaaagcacgggatctggctgggataattccaccagcaggaaaaactccgccaacatttcatgaacaacgctctctatcagaacggctgtaccgtgcacagggtatcgatacaaaaacattactaggacataaagtccaggcaaccaccgatcgctataacgatactcgaggtcaggaatgggttaagttggttatttaa

SEQ ID NO: 487679 - DNA, 270 bp, Shigella sonnei; identical to SEQ ID NO: 261652

SEQ ID NO: 487680 - DNA, 2442 bp, Shigella sonnei
atgagcactgataaagaagaatttgcactatattgcgaagcaaaaaatgacaaagtaagaaaacgcctgggaattaaaggtggtttttactggactacagcaaaaaaattatctgttgcaatctcccgctgcattaccgcaatggatgacaacgattatgatgaagacgactttaaaaaacccgtccgcgtcaatttgcccgttgttgacgaccttccgccagaaggcgtgtttgatactgaattctgcaaccgctatgaaaaaggcgggaaagatggcatcacaatgacatttatcggcccttccccctctgttcaggacaaaccagccagcactgacaataccaacatcaacggcgaagacatgactgagattgaggagagcatgcttctgcctgtctccggtcaggaactgcccattcgttggcttgctcaacacggcagcgaaaaaccagtaacgcacgtttcacgcgacgaactccaggcattacacattgcacgggctgaagaactaccggctgttactgccctggctatttcgcataaaaccagtctgctcgactcgctggagattcgcgacctccacaaactggttcgtgacactgacaaagttttccctaatcctggtaattcagaccagggactaataactgcttttttcgaagcatacctggacgctgactacactgatcggggtctgctgacaaaagagtggatgaaaggaaatcgtgtttcacgcatcacccgcacggcttccggtgctaatgctggcggtgggaacaaaaccgatcgcaatccgaatttagtacacaccctcgacacactggatgtggagattgcagcagccacacttccgatggattttaatatttatgaaattccgggcagcgtttatcgtcgcgcaaaagaagtagttctgaacaaagaaagtccgttcaaagaatggtccgcagcacttcgtgcaaccccgggtattctggactattcccgcgccgctatttttgcacttatccgaagcgcacaccctgaattttatcactacccgggacgccttcaggggtatatcaacgcctatttgacggaaactgatcacgagaaccccagcaaggaaactctcacagctgcccggcatacgccggaaaaagatatcctggaagaaattaaccgcgaggtggttactgagcgtgaaacagaagaagaaaaaccacaaccatctgacgcaatggcaggtgaacaggcaacaactgaaacaatggaaccggatacaactgaacatggccagaacgcgcagtcgctggatgctcagtcgcaggtgagttccgctaaccaagtaaaagtcaccgctgacgaagtaaacaaaattatgcaggcagccaatatcagccagcctgacgccgataagttacttgctgtatcgcgtggtgaatttgttgaggggattagcgaccctaatgatccgaaatgggttaaggggatccagacccgcgattctgtgaaccagaaccagcaagaaacggaacagaacgaccagaaagcggaacaaaacagcccaaatacacaacaaaacgagccagaaacgaaacaacctgaaccagtagtgcaacaggaaccggaaaagatctgcaccgcctgcggtcagagcggtggcggcaactgccctgattgtggtgcggtgatgggtgacgcaacataccaggaaatattcgatggagagaatcagcctgaagttcaggaaaatgatccggaggaaatggaaggcactgcgcatcagcacaaggagaacactggcggcaatcagcatcatgccagcgatagtgaaactggcgaggcgtcagatcccttaattaaggcgaacggtcatcataatctcacatccaccagcagagcggggattcatctgatgatcgaccttgaaaccatgggaaaaaatcccgatgccccgattatctcaataggtgcaatatttttcgatccgcaaaccggagatatgggaccggaatttagtaagactatcgatctggaaactgctggcggagtcattgatcgggacaccattaaatggtggcttaaacaatcacgcgaagcgcaatctgccattatgaccgatgaaatcccgttagatgatgcactgttacaattgcgggaatttatcgacgaaaactccggtgaattttttgttcaggtctggggaaatggagccaacttcgacaacacgattttgcgccgttcatacgaacggcaggggatcccctgcccgtggcgttactacaacgatcgcgatgtacgcacaatcgttgagctggggaaagccatagacttcgatgccagaacggctattccattcgaaggtgagcgccataatgcacttgatgacgcccgttaccaggcaaaatacgtttcagttatctggcaaaaactgatcccgagtcaggctgatttttaa

SEQ ID NO: 487681 - DNA, 189 bp, Shigella sonnei
atgaatccagtatttgcacttattctgacggtttttcttgtttccggagagccagttgatattgcagtcagtgttcacagaacaatgcaggaatgtatggccgcagcaaccgaacagaaaattccaggcaactgttatccggtcgataaagttattcaccaggataacgaaatcccggcaggattttaa

SEQ ID NO: 487682 - DNA, 189 bp, Shigella sonnei
atgaaaacgttattaccaaacgttaatacgtctgaaggttgttttgaaattggtgtcactatcagtaatcctgtattcactgaagaggccattaacaaaagaaaacacgaacgggagttattaaataaagtatgcattgtttcaatgctggcccgtttacgtctgatgccaaaaggatgtgcacaatga

SEQ ID NO: 487683 - DNA, 234 bp, Shigella sonnei
atgttaaaatcaactcttattgctaaatgcctttatcaaaatcgcatggtaagcagcatttcaataggcgagtctgcagttaaaagtattttcgaagagtactttcccgggcatgattttaataaatggaataccaaattaccgccagcagtttcaacgcgtattctgaaagcaactgaaagagcaagtacaattcgcgttaactatttcattaaagatttgtgggatctttga

SEQ ID NO: 487684 - DNA, 408 bp, Shigella sonnei
atggaatttaaagatttaccaaaagaaatccagacaattgctgcaacgactctcggtgatagtctggtgaaaattgacccggcatacaccaaaaaagaaaccatcgataatatggttcgtaatgtgcgcaatgctttttctgggctatatggttctgataatcaaaagcaggaaagcgatgttaatgaacgggtaatttctgtttgcgtgaatggccatgttctttcatcaatcaaaacagaaacagcgacagtcttcgattgcctttgcattgtacagagccttgttgatgccctgtttcgttcagtgaatttagaaaatgatgcaaatctgcgagggcgcacaatagcacatccatatgcacatactttaggctctgtggatatcaaagatcccacaaatctttaa

SEQ ID NO: 487685 - DNA, 219 bp, Shigella sonnei
atgcagaaacgagaacccgtcatcatcgcgccagactataccgatgatgaactttatgagtggatgcaccagaaaattaaggctgcgcaggacctgaaatgggccaatgaagccagggctaagcaggctgaaaatctgtccgctctggagcaggatatcaccaatctggaaaaagcagcggcattaagcattgccagaatgattacatacccacgttaa

SEQ ID NO: 487686 - DNA, 129 bp, Shigella sonnei; identical to SEQ ID NO: 7749

SEQ ID NO: 487687 - DNA, 237 bp, Shigella sonnei; identical to SEQ ID NO: 6072

SEQ ID NO: 487688 - DNA, 339 bp, Shigella sonnei
atgaaaaattcctcaataacctcttgtgtgcagcttgtcggagaaatcccggccaatacctttgcagttgttctagagagtgacagtatgtcaacatctggtgggggagtttccatcccaaatggttcaacagtttttgttgatcccgatcgaaccgtacaaccaggaaatattgtccttgccttacccaaagggaccacaacacctgtcattcgtaaactggagatagaagggccggatattcttttagtccccacaaatcctcgctacccttcaattatgctggatgatctatcttgcatattgggcgtatgctttaaaattcaacaagatatttaa

SEQ ID NO: 487689 - DNA, 231 bp, Shigella sonnei
atgaaaaaatcagaagtattaggctattttggcggagttgttaaaacagccgcagctctaggaacgtcaaaaaccacagtcagcatgtggggggaagaggttccgtggaaatgggcgttgctaattcaggcagtcactgccggggcgctcaaatatgagttacacataccgacggttgtcattcccggttctgatcataatccgccttctaaccaagggggggattcatga

SEQ ID NO: 487690 - DNA, 255 bp, Shigella sonnei; identical to SEQ ID NO: 482918

SEQ ID NO: 487691 - DNA, 747 bp, Shigella sonnei
atggctcagctttcgttacaacatattcaaaaaatctacgataaccaggtgcatgtggtgaaggacttcaacctggaaattgccgataaagagttcatcgtgtttgtcggtccgtcaggctgcggtaagtcgaccaccctgcgcatgattgccgggcttgaggagatcagcggcggcgatctgttgatcgacggcaaacgaatgaatgacgttccagccaaagcacgcaatatagcgatggtgttccagaactacgcgttgtatccgcatatgacggtttacgacaacatggcgtttggcctgaagatgcaaaaaatcgccaaagaggtgattgatgagcgggtgaactgggcggcgcaaattctcggcctgcgtgagtacctgaaacgcaagccgggcgcgctttccggcgggcaacgccagcgtgtggcgctcgggcgggcgattgtgcgcgaagcgggcgtgtttttaatggatgaaccgctctctaaccttgatgccaagctgcgcgtgcaaatgcgcgcagagatcagcaagctgcaccagaagctgaataccaccatgatctacgtgacccacgatcagaccgaagcgatgaccatggcgacgcggattgtgattatgaaggatgggattgttcagcaagttggtgcgccgaaaacggtttataaccaaccagcgaatatgtttgttgccggatttattggatcatcggcgatgggtgatgctgccaacttactgatttag

SEQ ID NO: 487692 - DNA, 312 bp, Shigella sonnei
atgcaaaataaattagctttcggtgccaggcttggacgtcaggcgttacttttccctctctgtctggtgctttacgaattttcaacctatatcggcaacgatatgatccaacccggtatgttggccgtggtggaacaatatcaggcgggcattgattgggttcctacttcgatgaccgcgtatctggcgggcgggatgtttttacaatggctcctggggccgctgtcggatcgtattggtcgccgtccggtgatgctggcgggtgtggtttatcgtcacctgtctggcaatattactggcgcaaaacattga

SEQ ID NO: 487693 - DNA, 759 bp, Shigella sonnei; identical to SEQ ID NO: 482954

SEQ ID NO: 487694 - DNA, 201 bp, Shigella sonnei
atgcggtatccaacccgcgaatatcagcgtgattcaccgtcggatttactgctacgtcgccctcagggaattaaacctaaaaagaaaatcgtcaaaattagagattccggtttgacacggaaagtcatatcagcgcaatgtgatgtcctgcgccgttttgccccctctcccttccagggtgagggctggggtgagggttaa

SEQ ID NO: 487695 - DNA, 687 bp, Shigella sonnei; identical to SEQ ID NO: 482234

SEQ ID NO: 487696 - DNA, 2310 bp, Shigella sonnei
gtggctatggggatgagtgcgttcccctctttcatgacgcaggcgacgccagcaacgcaaccactgatcaatgctgagccagctgtagccgcccagacggaacaaaatccgcaggtggggcaagtgatgccgggcgtgcagggcgctgatgcgccagtcgtggcgcagaacggtccttcgcgtgatgtgaagctgacctttgcgcaaattgcgccgccgccgggcagcatggtgctacgtggcattaacccgaacggcagcattgagtttggtatgcgcagcgatgaagtggtgacgaaggcgatgctcaacctcgaatacacgccatcgccatcgttactgcctgtccagtcgcagttaaaggtttatctcaatgatgagctgatgggcgtgctgccagtgaccaaagaacagttgggtaaaaaaacgctggcgcaaatgcccattaacccactgtttattaccgacttcaaccgtgtgcggctggagtttgtcggccattatcaggacgtgtgcgaaaacccggccagcaccacgctttggctggatgttgggcggagcagtggactggatctgacctatcagaccctgaatgtgaagagtgacctgtcacacttcccggtgccattctttgacccgcgcgataaccgtactaacaccttgccgatggtctttgcgggtgcgccggatgttgggctgcaacaagcatctgccattgtcgcctcgtggtttggttcgcgttctggctggcgtgggcagaacttcccggtgctctataaccaattgccggatcgcaatgccattgtctttgcaaccaacgacaaacggccggacttcctgcgcgatcatccggcggtaaaagccccggtgattgagatgattaaccatccgcagaatccttacgtcaaactgctggtggtgtttggtcgtgacgacaaagacctgttgcaggcagcgaaaggtatcgctcagggtaacattctgttccgtggtgaaagcgtggtagtgaatgaagtgaaaccgctgctaccgcgtaagccgtacgatgcgccgaactgggtacgtaccgatcgtccggtcacatttggcgaactgaaaacctatgaagaacagttacaatccagcggtcttgagccagcagcgattaacgtttcgctaaacctgccgccggatctctacctgatgcgcagtaccggcattgatatggatattaattaccgctacaccatgccgccggtgaaagacagttcgcggatggatatcagcctgaataaccagttcctgcaatccttcaacctgagcagtaaacaggaggcgaaccgcctgctgctgcggattccggtattacaaggtttgctggatggcaaaacggatgtctctattccggcgctgaaactgggcgcgaccaaccagctgcgcttcgactttgagtatatgaacccgatgccgggcggttcggtggataactgtattaccttccagccggtgcagaatcatgtggtgattggtgacgattccaccatcgacttctcgaagtattaccacttcatcccgatgccggatctacgcgcctttgctaacgcgggcttcccgttcagccggatggcggatctgtcgcaaaccatcaccgtgatgccgaaaacgcctaacgaagcacagatggaaacgttgctgaatactgttggttttatcggcgcacagacgggcttcccggcgattaatctgacggtgaccgatgatggcagcaccattcagggcaaagatgccgacatcatgatcatcggtggtatcccggacaaattaaaagacgataagcagatcgacctgttggtgcaggcgaccgaaagctgggtgaaaacaccgatgcgccagaccccgttccccggcattgtgccggacgagagcgatcgcgcggcagaaacccagtcaacgctgacctcttccggtgcgatggcggcggtgattggcttccagtcgccgtataacgaccagcgcagcgtgattgcgctgctggcagatagcccacgcggttatgaaatgcttaacgatgcggtgaacgatagcggcaaacgcgccaccatgttcggttcggtcgcggtgatccgcgagtccggtatcaacagcctacgtgttggcgacgtttattacgtaggtcatctgccgtggttcgagcgcttgtggtatgcgctggcaaaccatccgattctgctggcggtgctggcggcaatcagtgtgatattgctggcatgggtactgtggcgtctgctgcgaattattagtcgtcgtcgtcttaacccggataacgagtaa

SEQ ID NO: 487697 - DNA, 2022 bp, Shigella sonnei
gtgaaggcggcaaaaacgtccgagacgaatgctaagtcttctgaaacggcagcggaacagagcgcctcagctgcggcaggctcaaaaacagcggctgcgtcgtctgccagcgccgcgtcaacaagtgccgggcaggcctcagccagtgccaccgccgccggaaaatcggcagaaagcgccgcatcatccgcttcaacagccacaacgaaggctggcgaagccactgagcaggccagcgcagcagcgaggtctgcttccgcagcgaagacatccgaaacgaacgcgaaagcgtcggaaaccagcgcagaatcctcaaaaacggctgccgcatcgtccgccagttcggcggcgtcatcggcatcatctgcgtctgcttcaaaagatgaggcgaccagacaggcgtcagcagcgaggggcagcgccacgacggcatccacgaaggcgacagaggctgctggcagtgcggcagcggcagcacagagcaaaagtacggcggaatccgcggcaacgcgcgccgagacagcagcaaaacgggcagaggatattgcatccgccgtggcgcttgaggatgcgagcacgacgaaaaaggggatagtacagctcagcagtgcgaccaacagcacttccgagtcacaggcggcaacgccaaaagccgttaaggccgcgtatgacctggctaacgggaaatacaccgcacaggacgctacgacagcacaaaaaggaattgtccagctcagtagtgcaaccaacagcacatctgaaacgcttgctgcgacaccgaaagcagtgaaagcagctaatgacaatgcgaatggtcgggtaccttctgcccgtaaggtgaatggtaaggcgctttcagcggatataacactgacgccgaaagatattggtacgcttaactcaacaacaatgtcattcagcggtggtgctggttggttcaaattagcaacggtaaccatgccacaggcgagttctgttgtttcaattacgttgattggtggcgctggatttaacgtggggtcacctcaacaggcaggtatatctgaacttgttttacgtgcaggtaatggtaatccgaaggggattactggtgctttatggcagcgcacattgacagggtttacaaattttgcctgggttaatacatctggtgatacttacgatatttacgttgcaatcggaaattatgcgactggtgtaaatattcaatgggattataccagtaatgccagcgtgacgattcatacgtcaccagcatattctgctaataagccggaagggttaacggacggtacagtttattcactctatacgccatcagagcagttttatccgcctggcgcaccaatcccgtggccatcagataccgttccgtctggctatgccctgatgcaggggcaggcttttgacaaatctgcatacccgaaacttgcagcggcttatccgtcaggcgtgatccctgatatgcgtggctggacgattaagggcaagcccgccagtggtcgggccgtattatctcaggaacaggacggcattaaatcgcacacccacagcgccagcgcatccagtacggatttggggacgaaaaacacatcgtcgtttgattacggaaccaaatccacgaataacaccggggcgcatacccatagtattagcgggactgcaaatagtgccggtgcgcaccaacacaagagttccggtgcatttggtggcacgaacacgagcattttccctaatggttataccgcgatttcaaatctaagcgcggggattatgagcacaacaagcggtagtggccagactcgtaatgcagggaagacatcatcagatggtgctcatacccactcgctgtccggcactgctgcaagcgcaggcgcacatgcacatactgtcggtattggtgctcatacgcactccgttgcgattggttcacatggacacaccatcaccgttaacgctgctggtaacgcggaaaacaccgtcaaaaacatcgcatttaactatattgtgaggcttgcataa

SEQ ID NO: 487698 - DNA, 582 bp, Shigella sonnei
atggcattcagaatgagtgaacaaccacggaccataacaatttataatctgctggccggaactaatgaatttattggtgaaggtgacgcatatattccgcctcatacaggtctgccagcaaacagtaccgatattgcaccgccagatattccggctggctttgtggctgttttcaacagtgatgaggcatcgtggcatctcgttgaagaccatcggggtaaaacggtctatgacgtggcttccggcgacgcgttatttatttctgaactcggctcattaccggaaaatgtcacctggttatccccggaaggggagtttcagaagtggaacggtacagtctgggtgaaggatacggaagcagaaaaactgttccggatccgggaggcggaagaaacaaaaaacagcctgatgcaggtagccagtgagcatatagcgccgcttcaggatgctgtggatctggagatcgcaacggaggaagaaaccttgttgctggaagcctggaagaagtatcgggtgttgctgaaccgtgttgatacatcaactgcacctgatattgagtggccgacttcacctgcagagtaa

SEQ ID NO: 487699 - DNA, 246 bp, Shigella sonnei
atgcgcaatcacagaatttctttacaggatatcgctacgctggctggcgtaacaaaaatgaccgtgagtcgttatatccgctcgccgaaaaaggtggcaaaggaaacaggcgagcgcatcgccaaaattatggaagagatcaattatatccctaatcgcgctcccggcatgttgttgaatgcacaaagttataccctcggtaatggatgtacagggagaacggctggatatggaggtcggttttga

SEQ ID NO: 487700 - DNA, 1383 bp, Shigella sonnei; identical to SEQ ID NO: 484445

SEQ ID NO: 487701 - DNA, 204 bp, Shigella sonnei; identical to SEQ ID NO: 486816

SEQ ID NO: 487702 - DNA, 1683 bp, Shigella sonnei; identical to SEQ ID NO: 484981

SEQ ID NO: 487703 - DNA, 183 bp, Shigella sonnei; identical to SEQ ID NO: 485510

SEQ ID NO: 487704 - DNA, 351 bp, Shigella sonnei; identical to SEQ ID NO: 263060

SEQ ID NO: 487705 - DNA, 483 bp, Shigella sonnei
atgtctggacccccgaaaaccccgccacgcctgcatttgatacgaggtaacccctctaagcggccagttaaagactccaaaaaaaccgctaaaaaggatgaaaaaggtctccctaaaattccgcaacatttaggggcgcaggggaagtactggttcaggcgaatggcggaagagctgaatgcggaagggatcatttctcagctcgatgcacgtgcgctcgagttactggtggaagcctacaccgaataccggcatcactgcgaaatactcgatgttgagggttatacctaccgcacggaaacgcagaatggcgatgtgctgatcaaggcacacccggctgctgcgatgaaggctgatgcctggaagcggattcgggcgatgcttgcagagtttggtatgtcaccggcaagccgggcgaaagtaaataccgccggaccggatgatgttgatccgctggcagagcttttaaaagcgagagactga

SEQ ID NO: 487706 - DNA, 1758 bp, Shigella sonnei
atggcaaaagtgggtgacgggatccgctacgccgaacgtgttgttgcaggagaaattgttgctggcgaatttgtccgtctggcctgccagcgttttcttgatgatctgaagtacggcgaagagcgggggatttatttcagtgaacctcgtgcacagcacatccttaatttctacaaatttgtaccccatgtgaaaggggcgctggcaggtcagcccattgagttgatggactggcatgtgtttatcctcattaatatttttggttttgtcattccgctggtgaatgaagaaaccggggaagttgtcatgcgcagcgatggcagtggacgcccggtgatggtgcgccggttccggacagcatacaacgaagttgcccgtaaaaacgcaaaatcaaccctgtcatcgggtatcggtctgtatatgacgggggcagatggtgaaggcggtgctgaggtgtattcagccgcaaccacgcgtgaccaggccagaattgtgtttgaagacgccaaaaatatggtcagaaaagcccggtcgacactcgggcggttgtttgatttcaacaagctggcgatttaccaggagcagagcgcatcaaaatttgaaccgctttcctcggatgcaaacaacctggacggtctgaacatccactgcgccattattgatgagctgcatgctcataaaacccgtgacgtgtgggacgttctggaaacggcaaccggtgcccgtctgcagtctctgttatttggcatcaccacggctggctttaacaaggaagggatttgctacgagcagcgcgattacgccattaaggtattgcgaggctataacagcgacgtggagggcgcggtaaaagacgactcctactttgcgatcatttacacgctcgatgagggagatgatccgtttgatgaaacggtctggcagaaagcgaatcctggcctgggcatctgtaaacgctgggatgatctgcgtcgtctggcgaaaaaagcgaaggagcaggtctctgcgcgggtgaatttttttaccaaacacatgaatgtgtgggtcactgccgaatctgcctggatggatatgattaagtgggagaagtgcgaatacattgctccacaacatgagctgaaaacatatcccatgtgggtcggcgtagaccttgctcataagattgatatctgtgcggcggcaaaactctggcgaaccgataacggacatgttcatgctgattttaaattctggcttccggaaggacggctggagcgatgctcgcggcagcaggcagaactttaccggaagtgggcggagatggataagctcatcctgacggatggtgatgttatcgatcatgctcagataaaaagtgacttactggaatggattggcggtgaaaacctcagggaactgggatttgacccgtggagcgcaatgcagttcagcctggcactggctgaagaagggataccgctggtggaggttccgcagacggtccgcaatctgtcagaggccatgaaggaaacggaatcactggtttatgccgggcgtttccatcacagcaatcatccggtcatgaactggatgatgtctaacgttacggtaaaaccggacaaaaacgacaacatcttcccgaataaatccacgcctgaagccaaaatcgacggccctgttgcgctttttacggccatgagccgctttctggtaaatggcgggggcgtgaatgactttctgtccacgcttgatcctgatgaggacctgttaattctgtga

SEQ ID NO: 487707 - DNA, 162 bp, Shigella sonnei
gtgaaacagcttattactgatatgaccgggctgatcggtttcggtttgctcactgctggcgtttatctgtatgcaggtctgccagcgtctctgatgctgtcgggctgtttgttgctgctttatgcactggtggtgtccatgaggagaaaacatgcttcttga

SEQ ID NO: 487708 - DNA, 1227 bp, Shigella sonnei
atgcttcttgatgctctgtttcgcagtgagcctctggaaaatccctcggttccggtaaccggagaggccgctgagacggataatatttttgcccgggatgtgtatgtcagtccggaaacatccatgaagctggctgctgtctatgcctgtatttatgttatttcatccagtgtggctcagatgcccctgcatgtgatgcgaaaaacgaatgagcatgttcagccggcacgcgatcatccgttgttctggctcgttcatgatgaacctaatgcctggcagaccagctataagtggcgggaactgaagcagcgtcatgtgctggggtggggcaatggttatacgtgggtaaaacgtaatcgtcgtggagaggttaccagccttgaatgctgtatgccatgggaaaccacgttacttaacaccggtgggcgtcatacttacggggtgtataacgaagagggtgcatttgcggtaagtccggacgacatgatccatatcagggcgctgggaaacaatcagaaaatgggactgagcccgatcatgcagcatgctgaaaccattggtatgggaatgagtggccagcagtataccagcgccttttttaacggtaatgcccgtcctgccggtattatttctgtgaaaaatgaactgaacgaacaaagctggggcaggcttaaaaatatgtggcagcgggcggtgacagcgcttcgcagccaggaaaataaaaccatgttgctgcctgcgcaactggattaccgcgctctgacagtttctccggtggatgctcagatcattgatatgaccaagctgaaccggtcgatgattgccgggatttttaatgtcccggcgcacatgattaatgacctggaaaaagccacattttcgaatattacgcagcaggcgattcagtttgttcgctacacgatgatgccctgggttgcgaactgggagcaggagcttaaccgtcgcctgtttacccgtacagaacgggctgccgggtattacgttcgtttcaacctcacggggttgctccgtgggaccccacaggagcgtgcgcagttctatcactttgccattacagatggctggatgagtcggaatgaagccagggcatttgaggatatgaacccggttgacggtctggatgaaatgctggtcagcgtaaatgcagcaaatccgttgaataactttaaagatacgaaaggcaaagaggaaaagaacgatgaatga

SEQ ID NO: 487709 - DNA, 600 bp, Shigella sonnei
atgaatgaccgtgaaacgcgctgttacagcggggaggtgcgggcggaacaatatgataatgccccgacccacattctggggtatggctcggtatttaacagtcgttcagaacctctgtggggatttcgtgaaatcatcaagccgggggcttttgatgatgtactgaatgatgatgtacgtggcttgtttaatcatgatcctaatttcattctcggacgaagttctgccggcacgttgtcattgtcggtggatgaacgcggtttacgttatgacattgttgcaccggatactccgactatttgtgacctggtgctgtctccaatgttgcgtggtgacattaatcagtcctcgttcgcgtttcgtgtcgcccgtgacggagagagctggtatgaagacgacgaggggattgttatccgggaaatcacgcgcatttctcgtctgtatgacgtcagcccggtgacatatccggcctatcaggacgcagactctggtgtccgctcaatgaaagcctggcaggaagcgcgggcgagtggtgcgctgaagaaagctgttaacgaacgaatggcgcgtgagcgtcttttgactcttcttaatgcataa

SEQ ID NO: 487710 - DNA, 1218 bp, Shigella sonnei
atgaaacttcatgagatgaagcaaaaacgaaacaccattgcaaaggatatgcgtgcactgcatgaaaaaattggtgataacgcatggactgatgagcaacgggcagagtggaacagggcgaaagctgagctggatgcgctggatgagcaaatcgcccgtgaagaagagttgcgccgtcaggatcaggcatatgtggatgagtccgggccggaagagcgccagaataatgaggcggagaacgggaaaaaggcggtggaagagaagcgcgctgcggcatttaaccgttttctgcgtgccggatttgcagaactgaatgctgaagagcgtaatctgatgcgtgaactgcgggctcagagtgtaacaacggattctcagggcggatatacggtgcccacgcagatgcgtaacaaaatcattgacaccatgaaggcttatggcgggattgccagtgtggcgcaacttctgaccacatcaaccgggcaggatatcacctggtcaacgtctgatggcacgactgaagagggcgagctgctggcggaaaatacagccgcaacggaacaggatgtgacgttcgggaccgctattctgggggctaaaaagctgtcatcaaaaataattcgtgtgtccaatgagctgctccaggacagtggggtggatattgaatcttatctggcaaaccgtattgcccagcgtattggtcgtggagaggcaaaatatctggttcaggggaccggaacgggatcaccgttacagccaaaagggctggcagcgtcggtgacgggaaccatccagactgcagcctctgccgctttcacctggaaagaaatgaatgccctgaaacatgccattgatccggcatatcgtggtgggccgaaataccgctgggcattcaatgatgccacattgcagactattgaagagatggaggatgggcagaaacgcccgttatggctgccggatattgcaggcggtacgccggctactgtgctggggatcccttatgttattgatcaggctattgacgggattggtaccggaaaaaaattcattttcctgggggatttcaaccgctttatcattcgccgcgttacttatatggaactgaaacgtctggttgagcgttatgctgagtttgatcaggtggcatttctggctttccatcgttttgactgtgtgctggaagatgtggcagccatcaaggcgctcactggcaaataa

SEQ ID NO: 487711 - DNA, 318 bp, Shigella sonnei; identical to SEQ ID NO: 263054

SEQ ID NO: 487712 - DNA, 339 bp, Shigella sonnei; identical to SEQ ID NO: 263053

SEQ ID NO: 487713 - DNA, 447 bp, Shigella sonnei
atggatttcagtcttgatttttccggcctggcggatattgcacgggatttggagacgctcagcagggcagaaaacaataaggttctgcgcgatgccacccgtgccggtgctgaagttatgcgggatgcagttgttgaacgtgcgccggagcgaaccgggaaactgaagaaaaatgtggttgttctcactcagcgttcaaagcgtcggggggaaattatctcgggtgtccacattcgcggacggaacctgcgaaccggaaacagtgataacagcatgaaagccagcgatccccgaaatgcattttactggcgctttgtggagctgggaacgataaacatgcccgcgcatccattcattcgcccggctttcgatacgacagaggagctggcggcgcaggttgccatacagcgaatgaatcaggctattgatgaggtcttaagtaaatga

SEQ ID NO: 487714 - DNA, 345 bp, Shigella sonnei
atgagggagggcacactgtattccctgttgtctcagctggccggaggacaggtttatccttatgtggtcccgctgacggagggaaagcctgcggtatctccgccgtggctggtgttttctgtggtgtctgacacggcatctgatgtgcttgatgggcaggctgaatccagaattaccgtgcagatcgatgtctgggcgacagtacctgatgacgcagataatattcgtgagcaggcgcttgatgcggtaagaaaactggcaccctccgttatttctaaagcgcagggttatgatcctgactcccgtctgagcagagccacgcttgaattccaggtaatagcctga

SEQ ID NO: 487715 - DNA, 705 bp, Shigella sonnei
atgtcctctaattttgagcgttcgcaactgacgaaaattatgatttcgtctgcaccggtaacagcagaaaccctggattctgccagctatcttggcctgagctgtacaatcaaagaggtgcagtttaccgcaggacaaaagcaggatattgatgtcaccacgctgtgttctgttgagcaggaaaatattaacggccttggggctgcttcagagatttccatgtcaggcaacttttatctgaatgctgcccagaacgcgttgcgcagtgcctatgacaatgacaccacgtatggctttaaagttatttttccgtcaggcaacggatttacctttatggcagaggtgcgtcagcatacctggtctgcaggaaccaatggtgttgtggctgcaacgttttctctgcgcctgaaaggtaaacctgtgctgacgacagagccgctgaaagtgaaggtcgatttaaaaagcacgctgcgggtttcttccggagcgaaacttgaaatggcggttgaggctgcgggtggtgtgccgccttattcttatgcctggaaaaaaggtggttctcctgtttccggacagacggcggcaacgttcagtaaggcatcagcagcatccggtgatgccggtgcgtatacctgcgagatttctgattcagcaagtcctgttaacaaggtgacctctacttcctgcactgttaccgtcagttaa

SEQ ID NO: 487716 - DNA, 372 bp, Shigella sonnei
atgactaaaaatatccgtaatctggcactggcaacgatgtcggggtttcgccataaaactgttgatgtgcctgaatgggaaggggcaacggttgtattacgggaaccttctgcagaagcctggttgcgctggcaggagatcgttaaagcaaaagatgatgagacaccgttatccgttgcggagcgcgcccgccgaaatctggaagcggatgttgaactgttcatcgatgttctgtgtgataccggactgcaacctgtattttcagtggatgatcgtgaacaggtgattgccgtgtatggcccggtgcatgcgcggcttcttcggcagtctctggaactgatcagtgatgctggcgaggttaaaaaaaagtag

SEQ ID NO: 487717 - DNA, 279 bp, Shigella sonnei
atgatgctggcgctcaggatggggcgcacattgtcagagttacgccgggaaatgtccgcatcagaaatcatgatgtgggcagaatttgacaggttcagcccgctgggggatgaacgggctgatatccgggctgcccagattgtttcagctgtttacggtgcgcagggggtcaaagtgccactgaatgatgcgcttcttcagtgggagaaggagcagacagaaggcgtatcagatccatttgctggactggaaaacgcgcttttaatagtgtctcagtga

SEQ ID NO: 487718 - DNA, 3228 bp, Shigella sonnei
gtggcgacattacgtgaactgattattaaaatctcggcaaattcccggtcattccagtcagagatctcccgggcttcgcgtatggggcaggattactaccgtaccatgcagaacggaggccgacagtccgctgctgcatcccgtgaaatgcggcgtgcactggcagaagtgacggatcagataaatacagctaaatcttcggcactgaacatggcgggggcatttgccggggcttttgctaccggtcatcttatttctctcgccgatgagtggaattcagtaaatgcccgtctgaagcaggcctcacagtccagtgatgattttcagtcatcacagcgtgaattaatggcgatcagccagagaacggggacggctttttctgataacgccagcctttttgcccgctctgcagcttccatgcgggagtatggttacagttctgaggaggtactgaaagtcaccgaggcgatctccacgggcctgaaattatccggtgccagtacagcagaagccagttcggtgatcacgcagttcagtcaggctctggcgcagggagtgctgcgcggtgaagagtttaactcggtgaatgagaacggcgatcgtgttattcgtgctctggctgcgggaatgggagttgcccgtaaggatctgaaggccatggcggataacggaaagttgaccgccgataaggttgttcctgcactgattagtcagcttggggcattacgtgatgaatatgcggcaatgcctgatacggtttcatcctctgcaaccaaagttgaaaacgcctttatggcctgggttggtggtgcgaacgaggcaagcggagtgacgaagacgctctccggtgtgctgaatggtattgcaggcaatattgacaccgtggcaaccgctgccggtgctctggttgccgtcggggtagcccgatattttggcaatatggcgtcgtctgctggatctgcaactgccggattaattactgcagccagaaacgaagtggctcttgctgaagcgcaacttcgggggacacagatagcaaccgccagggcgcgtgcggcggtttatcgtgcgcaacaggcggttgttgctgctcgcggtaccgaaaggcaggccgcagcagaagcgaagctgacagctgcccaggcgtcacttacccgtaatattgcggccagaacagcggcacagacaacgctgaatactgtcacgtcagtggggagtcgtctgttaagtggtgcgctggggttggttggtggtgtgccgggactcgtcatgctgggggcgacggcctggtacacgatgtatcagaatcaggagcaggccagagaatctgcacgccagtatgccgcaacaatcgacgaaattcgccagaaaacgtcggcaatgtcgcttcctgaagcgtcagataatgaggaaaagacgcggcaggcacttgatgagcaaaacaggttaattgacgagcagaaaagtaagattaaatccttacaggaaaaaattgctggctatcagtatgtgctggcaaactcgggctggacaaccgataacggttttatgattaaccacatgacgtcggtaaaaactgtcacagaagggcttgcagaagcaacaaatcaactggcagttgaacagtcccgtctcacacaaatgcagggcaaagcgcaatccattcaggatgtgcttgccgggctggaggagcgacgggtggcgttgatccgtcaacaggccgcggaacaaaacaaagcgtatcagtccctgttgatcatgaatgggcagcataccgagtttaatcgtcttctcgggctcggtaatgaattacttcagcagcgacaggggctggtgaatgtaccgttacggctaccacaggcaaccctggatgataaacagcagactgcactgaataacagcgagcgcgaactggctctgtcccgcctgaagggggaagcccgtgagcgtgcccgcctgggttatgctgcggatgatctcggctttgtgggagaggcatatcagacagccagacagaattatatcaataactcactggatgcctggcgaaataaccaggcaaataaacccaaagcgcataaaaagaccgaagcggaaaaaacagaagatatttataaacggctgattaaacagcaaaaagaacaaatagcactggcagggcagaatactgaactggctaagatgaaatatcaggtcagtcagggcgaattatcaaccctgtcagaagcgcagaaaaaaacgcttttgcagaatgcagcactcatcgaccagaaaaagattcgtgagcagcttgctgcgtatgagagcagtctggcggacagtaatgccagtgcccgggcatctgacgaagcgcagttgttgggatatggtgaaggctcacggatgcgtgaacgactccaggaaatgtggagtatccggcaggcgtttgagcagaaaaataacgagctgctgagacagtatcaggccggagaaattgaagaagccctgtggaaacaggagaaagaactgaataaaaaatatctggaagagcgtctcagcgatcagcagaattattatgcaaaggccgatgctttacgtaataactggaatgccggactccaggagggactgaccaactgggcagacagtgccaccgattatgcttcacaggcggcagatgctgtcgtttccacgatggacgggctggtatcaaatatttccgatgcactggccgggaatgttgtggactggaggaactgggggagttcagttctccgggaagtttcaaaaattctgatgaatgcagccattgttaacggactgaaatcactctccggtgccggagggtggcttggtacggtcggcggatggatttcgggggcagtggcaaacgcaaaaggtggtgtttacacatcggcaaatctgagtgcttacagtaacactattgtggatacaccgacgtattttgcttttgcgaaaggtgccgggttgatgggcgaggccgggcctgaagcaatcatgccactgacacgggcagcggacggctctcttggggtcagggccattggaaatgtgaatggtggcggtggatttgtttattctcccgtgtatcacatcagcattcagaatcaagggagcaatggcgagatagatgcgcgctcagccaggggactggtggatctgatcgacagcagggttgtgtcaattatgcagtcatcgcgtcgggatggaggattgtacagtgcctga

SEQ ID NO: 487719 - DNA, 342 bp, Shigella sonnei; identical to SEQ ID NO: 5920

SEQ ID NO: 487720 - DNA, 180 bp, Shigella sonnei
atggcaaaacttaccttacaagagcagttgctcaaagcaggattagtcaccagcaaaaaagcggcgaaggtcgagagaacggcgaaaaaatcgcgcgttcaggcgcgtgaagctcgggctgcggtagaagaaaataaaaaggcacagcttgagcgtaatgccagtcagttaagcaactga

SEQ ID NO: 487721 - DNA, 1524 bp, Shigella sonnei
atgaaacgtgtcatttcatacattcgtttctcatcagagaagcaagctaaaggcgactcactccgcagacaatctaagatggtcactgattggcttaaggctcatcctgagtactaccttgaccaagatttatccttccgtgatttgggggtgagtgggttcactggtaagcacttgaaaggtggcttaggtgacttcttaaccgctatcgagaaagggcttgttaaagctggtgatacgctcttgatagaatctcttgaccgtttgtcacgtcaggccgtagaccgagcaagtgagttattacgaaacattcttcgctctggtgtagatatagtcaccctgtccgatggtgaacattacacaagtgagtctcttaaagacccgttagctctgattaaaagcattttgataatgcaaagggcgcatgaggagagtttgcgtaaatctgagcgtatacaggctgcatgggatgccaagaaagaggctgctaaagctggtatcaaagtttctaaacgttgtcctgcatggttaaggctgaatgatgaccgtaaaagcttctctgtgatacctgagaaagtggagactgtgaagaggtgctttcagctacggttagagggtaagtctatctgggagattgtcagaactcttaatgctgaaggtcaccggtcgatgaaccaatacaagccgggtaagtttggtcaaacctcagtgcaagaccttttgaagaatcgctctgtaattggatactttaccccgaaaggctgtgaagagatatctggttattatcctgcaattatagatgaaacaacattctacaaagttcaacaactatcacattctcgttatggaaagaggtctgtttcagataaaccattgagtgtgaatctctttaaaggtgttatccgttgttctgaatgtggtcatgctctgattatcacaggctttagcgatacaagaaacgggatttatcgttgtcctcttcgtaatgaaaaccgttgcaatgccaaagggctgtcacgtaagcaaaccgatggtacattacttgccctgctatctcgtcttgaccgatttgatagcgatacgacgaataccatcgacacactgaagctacaccgcgaacacctctcaagcaatattgagaagctggtacagctatcacttgaaattgaagacctgaacgctattaccaacaagctaaaacaactaaagaatgagttatcacaggttgatgctgatatcgagaaggagacacaacgccttaaatctattgatgtggggtgtttgtctgattgtgacttgactacaaaggcgggaaggattgaagcacaactgataatcaaaagtgctgttaaagaggtcgttttaaatactgctagacgtcgctgtaaagtaacttttcacaacggtaaggtaattgacctaccaataacagaaaacccctcagaggacgttacagaggccatacagtcgctttctgaagtcactgcgaagggtttaatagatgttgatgtagtagagatttag

SEQ ID NO: 487722 - DNA, 789 bp, Shigella sonnei
atgatttttagcaatcaaatccgctacagtggcaaagatggcgtttactttcatctacaaggccaaccagataatttcttgtcactatcagcaactgagaacatggaatttgacagccctatgatggttaccactcaaaatatgcaatcagggcagactgtaacagacaatgtaatgcgttcaccaagaactatttcaatcagtggtgtggttgtggttggtgaatccggtagtatcctcatctcaagagataataagctggtggaaaacttcatcgacactcttgaaagctggagagaccagaagcagattatttcggtcatctgtcgagatggtattaaaattgacgattccattattacgagttttaaagcctctaaagatgttggtatttcaaatggtcttcgtatccagctaacttttcaggaaattaactttaaagcaatcgtaggtcaaactgatatttcagcagccactggcaaaacggctaccacgaatgatggcggtgctaccagtaaaaagaatacaggtaacgtgaccactgaacgcaataacgcgcctatgctatcgtgcaaagagctaatgagtattaacgatgtatccggttacgctccagctatcagaaatgatattctcgatgctcagattaaatgtaataaggcttggaagctggactattcagacttaacagaagctgaaaaaaccaacgtcaccaatgctaatagtaacgctggtcgggtagcttcaaagcttaaaaagtactcagtgaaccctaacaaaaaatactaa

SEQ ID NO: 487723 - DNA, 2181 bp, Shigella sonnei
atggcacagtttaaagttgatagttttatcgttgaactaggcttcaatgaaaacgttattaaaagtctgcaaagagttgaaaaggcagctttgcagtcagcacaaagaattgaacgtaatttgaatagagcgtttaaggtcgataccaagcaacttgacagcaatctgacaagttctttagggcaacttgaaaggaagtttaataagacctttgacaagattgagcagagagtaagaaacacaagagcatttcagtttgccaccagatttaatgacactgttaatcctccaaaacagcctagacagccacgaattagcggaaacagagcaatcacagcagcgcatagcgtgaatatgtctaagcttggtgatattaatccgctgatggctaaaatgtttaaagcacagtattacagcttaagcggtaaggctggtaatattggaagtgaaaagtttaacgctgaacttgcaaaattaaatcaatctcttcgtgaaacgttgaataaactcaggtcacagacaaaggccaccagcattaataatacaagcgacgcatttaataatcttgcaagcaatgcaattaagttatctggtgcattttactctgtgatgggtgctcttaacgcttacaaggccattatgaatgcaggtcttaaacgagattccgcacagagagccgctaagtttgtacttggtgataaagcatctgaagctgaaacatttatcaggggactggctgacaagacaggtcttaatatctctgaagggctatcaagctacgctaagtttgcagcaggtgctcagggttctatgtcacaggaacagacacaggaactatttggtaatgcaacggctatgagtcgcttaatggggcttagtaatgatgagctaaacggcattttgaaagcttttgagcagatggcttctaagggcaagattcaggctgaagagcttcgtggtcagttaggtgaccgtatggctggtgcatttaagctattcgctgaagcactgggtatgactgctacagagcttgataaagcgatgaaagacgggaaggtactttccgctgatactctccctaaagttgctaaacagatgggcttgatgattgataaagcgggtggctgggctgaagtcgctaagagcactcagacagctttagggaaactggctaacaactgggatgatacgatggtgaaaatcttctcaggttcacaggatgagctaaacggcttcttatccagcctgagtaacctacttagtgaaatgggtatgagttcttctatcgctggtgatgctatcggtggacttattgacatgcttaaagctggtgtagatgacatccgtatctttaacaatcacattgaaggctggattctacagactaagaagttctattacagccttgatgacactaaacgaaaactacttgatgaagtcggtgatggttttatcaattttgtcaaaggtcttgctatagcgttatctgcaaagacactattcagtgctgctacaggggttatgagcctgacaagagcaatcacaacgttaggtacaagagctaatcaggtggctggtcaggtagctactggtaaaggtggtggaaaactgaaaggtgtagctggtggtgtaggtagtgcccttgcaattggttatgctgatgacggttatgaaacagcgttagcattagcttcaatgattccacaaatcagaggtgtcactcttggtttatatgcattgaagaaagcactggattttatgaatcaggaagtagtcaaaaacgctaatatgcatccgtctggggtaggtgtgggtagtgactttaatcctgtgtattctggtgaccctaataaaccgaatgtgattaacgaaggatggagtagaatttttagttcaatgggtgaattgtttaacaatgccacaatgaatattgcaagattcaatcatccagaattgattaccatgaaacaagatgcatcattaacgagcactgacatccaaaatctaagagatgaaattagtgctttgagtaaacgtattcaggagcctgtgaaagtttcacttggtggtgaagttgccattaaaccagatgaaaccagctttatgacctttagcagtaatatctacgaccaatatgcagaagctacgttattaagttcatcattcccagaagatgattga

SEQ ID NO: 487724 - DNA, 216 bp, Shigella sonnei
atgattgatttgcaacagcgttatgaaactattaagtcggcttgtgaaaacttaaagttacaaactaagccagccttaagaattaaaaccaaacataaaattatcacctcacacaaaccaaaaacacgcaagattccaaagtggtgtattgaccgtatcccttctgatgcgcaaatcataggtgaaacggaattacattatcttgtcagacattaa

SEQ ID NO: 487725 - DNA, 324 bp, Shigella sonnei
atgaacaattacccgctacagattttcgttgataacgacaccgctatgatggtgcaaagcttcattgatgcaggtattagcattgactttgaccggctgttagctttgatggctgataatgcagaaaacatctctgactttattcagtcggtggagtttaacgagcctcgaatgatgctaccaattaaagacagcaacatgaaaagattggttatcgagcaaacgaacaaatacagcgttagccctgaaaaatatctcaaggcggctatagcaattttgtacgctgacaatattttggttacggattcgaaggtggtgcattaa

SEQ ID NO: 487726 - DNA, 282 bp, Shigella sonnei
atgaaaaacaaacacacattaacccgcatttcagaggaagcttttaacgagcttaccagaattaaacagacaactaacctccctcatcaaactgttatgcagcttgcaattgctaaagaggttactgagtcggatttactgaaatatccagtctctaaaggtcgtaaacacatccgaattagtcaggacgctttagctactttgaaggcgcttaacggctttaagattgatattgcccgtctattgagtcttaaaattcacaagctgtctctggaggtctga

SEQ ID NO: 487727 - DNA, 384 bp, Shigella sonnei
atgccaaccagaaagagcacccagaacagcatcaaaaattatttggctagctttgattcttacgaacaactaccaagtaaggttgaagatttaattatcggattttgcagaaatgaaggtcacccaaaatacaacagaaagctattttatattctaaagaatcttgatgaaattaacgcagccagcgtgacaaatcttcttcagtgtcaagcaaccagacttagttatgaattaccaagcgataaatattgtgcattgcttgctgtaatgtgtgcaaagctaattggtattgttgaacatcatattgccgttgggaatattgagccaatggaaaacgagcaaccagactttgaatttgacccgtatattttggaggaattttaa

SEQ ID NO: 487728 - DNA, 3963 bp, Shigella sonnei
atgggaaccaccaccatgggggttaagctggacgacgcgacgcgtgagcgtattaagtctgccgcgacacgtatcgatcgcacaccacactggttaattaagcaggcgattttttcttatctcgaacaactggaaaacagcgatactctgccggagctacctgcgctgctttctggcgcggccaatgagagcgatgaagcaccgactccggcagaggaaccacaccagccattcctcgactttgccgagcaaatattgccccagtcggtttcccgcgccgcgatcaccgcggcctatcgccgcccggaaaccgaagcggtttctatgctgctggaacaagcccgcctgccgcagccagttgctgaacaggcgcacaaactggcgtatcaactggccgataaactgcgtaatcaaaaaaatgccagtggtcgtgcaggaatggtccaggggttattgcaggagttttcgctgtcatcgcaggaaggcgtggcgctgatgtgtctggcagaagcgttgttgcgtattcccgacaaagccacccgcgacgcgttaattcgcgacaaaatcagcaacggtaactggcagtcacacattggtcgtagcccgtcactgtttgttaatgccgctacctgggggctgctgtttactggcaaactggtttccccccataacgaagccagcctctcccgctcgctgaaccgcattatcggtaaaagcggtgaaccgctgatccgcaaaggtgtggatatggcgatgcgcctgatgggcgagcagttcgtcacgggtgaaaccatcgcggaagcgttagccaatgcccgcaagctggaagagaaaggtttccgttactcttacgatatgctgggcgaagctgcactgactgccgcagacgcacaggcgtatatggtttcctatcagcaggcgattcacgccattggtaaagcgtctaacggtcgtggcatctatgaaggtccgggcatttcaatcaaactgtcggcgctgcatccgcgctacagccgcgcccagtatgaccgggtaatggaagagctttacccgcgtctgaaatcactcaccctgctggcgcgtcagtatgatattggtattaacatcgatgccgaagaggccgatcgtctggagatctccctcgatctgctggaaaatctctgtttcgagccggaactggcaggctggaacggcatcggttttgttattcaggcttatcaaaaacgctgcccgttggtgatcgattacctggttgatctcgccacccgcagccgtcgccgtctgatgattcgcctggtgaaaggcgcgtactgggatagtgaaatcaagcgtgcgcagatggacggccttgaaggctatccggtttatacccgcaaggtgtataccgacgtttcttatctcgcctgtgcgaaaaagctgctggcggtgccgaatctaatctacccgcagttcgcgacgcacaacgcccatacgctggcagcgatttatcaactggcaggtcagaactactatccgggtcagtacgagttccagtgcctgcatggtatgggcgagccactgtacgagcaggtcaccgggaaagttgccgacggtaaacttaaccgaccgtgtcgtatttatgccccggttggcacacatgaaacgctgctggcgtatctggtgcgtcgcctgctggaaaacggtgctaacacctcgtttgttaaccgtattgccgacacctctttgccactggatgaactggtcgccgatccggtcactgctgtagaaaaactggcgcaacaggaagggcaaactggattaccgcatccgaaaattcccctgccgcgcgatctttacggtcacgggcgcgacaactcggcagggctggatctcgctaacgaacaccgtctggcctcgctctcctctgccctgctcaatagtgcactgcaaaaatggcaggccttgccaatgctggaacaaccggtagcggcaggtgagatgtcgcccgttattaaccctgcggaaccgaaagatattgtgggctttgtgcgtgaagccacgccacgtgaagtagaacaggcgctggaaagtgcggttaataacgcgccaatctggtttgccacgcctccggctgaacgcgcggcgattttgcatcgcgctgccgtgctaatggaaagccagatgcagcaactgattggtattctggtgcgtgaagccggaaaaaccttcagtaacgccattgccgaagtgcgcgaagcggtcgattttctccactactacgccggacaggtgcgggatgatttcgctaacgaaacccaccgtccattagggcctgtggtgtgtatcagtccgtggaacttcccgctggctattttcaccgggcagatcgctgccgcactggcggcaggtaacagcgtgctggcaaaaccggcagaacaaacgccgctgattgccgcgcaagggatcgccattttgctggaagcgggtgtaccccctggcgtggtgcaattgctgccaggtcagggggaaaccgtgggcgcgcaactgacgggtgatgatcgcgtgcgcggggtgatgtttaccggttcaaccgaagtcgctacgttactgcagcgcaatatcgccagccgcctggacgctcagggtcgccctattccgctcatcgctgaaaccggcggcatgaacgcgatgattgtcgattcttcagcactgaccgaacaagtcgtcgtggatgtgctggcctcggcgttcgacagtgcgggtcagcgttgttcggcactgcgcgtgctgtgcctgcaagatgagattgccgaccacacgttgaaaatgctgcgcggtgcaatggccgaatgccggatgggtaatccgggtcgcctgaccaccgatatcggtccggtgattgatagcgaagcgaaagccaatattgagcgccatattcagaccatgcgtagcaaaggccgtccggtgttccaggcggtgcgggaaaacagcgaagatgcccgtgaatggcaaagcggcacctttgtcgccccgacgctgatcgaactggatgactttgccgaattgcacaaagaggtctttggtccggtgctgcatgtggtgcgttacaaccgtaaccagctaccagagctgatcgagcagattaacgcttccggctatggtctgacgcttggtgtccatacgcgtattgatgaaaccatcgcccaggtcactggctcggcccatgttggtaacctgtatgttaaccgtaatatggtgggcgcagtggttggtgtgcagccgttcggcggcgaagggttgtccggtaccgggccgaaagcaggcggtccgctctatctctaccgtctgctggcgaatcgcccggaaagtgcgctggcagtgacgctcgcgcgtcaggatgcagagtatccggtcgatgcacagttgaaagccgcattgactcagccgctaaatgcactgcgggaatgggcagcaaatcgtccagaattgcaggcgttatgtacgcaatatggcgagctggcgcaggcaggaacacaacgattgctgccggggccgacgggtgaacgcaacacctggacgctgctgccgcgtgagcgcgtgttgtgtattgccgatgatgagcaggatgcgctgactcagctcgccgccgtgctggcggtgggcagccaggtactgtggccggatgacgcgctgcatcgtcagctagtaaaggcattgccatcggcagtcagcgaacgtattcaactggcgaaagcggaaaatataaccgctcaaccctttgatgcggtgatcttccacggtgattcggatcagcttcgcgcattgtgtgaagccgttgctgcgcgggatggcgcaattgtttcggtgcagggttttgcccgtggcgaaagcaatatccttctggaacggctgtatatcgaacgttcgctgagtgtgaataccgctgccgctggcggtaacgccagtttaatgacgatcggttaa

SEQ ID NO: 487729 - DNA, 315 bp, Shigella sonnei
gtgtctaataattatgatttaattgccaaggcaatcaaagaaaagttgcaagtaacagcatattaccaaggtttttaccgcgagatgtgccctcatgcgctaggttcaaaaaaaggacgaaaacaggctcttttctatcagtttggcggtgaaagcagtaaaggtactgtgacacctggttccacattcaactggcgctgcattcctatagatggtctaactgaggtcaccttacaatcaggccagtggtacacagcagaaaatcacagccaagcacagacttgtgttgatcagatcgatattgaagttcaataa

SEQ ID NO: 487730 - DNA, 303 bp, Shigella sonnei
atgcttaagacagtacgttcgtgtctgttatcagctttactgacacatctttttttcggcaatatcgctgtggcgaaagaaaatctatcagatgacaaagtaaagcaggcgattattgacgagtcgatagcagcctatcccggaacatgtgcatgtccgtttaacagcgcaagaaatggcagctcgtgcggcaggcgcagcgcctggagcaaagcaggaggttattcgccaatctgctacaaaaaagaggtaacaaaagaaatgataaaagattggcgagcttctcactcaaataacaactga

SEQ ID NO: 487731 - DNA, 429 bp, Shigella sonnei
atgaaacgttctggtggcacacgctatctgtatcttatatccctgataactgtggctgcagccctcacggcctgtaccccgaaaggcagtgtggaacaacatacccgacattatgtgtacgcttccgatgaccgttctgaccctaacttctacaccaacaaggccgacaccacacggatgatgattccgttctttcagcagttcagggagatgggggagaaagacaaagcagccggagtatcagcagaaacggcacagcaacgcataaaagaattccactcagaaaaatttcttcagtctctcagaagcacaactacctttgcgggcagaaaatacatgaatagcgatatgccatcaccggaaaaaatgaagctgctggctgacacgatttctgcggtttatctcgatggctacgagggcagacagtaa

SEQ ID NO: 487732 - DNA, 1164 bp, Shigella sonnei
atgggtagtaatggcgcagataacgcacataacaatgcttttggtggagggaaaaatccgggcattggtaataccagtggcgctggaagtaatggtagcgcatcaagtaaccgaggaaattccaatggatggtcatggagtaataagcctcataaaaatgatggcttccacagtgatggttcttaccatattacatttcatggggacaataattcaaagcctaaacctggtgggaatagtggaaatagaggtaataatggtgatggatcgagtgctaaggctggagagataacaattacacctgacaactcgaaacctggtcgttatatttcgtcaaatccagaatattcattgttagcaaaattaattgatgcggaatcaattaaaggtacagaggtatatacttttcacaccagaaaaggtcagtatgtcaaggttactgttccagatagtaatattgataaaatgagagttgattatgtgaactggaagggaccgaaatataacaataaacttgtgaagaggtttgtgagccagtttttattatttaggaaggaagaaaaagaaaaaaatgaaaaagaagccttgctaaaggctagtgaacttgtgtctggtatgggggataaacttggcgagtatcttggagaaaaatataaaaatgtagctaaggaagttgccggtgatattaaaaactttcatggccgtaatattcgtagctataatgaagcaatggcttcactgaataaagtgttagcaaatccaaagatgaaagtaaacaaatctgataaggatgccattgtgaatgcctggaaacaggttaatgctcaggacatggctaataagattggtaatcttggcaaggcatttaaggttgctgatttagctataaaggttgagaaaattagggaaaaaagcattgagggatacaatactggcaactggggacctctcctgctggaggttgaatcatggatcatcgggggcgttgttgctggagttgctattagtttgtttggggctgtgttgagttttctcccaatctcaggacttgctgttactgtgttgggggtaataggaataatgacgattagttacttgtcatctttcattgatgcaaatcgagtttcgaatataaataacattatatctagtgttattcgatga

SEQ ID NO: 487733 - DNA, 525 bp, Shigella sonnei
atggatataaaagacagaaataagatatcaaaaaaaatatcattcagtcttctgctcttactttccccattcgcattaatatttttcagttataataatgcaccaataccactccttgaaaaaatcatcgcatacctatccctaccaggatttcattcatcaaacaacccgcccctaagcgaagcattcaatctctatgttcatacagcccctttagctgcaatcagcttattcatattcacacacaaagaattagagttaaaaccaaagtcatcatctctgcgggcgctaaagatattaactcctttcactattctttatatatccatgatatactgtttcttgctaactgacacagaactaaccttgtcatcaaaaacatttgtattaatgtcaaaaaatgacctgtttttgtctttcttctatataacactatacattgggatatatatattcacatatttatacctttggttctttataggaacatataaactatttaccaggggaggtatactcccctga

SEQ ID NO: 487734 - DNA, 225 bp, Shigella sonnei
gtgactaaacaggaaaaaacagcccttaacatggcgcgctttatcagaagccagacattaacgctgctggaaaagctcaacgaactggacgcggatgaacaggcagacatctgtgaatcgcttcacgaccacgccgatgagctttaccgcagctgcctcgcacgtttcggggatgacggtgaaaacctgctgacaagcccgtcagggcgcgtcagcaggttttag

SEQ ID NO: 487735 - DNA, 339 bp, Shigella sonnei
atgaaacgcgagaggatgctcacgatacgggttactgatgatgaacatgcccggttacttgaacgctgtgagggtaaacaactggcggtatggatgcggcgggtctgcctgggggagccggttgcccgttccgggaggctgccgacactggcaccgccgttactgcgtcagctggccgccatcggaaataacctgaatcagacagcccgtaaggtgaacagcgggcagtggtcttccggtgaccgggttcaggtggtggccgcactgatggccatcggggatgagctgcgccggctgcgtctggccgtcagggaacagggggcgcgggatgatagttaa

SEQ ID NO: 487736 - DNA, 519 bp, Shigella sonnei
atgagcaatcttttacagacgggcgcggagttcgagaaaaagctgaaagagagagccgaatctacagagaaaatgctgaacgacgagttcaggaagctcggcgagtctgtcagcgaggctgtgacctcaaacgagacgaaaatcagagacgctatagccctgttcacagcctcgacagagaaatcgctggaaaaacaccgggaaggggtgaaagaggcgatgatgcagcacaggaaggacgtgttaaagctggcagggaatacgggcatgatattactggggatagtctttctcctgtttaccgcgagtggcgggacgctctggtatcttggcggacggatacagacgaacctggaagaaatcaggaagcaggaagagacattgcagaaactgaacgcgaagacatggggcgtggagtttgtgcaggacgggaacaggaaattccttgtccttccgtacgggaaatcagcggaggtgattccctttcaggggaaagagtgggtacatctgaaggagtga

SEQ ID NO: 487737 - DNA, 162 bp, Shigella sonnei; identical to SEQ ID NO: 394156

SEQ ID NO: 487738 - DNA, 735 bp, Shigella sonnei
gtggcactacctttcgctgctgacgcttgtctggtcgcctcatcttttgaagcagacgcagatgatgccgatgacgccgctgaactggctgacgatgcggctgctgccttagaggaagcagcattgtctgctgaagtctttgcatttgtttcagaggtttttgctgcagaagcagacctcgctgctgcagtggcttgctcagtggctttgccagccttcgttgtggctgttgaagcggatgatgcggcgctttctgccgattttccggcggcggtggcactggctgaggcctgcccggcacttgttgacgcggcactggcagataatgcagccgctgtttttgaacctgccgcagctgaggcgctctgtcccgctgctgtttcagaagacttagcgttcgtctcggacgtttttgccgccttcgcggaatttcctgccgccgttgccgaggaagctgcactactggcacttgatgatgcattcgtttctgaagatttcgctgcctcttttgaggccgccgcaccccgtgccgaggtggcagcttctgacgccttcgtggtcgctgtggatgcagaagtggctgccgatttttgtgatgctgcggcattcgtttctgacgttttcgcggcactggcgctggtagctgccgcgctttttgatgactctgcagcagcactttttgctgcttcacgggcctttgtcgatgccgttcctgcgctggaagacgctgactga

SEQ ID NO: 487739 - DNA, 126 bp, Shigella sonnei
atgaaacatattcaaatccgcaatagtgatatggcctggtggatttgcccctatatttccagacatctgttatcacttaacccattacaagcccgctgccgcagatattcccgtggcgagcgataa

SEQ ID NO: 487740 - DNA, 684 bp, Shigella sonnei; identical to SEQ ID NO: 487131

SEQ ID NO: 487741 - DNA, 585 bp, Shigella sonnei
atgtctattgaagttctgttgcaaaaaaacagtgaattgcagattgtcctgaaaacggatgattaccgcataaccatcgattatctccgaacccgtcctgttgatttaatcattatggatatagacttgcccggaacagacggttttaccttcctgaaaaggatcaaacaaatccagagcacagtgaaagtgttatttttatcatcgaaatcagaatgcttttatgctggcagagcgatacaagctggtgctaacggttttgtcagtaaatgcaatgatcagaatgatatttttcatcccgttcagatgatcctctccggatacacgttttttcctagcgaaacgctcaactatataaaaagcaataaatgtagtacgaatagttcaacggtcactgtgctatctaatcgtgaagtgaccatattacgttatctggttagcggattatctaataaagaaattgccgataagttattacttagcaataaaacagttagtgcgcataaatctaatatttatggcaaactaggtttgcattcaattgtagagcttatcgactacgccaaattatacgaattaatataa

SEQ ID NO: 487742 - DNA, 684 bp, Shigella sonnei
atgaataaccagtatttacagtttgtgcgtgagcagctcattatcgccaccgctgatttgagtggggcaacaaaaggtcagcttgaagcctggcaagagaatgccatgttcgatacagggcgttacaggcgtaaaaaaatccggtaccgcgatgaagtgactggaaaaatgataacgcgggataatccaccaatcccgggaaagcaatcgctggcgaaggggacgtcaattcctctggtcagtccggttgggttttcgacatcatcgtggcggcgggctgttctgtctcttgaagaacatcataaagcctggttgttgtggtgttacagcgggagtatttgttgggaatatcagatcgcgataacacagtgggcgtggaatgaatttaatgctcaatccggtaccagaaaaattgcagggaaaacgcaggaacgcctgaaaaaattaatctggctggcggcgcaggcagtaaaagcagaactttttggtggggaaggttatgaataccaggagctggcattactggcgggagtgacaactaaaaactggtccaaaacatttactcgtcactgggttgcaatgaaacacatttttcaccgactggatagtgaggctttattgtttgtaatgagaacacgttcaaaaaaaagacggcattttcaaagcaaagtgttgcaaaagtag

SEQ ID NO: 487743 - DNA, 366 bp, Shigella sonnei
atgactgaacgcatagaatttgttttgccttacccgccgacggtgaatacctactggcgacgtcatggcaatacgtatttcatctcggaagccggaaagcgttatcgccgtgatgtggcgctaattgttcgccagcagcgactgaaattaaacctgtccggaaggctggcgataaagattattgcagagccaccggataagcgccgtcgtgacctggacaatatcctgaaggcaccgctggatgcgctgacgcatgctggactacttatagacgacgagcagtttgatgaaatcaatattgtgcgcggtcagctcgttcctggtgggcggctggggataaaaatcacagaactggggtgcgcatga

SEQ ID NO: 487744 - DNA, 1059 bp, Shigella sonnei
gtgcgggtattacttcgacctgttctggtaccggaactcgggctggtgatcgttaagccgggccgtgaatccatgccggtattccacaatacccgggtactggtggagccggaaccgaaaagcatgcgtaatctgccgtccggggtcgttcctgccgttcgccagccgctggcggaggacaaatcattactgccatttttcagcgatgagcgtgtgattcgtgctgctggcggtgctggtgcactgtctgactggctgttacgccacgttaaatcctgccagtggcctcatggtgactatcatcacagcgaaatcgtcatacatcgttatggtaccggtgcgatggtgttgtgctggcactgcgacaaccagctgcgtgaccagacctccgaatcactcgggcaacttgctcatcaaaacctgtcagcatggatgattgacgtcatacgccatgcaatgaatggcacacaggagcgggaattatcgctggctgaattatcctggtgggcgctctgcaatcaggtggcggacgcgctaccggaggcagtattacgtcgttcgctgggattaccggtagaaaaaatccgctcagtataccgcgaaagcgatatcgtaccgggagcgcagaccgccaccagcatactgaagcagcgcacaaaaaatattgcgccgttgcctcacgcccaccagcaacagaatccaccacaggaaaagacggtggtcagcattgccgttgatccggattctccggctcagtatctccagcgccagaaaccacaacgggaagagatgcccgtatacacgcgctgggtaaaaacgcagaaatgcatgacgtgtggcaatcaggcagatgatccgcatcacatcattggtcatggactgggagggatgggaacaaaggctgatgatttgtttgttattccgctgtgccgtaaatgtcataacgaactgcacgccggggtaaaagattttgaagaaaaacacggcagccagctgttgttgctgattcgttttttaatgcacgcgagaaattcgggtgtcctgaagtggaaagcatga

SEQ ID NO: 487745 - DNA, 258 bp, Shigella sonnei
atgcgtacaacccaacaattcagcattacattaactaacgagatggctgacatggtgcgcgcccgtgtggcttccggtgcctatgcttcagaaagcgaggtcattcgtgaagggcttcgcgcactgaatgagcgcgataaagcaatcgaagcgtggttaacgcattcagccgccccctctcttgattctatccgcgaaaatccaaacaacggacgctccatttcacaggttcgcgccgcgattcgatccggaaagtaa

SEQ ID NO: 487746 - DNA, 189 bp, Shigella sonnei
atgtataaaattacagccactattgaaaaggaaggtggttctcctgccagctggacaagatactcaaagacaaaactaacgaaatcagaatgcgaaaaaatgctctcaggggaaaaagaagcaggcgtttccagagagcagaaagtaaaactgataaattttaattgcgagaaacttcagtcctcgtga

SEQ ID NO: 487747 - DNA, 297 bp, Shigella sonnei; identical to SEQ ID NO: 475195

SEQ ID NO: 487748 - DNA, 234 bp, Shigella sonnei; identical to SEQ ID NO: 487009

SEQ ID NO: 487749 - DNA, 1041 bp, Shigella sonnei; identical to SEQ ID NO: 485547

SEQ ID NO: 487750 - DNA, 975 bp, Shigella sonnei
atgggcggtggtaaaggcggcagcgatttcgatccgaaaggaaaaagcgaaggtgaagtgatgcgtttttgccaggcgctgatgaccgagctttatcgtcatctgggcgcggataccgacgttccggcaggtgatatcggcgttggtggtcgtgaagtcggctttatggcgggggtgatgaaaaagctctccaacaataccgcctgcgtcttcaccggtaagggcctttcatttggcggtagtcttattcgcccggaagctaccggctacggtctggtttatttcacagaagcaatgttaaaacgccacggtatgggttttgaagggatgcgcgtttccgtttctggctccggcaacgtcgcccagtacgctatcgaaaaagcgatggaatttggtgctcgtgtgatcactgcgtcagactccagcggcactgtagttgatgaaagcggattcacgaaagagaaactggcacgtcttatcgaaatcaaagccagccgcgatggtcgagtggcagattacgccaaagaatttggtctggtctatctcgaaggccaacagccgtggtctgtaccggttgatatcgccctgccttgcgccacccagaacgaactggatgttgacgccgcgcatcagcttatcgccaatggcgttaaagccgtcgctgaaggggcaaatatgccgaccaccatcgaagcgactgaactgttccagcaggcaggcgtactgtttgcaccgggtaaagcggctaatgctggcggtgtagcaacgtcgggcctggaaatggcacaaaacgctgcgcgcctgggctggaaagccgagaaagttgacgcacgtttgcatcacatcatgctggatatccaccatgcctgtgttgagcatggtggtgaaggtgagcaaaccaactacgtgcagggcgcgaacattgccggttttgtgaaggttgccgatgcgatgctggcgcagggtgtgatttaa

SEQ ID NO: 487751 - DNA, 1101 bp, Shigella sonnei
gtgcctgctccggagctggccgctggtattccaggcggtggcaagttcatatgcctccccgccgaagctgcgggccgtctcacggtgcagccggtcccgcgtgtactcgaccagcggtgttccgcccagcttcatccccgcaagataaccgctgccatacgtcagccactccaccggcggcaggccgtccggctcctgacgggtcgccagcccctgttcgctgtacgcgtgccccgtctcatgctcccacagcatctcccccgtctccggggtctccaccgtctgccgttcgcccgtcagacggcctttatcgtcatagccgtagtggaccgccacacggtggccttcactcaggtggctgatttctgtcagccagccgtggtcgtcatactgccactgctccgccggttcaccgttcaccgtgcgccgggtgatacggtccgacgcatcgtaatgccagagggtgataagcccctcatcttcactctgcgtgagttttccggtcaggtcatactggtaacgttgcgtccggccgtcaaagccgcgctgctccgtcagcctgtcgaccgggtcataccggaacgtggactggctgccgttctcgttggtcagcacagtgatgcgcccggcggcgtcataccccatgcttcgcgtcagaccgccctgcgtggtgctgacggcctttccccacgcatcatactgtatctcactgcggctgccgtccggggcaacgatagcggtgaggtctcctgcggcgctgtactcataacgggtttcacgcccctgcgcatccctctgactgaccagttgaccgcgcgggttataactgctgtaagtgctgatgccttcttcccggtgaacggcgatttgttgaccgtaccggtcatactcataccgcgtcgtgtaccccgagcagtccgtaaacgcctgaagctgaccgtaccggtttcgcgttattctccgcctcaccccggttccgtcttccaccgcacagggcaggccactgcgggaagaatcataaaaccagcgcgtaatgttaccgttgcgcgaggtctcttccgccagcctgccctgacggtcatatttccggctgctgcgtaa

SEQ ID NO: 487752 - DNA, 177 bp, Shigella sonnei
atgagggacaaacccgcgaaccataaacgcggtaaaaacccggtgtgcatcgtttttgattattcccgcacactcgcgcagaaggagttccccgtcgggctacggtcatggttaatacgggaatacggcgacgatacagcgcatgatgtgtcaggcttgaatacctttatccgttaa

SEQ ID NO: 487753 - DNA, 153 bp, Shigella sonnei; identical to SEQ ID NO: 38791

SEQ ID NO: 487754 - DNA, 207 bp, Shigella sonnei; identical to SEQ ID NO: 485753

SEQ ID NO: 487755 - DNA, 1002 bp, Shigella sonnei
ttgctcaacacggcagcgaaaattttccctaatcctggtaattcaagcctgggactgataactgcttttttcgaagcatacctgaacgctgactacaccgatcgaggactgctgacaaaagagtggatgaagggtaatcgtgtttcacacatcactcgcacggcttccggtgctaatgctggcggcggaaacctcaccgatcgcggcgaaggtttcgtacacgatctgacgtcactggcgcgcgacgtagccactggcgtactggcccgttcaatggatctggacatctataaccttcatccggcacacgctaaacgcattgaggaaattatcgctgaaaataaaccgcccttttctgttttccgcgacaaattcatcaccatgcctggcgggctggattattcccgcgccatcgtggttgcgtccgtaaaagaagcaccaattgggatcgaggtcatccccgcgcacgtcactgaatatctgaacaaggtactgactgaaaccgatcatgccaaccctgatccggaaatcgtggatattgcctgcggtcgctcctctgccccgatgccgcagcgtgtaacagaagaaggaaaacaggatgatgaagaaaaaccgcaaccatcttgcgcaatggcagatgaacaggcaacggctgaaacagtggaaccggatgcaactgaacatcatcaggacacgcagccgctggatgctcagtcacaggtaaatgctgttgatgcgaaatatcagaaactgcggacagaactccatgaagcccggaaaaacattccgcccaaaaatcctgtcgatgcagacaaattactggctgcctctcgcggagaatttgttgaagggattagcgacccgaatgattcgaaatggattcccggtcatcatatctcctcaaatgaagtcaaaaaaacggaaaataaagtgcgacagactgaagataaacagcaccagaacagcgaaccggaggagcgaactgaggtgtactggcaatag

SEQ ID NO: 487756 - DNA, 462 bp, Shigella sonnei
atggtagtgtccgctattgccagtacacctcagtattacgaagcaaaaaatgacaaagtaagaaaacgcctcggtattaaaggcggtttttactgggctgaagcgaaaaaattatccattgccatctcccgtggtgctgttgcgattgacgatgctggctacgatgaagatgactttaaaaaacctgttcgcgtcaatttgcccgttgttggtgacctcccaccagaaggcgtgtttgatacggaattctgcaaccgttacgaaaaaggcggggaagatggcatcacaatggtatttatcgcatcttctccctctgttcaggacaaaccagccagcactgacaataccaacgtcaacggcgaagacatgacagaaattgaggagaacatgctcctgccagtttccggtcaggaactgcccattcgctggcttgctcaacacggcagcgaaaattttccctaa

SEQ ID NO: 487757 - DNA, 789 bp, Shigella sonnei; identical to SEQ ID NO: 486974

SEQ ID NO: 487758 - DNA, 225 bp, Shigella sonnei; identical to SEQ ID NO: 486969

SEQ ID NO: 487759 - DNA, 180 bp, Shigella sonnei
atgtttttagttgctcccaacaatatattaactcggaattctgaggtaagcagaaacctgtcgtgttacgaatttgatcggttatcgcataaagattttggaacttttcaattagatcaatgggataataaagcatttctgcaagataaagacggtgatgctgccaacttactgatttag

SEQ ID NO: 487760 - DNA, 1020 bp, Shigella sonnei; identical to SEQ ID NO: 485811

SEQ ID NO: 487761 - DNA, 654 bp, Shigella sonnei; identical to SEQ ID NO: 476867

SEQ ID NO: 487762 - DNA, 486 bp, Shigella sonnei; identical to SEQ ID NO: 487387

SEQ ID NO: 487763 - DNA, 519 bp, Shigella sonnei
gtgaatgcgaacgccgggacgctcaacaatgtcacggtaaatgaaaactgtacgattaagggcatgctggaggcgactcaggtcagaggtgacttcgttaaagctgtatccaaatcatttccgaaacaggctggtacgtggggtaacacggaaacaccaaacgggacggttacagtcaccataagcgatgatcataactttgaccgccagattattattccgcccattatttttaacggtatagcgtatgacgatccggggagcggaaataacccaggaggcacgcgatacacgggttatggttttgaagttcgcaaaaacggcgtattaatcgcatccagagaaactaaaggtgccattcccggtagttacagtgcagttattgatatgcctagtggtggtggtagcgtcactctggagtttaagattttccagaaaggcaatcagggggcaggcaatatcaccgactgtacggtgattgtgaccaaaaaagcggcttccggcatcagtattcgttga

SEQ ID NO: 487764 - DNA, 480 bp, Shigella sonnei; identical to SEQ ID NO: 464934

SEQ ID NO: 487765 - DNA, 303 bp, Shigella sonnei; identical to SEQ ID NO: 21213

SEQ ID NO: 487766 - DNA, 483 bp, Shigella sonnei; identical to SEQ ID NO: 486898

SEQ ID NO: 487767 - DNA, 327 bp, Shigella sonnei; identical to SEQ ID NO: 485848

SEQ ID NO: 487768 - DNA, 354 bp, Shigella sonnei; identical to SEQ ID NO: 466835

SEQ ID NO: 487769 - DNA, 498 bp, Shigella sonnei
atgtcgccatcattacgcaaggctgttgcagctgctattggtggtggggctgttgctatagcatctgtgttaatcactggcccaggtggtaacgatggtctggaaggtgtcagctacataccatacaaagatatcattggtgtatggactgtatgtcacggacacaccggaaaagacatcatgcctggtaaaacgtataccgaagcagaatgcaaagctctcctgaataaagaccttgccactgtcgccagacaaattaacccgtacatcaaagtcgatataccggaaacaacgcgcggcgctctttactcgttcgtttacaacgtgggcgctggcaatttcagaacatcgacgcttcttcgcaaaataaaccagggctatatcaaaggcgcatgtgaccagctacgtcgctggacatatgctggcggtaagcaatggaaagggctgatgacccgtcgtgagattgagcgtgaagtctgtttgtgggggcagcaatga

SEQ ID NO: 487770 - DNA, 186 bp, Shigella sonnei
atgactagtctaaaaactagtattaagactatcacttatttaagtgatactggttgtctggagattcagggggccagtctaggttggaagaatgtttccgtgtatgacggcggctggtacgaatggagcagcgatccaaaaaatccggtagcaaccggtgaacgcggcccggacagtagcaaataa

SEQ ID NO: 487771 - DNA, 309 bp, Shigella sonnei; identical to SEQ ID NO: 486565

SEQ ID NO: 487772 - DNA, 366 bp, Shigella sonnei
atgctggaagcggccagagaggccagacgtcaggaaattgaagcatggcgcacagaacaggaggcgaagccgttcacgtttgaatggaacggtcgtatctggaatgctggccccaactcactgggccgcctgtccccggtagtcatgctggcaaaatctgtcacagcacaaacgcatatggcgtggggtgatgccgataatcagcaggtgaaactgtcgatgccggaactggaagaactggcggcagcaatggtgcaggctgttgttgaacgcaatgacgagatttatcgccgtcagcgtgaaatgaaagaggagctgagcagtctggatgatttggcttcaattcgggcgtttgacgttaagtaa

SEQ ID NO: 487773 - DNA, 177 bp, Shigella sonnei; identical to SEQ ID NO: 485877

SEQ ID NO: 487774 - DNA, 348 bp, Shigella sonnei; identical to SEQ ID NO: 485869

SEQ ID NO: 487775 - DNA, 339 bp, Shigella sonnei
ttgtacctcgctggcatcaaagatgtttatacgtgcgaaattgtcggctacgccatgggagagcgcatgacaaaagagctgacaggtaaagccctgtttatggcgctcaggagccagcgcccacctgccgggctaatccaccactctgatcgaggttcacagtactgcgcatacgattaccgggtcatacaggagcagtttggtctgaaaacatcaatgtcgcgtaaaggtaactgttacgacaacgctccgatggaaagcttctggggaacgctgaaaaatgagagcctgagccactatcgttttaataaccgggatgaagccattgaggtagcctga

SEQ ID NO: 487776 - DNA, 441 bp, Shigella sonnei; identical to SEQ ID NO: 478325

SEQ ID NO: 487777 - DNA, 441 bp, Shigella sonnei; identical to SEQ ID NO: 478283

SEQ ID NO: 487778 - DNA, 279 bp, Shigella sonnei; identical to SEQ ID NO: 11573

SEQ ID NO: 487779 - DNA, 213 bp, Shigella sonnei; identical to SEQ ID NO: 485717

SEQ ID NO: 487780 - DNA, 249 bp, Shigella sonnei
atgacacagggcaggcgggaggataaatgcccgtctgcccgtgcaggaaaaagaccgcgcgccggtggcgctgaaaggggccgcgctcacgcgccgcccctttcattgcgcggacgttctgctgtgggcttctgtcttttcagacctgtcatttgtctgttactgatgatgtggttgttcctgctactgctactgctactgctactgctactgctactgctactgttcttcttttttctgctgctctga

SEQ ID NO: 487781 - DNA, 450 bp, Shigella sonnei; identical to SEQ ID NO: 478883

SEQ ID NO: 487782 - DNA, 705 bp, Shigella sonnei; identical to SEQ ID NO: 8686

SEQ ID NO: 487783 - DNA, 837 bp, Shigella sonnei; identical to SEQ ID NO: 22759

SEQ ID NO: 487784 - DNA, 1023 bp, Shigella sonnei
gtggctgaaagatacacccctcaaaaacactggagtcagcttccggctgaagagcaaatccgtttctgggaagaatatgaggcgggaagggctacctctttcctggttgagccagaaaggaagcgcacgaagcgccgtcgtggcgagcactccaccaaacccaaatgtgaaaatccgtcctggtatcgtcctgcgcgctataaggcgctgagcgggcagctcgggcacgcctatcaccgtctggtgaaaaaggacccggtgaccggcgagcatagcctgcgcatgcgcatgtcgcggcatcctttttatgtgcagaaacggacgttcgtcggtcgcaaatatgctttccggccggaaaaacaacgcctcctcgatgccatctggccggttctggtcagcttcagtgatgcgggcacacataccgtaggcatgagtgtttcccgtctggccagagaaatcagcccgaaagacagcaaggggaaggttattccggaactggaagtgacggtctcccgcctttcccgtttgctggccgaacaggtacgctttggtgtgctgggtgtttcagaggaaaccctgtgggaccgtgaaacccgccagcgtctgccacgttacgtctggataacaccggcaggctggcagatgctgggcgtcgacatggtaaaacttcacgaacagcagcagaaacgactgcgtgaaagtgaaatccgccagcagctcattcgggaaggtgttctgcgtgaggatgaagatatctccgtacatgcggccagaaaacgctggtatctgcagcgcagccaggatgcactgaaacaccgtcgtgaaaaagcggcagccagtaagcgcgccagacgcctgaagaaactgcctgccgaccagcagattcatgagatggcagagtatctcaggaagcgtctgccgccggatgaggcctatttttgttccgatgaccatctgaagcgactggccatcagggagttgcgtcagcttgaactgacgctggctgcgccaccgccgcactag

SEQ ID NO: 487785 - DNA, 258 bp, Shigella sonnei
atgtcgcagacagaaaatgcagtgacttcctcatctggcgcaaaacgagcatacagaaagggtaaacctttgagtgaagcagagcgacagagagcagcttctgcgcgcaaacgatctgtatgtaaagagatcaaggttttcgtcagaccagaactgaaaaactaccttaccagtttgtgtgcagaggaaggtgtaactcaggcagagttgatagaaaggcttatcgaaaaagaggcctgtcacaggaatatggcgtga

SEQ ID NO: 487786 - DNA, 195 bp, Shigella sonnei; identical to SEQ ID NO: 18715

SEQ ID NO: 487787 - DNA, 1014 bp, Shigella sonnei; identical to SEQ ID NO: 478846

SEQ ID NO: 487788 - DNA, 309 bp, Shigella sonnei; identical to SEQ ID NO: 18716

SEQ ID NO: 487789 - DNA, 711 bp, Shigella sonnei; identical to SEQ ID NO: 18717

SEQ ID NO: 487790 - DNA, 354 bp, Shigella sonnei; identical to SEQ ID NO: 18718

SEQ ID NO: 487791 - DNA, 732 bp, Shigella sonnei; identical to SEQ ID NO: 478850

SEQ ID NO: 487792 - DNA, 567 bp, Shigella sonnei; identical to SEQ ID NO: 478851

SEQ ID NO: 487793 - DNA, 5298 bp, Shigella sonnei; identical to SEQ ID NO: 478852

SEQ ID NO: 487794 - DNA, 2232 bp, Shigella sonnei; identical to SEQ ID NO: 478853

SEQ ID NO: 487795 - DNA, 738 bp, Shigella sonnei; identical to SEQ ID NO: 478854

SEQ ID NO: 487796 - DNA, 579 bp, Shigella sonnei; identical to SEQ ID NO: 478855

SEQ ID NO: 487797 - DNA, 2889 bp, Shigella sonnei; identical to SEQ ID NO: 478856

SEQ ID NO: 487798 - DNA, 1362 bp, Shigella sonnei; identical to SEQ ID NO: 478857

SEQ ID NO: 487799 - DNA, 603 bp, Shigella sonnei; identical to SEQ ID NO: 478858

SEQ ID NO: 487800 - DNA, 780 bp, Shigella sonnei; identical to SEQ ID NO: 478859

SEQ ID NO: 487801 - DNA, 1839 bp, Shigella sonnei; identical to SEQ ID NO: 478860

SEQ ID NO: 487802 - DNA, 615 bp, Shigella sonnei; identical to SEQ ID NO: 478861

SEQ ID NO: 487803 - DNA, 369 bp, Shigella sonnei; identical to SEQ ID NO: 478862

SEQ ID NO: 487804 - DNA, 987 bp, Shigella sonnei; identical to SEQ ID NO: 478863

SEQ ID NO: 487805 - DNA, 636 bp, Shigella sonnei; identical to SEQ ID NO: 478864

SEQ ID NO: 487806 - DNA, 465 bp, Shigella sonnei; identical to SEQ ID NO: 478865

SEQ ID NO: 487807 - DNA, 2592 bp, Shigella sonnei; identical to SEQ ID NO: 478866

SEQ ID NO: 487808 - DNA, 600 bp, Shigella sonnei; identical to SEQ ID NO: 18720

SEQ ID NO: 487809 - DNA, 411 bp, Shigella sonnei; identical to SEQ ID NO: 478868

SEQ ID NO: 487810 - DNA, 186 bp, Shigella sonnei; identical to SEQ ID NO: 18722

SEQ ID NO: 487811 - DNA, 225 bp, Shigella sonnei; identical to SEQ ID NO: 478870

SEQ ID NO: 487812 - DNA, 1365 bp, Shigella sonnei; identical to SEQ ID NO: 478871

SEQ ID NO: 487813 - DNA, 741 bp, Shigella sonnei; identical to SEQ ID NO: 478872

SEQ ID NO: 487814 - DNA, 564 bp, Shigella sonnei; identical to SEQ ID NO: 478873

SEQ ID NO: 487815 - DNA, 306 bp, Shigella sonnei; identical to SEQ ID NO: 478874

SEQ ID NO: 487816 - DNA, 360 bp, Shigella sonnei; identical to SEQ ID NO: 478875

SEQ ID NO: 487817 - DNA, 189 bp, Shigella sonnei; identical to SEQ ID NO: 478876

SEQ ID NO: 487818 - DNA, 276 bp, Shigella sonnei; identical to SEQ ID NO: 478877

SEQ ID NO: 487819 - DNA, 384 bp, Shigella sonnei; identical to SEQ ID NO: 478880

SEQ ID NO: 487820 - DNA, 666 bp, Shigella sonnei; identical to SEQ ID NO: 478881

SEQ ID NO: 487821 - DNA, 315 bp, Shigella sonnei; identical to SEQ ID NO: 25695

SEQ ID NO: 487822 - DNA, 435 bp, Shigella sonnei; identical to SEQ ID NO: 25697

SEQ ID NO: 487823 - DNA, 1968 bp, Shigella sonnei
atgtcagttacagagtctaaggcaaaaacggggcgtaaatccagccgtaaatcgtcaaaagaacaggaaaccgccctgtctgccctgctggcgcagacggaggaagtgagtgtgccgctggcctcactgattaaatcaccgctgaatgtgcgcacggtgccgtattccgcagagtccgtcagcgaactggcggagtccgttaagggcgtcggactgctgcagaatctggtcgtgcataccctgcctggtgaccgttacggtgtcgccgcaggtggtcgccgactggctgcactcaacatgctggcagagcgtggcatcattccggctgactggcctgtccgcgtgaaggttattccgcaggaactggcgactgccgcatcaatgactgaaaacggtcatcgtcgggatatgcaccctgccgaacagattgccggattccgtgcaatggcgcaggaaggcaaaacgcctgcacaaatcggtgatttgctgggctattcaccccgccacgttcagcgaatgctgaaactggcagaccttgcgcctgtcatcctcgatgcgctggcagaagaccgcatcaccacagagcactgtcaggcgctggcgctggagaacgacaccgcgcgtcaggtgcaggtgtttgaagctgcctgtcagtcgggatggggcggtaaaccggaagtacagaccattcgtcgtctggtgaccgaaagtgaagtggcggtggcggggaacactaaattccgctttgtgggggctgatgccttctcgccagatgaactgcgcaccgatttgttcagcgacgacgagggtggctatgtggactgtgttgcgctcgatgctgccctgctggaaaaactccaggctgtcgctgaacaccttcgggaagcagaaggctgggaatggtgcgccggacgtatggagcctgttggttcctgccgtgaggatgccggaacataccgcagtctgccggagccggaagcggtgctgacggaggcagaagaagaacgcctgaacgaactgatggctcgttacgacgcgctggaaaaccagtgtgaggaatccgacctgctggaagcagaaatgaagctgattgactgcatggcgaaggtcagggcgtggacgccggagatgcgtgccggaagtggcgtggtggtgtcctggcgttatggcaacgtatgtgtccagcgtggtgtgcagttgcgcagtgaagatgacgtggctgacgacgctgaacgcacggaacaggtgcgtaagactgatgcggtggaggaaatcagtctgccgctactgacgaaaatgtcttccgaacgcacgctggcagtccaggccgcgctgataaagcagcccgaaaaaacagtggcactgatggtctggcgattgtgctgttgtgtttttgactactgcaatacaactctccacccgttcgggatgcatattgaagagtatcacagaaggctgacaagtgatgctcccagtggaaagagaggtcaggcatggctgagtctgatgcaggagaaagcccgtctggaggctctgttaccggaaggatggcagaaagatttcaccacattcttcacgcttgacggacaggccctgatgagtctgatggttttctgtactgcctgttccgtggatggtgtgcaaacccgcaattgtggtcacacgtcacgcagtccgctggattcgctggaaagcgccatcggctttcacatgcgcgactggtggcagccgacaaaagcaaacttcttcggacacctgaaaaagccgcagattatcgatgccctgaatgatgcaggactgtccggtgctgcgcgggacgcggagaaaatgaagaaaggcgatgcggctgaacatgcagagttccacatgaaagacaaccgctgggtgcctggctggatgtgtacaccacgtccacaggcagagacggaaaccacggaataccgtgacaaccaggccgatgccgcctga

SEQ ID NO: 487824 - DNA, 423 bp, Shigella sonnei; identical to SEQ ID NO: 481884

SEQ ID NO: 487825 - DNA, 435 bp, Shigella sonnei
atggactatcgcaaaatcattaaagagatcgggcgcgggaaaaaccacgcgcgcgatttagaccgggatactgcgcgcggtctgtatgctcatatgctcaatggtgaagtccctgaccttgagttgggcggcgtattgattgcgctgcgtatcaaaggagaaggggaagcagagatgctcggcttttacgaagccatgcaaaatcacaccatcaagctgacgccgccagcaggcaagccgatgccgattgtcatccccagttacaacggcgcgcgtaaacaggccaacctgacgccgttgttggcgattctcctgcacaaactcggttttcctgtggtggttcacggggttagcgaagatccaacccgcgtgctgactgaaaccatttttgaattgatgggtattacgccaacgttgcacggcgggcaggcgtag

SEQ ID NO: 487826 - DNA, 738 bp, Shigella sonnei
atgtctatttataaaattcctcttccgctcaatattctggaagctgcacgagagcgtattacctggacactcaacaccctaccccgcgtttgtgtctcattttctggcggcaaaaactctggtttaatgctgcatctgacagccgaacttgcccgacaaatgggcaaaaaaatctgcgttttgtttatcgactgggaggcgcaattctcttgcaccattaactatgttcagtccctgcgcgagttgtacaccgatgtcatcgaagagttttactgggttgcgctcccgcttacgacgcaaaattccctttcacaataccaacccgaatggcagtgctgggaacctgatgtcgaatgggtgcgtcagcccccgcaagatgcgataaccgatcctgactttttctgcttttaccagccaggcatgaccttcgaacaatttgtacgtgagtttgccgaatggttttcacaaaaacgtccggtggcgatgatgatcggcatccgtgcggatgagtcctacaaccgttttgtcgccatcgccagtttaaataaacaacgttttgccgacgataaaccatggactacggccgcaccaggcggtcatagctggtacatttaccccatttacgactggaaagtggctgatatctggacctggtatgcaaatcatcaaaatctctgcaacccactgtataacctaatgtatcaggcaggcgttcctctgcgtcatatgcgaatttga

SEQ ID NO: 487827 - DNA, 651 bp, Shigella sonnei; identical to SEQ ID NO: 481820

SEQ ID NO: 487828 - DNA, 906 bp, Shigella sonnei; identical to SEQ ID NO: 484294

SEQ ID NO: 487829 - DNA, 2385 bp, Shigella sonnei; identical to SEQ ID NO: 464842

SEQ ID NO: 487830 - DNA, 702 bp, Shigella sonnei; identical to SEQ ID NO: 5274

SEQ ID NO: 487831 - DNA, 267 bp, Shigella sonnei
atggcgacgctggggcgtcttatgagcctgctgtcaccctttgacgtggtgatatggatgacggatggctggccgctgtatgaatcccgcctgaagggaaagctgcacgtaatcagcaagcgatatacgcagcgaattgagcggcataacctgaatttgaggcagcacctggcacggctgggacggaagtcgctgtcgttctcaaaatcggtggagctgcatgacaaagtcatcgggcattatctgaacataaaacactatcaataa

SEQ ID NO: 487832 - DNA, 345 bp, Shigella sonnei; identical to SEQ ID NO: 485793

SEQ ID NO: 487833 - DNA, 303 bp, Shigella sonnei; identical to SEQ ID NO: 21213

SEQ ID NO: 487834 - DNA, 267 bp, Shigella sonnei; identical to SEQ ID NO: 487831

SEQ ID NO: 487835 - DNA, 267 bp, Shigella sonnei; identical to SEQ ID NO: 487831

SEQ ID NO: 487836 - DNA, 387 bp, Shigella sonnei; identical to SEQ ID NO: 485857

SEQ ID NO: 487837 - DNA, 711 bp, Shigella sonnei
atgcgattgctcaaccgtcttaaccagtatcaacgtctgtggcaaccttcagccggaaagccgcaaaccgtcaccgtcagcgaactggccgaacgctgtttttgcagcgaacgccatgttcgtacgctgttgcgtcaggcacaggaggcgggatggctggagtggcaggcgcagtcaggacgcggaaagcgcggacaattacgctttctggtcacgccggaatcgctacgcaatgcgatgatggaacaggcactggaaaccggaaagcagcaagatgtgctggagctggcgcaactggccccaggtgagctgcgcactctgttacagccgtttatgggcggacaatggcaaaacgatacacccacgttgcgtattccctactatcgcccgctcgaaccgctacaaccaggctttttgcccggccgtgccgagcagcatctcgccgggcagatattttccggcctgacccgcttcgataataatactcagcgcccgattggcgatttagcgcatcacagggaaacctctactgacgggttacgctgggacttttatcttcgttcaaccctacactggcataacggcgatgcagtaaaagcctcacacttacaccagcgattattgatgctgttacaactgccagcactggatcaattatttatgtcaacgccacgatgtttgaccgttatttgccattttcatgcccgctaa

SEQ ID NO: 487838 - DNA, 468 bp, Shigella sonnei; identical to SEQ ID NO: 19402

SEQ ID NO: 487839 - DNA, 303 bp, Shigella sonnei; identical to SEQ ID NO: 487011

SEQ ID NO: 487840 - DNA, 486 bp, Shigella sonnei; identical to SEQ ID NO: 485847

SEQ ID NO: 487841 - DNA, 531 bp, Shigella sonnei
atgtcgcagggaaaagaacctgttattgaacgtattggaatgcttacaaagcgctacccttcaagaagtgcagctgccagagcgtggggaatcaatatcaacacattaaacagctatttcaagggaggacaaacacaaccagcccccagagaaagtatccttatacgaatttctgaaagtgaaggcgttagtcttgagtggcttaaagagggcaagggtgaattaccaaacgatattggtatttatggtgattttggttgttctggtgataagggagatcagcttacacagatgctttcattccttacgaaagacgaacgagaacagttaaccaatctccttgctcgcaaaggtgtagagacggttctgacactgctgaataaagaaaaccaggatttattacaactagaaggcaggaagcgcctggctgcgttgatgattgtagatatgccagacgattgcgtcagagagattttggaaaaaaccgagacaagtaggcaatcaaatccggtagaatctaaagcgggttag

SEQ ID NO: 487842 - DNA, 2091 bp, Shigella sonnei
atgtatgtcattgcaaaagaactgattggcgcgcccggaatgcctgctacaacaaaaggtattcgccaggcattacaacgttacgtacaagggaaaagctgttgttcccgtcgtcgctcaggctctaaagcaactgaatacagcatcgactgtttacctgaagtgacgcagcaggcattacgtgaacgctacgccctgcaactgatgacgcaaaaagccgatgaatcaccggctccggtggtgacaaaggccagacgctcacctgccgtggttgatgcggtggaggcatatcgcggatcaccccaactgatggtcgaacgcctcaatgccctgactgaaaaccaacgtaaagtggcagaggcacgaatagcgatcgtcagcgaggtgctgaaaatcgcgcaacaacccggctttagttgcgctaaggctatccggttcctcgttaacagcctggcacgatcacaactggacgagcgcattgtggcaatggttgagacggcgaacgccaaaaagggaaacagccgcgcgttgagtgaaatcacgctgaaacgctggattgcggcctttaacaaggcacagaacgccgctgaacgcctgcttttactggcaccgggtaaacgccaggaaataaaagccgaagatattaactggctgcccgaatttctggcgcagtatcgccagtcaaacggccgaccaatgaccgaggcttacgaggattttgttgctgaatggcagcaccggcacgctgatgagccttatatgctcgatatcatgccctcttatgacaccattcgccgcgcaatgaagaaactgccggaagtggtgaaacaaaaaggccgggtaactggcagtgaataccgtcagcttgagggattcacgcgccgcgactggtccagaatgccggtgaattatgtctggattggtgacggtcacggcatgaagctgaaatgcgcgcacccggttcacgggcggccattcgcaccggaagtgacctttgttatcgacggtggcacgcgctttgtggtgggctggagccttgacctggctgaaaatgttttcgccgtagccggtgccatacagcacggtattcgccatcatggcaaaccgtttctgtattactcggataatggctccggggaaaccgccgacgtcctggataaggagattgtggggatactgccacgactggggattaatcacccgacagggattgccggtaatccgcagggacggggcattatcgaacggcttaaccgcacattaccgatgcgcatagcccgtaaataccgcacctatttcgggaaaggagcagatcgcgagacgttacgtaaaaccaaccgcgatttacgctcggcattcagtgccctgcaacagggcaaacggctgaacgcccggcagcagtcagcgatgcgtgatttaccgtcctggtctgaactgattgatgccattcgtgacggtgttgagtggtacaacaaccggccgcacgatgaattacccatgaagccgaacggtaaacattacagcccggcggagttcagaaaaaaacgcctggcggaagaggacacggaaattgaatggctgtccgatgttgaactgcgggatatgttccggccgatggtggagcgccctgtaagacgctgtgaaatacgctggctgaataatatttactacgcgcccgagctgcgtgacgagcatggccgtaaggtacttatcagctatgacattcatgatgccgaacgaattaccgtgcgccgcccggatggcagcgtgatttgcgaggcggtatgggacggcaataaacgcgaagccttccctgtcagcgcggaatactacaaacagcagcagcgccttaaaggcatgcgtaaacgcgcagaggaaaaaatccgtgatgccgaggatgaggttgtcaacgtgctggagcacaagccgcaggagccctggctggaaaacatataccgccctgtgggtaatacggtgaccgttcagcaaccggtcgctgacgatgaacctgatgaagaatacgagcgtaatttccagcggggattgcagttgctcgaagcgaaattaaaagaaagtgatccgctggcctga

SEQ ID NO: 487843 - DNA, 933 bp, Shigella sonnei
atgaccgatattaacgatgtaatcaagaccattgatgaacttattgatggcggcgtactgacgcagtatgccatcgccagagaggcgggaatttccgacggcacattatcggctttccgtaagggaaaatataaaggcgataacgctgctgtggctgcttccctgcgctcctggtatgagaactggaataaacaaagcgcactgccggaaccgccgcagtttgtggaaactcagacagtccaggagctgcgcgcactgtttcaggcggttcgcctgatgggctgtattaacgttattgtgggcgtaccgggtgtgggtaaaacggccactgcccgtaattactgccaggagcaaccaaacacctggatgatcaccctgtcacccgcgcactccagcgtcacggagtgtctgctggagctggccgatgcgctggggattgattacacccgcgcgaacaaaggggcattatcccgcgccatccgccgtcgcctgatgggaacgcgtggactggtgattgtggatgaggcggatcatcttggtattgacggtctggagcaactccgggcaattcaggacgccacggggatcgggatggtgcttattggtaacccgcgcggattgtttaaaggtggacgccgcgcctttgatgatttatcgcgcctgttcagccgtcttgcccgtacaaaacaacttcgcaaggccaaaaaggcggatgtgctggccattgccatggcgtgggggatcagtggtgaggccgagctggccgtcatgcaggctatcgctgaaaagccgggagcgttacgcgttctgacacatacgcttaaccaggcgtggctcaccgccagcggtgaaggcgcggcgctgacagaaaaacatattaatgcggcctttaaagaggtttataccaaccctgaattactctcacaggtgtga

SEQ ID NO: 487844 - DNA, 222 bp, Shigella sonnei; identical to SEQ ID NO: 27615

SEQ ID NO: 487845 - DNA, 255 bp, Shigella sonnei
atgaatatgcaatcctgcggtaacaaaatgaatttattcgactccctgaacagcgcgcgccgtctgaccgaacttgccggtgcggtactggaacgcagtaagcgctatccgcaacgttttgcactgaaaaccacgccgccggtaggcaacgtgcagggaaccggtgaaattgaaatcaccatacagaccaacggcctgcgccgccgtgtgaaggccacccgcatcagcggctgcacggtttactgggaggtgtga

SEQ ID NO: 487846 - DNA, 282 bp, Shigella sonnei
gtgaaaaaaaatctcattgcatgggcgtggtcgagtggtcttattgagtttggttacgtcctgccggaaggtgcattgccgatagttgccggaaagcctgccacggtacggcatgtgattgaggttatggcgcgtcatggacgtgatgaacaggagcagttactggttccggggataccggaagcggtgacggaggaagaagcctttaatgccatgattcggttctgccgtgaggtcagacgccgggtcagttatccaaacagaacgaggaccagaggatga

SEQ ID NO: 487847 - DNA, 273 bp, Shigella sonnei
atgagtaaagtcgtacacattattttcgaatataaggagcacgttatccataaaaacgctgatggaacagtgcgcatgggggtaagtctggacatacgttcaaccgggataaagcagaaaggtgatggacccgccatgatttttggggtggttatgctcgcggaaagcagaaacttcgcagagcttgtggcaatgaaagccagtgcattcatgaaagacaggggcatggcttccggggttattaacggtaatgaatttaatcagcaggggtaa

SEQ ID NO: 487848 - DNA, 294 bp, Shigella sonnei
atgagcaaagtacgcgttatttttgaatttaaccacgtaatgcatgaagtaaagccagccggtaatgatagtcaggaaatcacggagggggttactgccactgtaaaaatcgaacgtgatacggagaacagaccgacaggcccatgtgatgtttatgcgcaaattcttaaatatcacagccccacaattattcagtttctgacagatgaacttcagggttccatgcaggctctgggggtgaaaagcagcattgagcgccgctccttgcagaacgcaccagatacattgcaataa

SEQ ID NO: 487849 - DNA, 531 bp, Shigella sonnei
atggcaaaacgcgttacaaaattaaaggctgtagccgaggccgcaccgcagacccgcgaagaagtcagccgcgatatccgcaccctgggcgatattcagcgagaggcgctgcgcctggaaacggcgatgaatgatgaagtggcagaaatcaccgcccgttatacgccgcagattgaaaatcttaaaaagcaaatcaaagtgctttttaaagggattcaggactggtgtaaaaccaaccgtgatgagctgacgaacggcggcaaaaccaaaactgccaatctgaccaccggaacggtgtcatggcggctgggaacgccatcatgcagcgtcagccgtgatgtggaaggtgtgattgacacgctgcgccgtatggggcttgagcgattcatccgcacgaaagaggaagtgaacaaggaagccgtcctggcggagccggatgcggtgaaaggcattgccggtataaaggtgaataaaggcgctgaaagtttttatgtcgagccttttgaacaggatgccggactgaataaataa

SEQ ID NO: 487850 - DNA, 543 bp, Shigella sonnei
atggcatatttttatttcaaattagaccgtgtgcagacaaataaatatttcaccaaatatcaacaggctgttttaccgctacgcaacagtattcttcggacattactgaaaaatacaggcgctgccggattgcgcttaaagccgttcgccatggacagaatcagtgagttttattttgccggtgctctgcctgcgggctggcgtaagcgcgatgatgtggcttttatcggtggcggacagtgctttatagccagacctgatgagtcatgccctgaaggaccggcgattgccgcaatgattgaagccgctgaacgcgagttaagaaagcgtcctgatttccttgtctggctctgtgaaaagctgggggtaatgagaatcccctccatgtttaacacggactcctggtggaccccttcgttctcccgtgatgccctgtgcgtggtgtttaaagtgggcgcttatggcagggaaataaacggatgtattcctgaagaatgccaggaaattaaacattctgaatatgtggcgctgacggaggaataa

SEQ ID NO: 487851 - DNA, 534 bp, Shigella sonnei
atgattgatgcaaaagtgcttgaaggggttaaaaactggctgagtatttacgggcgtctgacctgcggcgtactggctgaaaaaatgaatatgccgccatcctccatggtttattttctgcgtgatgcggttgatgccggggtgctgacggaatgtaacggtttttatgatattccgcgtccccgcccggtgcagccgattcgtcgcaaatgcagacaggaatctgcggctgatgatgttcagtggtgcagcttcagaaaatccctgccatggattgaggggcatgatattccgtcgatggcgtgggaatttgctcagggcgttctgacctgtgaaaccgtttatgtggtggctgaagttgatgagcaggccatgaaagaaggcgtgccccagtttgtgatggcgtatatcgacattcgcctgggtgtcatcatctgcggtttaagcggctggaatatcaccgcgcgtgttctgcgctacctgattgttgaccggacagcagcgcctgccgggatatctgcggaggtggcgtaa

SEQ ID NO: 487852 - DNA, 516 bp, Shigella sonnei
atgttctttaaaacatcaaacccttccgcgctggctgcgtggcaaaaataccagcaggactgccagacggtaaaagatgaggcgaaacgccttgaggccgtgctgaatgttgcgtgccggtcggtatttgaattcagtatcagtggtttttgttttaagggactgcgttttacggaggacaaatatccttttcatcgcgacttatggcgaaaaccgactgcgtcgaatggctggagctgcacaccgcgcacatcacgtatccctaaagccctgcgtgttgcctctgatgaactgaacagtctgtggcgtgaatattcgcccgtcacgtatgccagaaccgatgccctgttgttctggctgggtattgacttctcagcaatattgtatggtcccgtgaactggttctgcgttgacaatgtgatttatcttcagtgcgaagatgattccgcaaaacggaaaatgaccgaaattctgtctgatgagttttatgctgccgaaaagcgagtcagggggtga

SEQ ID NO: 487853 - DNA, 552 bp, Shigella sonnei
atgatgattttacaacacatggggcgaaaaggtcgtacacccgctcatgtccgcgcgtggacacctgaagaagatgcgctgctgattgcgctttattcatccaccccggttaaggatattgctgccagaataaaaagaactgtctgggctgtatataaccggactggtgtattgcgcagttcatacccggagttactgaaatataaacacccaagatttacacctgatgaagataagtttattcgaaaaaatgccagaacaatgacctgccagcaaatgggagaatatctcggacgtaataaagattctgtcagatgtcgggcaggaatgattggtgctggattaacaaagtgcggagagttacgccccggcacgcgcatatctgatgatgatgtacgtcttatacgtgcgctgcgtgattccgattacccacgccgtctgtcattccgggaaattggcgaaaagtttggaatatctgaacattctgctcacgcagtttattaccgtcgccggactgccgaggacgctgtattacgggagttaacgccatga

SEQ ID NO: 487854 - DNA, 330 bp, Shigella sonnei
atgataacgaccttatttgttgaatcagatgaacctcttgtgtgtgccgccggaatgccgctctgtggcggaacgctgaccggtgtttatttcggggatttacgcggttatccctggcattcactgaatgatgctttcccacctgatatggaggctgtcgtgctgattgttcagtatggtcaccgtcaggagctgcgcatcggccatatggggtatgaaggcttttttgttgatgaagaaaccggagcctgccttgaagatgaagacggacaggtgacgcactggtgtcatatttcggctttaccggaattacgggaggtgaatgcgtga

SEQ ID NO: 487855 - DNA, 351 bp, Shigella sonnei
gtgagaagttatattgataatgaaaagctggagacaataagcgactgtcttagcttgctggcaaaaatcaaagaaactattgaagagattaaatttcagcttgaatacgcaccatgtggcgatgatgcatggcgtaatgctgccagaaaagcactggctgtctttcagaaacaacgccgggctgttgaataccgccttgctgtattgcgccaggaggaaaaggaaagaaatataagacgtcatgaacgcgttaatgatttccttgttcgtgaattaaaagagcgcgtgccggagtcggtattttttgaatgtgaggctatagcccgtagcaaagcactggaaacagattaa

SEQ ID NO: 487856 - DNA, 309 bp, Shigella sonnei
atgagtattgaattaagatcgtcttatgaatatcgcaaaatccttatcgccggaggcatgaaaccggaagatgcagagaaattcgtttcttttatggataaagaatgtgacaagcgggatatgccagaaattattatggatgacatgattctggattcagccgtggcgttaagttcgttatggattgtgcatactcttgcggaaatagctaaaagaagtgacaagcaggcggctgtcgccgccctgcgattactggctgaattaagttgttcagtcaatcccaatacgttctttgacgaacctggttaa

SEQ ID NO: 487857 - DNA, 411 bp, Shigella sonnei
atgaaaatagattacgatgaagtattaagtattctcacaacttttcaggatgctgaaacacctttccttacactacaggatctgggcatggctgaggcagaaggagaggaaaaggataaaaaagtttttcatcttatgcttctcgctgataatggctcaattgttaatggtgatatgcagtcagaaacacccaaatatattggtttctttttccattctctgggcgttggtttcagaaacacgcccattatgcttacccagcaggggcatgatttagctaacgccctgagaaaaaaaccaatccttgaaagaatcaaaaaggagtttacagacgcaccatttgatctaattaaagaagttaccaaatcaatgttaaccaggttcgtcaaagaacgtattgggattgactga

SEQ ID NO: 487858 - DNA, 513 bp, Shigella sonnei
atgaatcgcgcttccctgattaccttaatacatgtcgcaaaacgcgatctacagcttgaccatgagacctacacatccgtactactggcagccaccggcaaacccagttgccgggatatgtcaccggatgagttatcccgcgtgctggatgttttcaaaaaacgcggttttaaagtgcgtcagaagccggttaaccgggccttaaaaccggggacggtgaccgccaaaattcgcgccatctggaaagtgatgcaccggcagggctttatcgctgatggcggggaaaacgccattaaccgctgggtgaaatcgcagacggccgcgcagaacggcggtgaaggagtggctaactggcagtggctggagcaacaccccgcactggcctctgatgtgctggagcgtctcaaacgctggcaccgccgcaaaatgctggatgtgctggggatgtcagcgcgtacagtgataagttatgagcgcgtttgcaggctgtatgaaaaatcattcccccgttaa

SEQ ID NO: 487859 - DNA, 423 bp, Shigella sonnei
atggctgaaacacagatgagcatgtttggtgacagcgaacagctgcacgcgctgattgaccgtctggatgatattcctgatgatgagctgaaaaagaactggcccggcacgctgcgggacctggttgatgtgatcagtgctgaactgcaccgtcaggggattgaacctgctcaggcgggaatgcttgcccgtaaagttgcggccgcacaggccgggtacatgggcgggcgtggttattatctcccggtcggtgaatcccttttcaccgaactgcgcaataatgagattttttcccgctggagccagggcgaaaaaattgaaaccctgcgccgccactaccagatgtcagagacgcagatttactccgttatccgtaaccagcgccgcctgcatcaggaacgcacgcagccccggcttttctga

SEQ ID NO: 487860 - DNA, 501 bp, Shigella sonnei
atgccaaaactccccgcacccctgcgtaaaaagctgattgcccttgttctggccggagtcgggacgttcaccattgccacgcactacaccggctactgggaagggaaagaaaacaccacgtacattgatcccaccggcacccccaccatctgttacggccataccggcccggatgtgaaaccggggatgacaaaaactgatgaagagtgtctggagctgctggaaaaggacatgaaatgggcctttgcggctatcgatcgtcatgttcaggtgccgcttacccgtggtcagacggtggcgttggcctcctggattttctgggccggtgaaacgaactttcgcaactccacgctcctgcgccttatcaatgccgggcagatgcccgcgtcctgtaagcagtatatccgctggatttattcaaagggggtgaaactccccggtcttgaggcccgccgttcggcggatgaatggttatgtcgttacgacttgccgaaagtctga

SEQ ID NO: 487861 - DNA, 351 bp, Shigella sonnei
atggcggcgctgggggtgatgagtgtgctggctgccgtggtatggggaatgcaccagaagacgcagcgccttgaggacaataatcatgtgcttgtgcgtgaacgggacgaagcccgtctggtgctggcaaaccagcaacgcaccctgcaactcatttcacaaatcagtaaggcggccacgaatgaaaaacagcagaacatgcagcacagcgaggaacagcagagcattgtccgccggtcgctggcaacggtgcctgcggccgctgttcctgtgcctgatgatgtggctgaccgggtgcggcgggccgtctgtgaaatacgtgccggtgaagccggtgccgatccccgctga

SEQ ID NO: 487862 - DNA, 294 bp, Shigella sonnei
atgaatttactgatatggccggaacgtctgctgttccggcaggaaagacgaagtaaggaaaaaggtatggatgattcagattgtgctcaggcagtcatggagcgggcaacagaacgcgccctttgtgaccggctgacacgtaagtgccgggtggaggatactccgggcaggcgtgtatgcgcagactgcgggggtgacattccggccgcccgtctggttgccgtgccggatgccatccgttgtgtgaactgccagagcatcatggaggccggtcatgtggatcagcatcgttaa

SEQ ID NO: 487863 - DNA, 312 bp, Shigella sonnei
atgtggatcagcatcgttaaagattatgtcgtgccgatcctgtcggcaacggccacggccggggggatctttatggcgctgatgcgcaaaacctttgtcccccgcgaggcctttgaaaaactctccgaccgggttgagcgggtggagagccggatttccggcctgcccacgcagcaggaggtgaacagactcaatatcgaaatcaccaccctgcgcggtgagcttaaggccaccaatgccaccctgaaatccgtctcccaccagaacgaactgctgctggagcaggctgtaaggaaaaaacacaatgagtga

SEQ ID NO: 487864 - DNA, 291 bp, Shigella sonnei
atgagtgatttcattactgaagatcagcgtcttgtcattctgcggtcgctggcggattacaacggcgaactgggcgaatccgtgcttcaggactgcctggatgattacggccaccgcgtgtcccgcgacaccgtgcatacccatattgcctggcttgccgagcagggactggtgcgtaagcgcacgcttgttaacggttatttcatcgttgaactgaccggccggggtcaggatgtggcggaaggccgcgccaccgttccgggtgtgaagaaaccacgcgcaagggggtaa

SEQ ID NO: 487865 - DNA, 582 bp, Shigella sonnei
atggataagccaacgcgtggccgtgtacgcaaggtggatttgctccccgacagcatccgtaagccgctgctggaaatgctgcgtgaaaaacgcctgacgcaggtccagatccgcgaggaaatcaaccgcctgatccgtgagtcgggtctgccggaagagcagcagctttcaccggcggccatcagccgggaggcctcccgtaatgagctgattgcccgtaacctgcgtgatttacgcgagcagacaaaagccatgatggccgaactgggggacaagccgaccggtgaaaccacggcactgattctggaaatgtcccgcgccctgatgtaccgccgtctgcgtgctgccaccgaatccctgaacagcgacagcgatgtggatatgcgccttattaaggacatcctcctgtcggcacagcgtgcggaaagtgccgccgagcgcagcattaagcgtgaaaaagaaatccgggccgcatttgctgaagagatggcgaacgccgtcaccgacgagttgcgcggcgtggatggcatgagcgagcagatagaattccgtatcaggcagatgctgcttggtaaggcgtag

SEQ ID NO: 487866 - DNA, 249 bp, Shigella sonnei
gtggtaacagataaccgctcactgatgagtagtgctcatcagaaggcattcagtcttgcaacacagttacctcctgaaaccataaaagcgtgtcgtgagttgactgaactcagcattgccggggaaatatccctggaacaactgcattcgctgctggcagaggctgtcactgatgagttgagtggcgtggacgtgatgactgaagagcttgagttccgaatcaaaagcattctgacaggtaaagcctga

SEQ ID NO: 487867 - DNA, 1665 bp, Shigella sonnei
atgaacaaagccaaagaaacgtctccttcactgatacaaatgacgcctccccgcaaaattgatctgtccggtgaaaaagccctgctgggcgtggatgtgccggacagacttgatttgcccggtgatatgccggtgtttctggattatcaggcccgctggtttgaggatgaaagtcaggtctgcattgcggaaaaatcccgccgcaccggtcttacctgggcggaagccgggcgtaacgtcattactgctgcaaaaccgaagcgtcgtggtggccgcaatgtgttttatgtgggatcaaagcaggagatggcgctggaatatatttctgcctgcgccctgttctcccgcgcctttaaccagctggcggatgctgatgtgtatgagcagaccttctgggatcgggataaaaaagaagaaattctgacctacatgatccgctttccgaacagtggattcaaaattcaggcactgtcttcccgtccgtcaaacctgcgcggccttcagggggatgtggtgattgatgaagccgcgttccacgagtcactggatgagcttctcaaggcggcaatggcgctcactatgtggggcgcgcgcgtgcgtattatctccacgcataacggcgtcgataatctgtttaatcagtacattcaggaagcccgcgaggggcgcaaggattacagcgtccaccgcataaccctggatgatgccattgcggacgggctgtaccgtcgtatctgttacgtcaccgatcaggaatggtcaccggaaagcgagcagaaatggcgtgatgatctctacaaaaacgccccgacccgtgaggatgccgacgaggaatacggctgtatcccgaaaaaatccggcggtgcctatattcctcacgcgcttattgaaatggcgatgatccgcgacatcccgattctgacgtttgaagccccggacaacttcatcagccgtgccgcatggctgcgtgaatcggaagttttaacctggtgtgaagaacatttaaaaccgcttttagagaaattaaatccccgttcccgcttcagcttcggggaagactttgcccgcaccggtgacctgtcctgctttgtgctgctggaaatcaccgaatccctggcaaagcgcgaggtgtttcgcgtggagctgcgcaacctgccgtatgcccagcaggaacaggtgatgatgtacatcctgacccgcgttccggcgctggtcggtgcggcgttcgacgccaccggtaacggcggctatctggcagaagccgcactgctggcctttggcccggacatcatcgactgcgtgatgttgtcgccgaagtggtacggcgagtggatgccaaaactgaaagccgagtttgaagatcagaatatcctcgtcgcccgccatcagaccacgcttgatgatttgcgccatgtgaaggtggtgaatggtatcccgcaaatcgacaaggggcgcacgaaggaccagaacgcaacggctgcgaacgcccgccgccatggtgattttgccgtggcactctgtatggcaaaccgggcgtcatacatggagggattcatcctggatgaatcagcctgtcaggcgctgccggagcggtcgcgggcaatggagggcggttatcgtgatgacgatgaggcatatcatgaatttgaacgggggtgctggtag

SEQ ID NO: 487868 - DNA, 1590 bp, Shigella sonnei
gtgggacgcataattgatcttgacggaaaacctctctcctttgacccggagatgcagagtaccgcgctggatattccgcagattgccagccgttatgttgagcatcccgcctcgggtatcaccccgaaccgggcggcgcagtgccttcggggggctgaacgtggcgacctgattgcccagtccgatctggcggctgacattgaagaaaaggacacccacctttttgcggagctgggcaagcgacgtcttgccattcagggggtgccatggagtattgagccgccaccgaacgccagcgcgaatgagaaaaaggacgcggaaatgctcgacgaatatctgcattccgcagactggtttgatgccatgctgtttgacgccacggatgccatcctgaagggctattcctgcatggaaattgagcacgggatgctcggtaaaatgcacatcatccgcgccatccgctggcgtgacagcgggcatttctgccttaacccggatgatttgagcgaactgcggctgcgtgacggcagccatgccggggtggcgtttcagccttttggctggatagtgcatcagtcacgttcacggaccggttacggtggcgcaacggggcttgtcaggacgcttatctggccgttcattttcaaaaactattccgtgcgcgatctggccgaatttctggaggtgtacggactgccgatgaaggtcgggaaatacccgtccggggcaacaccggagcagaaaagcgccctgatgcgggcggtgatggatatcgggcgacgtacaggcgggatcatcccggccgggatgtcgctggaatttcaggcggcagcaaacggtcaggccgatccatttgaaaccatgatttcgtggggggagcgttccatctccaaagcaatactcggcggcacgctgaccacggaagccggagacaaaggcgcgcgctcgctgggtgaggtgcataacgaggtgcgccgggaaatcagggattctgatttacggcagctggctgcaaccctgaaccgcgatctggtgtatccgctgtacgccctgaacaccacgcacactattgatatccgccgtctgccacgtatctgcttccagaccaaagaaccaggtgatatcaccaaaatcaccagtgcggtgatgcagctcagtacggggatggatatttctgatccctggatacgggagcagaccggtattccgcagcccacgcccggtgaagccatattccgtgtccgtcagagtggcaatgaaccggctcagaccgacagggaaacaccaccggaaaaacaggaaaaaacagagcagacggcgctgtcagccagactgccggaagcgaaaagcacgccgcgtgatgaactggatgatatgggggacgcggtgcctgcccgccgcttacaggaggccatcgacccggtactggagccggtcattgatgccatcagaacgcgggggctggcggatgcgctggcagacctgcctgccctttatcgtgaaatggatgattcccgcctgatgacgctgctcagtgatgccatgttcgctgcggaaatgaaggggatgctggatgacacaggggattga

SEQ ID NO: 487869 - DNA, 1332 bp, Shigella sonnei
atgacacaggggattgatttaggttatgccgccacgcttccctcaaaagaggcggtggcatacttccgcgccaaaggggagcatatcagctggaactggttcgaaacagacgcggatgttcatgcccgttcattcacggcggcaaaagtggcacgcctggacgtactgaccacactacaggcggaagtgcagcgtgctgttgatgagggcatttcacagaaagcatttatccgcacgctgacaccccgcctgcaaaagctgggatggtggggaaagcagattgtggtggacagtgcagggaacgcggaagaagtgcagcttggcagcccccgccgtctggcgctgatttacaacgtgaacacccgtgtggcttacaatgccgggcgttacacgcagatgatgaacaacacggacacgcatccgttctggcagtatgtggcggtgatggacagccgcacccgcccggcacattccgcccttaacgggctggtattccgctatgatgatccgttctggaatactcactacccgcccaatggctggaactgtcgctgccgtgtgcggccattgtctcaggcccgtctggatgcaatggggttatccgtttcatccggtgaggatcatctctccacccgcaatgttgaggctggcgtggataaacagaccggagaagtcagagaaatgccggtgaccacatattcagatggcaccagaaccatgacaccggatgtgggctggtcatataaccccggctcggcagcgttcggcacagaccaggcgctgatccgcaaactgatcgaggtgaaaagcccggcgttacgggaaatggtggttcaggagatgaacaacagcccggagcggcagctggcgttccgcatctgggcaaaaaacatcatgcagacccggcgaggtggtaacgatatccgcacgctgggctttatgactgaaagcattgcgcaggcagtggaaagccggacgggaacgccaccggcccgcctgctggcgatgagcggtaaaaatgtgctccatgcagacagtgtgaaacatcagaatgacggcatcgccctgatgccagaggacttcgggcgcttaccggcaatgctggcaaagccaaaagcggtgctgtgggacaaacggcacaacaatctgatgtatatcgtggaaaataaggatggcagtgtgcagattgccgttaatgcaccgtacagtctgaaacgtcagcccgacaaactggatgtgattgtgaatgcttaccgggttatcaatatggataagctgaaatcggatatccggggcggaatgcttgaggtgctggaaggacaaattgattaa

SEQ ID NO: 487870 - DNA, 474 bp, Shigella sonnei
atgtcatccattgatgcggcggtcgtggtggacgttgcgcgtctccagcgggtctttgcccggcttcagtttgtgggaagcggaaaagacctggcacgcagtgtggcggagagtcttctgtcatcgtcagaaatggcatttgagcaggaaaaagagccggatggtgaacgctggcatgactggtcagatccttaccgtgagtggcgtacccgtaagggatacacgcccggcaaaatcctgacgctgaacggcgatctggcccgccgcctgaccacggattatggcgatacctgggcgctgattggatcaaatgaaccttatgcagccattcatcagtgggggggcctgcctggtatgccaccgggaccggcggccattggcgcacgtccgtatatgggctttgatcaggtggcagaacaggagatcatggacgaaatcagaaaacgctttaaaaaggccacagaaacgccgtaa

SEQ ID NO: 487871 - DNA, 1125 bp, Shigella sonnei
atgaagacgaaaaacacgcccaaacttgcttatgccattctgaatgccatcagcctgtccgcagacggggacggtgactggtgtcagatcatgccagccggtcgggtaaaggcccgtgacggtcgcccggaaaaaccggaggaaggctggctgattaaccatgcggccgttgagcgtatggtatccggggtcgtggcactcaatcagccggtgaagattgactataaccaccagtcactgattgaggggcatgcggcaccggctgccggttttgtcatggcctcgccggagaacttccgtttcagtgaagagcggggttttgaagtgcgtccgaagtggaaccctccggccattgaacacctgcgcaataacgaatttccctggttttccccggtgattggttatgacgaaatcaccggtgaacctgttgagcttcggatgctggctattaccggtgaccccggtctgactggcatgaatcctgtcgccgcactgtcggcggatgacctttataacgccttaaaccctcctttaaaggacacctccatgaatgagcaattacgccagttgctgacggcgctcggtctgaccgtggccgacggtgacgaatttacaccggaactgggcacggcggcgctgtctgcccttaccgggatcaaaacccgtgcggatgcgcacgacaccctgaaaacgcaggttgccagcctgtcggcagagctggaaaccgcaaaaggcacaccaactggcggcactattgatctgacgaaatacgtgcccgttgagacgtataacgccctgcgtaccgaatatgtcgcgctgtcggcacagcacggcagcaccacgctggagcagttgctggataaggctgagtccgaaggacgcattttcaaaagcgaacgcggatacatggaaggactcggacaacagattggcgttacagcactttctgcacagcttgacgcccgccagccggttgcggctctgaccactcttcagaccgacaccgtgaccgtgccggataaaaagaccgccactgctgtgctgtcggctgaagatatcgccgccgcccatctgctgggtaaaaccgaagccgagttcctgaaaatgaaagaggaaatgcaataa

SEQ ID NO: 487872 - DNA, 948 bp, Shigella sonnei
atgcctaccccgattacaccggcgatgatcaccgccctgatgacgggctaccgttctgattttcaggccgggatgtccatggctccgtcgcagtaccagaaaattgcgatgaccgtaccgtccacgtcgaaatccaacacctacggctggcttgggcagttcccgcagttccgtgagtggatcggctcccgcgtcatcgagaagatgaaagcctatggctacgccatcgtgaacaaaaccttcgaaggcaccgtcgccattagccgcgatgacttcgaagacgacaatcttggcatctactccccattgttccaggagatggggcgcgctgcggcggcacaaccggatgaactggtctttgctgcactgcgtgacgggatcagtgcggcctgctatgacggccagaacttctttgataccgaacacccggtttaccccaaagtggatggctccggggatgcacagatggtcagcaatatgtttgtggcaaaaaccggctctgtcggtgcacaggcggattacagtggcccggcctggtatctgctcgactgctcccgcgcggtaaaaccgctgatttaccaggatcgccgcaaggccgaactggttgcccagacaaaagtcgatgaaggccgtgcgtttactgataacgagtttgtgttcggtgcttccgcccgtcgcaatgtgggctacggcttctggcagatggcctacatgatgcagtcaccgctgacgctggatgcgctgtggcacggctggtcagccatgcgtgactttaaggctgacggtggccgcaaactcggcatcaaacccacccatattgttgtccccacttcgctggaaaaacaggcggtgcagctgctggagcgcgagctgttcgcggacggtaacgccacagtctctaacgagatgaagggcaagctggagctggttgtcgcggattatctgtaa

SEQ ID NO: 487873 - DNA, 360 bp, Shigella sonnei
atgaatgaacatcacactgtggcagcaacagatgattcaggccttcaggtcagtggtgacagtcctgtcacggtactggcagaagtgcgttgcagtcgtacgcattttcgtcgtgcggggttcctgttcatgcggggacgccagcaggttgacgtcaccccggagcagcttgcccgactggaagcggagccatgcctcactgtacgaatactacagacgcctggtgatgatgcgggagccgtggcgggtgtggttcatgcagagaccggtgcagatttagccgaagccgaaaccgtacaggatgctccccggaaaaagaccggcaataacgccagacaggcaaaaaaggcgcgcgcatga

SEQ ID NO: 487874 - DNA, 420 bp, Shigella sonnei
atgaattacgccaccgaaaccgatatgcgggcacgttaccgcgaggatttgctcaggccattactggccgtgccccgttcggatgaaccggacacgcgcaagctgaaccgggcactgacggacgcgtctgcccttatcgacagctatctgtcttcccgttacacgctgccgctggcggtggttccggcggttcttgttcagcactgctgcacgattgccttttattacctgtgcgatcagcgggcatccgatcaggcgcgtgaccgttaccgtgaggcgctggcctggctgaaagacgtcatgaacggcaatgtgccggtcggcgtggataccgacggtgcggcccctgaatccggggatttaccgcaggtgcagtctgatgcggcggtgttcgggcgcaaccagaagggctttatatga

SEQ ID NO: 487875 - DNA, 564 bp, Shigella sonnei
atgattacggaaaccgaacaggcatatatcgcccgcatccgtgagtatttcgggaatgaactggtgtctgttgacacccatcccggcgactggagcgacagcgtgctgcgcaccatgctgattaacgccccggctatctatgttgcctggctgggtgccggtgaagggcgtacccgtgggcgtctggtcagtcactgggtgttctacgtcatcggcgacatgctcaatggccgtgaggtcagccgtccgggactttatcagattgtggcccgcctgattgccgtactgaacggcttcagaaccgaaaaaacctcaccgctttactttgaaaaggcggttaacggttacaccgaaacgcaggccgacagcggagccgtgatgtacgccctttatttctcatgcgaggaaatgatcgacccgctgacggatatcagctcgctggatgatttcctgcgccattacgaaaccttcaccgaaccggaaggcacaccggaatttaaggcgcacatcagcctgccaggtgcaaccgccgccggtgaaaaagccggaccgtcagaggaataa

SEQ ID NO: 487876 - DNA, 288 bp, Shigella sonnei
atgacaaccatttttatcaaacccgcgccgggatgcctgatccgcgatccggacaccatgaaaccgctggcgcaggagggagaggaaaaacccttcaccccgttctggtgccgccgtcttaatgacggggacgtcattgtggtggaaaaagcggctgaagcagcaccggcagcagcgtctgcaacgactgatgccgccggaaaacccgcgggagcggcagcagaaaaacctgcgactgaaaaacccgcgactgaaaaacccgcagcatcagacaaggggacgtcctga

SEQ ID NO: 487877 - DNA, 1503 bp, Shigella sonnei
atgattaactttgattatatcggcgataacaatcgcattccgctggtacagattgaaatcaataattcaatggccgtgaccggcactccaccacagcgtcaggcggtactgttgtttggtcaggctgcaatgaaagacaccaccattcaggggcgcggtcagcttgatgtaccagtacgtattacccgagcttcacaagcaagagaactctgggggcgaggttccatgattgcactgatggtagaggaatttatcgccattaaccctgacacagagttatatgccattgcacagggggctggaacaggtcagtccagggcatgcgtgatgaatatcattggaacagcattggcagacggggtgttaagtgtttacatcggcggtcgccgttacctcctgcccgtcagtaaggggaaaaaaggtaaagagcttgtggaagagctggctaaggtcattaacgctgacactgatgcgccattcactgctatcgcagctgaagtcagtggtgataatgctgaaggacttaaagggagcatgggggttaacgcccgctttatcggtgaatgctcagctcatgatttacgggtgaactattatgacggtgaaactacaccggccggtcttacgctggagctcgtcgcgccaacacagaaggcaacaaaccccgatatcacccgtagcgtctcagggatggggaatcgtcagtacaactacatcgtcatgccctataaggatgcggcaaatctcaaaattctggcggatgaactgctgaaacgctggggaccggtaaaaatgtcggacggtatggtctggatggcgcataccggcaccttcggtacggcaaccagttttggtgaatcccgtaatgacttcctgtttacctgcacttctattcctaaagcaccagagccggattatgtctgggcggcctccatttgtgcggtctgtgcgccctccctgtcaacggatccggcccgaccattacagacactggcgctgcctgcccgtatggcacctgaagcaccggctcgtctgacgcgggaagagcgaaacagcctgctttataccggcatgtccacggtgaccgttgcggccgctgatgtggtgcagattgaacgtcaggtgacgatgtaccgtcagaatgcatacggcgaaagcgatcccagctatctggatgtagaaaccatctacaccctgtcatatctgcgttattccctgcgcacctttatcacgcagcgtttcccgcgccacaaactggccgataacggtactcccgtccggcccggtcagaatatcgtgacgccggagattatgacgctccagctgattgcactgggggaagaatgggtggaactcgggctggtcgaaaatctggacacctttaaaaagaatctgctcgtggagcgcaacacaaaagaccgtaaccgtctggatgtgatgtgtacaccggatctggttaaccagttccgcttcatggccgcgcagatccgtttcattttgtga

SEQ ID NO: 487878 - DNA, 366 bp, Shigella sonnei
atgagcggaaaacagcatcagggcacggccaccatccgtgtgaacggacaggagtacgccacccttgagggagccacgttctccccgtccggctttgagcgtgaagtggtgaaaggcgcgaaagtctatggctatcgtgagaaaccccgtgaggcgacgctggactgtaaatttccggctggcggagaaggttcaccggctgccgatgaaatcaacacctggactgcggtcacgattgagttcgtggccgataccggtgaagtccatatgatgacgaaggcctggagcagtgaaccggcctcgcttgacggtggcggtgatatctccgcgaagttcgccagcgccaccagtacccgtgtccagtaa

SEQ ID NO: 487879 - DNA, 480 bp, Shigella sonnei
atgaccacacgtaagaaaaaaacggcggtttctgacgaggccgtgatggaggctatccgggatgtacttgaagacggcgatccccgcaccgccgggctggctgaacagctggcgaacggctatgtggatctgctcgacggtctgccgttcggggaatcccgtgaataccgcgtcaccttccgcgaactgacggcgaaagacagcattgacgcggaaaccgaggccgagcgtcttatggaaacccgaaatggcggcccggttctgatagcctcgccggcactgcgcggcattgcactgctgcgccgtcagattgccgctgttggccagattgaggggccattgtctccgcgtcagatcggacagctcagcgagcgcgatctctcccgtctgatggcggcggtaagcctgcttgattccgcgatggcaggaaagctggtcgctgaacgggggcgaccagatgcagtgccgggatcagattga

SEQ ID NO: 487880 - DNA, 2058 bp, Shigella sonnei
atggcaaaaaacctgaaagcctccctgattgtcgatttactcggcaatatttccgccaaatcccgccagtggtcacaggagctgggggcgttctcccgttccggcaggacaggcctgggtggtcttggaaatgcagcccgccgggccggtcaggaaacagaacttgtcggctcccgtatgcagcgaacgcttgccggtgttcgtggcagcatccgcacggtaacgtcagattttgaccgcctgcagggcagcattaccggcaccatcgggcggataagcaacctttacgggatgctggcgggaggggctgcggtctacggttttaataaagcctttatccgcccggccgcagagatggagaactatattctgcgtctcaacgccattaatcatggcgatacggcaaaaacggaagcagtgaaagcctgggcagtacagaacgccaaagacaccacctgggggctggcgggggttatgcaggaatacgcctccagtcgcgggtttggcatgagtgacagggaagcccgtcgctttattaccatgcttcaggatcagggcggctatcacggctggtcactgtcagatgcacagggtgcgtccctgcaactcaaacagatgtttgcccgccagagtatccaggcagcggacgccaatattctgaccggatacgggattaacgtttaccagttactggccgataagctgggcgtaaaccagaagatcatccgtgagaaaggcgaaaaaggaaaactggggccggacagcattcgcctgttatttcaggtgatggccgaacaggcaaaaggtgcccagaaaaacgccatgaattcctggacgggaatgacgtccatgatgggcgatgtctgggacggatttgcccgcgaggtgatggcaaagggaccgtttgatagcctgaaaaagagcctgaaaggcttcctggattatgccgatgcggcacagaaaagcggcttacaggataagctggccacacagacggccttagctctgaatcagggatttgagtatgccagagacgctgcgaccggcttttaccgggtcattcagaaagtcagggaaacgcttcaggcactgcgcgacgccggttatggcgatgcgctggatcgtattggtcagggtgcgcagaccgccgcaaagtacctgatgtatatgtatctcgcctcccgtgcgctgaaggtgctcaggtttgcggggacgggggcattacgtctcggcgcaacccccttacgctatggcatggcgatgacctccgtgctgacgtcgcccttccgcaaaccgcagaccactgtaccgggaacgcagcccggacgcgctggccggttcctgaatttccttaccggggtaaatccggctgccgttcagcccgtgctggtcaccaactggcctgcgggtggcctggcctcaggtggcggggatgtggtggtcagcggtgacggcaaaaccgtgcgcggccgtaaaaaacgcggccccggacgtggacggggtgtcacgaccgtcgtgactgccggtgagcaactggcggagagtgccggtaaacagggcttcttcggtcgtatgatgagccgtgccggtggtctgctaacggcggccggaaaccgcatggggctggggcgttttgccgggctgttccgtggtgccggtcggctgggtggtggtgccctgtgggccggtgccatggcggctcctgtactgctggacagcagcgccagtgcagccgataaagccggtgccgtgggttctcttgccggaagtatcgccggtggcgcgctgggggcggctgccggtccggtcggggttgccattggttccacggtgggcagctatctcggtgattatctggggggctggctgacgcaggcctggcagaaactgcgtggcagcagtgacgaaaacggcggacaggccaccgcgaaaaccgccgcacgggtggagcttgtggcccctgaaggctggcgggcgcgcagtattgatgtggatgataccgcacagcatggcctggatgtgaacgtctggaacggagggaactatggcctctactga

SEQ ID NO: 487881 - DNA, 1359 bp, Shigella sonnei
atggcctctactgacacgccggggcgtggctcctttcgtggcgtaccgttcctggtttatcaggagcagcgggaacggggcggacgtaacattgtgcgccgtgaatacccactgcgtgaaagcggcggtgcggatgatctggggccaaaactcccggagttcacattcacggttctagtgaccggagacgatcttcagacacagcgaagccgcctgcgtgatgcgctgcgtgcacccggtgccggtgaactgatgcacccggattacggcacgttaaacgtgctgataaacagctttgaaagccgttataacgccagcgagcagggaacggttgagttcacgatcaacgtgatccccgccagtgacgataccgccccttcggtggcagaagatacggcagctgcgctggagcagaaaagcggctcagcaatgaatcagctgtttaacacactttcagacggctggacggtgatttcagacggtctgcatgatgtacaggccatgaccgacaccatcagcgataaaattgatgcgctggagaatgccgtttcagggatggggattgtgcaggatatcagtgcctttacggccagttttactgccctgaaagggaatgccgccgccctgattaatgcgccccgtcgcatggctgaatcgctggccggaatgtttgccgtgctggcggggctgcccggcgatccttccctgtcgctgaccggaaaagccggaacgccgtccggcagcctgaccacaaaccgtgacagcacgacagagcaggccatgccgcagctgtaccgcacactttcttccctgcgttacaccctcagcgaacaggatgatccgcagcgcctgattggtctgacgcctgcggcacagaacaatatccgtctgctgcggagcgtcatgcagagtgcagccctggtgtcgcaggcgcagacggtcggaaaactgctggatcaggtcatccggcagaatacgacgcacgttcaggatactgaccgtgcgggcggactggcctggctggaaagttctgctgatgtgcagcgtatcaaccgggatttgagcgatgccatggaacaacaggtgctggatctgtccgcacagggccataccggcaccgcccttgcattacgtgatgcagggcttgcgctgacagaagatttaaccacgcggagcgtgcatcttcccggtgcttttcaggtcatggtgcgaaccaccgaaccggcactggtcacgctgtaccgtgccaccggtaacagccgccgctggcagtattttgtccgcagaaacaatatccccgatccggtttttgttccgggtggccgccgcgtggaggtgatcagtgagcagcaggattga

SEQ ID NO: 487882 - DNA, 1125 bp, Shigella sonnei
gtgagcagcaggattgaactgtatatcggcggcagtattttttccggctggctgacggtcagcgtccgtcgctcgctggagcatctggccgggtcgtttgaactggggctgatgctgcccggtgagcgcatcccctcagccctgcggaccggtcagtccctgacgctcagaattaacgggcagacggtcatcagtggctggctggatcaggtcagtcagcggatcagtgcaacccgtcatcagatcagcatcagcggtcgggataaaaccggcgacctggtggactgtgccgccatccatcccggcagccagtggcgcaaccggacgctggcacagattgccgcagatttatgtgcgcccttcgggatagccgtgcgctggcaggttaacgacgacacggctgcacgccccttcagctcttttacgctggaaaactcagaaaccgtggcggatgcgctgacccgtgctgcccggcatcgcggggtgctggtgaccagtaatgctgacggcgatctggtgttcacccaggcaggaagccagcagacggacagactggtgctgggagataacctgcttgatgccgattacaacacggactggcgaggacgatacagcgaataccgtgtccggggacacgggcgcggtggtggcaaacggggagacagcgaatccgccgcccgtctggcagcacctgtgggcgtcatcagtgatgagcagatcggccgctaccggccgaaaatcatcctcgccgatcaacagacagacatcaccggtgcacggcagcgtgccctgcgtgaaatgcgccgtgcgattgcccgttcagaacggttttctgccaccgtgcgtggctggttccgggatgatggccggttatgggatgtcaatctgctgaccggtgtttcagccctgcgtttcggtatagaacagactgaactgctggtctgtcaggtggagtttttacttgatgagcataacggggaagtcacccggctggtactggcaccgcgtgacggctttatcgttccggcagagccggacagtaagggccggggtggttccggtgacgatgttgatgcctttattcgccagcagatgaaaaaacaggggatcagctttgatgaatga

SEQ ID NO: 487883 - DNA, 612 bp, Shigella sonnei
atgaatgatgaagtgttcagccgcctgattgccccggtaacgcgcggtattcgcctgttgtttggccggggcgttctgaccggcacacatgacgaactgaaaatgcagaatgtgcagctcaccggcatggacggcgaaacctttgatgatgtggagcgtccccagcagtacgggcagatcagcgttcccctgccgggtgcggaaaccttttttgcctgtctgggcggacagcgggatcagactgtggtgcttgtggtggaagaccggcgcagccgcccgaccggactcacagccggagatacgggggtgtatcaccatgaggggcaccggatacggttaacaaaggatggccgcattattgtgacatgcaaaatgctggagatttacgccgacgaggggatgcgggtggatacgccggaagccacctttacgggcaatgtgacggtggataagaacctgcatgttaagggtaatttcgcgcttgagggtacggggaaatctcagggactgttcacaatgtcggatgccgttattgcagggatacggtattccggccatgtgcatcatgataacggcgaaggcagtaagacaggagtgccggagaatggctga

SEQ ID NO: 487884 - DNA, 438 bp, Shigella sonnei
atggctgatattgcaattgtgtgggatcagggatgcggttcgctgcaactgaacggtgccgacctgctgacggatgacagtctgctgacggccgttctgatttcgctgtttactgaccgccgggcgctggcatcggatgaaatccctgacggtacgcgcgaccgccggggatggtggggagacagttttcgcccgcgccccattggctcccgtctgtggcttctcagccgggaaaaaacgctggcctcggtgataagccgtgcccgtgcttacgcggatgaggcgctgggctggctcagtcaggatggcgtggcgtcatccgtggtctgtcatgcagaacgtgtgggacacgcgcggctggcgctttcggtgcgcataaccctgcctgatggttcagtgaggcccatgattttttatgctgatcttaagggggagtaa

SEQ ID NO: 487885 - DNA, 1083 bp, Shigella sonnei
atgccttatcagcctttaccgctggcacagttaatcacgcagacacagcaggatatcagccagcgcctgcccggctcgcagccgggtgtgaatgaaaccaccctgaatgccattgcttacgctcaggcagggttatctgctcaggagcatgagcatctggcctggattgcgcgtcagatcatcccgaccgaagccgatgaagccgaactgctgaaacactgtgcattctggggcgtcatgcgtaagcctgcctctcggggggacgggccggttcagctgatgctgaccacggatgcggggatcaaggaaggtgtgcttctccagcgaagtgatggcgtggtttaccgtatcaccacctccctgaccggtaaggccggtacgctgaatgtcagtgtggaagccgaaagtgccggtcgtgcggggaatgccccggcagggacaaaactgacatttatcacaccgcaggcggggatcaaccagacggccacggtgaccggaacggggatcaccggtggtgcggatgtggaaaccgtgccggagctgctttcccgtctggttttccgggtgcagaatccaccgtccggcggcacgcagtatgattttgaacgctgggcgcgtgaagtgccgggcgtgacgcgggcatggtgccgcccggaatggccgcaggcgggcagcgtgggggtaacgtttgttcaggataataacccggatattttccccggtgacggtgatgttcagcgggtggcggattatatccgcagtcatgatgatccggcgaccggccagcctgtcggacagcctctggggccgacggtgaccgtgtttaaactgaccaataagccggtgcccttcagcatcaggatcatcccgaaaacaccggagaatcaggcggccgtaaaacaggcgctgaccgacctgttgtataacgaatcccggcccggcggtctggttctgccgtcgtctttctggcgggcggtggcaggggtgaaaaatctggaggattttgaagtgcgcagtccgctgacgtcagttcaggcgggagacagtgagctgctgacggtaggagaaatcacatggctgtaa

SEQ ID NO: 487886 - DNA, 561 bp, Shigella sonnei
atggctgtaaccctgaccccgcatcagcgcgccctgttgcagttactgcctgacgggctggcatgggacaagcgtccgtcatccgtactggcatcattatgtctgggcctcagtcattcgacagcgcgtgtatcctggacgggtaaacagctgcttgccgagcgtttccctgacacgtcgcgcctgctgctggaagactgggagcgttatctcgggcttcccgagtgtgatatggccggagccaccctcacggagcgacagcgttatgccggaaataaataccggatgaagccctcgctgaaccgtgaattttatatccggtttgcggcggagtttggttatcagattgacattcagccctcaccggattcgcagtgggtcagtattgtcacgattaacagtgaaaccggctaccggaatatgaatgtgctggatgatattctcacgccgctgcgtatttatgaaggcggtgcgctggaatgtattctgaaccgttataagcctgcatggcagacgtttatttacgtttatgcaaacagccatgaagaggagactatttaa

SEQ ID NO: 487887 - DNA, 882 bp, Shigella sonnei
atgtttcatgttgataataattccggcgtggcgaatatgcctgcgctggcaccggcgcagagtaataccaccacctggtttaccgaaggtgacggacaaaaaggtatcagctggattggtcaggactggctgaatattctccaggccgaactgctgaatattctggctgaagccagtattcagccggataaggcgcagttaaaccagcttacgctgtccattaaagccattatcgctgcgaatgccttttcccggaaaaataacctgaaagaaattgctgatgccggtgcggaggcccagcgtctggcccgtggttatcttggtctggggacgcttgccacaaaaaacagtcttggtcccgctgacgttaatgccctggcgaaggatcagaatctcgccgacctggagaataagggaaccgcccgtaataatctggatgtttacagcaaaagcgaaggtgataaccgttacctgcgcagggagcagaacggcgcagacattccggataaaggggcttttatcgataacgtcggtttacgggaaacggtaaacagggcggcgaatgccctgccatcggacggcaccgccgttgccgcgaacaggctggcaaatgcccacacaattaatggtgttccctttgacgggacgcaggatatcactatctcatcaggaacagtaaccgccataagactggggtcggtgaccgcacatatgcccggaacatgggaaagctgggatctgaatctggggggcggcaatgttcttaccggaattaaagtacaggatgtcggtaagaatacggcagataacgtcggcggcgtgtattaccggccgttgcagtatctgttaaatggagcatgggtgacggctgcaagtatataa

SEQ ID NO: 487888 - DNA, 522 bp, Shigella sonnei
atggaactaaaaaatataacccgttattatcctgaaaatatgccatatggtaataatgttcagtatttccagagtgaagatggtaaggatttctacgaatccctgccattattcaccaaaaaatataaactttgcataacacctgacagcggcgttatctgctcaatatcacaggacgcctcggcgctgtatcctgcggggttttctgtggttgaggtcgatgaactccctgaaggcacggatatttcaggaaactggaagtttgataatggcataatctcccgtattccggttaactacgcaagaaaactggaagcaatgcgccagtcatatcttaatcaggcatatgaaaaaattaatgactggagaacggagctacaactgggcaccatcagcgatgaagacagagcagcacttacccaatggatggcatacatcagtcaggtgaagaaaatggaactacccgccattaaaacagaagctgaatttaacgccattaaatggcctgagcagccacagtaa

SEQ ID NO: 487889 - DNA, 150 bp, Shigella sonnei; identical to SEQ ID NO: 27609

SEQ ID NO: 487890 - DNA, 573 bp, Shigella sonnei
atgctgattgggtatatcagggtgtcaacaaatgaccagaatacggcgctacaaagaaatgcgctggaatgtgcaggatgtgagctgtttttcgaagacagaataagcggtaagacaagggagcgtcccggacttaaacgcgcattaaagcgactccggccaggggataccctgctggtctggaaactggatcgccttggacgcagtatgcagcaccttgtccttttaacagaagaactccggcaacgcggcgttaacttccgcagcattacggacaatattgatacatccactcccatgggacgtttctttttccatataatgggcgcgctggcggaaatggagcgggaactcattattgaacgtacacgcgcgggtcttgctgctgcccgtgctcaggggcgtcatggcggcagacctcagaaactgacagagaaagagcgggagcaaatcgcccgtttgctggctaatggcgagtcccgtaaacaaatcgcactgatatttgatattggcctttccaccctttatcgttattttcctgcctcaccagctccgtcaccaaaagtaccgtga

SEQ ID NO: 487891 - DNA, 2055 bp, Shigella sonnei
atgtcagactccaagtggaaaatgctctccgccatgcccggagagttttcagtcaaggttgccggtggcacggtggcatttattgaaagccctttccgcccttcgggtaataaaggggggatcaccttcgcagactgcgtgatccgcttcagcacgaaagagccattatgggtaatgccggtatccggtaatcccagtgcagaaatcaccagttcaggcgtgactggcatcattccaatcacatctgacgtggccggaacgctcacgccctccgactggaatgcaccggataacgccgggccttccggtagcacgaatggcagcagttcagagccggaatattactttgttgtcattctcgcgggtcagtcaaatggcatggcctacggcgaggggctgccgttaccggattcgtttgaccgcccggacccacgcattaagcaactggcacgccgcagtacggtaacgcccaacggtacgtcgtgtacatacaacgacatcattccggcagaccactgcctgcatgatgttcaggatatgagcgggataaaccacccgaaagctgatctggcaaaaggccagtacgggactgtcggtcaggggttgcatattgccaaaaaactgcttccctatatcccacagaatgccgggatacttctggtgccctgttgtcgtggcgggtcagcattcaccactggagccgacggctcattcagtgaggccagcggtgcttccgctgattcttcacgctggggggccggtaaacctctgtatcaggacctggtaagccgcaccaaagtcgcgctggcgaaaaacccgaaaaacaaacttctggctgtggtctggatgcagggagaggcagaccttgcctcaggaagccagcagcataatagtttattcacggccatggttcagcagttcagaactgacctggctccgcttgctgcgcagtgcgtgagtggaaatgccaccacggtgccgtggatttgcggtgataccacgtattactggaaaaacgctggcaccgataaatatgaggcagtatacggtggctacaaaggcaaggaagcacagaaaattttctttgtaccgttcctgacggatgagaatggacagagcacgccaacgaatgctccggcggaagacccggatattgtggctgtcgggtattacggtgcagcatcccgaacccagggcagttttgtttcgacacagcgtgacagccatttcagctcatgggcacgcaggggcgtcatttcagaccgtctggcctcagctattatgctccatgcagggcgcacggctgaactgatgcgcgggcagaccgtgacaccaccggatgagaagccgtcacctgatacaccatcaaaaccgtccacgccacccgcagacaccacgacgatgagtacgctatttgcttaccgggcatctgagtctgaaggacggttgacaccacagggttgggctgccggaggtggcaaggctcaaatcgtggatgatgccggagccagcgggggtaaggcaatgaaactgaccaaggaaacaggaagagccccctggtaccttgagcatgatgctggtaatggtgcggacctgctgggtaaaggtggtcttgtcagttgtcgttttaaactcgatggcgcgcttacggctaatcagtacgcactggcgctgtactggccggtttctgccctgccgcaaggggttactctggaaggaaatgccggtcataacctgctggcatcgttctacgtacagagcgatgccacagaccttaacgtgatgtatcacaaaggaaacacggcgcagaacacgaagctggggtcattcggcgcatttaataacgaatggcatacgctgggcttccgttttgccggtaacaacagtattgaggtgacgccggtcattgatggtaaggacgggacaccattcatgctgtcgcagtctccggtcggcacgtttacggcagacaagttgcgcgtgaccgatatcactaaaaatgcgacttacccggtactgattgacagtatcgtggtggaagtgaataacgcgtaa

SEQ ID NO: 487892 - DNA, 183 bp, Shigella sonnei; identical to SEQ ID NO: 27606

SEQ ID NO: 487893 - DNA, 255 bp, Shigella sonnei; identical to SEQ ID NO: 27605

SEQ ID NO: 487894 - DNA, 294 bp, Shigella sonnei; identical to SEQ ID NO: 27604

SEQ ID NO: 487895 - DNA, 900 bp, Shigella sonnei; identical to SEQ ID NO: 27603

SEQ ID NO: 487896 - DNA, 318 bp, Shigella sonnei
gtggttatttcggcggaagtcttgctgcttcgttcgatcggcaaatggctgggacgctacccgtcggtgcgtaatgcgtcggataacatccgtaacgccatgaatatgctgatggaagtggcgctgctggtcggttcgattttcgcagcaattaagatggcgggttataccggattctctatcgcggttgccatttacttcctcaacgaatccctgggccgtccggtacagaaaatggcggcaccggtcgtggcagtaatgatcaccggtattctgctgaatgttctttactggcttggcctgttcgttccggcttaa

SEQ ID NO: 487897 - DNA, 444 bp, Shigella sonnei
atgtccctcgctgtctttcgggctgatttcttcagccagccgagtgacgctcatccccacggtatgtgtgccggcatcactgaagctgaccagaaccggccagatggcatcgaggagacgttgtttttccggccggaaagcgtatttgcgaccgacgaacgtccgtttctgtacataaaaaggatgccgcgacatgcgcatgcgcaggctctgctcgccggtcaccgggtcctttttcaccagacggttataggcgtgcccgagctgccctttcagcgctttatagcgctcaggacgataccaggacggattttcgcatttgggtttggtggagtgctcaccgcgacggcgcttcgtgcgcttcctttccggttcaaccaggaaagtggtcgcccttcccgcttcatagtcttcccagaaacggatctgctcttcgggtgctaa

SEQ ID NO: 487898 - DNA, 525 bp, Shigella sonnei
atgacattcttcgacgccgccggaacgccagcgggtttgctgggtaaaagtttttacccagaggtgatgcgtttagatccgcgcaccaccagaccgtggttgttaggtgtgaagtccggtttactggcgggcggaatcggtattctggtggcgctcgcggtgttgatcgccggcaagccgctcatttcgctggtgtttggcgttaagtatctcgaagcgtatgacctgattcaggtgatgctgggcgcaattgtgatttcgatgctgggtttcccgcaggagtcattgctattgatggcgggaaaacagcgcgcttttctcgtggcgcaaaccatcgcctcaatcggctacatcgtattgctgttcatgttctgtcatctgtttggtgtgctgggagcagcgtttgcttacttcggtgggcaatgtctggatgtggtgctctcgttaattccaactttaaaggcattttttcagcgtcattccttgctttataacgcagccggggtaatgactccaacttattga

SEQ ID NO: 487899 - DNA, 411 bp, Shigella sonnei
gtggctgttttcaacagtgatgaggcatcgtggcatctcgttgaagaccatcggggtaaaacggtttatgacgtagcgtcaggggacgcgttatttatttctgaactcggtccgttaccggaaaatgttacctggttatcgccggaaggggagtttcagaagtggaacggcacagcctgggtgaaggatacggaagcagaaaaactcttccggatccgggaggcggaagagaaaaagacaagattaatccaggaagcgactgataacataacaattctgcaggatgctgttaattttgaaatggcaactgatgaggaggtctcgatgctatcttcctggaaaaaataccgggtattagtgagtcggattgatataaatacagccccggatatcgtatggcctgagctgtga

SEQ ID NO: 487900 - DNA, 546 bp, Shigella sonnei
atgaatattagtgaacttaaaaagtgtatacactatgaagtaataggttataaacgccctttctcctggcgaaaagcaattgttcgcgcaataaaacacagaagatcacgttatttattttggtggcgcgtagcaaaatatctttttgataaaggcggataccggcgaaagattgcaggaaaaatagaacgcttcattcttgataaatacaatgtaaccgttcccttaactgtaaatattggtaaagggttcgacatatcttatctcaatggcgttgttatcggtcacaaagttacaataggtgaaaattgttcaattaagcctggggtaactattggacttcgcggtgaatttaatgatatggatattgtcataggaaataatgtaaccattggctgtaacgccaccatccttggtggcaaagtgcatatagggaataatgtaaaaataggagctcatgcattggtactgcatgacattcctgatgactccacattcattaccaaatttcactctgaaattatttataattcacctcacacataa

SEQ ID NO: 487901 - DNA, 249 bp, Shigella sonnei
atgcgtattgagatctgcatagccaaagagaaaatgactaaaatgccaaacggtgctgtggatgcgttaaaggaagaattaactcgacgcatcagtaagcgttatgacgatgtagaggtgatcgtaaaaaccaccagcaacgatggcctttctgttacgcgcaccgccgataaagattcagctaaaacttttgttcaggaaactctgaaagatacctgggagtctgctgacgagtggtttgttcactaa

SEQ ID NO: 487902 - DNA, 516 bp, Shigella sonnei
atgcaggcactggtggaaacgttactacgccaggcaagactggagaatcgtcaggaagtcgttttgactgctgttgatgtggcggcattattccgccgcgtcagcgaagcgcgcaccgtgcagttggcagaaaaaaacatcactctacatgttacgcccaccgaggttaatgttgctgctgaaccggcgttactggatcaggcgctggggaatttactggataacgccatcgattttacccccgagagcggtcgtataacgctaagcgccgaagtggatcaggaacacgtcacgcttaaggtgctggataccggtagtggtattcctgactacgcgctgtcacgtatttttgaacgcttttactctttgccgcgtgcaaatgggcaaaaaagcagcggtctggggttggcgttcgtcagtgaggtcgcccgtttgtttaacggcgaagtcacgctgcgcaacgtgcaggaaggtggcgtgctggcctcgcttcgacttcaccgtcacttcacatag

SEQ ID NO: 487903 - DNA, 717 bp, Shigella sonnei; identical to SEQ ID NO: 482407

SEQ ID NO: 487904 - DNA, 657 bp, Shigella sonnei; identical to SEQ ID NO: 463703

SEQ ID NO: 487905 - DNA, 597 bp, Shigella sonnei
atgccgtctccacgcatccgtaaaatgtccctgtcacgcgcactggataagtacctgaaaacagtttctgttcacaagaaagggcatcaacaggagttttaccggagcaatgttatcaagcgatatcccattgcccttcggaatatggacgaaataacaaccgttgatattgctacatacagagacgttcgtttagcagaaatcaacccccgaacgggtaaacccattacaggtaatactgtacgtcttgaactcgcccttctgtcatctctgttcaatattgctcgtgttgaatggggaacctgtcgtactaacccggttgaactggttcgcaagccgaaagtatcctcgggacgagatcgccggctaacgtcttcagaagaacgtcgcctttctcgctatttccgcgaaaaaaatctgatgttgtatgtcattttccatcttgcccttgagacagccatgcggcagggcgaaatactggccttacgttgggagcacattgatttgcgccacggtgtggctcattacctgaaaccaaaaacggtcactcacgggatgttcctctgtccagacgtgcccgtaactttcttcagatga

SEQ ID NO: 487906 - DNA, 210 bp, Shigella sonnei
atggcaaaaacaaaacaggaatggttatatcagttacgtcgctgttccagcttaaagacacttgagaaaattattgctaaaaaccagggctctttgacctcagataaaatagaaacattcaactctgcagttgatcatcgccttgcggaactgacaatgaacaaattgtacgacaaagtaccggcttctgtctggaagtacgtaaaataa

SEQ ID NO: 487907 - DNA, 201 bp, Shigella sonnei
atgtttattaaattactttcctttatatgtggtttgttactgggatttgcgctattgagtggctcctctgttattgatttatactggttttcactcccttccgagttttcaaagattgtagtcatgctgatcactcttttttccacagcaagattcatggactatatcatagaaaaaataagaacaatctccgcgaaatag

SEQ ID NO: 487908 - DNA, 636 bp, Shigella sonnei
atgaatgataacatatataaatacagtaaagataatgcgatagcgtttcttctacttgttgttatatcaacagttgtgatattcacaccagcattcaccatacaatatattggtttggacctggcattttcctttgtctttattactgaaattttaatatcaacttcattttatattttttacttaagaagaataccaggttgtaaaatcaccataaagacaaatgcgaaaacattaaagctattagtaatatcatttgctgtaattgctctcatgcaactgcttatttttgcttatagagacaatttgaacaatagtgaatcaacttcacttaattggattgaaatatttatactggtcctgatagttccgtattatgaagaaattgtttaccgaacatgtttattcggccttctatgtgcgacttataaaaaagaattattcaccccctgcgtgtgtacatctttatttttctgcctgatgcatccgcagtattataatgtagctgatcaaattattctgtttattatgtcaatgttattgttgaatataagaatttgcagtaaggggattttctatccaatgctgttacatgcgggaataaacggctttgttatattgttaaatatattatag

SEQ ID NO: 487909 - DNA, 1254 bp, Shigella sonnei
atgaatatattcagaagtgaagcaatagaacatcataatgacactgaatatggtgacattattttaccaacatcatttagcctatccgtatgtgcaacagttacattattcattatgttaagtctgactgtattcatctattacggtagctatacaaggaaagcgcatcttacaggtatcgtcatgccctcatcaggactggtaaaaataattcctcaatatgcaggatatgtaacacaactgactgtatccgaaggagaacacgtaactgcagggacacaactctatcatataagtggagaacattataacggtaacggaactggcacattagcaacgatgagtatttccctgaaaacccagtctatcatgctggcctcccagcaatcctttgagtcgcgagataatagtcaacaacaggaagccatacggcaaaggatggtatcacttgagccacaaataagaagtgcagaacaaagacttcagcttgctgaacgtcaggcagaactggctatatccgtcatggaacgctataaaaaattggctggtacgcattatgtgtcagatatcgaattccaacagaaacaaattgatgtttctgccgctcaacaaaacgttgaagatcagcgtcaggggcttctccaattgcatactgcaatggacacagccaaagatgaactaaatcatcttattgttcaggggaaaagccgtaaagcagaactcgacagacaattgcaggtgctaaaacaacaacaggatgaactggccggacaagaaaaatttacactgagggctccagtatccgggactattgctgctgtactgatcaaacaggggcagtctgtgaaagcatcagaaccggtcatgactctcattcccgataatgctcatttacaaattgagctttatgctaccagccagaaagccggttttatccgaccaggtcaacgagtatctctgaagttttcggccttcccttatcagaaatttggtatccagtacggcacaattcgtgaaatcagtcatacgactctggctccttccgacttattaccagtttcacccgtcacatggaaagaaaacgaagggcattatcgcgttattgttgagcctgaaaatacatttatatttgcatacggaaaaaaagaaccgctaagaccaggcatgactctggaaggagacgtcaaccttgatactcgtcatttatgggaatggctgacagagccactatggagcatgaaaggaaatctgtaa

SEQ ID NO: 487910 - DNA, 2190 bp, Shigella sonnei
atggaatcaataaactggaaagtaaggaaacaactacccgttatccgtcaaaccgaatcagctgaatgcggtctggcgtgtctggctatgattgcctgctggcatggactgaaaacagatttatcgacattacgggaacgtttcaatataggtattcagggaatgacgctacaaaggttgatcgaatgtgcagcgtccatccatttatcatcacgtgcagttcgtctggaacccgaagatctgaggtgtcttaatcttccatctattctgcactgggatatgaaccatttcgtcgttctccataaagttcggggaaaccggttatacatccatgatccggacagaggaaaaattacaataagtctgttggacgcaggtaagcattttacaggagtggcactggaattaactccagccagtgatttcaccccccggaacgagagaaaaaaaatccacctgcgccaactgacagggaaaaccccggggcttttagcatcaatgacaaaaattattatttttgctctggcccttgagattctggctttaggtggtccacttcttaatcaactggtaattgatgaagttctggtcgcagcagacagaagtctgttgtatgtcattatagtggcactactgttgttatcactcatacaattattactctccctggcacgacaatgggcaacgatcagtttatcagtcaattttaacatgcaatggactgccagagttttccatcatcttgtaagactccctcttgcatggttcgatgcccgaagtaaaggaagtattaatgcccgttttgaagcagtagatataatccagcaggcgctgacaacgcaggttcttgaaggcattctggatatgctacttattgtgactgctctttgcatgatgctgttgtatagtccaggaatgacattaatcgcagtaattgcagctattatatatggcgcactgagagcattgtggtatccggctttacggcaatctgttgaagatgtctgggatgcaggaactaaggagtcggggcattttctcgaaacccttaacggcattcagagtctgagaatcaacggtgtaactattcacagagaagcggcctggctgaacctcaacgttacccgcagaaacacacagctacgccagaatcgtttacaaatgagctatgagctgacgcatacactgacggaaagtgtagtttcagccattattttgtggcagggtgcagtagaagtgctggatgggacatttaccgtgggtatgttggttgcttacttatcctatcagatgcgtttttcatccagtataagcaatctgactgataactttttttcctggcgcatgcttgatgtttataacgagagacttgccgatattgtgctaacaccacaggaaggtcaccagaatcagcaccattgggcaaaccataatgaaacaatatctgcaagccagtacagagaacataaatgtgataatacccatccaccattacttatcgaaaaaataacatttagccataagggcgcagataaacccatattggataacgcgtcactaatgctctttcctggagaaatattagcaataacaggtaaatcaggatgtggcaaatcaacattggtaaagcttattcttggaattcatacacccagtgaaggaagaattaatgcatttggcataccacatacacattctgattattttcaggttcgtcaacgaattggcactgtattgcaagatgactatcttttcaaaggttctatagctgataatataatgttttttagcgaaattagagatcatgaacacatgcgtaaatgcgcaagtctggcacttatagacagtgatattatggcaatgccaatgggctatcaaacattgcttggagaaaccggggggggactttccggtggtcagaagcaacgtattctactggcaagagcactgtataaaaaacctggtctattattactggacgaagcaaccagtcatcttgatgtggaaagtgaaatagaaataagccagacattacgccaactcggaattcctgttctgttaatagctcatcgaccagaaacaatagcatccgcagacagagttctgtatctgagagatggtcacttttcggaaataaaatatcgacctgtcagaactcataatataaataatcatcccaacaggaggtga

SEQ ID NO: 487911 - DNA, 573 bp, Shigella sonnei
atggcttatgtcgatgattttaaagaagcaataatcaggactcggcggttacaacttgcgcaacccgttgatttatgtgagatgcatactcgcataatgaacgataaacgaatccgccatttgggaggaattatacgtcctgtactggatctgaattctgggtatgaacaactggttgcgcgatgtatgcctgttcatcttcaagccagacctttggttgaagaatggctgggatgtcctgtttattttacgttgggatggattgatgatgggaccccaaaaggtatgttcaggtttgatgaggactttattactgatacattgaaaaatggttatacaggagatactgtcaatcttcatgcatggctaactttacctagtatggaaattatagatatcacattatcaacaacaatttctatgttgcaggggcataagaatcagttaggcggtgttattatcaagagagctgatgatattaaaggcttctcatataagccaatgcttattggtgatgaattcctgttaaaatctggtatattgcataagtttacatatctagaattgaactag

SEQ ID NO: 487912 - DNA, 1509 bp, Shigella sonnei
atgaaaaaaatcagcttaccgaaaattggtatccgcccggttattgacggtcgtcgcatgggtgttcgtgagtcgcttgaagaacaaacaatgaatatggcgaaagctacggccgcactgctgaccgagaaactgcgccatgcctgcggagctgccgtcgagtgtgtcatttccgatacctgtatcgcgggtatggctgaagccgctgcttgcgaagaaaaattcagcagccagaatgtaggcctcaccattacggtaacgccttgctggtgctatggcagtgaaaccatcgacatggatccaacccgcccgaaagccatttggggctttaacggcactgaacgtcccggcgctgtttacctggcagcggctctggcagctcacagccagaaaggcatcccggcattctccatttacggtcatgacgttcaggatgccgatgacacatcgattcctgccgatgttgaagaaaaactgctgcgctttgcccgcgccggtttggccgtcgccagcatgaaaggtaaaagctatctgtcgctgggcggcgtttcgatgggtatcgccggttctattgttgatcacaacttctttgaatcctggctgggaatgaaagtccaggcggtggatatgaccgaactgcgtcgccgtatcgatcagaagatttacgacgaagccgaactggaaatggcactgacctgggctgataaaaacttccgctatggcgaagatgaaaataacaaacagtatcaacgcaatgccgagcaaagccgcgcagttctgcgcgaaagtttactgatggcgatgtgtatccgcgacatgatgcaaggcaacagcaaactggccgatattggtcgcgtggaagaatcacttggctacaacgccatcgctgcgggcttccaggggcaacgtcactggaccgatcaatatcccaatggtgacaccgccgaagcgatcctcaacagttcatttgactggaatggcgtgcgcgaaccctttgtcgtggcgaccgaaaacgacagtcttaacggcgtggcaatgctaatgggtcaccagctcaccggcaccgctcaggtatttgccgatgtgcgtacctactggtcaccagaagcaattgagcgtgtaacggggcataaactcgatggactggcagaacacggcatcatccatttgatcaactcaggttctgctgcgctggacggttcctgtaaacaacgcgacagcgaaggtaacccgacgatgaagccacactgggaaatctctcagcaagaggctgacgcttgcctcgccgctaccgaatggtgcccggcgatccacgaatacttccgtggcggcggttactcttcccgcttccttaccgaaggcggcgtcccgttcaccatgactcgtgtcaacatcatcaaaggcctgggatcggtactgcaaatcgcggaaggctggagcgtggaattgccgaaggatgtgcatgacatcctcaacaaacgcaccaactcaacctggccaaccacctag

SEQ ID NO: 487913 - DNA, 219 bp, Shigella sonnei; identical to SEQ ID NO: 477964

SEQ ID NO: 487914 - DNA, 690 bp, Shigella sonnei
atggaactgcttttattgagtaactcgacgctgccgggtaaagcctggctggaacatgcactgccgctaattgctgaacagttgcagggtcgccgctcagcggtgtttatccctttcgctggcgtaacgcagacctgggatgattacacagcgaaaacggctgcggttctcgctccgctgggtgtttctgtcaccggtattcatagcgttgtcgatcccgttgccgcgattgaaaatgctgagatcgtgattgtcgggggcgggaatactttccagttgctgaaacagtgccgcgagcgcgggctgctggcaccaattactgacgtggttaaacgtggtgcgctgtatattggctggagcgcaggcgctaaccttgcttgcccaaccattcgtaccaccaacgatatgccgattgtcgatccgcaaggtttcgatgcgctaaatctgttcccgctgcaaatcaacccgcacttcaccaacgcgctgccggaaggccataaaggtgaaacccgtgagcagcgtattcgcgaactgctggtcgtcgcgccagaactgacgattattggtctaccggaaggtaactggatcacggtgagtaaaggtcacgctacgctgggtggcccgaacaccacttatgtgtttaaggccggtgaagaagcggtgccgctggaagcgggtcaccgtttttaa

SEQ ID NO: 487915 - DNA, 528 bp, Shigella sonnei
gtgagcagcaaagtggaacaactgcgtgcgcagttaaatgaacgtattctggtgctggacggcggtatgggcaccatgatccagagctatcgactgaacgaagccgattttcgtggtgaacgctttgccgactggccatgcgacctcaaaggcaacaacgacctgctggtactcagtaaaccggaagtgatcgccgctatccacaacgcctactttgaagcgggcgcggatatcatcgaaaccaacaccttcaactccacgaccattgcgatggcggattaccagatggaatccctgtcggcggaaatcaactttgcggcggcgaaactggcgcgcgcctgtgctgacgagtggaccgcgcgcacgccggagaaaccgcgctacgttgccggtgttctcggcccaaccgcacggcgtctatttctccggacgtcaacgatccggcatttcgtaatatcacttttgacgggctggtggcggcttatcgagagtccaccaaagcgctggtggaaggtggtgcggatctga

SEQ ID NO: 487916 - DNA, 657 bp, Shigella sonnei
atgcctgcgatcaatgccaaacgtgtttaccggatcatgcgccagaatgcgctgttgcttgagcgaaaacctgctgtaccgccatcgaaacgggcacatacaggcagagtggccgtgaaagaaagtaatcagcgatggtgctctgacgggttcgagttctgctgtgataacggagagagactgcgtgtcacgttcgcgctggactgctgtgatcgtgaggcactgcactgggcggtgactaccggcggcttcaacagtgaaacagtacaggacgtcatgctgggagcggtggaacgccgcttcggcaacgatcttccgtcgtctccagtggagtggctgacggataatggttcatgctaccgggctaatgaaacacgccagttcgcccggatgttgggacttgaaccgaagaacacggcggtgcggagtccggagagtaacggaatagcagagagcttcgtgaaaacgataaagcgtgactacatcagtatcatgcccaaaccagacgggttaacggcagcaaagaaccttgcagaggcgttcgagcattataacgaatggcatccgcatagtgcgctaggttatcgctcgccacgggaatatctgcggcagcgggcttgtaatgggttaagtgataacagatgtctggaaatatag

SEQ ID NO: 487917 - DNA, 294 bp, Shigella sonnei
atgaaaaaaatgttgttttctgccgctctggcaatgcttattacaggatgtgctcaacagacgtttactgttggaaacaaaccgacagcagtaacaccaaaggaaaccatcacccatcacttcttcgtttcgggaattggacaggagaaaactgttgatgcagccaaaatttgtggcggcgcagaaaatgttgttaaaacagaaacccagcaaacattcgtaaatggattgctcggttttattactttaggcatttatactccgctggaagcgcgtgtgtattgctcacaataa

SEQ ID NO: 487918 - DNA, 462 bp, Shigella sonnei
atgaacagagtaaccgcgattatctccgctctggttatctgcattatcgtctgcctgtcatgggctgttaatcattaccgtgataacgccattacctacaaagcccagcgcgacaaaaatgccaaagaactgaagctggcgaacgcggcaattactgacatgcagatgcgtcagcgtgatgttgctgcgctcgatgcaaaatacacgaaggagttagctgatgcgaaagctgaaaatgatgctctgcgtgatgatgttgccgctggtcgtcgtcggttgcacatcaaagcagtctgtcagtcagtgcgtgaagccaccaccgcctccggcgtggataatgcagcctccccccgactggcagacaccgctgaacgggattatttcaccctcagagagaggctgatcacgatgcaaaaacaactggaaggaacccagaagtatattaatgagcagtgcagatag

SEQ ID NO: 487919 - DNA, 498 bp, Shigella sonnei
atgcctccatcattacgaaaagctgttgcagctgctattggtggcggggctattgctatagcatctgtgctaatcactggcccaagtggtaacgatggtctggagggtgtgagacataatccttacaaagacatagttggtgtatggactgtatgttacgggcatacaggaaaagacatcattcccggtaaaacgtataccgaagcagagtgcaaagccctcctgaataaagaccttgccactgtcgtcagacaaattaacccgtacatcaaagtcgatataccggaaacaacgcgcggcgctctttactcattcgtttacaacgtgggtgctggcaatttcagaacatcgacgcttcttcgcaaaataaaccagagcgatatcaaaggcgcatgtgatcagctacgtcgctggacatatgctggcggtaagcaatggaaaggtctcatgactcgtcgtgagattgagcgtgaaatctgtttgtggggtcagcaatga

SEQ ID NO: 487920 - DNA, 216 bp, Shigella sonnei
atgtcaaataaaatgactggtttagtaaaatggtttaacgctgataaaggttttggctttatttctcctgttgatggtagtaaagatgtgtttgtgcatttttctgcgattcagaatgataattatcgaaccttatttgaaggacaaaaggttaccttctctgtagagagtggtgctaaaggtccagcagcagcaaatgtcatcattactgattaa

SEQ ID NO: 487921 - DNA, 213 bp, Shigella sonnei
ttgtcccgtaaaatgacaggaattctcaaaacctttgacggcaaaagcggcaaaggtcttataaccccatccgatggtcgtatcgatgtccagcttcatgtttcagcgctcaatctccgtgatgcagaagaaattaccaccggattacgcgtggaattttgccggataaatggtctgcgtggaccatcagctgccaatgtttacctttcatga

SEQ ID NO: 487922 - DNA, 942 bp, Shigella sonnei
atgagcactaaattaaccggctatgtatgggatggttgcgcagcgtcaggcatgaaattatccagtgtggcaattatggcccgcctggctgatttcagtaatgacgaaggtgtgtgctggccatcgattgaaaccattgcccgccagattggcgcggggatgagtaccgtcagaacggctattgcacggctggaagcagaaggctggttaacgcgtaaggcgcgtcgccagggtaaccgtaatgcgtcgaatgtttatcagcttaacgttgcgaagcttcaggccgcggcattttctcaactgtcagattctgacccgtcaaaatctgacgcatcaaaatctgacccgtcaaaatttgatgcgtcgaaatctggcaaaaaagcgggttttcacccgtcagaatctggcggggatccgtcagtaaaatcaaaatatgatccgtcagataaaaaaccttctcgtccggacgtttcgcaaccggacacgcagacggctgaacaggattttttaactcgccatcctgatgcggttgtattcagccctaaaaagtgccagtggggaacgcaggatgatttgacctgcgcacagtggctctggaaaaaaatcatcgccctgtacgagcaggccgccgaatgtgacggcgaggtggttcgtcccaaagaaccgaactggacagcctgggcaaacgaaattcgcctgatgtgtgtgcaggatggtcgtactcacaaacaaatctgcgagatgtacagccgcatcagccgcgatccgttctggtgccgtaacgtgctcagcccgtcgaagctgcgggaaaaatgggatgagctttccctgcgcttatcgccgtccatcagcacgtacacagaaaaacgcgaagacccgtacttcaaagccagttacgacaatgtggactacagccagatcccggcaggattcagggggtga

SEQ ID NO: 487923 - DNA, 339 bp, Shigella sonnei
atgaacagtttaacaacacactaccgtcgctcgcaactgattgcgcttcctgtaccgggtggaaaagcgaaggtggagtattgctatgcagtaaatgtaccaggtgacagggaaattgtaacccacagctttgctgagtgggctgtgggtgatttcaaccggcagaaggagacagtcctttgcgacaagttaaccgctggttcaaagatcactacggagtacccgtcagagtcattcgttgggaaccggaaacacaacgggttatctacctccgcgaaggctatgagcatgagtgcttcagcccgctcgaacagtttcgtcgtaaattcagggaaatag

SEQ ID NO: 487924 - DNA, 558 bp, Shigella sonnei
gtgggtaagtatcactggaaagtagaaaaacagcctgagtggtacgtgaaagctgtcagaaaaactatcgcagcgttgccgggtggttacgctgaagcagctgactggctggatgtaacagagaacgcattatttaaccgccttcgtgccgatggcgatcagattttcccgctgggatgggcaatgattttacaacgtgctggtggcactcacttcattgctgacgctgtggcgcagtctgcaaatggcgtctttgtgtctcttcctgacgtcgaggatgtggacaatgccgatattaaccagcgtttactggaagtcattgaacagatcggcagttattcaaaacagattcgttcggcaatcgaagacggtgtagtggaaccgcatgagaagacagcaattaacgacgagctgtacctctcaatttcgaagctgcaggagcatgcagcacttgtctacaaaattttttgcgtttcagaaagtaatgacgcccgcgagtgtgcagctccgggcgtcgtggcgtcgattgcttctggttgtggagaaactaacgcatga

SEQ ID NO: 487925 - DNA, 201 bp, Shigella sonnei
atgacaactgacgatatcgaaagctacttcggcagtattgagaaagttgctgcttttttcggcataacaactgaggccgtttatcagtggcgaaaccgtccgggccagttaattccaaaaggacgtgcagcagaagcagcatatagaacttgcggacggttgccatttaaacctgagctttatgaaaaatctaatggataa

SEQ ID NO: 487926 - DNA, 627 bp, Shigella sonnei
atggaaacggttggtcagcgtataaaagctctgagaagggttaccagaacgtcccagaaagaattgggtaaattttgtggggtaagtgacgttgctgtggggtactgggaaaaagacatcaatgtccctggcggggaagcactttcgaaattagcgaagttctttaatacgtcaatagattacattctttatggtgctgagtttgaaggcaaactagtcacaaacatgcgcagagttcctgtaatttcgtgggttcaggctgggcagtttactgagtgcagggcagcagaagtgtttagtgaagtggacaagtgggtagatacatctttaaagattggtgataactcatttgcattagaagttaaaggcgactccatgactaatcctaatggcctcccaacaataccagaaggtgcaacagtgattgtagatcctgatgcagaacctcgtcatggaaaaatagtcattgctcgacttgatggaacgaacgaagctacagtaaaaaaattagtcatcgatggtcctcaaaagtttttagtgccattaaatccacggtatcccaacatcccaatcaatggtaattgcctgatcattggtgtagtcaaaggagttcaatacgaactctag

SEQ ID NO: 487927 - DNA, 522 bp, Shigella sonnei
gtgatagctgaactgtctgcggctatggctgctataaaggagactgccggtcttgctaaggttattaatgacgcgaaaacggatgcagaagttaaagctgcaaccattgaactccagaacaaactaatcacgcttcaggcagaatgcttctctcttggcgatgcgatccgccttcgtgatgaagaggtgatgcatctcaaagcaaaaattgcagagtttgaagatttttgtgccaaggtagaaggatatgtccttgatcagcttgactctggtgcttttgtttactctaaaaatgaaattgtgagtggaaaagaaataactgtgcatctgtgcccactttgttattccaaaaatataaaatcgatacttcatccgcttccagtaggtaaaacttctcattttcttacaagccgttgccttcactgtgaaaataaatttcttatggaaaaaaatccgatgtacgaacgaccaagatcattacgtgagtcggggcgagatctgaattcgccttggattccttaa

SEQ ID NO: 487928 - DNA, 537 bp, Shigella sonnei
atgtcatttattaaaactttttccgggaagcatttttattatgacaggataaataaagacaacatcgatattaacgatatcgcggtttccctttcaaatatctgtcgctttgctggtcatctttcacacttctacagcgttgcccaacatgcggtgctttgcagccagctggtaccggaggagtttgcttttgaagcgttaatgcatgatgcaacagaagcgtattgccaggacatccccgcaccactgaaacgccttcttcctgactataaacggatggaagaaaaaatagatgccgtaatccgtgagaaatacgggttacccccagttatgagtacgcccgtgaaatatgccgatcttatcatgctggcaaccgaacgccgcgatctcgggcttgatgatggctctttctggcctgtactggaaggcatcccggcaacagagatgttcaacgtgattccactggcacctggccatgcctacgggatgtttatggaacgttttaacgagttatcggagttacgcaaatgcgcatga

SEQ ID NO: 487929 - DNA, 363 bp, Shigella sonnei
atgcgcatgaatgttttcgaaatggaagggtttcttcgcgggaaatgtgtaccgcgagatctgaaagtgaacgaaacaaatgctgagtacctggtacgtaaattcgacgcgcttgaagctaaatgtgcggcactggaaaacaaaataataccagtgtcagctgaactgccaccagcaaatgaaagtgttctgttatttgatgctaacggagaaggctggctgattggctggcgttctctctggtacacctggggacaaaaagaaaccggagaatggcagtggacatttcaggtcggggaccttgaaaacttcaatatcactcactgggcagtaatgcccaaagcgccggaggctggagcataa

SEQ ID NO: 487930 - DNA, 621 bp, Shigella sonnei
atgaccacatttaccaataaagaactgattaaagaaatcaaagaacgaatcagcagcctagaggttcgagacgatattgagcgccgtgcttatgaaattgctctggcatcgctggaagaggagccggtggcatggctgcattcagacaatggcttaggtattccggcaataaccaggagcaaaaacattgctgacagttggttatcaatgggctggtatgttcagccgctatatatagccaagccagtactggtggtgccagatgctcgtccgtctttaaataatggcatagtcggttttgatgaaggctggaacgcctgccgcgccaccatgcttcatggtgccaaacctgtaagtcagacttacaagttgaacaagctgtcgggcaactctccggtaactcaggatggttggataagctgtagtgagcgaatgccgaacgataaacagtatgtttggtgttggggtaagtcttacggctggactgagtgcgataccttcgaagggtattacgattggtcgagaaacaaatggtgggcagttactgacgatggggaagaaccggcatcgaaagtaacccactggatgccgctaccggagccaccgcaggaggtgaagtaa

SEQ ID NO: 487931 - DNA, 3828 bp, Shigella sonnei
atgcaattcattaccaacggccctgatattcctgatgagcttttgcaggcgcacgaggaagggcgcgttgtgttcttctgtggagcaggcatttcctaccctgctggtttacctggtttcaaagggttggtagaactaatttaccagaggaacggaacaacactttcagaaattgagcgtgaggttttcgagcgtgggcaatttgacggcacattagatttgctggaacggcgcttaccagggcagcgtatagccgtccgacgcgcgttggaaaaagcccttaagccaaagctccgtcgtaggggcgctattgatactcaggcggcgctgttacgtttagcccgtagccgcgagggtgcccttcgattggtcactaccaactttgaccgtctctttcatgtggcagctaaacgtacaggccaggcttttcaggcctatgtagcgccgatgctgccaattccaaaaaacagccgctgggatggacttgtatacctgcatgggctgttaccggaaaaggcggatgatactgccctgaatcgtctggttgttaccagcggtgactttggcttggcttatctcactgagcgttgggcagctcgctttgtgagtgagttatttcgtaactatgtggtctgcttcgttggctacagcatcaacgacccggtactgcgctacatgatggatgcgcttgcagcagatcggaggctcggtgaagtcacaccacaagtatgggcactgggggagtgtgagccggggcaggagcaccggaaagccatcgagtgggaggccaaaggggtcactcctatcctttacaccgtaccggcgggctccactgatcattcagtgctgcatcaaacgttgcacgcttgggcagatacttatcgagatggtatacagggcaaagaggctatagtcgtcaaacatgctctggcccgcccgcaggacagcactcgtcaggacgatttcgttggtcggatgttgtgggccttgtcagataaatcaggtttaccagcaaaacgctttgcggaactcaatcctgcaccgccgctggattggttattgaaagctttctcggacgaacgatttaaatacagcgatctgccacgcttttgtgtatctccgcatgtcgaaattgacccgaaactccgattcagtctggttcagcgtcctgcgccctatgagctggccccgcagatgtcgctggtttctggatgtgtcagtgctagcaaatgggatgacgtaatgtcccatatagcccgttggctagttcgttatctgggcgaccctaggttgatcatatggattgctgaacgcggcggacaaatacacgaccgttggatgtttctgattgagagcgaactagatcgcttagcagcactgatgcgggagcgtaagacttctgagttagatgaaattctcttgcattcccccctggctattcctggtccacctatgtctactttatggcggcttctgcttagtggtcgtgtgaaatcgccattgcagaacctggatttgtatcgttggcaaaaccgcttaaagaatgaaggcttgacgactacattgcgcttggagttacgcgagttgctttctcccaaggttatgttgaggcggccgtttcgctatagtgaagacgattcgagcagcactgatgaacccttgcgaatcaagcaattggtggattgggagctggtgctgactgctgattacgtacgttcaaccctgttcgaccttgctgacgagtcatggaaatcgtccttgccatacctgttggaagattttcagcagttgttgcgtgatgcactggacttgttgcgggagttgggagagtccgacgatcgtcacgaccgctcgcattgggatttgccgtccatcactccgcactggcagaaccgggggttccgcgattgggtgagcctgattgaattacttcgggattcatggttagccgttcgatccaaagacagcgatcaggccacgcgcattgctcagaattggtttgagttgccatatcccaccttcaaacgtctggcactgtttgccgcaagccaagacaactgcataccacctgagcggtgggttaattggttgttagaggacggttcatggtggttgtgggccacggatactaggcgagaggtattcagactgtttgttttgcagggacgacatctgacaggaattgcacaagagcgtctggaaactgctatcttggcagggcctccgcgcgagatgtacgaggataatttggaagcagacaggtggcattatttggtggctcattccgtctggttgtgtctagcgaagctcaggggagcgggccttgttttgggagagtctgcggctacacgtttgacggaaatatccacagcatacccaaaatggcaactggcaaccaacgagcgtgatgaattctctcactggatgagcggaaccggtgatccaggcttcgaggagagtatagatgtcgacattgcgccccgtaagtggcaggaattagtgcaatggctcgcaaagcctatgccagaaagactgcctttctatgaggacacttggagtgatgtttgccgtacgcgcttttttcacagtctgtatgcgttaagtaaactatcacaagatgatgtgtggcctgttggtcggtggcgtgaagctctgcagacttgggctgaaccagggatgattttgcgttcgtggcggtacgccgcaccgttggtgcttgacatgcctgacgcagtacttcaggagatttcccacgctgtcacttggtggatggaggaggcttcgaagaccatcctctgccacgaggagattctactggccctttgtcgtcgggttctgatgatagaaacaagcccagagtctagcaccattcgaaacggaattgagacctatgatcctgtttctacggcgatcaatcatcccattgggcatgtcacgcaatcactgatcaccctatggttcaaacagaacccgaatgacaatgatttgcttcctgttgaattgaaaacacttttcaccaaattgtgtaatgtacagatagagctattccgccatggtcgggtgttgctggggtcgcggctgatcgcattttttcgcgtagatcgaccttggaccgaacagtatctattgcccttgtttgcttggagtaatcccgtcgaagcaaaagctgtgtgggaaggcttcctctggtcgccacgcctgtatgaaccgttgctgatagctttcaagtcagattttttggagagcgccaatcactattctgatcttggcgagcaccggcagcaattcgctactttcctgacttatgcagctctgggccctaccgagggatataccgtggaggagttccgaacggcaattagtgctcttccacaagaaggtctggaggtagccgcgcaggcgttataccaggcacttgaaggtgcgggcgatcagcgcgaggagtattggaaaaatcgtgtccagccattttggcaacaggtttggccaaagtcccgcaacttggccaccccacgcatatccgaatcgttgactcgtatggtgattgctgcccgaggtgaatttccggcggctttggcagtggtgcaggactggctgcaaccgctcgaacaccttagctacgacgttcgccttttgctagaatcagatatttgcagccgatatcctgcggacgctctatccctgctgaatgccgtgattgccgaacaacactgggggcctcgagagttggggcaatgcttgcttcaaattgttcaagctgctccacaactggagcaagatgttcgttatcagcgattaaatgaatattctcgaaggcgcagcgtgtga

SEQ ID NO: 487932 - DNA, 1224 bp, Shigella sonnei
atggcgctgtctgatgcgtggttgcgttcagttgttggaaaggaacgtgataaggttttggttaaatccgatcgtgatggtctgtctgttagagtatcaccgaaaggtcgcgtagtgttccaatatcgttatcagtgggcggggaaaggtgagcgtcttgatatcggaacttacccggcaactggactaaaagaggccagagaagaagttatccgtcttcgtggtgaactcgagtcaaaccgcaatccacgattggtcaagctggcagaaaaacgtaaagctactgaagccatgacggtagaatctgtgatccgtgcttggtatgaagcatattgtgtaaaaaataaaaaaggttctgaacagatactccgctcgtttgagctgcacctgttctctaaaatcgggaatatccctcacgatgcagctacattgcatgattggttagaagtcctggagcctcttagcactaagactccagcaatagcagaccgattgctaattaacgcaaagcaggcccatgtctgggcgtataagagaaagctcattgaaactcgcccgctgtcggatatcacgggtaaagatatggatatccgtaaaggtcagaagaaacggtttctgacacatgatgaaattaaaatcctttatgctgcgatcgatggttctcgaatggttcctaaataccgggccttcattaaactattgctgcattttggttgccgtagttcagagctaattactgccaaggtggacgattttgatttcattaataaaatatggactgtaccaccagaacgacataagacaggggatataacaggcgaaccgctaaagcggcccattattgaaccggttgaagagcttataaaatacgttatctctatgaacaacggttccgatatgctttttactaaggaaggaagcagggaaccagttggtcggacatcattgcagtcgctgccttacaatttaatgcagtacgcatggcggcgtttggggtatcaatttcctcattggtctcttcatgatttgagacgaacagcacgaacaaacttttctgatcttactgcgcctcatattgctgaaataatgctcggtcataaactgccaggtgtatggcaagtttatgacaagagtgattatctagaagaacagcgtaaagcctaccaggcatggtgggagagagttgaatcgattgttacttgtactcgttcaggctcgaaatga

SEQ ID NO: 487933 - DNA, 1602 bp, Shigella sonnei; identical to SEQ ID NO: 483284

SEQ ID NO: 487934 - DNA, 1050 bp, Shigella sonnei
atgagcaaaatcagggtgttatctgtcgatgattcggcactgatgcgccagatcatgacagaaatcatcaacagccatagcgacatggaaatggtggcgaccgcgcctgatccgctggtcgcgcgtgacttgattaagaaattcaatcccgatgtgctgacgctggatgttgaaatgccgcggatggacggactggatttcctcgaaaaattaatgcgtttgcgtccaatgcccgttgtgatggtttcttccttgaccggcaaaggatcagaagtcacgctgcgcgcgctggagctgggggcaatagattttgtcaccaaaccgcaactgggtattcgcgaaggaatgctggcgtatagcgaaatgattgctgaaaaggtgcgtacggcagcaaaggcgagccttgcagcacataagccattgtcagcaccgacaacgctgaaggcgggtccgttgttgagttctgaaaaactgattgcgattggtgcttcaacgggtggaactgaggcaattcgtcacgtactgcaaccgttgccgctttccagcccggcattgttaattacccaacatatgccgcccggtttcacccgctcttttgccgacagacttaataagctttgccagatcggggttaaagaagccgaagacggagaacgtgtcttgccggggcatgcctatattgcgccgggcgatcggcatatggaactggcgcgtagtggcgcaaattatcaaatcaaaattcacgacggcccggcggttaaccgtcatcggccttcggtagatgtgttgttccattctgtcgccaaacaggcggggtgtaatgcggttggggtgatcctgaccggtatgggcaacgacggcgcggcgggaatgttggcgatgcgtcaggcgggggcatggacccttgcgcaaaacgaagcaagttgcgtggtgttcggcatgccgcgcgaggccatcaatatgggtggtgtctgcgaagtggtcgatcttagccaggtaagccagcaaatgttggcaaaaattagtgccggacaggcgatacgtatttaa

SEQ ID NO: 487935 - DNA, 657 bp, Shigella sonnei
atgcctgcgatcaatgccaaacgtgtttaccggatcatgcgccagaatgcgctgttgcttgagcgaaaacctgctgtaccgccatcgaaacgggcacatacaggcagagtggccgtgaaagaaagcaatcagcgatggtgctctgacgggttcgagttctgctgtgataacggagagagactgcgtgtcacgttcgcgctggactgctgtgatcgtgaggcactgcactgggcggtgactaccggcggcttcaacagtgaaacagtacaggacgtcatgctgggagcggtggaacgccgcttcggcaacgatcttccgtcgtctccagtggagtggctgacggataatggttcatgctaccgggctaatgaaacacgccagttcgcccggatgttgggacttgaaccgaagaacacggcggtgcggagtccggagagtaacggaatagcagagagcttcgtgaaaacgataaagcgtgactacatcagtatcatgcccaaaccagacgggttaacggcagcaaagaaccttgcagaggcgttcgagcattataacgaatggcatccgcatagtgcgctgggttatcgctcgccacgggaatatctgtggcagcgggcttgtaatgggttaagtgataacagatgtctggaaatatag

SEQ ID NO: 487936 - DNA, 1200 bp, Shigella sonnei
atgttgtccgcttttactccccgcccgctgaaacgtctgttcacggccaaccagtgctggacgtccttcctggatgcgggcggtctgcgcgatatcgaggttgaggctgtcacaaaaatgctggcctgcggcacgcggatactgggagtgaaggaatacaactgcgataaacctgagtgcccccacgtcagatacgtcactaactcatgcggcagccgtgcctgcccgtcctgcggaaaaaaggccacagacctgtggatagcgacacagctgaatcgtcttcctgactgcgactgggtacatctggtcttcaccctgccggacacgctgtggccggtgttcgaaagcaaccggtggctgctgaatgacgtgtgccgtctggcggtggagaatctgctgtatgccgcccggaaacgggggcaggaacccggtatcttctgcgccatccacacgtatggccgtcgtctcaactggcatccgcatgtacatgtgtctgtaacctgtggatgtctgaataagcatggtcagtggaaaaagctgagcttcctgaaagacgcgatgcgttcgcggtggatgtggaatatgcggcaacggcttctgaaagcgtggtcagaggggctggcgatgccggagtcgttgtcacatatcacgacggaatcacagtggagaagcctggtgctgaaagccggaggaaaatactggcatgtgtacatgtcgaaaaaaacggccggcgggaggaatacggcgcgctacctgggtcgttatctgaagaagccgccgatagcggcctcccggctggcacattacaacggaggggcgagcctgagcttccgttacctggaccacaaaacgggagaaacggcgacggaaacgctgacacagcgtgagctggtcgcgaggctgaaacagcacatcccggagaagttttttaagatggtgaggtacttcgggttccttgccaaccgggtgtgtggagagaagctgccgcaggtgtaccgtgctctggggatggataaaccggaaccagtggcgaaagtgtgctatgcacaaatggtgaaacagttcctgagtcgtgacccgttcgaatgcgtgctgtgtggcggccggatggtataccgccgggccattgcggggctgaatgtggaggggctgaagaaaaacgcgcgggatatcagtctgctgaggtatatgccggcctga

SEQ ID NO: 487937 - DNA, 189 bp, Shigella sonnei; identical to SEQ ID NO: 469030

SEQ ID NO: 487938 - DNA, 276 bp, Shigella sonnei
gtggcttctgtttctatcagctgtccctcctgttcagctactgacggggtggtgcgtaacggcaaaagcactgccggacatcagcgctatctctgctctcactgccgtaaaacatggcaactgcagttcacttacaccgcttctcaacccggtacgcaccagaaaatcattgatatggccatgaatggcgttggatgccgggcaacagcacgcattatgggcgttggcctcaacacgattttacgtcacttaaaaaactcaggccgcagtcggtaa

SEQ ID NO: 487939 - DNA, 657 bp, Shigella sonnei; identical to SEQ ID NO: 463703

SEQ ID NO: 487940 - DNA, 522 bp, Shigella sonnei
ttgacgcttttcggacgacgtcgcggcagcggcgaaaccatctgggatatcaaaaagcatatcggttacgtcagcagtagtttgcatctggattaccgggtcagcactaccgtgcgtaatgtgattctttctggctattttgattcgattggcatttatcaggccgtttcggatcgccagcaaaaactggtgcagcagtggctggatattctcggcattgataaacgtacggctgacgctccgttccatagtctttcctggggacagcagcgtctggcgctgatcgtccgcgcactggtgaaacatccgacgttgcttattctcgatgaaccactacaggggcttgatccgctcaatcgccagcttatccgccgttttgttgatgtgctgattagcgaaggtgaaacgcaattgttatttgtttcgcaccacgctgaagatgcgcctgcctgtattacccatcgccttgagttcgtgccggacggtggactctatcgctatgtgctgacaaaaatatattga

SEQ ID NO: 487941 - DNA, 657 bp, Shigella sonnei; identical to SEQ ID NO: 463703

SEQ ID NO: 487942 - DNA, 330 bp, Shigella sonnei; identical to SEQ ID NO: 483867

SEQ ID NO: 487943 - DNA, 552 bp, Shigella sonnei
atgaaaaaacaaccactactctggatgacgatagccgccgcactgctgtccggctgcacaggccacagggaacatcacccgcaggtgacattcacggtcgataccgtgcgaacagacacaacggccagcaacccaatcagcctggcggaaaaatacggaagccttcttaatgagcgccatccggacctgtttgccggtgctcaggggagtatttcacgcagtgcattttttaatggcagcctgacgctgacacctgaaacgctccacgggatgatacagaatacgccctgtgttgaatcactggtaacgtccgtaggtccggataccttcactgcagatgtctctcccggtgtcagaatgcaggtatcaccggatattcacggtgcgcccggaaatatcactctgcgactctcgaccacagaccagaaacgaaaacagactgttgaacaaagcatttctctcagaccggaacagtcccttgtcgtgaatggattcaccggagacggagctggcgaaaagcgcgtcgttctcatcacacctcacgtgcgttaa

SEQ ID NO: 487944 - DNA, 297 bp, Shigella sonnei; identical to SEQ ID NO: 109544

SEQ ID NO: 487945 - DNA, 474 bp, Shigella sonnei
atgactagtctaaaaactagtattaagactatcacttatttaagtgatactggttgtctggagattcagggggccagtctaggatggcaaattgatccggcagggctacgttattcactcaactggttctgggatcatttccagttgccgctgtttattgtcgaaaatggatttggtgcggttgaccagagacaagctgacggcacggtgaacgatcactatcgcattgattactttgcttcccatattcgggaaatgaaaaaagccgtagttgaagatggtgttgacttaattggctacaccccgtggggctgcattgacctggtttctgccggaacaggggaaatgaaaaagcgctacggaatgatttatgtcgataaagacaacgaagggaagggaacgttggaacggatacgtaaagcgtcgttttactggtatcgggatctcatcgccaacaatggcgaaaatatttga

SEQ ID NO: 487946 - DNA, 330 bp, Shigella sonnei
atggagacgtttcactggaaagtgcgcccggatatgaatgtggtatcagagccgaaagtggtgacagtgaagctgggcgatggttatgaacagcgtcgtgcggcgggactgaataaccagttgtcgatttacagcgtgacgatacgtgttcgtaaatgtgaacacccatctttaaaagcctttctggaacggcacggtggcgtccgcgcatttcagtggacgccaccttatgactggaagccgatcagggtggtttgtcgtaaatggtcggcaagcgtgggggcgctgtggataaccataacggcagattttgaacaggtcgtggcatag

SEQ ID NO: 487947 - DNA, 3066 bp, Shigella sonnei
atggaccagatagccaacctggtcattgatttggggattgatgcggcagagtttaaaaatgaaattccccgtatcaaaaaccttctgaatggtgcagccagcgatgcagaacggtcttctgcccgtatgcagcgttttatggagcgtcagactcaggccgcccggcagacaatgcaggcggcttcttcggctgcaacagccgcatccgtccatgcgcagacggtggagaagagcgcacaggctcatgaacgcatggcccgcgaggtggagcaaacccgccagcgtatggaggcactgagccagaaaatgcgcgaggaacaggcgcaggccatggctctggcggagactcaggataaagcggctgccgcgttttatcgtcagattgacagtgtgaaacaggccagtgcggggctgcaggaattacagcgtattcagcagcagatccgacaggccagaaacagtggcgggattggtcagcaggattatctggcgctgatttctgaggttacggcgaaaaccggtgttcttacgcaggctgaggcagaggctacccgacagaaagtggcgtttatccgtcagcttaaagagcaggcaacccgccagaatctttcttcttctgagttgcttcgtgctaaggctgcccagctgggggtaagcagtgctgcagaagtgtatatccgcaaaatggagcaggcaggaaaagccacgcattcgctgggtctgaaaagtgcagcggcccgccaggagataggcgttctgataggtgaactggctcgcggcaatttaggtgcgctgaggggatccgggataacgctggctaaccgtgccggatggatagacacactgatgtcaccgaaaggcatgatgctgggcggggttattggcggtattgccgcggccgtctatggtctgggtaaagcctggtatgatggtcagaaggagggggaagaatttaaccgccagttgtcgctgacggggcattatgccggagtcactgccgggcagctgtggacgctcagtcgtgctatttccgggaatggtattacgcaacatgctgcagccggtgcgctggctcaggtggtggggagtggtgcatttcgtggaaacgatatcggtatggtggcgagagctgccgcacagatggagcgatcggttggccagtcggtcagcgataccataaatcagtttaagcggctgaaggatgatcctgtaaatgccgcgaaggctctggacaatgagctgcattttcttactgccactcagcttgagcagatacgcgtccttggggaacaggggcggtccagtgatgcggcacggatagccatgtctgcactggcagaggaaaccggtcggcgtactgcggatattgataataacctcaatgcgctgggcagtacgctgaagtatctgtctgatttatggagtcgtttctgggatgcggccatgaatattggtcgtgaagactcgctggatgaacagatttccgctttacaggagaaagtgtcgcgggcgaaaagactcccctggacggcatcatcttctcaggttgagtacgatcagcagcgtcttaacgagcttcaggagaaaaaacgccagaaggatttgcaggatgcaaaagagcaggcagagcggaattatcaggagcaacagaaacgccgtaatgctgaaaatgctgcactgaaccggatgaatgaaacggaagcagcacgacatcagcgtgaaattgcgcgtattaattccatgcagtacgccgatcaggctgtcagggatgcggcgatacaacgtgaaaatgaacgttacgagaaagccctggcatccggtaagaaaaaaacacgcgaaccccgtaatgatgaggccacccggttattgctgcagtacagtcagcaacaggcacaggtggaaggacagattgctgctgccagacagtcagcaggcattgccacggaaaggatgacagaagcgcataaacagcttctggctctgcagcagcgcatcagcgacctggacgggaaaaaactgacggcagatgaaaagagtgtgctggcccgtaaagatgaactgattcaggcactgacgctgctggatgtaaaacagcaggagcttcagaaacagacggcactcaacgagctgaagaaaaaaacaattcagctgaccagtcaactggctgaagaagagcgcgctcagcgtcagcaacatgacctggatatcgccacggtgggtatgggtgatcagcagcggcagcgatatcaggtacaactgagtcttcgccagaaataccagcaacagctggagcagttgaggcgggatagtgagcagaaaggaacatataacacggatgactacagaaaggccgagcaggcgctgacggagagcctgaaccgacaactgaatgagaatcgccgttactggcaacagcttgaagttgtgcagggtaactggaaaaacggagtcctgcgtgcatttcaggattttaccgtggatgcagataatacggcaggaacagcagaacaggtgttctcgtcagccttcagcaacatgggaaatggcctggcaacttttgtcactaccggcaaactcaatttcaaatccttcacctcttctgtgctgtcagatatggcgaaaatcctggcgcaggcaaccatgatgaaatcgataaaagggattggcagtgtactgggatttgatctcagcagcctttccctgaatgccaatggggggatttatcagtctgctgatttgagtcgttacagtggcacggtggttaaccgtccgacgttttttgcttttgcaaaaggcgcgggtgtgatgggggaagcgggacctgaagccattctgccactgcgtcgtggtgctgacggtaagctgggggttgtggcggatattggtggttcaggtatggcgatgtttgccccgcagtacaacatcgagatcaataacgatggcacgaacgggcagataggtccggctgccctgaaggtggtttatgacctcgggaaaaaagcggcagcggactttatgcaacagcaggcccgtgatggtggtcggttaagtggagcatatcggtaa

SEQ ID NO: 487948 - DNA, 657 bp, Shigella sonnei; identical to SEQ ID NO: 463703

SEQ ID NO: 487949 - DNA, 210 bp, Shigella sonnei; identical to SEQ ID NO: 9340

SEQ ID NO: 487950 - DNA, 276 bp, Shigella sonnei; identical to SEQ ID NO: 484087

SEQ ID NO: 487951 - DNA, 276 bp, Shigella sonnei; identical to SEQ ID NO: 484087

SEQ ID NO: 487952 - DNA, 393 bp, Shigella sonnei; identical to SEQ ID NO: 382358

SEQ ID NO: 487953 - DNA, 972 bp, Shigella sonnei; identical to SEQ ID NO: 233786

SEQ ID NO: 487954 - DNA, 645 bp, Shigella sonnei; identical to SEQ ID NO: 233785

SEQ ID NO: 487955 - DNA, 276 bp, Shigella sonnei
atggtgaagaaacccagccagcaagcattaaacagagctgcagttacggtagaacaagcagaggctctggctcagcgccttgcggataaaccatacggagcgccggaaaaacccgaaccagaaaaacaatgtcggacgacaatctctcttggtgaaagcatgcttgtcacaatagaagatctggcattgaggaataaacgcaatggtaaagatccaaaaaatgtaagtgccatcgtcagagtagcccttgagcaatacttaaaaacactaacgtaa

SEQ ID NO: 487956 - DNA, 609 bp, Shigella sonnei
atgaaaaagggaaaaacgttagaaccggggctgctggccagcgacagcgactggcacaataatgcctgcctgaattacatgccggatcatggtacagcttacaccgaaggttacaggcgagctgctgatattctgattaaccacattgatgaatccgggcgggaccaggattttctggtttatccggtgttgtttctctaccgacatcacttggagctccttatcaaacaaattatcggactggcccttgcactggcagaagacccggataaacaccagtacaaaaaagatgaccataacctgaataatctatggccgctggcacaaaagctgatcctggaagttgatgacagctaccggccttccgattttaaaatcgtcaaagaggtggttaaagctcttcaccaagcggatgaacgggcgacagatttccgatatgccaggagaaatgacggcacccggagccttgaaggaattcattacgtcaacacccgccgctttggggaaaaaatgggagaggcttccgatttacttgacggggtcgacaatggcctccggtacctgctggactgtaaagccgaatggaatcaaattctggacagcttctga

SEQ ID NO: 487957 - DNA, 351 bp, Shigella sonnei
atgtttactgcattcaatgagagaaatgatttcagttatgcttttgaaaaaattcgcaatgcgatttccgcgccaggagaaaataatgtttatgctgccacagaattaggtcttggcattctgctccgtaaatacgagcagtttcgccgggagctggatgtggccggtgagctgggaaactgggaatacgatctcgatacctacaatcactgtattgcggtgctgcaacgttacttcactggcaatccatccggactgacagaacgtgacgcccggatttacagtcagtacctgcagactgagcacaaagggtttgtgaagctggctgaagaactggcagctgaccgctga

SEQ ID NO: 487958 - DNA, 435 bp, Shigella sonnei
atgtacggaacatgcgaaacgctctgccgggcgctggcagcaaagtatccgggagatacgccgctgatgctggttatctggtccccggaagagattcaggccctcgctgacggaatggatatttccctgtccgatcatgaaatcaggactgtcctggcgcgcctggaggacatcccggaagaccagcggactgaatccggtatttcttccggtgcggcgatggagatcatcaataacgtgagagaaaaccgccaggtgaccgtcccggctgaactgctggcgtccctgattcagaccgctgaacaggcattgtggaagcgtgaatgggccgcccgtgataacggcctcgccgtcccggaatgcgtcacccgccgacaggcggtggttaatcaggcccgcgccctgctgaaaaacaacacacacgaaaactactga

SEQ ID NO: 487959 - DNA, 168 bp, Shigella sonnei; identical to SEQ ID NO: 10760

SEQ ID NO: 487960 - DNA, 195 bp, Shigella sonnei
atgaacaagcagcagcaagccgtactcaacatggcaggattcataaaaagccagagcctgacgctgctcgaaaagctggacgcactcgatgctgacgaacaggctaccatgtgtgagaagctgcacgaactcgcagaagaactccagaacagcatccagacacgctttgaagtagaaaatagcacagagagataa

SEQ ID NO: 487961 - DNA, 525 bp, Shigella sonnei
gtggatgcaacagttagcttttatcaaacgctatctgaaaaatatggtgaaaaatattcaaaaatggcacaggaacttgctgataaatctaaaggtaagaaaatcagcaatgtgaatgaagctctagctgcttttgagaaatacaaggatgtattaaataagaaattcagcaaagcagaccgtgatgcaattttcaatgcactggaggcggttaagtatgaagactgggctaagcatttagatcagtttgccaagtacttgaagattacgggacatgtttcttttggatatgatgtggtatctgatatcctaaaaattaaggatacaggtgactggaagccgctatttcttacattagagaagaaagctgtagatgctggagttagttatgttgttgttttactttttagtgtgcttgctggaactacattaggtatctgggggattgctattgttacaggcattctatgtgcctttattgataagaataaacttaatactataaatgaggtgttgggtatttaa

SEQ ID NO: 487962 - DNA, 261 bp, Shigella sonnei
atgatcattaatggtaaaaagataaaagcaaaagagatcatggaaatgacaggccgtagtgaaaggactgttagaaaatatttttctcaacctcgtgaagtctatgaagatgaagcggctgaacgtagaagaaaagcgtatgagctgagagagaaaggcttaaagtggaaagatgtaggaaaagagttagatacttctctacatggtgcggtagctctttataagcgttatttgaagttagatttaaaccaacaacaatag

SEQ ID NO: 487963 - DNA, 864 bp, Shigella sonnei
atgataatacaagataaccatactatagaaatatttaaaaatcaattacctgtgaagccttactgttccaacaatttagaaaatggtcttagtatcaggaacaaaaacaaagcacttgagatgctttaccttcaagcaaatcagccagctatacagacgtgcttactgttcgatctcgatgagaacaacgctttctacaagtttgaagatgtagggcttcccgttcctacgttcatcaccaaatcgccggatagtggtaggtgtcattatggctatatgcttaaagcaggtgtctgcaaaactcaacacgcaaagctgaagccattgaagtatgcagcagccgtagaagctggcattgctggtaagttagcttctgatcgtgggtatgccggactgattaccaaaaacccactgcatagccattggtcgccttattggtcaggtgctgatctgtatgagctggattatttagctgattttgttgagctggagacaccaaagaaggccaaaaaatcagagaactacgggcttgggcgtaatgttaacctgtttgaagatttaaggacttatgcttatagacgagttcttaaatttaaaaaggactcaacttatgaagcgtgggaacgtgatgttttaaatgtagctgaaggactcaatactcattgtaatgctttaaatccgctacaatataatgagataaaagcaactgcgagatctgttagtcgctggacttggaagcattttgatagtgctactttttcagatatacaatcaaacagaggtaaaagaaacttaggcaaaacaaaaagaaccagtgctaaaaatgaaatgttagaaatattaatgagcaagggggcgttatga

SEQ ID NO: 487964 - DNA, 300 bp, Shigella sonnei; identical to SEQ ID NO: 5277

SEQ ID NO: 487965 - DNA, 306 bp, Shigella sonnei; identical to SEQ ID NO: 209200

SEQ ID NO: 487966 - DNA, 177 bp, Shigella sonnei; identical to SEQ ID NO: 5279

SEQ ID NO: 487967 - DNA, 1041 bp, Shigella sonnei; identical to SEQ ID NO: 485547

SEQ ID NO: 487968 - DNA, 657 bp, Shigella sonnei; identical to SEQ ID NO: 463703

SEQ ID NO: 487969 - DNA, 156 bp, Shigella sonnei
atgaatactatcgatcttggcaacaacgaatctctggtatgtggcgtgtttcccaatcaagacggcacattcaccgccatgacgtataccaaaagcaaaacgtttaaaaccgaagctggcgcacgtcgttggttgggaagacattcaggtgagtaa

SEQ ID NO: 487970 - DNA, 1347 bp, Shigella sonnei
atgccaatgatacttgtaaagaagaatccccggggcaaagtgattcgggagcttagcagtgaggaagagactgcagtaaagacggtctgtggactgaaaaggccagcaaccatggcacaacataacctggccaatgatcttctccgggaaatgcgtgagtatgatgcatggttacagtgtgactgtattccgggagattcgccggccatgaattttgctgctcttaaaaacaatacgggtactctttatctgtccagttttaatcatgagcatgcacctgaatgccccatgtatcgtcagttatccggaaatgaagaggaaacatccttcggagcaagccggcatcccgttagcacccgtataaattacagaaactttttaccacctgatgacagtaattctgttatcagactgcaggcccgctctgcttaccataatggtgagcgctcctccgttcgcaagaaacgtccgcgccttggccgtttactcctgtcgcttattgaagatgcagggctgaataaactggattccctggctaatccccgtatccggactaattatcgtgaatgtcttgatgccatacggcaggttacactgcagcaggagtatatgcggggaagatccttatctgaaattatccatttccggcctggaatgtctgaaaggtctcaggagcggttaatggaaacgctggagaattcagaacgacactggcctgccagaagaaaacatatgttctttcagatttttatggcgcagcacatctgtcgtgatgctgtggaaattcactgggcgaacggtaatattcaggtcatcagacctgtgcgggggatcagtattaatggtgaagcgcagggcggaatacgtcccccttactgggttattcttgctttttgccggagtgccgatggcagaatcatctgcagtgaagggtatgctcatgctctttatcaactgacatgtccggtgcctgtggacagcaaactggaacgaaacacgctcactgctcttctgaatgtggccagctggcttaaaagaaagccaggtacgccggaattaagtctggaaaggcccctgtttgatacagaagtttatgttaatggtgaaaagaaatatgtactgccggatttcattgtcacagcaagggctcctgacggaaagacggccagagtggtcatcgaaacgatgggatatgaagacagtgattactgcgcgagaaaatccaggcagcataccggcatgaagcagattggtgttctgcataccgatccaccgaaatggctggataacgatcatcccccttttgagaaacatatgtacggtgtttttatgcatctcaggtactga

SEQ ID NO: 487971 - DNA, 252 bp, Shigella sonnei; identical to SEQ ID NO: 403760

SEQ ID NO: 487972 - DNA, 657 bp, Shigella sonnei
atgcctgcgatcaatgccaaacgtgtttaccggatcatgcgccagaatgcgctgttgcttgagcgaaaacctgctgtaccgccatcgaaacgggcacatacaggcagagtggccgtgaaagaaagcaatcagcgatggtgctctgacgggttcgagttctgctgtgataacggagagagactgcgtgtcacgttcgcgctggactgctgtgatcgtgaagcactgcactgggcggtgactaccggcggcttcaacagtgaaacagtacaggacgtcatgctgggagcggtggaacgccgcttcggcaacgatcttccgtcgtctccagtggagtggctgacggataatggttcatgctaccgggctaatgaaacacgccagttcgcccggatgttgggacttgaaccgaagaacacggcggtgcggagtccggagagtaacggaatagcagagagcttcgtgaaaacgataaagcgtgactacatcagtatcatgcccaaaccagacgggttaacggcagcaaagaaccttgcagaggcgttcgagcattataacgaatggcatccgcatagtgcgctgggttatcgctcgccacgggaatatctgcggcagcgggcttgtaatgggttaagtgataacagatgtctggaaatatag

SEQ ID NO: 487973 - DNA, 528 bp, Shigella sonnei; identical to SEQ ID NO: 469185

SEQ ID NO: 487974 - DNA, 378 bp, Shigella sonnei
ttgcggcgcagtgatatcgcaaggcacaccgagcagggaattctggttatcggtggggctgttcgccagaaaaaatttgacccgttgtcagttgatctgcccgactggttgccagaaacactctggcatgagtgggtccagttcaggcaggcattgcgaaaaccgattcgaacggagcagggcgctaacggggcgatacgggaactggaaaaattccgtcagcagggttttacacctgagcaggtgattcgacacagcatcgccaatgaataccagggtctgttcgcgccgaaaggtgttcggcctgagacgttgctccgacaggttaacaccgtctcgttgccggacagtgcgatcccgccaggcttcagggggtaa

SEQ ID NO: 487975 - DNA, 417 bp, Shigella sonnei
atggcgaaaccttttactcccgaacagcgggaagaactgaagacgcgaattgtggaactcgtgcatcaggacggtcgggtcacgattcggcagttgtcagatgaaacaggtatcagtcgtgcgtctgtcggtcgcttatgcatggaactggtcgcaagtggtgatgtatataattctggctacggggtatttccctctgaacaggctcataaagactggcaaaacgcccgcaaaaagctatcgagggtaaaggtgaagaaaccggttgtggttgatcctgaccttatctggtcattaccagacggagaaatacgccgctacgacaggcgcctgaatataatctgtcgcgagtgccggaagagcgaagctatgaggtgtactggcaatagcggacactaccatttgttctttttttaa

SEQ ID NO: 487976 - DNA, 1881 bp, Shigella sonnei
atgtctgaccctgtacgtattacaaatcccggtgcagaatcgctggggtatgattcagatggccatgaaattatggccgttgatatttatgtaaaccctccacgtgtcgatgtctttcatggtaccccgcctgcatggagttccttcgggaacaaaaccatctggggcggaaacgagtgggttgatgattccccaacccgaagtgatatcgaaaaaagggacaaggaaatcacagcgtacaaaaacacgctcagcgcgcagcagaaagagaatgagaataagcgtactgaagccggaaaacgcctctctgcggcgattgctgcaagggaaaaagatgaaaacacactgaaaacactccgtgccggaaacgcagatgccgctgatattacacgacaggagttcagactcctgcaggcagagctgagagaatacggattccgtactgaaatcgccggatatgacgccctccggctgcatacagagagccggatgctgtttgctgatgctgattctcttcgtatatctccccgggaggccaggtcgttaatcgaacaggctgaaaaacggcagaaggatgcgcagaacgcagacaagaaggccgctgatatgcttgctgaatacgagcgcagaaaaggtattctggacacccggttgtcagagctggaaaaaaatggcggggcagcccttgccgttcttgatgcacaacaggcccgtctgctcgggcagcagacacggaatgacagggccatttcagaggcccggaataaactcagttcagtgacggaatcgcttaacacggcccgtaatgcattaaccagagctgaacaacagctgacgcaacagaaaaacacgcctgacggcaaaacgatagtttcccctgaaaaattcccggggcgttcatcaacaaatcattctattgttgtgagcggtgatccgagatttgccggtacgataaaaatcacaaccagcgcagtcatcgataaccgtgcaaacctgaattatcttctgagccattccggtctggactataaacgcaatattctgaatgaccagaatccggtggtgacagaggatgtggaaggtgacaagaaaatttataatgctgaagttgctgaatgggataagttacggcaaagattgcttgatgccagaaataaaatcacctctgctgaatctgcggtaaattcggcgagaaataacctcagtgccagaacaaatgagcaaaagcatgcaaatgacgctcttaatgccctgttgaaggaaaaagagaatatccgtaaccagctttccggcatcaatcagaagatagcggaagagaaaagaaaacaggatgaactgaaggcaacgaaagacgcaattaatttcacaacagagttcctgaaatcagtttcagaaaaatatggtgcaaaagctgagcagttagccagagagatggccgggcaggctaaagggaagaaaatacgtaatgttgaagaggcattaaaaacgtatgaaaagtaccgggctgacattaacaaaaaaattaatgcaaaagatcgtgcagcgattgccgcagcccttgagtctgtgaagctgtctgatatatcgtctaatctgaacagattcagtcggggactgggatatgcaggaaaatttacaagtcttgctgactggatcactgagtttggtaaggctgtccggacagagaactggcgtcctctttttgttaaaacagaaaccatcatagcaggcaatgccgcaacggctcttgtggcactggtcttcagtattcttaccggaagcgctttaggcattatcgggtatggtttactgatggctgtcaccggtgctctgattgatgaatcgcttgtggaaaaagcgaataagttctggggtatttaa

SEQ ID NO: 487977 - DNA, 657 bp, Shigella sonnei; identical to SEQ ID NO: 463703

SEQ ID NO: 487978 - DNA, 1167 bp, Shigella sonnei
atgcacactgttgctgatgtgatgacaggaaacgatggtgaatactgtttccatgcgcggactggaaaatatggtgtgtatctgaaaccgggctggcacaacgagtacaacgttggcgacattgctgtatatgaggactcaaagcccggcacgctgaatgactttctgattgctcctgatgagggcgacctgaaaccggatgtcgtcaaacgctttgaggaaatggtggcgcaggcgcagcagagcgccggggccgcagccggaaacgcacagcagacggcgcaggatgtggcggcagccgcaggttatgcccgcgcagcagagcaggccaaaaatgacattgatgctgcgctgaccggcactctgaaaacggctaaccatctgtctgaaatcgcagcagcaggcgaaaaggcacaacagaagtcccgggataatctggggctgaaaagtgcggccacgatggaagcacagagcgacatttacgaccggacaaaaggccgtctggcgatacccggcgcattcggctttgggtgtgcttttctgcctgaagatgttatccgttttgacactaagagtgatttcctggcctgggtaaggaatgcgctgccaggtgaatattccgttgctggcccctacgacatcatcatacccgacacacggtttgaaggggtgctcagcatccggtggactgatgcacgccctgagacaacagaaccgaggtacagagccaaatcccttactttttacggcattaacggccccatttatcacacccgctactgctactggcccatatccagactgactggctgggtgaaaataaatataaccacagaagatattatttacagaatcgtggcgagctctgtctgcaacagatggggagaccctgacattggcgggctgattattgctgcgtaccagggagaagctgacggtgataaagtcatcagacttgtcagggggcagtcatacagaggctcacgactgggaccggtggggatttcagtgcccagtactcccaccggaacgtatatagcatccccacaatttttcattacgggatgttcagagcattcattaccggggtcatatagcgccctgtccggggtgccggatgctcatgtctctggcgcaatgcccgggctttttattcgcacatcgtga

SEQ ID NO: 487979 - DNA, 1254 bp, Shigella sonnei
atgccattctatttcaggaaggagtgtccgttaaactcaggctacctcattattctgaaatcccgggtaaacaccccggaagtggtgatgcacactgttgctgatgtgatgacaggaaacgatggtgaatactgtttccatgcgcggactggaaaatatggtgtgtatctgaaaccgggctggcacaacgagtacaacgttggcgacattgctgtatatgaggactcaaagcccggcacgctgaatgactttctgattgctcctgatgagggcgacctgaaaccggatgtcgtcaaacgctttgaggaaatggtggcgcaggcgcagcagagcgccggggccgcagccggaaacgcacagcagacggcgcaggatgtggcggcagccgcaggttatgcccgcgcagcagagcaggccaaaaatgacattgatgctgcgctgaccggcactctgaaaacggctaaccatctgtctgaaatcgcagcagcaggcgaaaaggcacaacagaagtcccgggataatctggggctgaaaagtgcggccacgatggaagcacagagcgacatttacgaccggacaaaaggccgtctggcgatacccggcgcattcggctttgggtgtgcttttctgcctgaagatgttatccgttttgacactaagagtgatttcctggcctgggtaaggaatgcgctgccaggtgaatattccgttgctggcccctacgacatcatcatacccgacacacggtttgaaggggtgctcagcatccggtggactgatgcacgccctgagacaacagaaccgaggtacagagccaaatcccttactttttacggcattaacggccccatttatcacacccgctactgctactggcccatatccagactgactggctgggtgaaaataaatataaccacagaagatattatttacagaatcgtggcgagctctgtctgcaacagatggggagaccctgacattggcgggctgattattgctgcgtaccagggagaagctgacggtgataaagtcatcagacttgtcagggggcagtcatacagaggctcacgactgggaccggtggggatttcagtgcccagtactcccaccggaacgtatatagcatccccacaatttttcattacgggatgttcagagcattcattaccggggtcatatagcgccctgtccggggtgccggatgctcatgtctctggcgcaatgcccgggctttttattcgcacatcgtga

SEQ ID NO: 487980 - DNA, 657 bp, Shigella sonnei; identical to SEQ ID NO: 463703

SEQ ID NO: 487981 - DNA, 1287 bp, Shigella sonnei; identical to SEQ ID NO: 486968

SEQ ID NO: 487982 - DNA, 657 bp, Shigella sonnei
atgcctgcgatcaatgccaaacgtgtttaccggatcatgcgccagaatgcgctgttgcttgagcgaaaacctgctgtaccgccatcgaaacgggcacatacaggcagagtggccgtgaaagaaagcaatcagcgatggtgctctgacgggttcgagttctgctgtgataacggagagagactgcgtgtcacgttcgcgctggactgctgtgatcgtgaggcactgcactgggcggtgactaccggcggcttcaacagtgaaacagtacaggacgtcatgctgggagcggtggaacgccgcttcggcaacgatcttccgtcgtctccagtggagtggctgacggataatggtttatgctaccgggctaatgaaacacgccagttcgcccggatgttgggacttgaaccgaagaacacggcggtgcggagtccggagagtaacggaatagcagagagcttcgtgaaaacgataaagcgtgactacatcagtatcatgcccaaaccagacgggttaacggcagcaaagaaccttgcagaggcgttcgagcattataacgaatggcatccgcatagtgcgctgggttatcgctcgccacgggaatatctgcggcagcgggcttgtaatgggttaagtgataacagatgtctggaaatatag

SEQ ID NO: 487983 - DNA, 618 bp, Shigella sonnei
atgtctctggcgcaatgcccgggctttttattcgcacatcgtgaggaatgcaccgtggaaattaaaaaaatcattaatccccgttataccgaaagtggcgcagtagactgtgacgttttttttgacgacagggacctggcagtcccctacacagccaccgctgatgatgtcgcaccgacgggtcagcgaatctggcaggaactgcaaagtggcaaatggggtgagatagccccattcactgtgacaccagaaatgctggaagcggccagagaggccagacgtcaggaaattgaagcatggcgcacagaacaggaggcgaagccgttcacgtttgaatggaacggtcgtatctggaatgctggccccaactcactgggccgcctgtccccggtagtcatgctggcaaaatctgtcacagcacaaacgcatatggcgtggggtgatgccgataatcagcaggtgaaactgtcgatgccggaactggaagaactggcggcagcaatggtgcaggcgcaggtcgatcgcaacgatgagatttatcgccgtcagcgtgaaatgaaagaggagctgagcggtctggatgatttggcttcaattcgggcgtttgacgttgagtaa

SEQ ID NO: 487984 - DNA, 150 bp, Shigella sonnei; identical to SEQ ID NO: 17050

SEQ ID NO: 487985 - DNA, 132 bp, Shigella sonnei
atggacgaaaccgagtttcagcaggtttataaatctgttctgaatgtgctgtggaactggattctgttccgtaaattttcctctccggaacaagtcgaaaatgtggccgcgcagctgctggagtttgcgtaa

SEQ ID NO: 487986 - DNA, 516 bp, Shigella sonnei
gtggctgttgaagcggatgatgcggcgctttctgccgattttccggcggcggtggcactggctgaggcctgcccggcacttgttgacgcggcgctggcagacgacgcagccgctgtttttgagcctgccgcagctgaggcactctgtcccgctgccgtttcagaagacctggcgttcgtctcggacgttttggccgccttcgcagaatttgcagccgccgtcgccgaggaagctgcgctactggcgcttgatgatgcgttcgtttctgatgattttgccgcctcttttgaagccgacgcatcccgggctgaggtggcagcttctgacgctttcgtggtcgcggtggatgcagaagtggctgctgattgttgtgacgctgccgcattcgtttctgacgttttcgccgcaccggcactggtagccgccgcgctttttgaggactctgcagcggcagcacttttcgatgcttcactggcctttgttgatgccattcctgcgctggaagatgctgactga

SEQ ID NO: 487987 - DNA, 339 bp, Shigella sonnei
atgccggattttcatcgcggggatgactggtggcgtcacggccagaatctctatcttgacaatatggaggcaacgggtttttaccgtgtcccactgacagaggcgcagccgggcgatgtgctgctgtgctgttttggttcatcggtgccgaatcatgccgccatttactgtggtgacggcgagctgctgcaccatattcctgaacaactgagcaaacgagagaggtataccgacaaatggcagcgacgcacacactccctctggcgtcaccgggcatggcacgcatctgcctttacggggatttacaacgatttggccgccgcatcgaccttcgtgtga

SEQ ID NO: 487988 - DNA, 834 bp, Shigella sonnei
atggtctgccagatggaactgaccagccatctgctgacggctgcagccttcggcacgatgaagaacagcgaaaatgagcttgctgagcaacttatagaacaaaccggcgataacactctgacgttaatggataaaggttattactcactgggactgttaaatgcctggagcctggcgggagaacaccgccactggatgatacctctcagaaagggagcgcaatatgaagagctcagaaaactgggtaaaggcgatcatctggtgaagctgaaaaccagcccgcaggcacgaaaaaagtggccgggactgggaaatgaagtgacagcccgcctgctgaccgtgacgcgcaaaggaaaagtctgccatctgctgacgtcgatgacggacgccatgcgcttccccggaggagaaatggcggatctgtacagtcatcgctgggaaatcgaactgggatacagggagataaaacagacgatgcaactgagcaggctgacgctgagaagtaaaaagccggagcttgtggagcaagagctgtggggtgtcttactggcttataatctggtgagatatcagatgattaaaatggcggaacatctgaaaggttactggccgaatcaactgagtttctcagaatcatgcggaatggtgatgagaatgctgatgacattgcagggcgcttcaccgggacgtataccggagctgatgcgcgatcttgcaagtatgggacaacttgtgaaattaccgacgagaagggaaagggccttcccgagagtggtaaaggagaggccctggaaataccccacagccccgaaaaagagccagtcagttgcttaa

SEQ ID NO: 487989 - DNA, 486 bp, Shigella sonnei; identical to SEQ ID NO: 487387

SEQ ID NO: 487990 - DNA, 453 bp, Shigella sonnei
atgaccgaatccagcgattacgaatccgtccaggtctttatcggcgttgatgtcggtaaagatacgcatcacgctgttgccattaatcgttcaggtaaacgcctgttcgataaagcattacccaacgacgaaaacaaactcaggtcgctaatatctgacctgaaacaacatggtcagatactgctggttgttgatcagccagctaccatcggtgcgttacctgtcgccgttgcccgctcagaaggagtccttgtcggatacctccctggactggccatgcgccgcatagccgacttacacgccggtgaagctaaaactgatgctcgtgacgctgccatcattgccgaagctgcccgtaccctgcctcacgtgcgtattccgctctattcgatcacggattggcatcgaagttcgatcagcgattcgcatccattcgatcaaccgggaacttaa

SEQ ID NO: 487991 - DNA, 432 bp, Shigella sonnei; identical to SEQ ID NO: 487001

SEQ ID NO: 487992 - DNA, 291 bp, Shigella sonnei
atgtctcttattgacgcgcaatatttcgggttcggtcatgaaaaagtaacatattctatgctggaacagaccaattttgcattcgccgtccaggagtttgaggggaaagtagtcagtgtttacgctcagtcagggaaagtgtgcaatgataaacaacacgaaaggaatcgtagtacatgggcaccgcgattcaatattcaaggaaaacacaatacagcaatgtacttgtactgtttctattattctggcgatttcaataaaggcacttgctcgcgctctgtcattttctga

SEQ ID NO: 487993 - DNA, 150 bp, Shigella sonnei; identical to SEQ ID NO: 17050

SEQ ID NO: 487994 - DNA, 432 bp, Shigella sonnei
atgaaccatcgccggatggccgcactgacgctgctgatgaagcatatccgtcagcgggatatgctgatgtgtctggacaacctggtcagagcactgcaggacatccaggatgaagagcagattacagttcttttcaactatctgcttaatggcagcgaacatgtaacggttgaatttttgcagacgctggcgcagcgactgccgcagcacgaggacagcattatgacactggcagaacgtcttaagcaggaaggtatccagcaaggtatccagcagggtatccagcagggtatccagcagggagttcagcagggggcgcttcaaaaagcacgggaaatcgcccgggagctccggaacgcgggaatgccgacagcacaaatctgtcagctgaccggactttctgaagctgaactgaagaacatcactcactga

SEQ ID NO: 487995 - DNA, 366 bp, Shigella sonnei
atgctggaagcggccagagaggccagacgtcaggaaattgaagcatggcgcacagaacaggaggcgaagccgttcacgtttgaatggaacggtcgtatctggaatgctggccccaactcactgggccgcctgtccccggtagtcatgctggcaaaatctgtcacagcacaaacacatatggcgtggagcgatgccgataatcagcaggtgaaactgtcgatgccggaactggaagaactggcggcagcaatggtgcaggcgcaggtcgatcgcaacgatgagatttatcgccgtcagcgtgaaatgaaagaggagctgagcagtctggatgatttggcttcaattcgggcgtttgacgttaagtaa

SEQ ID NO: 487996 - DNA, 630 bp, Shigella sonnei
atgcaggggcagacttttgacaaatctgcttacccgaaacttgcagccgcttatccgtcaggcgtgatccctgatatgcgtggctggacgattaagggcaaacctgccagtggtcgggccgtattgtctcaggaacaggacggcattaaatcgcacacccacagcgccagcgcatccagtacggatttggggacgaaaaccacatcatcgtttgattacggcactaaatccacgaataacactggtgcgcatacccatagtttaagtggcagcacgaatgcagctggtaatcacagccatagagatggccgtcgatttaaccccagtgtttttaaagatacttatcaatatggttatacaagctcaggtcaaaatacctggggtgtacaaggctcagtaggtatgtctacgggggcgttagctaataccagtacagatggtaatcatagccactcactgtccggcacagcagcatctgcaggtgcacacgcgcatactgtcggtattggtgctcatacgcactctgttgcgattggctcacatggacacaccatcaccgttaacgctgctggtaacgcggaaaacaccgtcaaaaacatcgcatttaactatattgtgaggcttgcataa

SEQ ID NO: 487997 - DNA, 267 bp, Shigella sonnei
atgatcacaggaaatggaataaacactgtaactgtcaatggaaaagtgaaacacatcacagaactggatgatataacactttgtttagagtggacaaaactacgagaggaaaacaatcgtctttatgaaattaataaccaggcaaacagaggatggcgtggtttcatcctaagattgataggggttaacctgccagataaaaggactgagtttacacaatgtctcttattgacgcgcaatatttctggttcggtcatgaaaaagtaa

SEQ ID NO: 487998 - DNA, 150 bp, Shigella sonnei; identical to SEQ ID NO: 17050

SEQ ID NO: 487999 - DNA, 393 bp, Shigella sonnei
gtggtccggcgtaaggtttacgcccgttttctggatgcggtgaacttcgtcaacggaaacagtgacgccgatccggagcaggaggtgatcagccgctggcgcattgagcagtgcagcgaactgagcgcggtgagtgcctcttttgtactgtccacgccgacggaaacagatggcgctgtttttccgggacgtatcatgctggccaacacctgcacctggacctatcgcggcgatgagtgcggttatcacggtccggcggtcgcggatgaatatgaccagccaacgtccgacatcacgaaggataaatgcagcaaatgcctgagtggctgtaagtttcgcaataacgtcggcaactttggcggcttcctttccattaacaaactttcgcagtaa

SEQ ID NO: 488000 - DNA, 366 bp, Shigella sonnei
atgctggaagcggccagagaggccagacgtcaggaaattgaagcatggcgcacagaacaggaggcgaagccgttcacgtttgaatggaacggtcgtatctggaatgctggccccaactcactgggccgcctgtccccggtagtcatgctggcaaaatctgtcacagcacaaacgcatatggcgtggggtgatgccgataatcagcaggtgaaactgtcgatgccggaactggaagaactggcggcagcaatggtgcaggcgcaggtcgatcgcaacgatgagatttatcgccgtcagcgtgaaatgaaagaggagctgagcggtctggatgatttggcttcaattcgggcgtttgacgttgagtaa

SEQ ID NO: 488001 - DNA, 342 bp, Shigella sonnei
atgtttcaggattatgagggattcccggggaatatggcctctgaatgccatatcaactgggcctatgttgaaggcttccgccaggcgcgggatgaaggctgcgaagaggcttatcgtctctgggtggatgataccggtgagacggattttgacaccttccgcgatgcctggtggggcgaggctgacagtgaggaggcttttgcggttgagttcgccagtgataccggcctgctggctgacgtgccggagacggtggcgctctattttgactatgaggcgtatgcgcgggatttattcctggactccttcacctttattgacggtcatgtgttccgtcggtga

SEQ ID NO: 488002 - DNA, 282 bp, Shigella sonnei
gtggcattcagcggcgctaaacatgagcgggagaataacgatatttattcgtcatgccgcctgatagtacggaaaaacggtgctgaaatttataaccgtaccgcgctggataatacgctgatttacagtggtgttattgatatgccagctggtcgcggccacatgacgcaggagttttcggtgtcatcatggctggtaaatgactggtatcccacagcaagtatcagcgatttgctggttgtggtgatgaagaaagccaccgcaggcatcagtatcagctga

SEQ ID NO: 488003 - DNA, 150 bp, Shigella sonnei; identical to SEQ ID NO: 17050

SEQ ID NO: 488004 - DNA, 513 bp, Shigella sonnei
gtggctgttgaagcggatgatgcggcgctttctgccgattttccggcggcggtggcactggctgaggcctgcccggcacttgttgacgcggcactggcagataatgcagccgctgtttttgaacctgccgcagctgaggcgctctgtcccgctgctgtttcagaagacttagcgttcgtctcggacgtttttgccgccttcgcggaatttcctgccgccgttgccgaggaagctgcactactggcacttgatgatgcattcgtttctgaagatttcgctgcctcttttgaggccgccgcaccccgtgccgaggtggcagcttctgacgccttcgtggtcgctgtggatgcagaagtggctgccgatttttgtgatgctgcggcattcgtttctgacgttttcgcggcactggcgctggtagctgccgcgctttttgatgactctgcagcagcactttttgctgcttcacgggcctttgtcgatgccgttcctgcgctggaagacgctgactga

SEQ ID NO: 488005 - DNA, 279 bp, Shigella sonnei; identical to SEQ ID NO: 463003

SEQ ID NO: 488006 - DNA, 276 bp, Shigella sonnei; identical to SEQ ID NO: 484087

SEQ ID NO: 488007 - DNA, 207 bp, Shigella sonnei
atggtagtgtccgctattgccagtacacctcaatgggttaccgccgccagaaaagggctcggtactcctggttcccgcacggtggctgaactggaatctgaaattctgcaactgcgtaaggcgttaaatgaagctcgccttgagcgagatatattaaaaaaagcaacagcgtattttgcacaggagtcgctgaaaaatacgcgttaa

SEQ ID NO: 488008 - DNA, 381 bp, Shigella sonnei; identical to SEQ ID NO: 35582

SEQ ID NO: 488009 - DNA, 261 bp, Shigella sonnei; identical to SEQ ID NO: 17248

SEQ ID NO: 488010 - DNA, 222 bp, Shigella sonnei
atgaactatgccggacacgaaaaacttcgcgccgaagtggcggaggtggccaatgccatgtgcgacctgcgtacaaccatgaatgagatggagcggcggtacagctttaatgctgacactctgccggaacgtctggtgcgtcagacgttgtttcgcgcaaaccacctcctgatggaggcatataccgaaattctggaactggatgcgtgctttaaagattga

SEQ ID NO: 488011 - DNA, 213 bp, Shigella sonnei
atggttaacggtgaaaactggtttgaccgtaccgtgagtgctgatgccgcaggaatcattctcacttcccttgtgattaaccgccagttgtggctgtaccacgacagcggggatgcaggactgactcacctgtacaggatgcgcgatgcgcagttgtggagctacatcgaatttcaccccgaatgtaacgcgatttacgcggcgctggactga

SEQ ID NO: 488012 - DNA, 1974 bp, Shigella sonnei
atgcccttccggctgcgcggagaaaaccccgatagcaccgggcccattgtcatcggtgctgacgggattggggacgtgatgtgcttcaacgaggagtacgtcagtcagtttacgttccaaccggacgagctcatcagtgatagctttaatattcttatccgcaatcaagcccatgcggaaagagagcgtgaaatagaagaaatgacgcaaaagatccgggctgttttcacggatcacactgagctgaactctctgatagaccatctacaggaactcagtaatgctttcagatcaaccagttccgggatttcacgttcttcaaccggcatgagaggtctgtcaggcggaaataaaatacaccacattccggctggtcttgagaactatcaaccctacatccgcagtgaacgccgcgtggaatggattgactggcagacaaagggactcgagttttcgcccctttcggatggctgctgtccgttctgtaccggtgatatcacgggaaaggaagcacaaattcgccaagtcagagaggaatacgataaatccaccattaaaaacctgaccgctatcatcagactggtggaaaacctcggtaattacctgacggagagcgccagagaacgccttctggccattactatgcttcagaacggtccggaagccgaacatatcgagtacctagtggcgttgaaacgccagaccgatacgctgacagagaaactcactgcgctgagaggcctgaatgttttcagcctgcaggaacagcagaacgttcgggaggtgctcactgccaggttgattgacctgcagttcttccctgatctgcaatccgaactcatgcaggggatcaccgacagactgaacgcggcccttatggacctgataaaccttgccggaccgctgcagggaaaaattaaccggcaccgggacagcatgatccggctgatcgcacagcacaaaacaaacatcaataatttcctcacttatgcaggctataaatacagggtggatatagccggcgagggagagcagagaaaactcaggctacgacacatagattttgacgggtacgtcagcggcggtagccagcatctcagctatggagaacggaacgcctttgcgattgtgttattcatgtatgaatgcctgtcaaaaaacccgggactgattatccttgatgatcccatatcttcttttgataaaaacaagaagtttgccattcttgaaatgctgttcagacgtgcaagtggtgaatgcctgaagaaccggactgtacttatgctgacgcatgacgtggagcctgtgattgacacgctgaagtcagtcagaaggttgttcagtaatcaggtgaccgcctcctgcctgcgcctgtctgctggagtcatagaagaattacctgttaacgacggcgatatcatgacattcatgcagatctgcaaatccatcaccgcgtcagcagactgtgaggagatcattaagctcatctatcttcgtcgctactttgaaatcgttgacgaacgtggtgatgcttatcagcttctatccaatctattccatcgacgcgtcgtcccgctggattatcgcgagcctgccgctgcgggctcgggctatcccaaaatggctcctgagaaaattcagcaggccttgcgggatatccgggagtatgtggacagttttgattacccgcgacttcaggctctcgtcagcagcccagatgaaataaaaaacctgtaccgtcgctgtcgtaacggctatgaaaaactgcaggtattccgtttactggaactggatcaggaccatccggtaatacgaaaattcgttaacgaaacgtaccacattgaaaatgagttcatctgtcaactagatccgtccagattcgatctcatcccggagtacgtgattatggaatgtgacaagctcatcgccctgccaccggcagcaaaccagagctcggttgcccgtatcgcttga

SEQ ID NO: 488013 - DNA, 402 bp, Shigella sonnei; identical to SEQ ID NO: 468340

SEQ ID NO: 488014 - DNA, 231 bp, Shigella sonnei; identical to SEQ ID NO: 479837

SEQ ID NO: 488015 - DNA, 291 bp, Shigella sonnei; identical to SEQ ID NO: 113255

SEQ ID NO: 488016 - DNA, 900 bp, Shigella sonnei; identical to SEQ ID NO: 113256

SEQ ID NO: 488017 - DNA, 2226 bp, Shigella sonnei
atgaagatactgaggcagctgtggaaccagaaagggcttgatgcggcagttgaagatgtacctgaggatcgatacggtttcggtaatatcgcagaaaatatatcccgttccatccttactcttcctctggaggcttcaaatgttgtcggaatagaaggtgcatggggatcgggtaaaacaagcctccttaatctgatcctgagaaaccttgccctgaaaaaagatgctcacacgcatgtgctgcatatttctccctggctgagtggcggcagtccggttgaagcgctctttcttccggttgccacggttatccagcaggaaatggaaatacgctatcccccgaagggcttcaaaaagctctggcgtaaatatctgttgtcaccggaagctcaaaaagtgattgagtatgctcaggatacttcatcgcgcgtccttccactggttcaatatatcggacagttttccagcattattaactggatagcaggcggaataaaggtattttcagacagccgtctggctgttgatcagaaaaccacgacaaagcttcgggctgaaattgcaggacaactggtgagtctggatctgaagttcattgttgtcatggatgatctggaccgactggagccatcccaggtggcggaagtgttcaggcttgtgcgtgcagtagccgatctgccccgctttacccatattctctgttatgacaggcagattatcactcatgccgttgaacatgcgctgaatatcgaagatggcagccgttatctccagaaaatcattcagcttagttttaaattaccccgacctgaagcctttgatttacgtaatgaatttcgccagcgggctgaggctctatatcagcaaattaataatcaaccgccagactctggaatggtaagggatctcatcgcggtgactgatacctatggtgccgcactttcgacgccacgggaaatccatcaggccattaattccctgatttttctttatccggggatgcgggattttgtttatttccctgatttgtgcctgcttcagcttatacgggtgacaaacccggctctgtatgactggacagagcattacctgacagaacggtccgtgattgaaaccggtcagggtatgctttctgacggagagaaagcagacttccgggaggggcttatcagatgtatgaagacgttcagggcatcaaatgcagactcgtttctgacacttgcagactggatcccaggtatcagtggacataatgatgaatatctgaatctttttgagcccgtcagtgaggattttcgtcatatccagacgaccggtaaacgactcagcagcctgacgcactggcgatattattttgccttctcctcaccacagaatgttctgccacctgaattcttcagacagctttttgaacaggctggcgtatcggaaaaacagcagcagctttctgaattgctgctctcaaaaatcaacagtgtgggcagtctgtccggaacctggtttgaacatatactgagcagactgactccaggcctgataagagaacgtaatttcgaagagtgcgcaggactggttcattttttcttcgatcacaccgatgaggtgagcactcgcttcagtatccgtaacccatggttttccctgcgtgaaatggccattaatgaggttgtacggcatctgctgaagcatatgcaggatattgatgagaccagaacgatcacgcttatggaaaaactgatcgttacgggtgcttcgccgttctggatagctgattttatgcgggatcttatctgggaacatggacttgctcagaatgcagtaccttcgccttcagacgctcttttcagtcgcgatattacggaacggttgcgtgacaggtttgcggaacgtatgaatcaaccagaacttcagcaacagcttctcctgcgcaagtctcttctcgggtatctctacgcctggagagacatgagttcaggtgaaaccgtgaagcaatgggtcagagaagttactaccactgatgaaggccttgttaacctgttgatacgattacagaccagtgtcttcagctcccaccgaggggcatatcgccggattgcgcgtgaccaggtcagtccgttctttgatgactggccagcagtcgaagagaagttgaaggttatgctgtccggcaacgagctgactccggagcaggaagcgctcaaaacagcgctggaaaatgacgactga

SEQ ID NO: 488018 - DNA, 1089 bp, Shigella sonnei
atgctaagccagcttaacctgcgttttcacaaaaaacttatcgaggcgctgaaaacgcgtgccggtcgggaaaatacttcggtcaacgccctagccgaacgcttcctcgatgacggcctgaaaacggtcgcgcccggtgacgggtattttcagctcattgccgatccggaggccacggtccggcagctgtaccggcatatcattctgggccagaccttcggcacgtcagcgctctcccgcgacgaactgcgctttgtcctggttcacgtcagggaggccttcctgcgcgggcataataggttggccacactcccggccctggacacgctgctggacatcactggcaacctgctggcctggcaggtggagcacgatcgccctgtggacggtcactacctgaaggggattttccgcctggccgggaaaaactggacggaagagtttgaagccttccgggcagcgctgcgccccgtggtggatcagatgtatgccgaacacctcctgcgtccgctcgagagcgactgttttggcctggcggaggtgccggacgcggtgctggcagaaatcttcaccctgccgcggctgaaagctgttttcccgttgatgctgcgcggcctggactggaacacagaacaggcaagaacgctggcacaggagctgcgcccggttatttctgccgtcacggaaaccattgaggccggcacgctgcgcctggagatccgcgttgacggccagcaccccggagaacgcccgggggcctggtacaccacaccccgtctgcacctgctgatcaccggccaggacttcgtggtgccgtacggctgggaagcgttatccgaactgctgggcctgttcacgctgtatgcccggcatccggaagccctgacgcacggtcaccagggggagcgagtgatgttctccccgcccggaaacgtcacgccggagggcttcttcgggatagacggcctgcggatttttatgccggcggaggcctttgagacgctggtccgggagctcgccacgcggtgtcaagaaggcccgctggcggaggccctgaccgggctgcgctgcctgtacggagatctgtaa

SEQ ID NO: 488019 - DNA, 597 bp, Shigella sonnei; identical to SEQ ID NO: 381173

SEQ ID NO: 488020 - DNA, 501 bp, Shigella sonnei; identical to SEQ ID NO: 381174

SEQ ID NO: 488021 - DNA, 252 bp, Shigella sonnei; identical to SEQ ID NO: 381179

SEQ ID NO: 488022 - DNA, 1233 bp, Shigella sonnei
atgatgatgctaatcctgaaagcctacaaattcagactggaaccaacgcctgaacagtcgcagcgtttgcggcagttatgcggttgcgcccgttttgtctggaatttaggtcttgcggagacaaagcgcatacttgactcaggcgaaaagttaccttcggctttcgagttgaaccggatgattacagtgtggaaaaaaatgccggaatacatcttcttacaggatgcctataccgacaatctgcaacaaaagctgaaagacctgcataccgcatggaaacgttgttttgataaaaagctcgcagctaaggctccggtatggaaacgaaaaaatgagggcagagactcaatccgttttgtgaactttgagaaatattgctgccttgaaaatcgcagagtgaagctaccgtcaggtcttgggtgggtaaaattccggcaatctcaacgtgtgaacggtaaaatcaaaaatgcgacaatcagtcagttagcgggacagtggtatatctcgtttcaggttgaaattgaaacggcagaaccaaatcacacaagcacaacgatagtcggtctggatgctggcgtggctaaactcgccacgctgtcagatggcacagtctttgaacctgtaaacagttttcagaaaaaccagaagaagctggcgagacttcagcgacagttaagccgcaaggtcaaattcagcaacaactggcagaagcagaaacgcaaaatacagtgtctgcattcccgtatcgcaaatatccgcagagactaccttcataaagtcacaacgaccgtcagcaaaaaccacgcaatgatagtcattgaggatttgaaggtcagcaacatgtcaaagtcagcagcgggtacggtcagccagccggggcgcaatgtccgggcaaaatcaggtttaaaccgttcgatactggatcagggctggtatgaaatgcgccgccagcttgagtacaaacagctctggcgtggaggtcaggtgcttgctgttccgccagcgtacacaagccagcgttgcgcgtgctgtggtcatacagcgaaagaaaaccgcctgtcacaaagtcaattcagatgccaggtatgtggatatacagcgaacgccgatgtaaatggcgctcgtaacattttagcggcggggcacgccgtacttgcctgtggagggacgatgcagtcagaccgcccgttgaagcaggaaccagacgctgagcaatcagccgtcacccactaa

SEQ ID NO: 488023 - DNA, 405 bp, Shigella sonnei
atgcaaaaatataaaatcaatcgttcaagacatgctgccttccttttgcatgttcatcttgtctttgtaacaaaataccgtcgaaagatactgggagagttacactgtgcagcatttcatcagtatgcagcagaagtctgccgtgattttggggcagaacttaaagaaagtaacggagacgtcgatcatgtccacatgctgatcgaatacccaccaacagtgcagctttcggtactggttaactcactgaaagcagtgacatcccgccgtctgcgaaacgaatttcttgatttgcggggggcatacggaaaagccgtgctctggtcgaggtcatactttgctggctcctgcggaggtgcgccgctggaagttgttaggcaatacattcaacatcagcgtggctga

SEQ ID NO: 488024 - DNA, 663 bp, Shigella sonnei
atgaaagctaaaaaagaaacaacagacagatttccaacctggtggctattttattatgtattaagaaaagcttatttctttcttggaatacctttttttctgttctgcgcattaggttttaccgaaatgctatgttctgatcgttatttcggaaataaggtcgaagattatgttgtcactttcggtagttggttcttattacttgcgccaggcatatggatgtactcacgtgcaaaaacaaggagagaaaaaataagaaaagttgtacaaacaataaaagagtcaggcttctactctccagagaaggggtatgagggattatctttaacccagggagcttatttcggcattgaccttaaaaatggcacaatgttgtatgtccgtatctatccaggcaacattatggatgttatcggttttgacattcataatttcactcgtactgtaacagacgacaaaaaactggaaattcatacgaaatacatcaatctgccaatggttcctgttccatcatggtgtgctcatccagaaacagcatcaaacaccatgcacgcaatggcaagtcgaggatatgattaccctgtcgactttcctcgcctgattcaggaaaagcgtaaggagtgggagcagattgcaggtatgcctgtagctgaagtattttaa

SEQ ID NO: 488025 - DNA, 366 bp, Shigella sonnei; identical to SEQ ID NO: 10065

SEQ ID NO: 488026 - DNA, 189 bp, Shigella sonnei
atggtaaatctccctcctgagctggggtcacctgatgtatgggctggtggaggtgttgggctgattgcaggcttattacttcgctatttcatcgtcagagtgtttatcgtgttcagattgtttggtcgtgaatggtcgtttgacctcaaggacaggactcgaacagataaccatacagaaccccgttaa

SEQ ID NO: 488027 - DNA, 279 bp, Shigella sonnei
atgacaaccatttttattaaacctgcgccgggatgcctgatccgcgatcccgacacgatgactccgctctctcaggacggggaagagaaacccttcactccgttctggtgccgccgtcttaatgatggcgacgtcattgtggtggataaaacggcggagcctgccccggctgccacaactgctaataccggcgcggcggcaaaaccagcgggagcggtagcagaaaaaactgcggcggtggctgaaaaaaccgcagcatcagataaggggacgtcctga

SEQ ID NO: 488028 - DNA, 1134 bp, Shigella sonnei
atgaagacagaaaatcacccaaaagacgcaaatcgcccctccggtttagccgtgctttcagcttcgctgactgcatccggcgacggatggtgtcagttactgccagccggtcgggtaaaggcccgtgacggtcgcccggaaaaaccgactgaaggctggctgattaacgaatccgcctgtaaccggatgaaagccgggctttccgccctgcatcagccgttactgattgattatgaccatcactccgtgaatgcgcagaaaaacggattcaaggctattgctgcaggatgggttaagccggaaaacatcgaatggcgtgagggtcaggggattttcattaaacctgaatggacaccacaggcacaaaaacatattgatgaccgtgaatatgcctatctgtctgcatatatgcattatttcgctgacaccggggaaccctacctgttgcgcatggcttccctgacgaatgatccgggtattacgggtatgaaccctgtcgcggcactcagtgctgatgatctctatgtcgtttccccttctcaggagcaatcccccatgaatgagcaattacgccagttgctgacggcgctcggtctgaccgtggctgacggtgacgaatttacaccggaactgggcacggcggcgctgtctgcccttaccgggatcaaaacccgtgcggatgcgcacgacaccctgaaaacgcaggttgccagcctgtcggcagaactggaaaccgcaaaaggcacaccaactggcggcactattgatctgacgaaatatgtgcccgttgagacgtataacgccctgcgtaccgaatatgccgcgctgtcggcacaacacggcagcaccacgctggagcagttgctggataaggccgagtccgaaggacgcattttcaaaagcgaacgcggatacatggaaggactcggacaacagattggcgtcgcggcactttctgcacagcttgacgcccgccagccggttgcggctctgaccactcttcagaccgacaccgtaaccgtgccggataaaaagaccgccaccgctgtgctgtcggctgaagatatcgccgccgcacgtctgttgggtaaaaccgaagccgagttcctgaaaatgaaagaggaaatgcaataa

SEQ ID NO: 488029 - DNA, 240 bp, Shigella sonnei
atgtcagatataaaaaatgcacttgatgttgccgcattcacaatggctggaaatcttatggtaaccctgttcgataaggggctgatttcccgtgaggaggcaatacatattatcaatctcgctcaaaaaaactctaccccggaaaatgcagaagatatccaggatggctcatatattaataccgactggcatttcgacaatctccgggcctgtatggggattaccgctgaaaaagattaa

SEQ ID NO: 488030 - DNA, 288 bp, Shigella sonnei
atggaaaaagaaatcaaatttgcgcctaaatctatcgacgaagaactggctaaaatcggcatgcttgaacgtatgcgggacattatcgaatatgcgataaaagaaaatcttgcagccagagaagcccttttgataatggagcgggagattaacctgattaaggatgctgtatctctggataataaaatagcccgcgaggaatacgttcgccgtaggctcggtgttgatggttcagcaattcttacatctgaacattatgcaaaaatttttaatctttttcagcggtaa

SEQ ID NO: 488031 - DNA, 144 bp, Shigella sonnei
atggatgagcaaattgttgaatgtcccacctgtggaaatgaggacccggagtatctgaaagagtgcccacattgtggtgagataaaatgtaaccactgcgatatgggcgacgacactgcatgtataaattgtgaggatgaataa

SEQ ID NO: 488032 - DNA, 294 bp, Shigella sonnei
atgagcaaagtacgcgttatttttgaatttaatcatgtttcgcatgacgaaaagttggcaggcaatgactgtgttgaagtgcatgaaaagattggagtggatgtgaaaacagaacgtgatacggataacaggccgacgtcactctgtgacgtttatgcaagtattctccagtatcacagtcctgcaattattcagtttctctcagcggaatttcaggcatctgcacagtcttttggagcggatgccatcattaaacgccaccgcgtgcataaagcatcaggcacactgcaataa

SEQ ID NO: 488033 - DNA, 273 bp, Shigella sonnei
atgagtaaagtcgtacgcattattttcgaatacaaggaagatgttatctgcaaaaactctgatggcagcacgcacagaggggtaagtctggatatacgttcaaccggaataaagaagaaagataatggacccgccatgatttttggggtggttatgctggcagaaagcagaaacttcgcagagtttgtggcaatgaaagccagtgcattcatgaaagacagaggcatggcttccggggttattaacggtaatgaatttaatcaacaggggtaa

SEQ ID NO: 488034 - DNA, 231 bp, Shigella sonnei
atggcgagaaatgaagttaagcctgattggcatcctcaaagaattttgggggaagtcagagccagagaaggaagcatgagggcgctggcccgtaaagctggcgtgggtcagaacaatctgtacaacgcggtataccgccatgttcccaagtatgaggggattatcgcggaatgcctgggggtgccgcccgaggagatttggcccagccgctacattcgtaaggtcgcgtaa

SEQ ID NO: 488035 - DNA, 546 bp, Shigella sonnei
atgaacaagcaaacaacaacatctctttcttttcctggtggtagaaaagaaagcattgctgagcgtctgaaaaggctgattggctcccgcagcgtcagagctgcagcaagagattgggggctttcattttcaacactaaacaattatctgtctcgtggcactgagccatccttaagtgtcgcccttcagattgcgtctatcgaaggagtaagtgttgagtggctatgtggattcagtgatgcatcacaagtgaatcggtgtgagatcaaggaaaatcaagatgaaagcaagaagataattatgacgattatcagcgcacttgatgaaaaagacttagagcagctatcgaaaaatttggttctgaatggagccaagtacttagctcggttgttagagcctgaaaatcaagatctaatccgcttagaaggaaggaaaagaatagctgcattacagcttgaaggtatgtctgacgaacgcgtcagagagattttggaagaaactgagagaagtcgcaaatctaacgcggtagaaccaaaagcgggttaa

SEQ ID NO: 488036 - DNA, 1971 bp, Shigella sonnei
atgagtaccacaacacgaaaatttaaaaccattatcaccgatacgggtgcaaaaaaattagcgcaggcaaccgcgccagatgggaaacctgtccgcctgacacatatggccgtgggtgacggcggcggtactttacccacgccagacagtaagcagacccgtcttgtgcatgaggtgtggcgacataccgttaatcgcgtcaccctggacgcaacacatcagaaccacattattgcggagctggttattcctcctgaaacgggcggattctggatccgggaaattggtgtgtttgatgagcacggcgatttgatcgcggtaggcaatactgccgaaagttacaagccaaccgttgccgaaggatccggacgtgcacaaacatttcgcaccattctgaccgtatccagcactgccactgtggcgcttaccgtggataacaccatggtgatggccacagtgaattacgtggatgacaaactgaaagagcatgaacagtcacgacgtcacccggacgcctcgctgaccgcaaaaggccttgtccagctcagcaacgccaccaacagcacgtctgaaacgctggcagcgacaccaaaagccgttaaggcagtaatggatgaaacgaacaagaaagccccattaaacagcccggcactgaccggaacgccaacaacaccaactgcgcgacagggaacgaataatacccaaatcgcaagcacggctttcgttatggctgcgattgccgcacttgtagactcttcgcctgatgcactgaacacactgaacgagctggcggcggcgctgggcaacgacccgaattttgcgaccaccatgactaacgcgcttgcgggtaagcaaccgaaagatgccactctgacggcgctggcggggcttgctactgcggcagacaggtttccgtattttacggggaatgatgtcgccagcctggcaaccctgacaaaagtcgggcgggatattcttgcgaaatcgaccgttgccgccgttatcgaatacctcggtttacaggaaacggtaaatcaggcttctggcgcattacagaaaaaccagaacggcgcagatattccggggaaagataccttcaccaaaaatattggtgcctgccgcgcatatagctcatggctgaatattggtggcgatagtcaggtctggacaaccgcgcaatttatttcgtggctggagagtcagggagcatttaaccatccttactggatgtgcaaaggctcatgggcttatgcaaataataaggtcattacagatacaggttgcggaaatatttgtcttgcaggtgctgtggtggaagttattggcactcgcggcgcaatgaccatacgcgttaccacgccgagcacgtccagcggtggcggaattactaacgctcaattcacttatattaatcatggtgatgcttacgctcctggctggcgacgagactacaacacgaaaaatcaacaacctgcatttgctttagggcaaacaggaagcactgtcggaaatgataaagctgttggctggaactggaatagcggggtctataacgcaaacattggtggcgcatcgacattaatcctccacttcaatatgaatacggggagctgccctgctgtacagttccgcgtgaattacaggaacggcggtattttttatcgttcagcgcgtgatggttatggctttgaagctgactggtcagagttttacaccacaacccgcaaaccctctgcgggagatgttggtgcatatacgcaggcagaatgtaactcaaggtttattacaggtattcgccttggtggtctgttatctgttcagacatggaatggtcccggatggtctgacaggtcaggttatgttgttaccggttccgttaactcaaacagagatgaactaattgatacaactcaggcaaggccaattcagtattgcattaatgggacgtggtataacgcggggagtatttaa

SEQ ID NO: 488037 - DNA, 351 bp, Shigella sonnei
atgctgacacttgcccgccaacaacagcgacaaaatattcgctggttattatgcctgtcagttttgatgctgctggcgcttctcttaagcctttgcgccggtgaacaatggatttcgccaggtgactggtttactcctcgtggcgaactgttcgtctggcaaattcgcctgccacgtacgctggctgtattgctggttggtgcggcgctggctatatccggcgctgtaatgcaggcgttgtttgaaaatcctctgcagaacctggactacttggcgtctctaacggcgcaggcgtggggcttatcgccgcggtattgcttgggcaagggcaactccccaactgggcgctag

SEQ ID NO: 488038 - DNA, 210 bp, Shigella sonnei
atgctgcgtcagtcgccggaaggccgcacactcttttctcagcttttacatctaatgaatcgctattgtcgcggggtgattgtcgagggcgtagaaacaccggaagagtggcgtgatgttcagaactcgcccgcattcgccgcacaaggctggtttctttcacgcccggcaccgatggaaacgctgaatacggcggttctggcgctataa

SEQ ID NO: 488039 - DNA, 1095 bp, Shigella sonnei; identical to SEQ ID NO: 483848

SEQ ID NO: 488040 - DNA, 537 bp, Shigella sonnei; identical to SEQ ID NO: 486773

SEQ ID NO: 488041 - DNA, 390 bp, Shigella sonnei
atgaaaacgttaatggtatttgacccggcgatgtgttgcagcaccggcgtctgcggtacagatgttgatcaggctctggtcgatttttctgcagatgtgcaatggctcaaacaatgcggtgtacaaattgagcgtttcaatcttgcgcaacaaccgatgagctttgtacagaacgagaaggtcaaagcgtttattgaagcttccggggcagaaggtctgccattgttgttactggatggcgaaacagtgatggccgggcgttacccgaaacgcgctgagctggctcgctggtttggcattccactggataaagtgggattagcgccttcaggttgctgtggtggtaatatggatttgcccctatatttccagacatctgttatcacttaa

SEQ ID NO: 488042 - DNA, 354 bp, Shigella sonnei; identical to SEQ ID NO: 39111

SEQ ID NO: 488043 - DNA, 348 bp, Shigella sonnei; identical to SEQ ID NO: 39110

SEQ ID NO: 488044 - DNA, 255 bp, Shigella sonnei; identical to SEQ ID NO: 8471

SEQ ID NO: 488045 - DNA, 615 bp, Shigella sonnei; identical to SEQ ID NO: 79124

SEQ ID NO: 488046 - DNA, 276 bp, Shigella sonnei; identical to SEQ ID NO: 486783

SEQ ID NO: 488047 - DNA, 384 bp, Shigella sonnei
ttgtcttttaaaaaagaatttattgatagttgcttgaatgacaaaaaatgcatactgcatttacccgaatttatatttaatgataacaaggcacgccttgttttagacaccgacccagagcagaaggttaatgaggtgaaaaatttcctcactgctctttcagatagcatttgctcattatttattgtttacagcaatgtggcatcaatctccttagggaatgaatccttttcaacagatgacgaccttgagtatgggtatttaataaacactggcaatcattatgacgtttacctccctcctgaactttttgctcaggcttacgagttaaacaataaggaaaggaatgcgcaaattgattttttaactcgttatgcaatttaa

SEQ ID NO: 488048 - DNA, 309 bp, Shigella sonnei; identical to SEQ ID NO: 486565

SEQ ID NO: 488049 - DNA, 297 bp, Shigella sonnei
atggcccccgtgatgttgtcaggtgcatacctgcaacgtgcgggggttttctctctccagcaaccaatgccaccagggataaagcccccgcaacattgcgcctcaccggaacccttccggcttgacgctgattctacgactgtttttctgttccggaatccgtcacgtcttcactctgtgctgcgcattccgcagaatattatccgcttgcaaccgttgcatttttcttacgaaaaaggccgcagagtttcacccctcggcctgatccgggcgcaaattgccattacggcagcctga

SEQ ID NO: 488050 - DNA, 456 bp, Shigella sonnei
atgaagaaaaaccccgtaagtataccacacaccgtctggtacgccgacgatatccgccgcggagaacgcgaggcggcagatgtgctggggctcacactctatgagctgatgcttcgcgctggcgaggccgcattccaggtgtgtcgttcggcgtatcctgacgcccgccactggctggtgctgtgcggtcatggtaataacggcggcgatggctacgtggtcgcgcgactggccaaagcggtcggcattgaggtcacgttgttggcccaggagagcgacaaaccgttgccggaagaggccgcgctggcacgcgaagcatggttaaacgcgggtggcgagatccatgcttcgaatattgtctggcccgaatcggtagatctgattgttgatgcgctgctcggtaccggcttgcagcaagcgccccgcgaatccattagccataatcgaccacgctaa

SEQ ID NO: 488051 - DNA, 747 bp, Shigella sonnei
atgacattgcctgtttttataacggtaattgcagaccatgacaagccgcagccgtcaggctgcctactcgatctgacaacatctgatcctgcggcgcatctcagcatgaccctgaacggtagccttaacaacctgcaggtcagcaggatcgatcctcacgaggaaacggaacgctatcgtcagcatgttcttgaaacaaagggaaaagaactggacgaagcgggaaaacgcctgctggaagaggacttacgctcaccttgcactgaggaaattgctgttttccaggccttttcacgggtgattcgtgaagcgggtaaacgtttcgtggtgatggatacggctccgaccggacacacgctgttgctgctggatgctacaggcgcgtaccaccgcgaaattgcgaagaaaatgggagaaaaaggccatttcaccacaccgatgatgctgcttcaggatccggagcgcactaaagtgttactggtcacgctgccggaaaccacgcccgtgcttgaagcggcaaatttacaggccgaccttgagcgtgcaggcattcacccctggggctggattatcaataacagcctttccattgcggatacccgttcgccactgcttcgtatgcgggcacaacaggaacttccgcagatagagagcgttaaacgccagcacgccagccgtgtcgctcttgttcccgtactggcgtcagaaccaaccggcatcgacaaactcaaacaacttgctgggtaa

SEQ ID NO: 488052 - DNA, 1290 bp, Shigella sonnei
atgttactggcaggagccatttttatcctgaccatcgttttggttatctggcagccgaaaggattagggattggctggagcgccacgttgggggctgtactggctctggcgtcgggtgtgatacacattgctgatattccggtggtgtggaatattgtctggaacgcgacggcaacatttatcgccgttattatcatcagcctgttgctggatgagtcaggctttttcgaatgggcagcgttgcacgtttctcgctgggggaacggtcgtggccgcctgctgtttacgtatattgttctgctcggcgcggcagtggcggcactgtttgccaacgatggtgcggctcttattctgacgccgattgttatcgccatgctgctggcgcttggcttcagtaaaagcaccacactggcattcgtgatggctgccgggtttatttccgatactgctagcttgccgcttatcgtatcgaacctggtcaatatcgtttcagctgatttcttcaaactgggattcacggagtatgcttcggtgatggtgccggtggatatcgccgccattatcgccacgctggtgatgctgcatctttttttccgcaaagatatcccccccacttatgagctggcgcgactgaaagaacctgcaaaagccatcaaagatcctgcgacgttcagaaccggctgggttgttctcctccttctgctggtcggtttttttgtccttgagccgatggggatccctgtgagtgcgattgcagcagtgggggcggcagtcctgtttgcggtggccaaaaaaggtcatggtattaacaccggtaaagtgctgcgcggcgcgccctggcagatcgtgatcttctctctggggatgtatctggtggtctacgggttgcgtaacgccggtctgacagattatctctctgacgtgctgaacgaactggcagataaaggactgtgggccgccacgctggggacgggattcctgacagcattactctcttctattatgaacaatatgccgacagtattgattggcgcattgtcaattgatggcagcaccgcgaccggtgttatcaaagaggcgatgatttatgccaacgtcattggctgcgatctggggccgaaaatcacccctattggtagcctggcaacactgctctggctgcatgtactttcacagaagaacatgaccatcacctggggatactatttccgcaccgggatcgtcatgactctgcctgtgctgtttgtaacgctggccgcgctggcgctacgtctctctgtcacattgtaa

SEQ ID NO: 488053 - DNA, 426 bp, Shigella sonnei
atgagcaacatcactatttatcacaacccagcctgcggcacctcgcgtaatacgctggagatgatccgcaacagcggtaccgagccgaccattattctttaccttgagaacccaccttcgagggatgagctggttaaactcattgccgatatgggtatttcagtacgagcgctgctgcgtaaaaacgttgagccttacgagcaactgggtcttgcagaagataaatttactgacgatcagctcatcgactttatgttgcaacacccaattctgattaaccgtccgatcgtggttacgccgctgggaaccagactgtgccgtccttctgaagtggttctggatatcctacaggatgcgcagaaaggggctttcactaaggaagacggtgaaaaagtcgttgatgaagcaggaaaacggctgaaataa

SEQ ID NO: 488054 - DNA, 813 bp, Shigella sonnei; identical to SEQ ID NO: 39107

SEQ ID NO: 488055 - DNA, 369 bp, Shigella sonnei; identical to SEQ ID NO: 39106

SEQ ID NO: 488056 - DNA, 765 bp, Shigella sonnei
atgacgatgggtaaaggcggagtgggcaaaacgaccgttgcggcatcagtcgcggtatcgctggcgaaacgtggccacaaagtccacctgaccacatccgatccggcagcacatctgtcttacacgctggatggctcactgcccaatcttcaggtcagtcgtatcgacccaaaggtagagacagaacgttatcgccgctttgtcctggaaaatcagggcaaaggattagatgcagaagggctggcggtgctggaggaagacctccgctcaccatgcactgaagagattgccgtcttccaggcattctctcggatcatcaaagaggcagacgaccattttgtcattatggacaccgcgccaacgggtcacacacttctgctactggatgctacgggagcctatcaccgggaaatggtgcgccagatggggcaaacacatgaccatgtgatgacgccaatgatgcaattgcaggacccggagaagacgaaggtgattatcgtgacgcttgccgaaacgacacctgtactggaagcagcaaacctgcagcaggatttgcgtcgcgctggcatcgagccgtgggcatgggttgttaataacagtctggcggcagctgaaccgtcttcacctttcctgaggaccagggcgaaccgcgagttgcctctcatctctgatgtggaagagcagcatgcagaacgtattgcattaacagcgctacagagcgaagagccggttggtattgacctgctggaagagatggcgaagtaa

SEQ ID NO: 488057 - DNA, 273 bp, Shigella sonnei
atgtcacacaacctggagcaccagaaagtccacaccagaatggtgaaagaggttctgaaagccgtcgccagagccaataatcacccttatcagtccgtatttacagactttatcgccggtcatccctcctgcacggtctgtttctgggaaaccttccacaaaatgtacccggattcaccgtacgaatacgtcacgttctgccatacctgccgtcgttttgatttatacgaaacagaagcggagatgaaggcggatgacccgaagtggtggtga

SEQ ID NO: 488058 - DNA, 1011 bp, Shigella sonnei
atgaatatgccatttttaaaaaacattcccccgttcatcttcttcaccggtaaaggtggcgtgggtaaaacatctctggcctgtgctactgcggtatggctggccgatcagggtaagagaacgcttctggtgagtaccgatccggcttccaatgtcggccaggtatttagccagactatcggccaccgaatcacagatattagtacagtagaaaatcttgccgcgatggaagttgatccgatggctgcagcacaagcctatcgtgaccgtgtgctcgacccggtccgcgagctgatgccagccgatgtggtcagcagcattgaagagcagctctctggctcatgcaccacggaaatcgctgcgtttgatgagtttaccggtctgctaaccaatcatgagctgcgggaaaaatatgaccatattgtatttgataccgcgccaaccggtcacaccatccgcatgcttgaattgccgggagcctggagcggttatctggaagcgaaccctgatgccgctgcaaacctcgggcctctggtagggctggagaaacaacaacaccagtactccgatgcagttaaagcgctgtctgatgcagctcttacacgcttagtgctggttgcccgtgcccaggcttcaacgctgaaagaagtttctcatacgcacgatgagctttctgctatcggtttgcagcatcagcacattgccatcaatggtgtgctgccgccgtttgcgggtgaggatgatccactggcgcaaagcattctggctcgggaagaaaaagcattacaggcaatgcctgataatctggctaatcttccccgctcacagctgtatctgaagccatttaacctggtcggtctggaagcattgcgggagttatttacagagagcaaagccgcaccggctctccctgctaccacgctgaatactctggatttgccgaaactatcctcactggtggatgaaccacggcagcctggcggctgcaaatcggggtgtggcagaatatga

SEQ ID NO: 488059 - DNA, 363 bp, Shigella sonnei
atgtcaaaaattgagatctttgaagcagcaggctgctgcgcaaccagtagcgttgtggtcagcgacgaagcagtcaaatggaacgccagcgccgaatgggcgaaaaagaatggtgttgatattcagcgctacagccttgcgaaaaacccgcagcagttcctgaatacccctgtcatcaaagagtttctgaacacatcagggatggagtccctccctgtcaccttgctcgatgggcagctcgtgatggcaggcaaactcccgacgcgtgaagatattgcccgttggtcaggtattccgcttactcaggactggagtgaagacagcacacaaccacgctgctgcagcattccacgtatgccttaa

SEQ ID NO: 488060 - DNA, 546 bp, Shigella sonnei; identical to SEQ ID NO: 39104

SEQ ID NO: 488061 - DNA, 651 bp, Shigella sonnei; identical to SEQ ID NO: 39103

SEQ ID NO: 488062 - DNA, 324 bp, Shigella sonnei; identical to SEQ ID NO: 38924

SEQ ID NO: 488063 - DNA, 1134 bp, Shigella sonnei
atgaatagttggattcctatgttgcaagatgccgcagagatgtttgtttttctggctgttgagctttcattgctgtttattgtcattagtgccggtgtgagcctgataaggcaaaaagtcccggatcataaaattcagcagatgatgggggcgagaaaaggtaaggggtatctgctggcctcgttgctgggagccgttacccctttctgtagttgctcaacaattccaatgttgcgaggattgttgtctgcgaaagcggggtttggtccgacactcacttttttgtttgtttcaccgttgcttaatcccattatcgtggggttaatgtgggttacctttggctggaaagtaactttgttgtacgcgatcatcgctgccggtgtctcagtccttgccagtatcgtattggatttactaggatttgaacgtcatattgttgatcacaaaaactcagcatcaagtggttgcaccacgaaatgcgatgattccgaagcttcggtaaaaacgtcggcgggttccagttgttgcagcactagctcgactcaattgcctttaaaaacgagttgctgtacttcatcagcgaaccccataattaacttaaggacggtaaagaacgagcagaacgtatcagcgtgttgttcatcaatatcatctgaacaaccagctgttagctgttgcagcagcgagaatctgggcaatgtgaatctcacaacgaataccacctctggcccaataaagttagctatgaaagatgccttacagcagtttaaggatgttctgccttatcttttgttaagtgtattaataggttcatttatttatggctttatcccttcagagtggattgcagctcatgccggagcagataatcccttagccataccgctgagtgcagttgttggtattccgttgtatatccgcgcagaggcagtgataccacttgcatcagtgctgatgactaaaggaatgggcctgggggcattaatggccttgataatcggtagtgctggagcgagtctgacagaagtaatattgcttaaatcaatgttcagaatgcccatgataatcgcatttctgacggttatcttaggtatggcaatccttatgggatatttaacgcaatttttgttttaa

SEQ ID NO: 488064 - DNA, 618 bp, Shigella sonnei; identical to SEQ ID NO: 113251

SEQ ID NO: 488065 - DNA, 1557 bp, Shigella sonnei
atggcagaaaaaaataaaaaaaccattactggtcaagtcttgaactccattaaaattaacaaactaaaatgtataaatggattaaacgagattatttttaaacctcatgcgttaaccgcaattttaggtccaaatggaagcggaaaatcaacaatactccatgctatagcaagcatatacatgcctgaagaaggtttccccggtgaagaccatcggttaatgcatttttttccacgcagcccacatgctgaatggaacggcagtgacttcattgtaaatttaacttatcgtaaagatggggtaatgattgaaaatgaattgaaaaattatggaaaagcagatattcgaggctcacgatggattcagatttatgctcgtcgtcctttaagagaagtttactatcttggcattgataaatgtgttcctataatagaatcagaaaaaaagaataatattcagtatgaaaccagcagtgtcagtaatgatttaataacaaacattcttcattacgcctcctatatacttaataaaccatacacaagtttcaatcagcatcaacaacccaatggaaaaatattgattggagttgagtcagggggactggcctactcatcattgagtatgagcgcaggagagcaaaagatatttttaattctggaaacaatattgaaagcggacaagaacgccttaatattaattgatgaattagatttattgttgcatgacgaagcattgaaaaagttaatagaagtcatatcatctcatgccaaagataaaaacaaacaaatcatctttactacccatagagaaatgataaccactttatcagacaagataaatataagacacgtcgtaaacattcaaggccgtagttattcatttgaagaaacaaaacctgatgctataaacagattaacaggtgaatcaacgacgcctattgaaatatatgtagaagatgacttagctgttgccataataaataaaatatgttcttcacttaaggccagcaaatatgtaaaaatatttaaatttggcgcagcttcaaacgcattcactctacttgccagtacccttattcgtggtgacaatctatctggtaaactttatattcttgatggcgataaatattccacagaaaatgaaaagaaaactgctcttgataaagttttcaccggcacagaatcacgaacttatgagttaaaagcggcagcggaaggaaaagtaaaacaatttaatctcccaaatggggttaagcctgaacaatacattcattatcttattacaaatgtcccactggacggattgggtggcgaatatttagaaataatcgaagcagcaagggatatcagagttgaacttgatgctcataattatatctcgaatattttaactaaattgggcattgatcgtccgtccgggttaacacgagtgatggatctggcctccaggcatcccgaatggcatcagtatgtgagtgaagtcactgactggttacagcccgtagtttctgatttaatggaacgattacctgagaatgatacagtagatataacttaa

SEQ ID NO: 488066 - DNA, 1551 bp, Shigella sonnei
atgaagagatcgatatcgtttcgtcccacattgctcgcgctcgtccttgccacaactttcccggttgcgcacgccgccgtaccgaaagatatgctggtgattggtaaggccgccgatccacaaaccctcgacccggcggtaacaatagataataacgactggacagtgacctacccgtcttatcagcggctggttcagtacaaaacggacggtgataaaggctcaaccgacgttgaaggcgatctggcaagtagctggaaagcgtctgacgatcaaaaagagtggacgttcaccctgaaggacaatgctaaatttgccgatggcacacctgtcactgccgaagcagtaaaactctcttttgagcggttactaaaaatcggccaggggccagcagaagcatttcccaaagatttaaagattgatactcccgacgaacatacggtgaagtttacccttagccaaccattcgcaccgttcctctacacgctagcgaatgacggtgcatccattatcaatccggcggtcttaaaggaacatgcagcggatgatgctcgcggcttcctcgcgcaaaataccgccggttccggaccatttatgctgaaaagctggcaaaaaggtcagcaattagttctggtgccaaatccgcattaccccggcaataaaccgaactttaagcgagtatcggtaaaaattatcggtgaaagtgcctcccgtcgcctgcagctctcccgtggcgacattgacattgccgatgcgctgccggtggatcaactcaacgccctgaagcaggaaaataaagtcaatgtggcagagtatccgtcactgcgcgttacctatctgtatctgaataacagcaaagcgcctcttaatcaggcggatctgcgtcgggccatttcctggtctaccgattatcagggcatggttaacggcattctgagtggtaacggaaaacagatgcgcggcccgattccggaaggcatgtggggctacgatgcgacggcaatgcaatacaaccatgacgaaacgaaagccaaagccgaatgggataaagtgacgagcaaacccaccagcctgacgtttctctactccgataacgatccgaactgggagcctattgctctggcgacacaatccagtctcaacaagctgggcatcaatgtgaagctggaaaagctggcgaacgccaccatgcgcgacagagtgggtaaaggtgattacgacattgcgattggcaactggagtccggattttgccgacccgtatatgtttatgaattactggtttgagtcagacaaaaaaggtctgccgggtaaccgctcgttctatgaaaacagtgaggtcgataagttactgcgcaatgcgcttgcgaccaccgaccagacgcagcgtacccgggactaccagcaggcacagaaaatcgtcattgatgacgctgcttatgtgtacctgttccagaaaaactaccaactggcgatgaacaaagaggtgaaaggctttgtgttcaatcccatgctggaacaggtcttcaatatcaataccatgagtaaataa

SEQ ID NO: 488067 - DNA, 618 bp, Shigella sonnei; identical to SEQ ID NO: 484991

SEQ ID NO: 488068 - DNA, 711 bp, Shigella sonnei; identical to SEQ ID NO: 485012

SEQ ID NO: 488069 - DNA, 597 bp, Shigella sonnei; identical to SEQ ID NO: 381173

SEQ ID NO: 488070 - DNA, 435 bp, Shigella sonnei; identical to SEQ ID NO: 403908

SEQ ID NO: 488071 - DNA, 528 bp, Shigella sonnei; identical to SEQ ID NO: 381168

SEQ ID NO: 488072 - DNA, 402 bp, Shigella sonnei
atgctgggagcggtggaacgccgcttcggcaacgatcttccgtcgtctccagtggagtggctgacggataatggttcatgctaccgggctaatgaaacacgccagttcgcccggatgttgggacttgaaccgaagaacacggcggtgcggagtccggagagtaacggaatagcagagagcttcgtgaaaacgataaagcgtgactacatcagtatcatgcccaaaccagacgggttaacggcagcaaagaaccttgcagaggcgttcgagcattataacgaatggcatccgcatagtgcgctgggttatcgctcgccacgggaatatctgcggcagcgggcttgtaatgggggtctgacgctcagtggaacgaaaactcacgttaagggattttggtcatga

SEQ ID NO: 488073 - DNA, 657 bp, Shigella sonnei; identical to SEQ ID NO: 463703

SEQ ID NO: 488074 - DNA, 711 bp, Shigella sonnei
atgacaaatgatatttacattaatggcaaagtgattgatagcttcggtgactggtcaccacagactgaacatccagctatcgctattcagcgtcaagagcatgacaagcgtattgagcttgagcaatcgctaaagatgtcaccaaaggaaatcatctttgtgtctcctgagcctcaagaaatgccagatatctgcaagagtgaagcattatttaatcttgagcgtgaatattacccattgctgaaagcacaaagaattaaactagatgatgcttacagcaaagttaccctgatgcaatcagctattgagccgtcagaatttgagattcaggatgaattgtcacagaaaccatttgtctattaccaatacgaagacaatgacggttttggtatttatccagaaaacatcccagccgtgattaatagtatttctgacgaatatcgaattgtgaagatggttaaagcttcaagaggtgctggtcagtttatttacacgactaataagagcgatgaagaactctgtgaaattgccaaacagaacattttggcatcacgtaacaagcaacttgataatgctaagttatatctctcaagagagcttcaggctatgaaagagcttgtgaaagaatatgaagatgctaagaagattgctatgcaggctgatattgagcagttagtgaagatttcaacgaagtacgcaaaggtgctttga

SEQ ID NO: 488075 - DNA, 213 bp, Shigella sonnei; identical to SEQ ID NO: 461425

SEQ ID NO: 488076 - DNA, 309 bp, Shigella sonnei; identical to SEQ ID NO: 487355

SEQ ID NO: 488077 - DNA, 387 bp, Shigella sonnei
atgaaacgtgcgggtctcaacattcctgatggctatgaagtcactggtgattttgaatttaacggcgggtttgacgccatgcgccaactgttatcacatccgctgcgtcctcaggccgtctttaccggaaatgacgctatggctgttggcgtttaccaggcgttatatcaggcagagttacaggttccgcaggatatcgcggtgattggctatgacgatatcgaactggcaagctttatgacgccaccattaaccactatccaccaaccgaaagatgaactgggggagctggcgattgatgtactcatccatcggataacccagccgacccttcagcaacaacgattacaacttactccgattctgatggaacgcggttcggcttag

SEQ ID NO: 488078 - DNA, 528 bp, Shigella sonnei; identical to SEQ ID NO: 469185

SEQ ID NO: 488079 - DNA, 987 bp, Shigella sonnei
gtgcaaaaaaatggcgatacgttgtccggtggacttacttttgaaaacgactcaatccttgcctggattcgaaatactgactgggcaaagattgggtttaaaaataattcggatgcagacaccgattcctacatgtggtttgaaacaggcaacaacggcaatgaatatttcaaatggagacaccgcatcattggcacccggcctaaagacctgatgaatcttaaatggaatgctttgtctgttcttgttgaagcccttttcagcagtgaagtgaaaatatcgacagtcaatgcactgaggatatttaattcatcttttggtgccatttttcgtcgttctgaagaatgcctgcatatcatccctacacgagagaatgaaggggaaaatggtaatatagggccactacgcccctttacgcttaatctcagaactggccggataagcatggggcatggtcttgatgttacaggggatatatttgcaaaccgttttgcaattaacagtagtaccggcatgtggattcatatgcgtgaccagaatgttattttgggacgtaatgcggtatccactgatggtgctcaggctttgctccgtcaggaccatgccgaccgcaaatttatgattggcggtctgggaaataagcaatttggcatctacatgattaataactcaaggacagccaatggcaccgatggtcaggcgtacatggataataacgggaactggctttgcggctcgcaagttattcccggcaactatggcaattttgattccagatatgtgaaagatgttcgacttggttcacagcaatattatggagtgaacaactggcaaacatggaattttcagtgcccgtcaggctatgtactgacggggattaacgtacaggataccggaaaaaactctgccgataatattgcaggcgttcattacaggccagtgcaaaagtatataaatggcacttggtataatgtggcgagtatttaa

SEQ ID NO: 488080 - DNA, 543 bp, Shigella sonnei; identical to SEQ ID NO: 21048

SEQ ID NO: 488081 - DNA, 297 bp, Shigella sonnei; identical to SEQ ID NO: 484519

SEQ ID NO: 488082 - DNA, 1188 bp, Shigella sonnei
atgcttccccgttttgccgatatctttcagcagggaaaccgctggcttaactggctggagaagcagccggaaggggcagtacgtccggtggtgattgagtcggtgaccaaaatcatggcgtgcgggaccacactgatggggtatacacagtggtgctgttcatcaccggactgttgccatacaaaaaaggtctgcttccggtgtaaaagccgctcctgcccgcactgcggggtgaaggctggcgcacagtggatacagtatctgctgagcctggtccccgactgcccgtggcagcatattgtgttcacacttccctgccagtactggtccctggtgttccacaaccggtggttactgacagagatgagccgcattgcagcggatgtgatactggaaatctgccatcaggcagatgtggagccggggatattcacggtgatccacacatgggggcgtgaccagcagtggcatccgcatatccatttatcgacaactgccggtggtgtgacgtcgggccacacctggaaaaatcttcatttttacgcccgtaaggtgatgagcatgtggcgctaccggataacacggttgctgtcacggaaataccctgacctggtgatgccggatgcgctggcagcagaaggaagcagtaaacgggaatggaatcgcttcctggacacgcattaccgccgtggctggaatgtcaacgtatcccgggtgatggataatgccacccatgtggcggtgtactttggctcttacctgaaaaagccaccagtgccgatgagtcgtctggagcattatgccggtcaggatgaaatcggtctgcgttacaacagtcaccgaacaaaacgggaagaatacctgttgatgagtggagatgagttcatggaaaggttctcctggcatgtggcggataaggggttccgtatggtgaggtactacggttttttgagtccggcgaaacggcggttactggaagaagtggtgtacatcataacggagacagtgagaaaaacggcgatgcaaatcacctggagagggatgtatcagaggttactgaaggttgacccgctgaagtgcgtgctgtgcgggagtcagatgcgttttacggggctgaagcggggctaccgtctggcagagcaggtcctgatgcatgagctgctggcccggatgcggtggtgcggctga

SEQ ID NO: 488083 - DNA, 543 bp, Shigella sonnei
gtgaaagaaagcaatcagcgatggtgctctgacgggttcgagttctgctgtgataacggagagagactgcgtgtcacgttcgcgctggactgctgtgatcgtgaggcactgcactgggcggtgactaccggcggcttcaacagtgaaacagtacaggacgtcatgctgggagcggtggaacgccgcttcggcaacgatcttccgtcgtctccagtggagtggctgacggataatggtttatgctaccgggctaatgaaacacgccagttcgcccggatgttgggacttgaaccgaagaacacggcggtgcggagtccggagagtaacggaatagcagagagcttcgtgaaaacgataaagcgtgactacatcagtatcatgcccaaaccagacgggttaacggcagcaaagaaccttgcagaggcgttcgagcattataacgaatggcatccgcatagtgcgctgggttatcgctcgccacgggaatatctgcggcagcgggcttgtaatgggttaagtgataacagatgtctggaaatatag

SEQ ID NO: 488084 - DNA, 276 bp, Shigella sonnei; identical to SEQ ID NO: 486783

SEQ ID NO: 488085 - DNA, 375 bp, Shigella sonnei; identical to SEQ ID NO: 485586

SEQ ID NO: 488086 - DNA, 423 bp, Shigella sonnei; identical to SEQ ID NO: 487379

SEQ ID NO: 488087 - DNA, 216 bp, Shigella sonnei
atgctatgcgttacctttgaataccacacagataaaatgattcgctacatctccgacctcctgattaaaggaaacggattcggtgacatccataactcaagagatattttcattaaagccattggcccaaatgaaacactgaaagcagcagtcaagccagaatggtttgagcgtcacaagattgaattaggttattggggtgaggaggttttatga

SEQ ID NO: 488088 - DNA, 729 bp, Shigella sonnei
atgcttggttttgtcgctggttatcagggttatttatataaacagctcaatcccggtgtcggtgtgcgcgaaaatattgatacctgggcctggcgacccgataaactcaataatcaactgacaccactgcgtggtaaaccgcaaattcagtttacgcaaaactggccgcgactcgatggtgctacggcggcgtacccaatttatgcctctgcattttatgctttaagcgttataccggaagattttcacaccagggaatatctggagagctctcgtacccccgatgcgtataacaggattgttaaaggtgatgctgatattatttttgtggcgcaaccttccggtgggcagaaaaaacgcgctgaggaatcgggcgttactttgctgtacacgccttttgcccgtgaagcgtttgttttcatcgtcaatgcggataatccggttaattccctgactgaacaacaggtgcgtgacatcttcagtggtgcaattaccaactggcgtactgttggcggtaacgatcaggagatccagacctggcaacgcccggaagactctggtagccagacggtgatgcaatcccaggtcatgaaaaatgtccgcatgatctcgccgcaggaaacagaagtggcaagtatgatggagggaatgattaaagtcgttgccgaataccgtaatacaaacaacgcaataggttacaccttccgggtaatgactccaacttattga

SEQ ID NO: 488089 - DNA, 489 bp, Shigella sonnei
atgcaaaacagaaaatggattttgtcctcgctggtaatgacttttttcggcatccccatactgacgcaatttttggcggcggttgttgctatgctgggtgtcggacttgccggtattattgaagtttgtaatatccttatcacgccaacaagttaccttctgctcaacatttttatgctggcgctgggcgcattaatgctatttttctcggggcgagtatgggcaggcgatagtgcaccagaaaaaagagaaatagccgtctggcgacaatgtctttttttagtacccggtttattaatcctggttggctggataatcgcgctgcatctggcagattatcaatttcaccagatgggatcgggttggttggctgatcttatgctcccctggctgggcgttttgttagtctcagtagtcggaggtgagtactggtggatagtagactggccccctgaatctccagacaaccagtatcacttaaataagtga

SEQ ID NO: 488090 - DNA, 366 bp, Shigella sonnei; identical to SEQ ID NO: 10065

SEQ ID NO: 488091 - DNA, 543 bp, Shigella sonnei; identical to SEQ ID NO: 464540

SEQ ID NO: 488092 - DNA, 354 bp, Shigella sonnei; identical to SEQ ID NO: 466835

SEQ ID NO: 488093 - DNA, 327 bp, Shigella sonnei; identical to SEQ ID NO: 485848

SEQ ID NO: 488094 - DNA, 657 bp, Shigella sonnei
atgcctgcgatcaatgccaaacgtgtttaccggatcatgcgccagaatgcgctgttgcttgagcgaaaacctgctgtaccgccatcgaaacgggcacatacaggcagagtggctgtgaaagaaagtaatcagcgatggtgctctgacgggttcgagttccgctgtgataacggagaaaaactgcgagtcacgttcgcgctggactgctgtgaccgtgaggcactgcactgggcggtcactacgggcggcttcaacagtgaaacagtacaggacgtcatgctgggagcggtggaacgccgcttcggcaacgatcttccggcgtctccagtagagtggctgacggataatggttcatgctaccgggctaatgaaacacgccagttcgcccggatgttgggacttgaaccgaagaacacggcggtgcggagtccggagagtaacggaatagcagagagcttcgtgaaaacgataaagcgtgactacatcagtatcatgcccaaaccagacgggttaacggcagcaaagaaccttgcagagacgttcgagcattataacgaatggcatccgcatagtgcgctgggttatcgctcgccacgggaatatctgcggcagcgggcttgtaatgggttaagtgataacagatgtctggaaatatag

SEQ ID NO: 488095 - DNA, 657 bp, Shigella sonnei; identical to SEQ ID NO: 463703

SEQ ID NO: 488096 - DNA, 303 bp, Shigella sonnei; identical to SEQ ID NO: 487011

SEQ ID NO: 488097 - DNA, 366 bp, Shigella sonnei
atgctggaagcggccagagaggccagacgtcaggaaattgaagcatggcgcacagaacaggaggcgaagccgttcacgtttgaatggaacggtcgtatctggaatgctggccccaactcactgggccgcctgtccccggtagtcatgctggcaaaatctgtcacagcacaaacgcatatggcgtggggtgatgccgataatcagcaggtgaaactgtcgatgccggaactggaagaactggcggcagcaatggtgcaggcgcaggtcgatcgcaacgatgagatttatcgccgtcagcgtgaaatgaaagaggagctgagcggtctggatgatttggcttcaattcgggcgtttgacgttaagtaa

SEQ ID NO: 488098 - DNA, 318 bp, Shigella sonnei
atgcctggtaaaacgtataccgaagcagaatgcaaagctctcctgaataaagaccttgccactgtcgccagacaaattaacccgtacatcaaagtcgatataccggaaacaacgcgcggcgctctttactcgttcgtttacaacgtgggcgctggcaatttcagaacatcgacgcttcttcgcaaaataaaccagggctatatcaaaggcgcatgtgaccagctatgtcgctggacatatgctggcggtaagcaatggaaagggctgatgacccgtcgtgagattgagcgtgaagtctgtttgtgggggcagcaatga

SEQ ID NO: 488099 - DNA, 345 bp, Shigella sonnei
atgtgcggcagaggcgaaggcgcggcaggcgacctcggtgaggagtctggctgcggtcctgacaccgactccgggcatactggtcaggaccgggtaaagagggtgagcaagaactcgctgttctacctcaagcgccacctcgtctttttgcttacgcagcgtgatgagctggagtgccagacgtggcagtactacggcagcggcattcgtgccgggaacgacgacggtttgttcggccagtgcctgagctatgtctgctgcaaggcgtttacccagacgaggcgcaagtttgcagagctgggctgccagcttcttctcacccagcgaagcgagtttttctggtga

SEQ ID NO: 488100 - DNA, 348 bp, Shigella sonnei; identical to SEQ ID NO: 485869

SEQ ID NO: 488101 - DNA, 153 bp, Shigella sonnei
atggacattgaaatacgccactgcaataacatcgtacgagcacatatcaccctcactgccgataaactgaacattaagtttgcgccaaatggtactggaaaaagtacgctgtcacgggccataagctgtgcggtgtcagcgccagtgatataa

SEQ ID NO: 488102 - DNA, 201 bp, Shigella sonnei
atgattgatgtcttagggccggagaaacgcagacggcgtaccacacaggaaaagatcgcaattgttcagcagagctttgaaccggggatgacggtctccctcgttgcccggcaacatggtgtagcagccagccagttatttctctggcgtaagcaataccaggaaggaagtcttactgctgtgtcagcgccagtgatataa

SEQ ID NO: 488103 - DNA, 504 bp, Shigella sonnei; identical to SEQ ID NO: 485763

SEQ ID NO: 488104 - DNA, 504 bp, Shigella sonnei; identical to SEQ ID NO: 485763

SEQ ID NO: 488105 - DNA, 807 bp, Shigella sonnei
atgatcaacccggaaacccgggtcatcgctgtcgatctgaataatgttgccggtgacaaaacgcctgcaggcaggcttaaaaccggcatcatgtacctgcttgcaggtcagatcgccggtggtgacttcaccctgccacaatacagggatgaagtgttaaagcagcttccacgggaataccatgaaatcgctcttaaacgtattaaccaacttgatcaggaggttaagacaaaagtttatgatgaactgcataacgcccggggcattgacttcatctgggaaaatctggatacccaggagcgtgagcaacgcaagtttgctatccgcacggttctgagtacgcagtatctgagggactacccggaaagcgttcttaagtcagcaaatactctctggttactgcgctacaaacccgaagatatccccgtactgagggataacttcaacgtgcctgaatttatgctgaaacgcttcctgaaaatgccggaaggcccggcaccagatggtagtggtgttcctgttctgggagtattcagggtaaaaagtggcacgcttgcgagaatactcaaatttaccgtcggtccactggagctatgggcgctgaactcatcgccaaaagacagtgccctgcgtaaaacactgacaaataagttaggttcagttcgggcacgtaagattctggccgaaaacttccccagaggttctgcaacgtcattaattgagcaccgggcgggccaacataacagtgacaatgttattgaagaactggcctcggagctcatccgaaaacagggatacaatctctga

SEQ ID NO: 488106 - DNA, 657 bp, Shigella sonnei
atgcctgcgatcaatgccaaacgtgtttaccggatcatgcgccagaatgcgctgttgcttgagcgaaaacctgctgtaccgccatcgaaacgggcacatacaggcagagtggccgtgaaagaaagtaatcagcgatggtgctctgacgggttcgagttctgctgtgataacggagagagactgcgtgtcacgttcgcgctggactgctgtgatcgtgaggcactgcactgggcggtgactaccggcggcttcaacagtgaaacagtacaggacgtcatgctgggagcggtggaacgccgcttcggcaacgatcttccgtcgtctccagtggagtggctgacggataatggttcatgctaccgggctaatgaaacacgccagttcgcccggatgttgggacttgaaccgaagaacacggcggtgcggagtccggagagtaacggaatagcagagagcttcgtgaaaacgataaagcgtgactacatcagtatcatgcccaaaccagacgggttaacggcagcaaagaaccttgcagaggcgttcgagcattataacgaatggcatccgcatagtgcgctgggttatcgctcgccacgggaatatctgcggcagcgggcttgtaatgggttaagtgataacagatgtctggaaatatag

SEQ ID NO: 488107 - DNA, 366 bp, Shigella sonnei
atgattgatgtcttaggaccggagaaacgcagacggcgtaccacacaggaaaagatcgcaattgttcagcagagctttgaaccggggatgacggtctccctcgttgcccggcaacatggtgtagcagccagccagttatttctctggcgtaagcaataccaggaaggaagtcttactgctgtcgccgccggagaacaggttgttcctgcctctgaacttgctgccgccatgaagcagattaaagaactccagcgcctgctcggcaagaaaacgatggaaaatgaactcctcaaagaagccgttgaatatggacgggcaaaaaagtggatagcgcacgcgcccttattgcccggggatggggagtaa

SEQ ID NO: 488108 - DNA, 345 bp, Shigella sonnei; identical to SEQ ID NO: 488099

SEQ ID NO: 488109 - DNA, 657 bp, Shigella sonnei; identical to SEQ ID NO: 487935

SEQ ID NO: 488110 - DNA, 591 bp, Shigella sonnei; identical to SEQ ID NO: 113253

SEQ ID NO: 488111 - DNA, 258 bp, Shigella sonnei; identical to SEQ ID NO: 28312

SEQ ID NO: 488112 - DNA, 276 bp, Shigella sonnei
atgttgggtggagcggacaatccaaatggcgaattaccgtcttatatcactggcgctgacaccgcacagcttatggcccgtgacagcgtactttttccagtaccatttggcgcaaacttaatgttcagtttatcggcagtgagggtgatatgtgctcgtacgatgttattgcagtggcgtatttcaatgtccatttatctgtcctttgccagttattccggggggattcatatccttccgcaaaatgtgcccgcatgctgtgatgcagatacataa

SEQ ID NO: 488113 - DNA, 456 bp, Shigella sonnei; identical to SEQ ID NO: 488050

SEQ ID NO: 488114 - DNA, 504 bp, Shigella sonnei
atgccgggcaactgcacgcattatgggcgttggcctcaacacgattttacgtcacttaaaaaactcaggccgcagtcggtaacctcgcgcatacagccgggcagtgacgtcatcgtctgcgcggaaatggacgaacagtggggctatgtcggggctaaatcgcgccagcgctggctgttttacgcgtatgacagtctccggaagacggttgttgcgcacgtattcggtgaacgcactatggcgacgctggggcgtcttatgagcctgctgtcaccctttgacgtggtgatatggatgacggatggctggccgctgtatgaatcccgcctgaagggaaagctgcacgtaatcagcaagcgatatacgcagcgaattgagcggcataacctgaatctgaggcagcacctggcacggctgggacggaagtcgctgtcgttctcaaaatcggtggagctgcatgacaaagtcatcgggtattatctgaacataaaacactatcaataa

SEQ ID NO: 488115 - DNA, 555 bp, Shigella sonnei
atgaacgacagagaatttcaaagatttcttgaagagagcaaagcaagaaacagaagcaacggttacagctgcacagacacccccaccagctacgaactaccagccttttccaaatccgaacgtaaaagcattgaagcggtcattcgtagcattacgccacgggtaagacacatgccaacacgcaaagaaaaagagaacactttaaagactttcctgatgagctttgattcttacgagcaattaccatcaaaaattgaagatataattatcggtacttgtcgcagtcttggaagggataattatcaccggaaagttttctatctattacgaaatattgacaaaattagctcaagcacaataacaaattgtcttcagcgtcaagcgacccgattaagccatgagctaccaagcgataaatattgcgctaacttagccaccatttgcaataaagttatcgagacaatcaatcatcatgtggaagtgggcaatattagccttacgaccagtgaaccagactttgagtttgacccgtatttagttacagaggaattttaa

SEQ ID NO: 488116 - DNA, 288 bp, Shigella sonnei
atgaaaccttggcatgaagatgttagacgatattttacagaacaccttatctatgatgaatccagtgattccctgtgctggtctgatggagagtcagtcacgataaataccgacgactacggcaacaaaacatttaatataggccgatacactttctacgtgaaatatgttgtctggtttctttatcatggctatcaatccaacaagcaaattatccatcgaaatggtaacagagccgataccagaccaaaaaatcttatgcaagtccgagactttaagagaaattag

SEQ ID NO: 488117 - DNA, 504 bp, Shigella sonnei
atgccgggcaactgcacgcattatgggcgttggcctcaacacgattttacgtcacttaaaaaactcaggccgcagtcggtaacctcgcgcatacagccgggcagtgacgtcatcgtctgcgcggaaatggacgaacagtggggctatgtcggggctaaatcgcgccagcgctggctgttttacgcgtatgacagtctccggaagacggttgttgcgcacgtattcggtgaacgcactatggcgacgctggggcgtcttatgagcctgctgtcaccctttgacgtggtgatatggatgacggatggctggccgctgtatgaatcccgcctgaagggaaagctgcacgtaatcagcaagcgatatacgcagcgaattgagcggcataacctgaatctgaggcagcacctagcacggctgggacggaagtcgctgtcgttctcaaaatcggtggagctgcatgacaaagtcatcgggcattatctgaacataaaacactatcaataa

SEQ ID NO: 488118 - DNA, 486 bp, Shigella sonnei; identical to SEQ ID NO: 487387

SEQ ID NO: 488119 - DNA, 441 bp, Shigella sonnei
ttgtacctcgctggcatcaaagatgtttatacgtgcgaaattgtcggctacgccatgggagagcgcatgacaaaagagctgacaggtaaagccctgtttatggcgctcaggagccagcgcccacctgccgggctaatccaccactctgatcgaggttcacagtactgcgcatacgattaccgggtcatacaggagcagtttggtctgaaaacatcaatgtcgcgtaaaggtaactgttacgacaacgctccgatggaaagcttctggggaacgctgaaaaatgagagcctgagccactatcgttttaataaccgggatgaagccatctcagtaatacgggaatacattgagattttctacaatcgtcagcgttgtcactctcgtctggggaatatctccccggcagccttcagggaaaaatatcatcagatggctgcttaa

SEQ ID NO: 488120 - DNA, 366 bp, Shigella sonnei
atgattgatgtcttaggaccggagaaacgcagacggcgtaccacacaggaaaagatcgcaattgttcagcagagctttgaaccggggatgacggtctccctcgttgcccggcaacatggtgtagcagccagccagttatttctctggcgtaagcaataccaggaaggaagtcttactgctgtggccgccggagaacaggttgttcctgcctctgaacttgctgccgccatgaagcagattaaagaactccagcgcctgctcggcaagaaaacgatggaaaatgaactcctcaaagaagccgttgaatatggacgggcaaaaaagtggatagcgcacgcgcccttattgcccggggatggggagtaa

SEQ ID NO: 488121 - DNA, 504 bp, Shigella sonnei; identical to SEQ ID NO: 485763

SEQ ID NO: 488122 - DNA, 378 bp, Shigella sonnei; identical to SEQ ID NO: 487974

SEQ ID NO: 488123 - DNA, 417 bp, Shigella sonnei; identical to SEQ ID NO: 487975

SEQ ID NO: 488124 - DNA, 987 bp, Shigella sonnei; identical to SEQ ID NO: 488079

SEQ ID NO: 488125 - DNA, 1188 bp, Shigella sonnei; identical to SEQ ID NO: 488082

SEQ ID NO: 488126 - DNA, 279 bp, Shigella sonnei; identical to SEQ ID NO: 11573

SEQ ID NO: 488127 - DNA, 1287 bp, Shigella sonnei; identical to SEQ ID NO: 486968

SEQ ID NO: 488128 - DNA, 504 bp, Shigella sonnei; identical to SEQ ID NO: 487594

SEQ ID NO: 488129 - DNA, 1113 bp, Shigella sonnei
atgactagtctaaaaactagtattaagactatcacttatttaagtgatattggttgtctggagattcagggggccagtctaggcgtgggtaaaacctctatttcctgcgccacggcgatccgtctggcagaacaggggaaacgggtgctgctggtcagtaccgatccggcctcaaacgtaggccaggtgtttagccagacgattggcaataccattcaggcaatagcctctgttcctggattgtcggctcttgagattgatcctcaggctgctgcacaacagtaccgggccagaatcgttgaccctattaaaggcgtcctgcctgatgacgttgtttccagcatcaacgaacaactgtcaggtgcatgcacaacagagattgcggcttttgatgaatttaccggattactgacagatgcctctctgctgacgcggtttgaccatatcatttttgataccgcgccgacgggtcacaccattcgccttctgcagttgccgggcgcctggagtagctttattgacagcaatcccgagggcgcgtcctgtctcggcccaatggcggggctggaaaagcagcgtgaacagtatgcctatgctgttgaagcgttgtctgatccaaagcgtacccgactggtattagttgctcgtctgcaaaaatccacgttgcaggaagtcgcccggactcatctggaacttgccgccatcggccttaaaaatcagtacctggttattaatggcgttctgcccaaaactgaagcggcaaacgatacactggctgctgcaatatgggagcgtgaacaggaggcgctggccaatcttcccgctgatcttgcaggtttgccaactgacacattatttctccagccggtcaatatggtcggtgtgtctgcgctcagcaggcttctctccactcagcctgtagcgtcgccatcctcggatgaatacctgcaacagcggcctgatattccgtcactttctgcgttggttgatgatattgcccgtaatgaacatggcctgattatgctgatgggtaaaggtggcgtggggaaaaccacgatggctgctgccattgctgtcaggctggccgacatgggatttgatgtccatcgatag

SEQ ID NO: 488130 - DNA, 1137 bp, Shigella sonnei
atggaacttaaaaaattgatggaacatatttctattatccccgattacagacaagcctggaaagtggaacataaattatcggatattctactgttgactatttgtgccgttatttctggtgcagagggttgggaagatatagaggattttggggaaacacatctcgattttttgaagcaatatggtgattttgaaaatggcattcctgttcacgataccattgccagagttgtatcctgtatcagtcctgcaaaatttcacgagtgctttattaactggatgcgtgactgccattctacagatgataaagacgtcattgcaattgatggaaaaacgctccggcactcttatgacaagagtcgccgcaggggagcgattcatgtcattagtgcgttctcaacaatgcacagtctggtcatcggacagatcaagacggatgagaaatctaatgagattacagctatcccagaacttcttaacatgctagatattaaaggaaaaatcatcacaactgatgcgatgggttgccagaaagatattgcagagaagatacaaaaacagggaggtgattatttattcgcggtaaaaggaaaccaggggcggctaaataaagcctttgagaaaaaatttccgctgacagaattaaataatccagcgcatgacagttccgcaatgagtgaaaagagtcacggcagagaagaaatccgtcttcatattgtttgcgatgtccctgatgaacttattgatttcacgtttgaatggaaagggctgaaaaaattatgcgtggcagtctcctttcgctcaataatagcagagcaaaagaaagagcccgaaatgatggtcagatattatatcagttctgctgatttaaccgctgagaagtttgcgacagcgattcgaaatcactggcacgtggagaataatctgcactggcgtctggacgtggtaatgaatgaagacgactgcaaaataagaagaggaaatgcagcagaattattttcagggatacggcacattgctattaatgttttgacgaatgataaggtattcaaggcagggttaagacgtaagatgcgaaaagcagccatggacagaaactatctcgcgtcagtccttgcggggagcggactttcgtaa

SEQ ID NO: 488131 - DNA, 303 bp, Shigella sonnei; identical to SEQ ID NO: 458125

SEQ ID NO: 488132 - DNA, 504 bp, Shigella sonnei; identical to SEQ ID NO: 485763

SEQ ID NO: 488133 - DNA, 504 bp, Shigella sonnei; identical to SEQ ID NO: 485763

SEQ ID NO: 488134 - DNA, 366 bp, Shigella sonnei; identical to SEQ ID NO: 10065

SEQ ID NO: 488135 - DNA, 177 bp, Shigella sonnei; identical to SEQ ID NO: 487752

SEQ ID NO: 488136 - DNA, 441 bp, Shigella sonnei; identical to SEQ ID NO: 478283

SEQ ID NO: 488137 - DNA, 633 bp, Shigella sonnei
atggtgggatgtgcagggcagtcgcaagactggccgggttctcgagtgaccggtatttccacccctgtacgtctcaccacccttatggtcgtggaaaacctcggtggtgagttaattaacttatcactcgaggatgccatcatggctactatccctgccctttctcaccctgacgtaaccatcgaaaatggtcgcgctgtcactacgtctattgcgatcgcagagttctttggcaagcgtcacgacaatgtgttacgtgccatcgcaaatactgaatgctcacctgaatttaacgccctcaattttgaggacgtcacctacactgacgccaaaggcgaaaaacgcccgatgtaccaaatcaccaaaaacggcttcgttttcctggtgatgggattcactggcaaaaaagccgctgcatttaaagaagcctacattgctgagttcgatcgcatggaggccgaactgcgccagaataacaccccacccactgacaaaataattccaggcgatggccgcaccctggttgttcacttcgacgaacgcggcaacatcagattcaccgaaaccgttcctgatggcgcacgggtctgtaccatggagactttccggttggtaatgactccaacttattga

SEQ ID NO: 488138 - DNA, 354 bp, Shigella sonnei; identical to SEQ ID NO: 466835

SEQ ID NO: 488139 - DNA, 366 bp, Shigella sonnei
atgctggaagcggccagagaggccaggcgtcaggaaattgaagcatggcgcgcagaacaggaggcgaagccgttcacgtttgaatggaacggtcgtatctggaatgctggtcccgactcactgggccgcctgtccccggtagtcatgctggcaaaatctgtcacagcacaaacacatatggcgtggagcgatgccgataatcagcaggtgaaactgtcgatgccggaactggaagaactggcggcagcaatggtgcaggcgcaggtcgatcgcaacgatgagatttatcgccgtcagcgtgaaatgaaagaggagctgagcggtctggatgatttggcttcaattcgggcgtttgacgttgagtaa

SEQ ID NO: 488140 - DNA, 180 bp, Shigella sonnei; identical to SEQ ID NO: 476577

SEQ ID NO: 488141 - DNA, 366 bp, Shigella sonnei
atgctggaagcggccagagaggccagacgtcaggaaattgaagcatggcgcacagaacaggaggcgaagccgttcacgtttgaatggaacggtcgtatctggaatgctggccccaactcactgggccgcctgtccccggtagtcatgctggcaaaatctgtcacagcacaaacgcatatggcgtggggtgatgccgataatcagcaggtgaaactgtcgatgccggaactggaagaactggcggcagcaatggtgcaggcgcaggtcgatcgcaacgatgagatttatcgccgtcagcgtgaaatgaaagaggagctgagcagtctggatgatttggcttcaattcgggcgtttgacgttaagtaa

SEQ ID NO: 488142 - DNA, 504 bp, Shigella sonnei; identical to SEQ ID NO: 485763

SEQ ID NO: 488143 - DNA, 441 bp, Shigella sonnei; identical to SEQ ID NO: 478283

SEQ ID NO: 488144 - DNA, 276 bp, Shigella sonnei; identical to SEQ ID NO: 484087

SEQ ID NO: 488145 - DNA, 294 bp, Shigella sonnei; identical to SEQ ID NO: 13522

SEQ ID NO: 488146 - DNA, 201 bp, Shigella sonnei; identical to SEQ ID NO: 488102

SEQ ID NO: 488147 - DNA, 324 bp, Shigella sonnei
gtggtggaaaatgacggtggttctctggaagccatcgccaaaaaatataacgtcggctttctcgctctgttacaggctaaccccggcgttgatccttacgtaccgcgcgcgggcagcgtgttaacgatcccgttgcaaaccctacttccagacgcgccgcgcgaaggcattgtgatcaacattgcggagctgcgtctctattactacccgccgggtaaaaattcggtaaccgtgtatccaataggtattggtcagttaggtggtgacacgctgacaccgacaatggtgaccaccgtttcagacaaacgtgcaaacccaacctag

SEQ ID NO: 488148 - DNA, 1209 bp, Shigella sonnei
atgccaatgatacttgtaaagaagaatccccggggcaaagtgattcgggagcttagcagtgaggaagagactgcagtaaagacggtctgtggactgaaaaagccagcaaccatggcactacataacctggccaatgatattctccgggaaatgcgtgagtatgatgcatggttacagtgtgactgtattccgggagattcgccggccatgaattttgctgctcttaaaaacaatacgggtactctttatctgtccagttttaatcatgagcatgcacctgaatgccccatgtatcgtcagttatccggaaatgaagaggaaacatcttccggagcaagccggcatcccgttagcacccgtataaattacagaaactttttaccacctgatgacagtaattctgttatcagactgcaggcccgctctgcttaccataatggtgagagctcctccgttcgcaagaaacgtccgcgccttgcccgtttactcctgtctcttattgacgatgctgggctgaataaactggattccctggctaatccccgtatccggactaattatcgtgagtgtcttgatgccatacggcaggttacactgcagcaggagtatattcggggaagatccttatctgaaattatccatttccggcctggaatgtctgaaaggtctcaggagcggttaatggaaacgctggagaattcagaacgacactggcctgccagaagaaaacatatgttctttcagatttttatggcgcagcacatctgtcgtgatgctgtggaaattcactgggcgaacggtaatattcaggtcatcagacctgtgcgggggatcagtattaatggtgaagcgcagggcggaatacgtcccccttactgggttattcttgctttttgccggagtgccgatggcagaatcatctgcagtgaagggtatgctcatgctctttatcaactgacatgtccggtgcctgtggacagcaaactggaacgaaacacgctcactgctcttctgaatgtggccagctggcttaaaagaaagccaggtacgccggaattaagtctggaaaggcccctgtttgatacagaagtttatgttaatggtgaaaagaaatatgtcctgccggatttcattgtcacagcaagggctcctgacggaaagacggccagagtggtcatcgaaacgatgggtgaggtgtactggcaatag

SEQ ID NO: 488149 - DNA, 252 bp, Shigella sonnei
atgaacaggttgcaagtcctggccaaaacatcaggtggtgctggttttggtgctctggccggagaagaactgtctataactgacactatagaaaacgtggcgacaggcaatgtaagggcaaaccacggtgttctttctccattgatggagaagcggatgattaacctgttaatcatcgttctcagggcggttgttgctgtggctaacgcagtgatagcaatcctggaactgatccgggaactggttgactga

SEQ ID NO: 488150 - DNA, 1281 bp, Shigella sonnei
gtgtcttaccaacactcccccacaacagaagacccgatgaacatatggtatatcgttggcaccatatgtctgctctttgcgcttctcatctggctctttttacccgacatcgtctttgccacctgcctgatcctgcacacaatgtgggggatgactgactgggggccttttcaccattttgccgccccccgttataacctgctggccaacaccgccaacaacgctgcaacgatcactttcagccagtggctggatgtcatgtcacagaccgtggggatcctctggctgattctgcttcccatgacaatcggctttctgtggatgtggtttcagcatccggcccagccccgcttcacccgcagaccactgaatatccacacgctgccacatctgttttcatcactgtcaccggctatcgcccccgttctggctgacggagacagcaacagactcttccacggacaaaaacgtcccgagcgccgtgtcgctctaaccccggaagtctttgtggcacagaacaaccttatccgcaacatgcggctcgatgttgcggccacgcgccagtgctttatggcgcaactgggccagcctctgaccacctggaaagacatggctccacatgaaaaagcactctttgccgtctttggcctgcagttcttccttggggaccggaaatcggctgtttccctgatgaataacctcaacctctcctgcagactcaaaagcaagcgggaccaggggcgtttcagcacgccagtgtattcactggccagaaacgcctttatccgggtcataaaaacagaagacgcacaacagtggctcaggcagcaccgttacgttcgcagcggtcttgtctggctttacgcacatgatttgcgcctgacgccccccaactggctgtggctcaagggcgttgaccggacgctcttctatgcccttcaccgggcaaacaccacaaaaggcttcatcgaaggggccggcgtggtggccgttgcccgggcagaaaatgaagccagccgtctcggcctcccctgcccggaaccctgtgtggaagaggccattgaagggcttcgacgggacatgctggggctgggcctgatatgggacgaacctcagccagatcgcgatcgtaaacgtcagatcaggacccgctggtcactcacggatgacgtgataccccgccgccatgataacgacgaagacactgacactggtgaaaccaccgaaaccaccgaaaccaccgaaaaacagcatcccgccgacaaggaaaaagaacaatga

SEQ ID NO: 488151 - DNA, 2721 bp, Shigella sonnei
atgaatgccatcattccgaaaaaaagacgtgacggaaagtcttcttttgaagacctgattgcgtacacctcagtgcgggatgatgtgccggaagatgaactcaggcctgacacggaaatgaaagctgagattccgcaccggaaccgcttcagacgtcttgttgattatgcaacacgtctgcgtaatgaaaaatttgtttccctgattgatgtgatgaaagacggcagtcagtgggtgaatttctatggtgtgacctgctttcataactgtttgtctcttgaatctgcggctgaagaaatgcagaaagcagcagagcttgctcatttttccaaagatgatacagaccctgtttttcactatattctctcctggcctgcgcacgaaagtccgcgttctgagcagctttttgactgtgtgcgtcacaccctgaaatcccttgagctgtcaaaacatcagtatgtggcagccgttcatacagacacggataacctgcatgtacatgttgcagtgaatcgtgtccaccctgaaaccggctatatcaattgccttccgtggagccaggaaaaactcagtcgtgcatgccgtgaacttgaacttaagcacggattcgcgccggataatggttgctttgtacatgcaccgggcaatcgtattgtgcgcaaaacagcgctggtacgtgagcgccgtaatgcctggcgacgcgggaaaaagcagacgttcagggaatatattgatcagatgtcgattgccgggctgcgtgaagagccagcacaggactggttatctttgcataaacggctggccagtgatggtctgtatatcacgatgcaggaaggggaactggtggtgaaggatggctgggacaaagcgcgggaaggtattgcactcagttcgttcggaccgtcatggacagctgaaaaactggggcggaaactgggggaatatcagcctgtaccgacagatattttcagtcaggtggggacacccggtcgttatgatccggaagccataaacgttgatatccggccggaaaaagtggcagaaacggagagtctgaaacagtacgcctgccgtcattttgccgaacgcttaccggcaatggcgcgcaatggtgaactgaaaagctgcctggctgtacaccgtactctggcagaggcgggattatggatggggattcaacacgggcatctggtactgcatgatggatttgataaacaacagacaccagtacgtgcagacagtgtgtggccgttaatgacgctggattacatgcaggatctggatggtggatggcagcctgtaccgaaggatatttttactcaggtcgttcccggagaacgattccggggacacagtattggctctcagcctgtcagtgattacgaatggtatcgcatgaggatgggcacaggtccgcagggggctataaagcgtgaactgttttctgataaggaaagtctgtggggatacggccttattcagtgcaggagcctgattgaagagatgatagctgacggggatttcagctggcaggcatgtcatgagatgtttgcacgtaaagggcttatgctgcagaaacagcatcatggtcttgtgattgtggatgcgtttaatcatgagctgacaccggtgaaggccagcagtatccatcctgatttgacgttatcccgtgccgagcctcaggccgggccatttgaaattgcggctgcagatattttcgaacgggtgaagcctgaatgtcgttacaatccggaacttgctgccagtgatgaagtggaacccggcttccggcgcgatcctgagattcgtcgtgagcgccgtgaagcccgtgcagctgcgcgggaagatttgcgtgcgcgttatcttgcatggaaggagcactggcgtaaacccgacttacgttacggagaacggttacgggaaattcatgctgcctgccgtcggcgcaaggcgtatatccgtgtgcagttccgggatccacaattgcgtaagctgcattaccatattgcggaagtgcagcgtatgcaggcgctgatcaggctgaaggagagtgtgaaggaagagcggttgtcactgattgcggagggtaagtggtatcctttgtcctaccggcagtgggtggaacaacaggcggctcagggagacagggctgcagtatcgcagttacgtggctgggattatcgtgatcgtcgctcgcgtaataaggataaaagacgcacaactaatgttgatcgttgtgtcgtactctgcgaacccggaggaacgccactttttaataatgttgcaaaacttgaagctcgtcttcagaaaaatggaagtgttcatttcagggatacgcggacaggaaaaaatgtctgtacggattacggagatcgggttgtgttctaccatcacacggaccgaaatgaactggcagagaagcttaatttaattgcgccagttctgttcagccgcaacggaaagcttggttttgagccggaaggttcataccagcagtttaatgatgtgtttgcagaaatggtggcctggcacaatgcagcgggaataaccggaaacggacacttcaccattactcgtccggacgtggatttgcaccgtcaacgcagtgagcagtattaccgggaatatatcagacagcagacccgtttatcggagagccatgatgataattatacgttacggcaggagaaaacatgggagccaccatcacctggaatgtaa

SEQ ID NO: 488152 - DNA, 333 bp, Shigella sonnei
atgagtgagaagaaaacccgaagtggcagtgagaaacggcaaaagaatgtcctcattgctgttcgtttttcaccagaagaggctgagattgttaaagaaaaggcagaaaaaaacggactgacagtttcaactctgataagaaaaactgtgctgggaaaacagataaatgcccgcattgatgaagattttttgaaagagctgatgcgtcttggtcgcctgcagaagcatctgtttgtggaaggaaaacgcacgggagataaagagtatgcagaggttctcgttgctattacagaacttgctaatactctgcgaagagatttaatgggacgctga

SEQ ID NO: 488153 - DNA, 693 bp, Shigella sonnei
atgaacaactggcagcaagaaggctggaaagaagcgccggttccggtatggaatatgctcaactatgttgccttacaggaagggcgtaacggcatggctgtctttagcgaagggttacgtgaatttgaagtcatcggtgaagagaagaaaacctttgccattacgttgctgcgtggcgtgggcttactgggcaaagaagatctgcttttaaggcctgggcggccttcgggaattaaaatgccagtcccggactcacaactacgtggtctgctttcttgtcgcctaagtttattgagttataccggtacgccaaccgccgctggtgtagctcagcaggcgcgagcatggctgactccagtacagtgttacaacaaaatcccatgggatgcgatgaagctcaacaaagccggattcaacgtgccggaaagttatagtttgttgaaaatgcccccagtgggatgcctgataagcgcacttaagaaagctgaagaccgacaagaagtgattttacggctgtttaatccggctgaatcagcaacctgtgatgcgactgttgctttcagtcgcgaggtgatttcttgctcagaaacgatgatggatgaacacattaccaccgaggaaaatcaaggttcaaatctatcggggccttttttacccggccagtcacggacgttcagttaccggcttgcctga

SEQ ID NO: 488154 - DNA, 684 bp, Shigella sonnei
gtgccgttgattctggtgccgctattaatgcgctggctgccggagtcagcggttttcgctggcgaaaaacaggctgcgccaccactgcgtgccttatttgcgccagaaacggcaaccgcgacgctgctgctgtggttgtgttatttcttcactctgctggtggtttatatgttgatcaactggctaccgctacttttggtggagcaaggattccagccatcgcaggcggcaggggtgatgtttgccctgcaaatgggggcggcaagcgggacgttaatgttgggcgcattgatggataagctgcgtccagtaaccatgtcgctactgatttatagcggcatgttagcttcgctgctggcgcttggaacggtgtcgtcatttaacggtatgttgctggcgggatttgtcgcggggttgtttgcgacaggtgggcaaagcgttttgtatgccctggcaccgttgttttacagttcgcagatccgcgcaacaggtgtgggaacagccgtggcggtagggcgtctgggggctatgagcggtccgttactggccgggaaaatgctggcattaggcactggcacggtcggcgtaatggccgcttctgcaccgggtattcttgttgctgggttggcggtgtttattttgatgagtcggagatcaagaatgcagccgtgtgccgatgcctga

SEQ ID NO: 488155 - DNA, 1050 bp, Shigella sonnei
ttgctagtctccccgcacgtcgataaaaaacagattgcggcggtgattgccgaatggaccggcgtgccgctcaaccgcctgtcgcagaatgaaatgtcggtcatcaccgacctgacgaaatggctgggtgacaccatcaaaggccaggacctggcgattgccagcctgcataagcatctactgaccgcacgcgccgacctgcgtcgtccgggacgcccgctcggtgcgttcctgctggctggccccagcggtgtgggtaaaaccgaaaccgtcctgcaactggcagagctgctctacggcggtcgccagtacctgaccaccatcaatatgtccgaattccaggagaaacacaccgtctcgcggctgattggttcgcctccgggctacgttggctacggtgaaggcggcgtactgaccgaagcgattcgccagaaaccctactcggtagtactgctcgatgaagtggaaaaagcgcacccggatgtgctcaacctgttctaccaggcgttcgataagggcgaaatggcagacggtgaaggccgcctgattgactgcaaaaatatcgtcttcttcctgacgtccaacctcggctaccaggtaatagtcgagcatgccgatgacccggaaaccatgcaggaagtactgtatccggtgctggccgacttcttcaaacctgccctgctggcgcgtatggaagtggtgccgtatctgccgctgtcgaaagagacgctcgccaccattatcgccggaaaactggcccgtctggataacgtgctgcgcagtcgctttggtgtagaagtggtcattgaaccggaagtgacggacgaaatcatgagccgcgtcacccgcgcggaaaacggcgcgaggatgctggaatcggtcatcgatggcgacatgctaccgccgctctcgctgctgctgttgcagaaaatggcggctaacacggcgattgcccggattcggttgtcggcagtggacggcgcatttacggcagacgtggaagatgctcagaacgacgagtccgtcacaaaggatgaaacggttttatga

SEQ ID NO: 488156 - DNA, 2037 bp, Shigella sonnei
atgagtaccacaacacgaaaatttaaaaccattatcaccgatacgggtgcaaaaaaattagcgcaggcaaccgcgccagatgggaaacctgtccgcctgacacatatggccgtgggtgacggcggcggtactttacccacgccagacagtaagcagacccgtcttgtgcatgaggtgtggcgacataccgttaatcgcgtcaccctggacgcaacacatcagaaccacattattgcggagctggttattcctcctgaaacgggcggattctggatccgggaaattggtgtgtttgatgagcacggcgatttgatcgcggtaggcaatactgccgaaagttacaagccaaccgttgccgaaggatccggacgtgcacaaacatttcgcaccattctgaccgtatccagcactgccactgtggcgcttaccgtggataacaccatggtgatggccacagtgaattacgtggatgacaaactgaaagagcatgaacagtcacgacgtcacccggacgcctcgctgaccgcaaaaggccttgtccagctcagcaacgccaccaacagcacgtctgaaacgctggcagcgacaccaaaagccgttaaggcagtaatggatgaaacgaacaagaaagccccattaaacagcccggcactgaccggaacgccaacaacaccaactgcgcgacagggaacgaataatacccaaatcgcaagcacggctttcgttatggctgcgattgccgcacttgtagactcttcgcctgatgcactgaacacactgaacgagctggcggcggcgctgggcaacgacccgaattttgcgaccaccatgactaacgcgcttgcgggtaagcaaccgaaagatgccactctgacggcgctggcggggcttgctactgcggcagacaggtttccgtattttacggggaatgatgtcgccagcctggcaaccctgacaaaagtcgggcgggatattcttgcgaaatcgaccgttgccgccgttatcgaatacctcggtttacaggaaacggtaaacaaggctggtaacgccgtgcaaaaaaatggcgatacgttgtccggtggacttacttttgaaaacgactcaatccttgcctggattcgaaatactgactgggcaaagattgggtttaaaaataattcggatgcagacaccgattcctacatgtggtttgaaacaggcaacaacggcaatgaatatttcaaatggagacaccgcatcattggcacccggcctaaagacctgatgaatcttaaatggaatgctttgtctgttcttgttgaagcccttttcagcagtgaagtgaaaatatcgacagtcaatgcactgaggatatttaattcatcttttggtgccatttttcgtcgttctgaagaatgcctgcatatcatccctacacgagagaatgaaggggaaaatggtaatatagggccactacgcccctttacgcttaatctcagaactggccggataagcatggggcatggtcttgatgttacaggggatatatttgcaaaccgttttgcaattaacagtagtaccggcatgtggattcatatgcgtgaccagaatgttattttgggacgtaatgcggtatccactgatggtgctcaggctttgctccgtcaggaccatgccgaccgcaaatttatgattggcggtctgggaaataagcaatttggcatctacatgattaataactcaaggacagccaatggcaccgatggtcaggcgtacatggataataacgggaactggctttgcggctcgcaagttattcccggcaactatggcaattttgattccagatatgtgaaagatgttcgacttggttcacagcaatattatggagtgaacaactggcaaacatggaattttcagtgcccgtcaggctatgtactgacggggattaacgtacaggataccggaaaaaactctgccgataatattgcaggcgttcattacaggccagtgcaaaagtatataaatggcacttggtataatgtggcgagtatttaa

SEQ ID NO: 488157 - DNA, 609 bp, Shigella sonnei
atgcatctctgcgccgttggagaggatgattttatcgccccctttcagctccacatcgacttcagccgcggccttctgaataatgcttttaaactggaacgcctgacgacgcgacgcagacaaaaaaatctggttacgctggtaaggttgtgccacatcgtcacgcagcgccatcagcagtgcttcctgtgcaaaataccaggtcgccccaatctgtcgggatttcaggatcatcctgttacgtatcccggcttccctgcaaagcgtcagggagtcaaaccagccccgctgatgccactccagcctgctgatgattttttcccgcagtgcggcaatctgttccggcgtgaaatgatttttgagttttttcgcccggcctttctttcctgtggccgtcgcatccggctggccatcatgcagttttttaagctgccgggtcagcaggtctatttccttaaagtcaccacctgttttattctgtttttcagtaagctggatgaggcgcgcatcgatggactgcgtgacacgctgcacgggtggcgtttcatcccactggtcgcgttttttccacgcataaatcgtgttcgggtttattcccatcagacgtga

SEQ ID NO: 488158 - DNA, 306 bp, Shigella sonnei
atgcgtgatgataacggcattgtgcaactgtggcttatctcgccacagggcggcgagccgcgccagttaacccataacaaaacggatattcagtctgcatttaactggcatccgtcaggagaatggttgggctttgtgctggataatcgaattgcttgtgcccatgcgcaaagcggcgaggttgagtatttaaccgaaaaccacgccaatccaccttctgcggacgccgtggtcttctcgccggatggtcaatggctggcgtggatggaaggtggccagctgtggatcaccgaaactgatcgctaa

SEQ ID NO: 488159 - DNA, 333 bp, Shigella sonnei
atgttttcagaagtcatgcgttatattctcgacctcggccctacggtgatgcttccgattgtcatcattattttttctaaaatattaggcatgaaggcaggcgattgctttaaagcgggtctgcatatcgggattggctttgttggcattggccttgtgattggcttaatgctggattccattggtccggcggcgaaagcgatggcggaaaatttcgacctgaatctgcatgtggtcgatgtcggctggccgggctcttcaccaatgacctgggcgtcgcaaattgcgctggtggcgattccgattgcgattctgacgtggcgatgttactga

SEQ ID NO: 488160 - DNA, 525 bp, Shigella sonnei
atgaataaaggaaaacccaaagcgacgataatcaatccactgccgcgcaacaaagtggtactggcagtcagcattctgttaatcctcattttctcgaaatatttctatatggcgagcatcagcagctattacaccttttatctgatgcaaaaattcggattatctatccagaatgcccagcttcatctgtttgccttcctgtttgccgttgcggcaggtacggtgatcggcgggcctgtaggggataaaattggacggaaatatgtgatttggggctctatcctcggcgttgcgccgtttacgctgattttaccctacgccagcctgcactggacgggggttttaacggtgattattggatttatcctcgcttcggcattctctgccattctggtctacgctcaggagctacttccgggacgtatcggtatggtttctggactctttttcggttttgcttttggcatgggaggtctgggagcggcagttctggggcttatcgccgatcacactgaggtagcctga

SEQ ID NO: 488161 - DNA, 474 bp, Shigella sonnei
atgagtgacaccgaaaagaaaaatacgctgctggtgattaatctcgataacttaattgttggcgataaattgtatttcaacagcggtgtaaaaacccctgaagcagtaaggaaattaacgcgcgacagggcgctggcaattgcgcgcagtcacggaatagccgcaacgaccaatccgggtttgaataaaaattatccgaaaggcactgggtgttgtaatgacgcagaaatattcgacaaagcgggcattgctgtactttcggtggaagcgactaactggaatcttgggaataaggatggttatcagcaacgcgcaaaaacagccgcattccctgcgggaaatagctggcatgacgtaagactggataatcaacagcatattgataaggcacttcctggaagaatagaacgtcgctgccgtgacgttatgcggataatgctacctctggtgaaggagttggcgaaggcgtcttga

SEQ ID NO: 488162 - DNA, 903 bp, Shigella sonnei
atgattacgctcattctttctgcaccagtaacagaaatggctgaagcatttaagcgggtattcgcaaatgcagataatgtgaatattgtcggaaagccatttgaaacaatcagggaatttgactgcatggtaagtgcggcaaatagtttcggcctgatggatggcggtgttgatgccgccattaccgcattcttcggtactcagttacagtcccgcgttcagaatcatattcttcgtgaatatctaggcgagcagcctgtaggttctgcatttgttattgaaacggggcataatcatcatccctggctggtacatgcgccaacaatgcgtgttccgctgacaattgacggaacagacgctgtatataacgcaacctgggccgctctgcttgccatctttcagcacaataaacacgcaacgacagacaggaaaataaaaacggtggtattccctgcaatgggagccggatgtggtcaggtgccgtttgaaagtgttgcccggcagatgaagcaggcatgggataactttaataaaaaaacagaatcaattaactgggaatacgcacaatcccgccagtcggcagtatttggcacatatgcatactgtccgggtaattctgtttgccgttatgcggatactaaatatattggatgcggcgattatcggacgtattgctcacgttccgggcaggtctgtattaaccctgaacatcaggctgatgatgtactgatacaacatcaggctaataaccggtttcgccctggttcgcatatacaccggattaatccagaaaatcccgtaggtaatgtcatctctggcgcacatagccacggaagtagcatcgttattggtgctcacacccatacgctcaataaacaatattctgtctctgatattaagtag

SEQ ID NO: 488163 - DNA, 585 bp, Shigella sonnei
atggatttcagaatgagtgaacaaccacggactataacaatttataatctgctggccggaactaatgaatttattggtgaaggtgacgcatacattccgcctcatacaggtctgccagcaaacagtaccaatattgcaccgccagatattccggctggcttcgtggctgttttcaacagtgatgatgcatcgtggcatcttgttgaagaccatcggggtaaaacagtttatgacgtggcatcaggggacgcgttatttatttctgaactcggtccgttaccggaaaatgttacctggttatcgccggaaggggaatatcagaagtggaacggcacagcctgggtgaaagatgcagaagcagaaaaactattccggatccgggaagcggaagaaacaaaaaacagcctgatgcaggtagccagtgagcatatagcgccgcttcaggatgctgtagatctggagatcgcaacggaggaagaaaactcgttgctggaagcctggaagaagtatcgggtgttgctgaaccgtgttgatacatcaactgcacctgatattgagtggccggaagaaccagacacaatgtaa

SEQ ID NO: 488164 - DNA, 228 bp, Shigella sonnei
atgctgagacacaacgttcctgtgcggcgggatctggaccaaattgccgctgacaacggtttcgactttcatatcatcgacaatgaaatctattgggacgagagtcgggcttaccgttttactctgcgccagattgaagagcagatcgaaaaaccaactgcggaactgcatcagatgtgccttgaggtggtggatcgcgcggttaaagacgaagagatcctgacgtaa

SEQ ID NO: 488165 - DNA, 573 bp, Shigella sonnei
atgaacaacttaatgatcgaccttgagacgatggggaaaaataaggatgcaccgatcgtttccattggcgcggtgttctttaccccagaaaccggtgacatcggacaagaattctatgcggttgtcagcctggacagtgctatgaagcaaggagctacacctgacggcgataccatcctgtggtggttgaaacagagccctgaagcacgagctgcaatctgtattgatgatactttatcgatcagcgatgcactctctgaattgagtcatttcattaatcagcatgcagacaatataaaatatttaaaagtctggggtaacggggccaccttcgacaacgtaattttacgtggagcttacgagcgagcaggacaaatctgcccgtgggcgtactggaatgaccacgatgtacgcacgatcgttacgcttgggcgttccatcggattcgaccccaaaatggacatgcctttcgatggcgaacggcacaacgccctggctgatgcccgtcatcaggcaaaatatgtttccgctatctggcagaaattaattcctgccaccagcacagaattatga

SEQ ID NO: 488166 - DNA, 810 bp, Shigella sonnei
atgaccacatttaccaataaagaactgattaaaaaaatcaaagaacgaatcagcagcctagaggttcgagacgatattgagcgccgtgcttatgaaattgctctggcatcgctggaagaggatccggtggcatggctgcattcagacaatggcttaggtattccggcaataactaggagtaaaaacattgctgacagttggttatcaaagggctggtatgttcagccgctatatatagccaagccagtgccggtggtgccagatgctcgtccatctttaaataatggcatagtcggttttgatgaaggctggaacgcctgccgcgctgccatgctctatggtgccgtacctgcaagcaaggcttacaagttgccacaaacgcagtttaaacaggttgctgacctctacgaaatgcaatttgatgacggtcgcacttgtacctttcacactgatgcgcaaaaggctgtgcaatggcttcaggcgtgcgacggaaacagggttcaggaatacgttaagctggaacgattgcagaacgcactgtctggcaactctccggtaactccggatggttgggttatggtgccgaagagactaacagccgagaacggcgctaagggggcgctatccggtgaattttcagaaactacgtttataagctgcctggaatgctttggcgatgatgattgcgatacctgtgacgggagcggacgtattgaaattaaagtgccagtcacgtggtcgaccataaaatctatctgggataaaggtatcgagtattttgcagcaaaaccatcacaggaggtgaagtga

SEQ ID NO: 488167 - DNA, 1176 bp, Shigella sonnei; identical to SEQ ID NO: 5984

SEQ ID NO: 488168 - DNA, 684 bp, Shigella sonnei
atgtcccgttttgtcctcggtaactgcatcgatgttatggcccgtattcctgataacgccattgatttcatactgactgacccgccgtacctcgtcggttttcgtgaccgttccgggcgcaccatcgctggcgataaaaccgatgaatggctgcaaccggcctgtaatgaaatgtaccgcgtactcaaaaaagacgcgctgatggtcagcttctacggctggcaccgtattgaccgctttatggcggcctggaaacgcgccggattcagcgtggcagggcacctcgtgttcaccaaaaactacacatccaaatctgcgtatgtcgcgtaccgccacgaatgcgcttacatcctggcaaagggcagtccggcccggccccgtaaccctctgccggatgtgctgggctggaaatattcaggcaatcgtcatcacccgacggaaaagcccgttaccagcctgcaaccgctgattgagagcttcacacacccgaacgcaattgtgctggacccgtttgcaggcagcggctcaacctgcgtcgccgccctccagtccggacgccggtatatcggtatcgagctgcttgagcagtatcaccgtgccgggcagcaacgccttgccgccgtgcaacgggccatgcagcagggggccgcgaatgatgactggtttatgccggaggctgcgtaa

SEQ ID NO: 488169 - DNA, 534 bp, Shigella sonnei
atggccagcacagaagaaaaattactcacgctcctgttatcggtggagcatctgcaacataccgcaatggagcaacagaaagctgttgctgattctctggctgtggcaagggaaacacttcgcggatatcgggatatttctgacggtgtggcaaaacaggtcagggatgaagtcagaaatgaggtgcagaagctggacgtggcaggactgataggtgagcgcatcagccaggattttcagcggctggaagagtcagtcgcaaacatgaaggcaaacgcggatgccctgaacagggatattgcgacaattcacagcaatatcgtgcaggaatacaacacccttaaagggtatagctggaaatggctgggtggggtgtcagtggcttttctggttatgttctgtgtgctcggatggggaatgaaaacaatactcgacaggaactacaacgccacagcggcggtgtatcagaaagttgtgacactggaagataaactggtggagaaacctgtcacgggtaagagccggaaaaactga

SEQ ID NO: 488170 - DNA, 1728 bp, Shigella sonnei
atgagcggtggagatggacgcgaccacaacagtggcgcacataacacaggtggtaacattaatggcggccctacggggcttggtggaaatggtggggcttctgacggttcaggatggagttcggaaaataatccatggggtggcggttccggtagtggtgttcactggggaggtggctccggcaatggtaatggcggggggaatggtaattccggtggtggcagcaattcatccgtagcagcagtggcatttggttttcctgctttggcaactcctggtgccggaacgctgggtatcgccgtctctggtgaggctttatctgcggcaatagctgatatctttgcagccctgaaaggtccgtttaaattcagcgcatggggtattgcgctttacggcattctgccatctgaaatagcaaaagatgacccgaatatgatgtcaaagattgtgacgtcattaccggcagaaacagtgacgaatgttcaggtcagtacacttccgctggaccaggcaactgtcagcgtgacgaaacgtgtgacagatgttgtgaaggacacacgacagcatattgccgtagttgcaggtgtgcctatgagtgtgcctgttgtgaatgccaaaccaacacgtactccaggtgtatttcacgcatcatttcctggtgtcccttctctgacagtcagcactgtcaaaggccttccggtgtcaacaacccttccccgtggtattacggaggataaaggccggactgccgttcctgcaggatttacctttggtggtggttcacatgaagcggtgatccgtttcccgaaagaaagtgggcagaagccgatttatgtatcagtgacagatgttcttacccctgcacaggtaaaacaacgtcaggatgaggaaaatcgcctccagcaggaatggaatgacacacatcctgtagaagtggctgaacgcaattatgaacaggcccgcgcagaactggatcaggctaataaagatgttgccagaaaccaggaacgacaggctaaagctgttcaggtttataattctcgtaaaagtgaacttgatgctgcgaataaaactcttgctgatgcaaaggctgaaataaaacaattcgagcgatttgcccgagaaccaatggctgctggtcaccgaatgtggcaaatggcagggcttaaggcccagcgggcacagacggatgtaaataataagaaggctgcatttgatgctgctgcaaaagataagtctgatgctgatgctgcgttaggtgctgcgctggaacgccgtaagcagaaggaaaataaagaaaaggactctaaggataaattagataaggagagtaaacggaataagccagggaaggcgacgggtaaaggaaaaccagttggtgataaatggcttgatgatgcgggtaaagattcaggagcgccaattcctgatcgcattgctgataagttgcgtgataaagaatttaaaagttttgacgatttccggaagaaattctgggaagaagtgtcaaaagatcccgagcttagtaagcaatttaaagacagtaataagacgaacattcaaaagggaaaagcaccttttgcaaggaagaaagaccaagtaggtggtagggaacgctttgaattacatcatgataaaccaatcagtcaggatggtggtgtctatgatatggataatatcagagtgaccacacctaagcgacatattgatattcatagaggtaagtaa

SEQ ID NO: 488171 - DNA, 261 bp, Shigella sonnei
atggaactgaaacatagtattagtgattataccgaggctgaatttctggagtttgtaaaaaaaatatgtagagctgaaggtgctactgaagaggatgacaataaattagtgagagagtttgagcgattaactgagcacccagatggttcagatctgatttattatcctcgcgatgacagggaagatagtcctgaagggattgttaaagaaattaaagaatggcgagctgctaacggtaagccaggatttaaacagggctaa

SEQ ID NO: 488172 - DNA, 135 bp, Shigella sonnei
atgcacgaaagcgatgcgcgatcgatttcgactgttccgaagggcgaacaggtcaaaatgacaagttttctcgccctgggtggaaagttctgcacggggattttagctctcatctcccgcatggaatttttgtga

SEQ ID NO: 488173 - DNA, 1020 bp, Shigella sonnei
atgagcgccgcgcttcaatacttcgacgaaaatttaccccatcgtccctatcacacggatgatctcgctttcggccttcgcatctccggcaaagggcgtgcgcttcttgcgcggtacatccagcagaaccagcctcatgcgcagttctggctggtttttgacgttgaccgcgagggggctgcgattgactggagcgaccggaacgcccccgcgccgaacatcaccgttaaaaatcctgtgaacggacacgctcacctgctctacgcactcaacatcgccgtgagaaccgcgcctgatgcctcggttaaggcgctgaaatatgccgcagcggttgaacgttcgctgtgtgagaaactttgtgctgatgtgaactacagcggcctgatttgcaaaaatccgttccacctggaatggcaggtgatggagtggcgcgaggacgcctataccctcgatgaactggcagattatctcgatttgagcgcctcagagcgtcgtagcatcgataaacattacgggatggggcgaaactgccacctgttcgaaatgacgcgcaaatgggcttacagggcgattcgtcagggctggccagcgttctcacagtggcttgaagcggtgatccagcgtgtcgaaatgtacaatgcatcgcttcccgttccgctttcactggctgaatgtcgggctattggcaagagcattgcgaaatacacgcacaggaacttcacgccggaaactttcgcacagtatgtggctgatacgcacacgccagaaattcaggcagcacgcggtcgcaagggcgggaaggccaattcgtcagaaaatcagtcggacaaagggaaaaaaagcgccgctgttcggtggactgctaacgacgacaaacgtcgtagggcgcttgatatgtatatcttgggagcgtcaacggaagatattgcagtggcggttggtgttagcagccggactattcgacgctggatggataattctggagaatggctaaccaagaaacaaataattaaatgttag

SEQ ID NO: 488174 - DNA, 399 bp, Shigella sonnei
atgcgcatcagcaacatcgaatggctgaagaaacggatcggattcatcaggaagctcggagaacagaccgcacgacagagacagattattgacctgctcgacaacgaagcaggactcacagaacaggaacgcaaactcctccacgtactggcaacagcggaaaaaaacgacttacaggcacaggagaacgaacgaaaacaggcggtccaaaaacgaatcgagggaaaaaaacaacgacgagaacgcaatcaccgactctttctcgcggctgggctactgatcgaagcaggactggtagacacaaaaacaggcgagctatgctataaaaaagacaggatattacaggcacttaaggaaattaagtacgatctggagacatccccaaacccagacgcgtaa

SEQ ID NO: 488175 - DNA, 843 bp, Shigella sonnei
gtggcaacctatcacctcagcgttaaatttggtggcaaggggcaggctgcaaaccacgccgattacatcgagcgcaaagagaaataccgcgaccgtcaggatttggaatattccgcacacggaaacatgccggaatgggcgcgagataatccctcacatttctggcaggcggctgaccagtttgaacgtgcaaacggttcgacttatcgggaactggagatagcgctgccccgtgaactgacaccggaacagcgccttgaactggtgcaggattttgtacgtcaggaagctggcgaacggcatgcatggagttttgccattcacaatccgaaagcgagcattgagggaggcgaacagcctcatgcgcatatcatgatgagtcagcgtgtgaatgatggcattgaacgtacaccggaacagtatttccggcgctataacgccaggtatcccgagcggggaggtgcgaaaaaggattcaggaagcctgactcccactcagcaaaaagagcagttgcgggaattgcgaaaacgctgggaggtgaagcacaacgaacatatgagaaagcatggctttgaaaggggcttcattgactgccggacgctgaaagaacagggcattgaacgacgtcctgaagtgcatctgggttttgaaactgccggacggcttgatgatgcccagcgtcatgacatcatgcaaaaacggtctgaaccggactattcccgccatcttgaacaggcgcgaacggtcgggcatgacatcagggaatggctggacactccggttaagcaacatgtgtcaacgccacgatgtttgaccgttatttgccattttcatgcccgctaa

SEQ ID NO: 488176 - DNA, 774 bp, Shigella sonnei
atggatattactgagtttccttctggagtaattgaacaccttggctggtatgtataccgattgattgatccgagggacggaagcaccttctatgtagggaaaggcaaaggtaaccgcgtatttgcccatatgcgcggtgaagtggcagcgactgatgatgacgagttactgagcaacaagctaaagcaaattagagaaataaggttagcaggacttgaagttatccatgtcatccatcgacacggaatgactgatgaaaagacggcgtacgaagttgaagcagcacttattgatgcctaccctgggttaacgaatatcatgaatggtgctggcagcaatgaattcggcgccgcgcatgtcaaagagttgatagcaacatatcagcccgaaaccataacatttcatcataaagcattaatgatatccgttaacagaagtgcaaaggattcagagctttatgatgcggttcgatttagctggcgcattaatgtctctcgcgccagccaagcagaaatcattcttgctactgtaagagggatcgttcgaggggttttcattgctgataaatggctcaaatcaacacgtgaaaatttcccttcgttgaaatactgggacgaggatcctgactttgaggcaacacaaagttcgcgctatggttttgaaggtcgagaagccccacctgaaatagcaaatctttatcttggaaaaaaaataccagatgaattaagaaaaaaaggagctatgtccccggtccgttactcacctaatttttga

SEQ ID NO: 488177 - DNA, 1434 bp, Shigella sonnei
atgtctgaatttgaagtgttggcacagcatctgctgaaggaagccgaggcggaagaaaagctgcgacaggaaaatgataaaaagcttatcgagaaagtgctggaaatctatgatcagaagtatgtggctgaattactgagaaaagtcggaaaaaatgagtggagccgtgaaaccattaaccgctggattaatggcaagtgtttaccaaaatcgttgacttcagtagaagagtctcttctgcgtaagatgctaccagaaccacctgcaaaccatccggaatatgctttccgcttcattgacttatttgctggaattggagggatacggaaaggttttgaggccattggaggccagtgtgtttttaccagtgaatggaataaagatgctgtgcgtacatacaaggccaactggtttaacgatgaacaggtgcataaattcaatctcgatattcgggaagtcacgctgagtgataaaaccgatgtattggaaacggatgcttatgcatatattgatgagcatgtgccggatcatgatgtgcttcttgcggggttcccgtgccagccatttagccttgctggtgttagtaagaaaaactcacttggtcgtgcgcatggttttgaatgtgaagcacaaggaacacttttttttgacgtggcacgtattatacgagcaaaaaaaccggcaatttttgtgctggaaaatgtcaaaaatctgaagagccatgataagggtaaaactttcaaagtcattatggagacccttgacgagctgggctacgaagttgccgatgctgcagaaatgggaaaaaacgatccaaagattatcgatgggaagcattttttgcctcagcatcgtgaacgtattgttctggtcggatttagacgagatctgaatattcacaaggggtttaccttgcgtgatatcagtcgtttttatccggaacaccgcccatcatttggtgaattgctggagcctgtagtcgacagtaaatatatacttacgccaaaactatgggagtacctttataactacgccaaaaagcatgcagccaaggggaatggttttggctttgggttggtcaatcctgagaataaggaaagcattgcacgcacactttctgccagatatcacaaagacggatcagaaattcttattgatcgtggttgggatatggcaacgggagaggctgactttatgaatgagagtaatcaggctcgtcgaccacgcaggctgactccccgagagtgcgcacgccttatgggatttgaaaaacctggagggaaaccattccgtattccggtttcagatactcagtcatatcggcagttcggtaactcagttgtggtgccagtatttgaagctgttgccagacttctggaaccctatatcctcaaagctgtttctgctgatgctggtaagactgggcagccttga

SEQ ID NO: 488178 - DNA, 1209 bp, Shigella sonnei; identical to SEQ ID NO: 7876

SEQ ID NO: 488179 - DNA, 261 bp, Shigella sonnei
ttgtaccgtggcagtgtgctgaaggtgggtaaatatcttttccgggatgcgtttattcagcaactggcgaatggtcgctggcatgtgatgcgacgtattgatggcaaaaatcgttaccccattgatgtggtgaaaatcccgctgtccggaccgctgacacaggcatttgaagatgcccgcgatcgcatcattgctgcggaaatgccgaaacagctggggtatgcactgaaacaacaactgaggttatggctgacccgatga

SEQ ID NO: 488180 - DNA, 402 bp, Shigella sonnei
atgaaccgacatacacaaatccgccaggccgtactggcacgccttcgggaacagtgtggagacagcgccacattttttgacgggcttccggcatttattgatgcgcaggaactgcctgccgtggcggtgtggctgagtgatgctcagtacaccggaaaaatgacggatgaagatgactggcaggctgttctgcatattgccgtcttcatccgggcacaggcaccggattcagagctggatatgtggatggagagcaccattttcccggccctgaatgatgtaccggcactttccggactcatcgacaccctgatcccactcggttttaactatcaacgtgataatgagatggccacctgggcgatggcggaaatcacgtaccagatcacgtacacgaattaa

SEQ ID NO: 488181 - DNA, 744 bp, Shigella sonnei
atgaccacaccaaatccactggcaaagacgaaaggtgcggggacgacgttctggatgtataccggcaacggcgatgcgtttgcgaaccctttgtcggacactgactggctgcgtcttgcgatggtgaaggatctgcaacctggcgaaatgaccgctgatgcagaagatgacacttatctcgatgatgaagatgcagactggaaaacgacaacccaggggcagaaatccgttggtgatacttcggcgacgctggcctggcgtccgggtgacagcgggcagaaaaaactggttcagttgttcgactccggtgaagtctgcgcgtttcgtatcaaatatcccaacggcactgttgatgttttccgtggctggctgagctcactgggtaaaaccattgcctcaaaagacgtgatgacccgcacagtgaaaatcagcggtgttgggcgtccgtatctggcagaggaaggcactgaaacagtgagcgttaccgggctgacggtggcaccggcatctgccagtgtaaaagtgggagcaaccaccacgctgacctttacagtaaaacctgacggagccagtgacaaagcgatcagcgtgcattcgacagatccacagactgccacggtgaccctgaacgggtttgtggccacggtgaaaggcgtgaagcagggcagtgtcagcattgtgggcatgacttctgacggcgattttgtggcagtggctacggtggctgtcagcgccgcaggttaa

SEQ ID NO: 488182 - DNA, 387 bp, Shigella sonnei
atgtttctgaaacagggcacgtttaattatgaaaagcagtccgtggtgctcagtgagctgtccgggctgcagagaattgaatatctggcgtttgttcagcagcgaacggcaaagtttgatgccgaagagggagaactgccggaggctgaacgacagattgcttttctgcggatggggatggatatcaatgcctggctggtttcccgctcactgtggaatgcggaacagtctcaggatgttgagacgctttgcgcatccgtaattacaacatggtcgtatgatgccctgggtgcgggggcggagatggttctgtcgctgagcggtatgggagccattgagaatgccggggatttggagcatgaggtgctgacgccggaaaagtcctga

SEQ ID NO: 488183 - DNA, 318 bp, Shigella sonnei; identical to SEQ ID NO: 402007

SEQ ID NO: 488184 - DNA, 330 bp, Shigella sonnei
ttgtacctgatatcgctgccgctgctgatcacccatacccaccgtggcgatatccaggtcatgttgctgacgctgagcgcgctcttcttcagccagttgactggtcagctgaattgtttttttcttcagatcgttgagtgccgtctgtttctgaagctcctgctgttttacatccagcagcgtcagtgcctgaatcagttcatctttacgggccagcacactcttttcatctgccgtcagttttttcccgtccaggtcgctgatgcgctgctgcagagccagaagctgtttatgcgcttctgtcatcctgtcagtggcaatgcctgctga

SEQ ID NO: 488185 - DNA, 186 bp, Shigella sonnei
atgcgaaagctgaaaatgaaactctgcgcgctgatgttgccgctggtcgtaagcgcctgcgggtcaatgccagttgctccgcagccgtgcgtgaagccaccggacccaccggcgtggataatgcaaccagcccccgactggcagacaccgctgaacgggattatttcaccctcagagagcggctga

SEQ ID NO: 488186 - DNA, 252 bp, Shigella sonnei; identical to SEQ ID NO: 486466

SEQ ID NO: 488187 - DNA, 378 bp, Shigella sonnei
atggacgaacagtggggctatgtcggggctaaatcgcgccagcgctggctgttttacgcgtatgacagtctccggaagacggttgttgcgcacgtattcggtgaacgcactatggcgacgctggggcgtcttatgagcctgctgtcaccctttgacgtggtgatatggatgacggatggctggccgctgtatgaatcccgcctgaagggaaagctgcacgtaatcagcaagcgatatacgcagcgaattgagctgcataacctgaatctgaggcagcacctggcacggctgggacggaagtcgctgtcgttctcaaaatcggtggagctgcatgacaaagtcatcgggcattatctgaacataaaacactatcaataa

SEQ ID NO: 488188 - DNA, 819 bp, Shigella sonnei; identical to SEQ ID NO: 40381

SEQ ID NO: 488189 - DNA, 249 bp, Shigella sonnei; identical to SEQ ID NO: 40380

SEQ ID NO: 488190 - DNA, 1176 bp, Shigella sonnei
atgggccagacaaaactgctcaaactaccgcgcggcgtaacaatcaggaaacaccgccagggcgaaacgatcaatataactttcacctacaaaggagttaaatgtcgtgagcctctttccaatctggaagtaataccaaagaacataaaatacgccgagcgcacactcggcgaaattcataataagatcgaaaggggaacattcatttatgcggaatattttccccgttctgctcgtttgaaaatttttggtaatgctgctgcaggcaaaacggtaaaaatgtacctggacgaataccttgaaatctgcgaaacgagaaaactttcaccctctacgattggtggttataaaaaatgccgtagtgcgttagcctcactccacatttgccctgcaagtgaattaacaccagcaatcctgaaagcgtggattcaaagccagaaaacgaccttaaaaacaattcgcaaccagttatctttcctgcggtcagcacttgatgaagccgtaaccgatggggtacttcaaattaaccccgtatcgttggtaactgcttcgcgctaccaaagtgataagtcagaagcagaaagcagctacgtggttgatccgctatcaccagcagaagttgatgcattactagcagcagccggaaacaaacaatgggaaaatctgttccggttcgctatacatacaggcctgcgtagttctgaattatgtgcccttcgatggcgtgatatcgactttgttggaaaaactgcccatgtccagagcgcaagtgttgtcggtgttatcaaaggaacaaagacaaaagccggtactcgtaaagttgaactgacagaagaggcaatgttggcgctgataaatcagaagccatttacattcatgaaggatgctactgtctttgaagatccaaagacaaacaaaccgtgggccagcgccgatgcgataaggaaaaaagcgtggataccaaccttacgtaaagcaggtatccggtaccgtaacccatatcagaccaggcatacattcgccaccagccatatcagccgtggtgcgaacctgttctggcttgcaggccagatgggccataagggaccagaaatgctatttcgtcactatggcagttaccttgctgcatatgacggacataccgctaaaaatactaatgatacaaaacaggcttga

SEQ ID NO: 488191 - DNA, 207 bp, Shigella sonnei
atgctgaacctcgattgtgttccaatctcaacttattgcaaagaaactggcgaaactcctgaagcaataaacaaacgtgtacagcgcggtgtttggcgtgaaggtgttcaggttttaaaggttgaaggcgttaaggagaggtggattgatcttagtgaggttgcaaaatgggccagacaaaactgctcaaactaccgcgcggcgtaa

SEQ ID NO: 488192 - DNA, 216 bp, Shigella sonnei; identical to SEQ ID NO: 112112

SEQ ID NO: 488193 - DNA, 213 bp, Shigella sonnei
atggagatggttcgtataatcaactcccggacggaacttatgtttccgaaaagggcggtgatatttatcaaattcgcagccagatatctgactatgcagaccgactatccaggtatcgcgcgtctgtttttgtttgcgaattcagtcaatgcgcatggtatttataccccgccaagacccggtgaatatcctgtacggccttctgctttgtag

SEQ ID NO: 488194 - DNA, 381 bp, Shigella sonnei; identical to SEQ ID NO: 458903

SEQ ID NO: 488195 - DNA, 600 bp, Shigella sonnei
atgcgtaaagtttgtgcagccattttgtccgcagccatctgtctgtccgtatccggtgcgcctgcatgggcgtctgaacatcagtccacactgagcgcggggtatcttcatgcccgtacgaacgctcccggcagcgataatctgaacgggattaacgtgaaataccgttatgagtttacggacgcgctggggctgattacgtccttcagctatgcaggagacaagaatcgccagctgacccgttacagcgatacccgctggcatgaagattccgtgcgtaaccgctggttcagcgtgatggcggggccgtctgtacgcgtgaatgaatggttcagcgcgtatgcgatggtgggtgtggcttacagccgtgtgtcgactttctccggggattatctccgcgtaactgacaacaaggggaaaacgcacgatgtgctgaccggaagtgatgacggtcgccacagcaacacgtctctggcgtggggggctggcgtgcagtttaacccgaccgaatccgtgaccattgaccttgcttatgaaggttccggtagtggtgactggcgaacggatgcatttattgttggtatcggataccgtatctga

SEQ ID NO: 488196 - DNA, 1689 bp, Shigella sonnei
gtggataacggggcgcactttgacggcgaccagagcggcacggtgaatggtgtcacgccgccagcggtgcagcacctgaccgcagaagtcaccgcagacagcggggaatatcaggtgctggcgcgctgggacacgccgaaggtggtgaagggcgtgagcttcctgctccgtctgaccgtaacagcggatgacggcagtgagcggctggtcagcacggcccggacgacggaaaccacataccgcttcaggcaactggcgctggggcgttacacgctgacggtccgggcggtaaatgcgtggggacagcagggcgatccggcgtcggtatcgttccggattgccgcaccggcagcaccgtcgcggattgagctgacgccgggctattttcagataaccgccacgccgcatcttgcggtttatgacccgacggtacagtttgagttctggttctcggaaaaacggattgccgatatcaggcaggttgaaaccagcgcgcgttatcttggtacggcgctgtactggatagccgccagtatcaatatcaaaccgggccatgattattatttttacgttcgcagtgtgaacaccgttggcaaatcggcattcgtggaggctgtcggtcagccgagtgatgatgcatcaggctatctggattttttcaaaggcgagatagggaaaacccatctggctcaggagctgtggacgcagattgataacggtcagcttgcgcctgacctgactgaaatcaggacgtccataacggatgtcagcaatgaaataacacagaccgtcaataagaaactggaagaccagagtgcagcgatccagcagatacagaaggttcaggttgatacaaataataacctgaacagcatgtgggcagtgaagctgcagcagatgcaggacggacgcctttatattgcgggtatcggtgccggtattgagaacacccccgacggcatgcagagtcaggtgctgctggcggcagacaggattgcgatgattaatcctgcgaatggcaacacaaagccgatgtttgttggtcagggcgatcagatattcatgaatgaagtgttcctgaaatatctgacggctcccaccattaccagcggcggtaatcctccggcattttccctgacaccggacggaaagctgactgctaaaaatgcggatatcagtggcagtgtgaatgcgaactccgggacgctcaacaatgtcacgattaatgagaactgtcagattaaggggaaactgtcagccaatcagattgaaggcgatattgtcaaaacggtcagcaagtctttcccccgcacgaacagttatgccagtggcaccatcacggtaagaatcagtgatgatcagaaatttgaccggcaggtcatgataccgccagtgttattccgcggtggtaagcatgagaatttcaacagtaataaccaacagtcatactggtattcaacctgtcggttaagagtgacccgcaatggtcaggagatttttaatcagtccacgacggatgctcagggcgtattttcctcagttatagatatgcctgccggacaggggacgctgacactgacattcaccgtatcttcatcaggagcgaataactggacaccaacaaccagtatcagcgatctgctggttgtggtgatgaaaaaatccacagcaggtatcagtatcagctga

SEQ ID NO: 488197 - DNA, 474 bp, Shigella sonnei; identical to SEQ ID NO: 8364

SEQ ID NO: 488198 - DNA, 261 bp, Shigella sonnei; identical to SEQ ID NO: 39042

SEQ ID NO: 488199 - DNA, 648 bp, Shigella sonnei
atgaaaatcgccgatctcgctgaagcaataggagtggatgcggcgaatatctcgcgcctcgaaacaggtaagcagaaacaattcactgaacaagccctgagtaatattgccaggagcttaggtgttgatattgctgatctctttacctcagacctcaaaagtaatactgtatgtaaaaacagtattagtgaggatgttgcgcaggtgaaggatgtattccgtattgaaatgctggatgtcagtgccagtgcgggaaatggccttatccagggcggtgatgtcattgatgtgattcatgccattgaatacagaactgataatgctgtatcgatgtttggtggacgaccagcaaatcacattaaagttatcaacgttcgtggggacagtatgtgtccaaccattgagccaggagatctcatcttcgttgatatcagtatcaatcagtttgatggagatggtatatatgtatttggttttgatgataaaatttacgtcaaacgactgcaaatgatacctgataaactgctggtaatttctgataatcagatttaccgcgaatggggaattaccagcgaaaacgaacaccggtttatggtctttggaaaggtcttaatcagtcagtcacaaacccttaagcgacacaattaa

SEQ ID NO: 488200 - DNA, 381 bp, Shigella sonnei; identical to SEQ ID NO: 458903

SEQ ID NO: 488201 - DNA, 249 bp, Shigella sonnei
atgcgacatggatatttcacccgtccgcagattaatggtgaacgggcgcaggggaccaatatcgccattttccccctgaccttcactggtgggaataaggtgcaggcactcttccgaacgacgaaaaatcaggccaaaagcttcgttgaaaatcctcagcgcattaacaccacggattttcagctctccggtcatggtgtcgccatcacgctgaacggcattttttgccttatccaccgtgggttttaa

SEQ ID NO: 488202 - DNA, 414 bp, Shigella sonnei
atgatgcacttaaaaaacatttctgctggtaatcctgaaacaaaagagcaataccagctaacgaaacaatttaacatcaaatggctttatacagaggatgggaaaaactggtatgaggaacaaaagaactttcagcctgatacgttgaaaatggtctatgaccacaacggcgttattatttgtattgaaaaggatgtttcagcaattaatccggaaggcgcaagcgtcgttgaggttcctgatattacagcaaatcgccgggctgatatttcaggtaaatggatgttcaaagatggcgtagtgataaagcgaacttataccggggaagagcagaggcaacaagcggaaaatgaaaagcaaagcctgctacagctcgtcagggataaaacccagctatgggactcactgaggtag

SEQ ID NO: 488203 - DNA, 576 bp, Shigella sonnei
gtgacctcaccatttattcaacaaattgctgataaccgggtatgtcaggtactcagttgccttcctgaaaaatttgtggttgattttgcaaacggtattgatgttgcacaggagcataaccgcacggccggggggcgcacgtttttccggcgtttaaaagaaggtctgactggcaaaggcgctgtacgccagaatgccatcaatgcttcgcttgcacagggcgttgaggcgtccctgcgctggctgacggagctgacaacgtcgcttgccaccacaaattacgcgattacccgggtaaacgacagggtcagttcactggtcagtgatactgccaggctggcgcattattcggcagacacgcgggagcagttactcaccctggcagaacaggttcatcagaaactgaatcatcttgaagaaaaactccaccgtgttgaccaggttcagcgggcacagttacatcttgagcagatattctcatggtggagcgccgggcgatacgcgtcattttcccctgccggacgttgttatgtggcgcttgaagagcttcgctggggcgcgtttggtgatgtgtga

SEQ ID NO: 488204 - DNA, 363 bp, Shigella sonnei; identical to SEQ ID NO: 469980

SEQ ID NO: 488205 - DNA, 468 bp, Shigella sonnei
atgagcagagtaaccgcgattatctccgctctggttatctgcatcatcgtctgcctgtcgtgggcggtcaatcattaccgtgataacgccatcgcctacaaagaacagcgtgataaaaaagtcagtgagctgaagcaggcgaccgccaccatcgctgacatgcagcagcgtcagcgtgatgttgctgcgatcgatgcaaaatacacgaaggagttagccgatgcgaaaactgaaaatgaaactctgcgcgctgatgttgccgctggtcgtaagcgcctgcgggtcaatgccagttgctccgcagccgtgcgtgaagccaccggacccaccagcatggataatgcaaccagcccccgactggcagacaccgctgaacgggattatttcaccctcagagaacggttgatgacgatgcagaagcaactggaaggggcgcaggaatatatccgcacccagcgcattaagtag

SEQ ID NO: 488206 - DNA, 498 bp, Shigella sonnei
atgtcgccatcattacgcaaggctgttgctgctgctattggtggtggggctgttgccatagcgtctgtgctcatcactggtccgagtggtgacgatggcctggaaggtgtcagctacataccatacaaagatatcgttggcgtatggactgtatgtcacggacacaccggaaaagacatcatgctaggtaaaacgtataccgaagcagaatgcaaagccctcctgaataaagaccttgccacggtcgccagacaaattaacccgtacatcaaagtcgatataccggaaacaacgcgcggcgctctttactcgttcgtctacaacgtgggtgctggcaatttcagaacatcgacgcttcttcgcaaaataaaccagggcgatatcaaaggcgcatgtgaccagctacgtcgctggacatacgctggcggtaagcaatggaaaggcctgatgactcgtcgtgagattgagcgtgaagtctgtttgtgggggcaacaatga

SEQ ID NO: 488207 - DNA, 657 bp, Shigella sonnei
atgcctgcgatcaatgccaaacgtgtttaccggatcatgcgccagaatgcgctgttgcttgagcgaaaacctgctgtaccgccatcgaaacgggcacatacaggcagagtggctgtgaaagaaagtaatcagcgatggtgctctgacgggttcgagttccgctgtgataacggagaaaaactgcgagtcacgttcgcgctggactgctgtgaccgtgaggcactgcactgggcggtcactacgggcggcttcaacagtgaaacagtacaggacgtcatgctgggagcggtggaacgccgcttcggcaacgagcttccggcgtctccagtagagtggctgacggataatggttcatgctaccgggctaatgaaacacggcagtttgcccggatgttggggcttgaaccgaagagcacggcggtgcggagtccggagagtaacggcatagcagagagcttcgtgaaaacgataaagcgtgactacatcagtgtcatgcccaaaccagacgggttaacggcagcaaagaaccttgcagaggcgttcgagcattataacgaatggcatccgcatagtgcactgggttatcgctcgccacgggaatatctacggcagcaagccagtaatgggttaagtgataacaggtgtctggaaatatag

SEQ ID NO: 488208 - DNA, 543 bp, Shigella sonnei
gtgaaaacgggggctgaagccatccgggcgctggccacgcagcttccggcgtttcgccagaaactgaatgagggctggtatcaggtgcgcatttccgggcgtgatgcaggcgaaaacgaattatctgcccgtcttaatgagccgctggcaaatggtgccgtgatccacatcgtaccgcgtctggcgggtgccaaaagtggcggtatttttcagacagtgctgggtgcggcgctaattgctacggcaatctggatgccggggcttagtattgttgcaagtaatctcatgttctctcttggggcaggtatggttttaggcggtgttgcgcagatgctggcaccgaaagccaaaacgcctaaagtgtcagccactgataacggtaagcaaaatacctatttttcctcattggataacatggttgcccaaggcaatgtcctgcctgttctgtacggtgaaatgcgcgtggggtcacgtgtggcatctcaggagatcagcacggcagatgaaggggatggtggtcaggttgtggtaattgggcggtaa

SEQ ID NO: 488209 - DNA, 600 bp, Shigella sonnei
atggctccggaggactggctgcgggcagaaatgcagggtgagattgtggcgctggtccacagtcaccccggtggtctgccctggctgagtgaggccgatcggcggctgcaggtgcagagtgatttgccgtggtggctggtctgccggggggcgatttacaagttccgctgtgtgccacatcttaccgggcggcgctttgagcacggggtgacggactgttacacgctgttccgggatgcttaccatctggcggggattgagatgccggattttcatcgcgaggatgactggtggcgtaacggtcagaatctctatctggataatctggaggccacagggctgtatcaggtgccgttgtcagcggcgcagccgggcgatgtgctgctgtgctgttttggttcatcggtgccgaatcatgccgccatttactgtggtgacggcgagctgctgcaccatattcctgaacaactgagcaaacgagagaggtataccgacaaatggcagcgacgcacacactccctctggcgtcaccgggcatggcacgcatctgcctttacggggatttacaacgatttggtcgccgcatcgaccttcgtgtga

SEQ ID NO: 488210 - DNA, 624 bp, Shigella sonnei
atgcgggcgtttcagaatttcacggcagatgcggataatgcggcaggcactgcggagcagatgcttacagcggcatttaatagtgcaggtaatgcactggcaacattctgtaccaccggaaaactgaacttcaaatcttttaccgcctcgctcctttctgatctggcaaaaatcatggctcagatgtccatgatgcaggcagttaaggggattggttcggcgtttggctgggggagtgcagcaactgccagtgtgacgcccaatgctgatggtggtgtttatcagtctgctgatttgagtcgctacagtggcacggtggttaaccgtccgacgttttttgcttttgcaaaaggtgcaggtgtgatgggggaagctgggcctgaagccattctgccactgcgtcgtggtgctgacggtaagctgggggttgtggcggatattggtggttcaggtatggcgatgtttgccccgcagtacaacatcgagatcaataacgatggcacgaacgggcagataggtccggctgccctgaaggtggtttatgacctcgggaaaaaagcagcagcggactttatgcaacagcagtcccgtgatggtggtctgttctccggaggtggacgatga

SEQ ID NO: 488211 - DNA, 330 bp, Shigella sonnei
atgaaaaccttccgctggaaagtgaaacccggtatggatgtggcttcggccccttccgtaataaaggtgcgctttggtgatggctattctcagcgtgcgcctgccgggctgaacgctgacctgaaaacgtacagcgtgacgctttctgttccccgcgaggaggccacggcactggaatcgtttctggctgagcacgggggctggaaggcctttctgtggacgccgccttatggctaccggcagataaaggtgacctgcgcaaaatggtcgtcgcgggtcagtatgttgcgtgttgagttcagcgcagagtttgaacaggtggtgaactga

SEQ ID NO: 488212 - DNA, 747 bp, Shigella sonnei
atgaaaaatattgcgacaggcggcgttctggaacgcatccgccgacggaccccaccacatgtaaccgccccattcagaacggttgcggagtggcgcgagtggcaacttgctgaaggccagaaacgttgcgaggagatcaaccgcctgaatcgtcagttgcgggtggaaaaaatcctgaaccgctccggcatccagccgttgcaccggaagtgttcgtttgcgaattaccgggcgcagaacgacggtcagcgacatgcactgagtcaggcgaaatccatagctgacgaactgatgacaggctgtacgaattttgtgttcagcggtaagcccggcaccggaaaaaatcatcttgcagacgcgattggcaaccggctgatggcgaaggggcgtagcgtgattatcgtcaccgtgtccgatgtcatgagcgtgttgcatgagagctacgacaacggcaaatccggtgaaaaatttttacaggagctttgtggtgttgacctgctggtcctggatgaaattggcatgcagcgggatacgaaaaacgagcaggtggtactgaaccagattgttgatcgccggacggcatcgttacgcggtgtggggatgctgacaaatattaaccatgcagcgatgaaaacattgctcggcgagcgggtgatggatcgcatggtcatgaacggcgggcgctgggtgaattttaactgggagagctggcgtccgaatgttagccattcgagggttgttaagtag

SEQ ID NO: 488213 - DNA, 417 bp, Shigella sonnei; identical to SEQ ID NO: 487975

SEQ ID NO: 488214 - DNA, 747 bp, Shigella sonnei; identical to SEQ ID NO: 487139

SEQ ID NO: 488215 - DNA, 657 bp, Shigella sonnei; identical to SEQ ID NO: 463703

SEQ ID NO: 488216 - DNA, 381 bp, Shigella sonnei; identical to SEQ ID NO: 458903

SEQ ID NO: 488217 - DNA, 588 bp, Shigella sonnei; identical to SEQ ID NO: 486977

SEQ ID NO: 488218 - DNA, 573 bp, Shigella sonnei
gtgaaaacgggtgccgaagccatccgggcgatggccacacagctccctgcgtttcgtcagaagctgagcgacggctggtatcaggtgcgtattgccgggcaggatgttagcacgtccggattaacggcgcagttacatgaggctctgcctgacggcgctgtgattcatattgttcccagagtcgccggggccaagtcaggtggtgtattccagattgtcctgggagcagccgccattgccggatcattctttaccgccggagccacccttgcagcatggggggctgccattggtgccggtggtatgaccggcattctgttttctctcggtgccagtatggtgctcggcggtgtggctcagatgctggcaccgaaagccagaactccccgcacacagacaacggataacggtaagcagaacatctatttctcctcactggataacatggttgcccagggcaatgttatgcctgttctgtatggtgaaatgcgcgtggggtcacgtgtggtatctcaggagatcagcacggcagacgaaggggacggtggtcaggttgtggtgattggtcgctga

SEQ ID NO: 488219 - DNA, 375 bp, Shigella sonnei; identical to SEQ ID NO: 485586

SEQ ID NO: 488220 - DNA, 468 bp, Shigella sonnei; identical to SEQ ID NO: 19402

SEQ ID NO: 488221 - DNA, 165 bp, Shigella sonnei
atgtttgccccgcagtacaacatcgagatcaataacgatggcacgaacgggcagataggtccggctgccctgaaggtggtttatgacctcgggaaaaaagcggcagcggactttatgcaacagcaggcccgtgatggtggtcggttaagtggagcatatcggtaa

SEQ ID NO: 488222 - DNA, 330 bp, Shigella sonnei
atggagacgtttcactggaaagtgcgcccggatatgaatgtggtatcagagccgaaagtggtgacagtgaagctgggcgatggttatgaacagcgtcgtgcggcgggactgaataaccagttgtcgacttacagcgtgacgatacgtgttcgtaaatgtgaacacccatctttaaaagcctttctggaacggcacggtggcgtccgcgcatttcagtggacgccaccttatgactggaagccgatcagggtggtttgtcgtaaatggtcggcaagcgtgggggcgctgtgggtaaccataacggcagattttgaacaggtcgtggcatag

SEQ ID NO: 488223 - DNA, 165 bp, Shigella sonnei; identical to SEQ ID NO: 488221

SEQ ID NO: 488224 - DNA, 951 bp, Shigella sonnei; identical to SEQ ID NO: 485807

SEQ ID NO: 488225 - DNA, 447 bp, Shigella sonnei
atgaataaaatgactgtactattacttagcgcaactatcatttcaggttgtacttcttccgtaccattgataaagaaaactcaatcaggaaaacctgagggggtttatcaaaatacgacaaaagataaagtcaaagatgcccttgtgaattactgcaatagtagagggttgataatttacaacgctgataacagcagtgttatatgtggtaaagaactggaaggcgggtctgctgtctttggacaaatgttaatcggcaatgcctattcaacaaccccggtatcaaaagtcagatttactatcgctcaagttaataacgatacaaaagtgtgggccgatatgtggatggaaactcaaatggcaatggggcaagtacaacaaatggctataacagacaacgcaagcaaaaacactatccaacaacgtcttgatgaattaaaaccttaa

SEQ ID NO: 488226 - DNA, 366 bp, Shigella sonnei
atgcgtgatattcaaatggttcttgaacgttggggggcatgggtggcaaataatcacgaggatgtcacttggtcgtctattgctgcaggatttaaaggactaatcccttcaaaagtaaaatcccgcccgcaatgttgtgacgatgatgcgatgatcatttgtgggtgcatggctcgcctgaaaaagaacaacagcgatttgcacgatttattagtggattattatgtaggtggtatgacgtttatggcgcttgcccgtaaacatgggcgttctgattgctgggttgggcgtttattgcaaaaggctgaaggtgtagttgatggcatgttaatgatgttagaaattgagctagagatggatcgttag

SEQ ID NO: 488227 - DNA, 747 bp, Shigella sonnei; identical to SEQ ID NO: 487139

SEQ ID NO: 488228 - DNA, 543 bp, Shigella sonnei
gtggcgaccgtcatcacttccggtcagcacatcgtgcgttttccccttgttgtcagttacgcggagataatccccggagaaagtcgacacacggctgtaagccacacccgccatcgcatacgcgctgaaccattcattcacgcgcacagacggccccgccatcacgctgaaccagcggttacgcacggaatcttcatgccagcgggtatcgctgtaatgggtcagctggcgattcttgtctcctgcatagctgaacgacgtcaccatccccagcgtgtccgtaaactcataacggtatttcacgttaatcccgttcagatcatcactgccgggaacgttggtccgggcatgaagataccccgcgctcagcgtggactgatgttcagacgcccatgcaggcgcaccggatacggccagacaaatggctgcggacaaaatggctgcacaaactttacgcataattacctctcgcttttctgcaataaaaaaggcgtcattcctgacgccatttattggggttataaatatttcaacgaatactga

SEQ ID NO: 488229 - DNA, 177 bp, Shigella sonnei; identical to SEQ ID NO: 402013

SEQ ID NO: 488230 - DNA, 207 bp, Shigella sonnei; identical to SEQ ID NO: 485753

SEQ ID NO: 488231 - DNA, 207 bp, Shigella sonnei; identical to SEQ ID NO: 485753

SEQ ID NO: 488232 - DNA, 369 bp, Shigella sonnei
atgctggttatctggtccccggaagagattcaggccctcgctgacggaatggatatttccctgtccgatcatgaaatcagaaccgtcctggcgcgcctggaggacatcccggaagaccagcggactgaatccggtatttcttccggcgtggcgatggagatcatcaataacgtgagcgaaaaccgccaggtgaccgtccctgctgaactgctggcgtccctgattcagaccgccgaacaggcactgtggaaacgtgagtgggccgcccgtgataacggcctcgccgtcccggaatgcgtcacccgccgacaggcggtggttaatcaggcccgcgccctgctgaaaaacaacacacgcgaaaacgactga

SEQ ID NO: 488233 - DNA, 600 bp, Shigella sonnei
atggctccggaggactggctgcgggcagaaatgcagggtgagattgtggcgctggtccacagtcaccccggtggtctgccctggctgagtgaggccgatcggcggctgcaggtgcagagtgatttgccgtggtggctggtctgccggggggcgattcacaagttccgctgtgtgccacatcttaccgggcggcgctttgagcacggggtgacggactgttacacgctgttccgggatgcttaccatctggcggggattgagatgccggattttcatcgcgaggatgactggtggcgtaacggtcagaatctctatctggataatctggaggccacagggctgtatcaggtgccgttgtcagcggcgcagccgggcgatgtgctgctgtgctgttttggttcatcggtgccgaatcatgccgccatttactgtggtgacggcgagctgctgcaccatattcctgaacaactgagcaaacgagagaggtataccgacaaatggcagcgacgcacacactccctctggcgtcaccgggcatggcacgcatctgcctttacggggatttgcaacgatttggccgccgcatcgaccttcgtgtga

SEQ ID NO: 488234 - DNA, 546 bp, Shigella sonnei
atggctacgatcccaaccctcactcaacctgaaattgccatcgttgatggtcaggctgttacttcatccctggctgttgccaacttcttctccaaacgtcatgacgatgtactgaaaaagatccgcacgcttgaatgctcagcatcattcactgcccgcaatttttcggtgagtgattacactgattgcacaggtcgcaaacttccttgctaccaaataacccgcgacggctttgcgtttcttgctatgggtttcatgggtaaacgtgctgcccagttcaaagaggcatacatcaatgcctttaaccagatggagaaacagctttcaaatccctctgtactgagcgacgttgcacataacgccagcgttctctattcctacatttcatcaattcatcaggtctggctgcagcagctttatcctatgttggcaaaagccgaatctccgctggctgttagcttgtatgactatattaatgatgcttcggcactggcctgcctcataaatttgtcgctgaacccttcagaggtaagggggcgcaaatga

SEQ ID NO: 488235 - DNA, 330 bp, Shigella sonnei; identical to SEQ ID NO: 488222

SEQ ID NO: 488236 - DNA, 549 bp, Shigella sonnei
gtgaaaacgggggctgaagccatccgggcgctggccacacagcttccgtcgtttcgccagaaactgaatgagggctggtatcaggtgcgcattgccgggcgtgatgcaggcgaaaatgaattatctgcccgtcttaatgagccgctggaaaatggtgccgtgattcacatcgtgccgcgtatggcgggagctaaaagtggcggtgtgtttcaggtggtgctgggggcggcgctgattgcggtggcatggtggaaccctgtgggctggctgggtgctgcggctgtatcgggcatgtatgcggcaggggccagtatgatcctgggtggtgtggcccagatgctggcaccgaaagccaggacgcccacggcagccagtacagataacggcaaacagaacacctatttctcctcactggataacatggttgctcagggcaatgttctgcctgttctgtacggtgaaatgcgtgtggggtcgcgggtggtttctcaggagatcagcacggcagacgaaggtgacggtggtcaggttgtggtgattggtcgctga

SEQ ID NO: 488237 - DNA, 348 bp, Shigella sonnei; identical to SEQ ID NO: 485869

SEQ ID NO: 488238 - DNA, 336 bp, Shigella sonnei; identical to SEQ ID NO: 485874

SEQ ID NO: 488239 - DNA, 180 bp, Shigella sonnei; identical to SEQ ID NO: 476577

SEQ ID NO: 488240 - DNA, 132 bp, Shigella sonnei
atggaaataaaaccagaagatgagttaagcaatatcgttttatttccggtaaaagaggatgaccctcgtaatcaggttaattttctttatgagccatcggaaagaccatattgccatcacgcctctgtatga

SEQ ID NO: 488241 - DNA, 207 bp, Shigella sonnei; identical to SEQ ID NO: 10660

SEQ ID NO: 488242 - DNA, 303 bp, Shigella sonnei; identical to SEQ ID NO: 21213

SEQ ID NO: 488243 - DNA, 207 bp, Shigella sonnei
atgactattgcagaacgtcttatacagaaaggtttcgacgaaggttttaaagaaagttttaaagaaggctttaaagaaggggcgcttgaagtggcgcgggaaatagcctgccggcttcgggatatgggctggccgccggaacggattcaggaggcaaccggactttccggtgaagaactgaaaaaactgtttcctgatgagcagtag

SEQ ID NO: 488244 - DNA, 195 bp, Shigella sonnei
atgcgggcgctggccgagcgcctgccgcagcatgaggataaactgatgacaatcgcagaacgtcttgagcagaaaggtgcgcttgaaaaggccctggccattgcgcgtcagcttcagaaaatggggatgacacctgagcagattaagcaggctaccggactgtccgaagctgaactgaaaaaaatcattcactga

SEQ ID NO: 488245 - DNA, 132 bp, Shigella sonnei
atgtgtgaaggatatgttgaaaaaccactctacttgttaatcgccgaatggatgatggctgaaaatcggtgggtgatagcaagagagatctctattcatttcgatattgaacacagcaaggcggttaaatag

SEQ ID NO: 488246 - DNA, 141 bp, Shigella sonnei; identical to SEQ ID NO: 26214

SEQ ID NO: 488247 - DNA, 1077 bp, Shigella sonnei; identical to SEQ ID NO: 465096

SEQ ID NO: 488248 - DNA, 252 bp, Shigella sonnei; identical to SEQ ID NO: 486466

SEQ ID NO: 488249 - DNA, 207 bp, Shigella sonnei; identical to SEQ ID NO: 10660

SEQ ID NO: 488250 - DNA, 345 bp, Shigella sonnei; identical to SEQ ID NO: 488099

SEQ ID NO: 488251 - DNA, 3675 bp, Shigella sonnei
atgaaaaagttacgcgtagccgcctgcatgctaatgctggcgctggcagggtgcgacaacaacgataacgcgccaacagcggtgaaaaaagatgcgccttctgaagttactaaagcggcctcttcagaaaacgcgagttcagcaaaactctccgtgccggagagacaaaaactggcccaacagagtgccggtaaggtgctgacattgctggatctctctgaagtccaacttgatggtgcagccacgctggtgctgacgttctccatccctctcgacccggatcaggatttctcacgcgttattcatgtcgtcgataaaaaaagcggcaaagtggatggtgcctgggagctgtcagataatcttaaagagctacgtttacgccacctcgaaccgaaacgtgatttgatcgttactattggcaaggaggtcaaagcactcaacaacgcaaccttcagtaaagattacgaaaaaactataactacccgcgacatccaacccagcgtcggttttgccagccgtggttcgctgctgcctggcaaagtcgttgaagggctgccggtaatggcgctcaacgttaataatgtcgatgttaacttcttccgcgttaagccagaatctctgccagcattcattagccaatgggaataccgcaattcgctggcgaactggcagtcagacaaactgctgcagatggcggatctggtctacaccggacggtttgatctcaatcctgcgcgtaacacccgtgaaaaattattgctgccgctgggcgatatcaaaccgcttcagcaggcgggcgtgtatctggctgtgatgaatcaggctggacgttacgattacagtaatcccgcgacgctgtttacgttaagtgatatcggcgtttcagctcaccgttatcacaatcgtctggatatctttacccaaagtctggaaaacggcgcggcccagcaaggaattgaagtctctttattaaatgagaaaggacagactctgactcaggcaaccagtgacgctcaggggcatgtgcagctggaaaatgataaaaatgcggcattactgctggcacgtaaagacggtcagacaacgctactcgatttaaaacttccggcgctggacttagcagaatttaacattgctggcgcgccaggctatagcaaacagtttttcatgtttggcccacgcgatctttatcgcccaggtgaaacggtaatcctcaatggtttactgcgcgatgcagacggtaaagcattgcccgatcaacccatcaagttagacgtgattaaacctgacgggcaggtactcaggaacgtcgttagtcagccggagaatggcctctaccactttacctggccactcgatagcaatgcggcaaccggtatgtggcatattcgcgccaacacgggcgataaccagtaccggatgtgggatttccacgtcgaagattttatgccagagcgtatggcgctgaatctgaccggtgagaaaaccccgcttacgccgaatgatgaagtgaaattctccgtggtgggatactacctgtacggtgcgcctgctaatggtaatactttgcaagggcaacttttcctgcgcccactgcgtgaggctgtgtcagccttacctggttttgaattcggcgatatagctgccgaaaacctttcccgcacgctggatgaagttcagttgacgctggatgataaagggcgcggcgaagtttctacagaaagccagtggaaggaaacgcattccccattgcaggttattttccagggcagtttgctggaatcgggcggtcgcccggtgacgcgccgcgctgagcaggctatctggcctgccgatgcattgccggggctccgtccgcagttcgccttgaaatcggtttacgattatcgcactgacagcacggtgaaacagcccattgttgatgaaggcagtaacgccgcttttgacatcgtttatagcgatgcgcaaggcgtgaaaaaagccgtgtcgggcttgcaggtgcgcctgattcgcgaacgccgcgattactactggaactggtcagaagatgaaggctggcagtcacagtttgatcaaaaagatctgatcgaaaatgaacaaactctggatcttcaggcggatgaaaccggtaaggtcagtttcccggtagagtggggcgcttatcgtctggaagtcaaagcgccgaatgaagcggtcagtagcgtgcgtttttgggctggctatagctggcaggacaacagcgacgggagcggcgcagtgcgacccgaccgtgtcacgctgaaactagataaagccagttatcgccccggcgataccattaagttgcatattgccgcgccaacggcgggtaaaggttatgcgatggtcgagtccagtgaagggccgctgtggtggcaagagattgatgttccggctcaagggctggatctgacgattccggtcgataaaacctggaatcgtcatgatctttatttgagtacgctggtggtgcgtcctggcgataaatctcgctccgcgacgccaaaacgcgcggttggtgtgttgcatctgccgcttggtgatgaaaaccgtcgcctcgatctggcgctggaaacaccagcaaaaatgcgtcccaatcaaccattaaccgtgaaaattaaagccagcactaaaaatggcgagaagcctaaacaggtgaatgtgctggtgtctgccgttgatagtggtgtgctgaatattactgactacgttacgccagatccgtggcaggcgttctttggtcagaaacgctatggcgcagacatttacgatatttacggtcaggttattgaaggtcaggggcgtctggcagctctgcgtttcggtggcgatggtgatgagctgaaacgtggtggtaaaccgccggtcaatcacgtcaatattgtcgcgcagcaggcgctgtcggtaacgctcaacgaacagggcgaaggctcggttacactgccgattggcgattttaacggtgaattgcgcgtcatggcgcaagcctggacggcagatgatttcggtagcaacgaaagcaaagtgatagttgccgcaccggtgattgctgaactgaacatgccgcgctttatggcgagtggcgatacctcgcgtctgacgctggatatcactaatcttaccgataaaccgcaaaaactgaacgttgccctgaccgccagtggtttgcttgaactggtcagcgattcacccgcagccgttgaattagcgccaggtgtgcgtactacgctgtttatcccggtgcgagcattgccgggttatggcgatggagaaattcaggccaccattagcgggttagcgttaccgggtgaaaccgttgccgatcagcataagcagtggaaaatcggcgtccgtccggcgttcccggcacaaacggttaattacggtacggcgttacagcctggtgagacatgggcgattccggcggatggattgcaaaacttctcgcctgttacgctggaagggcaattgttgttgagcggcaaaccaccgctgaacattgcacgttatatcaaagagttaaaagcgtatccgtacggctgtcttgagcaaaccgccagcggcctgttcccgtcactttataccaacgcagcccaactgcaggcgttgggcatcaaaggcgacagtgatgagaaccactgcgcgacaacgcgttaa

SEQ ID NO: 488252 - DNA, 276 bp, Shigella sonnei; identical to SEQ ID NO: 484087

SEQ ID NO: 488253 - DNA, 1446 bp, Shigella sonnei; identical to SEQ ID NO: 487279

SEQ ID NO: 488254 - DNA, 945 bp, Shigella sonnei; identical to SEQ ID NO: 13277

SEQ ID NO: 488255 - DNA, 504 bp, Shigella sonnei
gtgttcaacgttgactacctgggtggtcaaattggtacttttgccatcaacttctcccgcccggcgggtcaggtaattgcacagtactatgaattcctgcgcctcggtcgtgaaggctataccaaagtacagaacgcctcttaccaggttgccgcttatctggcggatgaaatcgccaaactggggccgtatgagttcatctgtacgggtcgcccggacgaaggcatcccggcggtttgcttcaaactgaaagatggtgaagatccgggatacaccctgtacgacctctctgaacgtctgcgtctgcgcggctggcaggttccggccttcactctcggcggtgaagccaccgacatcgtggtgatgcgcattatgtgtcgtcgcggcttcgaaatggactttgctgaactgttgctggaagactacaaagcctccctgaaatatctcagcgatcacccgaaactgcagggtattgcccagcagaacagctttaaacacacctga

SEQ ID NO: 488256 - DNA, 291 bp, Shigella sonnei
atgagcgccgggaataacgtgaaggttgctgcggatgctttccttgaaattattttctctcttaagaataaatattgcattaaactattaagcgctcaggaacgggcgtttatttacgaatttgcaagaatgatcttcgcttatattaatgacaaaagcattgagatcttattactttcttgttttgcggcgtctgaccaaaaagcaatccagaggtatatacctcagtcacaagatggggaagactttaggagtcatttacaatataagttgcctctttccgctcattaa

SEQ ID NO: 488257 - DNA, 363 bp, Shigella sonnei
atgattgaacaatttttcaggcccgactctgtcgaacaggcgctggaactgaagcgccgctaccaggatgaagccgtctggttcgccgggggcagcaaactcaatgctacaccaacccgtaccgataaaaagattgccatttccttacaggatctggaactggactgggttgactgggataacggtgcactgcggattggtgcaatgtctcgcttgcagccactgcgtgatgcgcgctttattcctgcagcactgcgtgaagccctcggttttgtttactcacgccatgttcgtaatcagtcgaccattggtggtgaaacgccgcccggcaggaagagtcagtgctgcttcccgtcctgctag

SEQ ID NO: 488258 - DNA, 1158 bp, Shigella sonnei; identical to SEQ ID NO: 484982

SEQ ID NO: 488259 - DNA, 951 bp, Shigella sonnei; identical to SEQ ID NO: 485807

SEQ ID NO: 488260 - DNA, 483 bp, Shigella sonnei; identical to SEQ ID NO: 11476

SEQ ID NO: 488261 - DNA, 315 bp, Shigella sonnei; identical to SEQ ID NO: 485391

SEQ ID NO: 488262 - DNA, 612 bp, Shigella sonnei
gtggcttttgatggttcctccgatatcacattaaaagcaagtcatgttggtgcgtttgccttagggaaaacaggaagcaccgttgcgaatgataaagcagttggatggaactggagtagcggagcctataacgcaactattagtggtgcatcaacgttaattattcatttttatatgggagaaggaagttgtcctgcagctcagtttcggattaattataaaaatggcggtattttttatcgttcagcccgtgatggttatggttttgaagccgactggtccgaattttacaccaccagaaaaccttcagcaggagatgttggtgcactgccgttatctggtggtcaactgaatggtgcactgggtatcggaacatccagtgctcttggcggtaattcgattgtattgggtgataatgacacgggctttaaacaaaaaggcgatggtaatctggatgtttatgctaataacgtccatgttatgcgctttgtctccggaagcattcaaagtaataaaaccataaatattacgggacgtgttaatccctcggattacggtaactttgattcccgctatgtgagagatgtcagacttggcacacgagttgtttag

SEQ ID NO: 488263 - DNA, 2214 bp, Shigella sonnei; identical to SEQ ID NO: 485713

SEQ ID NO: 488264 - DNA, 1245 bp, Shigella sonnei; identical to SEQ ID NO: 485771

SEQ ID NO: 488265 - DNA, 657 bp, Shigella sonnei; identical to SEQ ID NO: 463703

SEQ ID NO: 488266 - DNA, 621 bp, Shigella sonnei; identical to SEQ ID NO: 479960

SEQ ID NO: 488267 - DNA, 924 bp, Shigella sonnei
gtggcaaagcaaaagttcaaaatcaccaactggcccacctacaataaagccctcatcaaccgtggctccataactttctggctggatgatgaagctattcaggcctggtatgagtcagcaacaccttcttcacgaggcagacctcagcgctattctgaccttgccatcacgactgtgctggtcattaaacgcgtgttcaggttgaccctgcgggctgcacagggttttattgattccatttttacactgatgaatgttccgttgcgctgcccggattacaccagtgtcagcaagcgcgcaaagtcggttaatgtcagtttcaaaacgttcacccggggtgaaatcgcgcatctggtgattgattccaccgggctgaaggtcttcggtgaaggcgagtggaaagtcaaaaagcatggccaggaacgccgccgtatctggcgtaagctgcatctcgccgttgacagtaaaacacatgaaatcatctgcgctgacctgtcgctgaacaatgtgacggactcagaagccttcccgggtcttatccggcagactcacagaaaaatcagggcagcatcggcagacggcgcttacgacacccggctctgtcacgatgaactgcggcgtaagaaaatcagcgcgcttatcccaccccgaaaaggtgcgggttactggcccggtgaatatgcagaccgtaaccgtgcagtggctaatcagcgaatgaccgggagtaatgcgcggtggaaatggacaacagattacaaccgtcgctcgatagcggaaacggcgatgtaccgggtaaaacagctgttcggggggtcactgacgctgcgtgactacgatggtcaggttgcggaggctatggccctggtacgagcgctgaacaaaatgacgaaagcaggtatgcctgaaagcgtgcgtattacctga

SEQ ID NO: 488268 - DNA, 348 bp, Shigella sonnei; identical to SEQ ID NO: 485869

SEQ ID NO: 488269 - DNA, 276 bp, Shigella sonnei; identical to SEQ ID NO: 484087

SEQ ID NO: 488270 - DNA, 327 bp, Shigella sonnei; identical to SEQ ID NO: 485848

SEQ ID NO: 488271 - DNA, 366 bp, Shigella sonnei; identical to SEQ ID NO: 10065

SEQ ID NO: 488272 - DNA, 1974 bp, Shigella sonnei
atgtggcaaattaatgaggttgtgctatttgataatgatccgtatcgcattttggctatagaggatggccaagttgtctggatgcaaataagcgctgataaaggagttccacaagctagggctgagttgttgctaatgcagtatttagatgaaggccgcttagttagaactgatgacccttatgtacatcttgatttagaagagccgtctgtagattctgtcagcttccagaagcgcgaggaggattatcgaaaaattcttcctattattaatagtaaggatcgtttcgaccctaaagtcagaagcgaactcgttgagcatgtggtccaagaacataaggttactaaggctacagtttataagttgttacgccgttactggcagcgtggtcaaacgcctaatgcattaattcctgactacaaaaacagcggtgcaccaggggaaagacgttcagcgacaggaacagcaaagattggccgagccagagaatatggtaagggtgaaggaaccaaggtaacgcccgagattgaacgcctttttaggttgaccatagaaaagcacctgttaaatcaaaaaggtacaaagaccaccgttgcctatagacgatttgtggacttgtttgctcagtattttcctcgcattccccaagaggattacccaacactacgtcagtttcgttatttttatgatcgagaataccctaaagctcagcgcttaaagtctagagttaaagcaggggtatataaaaaagacgtacgacccttaagtagtacagccacttctcaggcgttaggccctgggagtcgttatgagattgatgccacgattgctgatatttatttagtggatcatcatgatcgccaaaaaatcataggaagaccaacgctttacattgtgattgatgtgtttagtcggatgatcacgggcttttatatcggctttgaaaatccgtcttatgtggtggcgatgcaggcttttgtaaatgcttgctctgacaaaacggccatttgtgcccagcatgatattgagattagtagctcagactggccgtgtgtaggtttgccagatgtgttgctagcggaccgtggcgaattaatgagtcatcaggtcgaagccttagtttctagttttaatgtgcgagtggaaagtgctccacctagacgtggcgatgctaaaggcatagtggaaagcacttttagaacactacaagccgagtttaagtcctttgcacctggcattgtagagggcagtcggatcaaaagccatggtgaaacagactataggttagatgcatctctgtcggtatttgagttcacacaaattattttgcgtacgatcttattcagaaataaccatctggtgatggataaatacgatcgagatgctgattttcctacagatttaccgtctattcctgtccagctatggcaatggggtatgcagcatcgtacaggtagtttaagggctgtggagcaagagcagttgcgagtagcgttactgcctcgccgaaaggtctctatttcttcatttggcgttaatttgtggggtttgtattactcggggtcagagattctgcgtgagggttggttgcagcggagcactgatatagctagacctcaacatttagaagcggcttatgacccagtgctggttgatacgatttatttgtttccgcaagttggcagccgtgtattttggcgctgtaatctgacggaacgtagtcggcagtttaaaggtctctcattttgggaggtttgggatatacaagcacaagaaaaacacaataaagccaatgcgaagcaggatgagttaactaaacgcagggagcttgaggcgtttattcagcaaaccattcagaaagcgaataagttaacgcccagtactactgagcccaaatcaacacgcattaagcagattaaaactaataaaaaagaagccgtgacctcggagcgtaaaaaacgtgcggagcactga

SEQ ID NO: 488273 - DNA, 822 bp, Shigella sonnei; identical to SEQ ID NO: 16544

SEQ ID NO: 488274 - DNA, 225 bp, Shigella sonnei; identical to SEQ ID NO: 19405

SEQ ID NO: 488275 - DNA, 204 bp, Shigella sonnei; identical to SEQ ID NO: 13698

SEQ ID NO: 488276 - DNA, 1068 bp, Shigella sonnei; identical to SEQ ID NO: 13699

SEQ ID NO: 488277 - DNA, 507 bp, Shigella sonnei; identical to SEQ ID NO: 13700

SEQ ID NO: 488278 - DNA, 768 bp, Shigella sonnei; identical to SEQ ID NO: 13701

SEQ ID NO: 488279 - DNA, 333 bp, Shigella sonnei; identical to SEQ ID NO: 13702

SEQ ID NO: 488280 - DNA, 738 bp, Shigella sonnei; identical to SEQ ID NO: 13703

SEQ ID NO: 488281 - DNA, 225 bp, Shigella sonnei; identical to SEQ ID NO: 13704

SEQ ID NO: 488282 - DNA, 303 bp, Shigella sonnei; identical to SEQ ID NO: 24284

SEQ ID NO: 488283 - DNA, 1209 bp, Shigella sonnei; identical to SEQ ID NO: 139615

SEQ ID NO: 488284 - DNA, 546 bp, Shigella sonnei
atggaagtcaacaaaaagcagctggctgatattttcggtgcgagtatccgtaccattcagaactggcaggagcagggaatgcccgttctgcgaggcggtggcaagggtaatgaggtgctttatgattctgccgccgtcataagatggtatgccgaaagggatgctgaaattgagaacgaaaagctgcgccgggaggttgaagaactgcggctggccagcgaggcagatcttcaccccggaacacttgaatttgagcgccatcgcctgactcgtgctcaggcgacggcgcaggaactgaaaaatgccaaagaatcggctgaagtggtggaaaccgcattctgtactttcgtgctgtcgcgtatagcaagggaaatatccagtattctcgacggtattcctctgtcggtgcagcgacgttttcctgagctggataaccggcatattgatttcctgaaacgggatatcatcaaagccatgaacaaagcagccgcgctggatgaactgataccggggttgctgagtgaatatatcgaacagtcaggttga

SEQ ID NO: 488285 - DNA, 225 bp, Shigella sonnei
atgattcgcgggtttgtcccccatgctcgccagctctgtgcgggggtggaagaaacagggcatgtattcaggagcgtgcgaccgtggtcgcacgacgctggtctgtcagacattgaattcattgcgaataaaccagaacgcctgcgggtcctttccggcgatccggcaggctacggggcggaaggcgcgcgggttttcgctatttatgaaaattttccggtttaa

SEQ ID NO: 488286 - DNA, 450 bp, Shigella sonnei; identical to SEQ ID NO: 27160

SEQ ID NO: 488287 - DNA, 861 bp, Shigella sonnei
atgaaagagttgcaaaaaattaattcaataatggaacgattaattgctcttgagcttaagctggccgattgcggaaaactgtgtgctgaaaagcaaaatgagctttaccgggaatttgttacaatcgtaagtgagctgatgccaattgttaataactgcctaatgacatcaatattttttaatgtcgatgctactacatccagaaaatttactgtgaaaattcaagaaagagtttctggtagtgtgacaagagagatggctgaacagtttgtggcaatgagtaataaaacaaaaagaaaaaaggcattgcttgtaacagtaaatcagctttcagggcgcgttgactttcaggtcagacagggtgggcgtgtactggtaaacgatgcgttcgttggacgttgctttagtccttactcgatgaaatatgatgttgatgcagatgatcaggatatcagcatttcctggaaatctgagacagcagggattgtattaacagcagagttgttgagtgatgataaaaatgatggccagcatcatttggacgaaaaaaatcatatttctgaaatttgtatgaagccacgtagtggaatgactttattgtcgcgaactcttgctgctggcttttctgcaacggagaaacgtgtgcttctggtagtgcctgaagatgcagatattcgtccactgaatggctgtgatgttattagtgcaaaaacattgcatacccgcatcatgcctgtaccggatgtggtcatcattgatgatattgagaaatgcaagtctgtttcctcaactgccacaatcaaacgaattttacgttgtagcacgtcggctgttgcattccagaagcagttacataactaa

SEQ ID NO: 488288 - DNA, 312 bp, Shigella sonnei
atgaaaatttatattgccgggccaatgacgggatatgagaactttaatcgtgacgcctttaataaagaggcagatcgtttgtcacgacatggtcactctgtcttgaatccagccactttgcctaatggtctgacacaacgtgaatacatggatatttgctttgcaatgcttcgttgtgcggatgctattttgatgcttcctggctggaaagcgtctgctggagcaactgctgagtatcattacgcatacaagatggagatgccggtattcactacgctgaattacccgccagcttgttcctctgcagtataa

SEQ ID NO: 488289 - DNA, 468 bp, Shigella sonnei
atgagcagggtaaccgcgattatctccgctctggttatcggcatcatcgtctgcttgtcgtgggctgttaatcattaccgtgataacgccatcgcctacaaagagcagcgcgacaaaaacgccagagagctgaagcaggcgaccgccaccattactgacatgcagcagcgccagcgtgctgctgatgcactcgatgctaaatacacgaaggagttagccaatgcgaaagctgaaaatgatgctcttcggcgtaagcttgataatggtggtcgggtgctcgtcaaaggaaaatgccctgtgccagcctcagccaaaacctccagcgcctccggcatgggcaatgatgccaccgtcgaactctcttcagttgctggacgaaacgttctcggtatccgggacggaattatccgcgaccaaacagcactgagaacgcttcaggaatacatcaatacgcaatgcctgaattaa

SEQ ID NO: 488290 - DNA, 498 bp, Shigella sonnei
atgcagtcatcattacgcaaagctgtcacagctgctattggtggcggggctattgccatagcgtctatgctcatcactggcccaagtggtaacgatggtctggaaggtgtcagttacataccatacaaagatattgttggcgtatggactgtatgttacgggcacactggaaaagacatcatgctcggtaaaacgtataccgaagcagaatgcaaagctctcctgaataaagaccttgccactgtcgccagacaaattaacccgtacatcaaagtcgatataccggaaacaacgcgcggcgctctttactcgttcgtttacaacgtgggcgctggcaatttcagaacatcgacgcttcttcgcaaaataaaccagggcgatatcaaaggcgcatgtgatcagctacgtcgctggatatatgctggcggtaagcaatggaaaggcctgatgactcgtcgtgagattgagcgtgaagtctgtttgtggggtcaacaatga

SEQ ID NO: 488291 - DNA, 273 bp, Shigella sonnei; identical to SEQ ID NO: 14486

SEQ ID NO: 488292 - DNA, 1122 bp, Shigella sonnei
atgcgcatcgctgggttagcttacccaggcaaaaaaataatagctatgttcaaaaccactaatattcatggcgcacaactcgtttgcgcagattctctgcaatttatcaaaaccatccctgataactcggtcaatttgattgcaacagacccaccatacttcggcgtaaaggctaacgcatgggataaccagtgggatagcgatgctgactttttggggtggattgacgaatttttggcagaattttggcggatattggcccctaatggcagcctgtatatgtttaccggctctcgccttgcgtcaaaaattgaattattaactcgcgaccgtttcaatgttctgaaccatatcatttgggctaaacccagtggtatgtggcgcggttgtcataaagaaagtttaagggcttattttcctgctactgaaagaatattatttgcagagcattacggcgcgtcaggttatgctaaaggtcagtcaggttatgcttcaaaatgtgcagatttaagaaaaaatattttttctccactaattgatgctttttcgctggctcgccgtcagttagatatatcagccgcagacattaattcagcgacaggaaagcagatgtgttcacactggttttcttattcgcagtggcggcttccatcattaattgattttaataaactatgcgaattatttcgcaggaaggcagattcactcggtgtcccgtgtccatatccttttaatgttgattattcagaacatgaaaagcgttatagcgatctgaaattgcattatgaggaagtaaagaagcagtatgatgatttgaaggctcagtatgaaagtttacgccgtccatttcatgttactgctgatgtaccttataccgatgtatgggagtttcctcctgtgcaatattatcctggcaagcacccatgtgaaaaacctgcagcgatgatggaacatattataaagagtagttcacgccccggagatatcgttgccgatttctttatgggatcaggctcaactattaaagctgcgctgaagttaggacgtcaggcaataggtattgagattgagggcgagcgttatcttcagacagttgatgaagtgaaaaagttatttgagtaa

SEQ ID NO: 488293 - DNA, 228 bp, Shigella sonnei
atgaatattaatgaaattcgtggaaatatgaccgaagcggccctgagtgtggaatgtgttatgcgtggatatccacgcatttccttgaaagagttaagcgaagcctgttttttgagtcaggctgccgttgaatttatcatcgaacagatgatctgttttggggttgcaaagcgtagcgggtctggtcgatattctttgaccgatgaatataagcaggcaactttctaa

SEQ ID NO: 488294 - DNA, 222 bp, Shigella sonnei
atgaattatcaaggtaacgaaaaaatgcgcggcgacgttgcggagatagctaacgaattgtatgagttgtggcagaaggttgaacgtttcgaaaaggaatatggtttcaacagtaccaacctgacagaccgactggctggccgcttaattgggactatggggccaaaactggctgagttgaaccgctttatggctgatgttgatttccagtttcaagattga

SEQ ID NO: 488295 - DNA, 312 bp, Shigella sonnei
atgtttaacgtgataacccaccctgcagcactggatgaactgcttgaactaccagacgatctgcgaggtcgcatgaccaggctaattgaacgactggagaaagagggaaacaaacttaagatgccccatagccgtgtaataggcggaggactctttgaactaagagtaggggataaaaacatcgcaagaacgctatacgcctacgcgactggtaacgaaatttatctattgcatgcatttgtaaaaaagacacagaaaacaccagtaaaggctatagaaatcgccagaactcgcctgaaggagatgaactga

SEQ ID NO: 488296 - DNA, 288 bp, Shigella sonnei
atgaaagcaaaaggcatcccgtttaacgaagtaaaggaaaaactactcaacactccagaagctatcaaaggatatgaagaggccgataaagaactggagatggtcgaaatgttatacgaaatgagggaaagagcaggtttaacgaagtcagctctggcagaacgaatgggattgcgcccgtccgccatcagccgcctggaaagcaatcctttaggggcaagcatgaaaactttatcaaaatatgcccaagcatgtggcgcaacaattaatattaatgccgtctattga

SEQ ID NO: 488297 - DNA, 219 bp, Shigella sonnei; identical to SEQ ID NO: 27147

SEQ ID NO: 488298 - DNA, 327 bp, Shigella sonnei; identical to SEQ ID NO: 27158

SEQ ID NO: 488299 - DNA, 675 bp, Shigella sonnei
atgaaattttctaaattttctgagttggtgaatcgtattttgttgaatcgtattttgtccaacaaccacagcgatcgtcgcgatatggatgtaacgatcgttgttcattcgcctggcagcattggttcaacaccttcagttgaggttcagtcaattcacgctggttttgattgggattccgggaaagtgctgattttcccagcacagccactgaccacgctaacaccagaacagattactgatatcacggatagtgtgcgcaaaggtcagtcttggcacgcatatcaggaatacaagaagcataaagagcagttggaaaaattgtcgattgagttggaatcagccaaaaatcacatagcagaactggaagccaaacctgtaagccaaacttacaagttaacttttgagcaatggctggaacagcagcatgacaaaattgatgttgattgtggatgtgtaagtacagaaatgcttatgcactggataagggtcgcgtatgaggctggcaactctccggtaactccggatggtcatattcagttttctgtttcacttcctgcagcatgtggtggagataaatattttattgatggtgtatttcaacctttgagatatgagcgtgactgtgaaaaagcggttgtggccgctggcggtgtagttaattgggttaagtaa

SEQ ID NO: 488300 - DNA, 291 bp, Shigella sonnei; identical to SEQ ID NO: 14496

SEQ ID NO: 488301 - DNA, 420 bp, Shigella sonnei
atggcaaaggcttttacaccagaacagagggaagaactgaataaacaaattgtggaactcgtgcgcctgaatggacgaggaacggttaggcaacttgcggatgaaactggtattagccggtgtgctgttagtcgtttatcaagagagcttgctgccagtggtgatttgtatatctctggctccgggatatttctgtctgcacaagcacgcaaggactggcaaaacgcccgtaaaaaactatcaagagtaaagccgaagaaatcggtagttgttgatcctgaccttatctggtcattacctgatggagaaatacgtcgttatgacaggcgcttgaacatgatttgtcacgattgtcggaagagcgaagttatgcagcgtgtgttggcgttttatcagggaaattttcaggaggtggcgtag

SEQ ID NO: 488302 - DNA, 600 bp, Shigella sonnei
gtgactaatcagattatttacgacaggaaacggtctgatgtaatgattgatcttgaaacaatgggtactaacacatgtgctccaattgtttctatcggggcagtgtttttttctccagaaagtgaggaattaggtcctactttttatgtgccagtgaatctcagaagctcgatgttgaatggtggtatcgccgatggtgataccattttatggtggttgaaacagagcaaggaagccagagccgctatttgtactaatgatgcccttgatattaaggatgcactttttgaattatcacactttattacttgccatgcatgtaatttaaaaaagttgaaagtatggggaaatggagcaacgttcgataatgtaattttacgcggtgcttatgagcgcgttggcttagcctgtccgtgggaatattttaatgatcaggatgttcgaacaatcgttaatcttggtcagtttattggttttaatcctaaaaaagatatgccatttgatggcgaacgacacaatgccctggctgatgctattcatcaggctaaatatgtatctgcaattttctcccgtcttgtaaaagggcaaggagaatcgtaa

SEQ ID NO: 488303 - DNA, 711 bp, Shigella sonnei; identical to SEQ ID NO: 33874

SEQ ID NO: 488304 - DNA, 597 bp, Shigella sonnei; identical to SEQ ID NO: 14500

SEQ ID NO: 488305 - DNA, 3996 bp, Shigella sonnei
atgacattaaacgatttctatgcggatcgctttggcagcgatccgttctcgctaattgaagcagcacgggatgaactaaccgagctggcacagatggctggtatcaactggcctgcctgttccgacaacatccaactcaaccctcgcggaggggttgagcgttactcttcatacaataaaacatctccagaagctctcgaaaagagcctgaaaggacgcgtagaaatttactccaggctggaacacagcaaagggattgattacccgttcattaacttcgtccataaaggcagcgatgctggctcatggagcggtttctccttcctgttttctgaatatcgccgtgagcaacaacggaataatgcgaccgtggtcgcacaaccagaagaagaacgggaaagaatagaacgtcaggccgaagcacgtcgtcgccgtgaagaacaaaaacgaattaatgatctgaaaaacaaccaaatggaccatgaacgtttgctgggatggctggcattccacagcgcgtgggaacatgctcaggctgaagacggctcatggccatatgcgattaaaaaaggtattcgtgacgtttttagttcatgtgatgtgcgtcgcgtgaccagtcacgacagtgcgaaatggagccgggggccaaccacatatatggctatccctctggctcacctggacggtcgttatgatggtcgtattgtgggttggcagcgaatcgacaaacaaggtgggaaataccagaccagcgcagtaaccagcggtgatttcgtcggtgcctgctttgttatcggtgagctgaaaggggcgcaaaacatcgctgttacagaaggttttgctactggtgcatccatctggcttgccacgaaaaaagataaacgctttgacgctgtggttgtcgctgtatccgctaacaacatggttcatgttgtggaacaactggtaaacatgtacccggcggcaaaaatcacctgcgcactggataatgaccggaaatctgccacagaaggaaaagggaataccggcctgcggactggctatgaaatcttatcgaaattcaacgatgtccgctgcgtctatccaacttttgaagacgatccgcaaatggagtgcagtgacttcaacgacctgcacaaactacgtggacttcgtgaaacagcacgtcaactatttgcaacagcaaaccgcctgaaaaccggtactgatttgctatctctgacgctcaaccgcctgaagacaattaagcgggataaccgtcgtacttttgccaaagagctgctgagagcggtggatattggcatgctaacctgtccggttcctaacagtccgtcagatttatttaacatgttctgcatcgttctgcgtgaaatgggactggaaaatatctatcgcgctacggtaaaagaccacattgcccgtcgcctgaataaaaagtgccgtattgcccaggctccgcgctctttcagcgaacgcataactgatcccaataaacgccctcaacatatcacctataagcgttttgaaacttcggtaatgaccgatgatgtcctgaagtacgtgcaatcactacaggggatagtcatcgtccgtgctggtatgggttccggcaaatctactggattgttacgaccgttaatgcatagctcagaacgtggtatctctgttgctcaccgtgtctcccttattggtggcctgtgggaaatgatgacagaaggaaaaggtgtaaaagccgatatcctgcactatcaggaccctggctatcaggaaatggctccatacgccagtaaactgaccatctgcataaactcgattgttaaaaactgctggcaaccgttgatgcgccagcacgactattttggctttgacgaggccacacaagggctacgtgccgttctttccggtcgggctatggaaaacccggttgctgtattcaatacgctaattgacgcgctggccagaacggaacaacacccaatcatggtggatgctgatgcgaacgatctactggttgacctggctgaactggctatgaaacgccgtgaagaactaggtttaccggcatggctgcagatccacgtaattgaattacctgttgatgttcgcaaccgcgaaacaggtgagccaatccgggttttttatacagaaaaagatcgcatcatgaccgaggtggtgaaagctgtatcggatggcgaaaaaatcatgttggccaccgacagctccacctttgcagaagatgtgacagccaccctgagaatgcattttcctggtaagaaatttctgtgtgtaaaccagaaaaacaaaccagagccagaagttgaagcatttaccaatcaaccgaaaaagatggtcaaaaaatacgacggcctgatttatagcccgtctatttcatccggcgtgtcgattgagcaaaaacattttgaccgtcatttcggcatgttctgtggtgaagttgtacccagcgacgcagtgcaaatgctacgccgcgaccgtacagcaaaagaatttattatcggctttgataaagctcgtgcaaaacgtgaaactgacccgcaaaaaatagaacgagcattcgcccaggcattgcttgctaccgcaggtatgaacggtgaacttacggatgtcgttttcgatggcgaccgtatatcaatgggggtggccaataccgactttaccaggatgaaaattaaagcagccgcaattgaagcgactgcgcgtaacgactacgccagcaacatgatctgcatcatgcacagcgacggttataaagtatcaccgctggccaccgattatgctgcgaatgatatcggtaaagatctgcgtaaagaagcgcgggatattgtgtgggaacagacactggatctgcacctcaatacagaaactccacaagaatcagagcgtgaagaactgctaaaaaaacgcgcgctgacgcttgaagaacaggcaaaacttgtccgctgggatattgaaaacgaactgaaactaccggttgaagaaggcacgctgaaattctatttcgatggtgctcgagacaaagttcgccgctatgaaacaatgcttttagatgaggtaacagctcgtcgttacgaccgggaagaagcagccatcaattttacctacgcataccgtcaggcgggacagtggcaatattttgtagtgaccgcgatgactcgcgagcaggctgatgatgtctttaaaactaaattccctggaataatcgatcacaaggtaaaagctactcctactgttgaagtcggggcgcgcggtttctatgcgcttaaatcagcaactctccggcagtactttatcgactgcggtatcaaccctgagactatgaccggcgaggcgactcaggagcgtctcaaattcgctcgagataacctcatgacagccgaacgccgtgacctgttgaataacgttctgcacattggtggttttatgacgccaaaagggaagcctaaagtgccggaagcgttgtttaaaaacatttgcgactctcttggccttaaaacaggtaaacgtcgcggcagagacggcgataagcgtccaaccttgcgttttgttgagcctgaatcagcggcatttatgctggatattcttgttcagcgtcagaaagatggcctaaccctaaaaacgcgtaaagccgagaagacagccatcgaaatggatcgcgatttggatctcaatatatatatggatgataaaacgcgatccacaaacgagcaggttcaaaacgcccctcattcagtaatttctgaggctttggccgtgttgccagtggctgtacctgagtcctgggcgatgagtgcgctttccagtgaggagttggccactatgtcatcatggtcatcagccagcatagctatgacgtttgcatccctgtacctcacagagttcatggatcacctttccagcaatgagctgcggcggttacgtgaatacattacggggaatagctcatgcagctacgaagagcagggcgctttctatgggtaa

SEQ ID NO: 488306 - DNA, 192 bp, Shigella sonnei; identical to SEQ ID NO: 27148

SEQ ID NO: 488307 - DNA, 327 bp, Shigella sonnei; identical to SEQ ID NO: 27153

SEQ ID NO: 488308 - DNA, 396 bp, Shigella sonnei; identical to SEQ ID NO: 27152

SEQ ID NO: 488309 - DNA, 288 bp, Shigella sonnei; identical to SEQ ID NO: 27151

SEQ ID NO: 488310 - DNA, 165 bp, Shigella sonnei; identical to SEQ ID NO: 14505

SEQ ID NO: 488311 - DNA, 234 bp, Shigella sonnei; identical to SEQ ID NO: 27149

SEQ ID NO: 488312 - DNA, 1890 bp, Shigella sonnei
atgagcaaagtaaaaatcggtgaattaataaactcacttgttagcgatgttgagtcaatagataactctgaccgtcctcaaggggaaaaaacaaaaaaaataaaggctgttgcattaaaatttaaaaatgcattatttaatgataagcgaaagtttagggggaaaggattagaaaaaagaattacagccaacacattcaatgcctatatgagcagggccagaaaacggtttgatgataaacttcatcatagctttgaaaaaaatatacatcgcctatctgaaaagtatcctttatataatgaggagctattgtcatggctttctctacctgctgccgatattcgccagagaatgtcagctttacaggcaaaattaaaattaattctccctttatcagaagatttatctaatatcagaattggtgataacaaaagtcataataagttattaaaattatcaaataaatataaagagtggcaattcgccatatctgatttaactagcgataactggaaagataagcgcgattatttatataaattactacagcaaggatctgccttacttgaagagttgaatcagctaaaagttaaccatgagattctctatcatcttcaactaagccctgccgaacgcgcatctatccagcaacgatgggcggacgttctgcacaataagaaacgtaacgtggtggtcattgattaccctaaatatatgcaagctatttacgatattataaatagccctgctacattaaataatctaaacactcgttcaggtatggctcctttggcatttgcacttgctgcattgtcaggaagacgaatgattgagattatgtatcaaggtacatttactgtttctggtaagtataccgttgattttttaggccaagcaaaaaaaagaacttctgatgatataaccagaaaaatatatacattatgcgaagcaaaaacatttgtttatttaataaatgtacttcgctcatgcccagcagcatctgattttgatgatgtcgttaaaggttatggagataacgacacacgctctgaaaacggacggattaatgccatattagcaaaggcttttaacccgtgggtcaaatcatttttcaaagatgaccgccgtgtttataaagatagtcgtgctatttatgcccgtattgcgtatgaaatgtttttccgcgtagatcctcgttggaaaaacgtagatgaggatgttttctttatggaaattttaggccatgacgatgaaaacactcaattacactataagcaattcaagctggccaacttctcaaagacatggaggccaaatactggaaacgaaaataccaggctggaagcattgcagcagcttgatgacgaaatgccaggattcgccagaggagatgccggggttcgtctgcataacacagttaagcagctggtagagcatgacccctctataaaaatcacgaacagcactctaagagcattcaaatttagccctacaatgattagtcgatacctggaatttgctgctgatgctctggggcaatttgttggcgaaaatggacaatggcagctgaaaatagattctccagaaatcgttatgcctgacgaagaagagctggaagcaatacctgaacagacggatgaattatcagaggatgacgatctggatgacgacgaaattgagatagaggaagaggaagagagcgtagaagaacagcaaccgcccgcgccttcttcacctgtatctaagccggtatttaagcctgtgagaaatattggtgatggctcatacgttgttgagtttcattataatggccagaattatgcttggtccggcagtgcaaacagccctatatcagcaatgcagttagcatggctgacatatttcggataa

SEQ ID NO: 488313 - DNA, 1890 bp, Shigella sonnei; identical to SEQ ID NO: 488312

SEQ ID NO: 488314 - DNA, 234 bp, Shigella sonnei; identical to SEQ ID NO: 27149

SEQ ID NO: 488315 - DNA, 396 bp, Shigella sonnei; identical to SEQ ID NO: 27152

SEQ ID NO: 488316 - DNA, 327 bp, Shigella sonnei; identical to SEQ ID NO: 27153

SEQ ID NO: 488317 - DNA, 192 bp, Shigella sonnei; identical to SEQ ID NO: 27148

SEQ ID NO: 488318 - DNA, 3996 bp, Shigella sonnei; identical to SEQ ID NO: 488305

SEQ ID NO: 488319 - DNA, 600 bp, Shigella sonnei; identical to SEQ ID NO: 488302

SEQ ID NO: 488320 - DNA, 420 bp, Shigella sonnei; identical to SEQ ID NO: 488301

SEQ ID NO: 488321 - DNA, 291 bp, Shigella sonnei; identical to SEQ ID NO: 14496

SEQ ID NO: 488322 - DNA, 219 bp, Shigella sonnei; identical to SEQ ID NO: 27147

SEQ ID NO: 488323 - DNA, 312 bp, Shigella sonnei; identical to SEQ ID NO: 488295

SEQ ID NO: 488324 - DNA, 273 bp, Shigella sonnei; identical to SEQ ID NO: 14486

SEQ ID NO: 488325 - DNA, 498 bp, Shigella sonnei; identical to SEQ ID NO: 488290

SEQ ID NO: 488326 - DNA, 468 bp, Shigella sonnei; identical to SEQ ID NO: 488289

SEQ ID NO: 488327 - DNA, 312 bp, Shigella sonnei; identical to SEQ ID NO: 488288

SEQ ID NO: 488328 - DNA, 861 bp, Shigella sonnei; identical to SEQ ID NO: 488287

SEQ ID NO: 488329 - DNA, 450 bp, Shigella sonnei; identical to SEQ ID NO: 27160

SEQ ID NO: 488330 - DNA, 225 bp, Shigella sonnei; identical to SEQ ID NO: 488285

SEQ ID NO: 488331 - DNA, 546 bp, Shigella sonnei; identical to SEQ ID NO: 488284

SEQ ID NO: 488332 - DNA, 261 bp, Shigella sonnei
atggcgtctaaaaaattttactcagatgatgacatccagctggcaaaagctgctttatcggaattgccagacctcaccgctcaacggaaaacattgcgtgattttcttgatgccattcgtgatgacatcattatcctggtaaggacaaagggttatactgcgtattccgctctattcgatcacggattggcatcgaagttcgatcagcgattcgcatccattcgatcaaccgggaacttaactttttctaccgctttttaa

SEQ ID NO: 488333 - DNA, 189 bp, Shigella sonnei; identical to SEQ ID NO: 13644

SEQ ID NO: 488334 - DNA, 780 bp, Shigella sonnei; identical to SEQ ID NO: 52392

SEQ ID NO: 488335 - DNA, 237 bp, Shigella sonnei; identical to SEQ ID NO: 13646

SEQ ID NO: 488336 - DNA, 1428 bp, Shigella sonnei; identical to SEQ ID NO: 13647

SEQ ID NO: 488337 - DNA, 249 bp, Shigella sonnei; identical to SEQ ID NO: 13648

SEQ ID NO: 488338 - DNA, 240 bp, Shigella sonnei; identical to SEQ ID NO: 36218

SEQ ID NO: 488339 - DNA, 327 bp, Shigella sonnei; identical to SEQ ID NO: 16555

SEQ ID NO: 488340 - DNA, 537 bp, Shigella sonnei; identical to SEQ ID NO: 16554

SEQ ID NO: 488341 - DNA, 525 bp, Shigella sonnei; identical to SEQ ID NO: 16553

SEQ ID NO: 488342 - DNA, 498 bp, Shigella sonnei; identical to SEQ ID NO: 16552

SEQ ID NO: 488343 - DNA, 372 bp, Shigella sonnei; identical to SEQ ID NO: 16551

SEQ ID NO: 488344 - DNA, 378 bp, Shigella sonnei; identical to SEQ ID NO: 16550

SEQ ID NO: 488345 - DNA, 126 bp, Shigella sonnei; identical to SEQ ID NO: 16549

SEQ ID NO: 488346 - DNA, 1002 bp, Shigella sonnei
atgaatatgatgatctcatatcaggaacttgttcgcaccttccttagctttgaccctccgcccatgcagggttggaaattacatgtaaaaggacgttcttctaacgaggataaggattatttagttgaggaaatagtaggtttagaaatcaacgctatgcttcctagcacaacagctattagccatgcctcttttcaggaaaaggaggcaggtgatggtagtacgcagcacatagcggtttcaacagagtcagttgttgatgatgagcatctacagttggacgatgaggaaacagccaatatagacacagacacacgagtcatagaggctgagccgacatggataagttttagtagacctagtcgaattgaaaaatctcgcagggcaagaaaaagtagccaaactattttagaaaaagaagaagcaacaacaagtgaaaatagtaatttggttagtactgatgagccacacttaggtggtgtcctagcagcggcagatgtgggtgggaagcaggatgcaaccaattacaactctatttttgctaatcgatttgctgcttttgatgagctactttcaattctaaaaactaaatttgcatgtcgggtgctttttgaagaaaccttggttttgccaaaagttgggcgtagccgattacatctgtgtaaagatggctcaccaagagtgattaaagccgttggggtgcaacgtaatggcagtgaatttgtattgctagaggtggatgcatcggatggggtgaaaatgctttctaccaaagtgttgagtggcgttgatagcgaaacatggcggaatgattttgaaaagatacggcgtggagtggtgaagagctcattgaattggccaaatagtttgtttgatcaattatatggacaagacgggcatagaggggtgaatcatccaaaggggttgggggagctgcaagtatcgagagaggatatggaagggtgggctgagagagtggttagagagcaatttacgcattaa

SEQ ID NO: 488347 - DNA, 981 bp, Shigella sonnei
atgagccatcaactcaccttcgccgatagtgaattcagcactaagcgccgtcagacccgaaaagagattttcctctcccgcatggagcagattctgccatggcagaatatgaccgctgtcatcgagccgttttatcccaaggcgggcaatggccgacggccctatccgctggagaccatgctgcgtattcactgcatgcagcattggtacaacctgagcgacggtgccatggaagatgccctgtacgaaatcgcctccatgcgcctgtttgcccgattatccctggatagcgccctgccggatcgcaccaccatcatgaatttccgccacctgctcgagcagcatcaactggcccgtcaattgttcaagaccatcaatcgctggctggccgaagcaggcgtcatgatgacccaaggcactttggtggatgccaccatcattgaggcacccagctctaccaagaacaaagagcagcaacgcgatccggagatgcatcagaccaagaaaggcaatcagtggcactttggcatgaaggcccacattggtgtcgatgccaagagtggcctgacccacagcctagtcaccaccgcggccaacgagcatgacctcaatcagctgggtaatctgcttcatggagaggagcaatttgtctcagccgatgccggctaccaaggagcgccacagcgcgaggagctggccgaggtggatgtggactggctgatcgccgagcgtcccggcaaggtaaaaaccttgaagcagcatccgcgcaagaacaaaacggccatcaacatcgaatacatgaaagccagcatccgtgccaaggtagagcacccgtttcgcatcatcaagcggcagttcggcttcgtgaaagccagatacaaggggctgctgaaaaacgataaccaactggcgatgttattcaccctggccaacctgtttcgggtggaccaaatgatacgtcagtgggagagatctcactaa

SEQ ID NO: 488348 - DNA, 624 bp, Shigella sonnei; identical to SEQ ID NO: 10353

SEQ ID NO: 488349 - DNA, 276 bp, Shigella sonnei; identical to SEQ ID NO: 484087

SEQ ID NO: 488350 - DNA, 693 bp, Shigella sonnei
atgcgtcggcttcaaaagaggcggcaaaatcatcagaaacgaacgcagcctcgagcgccagcagcgcagcttcctcggctacggcggcaggaaattccgcgaaggcggcaaaaacgtccgagacgaacgccaaggcttctgaaacggcagcggaacagagtgcctccgcagcagcaggctcaaaaacagcggctgcgtcgtctgccagtgcagcgtcaacaagtgccgggcaggcctcagccagtgccactgccgccggaaaatcggcagaaagcgctgcatcgtccgcttcaacagctacaacgaaggctggcgaagccgctgaacaggccagcgcagcagcgaggtctgcttccgcagcgaagacatccgaaacgaacgcgaaagcgtcggaaaccagcgcagaatcctcaaaaacggctgccgcatcgtcagccagttcggcagcgtcatcggcatcatctgcgtctgcttcaaaagatgaggcgaccagacaggcgtcagcagcgaagggcagcgccacgacggcatccacgaaggcgaaagaggctgctggcagtgcgacagcggcagcacagagcaaaagtacggcagaatccgcagcaacgcgcgctgagacagcggcaaaacgggcagaggatattgcatccgccgtggcgcttgaggatgcgagcacgacgaaaaagggaatag

SEQ ID NO: 488351 - DNA, 891 bp, Shigella sonnei; identical to SEQ ID NO: 27176

SEQ ID NO: 488352 - DNA, 966 bp, Shigella sonnei; identical to SEQ ID NO: 27174

SEQ ID NO: 488353 - DNA, 1167 bp, Shigella sonnei
atgtctttgaaaaagttattgcaagattgtgttacgagaggtcaagaaatgacccaagcaattgctatcgctcaattcggtgatgatagtcctgaagctcggcgtatcacccgccgatggggtataactgaagtagcagatttaattggtgtaactcctcaagcaattagagatgctgagaagagcgggcgtttacctgcacctgactttgaaatgagaggaagaattgaacgtcgtgctggttataccatagatcaaatcaacagtatgcgagcagtttttggcaacccaaaccaacgaccacaagataaaaaccctgttgtgcttgccgttatgtcacacaaaggcggcgtttataaaacatcgtctgcggtacatcaagctcaatggttagcattacaaggtcatcgtgttcttttggttgaaggtaacgatcctcaaggcacggcctctatgtatcacggttatgttcctgatttacatatccatgccgaggatactttactgccattttacttaggagaacgcgataacgctgaatatgctataaagccaacatgttggcctggactagacattatccctagctgcctagctttacatcgtatagaaacagatctcatgcaatatcatgctcagggtaaattgcctcatcctccacaccttatgctgcgcgcagctattgaatcagtttgggataactacgatgttatcgttatagatagtgctccgaacctcggtacaggaaccattaacgttgtttgtgccgctgacgttattgttgttgctacacctgcagaattatttgattacgcttctgttctacagtttttcacaatgcttctcgatctattggaaagcgttgacctaggtggatttgagccaaccgttcgcttacttctgactaaatatagtctcactacagggaatcaatcacgatggatggaagaacaaataagaaatacatggggatcaatggtattacgtcaggttgtacgcgttaccgatgaagtaggtaaaggccagataaaaatgagaacagtatttgaacaagcagcaaaccaacgttcaacattgaatgcatggagaaatgctgtttctatatgggaccctgtttgccgagaaatttttgatgatctaataaaacctcgctgggagaacgaataa

SEQ ID NO: 488354 - DNA, 1167 bp, Shigella sonnei; identical to SEQ ID NO: 488353

SEQ ID NO: 488355 - DNA, 966 bp, Shigella sonnei; identical to SEQ ID NO: 27174

SEQ ID NO: 488356 - DNA, 891 bp, Shigella sonnei; identical to SEQ ID NO: 27176

SEQ ID NO: 488357 - DNA, 693 bp, Shigella sonnei; identical to SEQ ID NO: 488350

SEQ ID NO: 488358 - DNA, 1542 bp, Shigella sonnei; identical to SEQ ID NO: 484671

SEQ ID NO: 488359 - DNA, 1272 bp, Shigella sonnei
atgtgccctttgccgtgtcacacctaccgtaaccagctggcgtttatcgatattttcttccggggaatgaataacaccaactacaacatggcggtctgtggcacctccggggccggtaaaaccgggctgatacagccacttatccgcagcgtgctggactccgggggctttgccgtggtgttcgacatgggggatggctacaagtccctgtgtgagaacatgggtggcgtatatctggacggtgaaaccctgcgttttaacccgtttgcgaacatcaccgatatcgaccagtcagcggagcgtgtccgtgaccagttgtcagtgatggccagccccaacggtaacctggatgaagtgcatgaaggtctgctgctgcaggcggtcagggcctcctggctggccaaagagaacagggcacgtattgatgacgtggtggatttcctgaaaaacgccagtgacagcgagcagtatgccgggtcaccgactatccgcagccgtctggacgaaatgattgtgctgcttgaccagtacactgccaacggcacttacggccagtattttaactctgatgagccgtccctgcgggatgacgcaaaaatggtggtgctggagctgggcggactggaagaccgtccgtcactgctggttgcggtgatgttctccctgattatctacatcgagaacaggatgtaccgcacgccgcgtaacctcaagaaactgaacgtcattgatgaaggctggcgtctgctggacttcaaaaatcacaaggtcggtgagtttattgagaaaggttaccgtaccgcccgtcgtcataccggtgcttatatcaccatcacacagaacatcgtcgactttgactctgacaaggcctccagtgcggcccgtgcggcatggggtaactcctcctacaaaattatcctcaaacagagtgcgaaggagttcgcaaaatacaaccagctgtatccggaccagttccagccactgcagcgcgacatgattggtaagtttggtgcggccaaagaccagtggttcagttccttcctgctgcaggtggaaaaccattcctcctggcaccgcctgtttgtggacccgttaagccgcgccatgtacagctctgacggcccggattttgagtttgtgcagcagaaacgtaaagaggggctgagtattcatgaggcggtgtggcagctggcgtggaagaagtcagggccggagatggcttcgctggaagcctggctggaagaacatgagaaatacaggagtgttgcatga

SEQ ID NO: 488360 - DNA, 459 bp, Shigella sonnei; identical to SEQ ID NO: 7182

SEQ ID NO: 488361 - DNA, 1053 bp, Shigella sonnei; identical to SEQ ID NO: 7184

SEQ ID NO: 488362 - DNA, 867 bp, Shigella sonnei; identical to SEQ ID NO: 7185

SEQ ID NO: 488363 - DNA, 366 bp, Shigella sonnei; identical to SEQ ID NO: 10065

SEQ ID NO: 488364 - DNA, 1386 bp, Shigella sonnei; identical to SEQ ID NO: 485526

SEQ ID NO: 488365 - DNA, 309 bp, Shigella sonnei; identical to SEQ ID NO: 487355

SEQ ID NO: 488366 - DNA, 693 bp, Shigella sonnei
atgcgtcggcttcaaaagaggcggcaaaatcatcagaaacgaacgcatcatcaagcgccagtagcgcagcttcctcggcgacggcggctgcaaattctgcgaaggcggccaaaacgtccgagacgaacgccaggtcttctgaaacggcagcgggacagagtgcctcagctgcggcaggctcaaaaacagcggctgcgtcgtctgccagcgccgcgtcaacaagtgccgggcaggcctcagccagtgccaccgccgccggaaaatcggcagaaagcgccgcatcatccgcttcaacagccacaacgaaggctggcgaagccactgagcaggccacggcagcagcgaggtcagcttccgcagcgaagacatccgaaacgaacgcgaaagcgtcggaaacccgtgcagaatcctcaaaaacggctgccgcatcgtccgccagttcggcggcgtcatcggcatcatcggcgtctgcttcaaaagatgaggcgaccagacaggcgtcagcagcgaagggcagcgccacgacggcatccacgaaggcgacagaggctgctggtagtgcgacggcagcagctcagagcaaaagtacggcggaatctgcagcaacgcgcgctgagacagcggcaaaacgggcagaggatattgcatccgccgtggcgcttgaggatgcgagcacgacgaaaaaggggatag

SEQ ID NO: 488367 - DNA, 294 bp, Shigella sonnei
gtggcgcacgttttcggtgaacgcactctggccacactggcgcgtcttctgagcctgctgtcggcctttgaggtcgtggtatggatgacggatggctggccgctgtatgaatcccgcctgaagggaaagctgcacgttatcagcaagcgttacactcagcgcattgagcgacataatctgaatctgagacaacatctggcaaggctgggacggaagttactgtcgttctcaaaatcggtggagctgcatgacaaagtcatcgggcattatctgaacataaaacactatcagtaa

SEQ ID NO: 488368 - DNA, 978 bp, Shigella sonnei
atgccgtctccacgcatccgtaaaatgtccctgtcacgcgcactggataagtacctgaaaacagtttctgttcacaagaaagggcatcaacaggagttttaccggagcaatgttatcaagcgatatcccattgcccttcggaatatggacgaaataacaaccgttgatattgctacatacagagacgttcgtttagcagaaatcaacccccgaacgggtaaacccattacaggtaatactgtacgtcttgaactcgcccttctgtcatctctgttcaatattgctcgtgttgaatggggaacctgtcgtactaacccggttgaactggttcgcaagccgaaagtatcctccggacgagatcgccggctaacgtcttcagaagaacgtcgcctttctcgctatttccgcgaaaaaaatctgatgttgtatgtcattttccatcttgcccttgagacagccatgcggcagggcgaaatactggccttacgttgggagcacattgatttgcgccacggtgtggctcatttacctgaaaccaaaaacggtcactcacgggatgttcctctgtccagacgtgcccgtaactttcttcagatgatgcccgttaatctccacggcaatgtttttgattacaccgcatccggctttaaaaatgcctggagaatagccacacaacgacttcgcatcgaggacctgcattttcacgatctacggcatgaagcaataagccgcttcttcgaactgggtagcctgaatgtaatggagattgctgcaatatcaggacatcgttccatgaatatgctgaaacggtatactcatcttcgtgcatggcaactggtcagtaaacttgatgcccgccggcggcagacacaaaaagtggcagcatggtttgtgccgtatcctgcccatatcacgaccatcaatgaagaaaatgggcagaaagcgcatcgtattgagatcggtgattttgataactga

SEQ ID NO: 488369 - DNA, 543 bp, Shigella sonnei; identical to SEQ ID NO: 464540

SEQ ID NO: 488370 - DNA, 297 bp, Shigella sonnei; identical to SEQ ID NO: 19006

SEQ ID NO: 488371 - DNA, 441 bp, Shigella sonnei
atgcatggccacaccttcccgaatcatcatggtaaacgtgcgttttcgctcaacgtcaatgcagcagcagtcatcctcggcaaattctttccatgccgcttcaacctcgcgggaaaaggcacgggcttcttcctccccgatgcccagatagcgccagcttgggcgatgactgagccggaaaaaagacccgacgatatgatcctgatgcagctggatggcgttggcggcatagccgttattgcgtaccagatcgtctgcacgggcattgccacgggtaaagttgggcagcagggctgcatccacactttcactcggtgggttccacgcccgcaactgcccaccaaatccgctgccaccgccgtgataaccggcatattcgcgcagcgatgtcatgccgtccggccccagaagggtgggaatggtgggcgttttcatacataa

SEQ ID NO: 488372 - DNA, 207 bp, Shigella sonnei
atggcgaattaccgtcttatatcactggcgctgacacaacaacgcattcaacagtttcacagccaggaatttttaaactcactccggggcacaactcaatttgcgggtactgattaccgcagcaaagaccttaccccgaaaaaatccaggctgctggctgacacgatttctgcggtttatctcgatggctacgagggcagacagtaa

SEQ ID NO: 488373 - DNA, 573 bp, Shigella sonnei; identical to SEQ ID NO: 488218

SEQ ID NO: 488374 - DNA, 309 bp, Shigella sonnei
gtgatcagccgctggcgcattgagcagtgcagcgaactgagcgcggtgagtgcctcttttgtactgtccacgccgacggaaacagatggcgctgtttttccgggacgtatcatgctggccaacacctgcacctggacctatcgcggcgatgagtgcggttatcacggtccggcggtcgcggatgaatatgaccagccaacgtccgacatcacgaaggataaatgcagcaaatgcctgagtggctgtaagtttcgcaataacgtcggcaactttggcggcttcctttccattaacaaactttcgcagtaa

SEQ ID NO: 488375 - DNA, 1455 bp, Shigella sonnei; identical to SEQ ID NO: 485766

SEQ ID NO: 488376 - DNA, 333 bp, Shigella sonnei
atgacgagcaaagaaacctttacccattaccagccgctgggcaacagtgacccggctcataccgcaaccgcgcccggcggattgagtgcgaaagcgcctgcaatgaccccgctgatgctggacacctccacccgtaagctggttgcgtgggatggcaccaccgacggtgctgccgttggcattcttgcggttgctgctgaccagaccagcaccacgctgacgttctacaagtccggcacgttccgttatgaggatgtgctctggccggaggctgccagcgacgagacgaaaaaacggaccgcgtttgccggaacggcaatcagcatcgtttaa

SEQ ID NO: 488377 - DNA, 825 bp, Shigella sonnei; identical to SEQ ID NO: 486943

SEQ ID NO: 488378 - DNA, 525 bp, Shigella sonnei; identical to SEQ ID NO: 487961

SEQ ID NO: 488379 - DNA, 603 bp, Shigella sonnei
atgaccggtgaagccttcgatccggttgaggtggatatgggccgcagtgcggcgaacaacatcacgcagtccggcggtacggagtggagcaagcgtgacaagtccacgtatgacccgaccgacgatatcgaagcctacgcgctgaacgccagcggtgtggtgaatatcatcgtgtttgatccgaaaggctgggcgctgttccgttccttcaaagccgtcaaggagaagctggatacccgtcgcggatctaattccgagctggagacagcggtaaaagacctgggcgaagcggtgtcctataaggggatgtatggcgatacggcgatcgtcgtgtattccggacagtacgtggaaaacgacgtcaaaaagaacttcctgccggataacacgatggtgctggggaacactcaggcacgcggtctgcgcacctatggctgcattcaggatgcggacgcacagcgcgaaggtattaacgcctctgcccgctacccgaaaaactgggtgaccaccggcgatccggcgcgtgagttcaccatgattcagtcagcaccgctgatgctgctggctgaccctgatgcgttcgtgtccgtacaactggcgtaa

SEQ ID NO: 488380 - DNA, 396 bp, Shigella sonnei
atgacgaaagatgaactgattgcccgtcttcaggtgctgggtgagcaactgaaccgtgatgtcagcctgacggggacgaaagaagaactggcactccgtgtggcagagctggaagaggagcttgatgacacggatgacgctgccggtcaggacacatctgtcagcccggaaaatgcgctgaccggacatgaaaatgaggtggtatcagcgcagccggataccgtgactgatacggctgatctggtcacggttgtggcactggtgacgctgcatactgatgcacttcacgccacgcgggatgaggctgtggcatttgtgctgccgggaacggcgttccgtgtctctgccggtgtggcagctgaaatgacagagcgcggcctggccagaatgcaataa

SEQ ID NO: 488381 - DNA, 783 bp, Shigella sonnei
gtgaaggcgatgtatgccgccaccatcgagagtgagctggatacgcagtcagcgatggattttattcttggcgcgaacagtaatgagcagcgggacaagctgacgggctggattggtgaaattgccgcgtattacgccgccgcaccggtccggctgggaggcgcaaaagtgccgcacctgatgccgggtgactctctgaacctgcagacggctcaggacacggataacggctactccgtttttgagcagtcactgctgcggtatatcgctgccgggctgggtgtctcgtatgagcagctttcccggaattacgcccagatgagctactccacggcacgggccagcgcgaacgagtcgtgggcgcactttatggggcggcgaaaattcgtcgcatcccgtcaggcgagccagatgtttctgtgctggctggaagaggccatcgttcgccgcgtggtgacgttaccttcaaaagcgcgcttcagttttcaggaagcccgcagtgcctgggggaactgcgactggataggctccggtcgtatggccatcgatggtctgaaagaagtacaggaagcggtgatgctgatagaagccggactaagcacctacgagaaagagtgcgcaaaacgcggcgacgactatcaggaaatttttgcccagcaggtccgtgaaacgatggagcgccgtgcagccggtcttaaaccgcccgcctgggcggctgcagcatttgaatccgggctgcgacaatcaacagaggaggagaagagtgacagcagagctgcgtaa

SEQ ID NO: 488382 - DNA, 519 bp, Shigella sonnei
atggctgtaccgcctgacgcggatgcgccgccaccaacagccccgccaatggcgctgccgatactcccgacaatccccaccattgcctgcttaagcagaatttctgtcatcatggacagtacggaacgggtgaagctgcgccagttctgctcactgccggtcagcatcgccgccatattctgtgcaataccatcaaaggtctgcgtggctgcactttttacctgcgacatactgtccgtggcgctctcttcccactcactccagccggacttcaggcctgccatccagttcccgcgaagctggtcttcagccgcccaggtctttttctgctctgacatgacgttattcagcgccagcggattatcgccatactgttccttcaggcgctgttccgtggcttcccgttctgcctgccggtcagtcagcccccggcttttcgcatcaatggcggcccgttttgcccgttgctgctgtgcgaatttatccgcctgctgcgccagcgcgttcaggcgctcctga

SEQ ID NO: 488383 - DNA, 246 bp, Shigella sonnei
gtgcttgtggtgggtaaccgtcgtattcccggcgcgtttattcagcaactgaaaaatggccggtggcatgtcatgcagcgtgtggccgggaaaaaccgttaccccattgatgtggtgaaaatcccgatggcggtgccgctgaccacggcgtttaaacaaaatattgagcggatacggcgtgaacgtcttccgaaagagctgggctatgcgctgcagcatcaactgaggatggtaataaagcgatga

SEQ ID NO: 488384 - DNA, 462 bp, Shigella sonnei
gtggcactggctgaggcctgcccggcacttgttgacgcggcactggcagataatgcagccgctgtttttgaacctgccgcagctgaggcgctctgtcccgctgctgtttcagaagacttagcgttcgtctcggacgtttttgccgccttcgcggaatttcctgccgccgttgccgaggaagctgcactactggcacttgatgatgcattcgtttctgaagatttcgctgcctcttttgaggccgccgcaccccgtgccgaggtggcagcttctgacgccttcgtggtcgctgtggatgcagaagtggctgccgatttttgtgatgctgcggcattcgtttctgacgttttcgcggcactggcgctggtagctgccgcgctttttgatgactctgcagcagcactttttgctgcttcacgggcctttgtcgatgccgttcctgcgctggaagacgctgactga

SEQ ID NO: 488385 - DNA, 303 bp, Shigella sonnei; identical to SEQ ID NO: 21213

SEQ ID NO: 488386 - DNA, 330 bp, Shigella sonnei
atgaaaaccttccgctggaaagtgaaacccggtatggatgtggcttcgtccccttctgtaagaaaggtgcgctttggtgatggctattcccagcgagcgcctgccgggctgaatgccaacctgaaaacgtacagcgtgacgctgtctgtcccccgtgaggaggccacggtactggagtcgtttctggaagagcacgggggctggaaagcctttctgtggacgccgccttatgagtggcggcagataaaggtgacctgcgcaaaatggtcgtcgcgggtcagtatgctgcgtgttgagttcagcgcagagtttgaacaggtggtgaattga

SEQ ID NO: 488387 - DNA, 453 bp, Shigella sonnei
atggtgactgtaaccgtaccgtttggtgtttccgtgttaccccacgtaccgacttttttcgggaaggcttttgatacagctttaacgaaatcccctctgacctgggtcgcctccagcatgcccttaatcgtacagttctggttaatcgtgacattgttgagcgttcctgagttcgcattcacactgccactgatatccgcatttttagcggtcagctttccgtctgatgtcagggaaaataccggaggactgccaccgctggtaatggtgggggccgtcaggcgcttcaggaacacgtcgttcatgaatatctggttgccctgcgccacaaacatcggcgtttcattcccgtttgccgggtcaataaacgcgatacggttagcggcaaccagaaactggctcagcttgccttcctccgtgtcctccatgctgaggccaatacccgcgacataa

SEQ ID NO: 488388 - DNA, 366 bp, Shigella sonnei
atgctggaagcggccagagaggccagacgtcaggaaattgaagcatggcgcacagaacaggaggcgaagccgttcacgtttgaatggaacggtcgtatctggaatgctggtcccgactcactgggccgcctgtccccggtagtcatgctggcaaaatctgtcacagcacaaacacatatggcgtggggtgatgccgataatcagcaggtgaaactgtcgatgccggaactggaagaactggcggcagcaatggtgcaggcgcaggtcgatcgcaacgatgagatttatcgccgtcagcgtgaaatgaaagaggagctgagcggtctggatgatttggcttcaattcgggcgtttgacgttgagtaa

SEQ ID NO: 488389 - DNA, 366 bp, Shigella sonnei
atgctggaagcggccagagaggccagacgtcaggaaattgaagcatggcgcacagaacaggaggcgaagccgttcacgtttgaatggaacggtcgtatctggaatgctggccccaactcactgggccgcctgtccccggtagtcatgctggcaaaatctgtcacagcacaaacacatatggcgtggagcgatgccgataatcagcaggtgaaactgtcgatgccggaactggaagaactggcggcagcaatggtgcaggcgcaggttgaacgcaatgacgagatttatcgccgtcagcgtgaaatgaaagaggagctgagcagtctggatgatttggcttcaattcgggcgtttgacgttgagtaa

SEQ ID NO: 488390 - DNA, 474 bp, Shigella sonnei
gtgtctttcccgtatgccggagaatggctgaccgaagacgaaatcagggctgttcttgatgcggtgcacgatgcggtacgaagcatctgttaccaggtggcagaagatgcgcggcgtatccgtgcggcgctgaccaccaccggtcagacgttgctgacccgccagacgcgccgctttcgcctggtcgtgaaggaaagcgatcacccctgctggctcgatgaagatgacgaaaacctgcccgtggtgctcgatgccatcgtgaaccggggagcacgtttttcgtcggtggaaatgtacctggtcagcgattgtattgagcatatcctgtcctgtgggctggcctgcgatgtgctgcgtatacccgatgaaccgccccgccgctggtttgaccgtggtgttctgcgggaggtggtccgggaagcccggaccgaaatccgcagcatggcggatgccctggcaaaaatccggaaatga

SEQ ID NO: 488391 - DNA, 276 bp, Shigella sonnei; identical to SEQ ID NO: 484087

SEQ ID NO: 488392 - DNA, 423 bp, Shigella sonnei
atgttcctgaaaaccgaatcatttgaatataacggtgtgagcgtcacgctttctgaactgtcagccctgcagcgaattgagcatctcgccctgctgaaacgacaggcagaacaggcgggatccagtctcaatcgacaggtgagcgtggaagatctcgtcagaaccggtgcttttctggtggcgatgtccctgtggcatagccatccgcagaagacaaagctgccgtccatgaatgaagccgttaaacaaattgagcaggaagtgcttaccacctggcccacagaggcaattgctcaggctgaaaatgtggtaatgcgtctgtccggtatgtctgagtttgttgtgaatgatgcacctgaacaggcagatgacgccgggcctgcagagcctgtttctgcgggaaagtgttcgacggtgagctga

SEQ ID NO: 488393 - DNA, 195 bp, Shigella sonnei
atgggcgtcggaaatgagagtccctctgctccgccggagacaatgccggacatacagacacgggaactggttatgttgatcaagcgactggcatcatcgctgaaagcggtgaaacccgacagtagcgtggtgcgtgaagcgcaggactggctgtgcgacagaaaacttgtggatatcacagatattctccggtga

SEQ ID NO: 488394 - DNA, 222 bp, Shigella sonnei; identical to SEQ ID NO: 8360

SEQ ID NO: 488395 - DNA, 201 bp, Shigella sonnei; identical to SEQ ID NO: 488102

SEQ ID NO: 488396 - DNA, 192 bp, Shigella sonnei
gtgctggatgcactggagcaggcgttgtgggcccgtcgcccgtctggcaccatccatcacagcgataaaggctctcagtatgtgtcactggcctataaggcgcgactaaaagaagcaaaactgctggcatcaacagggagtacaggcgactcgtatgacaacgcgatggcagagatcatcaagggcctttag

SEQ ID NO: 488397 - DNA, 270 bp, Shigella sonnei
atgacatccggtgagcagtccggtgctgtgatacgtggtgtttttgatgaccctgaaaatatcagctatgccggaccgggcgtgcgcgttgaaggctccagcccgtccctgtttgtccggactgatgatgtgcggcagctgcggcgcggcgacacgctgaccatcggtgaggaaaacttctggatagaccggatttcgccggatgatggcggaagctgtcatctctggcttgggcggggcgtaccgcctgccgttaaccgtcgccgctga

SEQ ID NO: 488398 - DNA, 246 bp, Shigella sonnei
atgcggcgggtctgcctgggtgagccggttgcccgttccgggaggctgccgacactggcaccgccgttactgcgtcagctggcagccatcgggaataacctgaaccagacagcccgtaaggtgaacagcggacagtggtcttccggcgaccgggttcaggtggtggccgcactgatggccatcggggatgagctgcgccggttgcgtctggccgtcagggaacaggggacgcgggatgatagttaa

SEQ ID NO: 488399 - DNA, 138 bp, Shigella sonnei; identical to SEQ ID NO: 35620

SEQ ID NO: 488400 - DNA, 135 bp, Shigella sonnei
atgaagaaaggtgatgcggctgaacatgcagagcaccatatgaaagacaaccgctgggttccaggctggatgtgtgcaccacatccacagacggataccactgaacgcaccgataacctggctgatgccgcctga

SEQ ID NO: 488401 - DNA, 135 bp, Shigella sonnei; identical to SEQ ID NO: 21373

SEQ ID NO: 488402 - DNA, 360 bp, Shigella sonnei; identical to SEQ ID NO: 372517

SEQ ID NO: 488403 - DNA, 738 bp, Shigella sonnei
gtggcgctgcccttcgctgctgacgcctgtctggtcgcctcatcttttgaagcagacgccgatgatgccgatgacgccgccgaactggcggacgatgcggcagctgccttagaggaagcagcattgtctgctgaagtctttgcatttgtttcagaggtttttgctgcggaagctgacctcgctgctgccgtggcctgctcagtggcttcgccagccttcgttgtggctgttgaagcggatgatgcggcgctttctgccgattttccggcggcggtggcactggctgaggcctgcccggcacttgttgacgcggcgctggcagacgacgcagccgctgtttttgagcctgccgcagctgaggcactctgtcccgctgccgtttcagaagacctggcgttcgtctcggacgttttggccgccttcgcagaatttgcagccgccgtcgccgaggaagctgcgctactggcgcttgatgatgcgttcgtttctgatgattttgccgcctcttttgaagccgacgcatcccgggctgaggtggcagcttctgacgctttcgtggtcgcggtggatgcagaagtggctgctgattgttgtgacgctgccgcattcgtttctaacgttttcgccgcaccggcactggtagccgccgcgctttttgaggactctgcagcggcagcactttttgaggcttcagtggcctttgttgatgccgttcctgcgctggaagacgctgactga

SEQ ID NO: 488404 - DNA, 657 bp, Shigella sonnei; identical to SEQ ID NO: 463703

SEQ ID NO: 488405 - DNA, 234 bp, Shigella sonnei
atggttcgcgtgaaagatatctttataccgattgagagcaatgccaaacgctacgacgcgatgaataaaggcattttcaaagacctaaccaaacatactgatgtgatcctgaaaaaatcgtatgaagtgatgcatggggaattggggaattggggaattggggaatgcggattcgatccagagctggtcgaatgcgtgaataaggtaggccgggcggaaaactgcccggcctga

SEQ ID NO: 488406 - DNA, 192 bp, Shigella sonnei; identical to SEQ ID NO: 17096

SEQ ID NO: 488407 - DNA, 423 bp, Shigella sonnei; identical to SEQ ID NO: 267155

SEQ ID NO: 488408 - DNA, 426 bp, Shigella sonnei
atgcaatatgcgaaacctgtcactctgaatgttgaagagtgcgaccgtctctcctttctgccgtatctgtttggcaacgattttctgtatgccgaggcgtatgtgtacgcgctggcgcaaaaaatgatgccggaatatcagggcggcttctggcacttcatccgcctgccggacggtggcggttacatgatgccggacggtgaccgtttccacatggtgaacggtgcaaactggtttgaccgtaccgtgagtgctgatgccgcaggcatcatccttacctcccttgtgattaaccgccagttgtggctgtaccacgacagcggggatgcaggactgacccagctttaccggatgcgcgatgcgcagctgtggcgtcacatcgaatttcaccctgaatgcaacgcgatttacgcggctctggactga

SEQ ID NO: 488409 - DNA, 951 bp, Shigella sonnei; identical to SEQ ID NO: 485333

SEQ ID NO: 488410 - DNA, 930 bp, Shigella sonnei
gtggtatttccggctgaactggtgcggctgctggacagactggaggaagaaatccgggcagaccgcgtgagcagtgaaagccgggtgtggcttgcgcagtgcgggctgacggtggagcaactggccagacaggtggagccggaatacacaccagtgcgaaacgttcatctttaccactgcgaccatcggggccagccgctggcgctcatcagcgaagacggcgatacggtgtggagcggggcgtatgatgagtggggcaaccagctaaatgaggagaacccgcatcatgtgtatcagccataccgtctgccggggcagcagtatgatgaggagtcggggctgtactacaatcgtcaccggtactatgatccgttgcagagacggtacatcacccaggaccccattgggctgaaaggtgggtggaatctgtatcagtatccgctgaatccggtgagcaggatagatccgttggggttattctcatgtgagagttgtagtcattttatagatgatataaataataaactggataaccttccgtttaacccgacaaaaatgtttacagctagtttaaatactgctaattcagcaaggctgtatgcaagtggcatgacaaaattcggtataagtgttgctgccgatggaacgatcattgctgccccagtcggtgcagcttctatggctttaggggcgtggaatataaaatctgcgacagctgcatataacagagcaaatttacaattatcagaatcacttcaggaaaatggtagagataggtgttggagaaatttattgggtattttaccttatggtgagcagtttgatgaccctggtgaaccatcaatattagacgtttatggtgaaaagattgagaatatcaaagattctccaatgaagttttttgaagagcttgggacgctggggttgtaa

SEQ ID NO: 488411 - DNA, 657 bp, Shigella sonnei
atgcctgcgatcaatgccaaacgtgtttaccggatcatgcgccagaatgcgctgttgcttgagcgaaaacctgctgtaccgccatcgaaacgggcacatacaggcagagtggccgtgaaagaaagcaatcagcgatggtgctctgacgggttcgagttctgctgtgataacggagagagactgcgtgtcacgttcgcgctggactgctgtgatcgtgaggcactgcactgggcggtgactaccggcggcttcaacagtgaaacagtacaggacgtcatgctgggagcggtggaacgccgcttcggcaacgatcttccgtcgtctccagtggagtggctgacggataatggttcatgctaccgggctaatgaaacacgccagttcgcccggatgttgggacttgaaccgaagaacacggcggtgcggagtccggagagtaacggaatagcagagagcttcgtgaaaacgataaagcgtgactacatcagtatcatgcccaaaccagacgggttaacggcagcaaagaaccttgcagaagcgttcgagcattataacgaatggcatccgcatagtgcgctgggttatcgctcgccacgggaatatctgcggcagcgggcttgtaatgggttaagtgataacagatgtctggaaatatag

SEQ ID NO: 488412 - DNA, 612 bp, Shigella sonnei; identical to SEQ ID NO: 488262

SEQ ID NO: 488413 - DNA, 315 bp, Shigella sonnei; identical to SEQ ID NO: 485391

SEQ ID NO: 488414 - DNA, 1191 bp, Shigella sonnei
gtggtggcaagtgaactgcacggcgagcagccgcaggcggtgccgggacgcagtggttcaggaaccacgctgaataaccactttgcggtaataccggcagaccggacatggcggccacagccgttgctgaaaccgctggtggatggcccgcagagcgccgtcgtgacgggaccggcaggcgaggaaatcttctgtgatgaacatggccgcgtgcgggtgaaatttaactgggaccgctataacccgtcaaaccaggacagttcatgctggatccgtgtggcacaggcgtgggcaggcaccggattcggtaaccttgcgataccgcgcgtgggtcaggaggtgattgtggacttcctcaacggcgatccggaccagccgattattatggggcgtacctaccaccaggaaaaccgcacacccggtagcctgccggggacgaagacgcagatgaccattcgttcgaaaacctataagggcagcgggtttaatgaactgaagtttgacgatgcgacagggaaagaacaggtctacatccacgtgcagaagaacatgaacaccgaggtgctgaataaccgcaccacggatgtgataaacaaccatgccgaaaaaataggtaacaaccaggcgatcaccgttaccaataaccagatccagaacattggcgttaatcagatacagacggttggtgtcaaccaggtggaaacggtgggcagtaaccagattatcaaagtgggatcaaaccaggttgaaaaggtggggatcattcgtgcgctgacggtgggtgtggcttaccagacgacggtaggcggcattatgaatacctcggtggcgttgttgcagtcctcacaggtagggctgcataaatcactgatggtgggaatgggctacagcgtcaatgtagggaataacgtcaccttctcggtgggcaagacgatgaaggaaaacaccggacaaacagcagtttattctgccggtgagcatcttgaactctgctgtggtaaggcaaggctggtgctgacgaaggacggaagcatatttctcaacggtacgcacattcatctggaaggggagtcggatgtgaacggtgatgcgccagtgattaactggaactgtggtgccacacaacctgtaccggatgcgcctgtgccgaaagatttaccccccggaatgccggatatgcggcaattttga

SEQ ID NO: 488415 - DNA, 1167 bp, Shigella sonnei
gtggtggcaagtgaactgcacggcgagcagccgcaggcggtgccgggacgcagtggttcaggaaccacgctgaataaccactttgcggtaataccggcagaccggacatggcggccacagccgttgctgaaaccgctggtggatggcccgcagagcgccgtcgtgacgggaccggcaggcgaggaaatcttctgtgatgaacatggccgcgtgcgggtgaaatttaactgggaccgctataacccgtcaaaccaggacagttcatgctggatccgtgtggcacaggcgtgggcaggcaccggattcggtaaccttgcgataccgcgcgtgggtcaggaggtcattgtggacttcctcaacggcgatccggaccagccgattattatggggcgtacctaccaccaggaaaaccgcacacccggtagcctgccggggacgaagacgcagatgaccattcgttcgaaaacctataagggcagcgggtttaatgaactgaagtttgacgatgcgacagggaaagaacaggtctacatccacgtgcagaagaacatgaacaccgaggtgctgaataaccgcaccacggatgtgataaacaaccatgctgaaaccattggcaacaatcagatgattgcggttaccaacaatcagatagagacggtgggcgttaaccagatagagacggtgggcagtaaccagataattaaagtgggttctgttcaggtggaaacgattggacttgttcgtgcgctgacggtgggcgtggcgtatcagacgacggtaggtggcattatgaacacctcggtggcactgatgcagtcctcgcagatcggtttgcataaatcgttgagggtcgggctgggttatgacgtcaaagtcggaaataacgttaccttcaccgttggtaaaacgaaaaaggatgataccgggcagaccgcgatttactccgccggtgagcatctggagctctgctgtggtaaggcaaggctggtgctgacgaaggacggaagcatatttctcaacggtacgcacattcatctggaaggggagtcggatgtgaacggtgatgcgccagtgattaactggaactgtggtgccacacaacctgtaccggatgcgcctgtgccgaaagatttaccccccggaatgccggatatgcggcaattttga

SEQ ID NO: 488416 - DNA, 504 bp, Shigella sonnei; identical to SEQ ID NO: 485763

SEQ ID NO: 488417 - DNA, 570 bp, Shigella sonnei; identical to SEQ ID NO: 485859

SEQ ID NO: 488418 - DNA, 657 bp, Shigella sonnei; identical to SEQ ID NO: 463703

SEQ ID NO: 488419 - DNA, 267 bp, Shigella sonnei; identical to SEQ ID NO: 11114

SEQ ID NO: 488420 - DNA, 279 bp, Shigella sonnei; identical to SEQ ID NO: 11573

SEQ ID NO: 488421 - DNA, 303 bp, Shigella sonnei; identical to SEQ ID NO: 487011

SEQ ID NO: 488422 - DNA, 147 bp, Shigella sonnei; identical to SEQ ID NO: 465857

SEQ ID NO: 488423 - DNA, 180 bp, Shigella sonnei; identical to SEQ ID NO: 461173

SEQ ID NO: 488424 - DNA, 2304 bp, Shigella sonnei; identical to SEQ ID NO: 483738

SEQ ID NO: 488425 - DNA, 1548 bp, Shigella sonnei; identical to SEQ ID NO: 484442

SEQ ID NO: 488426 - DNA, 327 bp, Shigella sonnei; identical to SEQ ID NO: 486130

SEQ ID NO: 488427 - DNA, 1038 bp, Shigella sonnei; identical to SEQ ID NO: 486405

SEQ ID NO: 488428 - DNA, 738 bp, Shigella sonnei; identical to SEQ ID NO: 486991

SEQ ID NO: 488429 - DNA, 498 bp, Shigella sonnei
atgagacacgatcgcggctattttaatgtctccaacggcggcaaaatccatgttaagggcaccagccgtctgacctatttgcagggaaatgtcagtggtgaaggcagccaggtaaattctaaaaccttctttatgggcgtttacggcagttacggtggtaatcagtacctgtcagttaataacggcggtgaagttaatgccagtgagaaaattagcctgggttattatgatcaaaactccgatacaacacttgctgtttcggaaggtggtaaaatctctgcgccgactattagtttaagcaccaactctgagttagcgttaggtgcacaggaaggaagcgcagcgaaggctgcagggattattgatgccgaaaaaattgagtttgtgtgggcaaagacatccgagaagaaaatcaccttaaaccacacggataaaaacgcgactatttccgcggatattgtcagtgacagcgagggccttgaggtgtactggcaatag

SEQ ID NO: 488430 - DNA, 459 bp, Shigella sonnei; identical to SEQ ID NO: 485863

SEQ ID NO: 488431 - DNA, 360 bp, Shigella sonnei; identical to SEQ ID NO: 372517

SEQ ID NO: 488432 - DNA, 381 bp, Shigella sonnei
atgttttttattgagaatgaaggtcaggctgtcgccggaacggattactggcagtctgtacaggcgcaggccggatatgtctacctcagctggaatgccggcgcagccaggctgcttgtcccggatgcggcaaaacatttactcagggagatgcggggggctgagtacgtcatcatcagtaagggaacgctggatggccgcgatgcgctgttcgtgatccacatgctgagtgagcagtgcgatcgcctgctccccgaaaacaaccagggcgggggttttgttgtcaccgtctggacgcgtggcggtaaccagctccgttatccgggaaagtaccgggttgtggaaaaactgcccgacgtttccccgtggagtgaacactga

SEQ ID NO: 488433 - DNA, 822 bp, Shigella sonnei
atgttatcgccgcctgccctgcgggcggcgatacagggagaacgcttaatcatgaacaaaacgctgaatgcactggtttgtcgtcacgcccgtaacctgctgctggcgcagggctggccggaagagacggatgttgaccagcgaaatccgaactatccgggctggatcagcatttacgtgcggctggatgcgccccggctggcgacgttacttatcaaccgtcacggcggcgtactgccaccgctcctggcctccgccattcagagactgaccggaaccggggcggaactggtactgtccggcagtcagtggcagtcgctgccggtacttccggcagacggaacgcaggtgtctttcccgtatgccggagaatggctgaccgaagacgaaatcagggcagttcttgatgcagtgcgcgatgcggtacgcagtgtcagttgccgggtggcagaagatgcgcagcgtatcagggcggcgctgaccacaaccggtcagacgttgctgacccgccagacgcgccgctttcgcctggttgtgaaggaaagcgatcacccctgctggctcgatgaagacgacgaaaacctgcccgtggtgctcgatgccatcctgaaccggggagcacgtttttcggcggtggaaatgtatctggtcagtgagtgtgtggagcatatcctgtccagtgggctggcctgcgatgtgctgcgtataccggatgaaccgccccgccggtggtttgaccgtggtgttctgcgggaggtggtccgggaagcccgggccgaaatccgcagcatggcggatgccctggcaaaaatcaggggctga

SEQ ID NO: 488434 - DNA, 447 bp, Shigella sonnei; identical to SEQ ID NO: 17047

SEQ ID NO: 488435 - DNA, 2484 bp, Shigella sonnei
atgcagcacagcgaactgcgcggcggcgtgttgctgctggccctgctgcattcgccgctgcgttatataccgcctgctgccgcccggctgttgaccggcattaaccgtgaccgtctgcaacaggactttgtgcagtggacacaggagtcggcggaatcagtcgtgccggatgcagacggtaaaggcgcaggcacaatgacggacgcctctgacaccctgcttgcccgctatgccaaaaacatgaccgcagacgcccgtaacggcaggcttgacccggtactgtgccgcgaccacgaaatcgacctgatgatcgacattctctgccgccgccgtaaaaacaacccggtggtggtgggcgaagcgggcgtgggcaaaagcgcactgattgaagggctggcgctgcgcatcgtggcaggccaggtgccggacaagctgaaaaacaccgatatcatgacccttgacttgggcgcattgcaggccggggcgtcggtgaagggtgaattcgaaaaacgtttcaaagggctgatggcggaggtcatttcctccccggtgccggtcattctgtttatcgacgaagcacataccctgattggcgcgggcaaccagcagggcgggctggatatctccaacctgctcaaaccggcgctggcgcgcggcgagctgaaaaccatcgccgccaccacctggagcgagtacaaaaaatacttcgaaaaagatgccgccctgtcgcgccgcttccagttggtgaaggtcagcgaacccaacgctgccgaagccaccattattctgcgcggtctgtcggcggtctatgaacagtctcacggcgtgctgattgatgatgacgccttgcaggccgctgcgacattaagcgagcgttatctctccgggcgtcagttaccggacaaagcgattgatgtgctggataccgcctgcgcccgtgtggccatcaacctgtcgtcgccgccgaagcaaatctcggcgctgaccactctgagccaccagcaggaggcggaaattcgccagcttgagcgcgagcttcgcatcggactgcgtaccgacacatcacggatgaccgaggtgctggtgcagtatgatgaaacgctgacggcgctggatgaactggaagcggcctggcaccagcagcagacgctggtccgggagattatcgcgctgcgccagcagttactgggcgtggcagaggacgatgcggcgccgttgccggacgcagataccgtggaggatacgcagccagagtcagagtcagagtcagagtcagagtcagagtcagagtcagagtcagagcaggataataccggtgccgaaccggctgatgaggccgacagagaacaaccggaagagaccgctgaaacagtttccccggtacagcggctggcccagctcactgccgaactggacgccctgcataacgaccggttgctggtctccccgcacgtcgataaaaaacagattgcggcggtgattgccgaatggaccggcgtgccgctcaaccgcctgtcgcagaatgaaatgtcggtcatcaccgacctgacgaaatggctgggtgacaccatcaaaggccaggacctggcgattgccagcctgcataagcatctactgaccgcacgcgccgacctgcgtcgtccgggacgcccgctcggtgcgttcctgctggctggccccagcggtgtgggtaaaaccgaaaccgtcctgcaactggcagagctgctctacggcggtcgccagtacctgaccaccatcaatatgtccgaattccaggagaaacacaccgtctcgcggctgattggttcgcctccgggctacgttggctacggtgaaggcggcgtactgaccgaagcgattcgccagaaaccctactcggtagtactgctcgatgaagtggaaaaagcgcacccggatgtgctcaacctgttctaccaggcgttcgataagggcgaaatggcagacggtgaaggccgcctgattgactgcaaaaatatcgtcttcttcctgacgtccaacctcggctaccaggtaatagtcgagcatgccgatgacccggaaaccatgcaggaagtacagtatccggtgctggccgacttcttcaaacctgccctgctggcgcgtatggaagtggtgccgtatctgccgctgtcgaaagagacgctcgccaccattatcgccggaaaactggcccgtctggataacgtgctgcgcagtcgctttggtgtagaagtggtcattgaaccggaagtgacggacgaaatcatgagccgcgtcacccgcgcggaaaacggcgcgaggatgctggaatcggtcatcgatggcgacatgctaccgccgctctcgctgctgctgttgcagaaaatggcggctaacacggcgattgcccggattcggttgtcggcagtggacggcgcatttacggcagacgtggaagatgctcagaacgacgagtccgtcacaaaggatgaaacggttttatga

SEQ ID NO: 488436 - DNA, 657 bp, Shigella sonnei; identical to SEQ ID NO: 463703

SEQ ID NO: 488437 - DNA, 657 bp, Shigella sonnei; identical to SEQ ID NO: 463703

SEQ ID NO: 488438 - DNA, 2214 bp, Shigella sonnei; identical to SEQ ID NO: 485713

SEQ ID NO: 488439 - DNA, 315 bp, Shigella sonnei; identical to SEQ ID NO: 485391

SEQ ID NO: 488440 - DNA, 267 bp, Shigella sonnei; identical to SEQ ID NO: 11114

SEQ ID NO: 488441 - DNA, 654 bp, Shigella sonnei; identical to SEQ ID NO: 485795

SEQ ID NO: 488442 - DNA, 897 bp, Shigella sonnei; identical to SEQ ID NO: 486979

SEQ ID NO: 488443 - DNA, 276 bp, Shigella sonnei; identical to SEQ ID NO: 484087

SEQ ID NO: 488444 - DNA, 387 bp, Shigella sonnei; identical to SEQ ID NO: 485815

SEQ ID NO: 488445 - DNA, 276 bp, Shigella sonnei; identical to SEQ ID NO: 485876

SEQ ID NO: 488446 - DNA, 267 bp, Shigella sonnei; identical to SEQ ID NO: 11114

SEQ ID NO: 488447 - DNA, 498 bp, Shigella sonnei; identical to SEQ ID NO: 488429

SEQ ID NO: 488448 - DNA, 279 bp, Shigella sonnei; identical to SEQ ID NO: 11573

SEQ ID NO: 488449 - DNA, 1071 bp, Shigella sonnei
gtgaaagggggtgaagggcatcagagcgttttcccaccggatttgactgcggtgtttgatcacggcaaacgggccgtctccgctttccccatcgctaccggcacttactacaaagtggactactccgctggagtggacatttctcgctataaaaatgtgcccgttccaacctcatatatggccgaaaaatcgcagtacgattttgtcggcgcgtggtgtcacgatgaagatggcggtttgctgcacgttgccaaccaccatattgcgccaggtaaaaaacagtggagttggggacacagtgaatttggccaggcgtgggataagagtctgaccgacaataacggcccgtatatcgaactgatgaccggtatttttgccgataaccagcccgattttacctggcttgatgcttacgaagagaagcgttttgagcagtatttcctgccttatcattctctgggcatggtgcaaaatgcctcccgcgatgcggtgataaaactccagcgtagtgagcaggggattgagtgggggctgtatgccatctctccgttgaacggataccgcctggcgatccacgaaatcggcaaatgcaacgcgttacttgatgatgccgtggcactgatgcctgcgaccgccatccagggcgtgttgcacggtatcaatcctgataggctgaccattgagctttccgatgccgacggcaatattgtactgagttatcaggaacatcagccgcaagcgttgccgttaccggacgtcgccaaagcgccactggcagcacaagacattaccagtacagatgaagcctggtttatcggtcagcatctggagcaatatcatcacgccagccgttcaccgttcgattactacctgcgcggcgtggcgctggacccgctggattatcgctgtaacctggcgctggcgatgctggaatataaccgcgcagatttcccgcaagcgtatagcgcggcgatttttttgataccgatttgcatttcatttgataccgctgaaaaacgccgatacgcaacttatttgatactaaatcggcgcttttcttttgagttttag

SEQ ID NO: 488450 - DNA, 585 bp, Shigella sonnei
atgaacatgaaaaacagttcttttctcgacgaaggaaaagaaccagtgatcgaacggatttttcgtcttgcagagcgttacaaatcgagaagtgaggcggctagagcatggggaataaacgttcagacattgcagaactactacaaaaggagaaacaatcagccgccaccacaaccaagaaagcaccatctccagaacattgcagaaagagaacatgtatctatggagtggctggtcaatggttatggtgatgagccaagcatgaaaaaagaaccaattgaacaaacaaaaagaacaaaaaaacaaagaattgatgatagtgattccatcatcatgagggcgtgggactcgctaacttcatctgaacaagagattttgtccaacttattgatcagaaaaggggccgaactactaaccgttttgcttgatacagatattcaaaaactgcactcattgagcggagtcaaaagagcactagcattgagtctacaagagttacccgatgatactgtaagagagatttatgaagaatgtgaagctaaggttaatcatttaaatgtaacccagaaaaaggctggtgcgtaa

SEQ ID NO: 488451 - DNA, 360 bp, Shigella sonnei; identical to SEQ ID NO: 372517

SEQ ID NO: 488452 - DNA, 222 bp, Shigella sonnei; identical to SEQ ID NO: 6179

SEQ ID NO: 488453 - DNA, 849 bp, Shigella sonnei; identical to SEQ ID NO: 482262

SEQ ID NO: 488454 - DNA, 123 bp, Shigella sonnei
atgattgctcagggaacgcctgcggaaattatgcgcggcgaaaccctcgaaatgatttatggcatcccgatgggtattttgccgcatccggcgggtgctgcacctgtgagttttgtttattga

SEQ ID NO: 488455 - DNA, 2190 bp, Shigella sonnei
atggcgcgttccaaaactgctcagccaaaacactcactgcgtaaaatcgcagttgtagtagccacagcggttagcggcatgtctgtttatgcacaggcagcggttgaaccgaaagaagacactatcaccgttaccgctgcacctgcgccgcaagaaagcgcatgggggcctgctgcaactattgcggcgaagcactctgctactgcgactaaaacggatacaccaattgaaaaaacgccgcagtctatttcggttgtgacaaatgaagagatgcagatgcgtcaatttcagtctgtaaaagaagcattaggttatacacctggcgttacggttagcagtcgtggtgcttctaatacatatgattttgttatcattcgtggtttctcatctgttggtctgaatcaaaataattaccttgatggactaaaacttcagggcaacttttataacgatgctgtgattgatccttacatgctcgagagggttgaactgatgcgtgggccgacgtctgttctctatggaaaaagtaatcctggtgggattatttctatggtgagtaagcgtccgaccactgaacccctgaaagaaattcagtttaaaatggggacggataatctgtttcagaccggattcgatttcagtgatgcactggatgataacggtgagttctcttaccgtttgacgggcctcgctcgctcaacaaacgaacagcagaaaaactctgaatctcagcgttataccattgctccatcattctcatggcgtccagacgacaaaaccaattttactttcctgtcctatttccagaatgaaccagaaacgggttattacggttggttgccgaaagaggggaccgttgagccattgcctaatggtaagcgtctaccgactgacttcaatgaaggtgcatcgaataatacatactcccgtaaccagaaaatggtgggatatagttttgaacatggttttaatgacaccttcaccgtgcgtcagaatctgcgtttcagtgaaatgaaaacctcacagaaaagtgtttatggcacagggattgctggtgatggtcataccctaaaccgcgggacagtggtggataatgagcgtctacaaaactttagcgttgatacccaacttgaaagtaagtttgctacaggtgacgtcgagcatactttgctgacaggggtagacttcatgcggatgcgtaatgatatcaatgccagctttggatccgcaccatccatcgatctttataacaaatatcaccctgaatactttgcatttggtagcgcagagccataccagatgaatgaaagcaaacaaacaggtatttatgttcaggatcaggcggaatggaataaatgggtattcactctggggggacgctacgattggtctaagcaagcgaccactgttcgtgaaaactcttatacgccgactgaaggttatattgagcgcaatgatcatcagttcacctggcgcggtggtgtaaattacttattcgataatggtatttcaccttactttagctatagccagtcctttgaaccgagtgctttcgatctgtggagcaacccgcgcatttcctataagccatcgaaaggtgaacagtatgaagctggcgtaaaatatgttccgaatgatatgccggtcgttgttacgggcgcagtctatcaattgacgaaaacaaataacctgacagcagacccaacaaacccattagcgcaagtcccagcaggtgagattcgcgctcgtggtgtggaacttgaagcaaaagcggcgttaaatgccaatattaacttgacggcttcttatacctacaccgatgcggaatacaccaaagacaccaatctcaaaggtaaaactccagaacaagtaccggagcatatggcatctctctggggggattataccttcaatgaagggccgctttctggtttaacattgggaacaggtggtcgttttattggttccagctatggtgatccggcaaacacttttaaagtgggtagcacagctgtaatggatgctgttgtaaaatatgatctggcacgctttggtatggcgggatccagccttgctgtgaacgtcaacaatttgctcgatcgtgagtatgttgccagttgcttccagacttatggctgcttctggggcgcagaacgtcaggtcgttgcaaccgcaaccttccgtttctaa

SEQ ID NO: 488456 - DNA, 612 bp, Shigella sonnei; identical to SEQ ID NO: 15986

SEQ ID NO: 488457 - DNA, 375 bp, Shigella sonnei
atgcaggaaaaaccagcgaagcgtctggctatagagggacttccagggaattatttcaacgccggtgtagtatatctgcagcttgaagcatgggcgaaaaatgattttatgaataaagccattgctatgctggcaagtgacccgcagcacacgaagtataaatgccttgatcaggatattttaaatattctgttctttggtcattgtatttttattagcggcgattatgattgcttttatggcatcgattatgagttaaaaaataaaagcgatgaagattataaaaagaccattaccgatgatactaagctgattcattatgttggcgtaacgaagccctggaacgactggacgaattatccccatcaaaattaa

SEQ ID NO: 488458 - DNA, 363 bp, Shigella sonnei; identical to SEQ ID NO: 488257

SEQ ID NO: 488459 - DNA, 876 bp, Shigella sonnei; identical to SEQ ID NO: 8102

SEQ ID NO: 488460 - DNA, 201 bp, Shigella sonnei; identical to SEQ ID NO: 5005

SEQ ID NO: 488461 - DNA, 561 bp, Shigella sonnei; identical to SEQ ID NO: 15275

SEQ ID NO: 488462 - DNA, 2967 bp, Shigella sonnei; identical to SEQ ID NO: 59353

SEQ ID NO: 488463 - DNA, 378 bp, Shigella sonnei; identical to SEQ ID NO: 16790

SEQ ID NO: 488464 - DNA, 660 bp, Shigella sonnei; identical to SEQ ID NO: 52324

SEQ ID NO: 488465 - DNA, 258 bp, Shigella sonnei; identical to SEQ ID NO: 5061

SEQ ID NO: 488466 - DNA, 1845 bp, Shigella sonnei
atgagcaaattcacagttgatagttttatcgttgaacttagtttcagtgaaaacgttattaagggcttgcaaagagttgaaaaggcagctttgcagtcagcacaaagaattgaacgcaatttgaatagagcgtttaaggtcgataccaagcaacttgacagcaatctgacaagttctttagggcagcttgaaaggaagtttaataagacctttgacaagattgagcagagagcaagaagcacaaaagcatttcagtttgccaccagatttaatgacactgttaatcctccaaaacaatcaaggcaaccacgaattagcggaaacagagcaatcacagcagcgcatagcgtgaatatgtctaagcttggtgatattaatccgctgatggctaaaatgtttaaagcacagtattacagcttaagcggtaaggctggtaatattggaagtgaaaagtttaacgctgaacttgcaaaattaaatcaatctcttcgtgaaacgttgaataaactcaggtcacagacaaagaccgccagcattaacaatacaagcgacgcatttaataatcttgcaagcaatgcgattaaattatctggtgcattttactctgtgatgggtgctcttaacgcttacaaggccattatgaatgcaggtcttaaacgagattccgcacagagagccgctaagtttgtacttggtgataaagcatctgaagctgaggtatttattcgaaatttagcagacaagacaggtcttaatatctctgaagggctatcaagctacgctaagtttgcagcaggtgctcagggttctatgtcacaggaacagacacaggagctatttggtaatgcaacggctatgagtcgcttaatggggctttctaacgatgagctaaacggcattttgagagcatttgagcagatggcgagcaagggcaagattcaggctgaggaattacgtgggcagttaggtgaccgtatggctggtgcatttaagctattcgctgaagcattgggtatgactgctacagagcttgatgcagccatgaaaaacgggaaggtactttccgctgatactctccctaaagtcgctaaacagatgggcttgatgattgataaagcgggtggctgggctgaagtcgctaagagcactcagacagctttaggtaagttagcaaacaattgggatgatacgatggtgaaaatcttctcaggttcacaggatgagctaaacggcttcttatccagcctgagtaacctgcttagtgaaatggggatgagttcttctatcgctggtgatgctatcggtggacttatcgacatgcttaaagctggtgtagatgatattcgcgtattcaataacaccattgaaggctggattttacagactaagaagttctattacagccttgatgacactaaacgaaaactacttgatgaagtcggtgatggttttatcaacttcgtcaaaggtcttgctatagcgttatctgcaaagacgctattcagtgctactacaggggttatgaacctgacaagagcaatcacaacgttaggtacaagagctaatcaggtggctggtcaggtagctactggtaaaggtggtggaaaactgaaaggtgtagctggtggtgtaggtagtgctcttgcaattggttatgctgatgacggttatgaaacagcgttagcattagcttcaatgattccacaaatcagaggcgtcactcttggtttatatgcattgaagaaagcactggattttatgaatcaggaagtagtcaaaaacgctaatatgcatctagactggccccctgaatctccagacaaccagtatcacttaaataagtga

SEQ ID NO: 488467 - DNA, 918 bp, Shigella sonnei; identical to SEQ ID NO: 22868

SEQ ID NO: 488468 - DNA, 129 bp, Shigella sonnei; identical to SEQ ID NO: 463439

SEQ ID NO: 488469 - DNA, 603 bp, Shigella sonnei; identical to SEQ ID NO: 7227

SEQ ID NO: 488470 - DNA, 207 bp, Shigella sonnei; identical to SEQ ID NO: 7226

SEQ ID NO: 488471 - DNA, 267 bp, Shigella sonnei; identical to SEQ ID NO: 463441

SEQ ID NO: 488472 - DNA, 201 bp, Shigella sonnei; identical to SEQ ID NO: 7224

SEQ ID NO: 488473 - DNA, 570 bp, Shigella sonnei; identical to SEQ ID NO: 7292

SEQ ID NO: 488474 - DNA, 402 bp, Shigella sonnei; identical to SEQ ID NO: 16016

SEQ ID NO: 488475 - DNA, 435 bp, Shigella sonnei; identical to SEQ ID NO: 4023

SEQ ID NO: 488476 - DNA, 237 bp, Shigella sonnei; identical to SEQ ID NO: 16015

SEQ ID NO: 488477 - DNA, 888 bp, Shigella sonnei; identical to SEQ ID NO: 10348

SEQ ID NO: 488478 - DNA, 381 bp, Shigella sonnei; identical to SEQ ID NO: 458903

SEQ ID NO: 488479 - DNA, 216 bp, Shigella sonnei; identical to SEQ ID NO: 10294

SEQ ID NO: 488480 - DNA, 267 bp, Shigella sonnei; identical to SEQ ID NO: 11114

SEQ ID NO: 488481 - DNA, 483 bp, Shigella sonnei
atgttgaatttactgttccatttaaaaatgaatggacgacagttctgttggttgattgtggggtctggttcacctgaactgcaggaacatttacagtatcagattgacagtatgggcatgcatgatgatgtttttattgctgacaatgtttttcctgccgcccccgtatatcgggttgccagtctggtggttctgccttcagaaaacgaatcttttggtatggtgctggcagaagcatcggcattttctgtgcctgtagtggccactcagattggtggaatccctgaggttattcagaacaaccagaccgggacattgttaccagcaagtaataagcacgcatggatgtgcgccctgaatgatttttttaatgaccctgggcgtttttatcagatggctcgcctggcaaaacaggatatagaagagcggtttgatattaataaaactgcgttaaaaatactcacattagcgaagcaaaagtaa

SEQ ID NO: 488482 - DNA, 951 bp, Shigella sonnei; identical to SEQ ID NO: 484281

SEQ ID NO: 488483 - DNA, 1359 bp, Shigella sonnei; identical to SEQ ID NO: 5051

SEQ ID NO: 488484 - DNA, 537 bp, Shigella sonnei
gtgtggttcgcttacagcccggacagaaaaagcatccatccgcagactcatcttgcttgcttcagcggtgtgctgcaagcggatgcgtacgccgggttcaacgagctgtatcgcaatggtgggataacggaagctgcctgctgggctcatgcccgccgaaagatccacgatgtgcacgtccgcatcccgtcagcactgacggaagaagccctggagcagatcggtcagttgtacgccatagaggcggatataaggggaatgccggcagagcagcggcttgctgaacgtcagcgaaaaacgaaaccgctgttgaaatccctggaaagctggttgcgtgaaaagatgaagaccctgttcttcggctctggccatggtggtgagcggggagcgctactgtacagcctgatcgggacgtgcaaactgaatgacgtggatccagaaagctaccttcgccatgtgcttggcgtcatagcagactggccggtcaaccgggtcagcgaactgcttccgtggcgcatagcactgccagctgaataa

SEQ ID NO: 488485 - DNA, 381 bp, Shigella sonnei; identical to SEQ ID NO: 458903

SEQ ID NO: 488486 - DNA, 381 bp, Shigella sonnei; identical to SEQ ID NO: 458903

SEQ ID NO: 488487 - DNA, 381 bp, Shigella sonnei; identical to SEQ ID NO: 458903

SEQ ID NO: 488488 - DNA, 267 bp, Shigella sonnei; identical to SEQ ID NO: 11114

SEQ ID NO: 488489 - DNA, 297 bp, Shigella sonnei; identical to SEQ ID NO: 463478

SEQ ID NO: 488490 - DNA, 381 bp, Shigella sonnei; identical to SEQ ID NO: 458903

SEQ ID NO: 488491 - DNA, 381 bp, Shigella sonnei; identical to SEQ ID NO: 458903

SEQ ID NO: 488492 - DNA, 570 bp, Shigella sonnei; identical to SEQ ID NO: 485859

SEQ ID NO: 488493 - DNA, 381 bp, Shigella sonnei; identical to SEQ ID NO: 458903

SEQ ID NO: 488494 - DNA, 477 bp, Shigella sonnei; identical to SEQ ID NO: 485853

SEQ ID NO: 488495 - DNA, 381 bp, Shigella sonnei; identical to SEQ ID NO: 458903

SEQ ID NO: 488496 - DNA, 267 bp, Shigella sonnei; identical to SEQ ID NO: 11114

SEQ ID NO: 488497 - DNA, 381 bp, Shigella sonnei; identical to SEQ ID NO: 458903

SEQ ID NO: 488498 - DNA, 387 bp, Shigella sonnei
gtggagaaagttattgaaggggcttacgaggtggtgggggtttttgaccggattgaggaaaagcgtgatgccatgcagtcgctgattctgccgccaccggcacgccaggcgctggcacaggcggcactgacttaccgttatggtgacgaacatcggcccgtcaccaccgccgacattctgacgccacgacgccgggaggattacggtaaggacctgtggagtgcttatcagaccattcaggagaatatgctgaaaggcgggatttccggtcgcagtgccagaggaaaacgtatccatacccgtgccattcacagcatcgacaccgacattaagctcaaccgcgcattgtgggtgatggctgaaacgctgctggagagtatgcgctga

SEQ ID NO: 488499 - DNA, 348 bp, Shigella sonnei; identical to SEQ ID NO: 485869

SEQ ID NO: 488500 - DNA, 267 bp, Shigella sonnei; identical to SEQ ID NO: 11114

SEQ ID NO: 488501 - DNA, 210 bp, Shigella sonnei
atgacggatggctggccgctgtatgaatcacgcctgaagggaaagctgcacgttatcagcaagcgttacactcagcgcattgagcggcataacctgaatctgaggcagcacctggcacggctgggacggaagtcgctgtcgttctcaaaatcggtggagctgcatgacaaagtcatcgggcattatctgaacataaaacactatcaataa

SEQ ID NO: 488502 - DNA, 210 bp, Shigella sonnei; identical to SEQ ID NO: 9340

SEQ ID NO: 488503 - DNA, 219 bp, Shigella sonnei; identical to SEQ ID NO: 21647

SEQ ID NO: 488504 - DNA, 381 bp, Shigella sonnei; identical to SEQ ID NO: 21648

SEQ ID NO: 488505 - DNA, 591 bp, Shigella sonnei
gtgggttttcacctggtcttccaccaccagagtcagcgtcaggatgaacgggcaggaaatggacatttccgggttcagcagattgctgtagttgtcggccatgttccacaggaaggcgatttccgggttacgggccagatggaaattcaggatgcgggccgtgctgttcctgccgttctcacgcaggcccagcgtcaggtaatcagcccggacattcaggtcaaaactgtcctccacacactgataattcagatcagaatacgggtccagctgacgtcttttcgggtacagagagtccggattatggttaatcatctccccgacaatctcgatgaaagcctgtgcatccactgtctgtgtggtgatttttgcgccgtgaaaagaggcacggatgatttttaccagattttccatttccagaatgtcagcccggctttttttcttcgagggagaacagtacgagataaacacccggtaatggcgcagggtcaggggcagattcatcccctccggcagcgggaactgtgtcgctgccgctttcatataataggcacgggtaatggcgttaaaccgttcagcctgttcacctga

SEQ ID NO: 488506 - DNA, 321 bp, Shigella sonnei
atggatacacaacggaataccgcgcggcagtttggtgcgcagcatgtgatcgagtgcctccacaatggacttattcgccccattgatgggaatggcttccagcataaagcccatcgtggtgtcattcatgaacagaccggattcctggttgtaatcacggtacggcagcagacggctgaactgcgggaagctcatttcgcccagaacttcattggcctttgcggattcgtcaggcagtttcagtgctgtgacgagggagttaaccgcctgagtgacggcctcaagtgggttattcacatgaattccttagttgaaaaataa

SEQ ID NO: 488507 - DNA, 378 bp, Shigella sonnei; identical to SEQ ID NO: 476066

SEQ ID NO: 488508 - DNA, 378 bp, Shigella sonnei; identical to SEQ ID NO: 476066

SEQ ID NO: 488509 - DNA, 2826 bp, Shigella sonnei; identical to SEQ ID NO: 485484

SEQ ID NO: 488510 - DNA, 2220 bp, Shigella sonnei
atgacttcggtgttcaatattgccaggatgtcaccgcagaaaaggatggcggttctggttgcctttgtccttgcatgggaaacgctggcgctggatgatgcattggacgttctggacgccatgctggccgttatcatccgtgacgccagaaagattgggcagaaaaaacggctccgctcgctgaaggatctggataaatctgcattggcgctcgccagcgcatgttcgtacctgctgaaagaagaaacaccggacgaatcgattcgtgctgaggtgttcagctacatcccaaggcaaaagctggctgaaatcatcacgcttgtccgtgaaattgcccggccctcagacgataattttcatgaagaaatggtggagcagtacgggcgcgttcgtcgtttcctgccccatctgctgaataccgttaaattttcatccgcacctgccggggttaccactctgaatgcctgtgactacctcagccgggagttcagctcacggcggcagttttttgacgacgcaccaacggaaattatcagtcggtcatggaaacggctggtgattaacaaggaaaaacatatcacccgcaggggatacacgctctgctttctcagtaaactgcaggatagtctgaggcggagggatgtctacgttaccggcagtaaccggtggggagatcctcgtgcaagattactacagggtgctgactggcaggcaaaccggattaaggtttatcgttctttggggcacccgacagacccgcaggaagcaataaaatctctgggtcatcagcttgatagtcgttacagacaggttgctgcacgtctttgcgaaaatgaggctgtcgaactcgatgtttctggcccgaagccccggttgacaatttctcccctcgccagtcttgatgagccggacagtctgaaacgactgagcaaaatgatcagtgatctactccctccggtggatttaacggagttgctgctcgaaattaacgcccataccggatttgctgatgagtttttccatgctagtgaagccagtgccagagttgatgatctgcccgtcagcatcagcgccgtgctgatggctgaagcctgcaatatcggtctggaaccactgatcagatcaaatgttcctgcactgacccgacaccggctgaactggacaaaagcgaactatctgcgggctgaaactatcaccagcgctaatgccagactggttgattttcaggcaacgctgccactggcacagatatggggtggaggagaagtggcatctgcagatggaatgcgctttgttacgccagtcagaacaatcaatgccggaccgaaccgcaaatactttggtaataacagagggatcacctggtacaactttgtgtccgatcagtattccggctttcatggcatcgttataccggggacgctgagggactctatctttgtgctggaaggtcttctggaacaggagaccgggctgaatccaaccgaaattatgaccgatacagcaggtgccagcgaacttgtctttggccttttctggctgctgggataccagttttctccacgcctggctgatgccggtgcttcggttttctggcgaatggaccatgatgccgactatggcgtgctgaatgatattgccagagggcaatcagatccccgaaaaatagtccttcagtgggacgaaatgatccggaccgctggctccctgaagctgggcaaagtacaggtttcagtgctggtccgttcattgctgaaaagtgaacgtccttccggactgactcaggcaatcattgaagtggggcgcatcaacaaaacgctgtatctgcttaattatattgatgatgaagattaccgccggcgcattctgacccagcttaatcggggagaaagtcgccatgccgttgccagagccatctgtcacggtcaaaaaggtgagataagaaaacgatataccgacggtcaggaagatcaactgggcacactggggctggtcactaacgccgtcgtgttatggaacactatttatatgcaggcagccctggatcatctccgggcgcagggtgaaacactgaatgatgaagatatcgcacgcctctccccgctttgccacggacatatcaatatgctcggccattattccttcacgctggcagaactggtgaccaaaggacatctgagaccattaaaagaggcgtcagaggcagaaaacgttgcttaa

SEQ ID NO: 488511 - DNA, 195 bp, Shigella sonnei; identical to SEQ ID NO: 485310

SEQ ID NO: 488512 - DNA, 570 bp, Shigella sonnei
atgcagtcggtactccgtccgccgtcccgccgcatccgtctgcgccttcagcctccccgcctcatcatactcgctgcgggtgatgctcccgtcggcatgctccttcttcaccacccgcttcaggccaccctcgccttccgtgtacagcacctcccgccggttcaggctgtccgtgatgattacccggctctctccgtactcaaagcggtagtccagcccctccgggttgacctgctccgtcacccgaccggtatcatcataccggtagcggctctccggcctccccgcataatggtgcgccaccatccgcccggcgtgctccgcatcataagtaaacccgcgaacctgcgtcccgctgcggtcatacaccgcccgcagttcaccaccggccgtgtacgtgtagcgcgccagcggcgcagtcggctgttcatccgggtatgccgggtcgtgtgtcagccataccgcctccagccggataccgttatcggcaccgtactctgtaccggcgggcagcgtgtcggggaaaacctgagaagaggaaacagaacggggactggccggggaagataa

SEQ ID NO: 488513 - DNA, 597 bp, Shigella sonnei
atggcagcccggtcacgctcctgcccggcaatttccctgacagccagctctgttttgccgtccggcaggtcaggtttgttctctgccattttacggacaatttcatctgcgcgacgttccgtttcacggcggatggcctcttcagcctgccgctgtgccagtacctctgccgtgaccggttcgccatttccggctcccggctggacgctgttgtccgggatatccccccacacgcggccatcggtgatggcaccgggattccacggacggccttcaccggcaatgcttaccaccacaccactgtcaggattatcacgggcaatccggacgccatcctgcatattatcagccagcaggctttctccgttacggctgccctgcagggccacgaactgcgcatccccgctgccttttacccgaccttcaccgctgaatccccgcagcccgtttccgtcatccgtggtcagcgggttcagccagataccggcggacttgccgttacggtcaaacgccggcagtgccacatacggttgcggatatttacgtcccggagcaataaaccgtgcaggactgtctcccccggccagccccgcctga

SEQ ID NO: 488514 - DNA, 303 bp, Shigella sonnei; identical to SEQ ID NO: 487011

SEQ ID NO: 488515 - DNA, 597 bp, Shigella sonnei; identical to SEQ ID NO: 487306

SEQ ID NO: 488516 - DNA, 348 bp, Shigella sonnei; identical to SEQ ID NO: 485869

SEQ ID NO: 488517 - DNA, 360 bp, Shigella sonnei; identical to SEQ ID NO: 372517

SEQ ID NO: 488518 - DNA, 267 bp, Shigella sonnei; identical to SEQ ID NO: 11114

SEQ ID NO: 488519 - DNA, 378 bp, Shigella sonnei; identical to SEQ ID NO: 486141

SEQ ID NO: 488520 - DNA, 246 bp, Shigella sonnei; identical to SEQ ID NO: 401911

SEQ ID NO: 488521 - DNA, 252 bp, Shigella sonnei
atggctggtttaaggaataacaacaacacacagaatgcacagtgggctgattatgtgggtgacattcttcggggggctcagccgataaaccagctagtacctcagcacccttatcttaacgacgtcccactcattgatgagttaaggcatcagaacactcatcatgttattctcttgacacttgatgttgcaaaaaaaaaaaaaaaaaaaaaaaaaaaaaaaaaaaaaaaaaaaaaatactcagcccaataa

SEQ ID NO: 488522 - DNA, 330 bp, Shigella sonnei; identical to SEQ ID NO: 485224

SEQ ID NO: 488523 - DNA, 1215 bp, Shigella sonnei; identical to SEQ ID NO: 485225

SEQ ID NO: 488524 - DNA, 750 bp, Shigella sonnei; identical to SEQ ID NO: 485661

SEQ ID NO: 488525 - DNA, 735 bp, Shigella sonnei
gtggcactacctttcgctgctgacgcttgtctggtcgcctcatcttttgaagcagacgcagatgatgccgatgacgccgctgaactggctgacgatgcggctgctgccttagaggaagcagcattgtctgctgaagtctttgcatttgtttcagaggtttttgctgcagaagcagacctcgctgctgcagtggcttgctcagtggctttgccagccttcgttgtggctgttgaagcggatgatgcggcgctttctgccgattttccggcggcggtggcactggctgaggcctgcccggctcttgttgacgcggcactggcagataatgcagccgctgtttttgaacctgccgcagctgaggcgctctgtcccgctgctgtttcagaagacttagcgttcgtctcggacgtttttgccgccttcgcggaatttcctgccgccgttgccgaggaagctgcactactggcacttgatgatgcattcgtttctgaagatttcgctgcctcttttgaggccgccgcaccccgtgccgaggtggcagcttctgacgccttcgtggtcgctgtggatgcagaagtggctgccgatttttgtgatgctgcggcattcgtttctgacgttttcgcggcactggcgctggtagctgccgcgctttttgatgactctgcagcagcactttttgctgcttcacgggcctttgtcgatgccgttcctgcgctggaagacgctgactga

SEQ ID NO: 488526 - DNA, 360 bp, Shigella sonnei; identical to SEQ ID NO: 372517

SEQ ID NO: 488527 - DNA, 303 bp, Shigella sonnei; identical to SEQ ID NO: 458125

SEQ ID NO: 488528 - DNA, 1020 bp, Shigella sonnei
atgaaatatacaccggttggcgttgatatcgcaaaacatctgattcaggttcacttcatcgacgagcacacaggtgaagtgattgataagcaactgcgtcgtcaggattttctgatgttcttctgtaaccgggaaccctgcctgattggtatggaggcttgtggaggctctcaacactgggcacgggaactgacaaagcaggggcataaagtccggttgttgcaggcccgcttcgttaaagcgttcgtcatgggtaataaaaacgatgttatggatgcccgggctatctggatggcagtacaacagcctggcaaggaaatcgctgtcaaaacagaagaacagcagtcggtactggttctgcatcgttcccgcagacaactggtgaagttccgcaccatgcagattaactccctgcacggtacgctcctggaatttggtgaaacaattcacaaaggtcgggcagcaatggagcgggagttccctgaagcactggagcggatgaaagagagactgccaccgtatctcattactgtgctggaaaaccagtacaaccggctgaatgagctggactcgctgatagaggatattgaaaaacagcttaccagcgtggcgaaacagaatgaaacctgtaagcggttgctggatattcccggcgttgggccacttattgcgacggcagcggtggccaccatgggggaagcatcagcgtttaaatcagggcgagagttcgcggcttatgttggtctggtgcccaaacagactggctcaggagggaaaatccgcctgctggggataagcaaacgtggtgatacatatctgcgagccttgtttattcatggcgcaagggcggcagcattactgaccaaagaaccaggtccgtggataaccgaactgaaaaaacgtcgtccagccagcgtggcaatcgtcgccatggcaaacaaactggcacgaacagtatgggcgatagcagctcatggaagtaaatacgacaagaatcatgtcagtatcagaccatattaa

SEQ ID NO: 488529 - DNA, 687 bp, Shigella sonnei
atgtgtgcccgcatcactgaagctgaccagaaccggccagatggcatcgaggaggcgttgtttttccggccggaaagcatatttgcgaccgacgaacgtccgtttctgcacataaaaaggatgccgcgacatgcgcatgcgcaggctatgctcgccggtcaccgggtcctttttcaccagacggtgataggcgtgcccgagctgcccgctcagcgccttatagcgcgcaggacgataccaggacggattttcacatttgggtttggtggagtgctcgccacgacggcgcttcgtgcgcttcctttctggctcaaccaggaaagaggtagcccttcccgcctcatattcttcccagaaacggatttgctcttcagccggaagctgactccagtgtttttgaggggtgtatctttcagccacaccttcctgcacttatgttgcgcagaaagagtgagcacagaaagaagtcttgaacttttccgggcatataactatactccccgcatagagcaacagcttctatgcagtttcttgttagccccggtaatctttctgtactcgccaaagttagagaagattatcggggttttcgcttttctggctcctgtaaacccacatcagaagccagttccctgccaccttacggcgtggccaaccacaaaattccttaaacgatcagtaatctag

SEQ ID NO: 488530 - DNA, 633 bp, Shigella sonnei
atggggcgctggcttgctggcagactcatgaaagagctggggctggtcagctgtcagcagccgactcaccggtataaacgtggtggtcatgaacatgttgctatccctaactaccttgaacggcagttcgccgtgaccgagccaaatcaggtgtggtgcggtgatgtgacctatatctggacgggtaagcgctgggcgtacctcgccgttgttctcgacctgttcgcaagaaaaccagtgggctgggccatgtcgttctcgccggacagcaggctcaccatgaaagcgctggaaatggcatgggaaacccgtggtaagcccgtcggggtgatgttccacagcgatcaaggcagtcattatacgagcaggcagttccggcagttactgtggagataccggatcaggcagagtatgagtcggcgtggaaactgctgggataacagcccaatggagcgcttcttcaggagtctgaagaacgaatgggtgccggcgacgggctatgtaagcttcagcgatgcagctcacgcaataacggactatatcgttggatattacagcgcactaagaccgcacgaatataatggtgggttaccaccaaacgaatcggaaaatcgatactggaaaaaactctaa

SEQ ID NO: 488531 - DNA, 651 bp, Shigella sonnei; identical to SEQ ID NO: 8509

SEQ ID NO: 488532 - DNA, 261 bp, Shigella sonnei
atgtttatagttctgaatactatggtgttttacacgttcattctggttattatacgtagaaaagaatttatcgggcaacgccgagatgacgcggccccgttaaaccgtgtagtggtagatgatgagatcagatacagggatcaactgacggtgagcgcagtccccacattttatccggggcttactgcatattcccaacagccattcgttagccaggtagacgaataccctgatttgccgctggttttgctttcccattga

SEQ ID NO: 488533 - DNA, 849 bp, Shigella sonnei; identical to SEQ ID NO: 482262

SEQ ID NO: 488534 - DNA, 204 bp, Shigella sonnei
atgagcagaaaaacccaacgttactctaaagagttcaaagccgaagctgtcagaacggttcctgaaaatcaactttcgatcagtgaaggcgcttcccgattatctcttcctgaaggcactttaggacaatgggttaccgccgccagaaaagggctcggtactcctggttcccgcacggtggctgaactggatgaggtagcctga

SEQ ID NO: 488535 - DNA, 375 bp, Shigella sonnei; identical to SEQ ID NO: 13405

SEQ ID NO: 488536 - DNA, 303 bp, Shigella sonnei; identical to SEQ ID NO: 458125

SEQ ID NO: 488537 - DNA, 363 bp, Shigella sonnei; identical to SEQ ID NO: 488257

SEQ ID NO: 488538 - DNA, 216 bp, Shigella sonnei; identical to SEQ ID NO: 5123

SEQ ID NO: 488539 - DNA, 375 bp, Shigella sonnei; identical to SEQ ID NO: 13405

SEQ ID NO: 488540 - DNA, 375 bp, Shigella sonnei; identical to SEQ ID NO: 13405

SEQ ID NO: 488541 - DNA, 378 bp, Shigella sonnei
atggacgaacagtggggctatgtcggggctaaatcgcgccagcgctggctgttttacgcgtatgacaggctccggaagacggttgttgcgcacgtattcggtgaacgcactctggccacactggagcgtcttctaagcctgctgtcggcctttgaggtcgtggtatggatgacggatggctggccgctgtatgaatcccgcctgaagggaaagctgcacgtaatcagcaagcgttacactcagcgaattgagcggcataacctgaatctgagacaacatctggcaaggctgggacggaagtcactgtcgttctcaaaatcggtggagctgcatgacaaggtcatcgggcattatctgaacataaaacactatcagtaa

SEQ ID NO: 488542 - DNA, 267 bp, Shigella sonnei; identical to SEQ ID NO: 11114

SEQ ID NO: 488543 - DNA, 681 bp, Shigella sonnei; identical to SEQ ID NO: 485480

SEQ ID NO: 488544 - DNA, 222 bp, Shigella sonnei; identical to SEQ ID NO: 485618

SEQ ID NO: 488545 - DNA, 315 bp, Shigella sonnei
atgggagttgagcagaatgatttcagggacatgttctccgtttatctgtccggcccgccgcagacgcagcatatgttttgtgtattcccggcgacccgggtcacgcacacgtgtctggcaggcgaagaatggctgaaagccttcccgctgcaggctttccagtacggtgatggtgggagtgtacgcatagcgtttactgcgggaagtatgccggtcttcaccgaaaatactgggaacatagtgcatcagttcttcgtgtgtcagcggacggtcacggcgtatctggtttgcagcataaccaaaacgactggctag

SEQ ID NO: 488546 - DNA, 297 bp, Shigella sonnei
atgagcagaaaaacccaacgttactctaaagagttcaaagccgaagctgtcagaacggttcttgaaaatcaactttcgatcagtgaaggcgcttcccgattatctcttcctgaaggcactttaggacaatgggttaccgccgccagaaaagggctcggtactcctggttcccgcacggtggctgaactggaatctgaaattctgcaactgcgtaaggcgttaaatgaagctcgccttgagcgagatatattaaattgcacaggagtcgctgaaaaatacgcgttaatcgaacaatga

SEQ ID NO: 488547 - DNA, 564 bp, Shigella sonnei; identical to SEQ ID NO: 463476

SEQ ID NO: 488548 - DNA, 219 bp, Shigella sonnei; identical to SEQ ID NO: 15966

SEQ ID NO: 488549 - DNA, 375 bp, Shigella sonnei; identical to SEQ ID NO: 13405

SEQ ID NO: 488550 - DNA, 1044 bp, Shigella sonnei
atgatgacgaccagaatagtggttggcctcacggcagggacgtgtctgattttctcgcaaaacctgatggccgaggtcagtgtattcaatccggcgcttctggaaatcgaccatcaatccggagtcgatattcgccagtttaatcgggcaaacctgatgcccccaggtgtttatagcgttgatatttttatcaacggtaaaatgtttgaacgtcaggatgtgacatttgttcaggataatccagatgctgatctgcacgcttgctttattgccattaaaaaaacactgtcctcctttggcataaaagttgatgcgctcaaatcgttcaatgatgtggatgagacggtttgcctcgatcctgctccacgtattgaaggctcatcctggcagtttgacagtgataaattgcagctgaatatatccattccccaaatctacatggacgcgatggcttatgattacatcagccccacgcgttgggatgaggggattaacgcgctcaccatcaactacgatttttctggttcacatacactacgttcagattatggttcacaagagacagataccagttatctcaatctgcgcaatggactgaatattggaccgtggcggctacgtaattacagtactttaaacaccagcgatggccgtgcggaatacaactccattagtacctggatacagcgcgatattgccgcgttaagaagccagattatgattggtgatacgtggacggcgagcgatattttcgacagtacgcaaattcgcggcgcgcgtttgtatactgataacgatatgctacccgccagccagaatggctttgctcctgtggttcgtgggattgcaaagtccaacgccaccgtcatcattcggcagaatggctacgtgatttatcagtctgccgttccacaaggtgcttttgagatcaccgatctcaacaccgccagtacaggtggcgatttggacgtgaagtggtcaacaaaaactggccaccgagttagagtttttccagtatcgattttccgattcgtttgggggtaa

SEQ ID NO: 488551 - DNA, 381 bp, Shigella sonnei; identical to SEQ ID NO: 458903

SEQ ID NO: 488552 - DNA, 1269 bp, Shigella sonnei
gtgataacagatgtctggaaatataggggcaaatccaggacatctggtacgggtacgttaaccctgacgaatagcggcacgctgaatgtcgaaggtggagaagtttacttaggtgtttttgaacctgctgtaggaacgctaaacattggtgcagctcacggtgaggcggcggcagatgccgggtatataaccaacgcgacgaaagtagagtttggttctggcgaaggtgtttttgtctttaatcatactaataacagtgatgccggctaccaggtcgatatgctgattacaggtgacgataaagacggaaaagtgatccatgatgcaggccatacggtgttcaatgcagggaatacttatagcggtaaaacgctggtcaatgacggcctcctgaccattgcgtctcatacggcagatggggtaacgggcatgggttcgagtgaagtcaccattgcaagccccggtacgctcgacattctcgcatcaacgaacagtgcaggagattacacgctgaccaatgcgctcaaaggcgatggcttgatgcgagtgcagctgtcatcctacgacaagatgtttggctttacccatgcaacagggactgaattcgccggtgttgcccaactgaaagacagaaccttcactctggaacgcgacaacaccgctgcgcttactcacgcgatgttgcagtctgacagtgaaaataccacatcggtaaacgtgggagagcaatccattggtggactggccatgaatggcggtacgctcattttcgatacggatattcctgctgcgacgcttgcagagggatatatcagcgtcgatacgctggttgtcggcgcgggtgactacacctggaaaggccgtaactatcaggtaaacgggacgggcgacgtgcttatcgacgtgcctaaaccgtggaatgatcccatagcgaataaccctctgacgacgctcaatttgctggaacacgatgatagccatgtcggcgttcaactggtgaaggcgcaaacggttattgggtcgggtggctcattaacgttacgtgatttacagggcgacgaggtggaagcggacaaaacgttacacattgcgcaaaacggaacggtggtcgccgagggtgattatggattccgcctcacgaccgcaccaggtgatggtttgtacgttaactatgggctgaaagcgctgaacatccatggtgggcaaaagctgacgttagccgaacatggcggagcctatggcgcaacggccgatatgtcggcaaaatag

SEQ ID NO: 488553 - DNA, 381 bp, Shigella sonnei; identical to SEQ ID NO: 458903

SEQ ID NO: 488554 - DNA, 303 bp, Shigella sonnei; identical to SEQ ID NO: 458125

SEQ ID NO: 488555 - DNA, 303 bp, Shigella sonnei; identical to SEQ ID NO: 458125

SEQ ID NO: 488556 - DNA, 990 bp, Shigella sonnei
gtgcaggatcaagactctgtcatcacggtacgcagactctataatgggtatttcggtaatggcacagtcaatatttccaataatggtctgattaataacaaagaatattcattggtgggcgttcaggacggttcccacggtgtcgtcaacgtgaccgataaagggcattggagtttcctcggaacaggcgaagctttccgctatatctatatcggtgatgctggtgacggtgaacttaatgtctcgcgtgaaggtaaagtagattcgggaattatcactgcggggatgaaagaaacaggcacaggcaacattactgttaaggataagaactccgttatcactaatctcggaactaatcttggttatgacggccacggcgaaatgaatatcagtaatgaggggcttgttgtcagcaacggaggaagctcactcggttatggagaaaacggcgtcgggaatgtcagcatcaccacgggggggatgtgggaggtcaataagaatgtctataccaccattggtgttgcgggcgtcggaaacctcaatattagcgatggcggtaagtttgtatcgcaaaatattacttttttgggcgataaagcaagcggtatcggcacactgaacctgatggatgcgacatcatcgttcgatactgtgggtatcaatgtcggtaattttggtagcggtatcgtaaatgtcagtaatggtgccacccttaattcaacgggctatggatttatcggaggaaatgcctccggtaaggggatagttaatatttcaacggacagtctctggaatttaaagacatcatctactaacgcacaattgctacaggtcggtgtattaggcacgggtgaactgaatattaccaccggaggtatagttaaagcgcgtgatacacagatagctctcaatgacaaaagtaagggcgacgtgagggtggatgggcagaactctcttcttgaaacattcaatatgtacgtagggacatag

SEQ ID NO: 488557 - DNA, 267 bp, Shigella sonnei; identical to SEQ ID NO: 11114

SEQ ID NO: 488558 - DNA, 363 bp, Shigella sonnei
gtgggctatcgccacgaatgcgcctacatcctggcaaaaggccgtccacgtctgccacaaaaaccgctgccggacgtgctgggctggaaatattcaggcaatcatcatcacccgacggaaaagcctgttaccagcctgcaaccgctgattgagtgcttcacacacccgaacgcaattgtgctggacccgtttgcaggcagcggctcaacctgcgttgccgccctccagtccggacgccggtatatcggtatcgagctgcttgagcagtatcaccgtgccggacagcaacgactggctgccgtacaacgggccatgcagcagggggccgcgaatgatgactggtttatgccggaggctgcgtaa

SEQ ID NO: 488559 - DNA, 222 bp, Shigella sonnei
atgaactatgccggacacgaaaaacttcgcgccgaagtggcggaggtggccaatgccatgtgtgaccttcgggccaggctgaacgatatggagcatcgctgtcgctttgattccgatgtgcttgttgaacgcctgacacgccagacgttgtttcgcgcaaaccgcctcctgatggaggcatataccgaaattcttgaactggatgcgtgcttcaaagattaa

SEQ ID NO: 488560 - DNA, 435 bp, Shigella sonnei
atgtacggaacatgcgaaacgctctgccgtgagctggcagcaaagtatccgggaaacacgccgctgatgctgcttatctggtccccggaagagattcaggcactggccgacggtatggaaatttctctgaccgatcatgaaatcaggactgtcctggcgcacctggaggacatcccggaagaccagcggatggagtccggtatttcttccgccgctgcgatggagattatcagcaacgtgagcgaaaaccgcctggtgaccgtctctgctgaactgctggcgtccctgattcagaccgctgaacaggcactgtggaaacgtgaatgggccgcccgtgataacggccttgccgtcccggaatgtgttacccgccgtcaggcagtgattaatcaggcccgcaccctgctgaaaaacaacacacacgaaaacaactga

SEQ ID NO: 488561 - DNA, 363 bp, Shigella sonnei
gtgggctatcgccacgaatgcgcttacatcctggcaaaaggccgtccacgtctgccacaaaaaccgctaccggacgtgctgggctggaaatattcaggcaaccgccatcacccgacggaaaagcccgttaccagcctgcaaccgctgattgagagcttcacgcacccgaacgcgattgtgctggacccgtttgcaggcagcggttcaacctgcgtggccgcccttcagtccggacgccggtatatcggtatcgagctgcttgagcagtatcaccgtgccggacagcaacgactggccgccgtgcaacgggccatgcagcagggggccgcgaatgataactggtttgaaccggaggctgcgtaa

SEQ ID NO: 488562 - DNA, 222 bp, Shigella sonnei; identical to SEQ ID NO: 5758

SEQ ID NO: 488563 - DNA, 435 bp, Shigella sonnei; identical to SEQ ID NO: 35507

SEQ ID NO: 488564 - DNA, 303 bp, Shigella sonnei; identical to SEQ ID NO: 458125

SEQ ID NO: 488565 - DNA, 303 bp, Shigella sonnei; identical to SEQ ID NO: 458125

SEQ ID NO: 488566 - DNA, 381 bp, Shigella sonnei; identical to SEQ ID NO: 458903

SEQ ID NO: 488567 - DNA, 276 bp, Shigella sonnei; identical to SEQ ID NO: 484087

SEQ ID NO: 488568 - DNA, 294 bp, Shigella sonnei
gtggcacacatcttcggtgaacgcactctggccacactggagcgtcttctgagcctgctgtcggcctttgaggtcgtggtatggatgacggatggctggccgctgtatgaatcacgcctgaagggaaagctgcacgttatcagcaagcgttacactcagcgcattgagcggcataacctgaatctgaggcagcacctggcacggctgggacggaagtcgctgtcgttctcaaaatcggtggagctgcatgacaaagtcatcgggcattatctgaacataaaacactatcaataa

SEQ ID NO: 488569 - DNA, 210 bp, Shigella sonnei; identical to SEQ ID NO: 9340

SEQ ID NO: 488570 - DNA, 375 bp, Shigella sonnei; identical to SEQ ID NO: 13405

SEQ ID NO: 488571 - DNA, 381 bp, Shigella sonnei; identical to SEQ ID NO: 458903

SEQ ID NO: 488572 - DNA, 276 bp, Shigella sonnei
gtggcttctgtttctatcagctgtccctcctgttcagctactgacggggtggtgcgtaacggcaaaagcactgccggacatcagcgctatctctgctctcactgccgtaaaacatggcaactgcagttcacttacaccgcttctcaacccggtacgcaccagaaaatcattgatatggccatgaatggcgttggatgccgggcaactgcacgcattatgggcgttggcctcaacacgattttacgtcacttaaaaaactcaggccgcggtcggtaa

SEQ ID NO: 488573 - DNA, 513 bp, Shigella sonnei; identical to SEQ ID NO: 485852

SEQ ID NO: 488574 - DNA, 327 bp, Shigella sonnei
atgactaaaaatactcgtttttcccccgaagtccgtcaacgggcagtccgtatggttctggaaagtcagagcgaatatgactcacaatgggcgacaatttgttccattgctccaaagattggctgtacgccggagactctgcgtgtccgggttcgccagcatgagcgggataccgggggcggtgatggagggctcaccaccgctgaacgtcagcgtctgaaagagctggaacgtgaaaatcgtgaactgcgccgcagtaacgatatccttcgccaggcttccgcttattttgcgaaggcggagtttgaccgcctctggaaaaaatga

SEQ ID NO: 488575 - DNA, 141 bp, Shigella sonnei
atgctgaaaggcgggatttccggccgcagtgcaaaaggaaaacgtatccacacccgtgccattcacaacatcgacaccgatattaagctcaaccgcgcattgtgggtaatggcagaaacgctgctggagagcctgcgctga

SEQ ID NO: 488576 - DNA, 267 bp, Shigella sonnei; identical to SEQ ID NO: 11114

SEQ ID NO: 488577 - DNA, 141 bp, Shigella sonnei
atgctgaaaggcgggatttccggtcgcagtgccagaggaaaacgtatccatacccgtgccattcacagcatcgacaccgacattaagctcaaccgcgcattgtgggtgatggctgaaacgctgctggagagtatgcgctga

SEQ ID NO: 488578 - DNA, 375 bp, Shigella sonnei; identical to SEQ ID NO: 13405

SEQ ID NO: 488579 - DNA, 1530 bp, Shigella sonnei; identical to SEQ ID NO: 463473

SEQ ID NO: 488580 - DNA, 234 bp, Shigella sonnei; identical to SEQ ID NO: 488405

SEQ ID NO: 488581 - DNA, 381 bp, Shigella sonnei; identical to SEQ ID NO: 6156

SEQ ID NO: 488582 - DNA, 303 bp, Shigella sonnei; identical to SEQ ID NO: 458125

SEQ ID NO: 488583 - DNA, 321 bp, Shigella sonnei; identical to SEQ ID NO: 485263

SEQ ID NO: 488584 - DNA, 207 bp, Shigella sonnei; identical to SEQ ID NO: 14967

SEQ ID NO: 488585 - DNA, 1038 bp, Shigella sonnei; identical to SEQ ID NO: 486405

SEQ ID NO: 488586 - DNA, 318 bp, Shigella sonnei
gtgaagtggcctgtggggtatgaggtgaatatcagtagtcagggagacaacttcattcaggtggatttcgacacgccgtggtgtcagccggaaagcgacgttattgcagaattaagccgccgtttcagctgcacgctggagcactggtatgccgaacagggctgtgatttctgtggctggcagttgtatgagcgcggagagctcgttgatgtgctgtggggggaactggaatggtcttccccgacagatgacgatgagctgccggaagtcaccggacctgcgtggatagtcgacaatgtggcgcattatggcggatga

SEQ ID NO: 488587 - DNA, 435 bp, Shigella sonnei; identical to SEQ ID NO: 35507

SEQ ID NO: 488588 - DNA, 462 bp, Shigella sonnei
atgctccacacactcactgaccagatacatttccaccgacgaaaaacgagcgccccggttcaggatggcatcgagcaccacgggcaggttttcggcgtcttcatcgagccagcaggggtgatcgctttccttcacaaccaggcgaaagcggcgcgtctggcgggtcagcaacgtctgaccggttgtggtcagcgccgccctgatacgccgcgcatcttctgccacccggcaactgacactgcgtaccgcatcgtgcaccgcatcaagaactgccctgatttcgtcttcggtcagccattctccggcatacgggaaagacacctgcgttccgtctgccggaagtaccggcagcgactgccactgactgccggacagaacaagttccgccccggttccggtcagtttctgaatggcagaggccaggagcggcggcagtacgccgccgtgacggttgataagtaa

SEQ ID NO: 488589 - DNA, 1164 bp, Shigella sonnei; identical to SEQ ID NO: 485785

SEQ ID NO: 488590 - DNA, 234 bp, Shigella sonnei; identical to SEQ ID NO: 8278

SEQ ID NO: 488591 - DNA, 642 bp, Shigella sonnei; identical to SEQ ID NO: 486871

SEQ ID NO: 488592 - DNA, 327 bp, Shigella sonnei
ttggccgccttcgcagaatttgcagccgccgtcgccgaggaagctgcgctactggcgcttgatgatgcgttcgtttctgatgattttgccgcctcttttgaagccgacgcatcccgggctgaggtggcagcttctgacgctttcgtggtcgcggtggatgcagaagtggctgctgattgttgtgacgctgccgcattcgtttctaacgttttcgccgcaccggcactggtagccgccgcgctttttgaggactctgcagcggcagcactttttgaggcttcagtggcctttgttgatgccgttcctgcgctggaagacgctgactga

SEQ ID NO: 488593 - DNA, 1455 bp, Shigella sonnei; identical to SEQ ID NO: 485766

SEQ ID NO: 488594 - DNA, 381 bp, Shigella sonnei; identical to SEQ ID NO: 458903

SEQ ID NO: 488595 - DNA, 858 bp, Shigella sonnei
atgcgtgactgccattcttcagatgataaagacgtcattgcaattgatggaaaaacgctccggcactcttatgacaagagtcgccgcaggggagcgattcatgtcattagtgcgttctcaacaatgcacagtctggtcctcgggcagatcaagacggatgagaaatccaatgagattacagccattcctgaacttcttaacatgctggatattaaaggaaaaatcatcacaactgatgcgatgggttgccagaaagatattgcagagaagatacaaaaacagggaggtgattatttattcgctgtaaaaggaaaccaggggcggctaaataaagcctttgaggaaaaatttccgctgaaagaattaaataatccagagcatgacagttacgcaatcagtgaaaagagtcacggcagagaagaaatccgtcttcatattgtttgcgatgtccctgatgaacttattgatttcacgtttgaatggaaaggactgaagaaattatgcgtggcagtctcctttcggtccataatagcagaacaaaagaaagagccagaaatgacggtcagatattatatcagttctgctgatttaactgcagaaaagttcgccacagcaatccgaaaccactggcacgtggagaataagctgcattggcgtctggacgtggtaatgaatgaagacgactgcaaaataagaagaggaaatgcagcagaattattttcagggatacggcacattgctattaatattttgacgaatgataaggtattcaaggcagggttaagacgtaagatgcgaaaagcagccatgggcagaaactacctggcgtcagtccttgcggggagcgggctttcgtaa

SEQ ID NO: 488596 - DNA, 303 bp, Shigella sonnei; identical to SEQ ID NO: 458125

SEQ ID NO: 488597 - DNA, 303 bp, Shigella sonnei; identical to SEQ ID NO: 458125

SEQ ID NO: 488598 - DNA, 348 bp, Shigella sonnei; identical to SEQ ID NO: 485869

SEQ ID NO: 488599 - DNA, 348 bp, Shigella sonnei; identical to SEQ ID NO: 485869

SEQ ID NO: 488600 - DNA, 381 bp, Shigella sonnei; identical to SEQ ID NO: 458903

SEQ ID NO: 488601 - DNA, 276 bp, Shigella sonnei; identical to SEQ ID NO: 485876

SEQ ID NO: 488602 - DNA, 252 bp, Shigella sonnei; identical to SEQ ID NO: 485878

SEQ ID NO: 488603 - DNA, 684 bp, Shigella sonnei
gtggcacatatccgcactcgcgaaacatatggaacccggcggctccagacggagctggcagagaatggcatcatcgttggtcgtgaccgactggcacgtcttcgtaaggagctaaggctacgctgtaagcagaaacgcaagttcagagcgactacgaactcgaaccacaatctgccagttgcgccaaatctgctgaaccagacgttcgctcctacagcaccaaatcaggtctgggtggcggacctgacgtatgttgccacacaggagggatggttgtacctcgctggcatcaaagatgtttatacgtgcgaaattgtcggctacgccatgggagagcgcatgacaaaagagctgacaggtaaagccctgtttatggcgctcaggagccagcgcccacctgccgggctaatccaccactctgatcgaggttcacagtactgcgcatacgattaccgggtcatacaggagcagtctggtctgaaaacatcaatgtcgcgtaaaggtaactgttacgacaacgctccgatggaaagcttctggggaacgctgaaaaatgagagcctgagccactatcgttttaataaccgggatgaagccatctcagtaatacgggaatacattgagattttctacaatcgtcagcgtcgtcactctcgtctggggaatatctcccataagcgctaa

SEQ ID NO: 488604 - DNA, 327 bp, Shigella sonnei
atgactaaaaatactcgtttttcccccgaagtccgtcaacgggcagtccgtatggttctggaaagtcagagcgaatatgactcacaatgggcgacaatttgttccattgctccaaagattggctgtacgccggagactctgcgtgtccgggttcgccagcatgagcgggataccgggggcggtgatggagggctcaccaccgctgaacgtcagcgtctgaaagagctggagcgtgaaaatcgtgaactgcgccgcagtaacgatatccttcgccaggcttccgcttattttgcgaaggcggagtttgaccgcctctggaaaaaatga

SEQ ID NO: 488605 - DNA, 303 bp, Shigella sonnei; identical to SEQ ID NO: 458125

SEQ ID NO: 488606 - DNA, 333 bp, Shigella sonnei
atgctcacctcagaacaacacaggtgccataatgaaaaaagaaatttcagcgcagagtttaaacgcgaatccgctcaactggtcgttgaccagaattacaccgtggcagatgcagccagcgctatggatgtcggcctttccacaatgacgcgatgggtgaaacaattacgtgatgagcggcagggaaaaacaccaaaagcctcccccattaccccggaacaaattgaaatccgtgagctcaggaaaaagctacaacgtattgaaatggaaaatgaaatattaaaaaaggctaccgcgctcttgatgtcagactccctgaacagttctcgataa

SEQ ID NO: 488607 - DNA, 381 bp, Shigella sonnei; identical to SEQ ID NO: 458903

SEQ ID NO: 488608 - DNA, 441 bp, Shigella sonnei; identical to SEQ ID NO: 478325

SEQ ID NO: 488609 - DNA, 276 bp, Shigella sonnei; identical to SEQ ID NO: 488572

SEQ ID NO: 488610 - DNA, 177 bp, Shigella sonnei; identical to SEQ ID NO: 485877

SEQ ID NO: 488611 - DNA, 210 bp, Shigella sonnei; identical to SEQ ID NO: 488501

SEQ ID NO: 488612 - DNA, 147 bp, Shigella sonnei; identical to SEQ ID NO: 465857

SEQ ID NO: 488613 - DNA, 1188 bp, Shigella sonnei; identical to SEQ ID NO: 484518

SEQ ID NO: 488614 - DNA, 330 bp, Shigella sonnei; identical to SEQ ID NO: 485224

SEQ ID NO: 488615 - DNA, 750 bp, Shigella sonnei; identical to SEQ ID NO: 485661

SEQ ID NO: 488616 - DNA, 267 bp, Shigella sonnei
atgaatcaatatggggtttttgatatggaagagcagaaagccaagtgggtgtttgatcaggggggcttctcgaaagccttggttgtgcccaccccgatgggtgccggctaccatctccacctcgtccagttcgggaggcaagctgaaaccagcgtgttggaacgccagaggggaggctggcgagtgttcaagacgatcgatgctgcggtatctactgccaaaaccatagggttccggcgcatcgaggtcgatttgacctccctgtga

SEQ ID NO: 488617 - DNA, 1011 bp, Shigella sonnei
atggccgcctttgccatcatgcgctgcaagaaactatcgggaatgggctcggttgcagcctccctcaagcactgctttcgggagcgcgacacacccaatgcagaccccgaaagactccggcacaacatgcacatggccgcccgttccacagacgaggcgatgggcaagttgcgggagaagctgccggagaagcggcgcaaggatgcggtgctcgctatcgagtacgtcctgagcgcttcaccggagtggtggatcaatgcggattcaggccggaaagcggacttctaccagagctcgatggactggttggccgagaagtacgggcgggaaaacatcctggtatcgtcgattcacctggacgagaagaccccccacatgtcggcgttcgtggtcccgatcaccaaagatgggcggttgagcgccaaggagttcatcggcaaccgcaccaagatgagcaacgaccagagcagctatgcggaggccgtcaagcatcttggactggtgcggggcatcgagggcagcaaggcgacccacaagcgcatcaaggcccattacaacgcgctggggcagcagatccccgtgccgcccgagatccgcgaggaggatctcaagccgcaaagcgagcaaggcccggggttgctgggcaagatcgggttgaggccgatggttgagaccccgctcggggtagcggagcgactcaacgccaagttcgcgaaggcgttcaaggttgtcgccgagaaagcctctgaaagcgattctcagcgcggggaggcggttaaggctaggatggcattggctgacacacagaaacgcctccaagcgcttcaggagccgtttaaggggctatccaaggagcaggtggctgaagttcttaagcaggcggtggcgatacagcaggacaatcagcggaggcagcaggagcaggatctggctcgcaagctggaggccgagatccggcggaagatggcccccgagaaaggcccgaagccgagtcgggggtttgggcgttaa

SEQ ID NO: 488618 - DNA, 249 bp, Shigella sonnei
atgaatatttcgcctaaattggtgcggttcgatgaaaacagcatgtgggttgagctactggacggccggatcatcggggtgccgctggtatggttcccgcgactgctgagggcacagcctgagcagcttgctcaatacgaactgagccagcggggtatccactgggacgaactggacgaagatatttccattgctggcctactagccggacaaggggatattacccaccgtccccatcgggcggcctag

SEQ ID NO: 488619 - DNA, 213 bp, Shigella sonnei
atgaccccagaagaaaaactgaacttggaaatagaacgtgttctatcaggctctgacagggcaaaattaagtgactgggatttgaattttctgttttccttaacgcagattttccggaagtcatttaacaaccctcgttcgattaaaggattgaccccgaaacaaaaagggcttgctagaaccattttggaaaaggttaaaacgtgccagtaa

SEQ ID NO: 488620 - DNA, 474 bp, Shigella sonnei
atgaccacagcaagggtgcttacttcgacaaggacaactcacttggatcactccactggtgaagtcttaagtacggaggatgtgattgttgcccgaatacctaaagagccagcctatgtgaagatgtacatcgaagacctatctcggatagttggtcttagtgctggtgctcaatcagtgctgtatgaactggctggaaaaatcgattacgagggaatcgtcacgatcaccaagggcactcgaaatagaattgccgaacgaactgggttgaaagagccaactgtccgcaatcgaatttcagacttagtggcatcaggaatcatgcgaaaatcggggtactgtgagtacgaaatgaacccgaacctctttgccaaaggggattggcaggacgtatacaagcgccgccaagcattcaagctggagattaaatactccgatggcaagagaatcattaatgggcatagcgtcgattga

SEQ ID NO: 488621 - DNA, 258 bp, Shigella sonnei; identical to SEQ ID NO: 485585

SEQ ID NO: 488622 - DNA, 570 bp, Shigella sonnei; identical to SEQ ID NO: 485859

SEQ ID NO: 488623 - DNA, 657 bp, Shigella sonnei; identical to SEQ ID NO: 463703

SEQ ID NO: 488624 - DNA, 657 bp, Shigella sonnei; identical to SEQ ID NO: 463703

SEQ ID NO: 488625 - DNA, 570 bp, Shigella sonnei; identical to SEQ ID NO: 485718

SEQ ID NO: 488626 - DNA, 657 bp, Shigella sonnei; identical to SEQ ID NO: 463703

SEQ ID NO: 488627 - DNA, 657 bp, Shigella sonnei; identical to SEQ ID NO: 463703

SEQ ID NO: 488628 - DNA, 657 bp, Shigella sonnei; identical to SEQ ID NO: 463703

SEQ ID NO: 488629 - DNA, 303 bp, Shigella sonnei; identical to SEQ ID NO: 484410

SEQ ID NO: 488630 - DNA, 336 bp, Shigella sonnei; identical to SEQ ID NO: 485874

SEQ ID NO: 488631 - DNA, 303 bp, Shigella sonnei; identical to SEQ ID NO: 485881

SEQ ID NO: 488632 - DNA, 1287 bp, Shigella sonnei
atgaaaaagacagataaaggtgtatctctccttgaggtattacttgtcatcggcataatggtgatggttatccctaaagtttatgaaaacattgaaaaccatctgaataatgttcgctggcagaatgcagcagaacacgcaaatacctataacaccgctgttcgtaattatgttgctgacaatgcatcaacactacttgctggctctttacccaaaacaatcacgccagcaacactcattcagaaaggctatctgaaatctggtttttctgaatccaattttggacaaagctacattaccggtattgcaaagaacagcaaaacatcccgtctggaagccctgacctgtagtaatggcggtcagtccctgtcagaagccggaatgcgctcggtagcaagcatgattgaagggcttggcggctacatcaacagcagcaagcaggcgattggcgcgggtggcggctggtctgacacgccttcaaattacgggctgaactgcgcgaccgggcatattgcaatggcacttgttggcgctgatttgcaggaaagcgaccgtttatatcgttactccataaccaatcgtcccgaccttaacaggatgcatacggcgattgatatgaacagcaacaatctgaacaacgtcggcactttaaacggcaacgccgccgcgctctccggcgatatcagcgcacgtaacggtacgttctctggcgcaatttcaggaaatacagccacaaccaacggcgatatcacttcgaataatggctggctggtcacaaaaaacagcaaaggctggatgaacagtacctatggtggcggctggtatatgtccgattcgtcctggttgcgcagcgtgaataataaagggatttatactggcggccaggtaaaaggtggaactgtacgcgctgatggacgcctctatacaggcgagtatttacagcttgaaaaaacagcaacggctggcacttcctgctcccctaacgggcttgtaggccgcgacagtacaggggcgatactttcgtgccaatccggtacgtggaaaaaaattggcgcaggtgatagccaaattgttaccgcttcagctactgcgtggcgttggcctggagcaacggcaacatgtccatctggcaagaaagtcattggtggaggcggtcaatgcagatcaaataccggatttatatggctcacgcgttccatgccttcaggcaacaatgcatggactgccagttgcgacacgaccgaagatcaaaatggttcaattacagtttacgccatttgccagtga

SEQ ID NO: 488633 - DNA, 162 bp, Shigella sonnei
atgaaattaaaaaattcatacacatccactccagcatttttatcacccaaatcacaggcagaagcggaaaggctgaaacattttgctgatatggtctacatgaactgtgccacaactctgagcttaggaaccaagaataatagtccctcgacaaaagaataa

SEQ ID NO: 488634 - DNA, 288 bp, Shigella sonnei; identical to SEQ ID NO: 38302

SEQ ID NO: 488635 - DNA, 255 bp, Shigella sonnei; identical to SEQ ID NO: 25980

SEQ ID NO: 488636 - DNA, 996 bp, Shigella sonnei
atgaacattgtttcagaatttcttgagaaagtaacaaccattgttgaatccacagcggcgacgaacgccgctaaggtcgcacaggcaatatctcctacattttttgcggctatagccttatacgttatttatctaatatatgaaatcacgtatgcccaacgtgacgtcctgatgagcgaggtgactaagaatatcggtgcattcgccctggttggtgcattcacttattcagcgccttattacagccagtttgttattccttttgtaatgcacgctggctccgacctttctgctgctgttactggaggttcaggaactgcaaccagtgttgataatttgtggaatatgctttcagtaacgttaaatgattttaagaataatgagttagatactctggagtggtatagcttcacagatcaactatacatatatctaatttggggggttggatatgttggcgggctgctgcttatttattacaccactgtatttctaaccctatcaacattcatggttggcattctcttatccgccggaatattatttatctgtttttctttatttgcttcgacaagaaatatgtttagcgcatgggtaggtagctgtttaaattatatattgctaaatcttttttatagtatatcgttcagcttcgtcatcagctttgtagagcaaacagtcccatcaagcggaaatataactctcacaacagtagtttatttctttatggtgactgttatatctatattccttgttgagcaagtaggtactctctgctcaactcttactggcggggtaggtataaatggccttacatcagccgctaatggctttggaggtaaggttgcatccggttttatgcgagcatcaggactccgatctttcaccaatggttttgccagcaaaatgccaaatccattctttaatgcaggaagtcgttctgcatcagcattagttcagggattaaaccgtggaagtaaacttaaagcggggtga

SEQ ID NO: 488637 - DNA, 462 bp, Shigella sonnei
atgcgaaacgcaaatgaaggtgtttctctttcagagattgtaactaaagccacattacgcaaatttggcattagaggtgtaaataaatacgagacatacacagtcataataataactgtagctttttttatccttgaatcagcagcaggaagggccaaagatacatttgctgtggctgtaaaagtattaagctacatgctcccctgtacggcaattatcatggctgtcatatggataatatttttcatcggcgatagacgagaaaagttaaaacatgcagagctggacgtgattaagataaaagctcgtcaaaaaatctacgatcgcctgcgttacgttgaaaatgagcatatcgttttcgacccggttacaggtcgggaagttccggcagaacggacgtgtattaataaactgattgaggcacttgttgatgaaagcaacgacatctcaaaaagaaattga

SEQ ID NO: 488638 - DNA, 324 bp, Shigella sonnei
atggaaaaccacgccaaatttgttgctactgaaattcttaatcagcttggtggaaaccgctttattgctatgacaggcgcaaagaactttgcctgttttgatgaaaatggtgagtgtggtctttgctttcgtttgccttcaaattttgcaatgaagggaattaatttggttaaaatcaaattaaccttctctgatacatacctggtgacattttcccgtgtccgtggagctacagtaaaagaaatatcaaaatttgataatatttattgtgatcagcttgaatgtttgtttaatgaacaaaccggacttgcaaccagattgtaa

SEQ ID NO: 488639 - DNA, 210 bp, Shigella sonnei
atgaaagttcttattggtaatataaatattgataattatcatatgctgtctgcattagctgggattgcgggatttgacaggagcattcagtttacatgtgaaatatcagcaagtatcgaaattatggaggatgatttcgtaaataaagctggtatattaaagatgttagatgaatttattgaaaatgatttttcaataaaactcgtttag

SEQ ID NO: 488640 - DNA, 225 bp, Shigella sonnei
atgaaacaatctacttttcctgttatcgtctctacaactggtcatgtgttttctgttgtgcgcgtgacgctttgcacaatttgccttaaacatgaaaaaacaggcgaggcttatgtcgtcatttttacagactgccataatatccgtgattataaaaagggcgttgttccggctcttggggaactttatcaggaagatgtcgatttgattaccggaaaaagttaa

SEQ ID NO: 488641 - DNA, 261 bp, Shigella sonnei; identical to SEQ ID NO: 403800

SEQ ID NO: 488642 - DNA, 252 bp, Shigella sonnei; identical to SEQ ID NO: 403799

SEQ ID NO: 488643 - DNA, 279 bp, Shigella sonnei
atgcatttcacaacttttctaaaaaaacatttcgatatagaaaaagtcgttggtacttctgattctggaaatgataccgaatctatttatgtttatgaaaaaggaaatgattgcgaaccgttgtttattctgcatgaatcctggctaaatgcagaaattaaaaagtgtggggtatggactattggcgatatatattccacattggaacacggaaaagaatattctgaacaggaactaataaaaatgattaaggagggtaaagtaatcagcaaatattaa

SEQ ID NO: 488644 - DNA, 135 bp, Shigella sonnei; identical to SEQ ID NO: 22628

SEQ ID NO: 488645 - DNA, 204 bp, Shigella sonnei
atggcaaccaacaatcgtaaagcaaagatgctaatttcccgtgtatacagactttgctaccccagccagtggttgagagttagcaatcgccgtgtggtgttgttctcattttccggaattgccagagagggagtcaaagataagcgtagcgcggtgcaaaaccgctggaaaaaccactgttatctgcgcactaaaggagagtga

SEQ ID NO: 488646 - DNA, 318 bp, Shigella sonnei
atgtttttcctctacgagacctacaatttcttctactacctgataaagttaattgtcattcagccacaatatatttgtgtctatatgatattcttttttttcaatgcaggaatacttcaggaaacagagaaaaggcaggaactacatgaatcaatacccaaaacatgcaaattaaaggcactggatgctcaacaaggtggtttattcggcgttgataaagatgaatgggtattccctgacaataaatcattctatctgcctgaaaagtaccgtccagaaaacaggattacggaactagccatgatgaaagaaggataa

SEQ ID NO: 488647 - DNA, 321 bp, Shigella sonnei; identical to SEQ ID NO: 22615

SEQ ID NO: 488648 - DNA, 183 bp, Shigella sonnei; identical to SEQ ID NO: 467533

SEQ ID NO: 488649 - DNA, 276 bp, Shigella sonnei
gtgaggcgcaatgttgcgggggctttatccctggtggcattggttgctggaaagagaaaacccccgcacgttgagaggtttaacctgacaacaaaacgggggctaatcttgaaccatcaacaattcaagaatagccgcaaaatgttgtcattacaacaaggcggctatatgacgctcgcgcagtttgccatgactttctggcacgacctggcagcaccgatcctggcggggattattaccgcagcgattgtcagctggtggcgtaaccggaagtaa

SEQ ID NO: 488650 - DNA, 480 bp, Shigella sonnei; identical to SEQ ID NO: 464934

SEQ ID NO: 488651 - DNA, 276 bp, Shigella sonnei; identical to SEQ ID NO: 484087

SEQ ID NO: 488652 - DNA, 480 bp, Shigella sonnei; identical to SEQ ID NO: 464934

SEQ ID NO: 488653 - DNA, 504 bp, Shigella sonnei; identical to SEQ ID NO: 485763

SEQ ID NO: 488654 - DNA, 216 bp, Shigella sonnei; identical to SEQ ID NO: 5123

SEQ ID NO: 488655 - DNA, 633 bp, Shigella sonnei
gtgtgccacttcacacgtcttcgtaaggagctaaggctacgctgtaagcagaaacgcaagttcagagcgactacgaactcgaaccacaatctgccagttgcgccaaatctgctgaaccagacgttcgctcctacagcaccaaatcaggtctgggtggcggacctgacgtatgttgccacacaggagggatggttgtacctcgctggcatcaaagatgtttatacgtgcgaaattgtcggctacgccatgggagagcgcatgacaaaagagctgacaggtaaagccctgtttatggcgctcaggagccagcgcccacctgccgggctaatccaccactctgatcgaggttcacagtactgcgcatacgattaccgggtcatacaggagcagtctggtctgaaaacatcaatgtcgcgtaaaggtaactgttacgacaacgctccgatggaaagcttctggggaacgctgaaaaatgagagcctgagccactatcgttttaataaccgggatgaagccatctcagtaatacgggaatacattgagattttctacaatcgtcagcgtcgtcactctcgtctggggaatatctccccggcagccttcagggaaaaatatcatcagatggctgcttaa

SEQ ID NO: 488656 - DNA, 207 bp, Shigella sonnei; identical to SEQ ID NO: 485404

SEQ ID NO: 488657 - DNA, 723 bp, Shigella sonnei; identical to SEQ ID NO: 487523

SEQ ID NO: 488658 - DNA, 390 bp, Shigella sonnei; identical to SEQ ID NO: 486384

SEQ ID NO: 488659 - DNA, 309 bp, Shigella sonnei; identical to SEQ ID NO: 487355

SEQ ID NO: 488660 - DNA, 1041 bp, Shigella sonnei; identical to SEQ ID NO: 485547

SEQ ID NO: 488661 - DNA, 276 bp, Shigella sonnei; identical to SEQ ID NO: 488572

SEQ ID NO: 488662 - DNA, 543 bp, Shigella sonnei; identical to SEQ ID NO: 464540

SEQ ID NO: 488663 - DNA, 327 bp, Shigella sonnei; identical to SEQ ID NO: 485848

SEQ ID NO: 488664 - DNA, 582 bp, Shigella sonnei; identical to SEQ ID NO: 485612

SEQ ID NO: 488665 - DNA, 1719 bp, Shigella sonnei; identical to SEQ ID NO: 485613

SEQ ID NO: 488666 - DNA, 783 bp, Shigella sonnei; identical to SEQ ID NO: 486531

SEQ ID NO: 488667 - DNA, 945 bp, Shigella sonnei; identical to SEQ ID NO: 13277

SEQ ID NO: 488668 - DNA, 234 bp, Shigella sonnei
atgaaagtctttgccggagccaactttattgatttcaatatgacaggacagaacctgtccgggttcgttctaaccttgtcaaggttttatttcgaagatctacttaatataaatttcactgacgcaaatttaggtgacactattttttacataaagaacaccctacccccaaattatataaagatggacaatatcttgacaaacaaatcgaaggtttattttcaacattattaa

SEQ ID NO: 488669 - DNA, 345 bp, Shigella sonnei; identical to SEQ ID NO: 485793

SEQ ID NO: 488670 - DNA, 315 bp, Shigella sonnei; identical to SEQ ID NO: 33595

SEQ ID NO: 488671 - DNA, 450 bp, Shigella sonnei
atgctcagatttcgggtgtttttcccgatattgtacgtactggtagtgaagttcacttttgccgttgtccagataccggattggcactggcctccgtgccaatccggtgtgtggagaacttccggttcctctaacggtagttacagtaatcttggctcacacagaggatcatttactggtcgcaatacaggaagtggtacgctgtttgtttacgcctctggagggaatggtggttccgccgggggagattgcgctaacacatccagattgcagggatacgttgcaggggcattgattagcacaaatgcgagcaacaacccatcttatgggaagacagcattcatctcttttgctgtccctgctggcgcaacttatcagatcacctcttatccggcccaaaactactcttgtggctcaggggtattttcagtatttggataccagacttaa

SEQ ID NO: 488672 - DNA, 315 bp, Shigella sonnei; identical to SEQ ID NO: 33595

SEQ ID NO: 488673 - DNA, 600 bp, Shigella sonnei
atgggcggcggaaaaccggcggcgcggcagggcgacatgacccgcaagggactggatattgtgcagggttcagcgggtgtgctgataggtgcgccgacgggagtggcctgttcggtgtgtccgggagggattacctatgctaacccggtgaacccggtgctgggtgcgaaggtgcttccgggcgagacggaccttgcgctgccctgcccgctgccgtttattcttttccgtgcctacagcagctaccggaccagaacacccgcgccggtgggggtgtttggtcccggctggaaagcgcccttcgatatccgcttacagatacgcgatgaaggcctgatactcaacgacagcggcggcaggagcattcactttgagccgctgtttcccggcgagataagctacagccgcagcgagtcactctggctggcgcggggcggagtggcggcgcagcacagttcgcagccgctaagcgcgctctggcaggtgctgccggaagatgttcgcctgagtccgcatgtgtacctggcgacaaacagccttcagtggtactgccggacggcaggacggtacggtatggttacaacaaccagttgcaactga

SEQ ID NO: 488674 - DNA, 387 bp, Shigella sonnei; identical to SEQ ID NO: 485815

SEQ ID NO: 488675 - DNA, 480 bp, Shigella sonnei; identical to SEQ ID NO: 464934

SEQ ID NO: 488676 - DNA, 231 bp, Shigella sonnei
atggtagtgtccgctattgccagtacacctcagctattaccttcttcagagagcccccagctacttcctgtgactctcgatgcagctgccgaacagccagaatcgctcgcagaggacccgaaaaccctcagtatcagctgtgaggtaacgttccggcacgggacgctccgcttcaatggcaatgtcagcgaaaagctcctgactctgctgatacaggaactgaagcgatga

SEQ ID NO: 488677 - DNA, 480 bp, Shigella sonnei; identical to SEQ ID NO: 464934

SEQ ID NO: 488678 - DNA, 177 bp, Shigella sonnei
atgcgccgcatagccgacttacacgccggtgaagctaaaactgatgctcgtgacgctgccatcattgccgaagctgcccgtaccctgcctcacgtgcgtattccgctctattcgatcacggattggcatcgaagttcgatcagcgattcgcatccattcgatcaaccgggaacttaa

SEQ ID NO: 488679 - DNA, 216 bp, Shigella sonnei; identical to SEQ ID NO: 485850

SEQ ID NO: 488680 - DNA, 315 bp, Shigella sonnei; identical to SEQ ID NO: 33595

SEQ ID NO: 488681 - DNA, 267 bp, Shigella sonnei; identical to SEQ ID NO: 11114

SEQ ID NO: 488682 - DNA, 336 bp, Shigella sonnei; identical to SEQ ID NO: 485874

SEQ ID NO: 488683 - DNA, 294 bp, Shigella sonnei
atgtcgcgccagtgcacgcattatgggcgttggcctcaacacggttttacgtcacttaaaaaactcaggccgcagtcggtaacctcgcgcatacaaccgggcagtgatgtgattgtctgcgctgaaatggacgaacagtggggctacgtcggtgctaaatcacgtcagcgctggctgttttacgcgtatgacaggatacggaggacagttgtggcacacatcttcggtgaacgcactctggccacactggagcgtcttctgagcctgctgtcggcctttgaggtcgtggtatag

SEQ ID NO: 488684 - DNA, 141 bp, Shigella sonnei; identical to SEQ ID NO: 488577

SEQ ID NO: 488685 - DNA, 327 bp, Shigella sonnei; identical to SEQ ID NO: 13453

SEQ ID NO: 488686 - DNA, 531 bp, Shigella sonnei; identical to SEQ ID NO: 403838

SEQ ID NO: 488687 - DNA, 849 bp, Shigella sonnei; identical to SEQ ID NO: 482262

SEQ ID NO: 488688 - DNA, 435 bp, Shigella sonnei; identical to SEQ ID NO: 484502

SEQ ID NO: 488689 - DNA, 267 bp, Shigella sonnei; identical to SEQ ID NO: 11114

SEQ ID NO: 488690 - DNA, 267 bp, Shigella sonnei
atggcgacgctggggcgtcttatgagcctgctgttaccctttgacgtggtgatatggatgacggatggctggccgctgtatgaatcccgcctgaagggaaagctgcacgtaatcagcaagcgatatacgcagcgaattgagcggcataacctgaatctgaggcagcacctggcacggctgggacggaagtcgctgtcgttctcaaaatcggtggagctgcatgacaaagtcatcgggcattatctgaacataaaacactatcaataa

SEQ ID NO: 488691 - DNA, 210 bp, Shigella sonnei
atgacggatggctggccgctgtatgaatcccgcctgaagggaaagctgcacgtaatcagcaagcgttacactcagcgaattgagcggcataacctgaatctgagacaacatctggcaaggctgggacggaagtcactgtcgttctcaaaatcggtggagctgcatgacaaggtcatcgggcattatctgaacataaaacactatcagtaa

SEQ ID NO: 488692 - DNA, 318 bp, Shigella sonnei
atggctgcgaatgataacaaggaatttctcacatccttatctaatataatgaggtacaaaatagatgctggactttccgaatcctatacatgctatttattaagtaagggaaagatcataagaccatatctgaaaaatctaaatccactccaacttgccgctgattgcattgaaacagtaaataaaataaaagataagaataaaaaaatcattgatataaattcagttaatatttgtagtgatgataaaaatataaaattgagagttaatagtactattatggccattgatgattctataaaatgcatcgatgaatga

SEQ ID NO: 488693 - DNA, 723 bp, Shigella sonnei; identical to SEQ ID NO: 487523

SEQ ID NO: 488694 - DNA, 438 bp, Shigella sonnei
atgtcggaccgcgcacgctcgctcagacattcccacatcctgtcccgatttctgcgggtttgtgtcaccggaacactggcgcaatgtcggcagttttttgcgccgcgccgccctccacgtaagcgcgcagttctggcaaccggacagcaaatcattctgccgttttcgtgccacagctgttccgcgcgatcgacaaactggcagtcggggaatctcacgaagtgcgcactcatacaaactacacttcgtttcgtttgtcgtgcggtctgcgacgctcaaaaaaccgagaaacggcgggaattttcgggacaggatgtgggaatgtcggaccgcgcacgctcgctcagacattccccacctggtcagggcttcgccccgacaccccgccaacgcctcacggcacgcgaaaaaattccgcgtaccgctcaccgttcttga

SEQ ID NO: 488695 - DNA, 267 bp, Shigella sonnei; identical to SEQ ID NO: 11114

SEQ ID NO: 488696 - DNA, 267 bp, Shigella sonnei; identical to SEQ ID NO: 11114

SEQ ID NO: 488697 - DNA, 450 bp, Shigella sonnei; identical to SEQ ID NO: 488671

SEQ ID NO: 488698 - DNA, 267 bp, Shigella sonnei
atggcgacgctggggcgtcttatgagcctgctgtcaccctttgacgtggtgatatggatgacggatggctggccgctgtatgaatcccgcctgaagggaaagctgcacgtaatcagcaagcgatatacgcagcgaattgagcggcataacctgaatctgaggcggcacctggcacggctgggacggaagtcgctgtcgttctcaaaatcggtggagctgcatgacaaagtcatcgggcattatctgaacataaaacactatcaataa

SEQ ID NO: 488699 - DNA, 267 bp, Shigella sonnei; identical to SEQ ID NO: 11114

SEQ ID NO: 488700 - DNA, 348 bp, Shigella sonnei; identical to SEQ ID NO: 485869

SEQ ID NO: 488701 - DNA, 315 bp, Shigella sonnei; identical to SEQ ID NO: 33595

SEQ ID NO: 488702 - DNA, 315 bp, Shigella sonnei; identical to SEQ ID NO: 33595

SEQ ID NO: 488703 - DNA, 315 bp, Shigella sonnei; identical to SEQ ID NO: 33595

SEQ ID NO: 488704 - DNA, 210 bp, Shigella sonnei
ttgcgcatacaaccgggcagtgatgtgattgtctgcgctgaaatggacgaacagtggggctacgtcggtgctaaatcacgtcagcgctggctgttttacgcgtatgacaggatacggaggacagttgtggcacacatcttcggtgaacgcactctggccacactggagcgtcttctgagcctgctgtcggcctttgaggtcgtggtatag

SEQ ID NO: 488705 - DNA, 267 bp, Shigella sonnei; identical to SEQ ID NO: 11114

SEQ ID NO: 488706 - DNA, 210 bp, Shigella sonnei; identical to SEQ ID NO: 9340

SEQ ID NO: 488707 - DNA, 225 bp, Shigella sonnei; identical to SEQ ID NO: 133446

SEQ ID NO: 488708 - DNA, 225 bp, Shigella sonnei; identical to SEQ ID NO: 133446

SEQ ID NO: 488709 - DNA, 945 bp, Shigella sonnei; identical to SEQ ID NO: 471492

SEQ ID NO: 488710 - DNA, 378 bp, Shigella sonnei; identical to SEQ ID NO: 476066

SEQ ID NO: 488711 - DNA, 225 bp, Shigella sonnei; identical to SEQ ID NO: 133446

SEQ ID NO: 488712 - DNA, 225 bp, Shigella sonnei; identical to SEQ ID NO: 133446

SEQ ID NO: 488713 - DNA, 225 bp, Shigella sonnei; identical to SEQ ID NO: 133446

SEQ ID NO: 488714 - DNA, 225 bp, Shigella sonnei; identical to SEQ ID NO: 133446

SEQ ID NO: 488715 - DNA, 3858 bp, Shigella sonnei; identical to SEQ ID NO: 484798

SEQ ID NO: 488716 - DNA, 867 bp, Shigella sonnei; identical to SEQ ID NO: 464884

SEQ ID NO: 488717 - DNA, 225 bp, Shigella sonnei; identical to SEQ ID NO: 133446

SEQ ID NO: 488718 - DNA, 225 bp, Shigella sonnei; identical to SEQ ID NO: 133446

SEQ ID NO: 488719 - DNA, 225 bp, Shigella sonnei; identical to SEQ ID NO: 133446

SEQ ID NO: 488720 - DNA, 225 bp, Shigella sonnei; identical to SEQ ID NO: 133446

SEQ ID NO: 488721 - DNA, 225 bp, Shigella sonnei; identical to SEQ ID NO: 133446

SEQ ID NO: 488722 - DNA, 225 bp, Shigella sonnei; identical to SEQ ID NO: 133446

SEQ ID NO: 488723 - DNA, 225 bp, Shigella sonnei; identical to SEQ ID NO: 133446

SEQ ID NO: 488724 - DNA, 225 bp, Shigella sonnei; identical to SEQ ID NO: 133446

SEQ ID NO: 488725 - DNA, 225 bp, Shigella sonnei; identical to SEQ ID NO: 133446

SEQ ID NO: 488726 - DNA, 267 bp, Shigella sonnei; identical to SEQ ID NO: 11114

SEQ ID NO: 488727 - DNA, 267 bp, Shigella sonnei; identical to SEQ ID NO: 11114

SEQ ID NO: 488728 - DNA, 267 bp, Shigella sonnei
atggcgacgctggggcgtcttatgagcctgctgtcaccctttgacgtggtgatatggatgacggatggctggccgctgtatgaatcccgcctgaagggaaagctgcacgtaatcagcaagcgatatacgcagcgaattgagcggcataacctgaatctgaggcagcacctggcacggctgggacggaagtcgctgtcgttctcaaaatcggtggagctgcatgacaaagccatcgggcattatctgaacataaaacactatcaataa

SEQ ID NO: 488729 - DNA, 225 bp, Shigella sonnei; identical to SEQ ID NO: 133446

SEQ ID NO: 488730 - DNA, 225 bp, Shigella sonnei; identical to SEQ ID NO: 133446

SEQ ID NO: 488731 - DNA, 225 bp, Shigella sonnei; identical to SEQ ID NO: 133446

SEQ ID NO: 488732 - DNA, 225 bp, Shigella sonnei; identical to SEQ ID NO: 133446

SEQ ID NO: 488733 - DNA, 267 bp, Shigella sonnei; identical to SEQ ID NO: 11114

SEQ ID NO: 488734 - DNA, 225 bp, Shigella sonnei; identical to SEQ ID NO: 133446

SEQ ID NO: 488735 - DNA, 267 bp, Shigella sonnei; identical to SEQ ID NO: 487831

SEQ ID NO: 488736 - DNA, 225 bp, Shigella sonnei; identical to SEQ ID NO: 133446

SEQ ID NO: 488737 - DNA, 225 bp, Shigella sonnei; identical to SEQ ID NO: 133446

SEQ ID NO: 488738 - DNA, 225 bp, Shigella sonnei; identical to SEQ ID NO: 133446

SEQ ID NO: 488739 - DNA, 225 bp, Shigella sonnei; identical to SEQ ID NO: 133446

SEQ ID NO: 488740 - DNA, 327 bp, Shigella sonnei; identical to SEQ ID NO: 485848

SEQ ID NO: 488741 - DNA, 225 bp, Shigella sonnei; identical to SEQ ID NO: 133446

SEQ ID NO: 488742 - DNA, 303 bp, Shigella sonnei; identical to SEQ ID NO: 484410

SEQ ID NO: 488743 - DNA, 267 bp, Shigella sonnei; identical to SEQ ID NO: 11114

SEQ ID NO: 488744 - DNA, 366 bp, Shigella sonnei; identical to SEQ ID NO: 485870

SEQ ID NO: 488745 - DNA, 276 bp, Shigella sonnei; identical to SEQ ID NO: 485876

SEQ ID NO: 488746 - DNA, 243 bp, Shigella sonnei
atggtggccgatcctgaatggttcctcgaactgacccgccagacgcacaagcgccgctttgtggcgaccggcggcgcactcaaagacgtgctgaaactcgatcaggaaaccgacgccgacatggtgatcggggatgatatttccgagggcgacgatgacggttcacgcatcgcgttcgagtggaaaaccgaggtcagaaagtaccgtcgctcaccgacgaaagataaaactgaatcaggctag

SEQ ID NO: 488747 - DNA, 225 bp, Shigella sonnei; identical to SEQ ID NO: 133446

SEQ ID NO: 488748 - DNA, 225 bp, Shigella sonnei; identical to SEQ ID NO: 133446

SEQ ID NO: 488749 - DNA, 225 bp, Shigella sonnei; identical to SEQ ID NO: 133446

SEQ ID NO: 488750 - DNA, 183 bp, Shigella sonnei
gtggcgaccggcggcgcactcaaagacgtgctgaaactcgatcaggaaaccgacgccgacatggtgatcggggatgatatttccgagggcgacgatgacggttcacgcatcgcgttcgagtggaaaaccgaggtcagaaagtaccgtcgctcaccgacgaaagataaaactgaatcaggctag

SEQ ID NO: 488751 - DNA, 225 bp, Shigella sonnei; identical to SEQ ID NO: 133446

SEQ ID NO: 488752 - DNA, 225 bp, Shigella sonnei; identical to SEQ ID NO: 133446

SEQ ID NO: 488753 - DNA, 225 bp, Shigella sonnei; identical to SEQ ID NO: 133446

SEQ ID NO: 488754 - DNA, 225 bp, Shigella sonnei; identical to SEQ ID NO: 133446

SEQ ID NO: 488755 - DNA, 216 bp, Shigella sonnei; identical to SEQ ID NO: 463866

SEQ ID NO: 488756 - DNA, 225 bp, Shigella sonnei; identical to SEQ ID NO: 133446

SEQ ID NO: 488757 - DNA, 366 bp, Shigella sonnei; identical to SEQ ID NO: 10065

SEQ ID NO: 488758 - DNA, 366 bp, Shigella sonnei; identical to SEQ ID NO: 10065

SEQ ID NO: 488759 - DNA, 699 bp, Shigella sonnei
atgcaggatatacagcaggaaacactcaatgagtgcactaaaacggagcaatccgcgctggtcgtgctctgggaaattgatctgacagaggtcggcggagatcgttatttcttctgtaatgagcagaacgaaaaaggtgaaccagtcacctggcaggggcggcagtatcaggcttatcccattcagggaagcggatttgagatgaacggcaaaggagccagtgcaaggccaacgcttaaagtctctaatctgtacggcatggtcaccgggatggcggaagatctgcagagtctggtcggcggaacggtggtccggcgtaaggtttacgcccgttttctggatgcggtgaacttcgtcaacggaaacagagacgccgatccggagcaggaggtgatcagccgctggcgcatcgagcagtgcagcgaactgagcgcggtgagtgcctcctttgtactgtccacgccgacggaaacggatggcgctgtttttccggggcgtatcatgctggccaacacctgcacctggacctatcgcggtgatgagtgcggttatcacggtccggcagtcgcggatgaatatgaccagccgacgtccgatatcacgaaggataagtgcagcaaatgcctgagtggttgcaagttccgcaataacgtcggcaattttggcggctacctttccattaacaaactttcgcagtaa

SEQ ID NO: 488760 - DNA, 735 bp, Shigella sonnei; identical to SEQ ID NO: 487738

SEQ ID NO: 488761 - DNA, 189 bp, Shigella sonnei; identical to SEQ ID NO: 463227

SEQ ID NO: 488762 - DNA, 381 bp, Shigella sonnei; identical to SEQ ID NO: 458903

SEQ ID NO: 488763 - DNA, 366 bp, Shigella sonnei; identical to SEQ ID NO: 488120

SEQ ID NO: 488764 - DNA, 189 bp, Shigella sonnei; identical to SEQ ID NO: 463227

SEQ ID NO: 488765 - DNA, 189 bp, Shigella sonnei; identical to SEQ ID NO: 487746

SEQ ID NO: 488766 - DNA, 234 bp, Shigella sonnei; identical to SEQ ID NO: 487009

SEQ ID NO: 488767 - DNA, 270 bp, Shigella sonnei
gtgaagaagcgttacgttattgcgctggtgatagtcatcgccggactgattacgttatggagaattcttaacgcacccgtgccgacttatcagacactgattgtgcgccccggtgatttacagcaaagcgtgctggcgaccggaaagctggacgcgctgcgtaaggttgacgtgggcgcgcaggtcagcggtcagttgaaaacgctgtcggtggcgattggcgataaagtaaaaaaagaccagcttttaggggtaatgccgatcagttaa

SEQ ID NO: 488768 - DNA, 783 bp, Shigella sonnei
atggacccggtgtacacgccggcgcgaaaaatccacctgtaccactgcgaccatcgcggcctgccgctggtgcttatcagcacggaaggggcaacagaatggtgcgcagaatacgatgagtggggcaacctgctgaatgaagagaacccgcatcagctgcagcagcttatccgcctgccggggcagcagtatgatgaggagtccggcctgtattacaaccgccaccgctattatgacccgctgcaggggcgatatatcactcaggatctgattggactgaaggggggatggaatttttatcagtatccgttgaatccgataactgatattgacccgttgggattagcgacctgtttatacagcataactttaagtatgctttcatgcgtttcagatacgcaaaatgatgataactcttatgatgtgcttactattcctgtcgcctctggtaataatggtaataatatgcaatgtaaaaataatcctggttgtacacacttacaaaatagaggtccaatacctcaaggggtatggagctggaatgttaatggtcctggagcaaccaatagaaaacctaatggtatacgtttagtaccgtcagcaaatacagaaacatataatcgtgatggatttttaacacaaagttgtttaaacgctttcggtccgtctttaggacctcgattctgttccgagggttgtataactggttcatctaatgacatgcaaaaattaaatgagttaatattttcagagccagatagcacattaacagttacggactaa

SEQ ID NO: 488769 - DNA, 366 bp, Shigella sonnei; identical to SEQ ID NO: 10065

SEQ ID NO: 488770 - DNA, 189 bp, Shigella sonnei; identical to SEQ ID NO: 463227

SEQ ID NO: 488771 - DNA, 462 bp, Shigella sonnei; identical to SEQ ID NO: 487756

SEQ ID NO: 488772 - DNA, 189 bp, Shigella sonnei; identical to SEQ ID NO: 463227

SEQ ID NO: 488773 - DNA, 366 bp, Shigella sonnei; identical to SEQ ID NO: 462994

SEQ ID NO: 488774 - DNA, 381 bp, Shigella sonnei; identical to SEQ ID NO: 458903

SEQ ID NO: 488775 - DNA, 381 bp, Shigella sonnei; identical to SEQ ID NO: 35582

SEQ ID NO: 488776 - DNA, 279 bp, Shigella sonnei; identical to SEQ ID NO: 11573

SEQ ID NO: 488777 - DNA, 435 bp, Shigella sonnei
atggacgcctcacgggccgatgatgcagctgctgtctcagagtctgccgcagctgaggcgctctgttccgctgccgtttcagaagacttagcattcgtctcggacgttttggccgccttcgcagaatttgcagccgccgtcgccgaggaagctgcgctactggcgcttgatgatgcgttcgtttctgatgattttgccgcctcttttgaagccgacgcatcccgggctgaggtggcagcttctgacgctttcgtggtcgcggtggatgcagaagtggctgctgattgttgtgacgctgccgcattcgtttctaacgttttcgccgcaccggcactggtagccgccgcgctttttgaggactctgcagcggcagcactttttgaggcttcagtggcctttgttgatgccgttcctgcgctggaagacgctgactga

SEQ ID NO: 488778 - DNA, 984 bp, Shigella sonnei; identical to SEQ ID NO: 484785

SEQ ID NO: 488779 - DNA, 366 bp, Shigella sonnei; identical to SEQ ID NO: 462994

SEQ ID NO: 488780 - DNA, 447 bp, Shigella sonnei; identical to SEQ ID NO: 486126

SEQ ID NO: 488781 - DNA, 189 bp, Shigella sonnei; identical to SEQ ID NO: 463227

SEQ ID NO: 488782 - DNA, 366 bp, Shigella sonnei; identical to SEQ ID NO: 488120

SEQ ID NO: 488783 - DNA, 654 bp, Shigella sonnei; identical to SEQ ID NO: 476867

SEQ ID NO: 488784 - DNA, 537 bp, Shigella sonnei
atgcagctccctgcgtttcgtcagaagctgagcgacggctggtatcaggtgcgtattgccgggcaggatgttagcacgtccggattaacggcgcagttacatgaggctctgcctgacggcgctgtgattcatattgttcccagagtcgccggggccaagtcaggtggtgtattccagattgtcctgggagcagccgccattgccggatcattctttaccgccggagccacccttgcagcatggggggctgccattggtgccggtggtatgaccggcattctgttttctctcggtgccagtatggtgctcggcggtgtggctcagatgctggcaccgaaagccagaactccccgcacacagacaacggataacggtaagcagaacatctatttctcctcactggataacatggttgcccagggcaatgttatgcctgttctgtatggtgaaatgcgcgtggggtcacgtgtggtatctcaggagatcagcacggcagacgaaggggacggtggtcaggttgtggtgattggtcgctga

SEQ ID NO: 488785 - DNA, 738 bp, Shigella sonnei; identical to SEQ ID NO: 486991

SEQ ID NO: 488786 - DNA, 366 bp, Shigella sonnei
atgattgatgtcttaggaccggagaaacgcaaacggcgtaccacacaggaaaagatcgcaattgttcagcagagctttgaaccggggatgacggtctccctcgttgcccggcaacatggtgtagcagccagccagttatttctctggcgtaagcaataccaggaaggaagtcttactgctgtcgccgccggagaacaggttgttcctgcctctgaacttgctgccgccatgaagcagattaaagaactccagcgcctgctcggcaagaaaacgatggaaaatgaactcctcaaagaagccgttgaatatggacgggcaaaaaagtggatagcgcacgcgcccttattgcccggggatggggagtaa

SEQ ID NO: 488787 - DNA, 273 bp, Shigella sonnei; identical to SEQ ID NO: 167055

SEQ ID NO: 488788 - DNA, 366 bp, Shigella sonnei; identical to SEQ ID NO: 487772

SEQ ID NO: 488789 - DNA, 180 bp, Shigella sonnei; identical to SEQ ID NO: 476577

SEQ ID NO: 488790 - DNA, 366 bp, Shigella sonnei; identical to SEQ ID NO: 10065

SEQ ID NO: 488791 - DNA, 366 bp, Shigella sonnei; identical to SEQ ID NO: 10065

SEQ ID NO: 488792 - DNA, 303 bp, Shigella sonnei; identical to SEQ ID NO: 21213

SEQ ID NO: 488793 - DNA, 303 bp, Shigella sonnei; identical to SEQ ID NO: 21213

SEQ ID NO: 488794 - DNA, 513 bp, Shigella sonnei
atgcagatcccggcgtttcgtcagaagctgagcgacggctggtatcaggtacgcattgccgggcgtgatgcaggcgaaaatgaattatctgcccgtcttaatgaaccgctggcaaatggtgccgtgatccacatcgttccgcgtctggcgggtgccaaaagtggcggtgtgtttcaggcggtgctgggtgcggcgctgattgcggtggcatggtggaaccctgttggctggctgggggccgcggctgtatcgggtatgtatgcagcaggggccagtatgatcctgggtggtgtggcgcagatgctggcaccgaaagccaggatgcccacggcagccagtacagataacggcaaacagaacacttatttctcctcactggataacatggttgcccagggcaatgttctgcccgttctgtacggtgaaatgcgcgtggggtcgcgggtggtctctcaggagatcagcacggcagacgaaggggatggtggtcaggttgtggtgattggtcgctga

SEQ ID NO: 488795 - DNA, 348 bp, Shigella sonnei; identical to SEQ ID NO: 485869

SEQ ID NO: 488796 - DNA, 189 bp, Shigella sonnei; identical to SEQ ID NO: 463227

SEQ ID NO: 488797 - DNA, 207 bp, Shigella sonnei; identical to SEQ ID NO: 488007

SEQ ID NO: 488798 - DNA, 255 bp, Shigella sonnei
atggcgggcgtggcttacagccgtgtgtcgactttttccggggattatctccgcgtaactgacaacaaggggaaaacgcacgacgtgctgaccggaagtgatgacggtcgccacagcaacacgtctctggcgtggggagctggcgtgcagtttaacccgaccgaatccgtggccattgatattgcttatgaaggctccggcagtggcgactggcgcactgacgatttcatcgtgggtgtcggttataagttctga

SEQ ID NO: 488799 - DNA, 189 bp, Shigella sonnei; identical to SEQ ID NO: 463227

SEQ ID NO: 488800 - DNA, 276 bp, Shigella sonnei
atgtcgactgaaaatgatgaaatcattaactccctgatacgccagattaataattttgataaagcattgcagcatgctgcggcgcgtagtgatataactcttttagcaatttcatttcttgcatctgtaatggataaaaatgaagtcgtacgacagagtcttgttgattatatcgactcgcttcaaccaggcactttcaatcatgagagcttcaatcatgagaaagagcatgttaaatctgtaattaattctcttgttttgaatcaaaagaattaa

SEQ ID NO: 488801 - DNA, 330 bp, Shigella sonnei
atggaatttaaagatttaccaatgccattccaggaaatggcagcgaatatagttcgttcccaactggcgactcttgacctgagtaccgtagaaaaagaaaccatcgatactatatccggtaacgtgcgtcgtgcctttatcggtctgtacgaagagaagcagctctctgataaccaggatttacatgaaaaatacttcctggatctaatggacatcattgataaggggtttggcttgttaatgaaaaagaaagggattcgaatagaaccccttgaaaattactttgcaacaaaaagcattaattcttttgattcaaaacaagagaattaa

SEQ ID NO: 488802 - DNA, 288 bp, Shigella sonnei
atgttaccggttttatggctcgaaagcgcagatgccgacctagataatataaccagctatattgcacgttttgacatagatgcggcagaacgtttgtggaaacgcttaaggacttgcgtcctgccattatctgaacatccgtatttatacccgccaagcgacagagtgcctggtttgcgtgaaattgtagctcaccccaattacatcattctgtaccgcgtgacaatttcaggcattgaaattgttaacgtagttcacgcccgccgacagttccctgtaacaccttaa

SEQ ID NO: 488803 - DNA, 192 bp, Shigella sonnei
atgaacacggccctttcaccaatggtttctgaatttgaaaccgtcgagcaagaaaatagttataacgaatggctgcgtgcaaaagtggccgcaagccttgctgatccacgtccagccattccccatgacgaagttgaacgcagaatggctgaacgctttgctaacatgcgcaaggaacggagcaaacagtaa

SEQ ID NO: 488804 - DNA, 462 bp, Shigella sonnei
atgggcgtactcgaaatcagtgctcttagaattaagatgcttctattggcaaaaggctggagccaagcagaacttgcgcgcagaattggtattgctcaacaatccgtccaaaggtgggtttgtggcatctcaagccctacagcagccaacctagataaactatctgatgtgactggatttcctcagtattggtttttcttaccattaaatgaagaaaataaggacagggcacaggatatattaaaaataacccctacgcaaaaggaactacttcaaacatttgaggcatttccagaggaagagcaacagcaaatgcttaaagatatgaaggagaaaaaagagacaatggatcgtatagttgcaaagtggctagcagcacaacaaaaagttcctaggcaggattaccagtacttacaagacgaggttcaccatgaacacggccctttcaccaatggtttctga

SEQ ID NO: 488805 - DNA, 372 bp, Shigella sonnei
atggaaacaaaagagattcggcgtttacgcctcaaagagtggttcaaagacaggactttgccgcctaaagagaaaagttacttatctcagttaatgagtggtaaagctacgtttggcgaaaaggcagctagacgtattgagcaaacatatgggatgcctggggggtatcttgatatggaacctgaagatacaacagaatctccgtcatcaagatctatggcattaactcctaaccaattggaattgttgcaaatatttagtgcttttcctgacgctgagcagcaggaaatcataaaagagctaagaaacaaaaaagaggcaatggaagatcttgttgcacgttggttggcgcggcaaggtcgccgagcctga

SEQ ID NO: 488806 - DNA, 426 bp, Shigella sonnei
atgaaaatcaagcatgaacacatccgcatggcgatgaatgcctgggcataccctgatggtgagaaagttcctgcagctgaaatagcccggacttatttcgaactggggatgacgttccctgaactgtacgacgacagccatccggaagccctggcccgtaatacacagaaaatattccgctgggtggagaaagacactcctgatgcggttgaaaaaattcaggcgttgttacctgcgatcgaaaaggctatgccacctccgctggtggcctggatgcgcagccacagttccgcttattttcgggaactggtggagacgcatgaacgattggtgagagacgctgatgaacttgtcgcggtggtaattgctggtttcaatcagatgaatcgtggtggtccggcgggaaatgccgtggtggtgcattga

SEQ ID NO: 488807 - DNA, 966 bp, Shigella sonnei
atgaagctcctttttgctgaacgcccgctggttataaacacgcagctggcgatgaaaattggtctgaatgaagccatcgtgttgcagcagttgcattactggttgagagataccggttccggcatggaatgtgatggtgttcgctggatttataacacaacagaacaatggctggagcagttcccgttctggtcagagtcaacgttaaaacgcgcatttgcaagtctgaaaacgctggggcttttgcgttgcgaaaagctcaacaaatcaaagcgtgatatgactaatttttacacgattaattacgagagcgagcttttagatggtggcaaagtgagcgaatccatcaggtcaaaatgcgctgctccatcaggtcaaaatgacacgatggaagaggccaaaatggcacgctccattggttcaaaacgacccaatgtcatcgggtcaaaatggcctgatgatcttacagagaatacaacagagattactacagagaataaaaagacttctcgtccggaagcttcgcaaccggacccgcagacggttgaacaggattttttaacccgacaccctggcgcggttgtgttcagtgcgaaaaaacgccagtggggcagccaggaagatttggcgtgtgcgcagtggttctgggggcgaatcgtgagtctttacgagcaggccgccagcgatgatggcgagatttcgcgaccgaaagaacccaactggaccgcatgggccaacgacgtgcgcacaatgcggatgctggatggcagaactcacagacaaatttgcgaaatgtttggtcgggtacagcgggatccattctgggtaaaaaacgtcatgagcccgtcaaagcttcgcgaaaaatgggatgagctggttattcgtctggggcgttcgcctgtacagcgttgcgtgaatcacatttctgaaccggatactgaaataccgccggggttcagggggtaa

SEQ ID NO: 488808 - DNA, 330 bp, Shigella sonnei
atgcaacacgctcatgacatcggacacggtgacgataatcacgctacgccccttcgccatcagccggttgccaatcgcggctgcaagatgattttttccggtgccgggcttaccgctgaacacaaaattcgtgcacccggtcatcagttcgtcagcgatggattttgcctggctcagcgcgtgtttttgcccgtcgttctgcacctgataattcgcaaacgagcatttgctgtgcagaggctggatgcccgaacgattcaggattttttccacccgcaactggcgattctggcggttgatctcctcgctacgttttcgcccttctgctag

SEQ ID NO: 488809 - DNA, 1191 bp, Shigella sonnei
atgcctgcacgttcattatgccaaaatttccttaacaacatactggcccctttgcatctttaccgtcaaaaatcactgattgacgcaactaatgctgtaataaatggcgcttccctcacacttaccagtatcgggcgtcatttaaccggtacggcatcagttaaaaacaaaataaagcgggtggatcgactgttggggaatcgacatttgcaaaatgaggtttccaccatttttcagcgaattacccaaaagattacgcggggaatgtctcgtgttgtgatactcattgactggagtgcttatcatgcctctcgttttcagcttttgcgggcaagcctggcatgtgacgggcgttctttaccgttgatgagttgtgtcgttccatcatcacagacagcgaatgcagatgtacatgagcgttttctggaatcgcttgctgagtgcttttcccccgggactgatgtcattgttattacagatgccggttttcaggggcgatggttccaacagctccgctcccgtggctggacctatatttgccgggtactgggcaatcattattacaatgttggtaatggctgggaaaaggtgtcggactcaggcacaaaagcatcaacgacagcaatttatttaggtgaaggcctgctgggtcgagataaaaatgcacaacatgaagggcatttttatctttataaaagtaagcctaaaggtcgtagatttaaacgctcgaaggaaagagcaaccagaccatcggtgacggctaaagctcgtactgccgggaaatcaccatggtttattttcacaaacagtactgagttctcgccaaaacaggtaatgaaattatacagccgtagaatgcaaattgagcaaaatttcagggatgaaaaaaatcctcgctggggatttggactacggtttggtgccagtcattcatccgggcgggtcacggtattgagtctgatcgcaacattagccagtatcattatgtggttaagcggtttcagcctggaaaacaaagggatacatcataaatatcaggcaaatacagtgaagcacaggcgagtcatctcgttattaaaactggcggagaatgtgattcgacattctccactcatactaaacacactgtcacttgacgcagggctgaaagttctacagcaacggtataccaatatgataatggtttactaa

SEQ ID NO: 488810 - DNA, 300 bp, Shigella sonnei
atgagggtttatatcgcagggccgatgaccgggtataaaaatttcaaccgtgaggcatttcacgaggcggaagagaagctgaaacagaaagggtgcacggtgttgaatccggcagtgcttcctggtgggctgacacaggcgcagtacatggatatttgtacggcgatgctccgctgtgtggatacgatttacatgctgaaaggctggcatcggtcggcaggcgctaaggcagaactggcgctggcggagaaactggggcatgcggtgatttttcaggagacagccagtgtgcaagactaa

SEQ ID NO: 488811 - DNA, 456 bp, Shigella sonnei
gtgtgcaagactaattaccaggcattacgtgaacgttattcaccaattcaggtgccggaatgtcctgtttgtggcgatgaaatgtcgatacagcgcatattttccagaacgcatattgtgtatgcctgcacaggtgagggggatgatggatattttaaaactggtcgaacttttgcggatgagcattacctgaaatcgcgcgtaaccgtcgttgatgttagcgatcctgacgtactggctttactgaaagagctggaagttaaagacaaacgcattgcagaattgacagatgcgcttacacaaatgattaatgcgcacaaaaccacaattcgttttggtcatgaacgcataactgaatgtggtggtgattgcgactcgccggaaaagatgatttcagaaaatccggatatcagaatggcagaggctgttttgagagcaggaataaaaactgaataa

SEQ ID NO: 488812 - DNA, 183 bp, Shigella sonnei
atgcgaaagttcaaaataattattgaaactggaatagctggtggagattttgaggatgtattcgaagtggacgatgacgcaacacctgatgaaattcatgacgaagcaaaagaaattttctttaactactgcaattattcatatcacgaaataaaagacgaagaggaagaacaaaatggctga

SEQ ID NO: 488813 - DNA, 177 bp, Shigella sonnei
atggctgattttggttcaactaaatacaacgtcagttttaaagaatggcatgaactgttaatggcctatgcagagttacgcggtggaagtgctgctgatgccgatgcatggcgtgatgattatgaagcaggaaaaacaccggtcgaagcatattgtgatgagtggggcgatgaatga

SEQ ID NO: 488814 - DNA, 516 bp, Shigella sonnei
atgagcgagattaattatcaggaagggcatgaaacggtagggcaggcaaaaccagttgcatggcgatatcgctatgtgaaaaaaagcgttacggactttcaggagaagatgtgggttggtgactggaaatatgtaccgacaaaagaggattgcaacgacaggccgagctatgagattcaggccttattcactgccccgccagtcccggtgacatcagaaggactggttaaagccgtgcgcttttatgaacaggtaaagcgtgaaaatccgccagctgaaacaggagcatggaaagatgctgttgattgggtactcaaagaggcctgctgtgctgccattctgggtaaagctgacaatccactagcatccagtaatcaggttagcgaattaacaatgtgggttaaacgactggtcagtcaactgaaaaaagctcagccggactgcaaattaccggagaaggcgatggattacctgaaacgaaatggactgataagcgtggaggatgttttacgatga

SEQ ID NO: 488815 - DNA, 213 bp, Shigella sonnei
atgaacggcaaatctaggttagcctcttacgtgccgaaaggcaaggagaagcaggctatgaagcagcaaaaggcgatgttagtcgccctgatcgtcatctgtattaccgtcattgtgacggcactggtaacgaggaaagacctctgcgaggtacgaatccgaaccggccagacggaggtcgctgtcttcacagcttacgaacctgaggagtaa

SEQ ID NO: 488816 - DNA, 1059 bp, Shigella sonnei
gtgcgggtattacttagacctgttctggtgccggaactcgggctggtggtccttaagcctggtcgtgaatccatgcaggtatttcataaccctcgagtgctggtggagccggaaccgaaaagcatgcgaggtttaccgtccggagtcgttcctgccgttcgccagccactggcggaagataaatcattactgccatttttcagcgatgagcgtgtgattcgtgctgctggcggtgctggtgcactgtctgactggctgttacgccacgttaaatcctgccagtggcctcatggtgactatcatcacagcgaaatcgtcatacatcgttatggtaccggcgcgatggtgttgtgctggcactgcgacaaccagctgcgtgaccagacctccgaatcactcgggcaacttgctcatcaaaacctgtcagcatggatgattgacgtcatacgccatgcaatgaatggcacacaggagcgggaattatcgctggctgaattatcctggtgggcgctctgcaatcaggtggcggacgcgctaccggaggcagtattacgtcgttcgctgggattaccggtagaaaaaatctgctcggtgtaccgcgaaagcgacatcgtaccgggagagcagaccgccaccagtatattgaaacaacgcacaaaaaatcttgcaccgttgccttacgcccaccagcaacagaacccaccacaggaaaagacggtggtcagcattgccgttgatccggattctccggctcagtatctccagcgccagaaaccacaacgggaagagatgcccgtatacacgcgctgggtaaaaacgcagaaatgcatgacgtgtggcaatcaggcagatgatccgcatcacatcattggtcatggactgggagggatgggaacaaaggctgacgatttgtttgttattccgttgtgccgtaaatgtcataacgaactgcacgccggggtaaaagattttgaagaaaaacacagcagccagctgttgttgctgattcgttttttaatgcacgcgagaaattcgggtgtcctgaagtggaaagcatga

SEQ ID NO: 488817 - DNA, 378 bp, Shigella sonnei
atgactgaacgcatagaatttgttttgccttacccgccaacggtgaacacttactggcgacgtcgtggcagcacatattttgtatcaaaagccggtgagcgttatcgccgtgatgtggcgcttattgttcgccagcagcgactgaaattaaacctgtccggacggctggcgataaagattattgcagagccaccggataaacgtcgtcgtgacctggacaatatcctgaaagcaccactggatgcactgacacatgcggggttgcttatcgacgacgagcagtttgatgaaattaatattgtgcgcggtcagcttgtttctggtgggcggttgggtgtgaagatttacgaaattacaggtgataacgatggcgcgtga

SEQ ID NO: 488818 - DNA, 387 bp, Shigella sonnei
atggcgcgtgatattcagcaggttatggagcggtggggggcatgggctgcaaacaatcacgaagatgtgtcctgggcgtcaatcgctgctggttttaaaggattaatcccgccgaaagtgaaatcacgccctcagtgttctgatgatgatgcaatgataatttgtggctgtatggcccggttgaacaagaaaaatcaggatttgcacgatttgttggtggattattacgtaggtggaatgacttttatggagctggcacgaaagcatgggtgttcggatacctgtattggcaagcgcctgcagaaagcggaaggggttattgatggcatgttgatggtgcttgatatccgactggagatggacagatacgtagaacgaatcatgtag

SEQ ID NO: 488819 - DNA, 588 bp, Shigella sonnei
atggctattcaaatctcagttgaaactctttccccgattacccataaccaaattcccgttatcactaccgagttactggcacagctttactgtaccgagatcaacaacatcaaagtaaattacacccgtaattccgagcgttttgttgagggtaaacactttttcaaggttgttggtgatgagttgaaaaatttgcgggttactttaagtaactcacaaaatttgcaaccatctttaagagggttacaaatttccccgaaagcccgctccctcatcctctggacagaacgcggagcagcccgtcacgccaaaatgctcgaaaccgatcaggcgtgggaagtattcgaaaaactggaagactgttatttcagccagaaacagccaccagcaacacaaaactcccccaccgaaaatgatggatgcgcattactgatccacttcgataaacacggtcaggtcgacttcacggaaaaagtacctgccgatgtgatggtatgcactctggaacggttcaaattttatctggaacaacgcggctggatcgttgcccgtaaagagcagctggtggaacgactgatgcggctttaa

SEQ ID NO: 488820 - DNA, 1059 bp, Shigella sonnei
atgactaatactgtaaaaatatccagttgtaagttaatcaacgctgattgcctggaatttatccagaccttaccggaaaactctgtcgatctgatagtcacagacccgccatactttaaagtgaagcccgagggctgggataaccagtggaagggcgacgaggattacctgaaatggctggaccagtgtctggcgcaattctggcgggtactgaagcctgccggaagtctttacctgttctgtggtcatcgcctggcatctgatatcgaaatcatgatgcgtgaacgctttaatgtgctgaaccacattatctgggcgaagccgtccggacgctggaacggatgcagcaaggaaagcctgcgggcgtatttcccggcaacagaacgcattctgtttgcagaacattatcaggggccataccagcccaaaaatgacggctatgcggcaaaggggcgcgaactaaaacagcacgtcatggccccgctgatttcttactttcgtgatgcgcgtgaatcactgggaataacgtcaaaacagatagcggaagccaccggaaagaaaaacatggcttcgcactggttcagtgccagccagtggcagttaccgaacgaggatgattacagaaaacttcaggtgctgtttgcccgggtggcagaagagaaacatcagcggggtgaactggaaaagccacatcaccaactggtcagcacatacagtgagctgaaccggcagtatgccagcctgctggaagagtacaaatccctgcggcgttatttttccgtatcggcagccgttccttatacggatgtctggacgcacaagcctgtgcagtattatccgggcaaacatccctgtgaaaaaccggcagatatgttgcggcaaatgattaccgccagcagtcgtccgggtgacctggttgcagatttcttcatggggtccggttcgacagtcaaagcagcgatggcgctggggcgtcgtgcaattggtgtcgagctggaggctgaacgttttgagcagaccgcaagagatgtacagaatttaatcagaaagagagagtga

SEQ ID NO: 488821 - DNA, 630 bp, Shigella sonnei
atgaagcatgaagaaatgaatcagcgattcaatcacctggaaaatgaaatcactgagcttaataaaaaattgtcggcgttggtgagttctgaagatgaaaacaaacgccgcgatgagcattatgcggcgatttacgattactgccacaaagtcgctcacgagacttttatgaagtttttgcaggaaaagtttttaccggccgcattgtcagaaaaagaggcggcttacctgcggcctgagtacgtcattacggttaacagtgccggagaggaagagcataaaagtgattttattgcgtctgcaccggataaagaccaggaaccccgtcggcctttcagggtttcctgtgaagagggtgagttcgtcgtttatgagaacggaaaacctgtccgggcatcgcatcatcactgcctgaaaattattaatctcgctatcagatgcctgaaagacgaaaacaccagagttatgaaacgcattggccgttgcatggggtatttgcaggtggcggcagagattgaagcacttgccagtggtgcagacatggatgctgcggtgcgggaggctcttcttcgtgatttcaatactccccctttaagaaagagcctgatgactggatccagccggggctga

SEQ ID NO: 488822 - DNA, 468 bp, Shigella sonnei
atgagcagagtcaccgcgattatctccgctctggttatctgcatcatcgtctgcctgtcatgggctgttaatcattaccgtgataacgccattacctacaaagagcagcgcgacaaaaacgcaagagaactgaagctggcgaacgcaaccattactgacatgcagcagcgccagcgttctgctgatgcactcgatgctaaatacacgaaggagttagctgatgcgaaagctgaaaatgatgctcttcggcgcaagcttgataatggtggtcgggtgctcgtcaaaggaaaatgccctgtgccagcctcagccaaaacctccagcgcctccggcatgggcaatgatgccaccgtcgaactctcttcagttgctggacgaaacgttctcggtatccgggacggaattatccgcgaccaaacagcactgagaacgcttcaggaatacatcaatacgcaatgcctgaattaa

SEQ ID NO: 488823 - DNA, 312 bp, Shigella sonnei; identical to SEQ ID NO: 488288

SEQ ID NO: 488824 - DNA, 510 bp, Shigella sonnei
gtggctactcagactgaagttgccaggcatttgagtctgaccgatcgccagcttcgcagattacagaaactgccgggtgccccggtttcgaacaagcgaggacaactggatctggatgcctggcgtgatttttacatatcgtatctgagaagaagtaaaaacgatgtgcctgatggtgatccggaagaggattatgaagagaaactactcattgcgagatgggaactgaccgcagaacaggctgtcgcacagcagttaaaaaatcaggtgtcaaaaggaaatcttattgatagcggattttgtatttttgcccttagtaagctggcgatggctttatccagtacgcttgactccattcctttgtccatgcaacgacagttcccggatttaacgccgcgtcatattgatcatctgaaaatccttattgctaagggagcgaatcagtgcgcgcgtgcgggggataaattaccggatttactcgatgaatatatcagaacaacaactgagtaa

SEQ ID NO: 488825 - DNA, 1929 bp, Shigella sonnei
atgaatatatcagaacaacaactgagtaatatgatggtggcagtcactatcgcactgcagccactggtcagggtattgccggtgacggctgtagaatgggccgatcaaaattattacctgcctaaagaatcgtcatacggtgagggggaatggaaaacgctgccgtttcaggtcgccatcatgaactgcatgggcaatgacgagattcgtacagttaacctgattaaatctgcccgtgttggttatacaaaaatggtgcttggtgtgatcgggtattttattgagcacaaatcccgcaacactcttctttttcagccgacggactcagctgctgaagattttatgaagtctcacgtggaagcaacaattcgtgatgttccttgcctgaaaaaactttctccctggctgggccggaaacaccgggataatacgctcacactgaagcgtttttcctctggtgtggggttctggtgtttgggtggtgctgctgccaaaaactaccgtgaaaaatctgtcgatgtggtctgctatgacgaactctcctcgtttgaaccggatgtggaaaaagaaggttcgccaacactgcttggcgataaacgtattgaaggttcggtatggccaaaatccatacgcggttcaacgccaaaaatcaaaggctcctgccagattgaaaaagccgcgaatgaatctgcacatttcatgcggttttatgttccttgccctcattgcggggaggagcagtatctgaaatttggcgatgatgcgacgccgtttggcctgaaatgggagaaaggcaaaccggaaacggtgtattacctgtgtgaacataatggctgcgtgatccgtcagtctgaacttgatcagaccggggggcgctggatttgtgacaataccgggatgtggacgcgtgacggtctgacgtttttcagtgcttcgggtaatgaaattccgccgccgcgctccatcactttccatatatggacggcgtacagtccgttcaccacctgggtacagatagtctgtgactggctggatgcactgaaagatcccaacggcgtgaaaacttttgtgaacaccacgctgggcgagacctgggaagaggccgtgggcgaaaaactcgatcaccaggtactgatggataaggttgtgccttacccggcggcggtgcctgtccgggtggtttacctgactgctggtattgactcgcagcgaaaccgttttgagatgtatgtctggggatgggctccgggagaggaagcctttctggtggataaaattatcattatgggacgacctgatgaggaagagacgctgttacgtgtggatgcggcgatcaacaaaaaataccgccatgcagacggtaccgaaatgaccatttcccgtgtctgctgggatatcggggggatcgatggcgaaatcgtgtatcagaggtcaaaaaaacacggtgttttccgggtactgccggtaaaaggtgcctctgtctatggcaagccggtgatcaccatgccgaaaacccgcaatcagcggggtgtgtatctgtgtgaggtggggacggataccgcaaaagaaattctctatgcccgaatgaaggccgatcccacccctgtgaatgaggccacatcgtatgccatccgctttcctgataatccggagattttttcgcagacagaggcacaacaactggtggcggaggaactggtggaaaagtgggaaaaaggaaagatgcgtctgttgtgggataacaaaaagcggcgtaacgaagcgctggactgcctggtgtatgcctatgcggcattacgtgtgtccgtgcaacgctggcaacttgatctggctgtgctggcggcatcccgcaaggatgcaactgcacaaccgacccttgaagaactggcagcgaagctgtccggaggagtgaatggttacagtcgctga

SEQ ID NO: 488826 - DNA, 204 bp, Shigella sonnei; identical to SEQ ID NO: 473969

SEQ ID NO: 488827 - DNA, 1593 bp, Shigella sonnei
atgaaacgaacgcctgtcctgattgatgtgaacggcgttccgcttcgtgagagtctcagctacaacggaggcggcgcaggatttggcgggcaaatggcagagtggttaccaccggcgcagagtgccgatgcggccctgttgcctgcattgcgtctggggaatgcccgggcagatgatctggtgcgcaataacggtatcgcggctaatgcggtggccctgcataaggatcatatcgtcgggcacatgtttcttatcagctaccgtctgaactggcgttggctggggatgcgggagaccacggcaaaaagttttgtcggggaggtggaagcagcctggtcggaatacgcagaaggaatgtttggcgagatcgacgtggaagggaaacgcacgtttacggaatttatccgtgaaggggtgggcgtgcatgcctttaacggcgaaatctttgtgcagccggtctgggatacggaaaccacgcagttattccgtacgcgttttaaagccgtgagtccgaaacgggtggacacgccaggacacggtatggggaaccactttctgcgggccggggttgaggtcgatcggtatgggcgggcgattgcgtaccatatctgtgaggatgattttccgttctctggtgctggacgctgggagcggatcccgcgtgagcttcccaccgggcgtccggccatgctgcatatttttgagccggtggaggacgggcagacccgtggggctaatcagttttacagcgtaatggagcggatgaagatgctggactccctgcaggccacgcagcttcagtcggccattgtgaaggcgatgtatgcagccacaatcgaaagtgaacttgataccgaaaaggcatttgaatatatcgcgggggcaccgcaaggtcagcaggataatccgcttattaatattctggagaagttcacccgctggtatgacacgaataacgtgacgctgggcggtgttaaaattccgcacctttttcctggcgatgcgctgaacctgcagacagcgcaggattcagacaatggattttcggcgcttgaacaggcgctgctgcggtatattgcagccggtcttggcgtttcctacgaacagttgtcccgtgattactcgaaggtcagttactcaagtgcccgcgcctccgccaatgagtcgtggcgctattttatggggcggcgaaaatttattgcggcccggctggccacgcagatgttttcctgctggctggaagaggcgcttcttcgggggattattcgtccgccacgggcgcgttttgatttttaccaggcgcgttcagcctggtcacgggcagagtggattggctccggaagaatggccattgacgggctcaaggaggtccaggaatcggtgatgcgcattgaggccggactgagcacgtatgagaaagaactggcactgatgggcgaagattatcaggacattttccgccagcaggtcagggaatccgcagagcgcgaaaaagccggactctcacgtccggtgtggatagcccaggcgtatcagcagcagatagcggagagtcgcaggccggaagaggagacaacatcacgtgagacgtaa

SEQ ID NO: 488828 - DNA, 1506 bp, Shigella sonnei
gtgagacgtaatctttcacatattatcgctgcggcattcaatgagccgctgcttctggagcccgcctatgcgcgggttttcttttgcgcgctcgggcgtgagatgggcgcagcaagcctttcggtaccgcaacagcaggtacagcttgacgctcccgggatgctggctgaaacggacgagtacatggccggaggcaaacgacctgcccgtgtttaccgggtggtgaacggtattgctgtactgccggtgaccggcacgctggtacaccggctgggtggcatgcggccattttccggaatgactggctatgacggcattgtcgcctgtcttcagcaggcaatggcggacactcaggtacggggcgtactgctggacattgacagtcctggcgggcaggccaccggcgcgtttgactgcgctgacatgatttaccgtctccggcagctgaagcctgtctgggcactgtgcaatgacacggcctgttcagccgccatgttactggcatcggcctgctcccgacggctggttacccagacatcccgtatcggctccattggggtgatgatgggccatgtcagctatgccggtcatctggcacaggccggtgtggatatcacgctgatttacgccggatcgcacaaggtggatggcaatcagtttgaatccctgccagcaaaggttcgccaggacatgcagcagcgcattgatgcggcgcgccggatgtttgctgaaaaagtggcgatgtataccggtttatctgtagatgcggttatgggaacagaggccgccgtttttgaaggtcagtccggtattgaggccggactggcggatgaattaatcaatgcgtcggacgccatcagcgtgatggctgcgacgctgaacacacatgatacaggaggcactatgccgcaattaactgcaacggaagccgccgcgcaggaaaaccagcgagtgatggggatcctgacgtgtcaggaagcgaaaggacacgaacagcttgccacgatgctggcaggacaacagggcatgagcgttgaacaggcccgggcaattctggcagcggtggccccacagcagccggtggcatctgcgcagagtgaagccgatcgcattatggcatgtgaagaggcgaaaggccgagaacagctggcggcaacgctggctgcgatgccggatatgacggtggaaaaagcccgcccgatcctggctgcttcaccgcaggcggatgccgggccatcactccgtgatcagatcatggccctggatgaggcaaaaggggctgaggtgcaggctgaaaaactggctgcctgcccgggaatgaccgtggagaacgcccgggatgtgctggctgctgcatcaggtaaagcagaaccggtttctgcgtccacaacagccatgtttgaacgcttcatggcgaaccattcaccgactgcgttgcagggcggtatgtcacagacgtcagcagacggtgatgcggacgtgaaaatgctcatggccatgccatga

SEQ ID NO: 488829 - DNA, 348 bp, Shigella sonnei
atggtgacgaaaaccatcactgaacagcgtgcagaagtacgtatttttgccggtaatgatccggcccataccgccacaggcagcagcgggatttcctcggcaacaccggctctgacgcccctgatgctggatgaggccaccgggaaactggtggtctgggacggacagaaggcaggccatgcggttggcatactggtactgccgcttgaaggtacagagacggtgctgacgtattacaagtcggggacctttgcgacggaggccatccactggcctgagagagtggatacacacaaaaaggcgaatgcctttgccggcagcgccctgagtcacgcggcgctgccgtaa

SEQ ID NO: 488830 - DNA, 1029 bp, Shigella sonnei
atgggattgtttacgacccgccagttactcggttataccgaacaaaaagttaaatttcgtgcgctgtttctggagctgtttttccgccgtacggtgaatttccataccgaagaggtaatgctggacaaaattaccggaaaaacgccggtggcggcctatgtctccccggttgttgaaggaaaggtgttgcgtcaccgtggcggtgaaactcgtgtactgcgcccgggctacgttaagccgaaacacgaatttaattaccagcaggcggtggagcgtcttcccggtgaagatccggcccagctgaacgacccggcttaccgtcgcctgcgtatcatcaccgataacctcaaacaggaagagcacgccattgtccaggtggaagagatgcaggcggtgaatgccgtgctgtatggcaaatacaccatggaaggagagcagtttgaaactgttgaggtcgattttggccggtcggtgggaaataacattacgcaggcaggagggacggagtggagcgctcaggaccgcgatacctttgatccgacgcatgatctggatgcgtactgtgattttgcttccggcaccatcaatattgccattatggatggtaaggtctggcgtctgctgaatggctttaagctgttccgcgaaaaactggatacccgtcgtggctcaaattcacagctggaaacggcagtgaaagacctgggggcggtggtgtccttcaaagggtattatggtgatctggcaatcgtggtggcaaaaacgtcctatgtggcagaggacggtaccgaaaaacgttatctgccggacggcacgctggttctggggaatactgctgcagatgggatccgttgctacggtgccattcaggatgcgcaggcgttgtctgaaggtgttgtggcctcttcccgttacccgaaacactggatgaccgtaggcgacccggcccgtgaattcaccatgacgcagtcctcgccgttgatggtgttaccggatccggatgagtttgtggtggtgcaggttaaataa

SEQ ID NO: 488831 - DNA, 402 bp, Shigella sonnei
atggcaaagaaagacgagaacctgatacgtctgaaggaactggcagaattgctggggcgtgagcctgatatgtcgggaagcgcagcagatattgcgcagcgtgtggcagaactggaagaagagcttggcgatgcggatggctctgctgatcagggggcacatcccgcgcaggaaggagagctgaccggacatgaaaatgaggtggtatcagcgcagccggataccgtgattccggatacggctgatctggttacggtcgtggcactggtgacgctgcataccgatgcacttcatgccacgcgggatgagcctgtgtcatttgtgctgccggggaaggcattccgtgtctctgccagcatggcagccggtatgacagaacgtggcctggtcagaatgcaataa

SEQ ID NO: 488832 - DNA, 372 bp, Shigella sonnei
atggctgattttgacaacctctttgatggtgcgattgcggatgctgacgaagccattctgcgtactatgggcattccggtacagattacgtcgggacgactggcgggagtgacgatcaccggtatttatgatgacccggagaatatcaccatggttgcaggggggatccgtctggaagactccctgccgtccttgtttgtcagaacggcatcggtttccctgctgtgtcgtcaggatactctggatatcgggggcgagtcgttcttcgtggatcgtattactccggatgacgggggcagttgctgtgtgcatctgcgccgtcatgcggggcaatcagccagcagtccgggcggtatgtatgaaaggacttga

SEQ ID NO: 488833 - DNA, 579 bp, Shigella sonnei
atgaaaggacttgagaatgccatccgcaatctgaacagccttgatacccgtatggtgccacaggccggcgcatgggcgataaaccgtgtggctgcaaaagttgtttcggttgccacacggcaggttgcgcagaataccgttgccggggataaccaggtgaaaggtattcccctgaaaacggtcagggagcgtgtcaggctgcttaaagccagcccctcaggaaaaatgtatgcccgcatgcgtgttaaccggggcaacctgcccgccattaagctggggacagcccgggtcagactggcgcgtcgtggcggaaaactgcggttccggggcagtgtgctgaaggtgggcagatatcttttccgggatgcgtttattcagcaactggcaaacggtcgctggcatgtgatgcagcgtactgaaggcaaaaatcgttaccccattgacgtggtgaaaatcccgatggacggaccgctgacacaggcatttaacgatgcccgcgaccgcatcattgcggcggagatgccaaaagaactggggtatgcactgaaacaacaactgaggttatggctgacccgatga

SEQ ID NO: 488834 - DNA, 402 bp, Shigella sonnei
atgaacagacacacacaaatccgccaggtcgtgctgacacgcctgcgggacgaatgcggggagcgcgcggcgcttctggacgggcttccggtattcattgatgcgcaggagctgcccgccgtggcggtatggctgagtgatgcacagtacaccggaaaaatgacggatgaagacgactggcaggcggttctgcatattgctgttttcatccgggcacaggcaccggattcagagctggatatgtggatggagaataccgtttttccggccctgaatgacattccggccctttccggactcatcgacatgctgatcccgctcggttttaactatcagcgtgataatgagatggccacctgggcgatggcggaaatcacgtatcagatcacctacacaacttaa

SEQ ID NO: 488835 - DNA, 744 bp, Shigella sonnei
atgaccacaccaaatccactggaaaaaatgaaaggggcggggaccacactctggttgtataccggtaacggcgatgcatattcgaatcccttatcagatgctgactggctgcgtcttgcgatggtgaaggatctgcagccgggtgaaatgaccgcggatgccgaggatgatgactatcttgatgatgaaaatgccgactggaaaagcaccacacaggggcagaaatccgtcggcgatacgtcggcaacgctggcctggcgtccgggtgacagcgggcagaagaaactggttcagctgttcgactccggtgaagtctgtgcgtttcgcatcagatatcccaatggcacggttgatgtgtttcgcggctgggtgagttcactgggtaaaaccatcgcggcaaaagacgtgatgacccgtaccgtgaaaatcagcggcgtgggacgtccgtacctggcggaagaaagtacggagacggtccgcgtgaccgggctgacggtggcaccggcatccgtcagtatcagggagggggccacagccacgctgacctttacggtaaaacctgaggacgccggagacaaaaacatccgtgtgctttctacggatccgcagacagccacggtgaccctgagcggccttgtggccacggtgaaaggtgtgaggcagggcagtgccaccgttgtgggcatgacttctgacggcgatctggtggcggcggcggtggtgactgtcagcgcggcgggttaa

SEQ ID NO: 488836 - DNA, 390 bp, Shigella sonnei
atgtttctgaaacaggacacgtttaattacggcgaacagtctgcggtgctgacggaactttccgggctgcagcgggtggaatatctgacgtttgtccgggagcgtacggccgcctttgatgaacaggtggtggatatggcagagccggagcgtcagatcgcctttctgggaatggggatggatttgaacgcctggctggtctcccgctcactgtggaatgccgatcagtctcaggatgccggggcgctttattccgctgtccgcataacatggtcttatgatgcgctggggcaggcagcggaacgcattctgtccctgagtggcatggccccggcggaagtccatgatgacagtgacacacaggcggcactgacgccggaaaagtcctga

SEQ ID NO: 488837 - DNA, 303 bp, Shigella sonnei
atgcaccttgcccgggagttccggcgggcagactggcggcggatgctgtcggagatgtcggccacggagctgggtgagtggggcgattatttccggatgcagagctttggtgatatctggctggatgcgcagttttccacgctgaaatcactgattgtgcagatggtgtccggtgaacgttttccggccggtgagttcagtctggtaccggatgagggggcgattgctgaacggacggatgatgaactgatgcacctgggggaaggcatttccggaggaatgagatttgagccagatagctga

SEQ ID NO: 488838 - DNA, 699 bp, Shigella sonnei
atgcaggatattccacaggaaacacatcatgagacgacacgcctcactcagtcagcccaggtggtgctctgggaaatcgatctgacagtggtcggtggagaacgttattttttctgtaatgagcagaacgaaaaaggtgagccggtcacctggcaggggcggcagtatcaggcataccccattcaggggtcggggtttgaactgaacggcaggggctgtgctgcccgtccgacactgacggtctctaacctgcacggcatggtcaccggtatggcggaagatctgcagagtctggtcggcggaacggtggtccggcgtaaggtttacgcccgttttctggatgcggtgaacttcgtcaacggaaacagcgacgccgatccggaacaggaggtgatcagccgctggcgcatcgagcagtgcagcgaactgagcgcggtcagtgcctcttttgtgctggccacaccaacggagacggatggcgcggttttcccggggcgtatcatgctggcgaatacctgtatgtggacttaccgttctgatgagtgtggttacacgggcagggcagtggctgacgagttcgacaaaccaacgacggatatccggaaggacaaatgcagcaagtgtatgcgcgggtgtgagttgcgcaacaataccggtaatttcggcggtttcctttccatcaataaactttctcagtaa

SEQ ID NO: 488839 - DNA, 744 bp, Shigella sonnei
atgacacagacagaatcagcgattctggcgcacgcccggcgatgtgcgccagcggagttgtgcggcttcgtggtgagaacgccggagggggaaagatattttccctgcgtgaatatctccggtgagccggaggcgtatttccggatgtcgccggaggactggctgcgggcagagatgcagggtgagattgtggcgctggtccacagccaccccggtggtctgccctggctgagtgaggctgacaggcggctgcaggtgcagagcgatttgccgtggtggctggtctgccggggtgagattcataaattccgctgtgtgccgcatcttaccgggcggcgctttgagcacggggtgacggactgttacacgctgttccgggatgcttatcatctggcggggattgagatgccggattttcatcgcggggatgactggtggcgtcacggtcagaatctctatcttgacaatatggaggtgacgggtttttaccgtgtcgcactgacagaggcacagccgggcgatgtgctgctgtgctgttttggttcatcggtgccgaatcatgccgccatttactgcggtgacggcgggctgctgcaccatattcctgaacaactgagcaaacgagagaggtacaccgacaaatggcagcgacgcacacactccctctggcgtcaccgggcatggcgcgcatctgcctttacggggatttacaacgatttggtcgccgcatcgaccttcgtgtga

SEQ ID NO: 488840 - DNA, 225 bp, Shigella sonnei; identical to SEQ ID NO: 486592

SEQ ID NO: 488841 - DNA, 621 bp, Shigella sonnei
atgtctctggcgcaatgcccgggctttttattcgcacatcgtgaggaatgcaccgtggaaattaaaaaaatcattaatccccgttataccgaaagtggcgcagtagactgtgacgttttttttgacgacagggaccaggcagtcccctacacagccaccgctgatgatgtcgcaccgacgggtcagcaaatctggcaggaactgcaaagtggcaaatggggtgagatagccccattcactgtgacaccagaaatgctggaagcggccagagaggccagacgtcagggaattgaagcatggcgcacagaacaggaggcgaagccgttcacgtttgaatggaatggtcgtatctggaatgctggtcccgactcactgggccgcctgtccccggtagtcatgctggcaaaatctgtcacagcacaaacgcatatggcgtggggtgatgccgataatcagcaggtgaaactgtcgatgccggaactggaagaactggcggcagcaatggtgcaggcgcaggtcgatcgcaacgatgagatttatcaacgtcagcgggagatgaaggaagaactgaataacctggaggatttgggttcaatccgagcgtttggtattggccaataa

SEQ ID NO: 488842 - DNA, 765 bp, Shigella sonnei; identical to SEQ ID NO: 486746

SEQ ID NO: 488843 - DNA, 1572 bp, Shigella sonnei; identical to SEQ ID NO: 486745

SEQ ID NO: 488844 - DNA, 1536 bp, Shigella sonnei; identical to SEQ ID NO: 486744

SEQ ID NO: 488845 - DNA, 582 bp, Shigella sonnei; identical to SEQ ID NO: 486743

SEQ ID NO: 488846 - DNA, 300 bp, Shigella sonnei; identical to SEQ ID NO: 486742

SEQ ID NO: 488847 - DNA, 294 bp, Shigella sonnei; identical to SEQ ID NO: 468975

SEQ ID NO: 488848 - DNA, 306 bp, Shigella sonnei; identical to SEQ ID NO: 468974

SEQ ID NO: 488849 - DNA, 228 bp, Shigella sonnei; identical to SEQ ID NO: 468973

SEQ ID NO: 488850 - DNA, 609 bp, Shigella sonnei; identical to SEQ ID NO: 468972

SEQ ID NO: 488851 - DNA, 411 bp, Shigella sonnei; identical to SEQ ID NO: 468971

SEQ ID NO: 488852 - DNA, 228 bp, Shigella sonnei; identical to SEQ ID NO: 468970

SEQ ID NO: 488853 - DNA, 588 bp, Shigella sonnei; identical to SEQ ID NO: 468969

SEQ ID NO: 488854 - DNA, 450 bp, Shigella sonnei; identical to SEQ ID NO: 468968

SEQ ID NO: 488855 - DNA, 552 bp, Shigella sonnei; identical to SEQ ID NO: 468967

SEQ ID NO: 488856 - DNA, 267 bp, Shigella sonnei; identical to SEQ ID NO: 468966

SEQ ID NO: 488857 - DNA, 315 bp, Shigella sonnei; identical to SEQ ID NO: 468965

SEQ ID NO: 488858 - DNA, 147 bp, Shigella sonnei; identical to SEQ ID NO: 468964

SEQ ID NO: 488859 - DNA, 540 bp, Shigella sonnei; identical to SEQ ID NO: 486729

SEQ ID NO: 488860 - DNA, 549 bp, Shigella sonnei; identical to SEQ ID NO: 469203

SEQ ID NO: 488861 - DNA, 525 bp, Shigella sonnei
atggctaaacccgcaaaacgaatcaggaacgccgcagcggcttatgttccgcaatcccgcgatgccgtggtatgtgatatccgccggattggggacctgcaacgcgaagcagcacgacttgaaacggaaatgaatgacgctatcgctgagattacggagaaatacgcctcacagattgcaccgcttaaaaccagtatcgaaaccctttcaaaaggcgttcagggatggtgtgaagcgaaccgtgacgaactgacgaacggcggcaaggtgaagacggcaaacctggtaaccggtgatgtgtcatggcgtcagcgcccaccatcagtaagtattcgcggtgtggatgcggtgatggaaacactggagcgtcttggccttcaacgctttattcgcacgaaacaggaaatcaacaaggaagcgattttactggagccgaaagcagtcgcaggtgtcgccggaattacagttaaatcaggcattgaagatttttctattattccgtttgaacaggaagccggtatttaa

SEQ ID NO: 488862 - DNA, 288 bp, Shigella sonnei; identical to SEQ ID NO: 469192

SEQ ID NO: 488863 - DNA, 420 bp, Shigella sonnei
atgaacgtcaaaatccgaaatgaaatcctggcattaatccggattaaagagcgtaataataacggtggtgaattacgcgagtttatttgcgcccggaaagttgatggttatggcgaaaagacttacctgattgcatttgaccattacagcatttgtgcgcgttattgcggagaggcggtattccgcgccattacgtttggcaatgccttcaatgtggatttatgggaatacgtcatggaccgcgaatacatctgcgcgtcagacccgaaagcccgtgaaatgtggcagcgtatctggcgcgattaccggttaatggcaaaaggctgggcgcgctgctgttattcctcgcttgccctgaaagcggttcagttatcgctgcggcatattccggcatcactgcgcgagcctctgttgtactga

SEQ ID NO: 488864 - DNA, 264 bp, Shigella sonnei; identical to SEQ ID NO: 486920

SEQ ID NO: 488865 - DNA, 228 bp, Shigella sonnei; identical to SEQ ID NO: 469002

SEQ ID NO: 488866 - DNA, 951 bp, Shigella sonnei; identical to SEQ ID NO: 469003

SEQ ID NO: 488867 - DNA, 2097 bp, Shigella sonnei; identical to SEQ ID NO: 469004

SEQ ID NO: 488868 - DNA, 186 bp, Shigella sonnei
atgaaaaaagtaactttaaaggaacgcaaacatcatgtagtaaccgcacgtcttaatgacgatcaagtacttgtacttaaccagctaattagtagtgggaaggtacagaaagattcattatcagcctgtgttcagtacttaattaatcagtacatgattttacagggcggtggtaatgaagaatga

SEQ ID NO: 488869 - DNA, 1935 bp, Shigella sonnei; identical to SEQ ID NO: 486848

SEQ ID NO: 488870 - DNA, 639 bp, Shigella sonnei
gtgctcgaacgggcattaaaccgcattatgttggtggttattgcgagccgctttccagaaacagaaaaaccattacccctgaaaaccgaaaaatgccacaatattggctgtttatacagtatttcaggttttctcatggcattaaccgccgcgcttaaagcgcaaattgccgcctggtataaggcgcttcaggaacagatccccgactttattccccgtgtgccgcagcggcagatgattgcggacgtcgccaaaacgctggccggagaagaagggcggcatctggcgattgaagcccccaccggcgttgggaaaacgctctcctatttgatccccggcatcgccattgcccgcgaagagcaaaaaacgctggtggtgagtaccgccaacgtggcgttgcaggatcagatttacagcaaagatttaccgctgctgaaaaagatcattcccgatcttaaattcactgccgctttcgggcgtgggcgctacgtttgtccgcgtaatctgacggcgctcgccagcactgaacccacgcaacaggatctgctggcgtttcttgacgacgaactgacggcaaataatcaggaagagcaaaaacgttgtgcgaagctgaagggcgatctcgacacttatatatga

SEQ ID NO: 488871 - DNA, 462 bp, Shigella sonnei; identical to SEQ ID NO: 486824

SEQ ID NO: 488872 - DNA, 621 bp, Shigella sonnei; identical to SEQ ID NO: 479960

SEQ ID NO: 488873 - DNA, 516 bp, Shigella sonnei; identical to SEQ ID NO: 469171

SEQ ID NO: 488874 - DNA, 873 bp, Shigella sonnei; identical to SEQ ID NO: 486804

SEQ ID NO: 488875 - DNA, 828 bp, Shigella sonnei; identical to SEQ ID NO: 28366

SEQ ID NO: 488876 - DNA, 282 bp, Shigella sonnei; identical to SEQ ID NO: 487352

SEQ ID NO: 488877 - DNA, 189 bp, Shigella sonnei; identical to SEQ ID NO: 463227

SEQ ID NO: 488878 - DNA, 621 bp, Shigella sonnei; identical to SEQ ID NO: 479960

SEQ ID NO: 488879 - DNA, 621 bp, Shigella sonnei
atgcgccagaatgcgctgttgcttgagcgaaaacctgctgtaccgccatcgaaacgggcacatacaggcagagtggccgtgaaagaaagcaatcagcgatggtgctctgacgggttcgagttctgctgtgataacggagagagactgcgtgtcacgttcgcgctggactgctgtgatcgtgaggcactgcactgggcggtgactaccggcggcttcaacagtgaaacagtacaggacgtcatgctgggagcggtggaacgccgcttcggcaacgatcttccgtcgtctccagtggagtggctgacggataatggttcatgctaccgggctaatgaaacacgccagttcgcccggatgttgggacttgaaccgaagaacacggcggtgcggagtccggagagtaacggaatagcagagagcttcgtgaaaacgataaagcgtgactacatcagtatcatgcccaaaccagacgggttaacggcagcaaagaaccttgcagaggcgttcgagcattataacgaatggcatccgcatagtgcgctgggttatcgctcgccacgggaatatctgcggcagcgggcttgtaatgggttaagtaataacagatgtctggaaatatag

SEQ ID NO: 488880 - DNA, 366 bp, Shigella sonnei
atgctgaatcaggaaaccgcaaaggcagcacgaaccgattcaggttatatccttcgcgcaccgagacgaatgcgggttgctgatgccgttgctcagtatatgcgggtgcccatgggggcagggaactcagtcccgtgggatccgctggtggcaccgtatgttattgagccgatgaactgcctggcctcgcgtgaatacgacgcagtgatatttgttggcccggcacgaaccggcaagactatcggcctgattgacggctgggtgatttacaacgtgatttgcgatcctgctgatatgctgattattcagatgacggaggaaaaagcccgcgaacactccaaaaaacgactcgccagaatgaggtag

SEQ ID NO: 488881 - DNA, 348 bp, Shigella sonnei; identical to SEQ ID NO: 485869

SEQ ID NO: 488882 - DNA, 843 bp, Shigella sonnei; identical to SEQ ID NO: 479662

SEQ ID NO: 488883 - DNA, 621 bp, Shigella sonnei
atgcgccagaatgcgctgttgcttgagcgaaaacctgctgtaccgccatcgaaacgggcacatacaggcagagtggccgtgaaagaaagcaatcagcgatggtgctctgacgggttcgagttctgctgtgataacggagagagactgcgtgtcacgttcgcgctggactgctgtgatcgtgaggcactgcactgggcggtgactaccggcggcttcaacagtgaaacagtacaggacgtcatgctgggagcggtggaacgccgcttcggcaacgatcttccgtcgtctccagtggagtggctgacggataatggtttatgctaccgggctaatgaaacacgccagttcgcccggatgttgggacttgaaccgaagaacacggcggtgcggagtccggagagtaacggaatagcagagagcttcgtgaaaacgataaagcgtgactacatcagtatcatgcccaaaccagacgggttaacggcagcaaagaaccttgcagaggcgttcgagcattataacgaatggcatccgcatagtgcgctgggttatcgctcgccacgggaatatctgcggcagcgggcttgtaatgggttaagtgataacagatgtctggaaatatag

SEQ ID NO: 488884 - DNA, 381 bp, Shigella sonnei; identical to SEQ ID NO: 458903

SEQ ID NO: 488885 - DNA, 189 bp, Shigella sonnei; identical to SEQ ID NO: 463227

SEQ ID NO: 488886 - DNA, 465 bp, Shigella sonnei; identical to SEQ ID NO: 483873

SEQ ID NO: 488887 - DNA, 189 bp, Shigella sonnei; identical to SEQ ID NO: 463227

SEQ ID NO: 488888 - DNA, 297 bp, Shigella sonnei
atgtccggcagtgcttttgccgttacgcaccaccccgtcagtagcagaacaggagggacagctgatagaaacagaagccactggagcacctcaaaaacaccatcatacactaaatcagtaagttggcagcatcacccgttaaccattccttgtaaatctgaccccgatttatgtatgcaactcgatgcctgggatgctgaaaccagtatccctgccctgctaaatggcgaacactctgtcctttaccgtacccgttacgatcaacaatctgatgcctggattatgcgtcttgcctga

SEQ ID NO: 488889 - DNA, 189 bp, Shigella sonnei; identical to SEQ ID NO: 463227

SEQ ID NO: 488890 - DNA, 348 bp, Shigella sonnei; identical to SEQ ID NO: 485869

SEQ ID NO: 488891 - DNA, 699 bp, Shigella sonnei
atgactcagccgttgttgtcagatgggcccctgacagcgttgatggatcattatcttgatacagatgctctggcaggcgggctaccgctgtatgtgtcgctgtaccccacagaagggggcatgcaggatattattgactgcattcgtgctgaactgggttccggaaccacgaaaaacgccgtttttcagcatatccagagtctgccccgcggacagcagaaagaggctctgcttgcgtcagccgcactgcccctgttgttccgtccccgtgaggttcaggggacaatgttcggtgatggtggtatgggaggatggcgaaatatgcagggaaatacccctgtaacgcctctggtcgatgccggatgcaatatggtgattgtgtcgcatctgagtgacggttctttatgggatcgccaggcttttccggacaccacaatccttgagatccgtccccggaaaaggctgaaatatgcaggtgatggtggcaacagtggcggtctgctcagtttcacgtcggcacataccgacgcctggcgtcagcagggctacgaggacacgatgctgacgatggagcatatccggaaaccgctggcagcacgtcaggcactgtcccggtcagaaacggtgttgcagaaaagtctggagataacggaagaggcagatttggcactgagaagcgcgatggcccggattaaataa

SEQ ID NO: 488892 - DNA, 339 bp, Shigella sonnei
atgccggattttcatcgtgaggatgactggtggcgtcacggtcagaatctctatcttgacaatatggaggtgacgggtttttaccgtgtcgcactgacagaggcacagccgggcgatgtgctgctgtgctgttttggttcatcggtgccgaatcatgccgccatttactgtggtgacggcgagctgctgcaccatattcctgaacaactgagcaaacgagagaggtataccgacaaatggcagcgacgcacacactccctctggcgtcaccgggcatggcacgcatctgcctttacggggatttgcaacgatttggccgccgcatcgaccttcgtgtga

SEQ ID NO: 488893 - DNA, 189 bp, Shigella sonnei; identical to SEQ ID NO: 463227

SEQ ID NO: 488894 - DNA, 486 bp, Shigella sonnei; identical to SEQ ID NO: 487387

SEQ ID NO: 488895 - DNA, 189 bp, Shigella sonnei; identical to SEQ ID NO: 463227

SEQ ID NO: 488896 - DNA, 189 bp, Shigella sonnei; identical to SEQ ID NO: 463227

SEQ ID NO: 488897 - DNA, 366 bp, Shigella sonnei
atggtagtgtccgctattgccagtacacctcatacttactggcgacgtcgtgacaacacatattttgtatcaaaagccggtgagcgttatcgccgggatgtggcgcttattgtccgtcagcagcgactgaaattaagcctgtccggaagactggcgataaagattattgcagagccaccggataagcgccgtcgtgacctggacaatatcctgaaagcaccactggatgcactgacacatgcgggagtgttaatggacgatgagcagtttgatgaaatcaatatcgttcgtggtcagccagtatctggtggacgtctgggggtgaagatttaccccataatgcatgaagagcaggtcaaaaaatga

SEQ ID NO: 488898 - DNA, 189 bp, Shigella sonnei; identical to SEQ ID NO: 463227

SEQ ID NO: 488899 - DNA, 276 bp, Shigella sonnei; identical to SEQ ID NO: 484087

SEQ ID NO: 488900 - DNA, 621 bp, Shigella sonnei; identical to SEQ ID NO: 479960

SEQ ID NO: 488901 - DNA, 189 bp, Shigella sonnei; identical to SEQ ID NO: 486857

SEQ ID NO: 488902 - DNA, 423 bp, Shigella sonnei; identical to SEQ ID NO: 487178

SEQ ID NO: 488903 - DNA, 504 bp, Shigella sonnei; identical to SEQ ID NO: 485763

SEQ ID NO: 488904 - DNA, 348 bp, Shigella sonnei; identical to SEQ ID NO: 485869

SEQ ID NO: 488905 - DNA, 165 bp, Shigella sonnei
atgatcgattcgaatgccaaactgcgatcgattcagatgccattttgcacttacccgatttttgatcgtattgaagaaatggcatgggctcgtcactaccagcagatcgttcgtgaagaaaaagaaacggaactggcggacgacctggaaaaaggtctgaggtag

SEQ ID NO: 488906 - DNA, 258 bp, Shigella sonnei; identical to SEQ ID NO: 485585

SEQ ID NO: 488907 - DNA, 279 bp, Shigella sonnei; identical to SEQ ID NO: 11573

SEQ ID NO: 488908 - DNA, 189 bp, Shigella sonnei; identical to SEQ ID NO: 463227

SEQ ID NO: 488909 - DNA, 189 bp, Shigella sonnei; identical to SEQ ID NO: 463227

SEQ ID NO: 488910 - DNA, 189 bp, Shigella sonnei
atgagcgcttactgcgtattccgctctattcgatcacggattggcatcgaagttcgatcagcgattcgcatccattcgatcaaccgggaacttaactttttctaccgctttttaactcgttttttcgctgctttccactgtcgggggatttttcctcagggactctccctgaaggaccactctgtgtga

SEQ ID NO: 488911 - DNA, 189 bp, Shigella sonnei; identical to SEQ ID NO: 463227

SEQ ID NO: 488912 - DNA, 129 bp, Shigella sonnei
atggttgcccagggcaatgttctgcccgttctgtacggtgaaatgcgcgtggggtcacgtgtggtttctcaggagatcagcacggcagacgaaggggatggtggtcaggttgtggtgattggtcgctga

SEQ ID NO: 488913 - DNA, 207 bp, Shigella sonnei
atgggctggcaaaagtgtagcggtattaagcgcagctatttagagaaattaaatcgaaattatgccgacaaaattacgatttatccggaatttcatcagcaaataacttacgaagcattgcgtgtttgccatgcggtgcgcaaagagccggatattattacccgccaacggatgattgccgagatatttacttccggtatgtggtaa

SEQ ID NO: 488914 - DNA, 225 bp, Shigella sonnei; identical to SEQ ID NO: 486592

SEQ ID NO: 488915 - DNA, 765 bp, Shigella sonnei
atgcgtgaaaccctcatcccgaaagaggcgctggcgtggctgaaggcgaagaagctgcgtcccggttttgattaccgggatgtgtggcgggaagagtaccggtacagcttccccgtggccagaatgctgcaactggatttgttgtcggatgtgaaagcccttgtggaagacgccctgcaaagcgggcagacgttcagcgagttccgggagatgctgcaaccgttgctgataaaacgcggatggtggggcgtacaggagatggatgatccactgacgggtgaaacccgcaccgtgcaactgggcagcgaccgccgcctccgcacgatttttgataccaacatgcgcaccgcccgcgcggcgggccagtgggaacgcattcagcggacaaagcaggccatgccgtatctgatgtacgagctggggccatcccgtgagcaccgggtggagcatgtgaaatgggcgcgtctgtgtctgccggtagatcatccgttctggcagacgcattttgcccctaacggctggggctgcaaatgcaccatccgtcaggtcagccgtggtgagtatgcgcaactggcggcacagggcaccattcacaccgaagcgccggaaatcagaactgtccgctgggtgaacaaacgcacgggcgaagaggaagatgtgccggaagggattgatccgggctggaactacaatcccggtataaaccgtgagcaggagctggcgcgccagctggcggccagacaggcccgttttaacagtgaataa

SEQ ID NO: 488916 - DNA, 1572 bp, Shigella sonnei; identical to SEQ ID NO: 486745

SEQ ID NO: 488917 - DNA, 1536 bp, Shigella sonnei; identical to SEQ ID NO: 486744

SEQ ID NO: 488918 - DNA, 582 bp, Shigella sonnei; identical to SEQ ID NO: 486743

SEQ ID NO: 488919 - DNA, 300 bp, Shigella sonnei; identical to SEQ ID NO: 486742

SEQ ID NO: 488920 - DNA, 294 bp, Shigella sonnei; identical to SEQ ID NO: 468975

SEQ ID NO: 488921 - DNA, 306 bp, Shigella sonnei; identical to SEQ ID NO: 468974

SEQ ID NO: 488922 - DNA, 228 bp, Shigella sonnei; identical to SEQ ID NO: 468973

SEQ ID NO: 488923 - DNA, 609 bp, Shigella sonnei; identical to SEQ ID NO: 468972

SEQ ID NO: 488924 - DNA, 411 bp, Shigella sonnei; identical to SEQ ID NO: 468971

SEQ ID NO: 488925 - DNA, 228 bp, Shigella sonnei; identical to SEQ ID NO: 468970

SEQ ID NO: 488926 - DNA, 588 bp, Shigella sonnei; identical to SEQ ID NO: 468969

SEQ ID NO: 488927 - DNA, 450 bp, Shigella sonnei; identical to SEQ ID NO: 468968

SEQ ID NO: 488928 - DNA, 552 bp, Shigella sonnei; identical to SEQ ID NO: 468967

SEQ ID NO: 488929 - DNA, 267 bp, Shigella sonnei; identical to SEQ ID NO: 468966

SEQ ID NO: 488930 - DNA, 315 bp, Shigella sonnei; identical to SEQ ID NO: 468965

SEQ ID NO: 488931 - DNA, 147 bp, Shigella sonnei; identical to SEQ ID NO: 468964

SEQ ID NO: 488932 - DNA, 540 bp, Shigella sonnei; identical to SEQ ID NO: 486729

SEQ ID NO: 488933 - DNA, 549 bp, Shigella sonnei; identical to SEQ ID NO: 469203

SEQ ID NO: 488934 - DNA, 525 bp, Shigella sonnei; identical to SEQ ID NO: 488861

SEQ ID NO: 488935 - DNA, 288 bp, Shigella sonnei; identical to SEQ ID NO: 469192

SEQ ID NO: 488936 - DNA, 420 bp, Shigella sonnei; identical to SEQ ID NO: 488863

SEQ ID NO: 488937 - DNA, 264 bp, Shigella sonnei
atggcaaaagtaattattgaaattaaaaatacagtatctggaattaaaggacggaatttgcgcaccagcattgcggtggacggtagtgcggaactggacggtgatgagggtacacttgctggcatggtggcgttactggtgcttaataaaagccagaaaataattaatgagtcagcccatgaagctatcgagattttgaaaaacgatagtgtcatcaccggtggccgtgtcactgaaatggctgttgaaaaaacatgccactga

SEQ ID NO: 488938 - DNA, 228 bp, Shigella sonnei; identical to SEQ ID NO: 469002

SEQ ID NO: 488939 - DNA, 951 bp, Shigella sonnei; identical to SEQ ID NO: 469003

SEQ ID NO: 488940 - DNA, 2097 bp, Shigella sonnei; identical to SEQ ID NO: 469004

SEQ ID NO: 488941 - DNA, 462 bp, Shigella sonnei; identical to SEQ ID NO: 486824

SEQ ID NO: 488942 - DNA, 342 bp, Shigella sonnei; identical to SEQ ID NO: 403579

SEQ ID NO: 488943 - DNA, 354 bp, Shigella sonnei; identical to SEQ ID NO: 486875

SEQ ID NO: 488944 - DNA, 2955 bp, Shigella sonnei; identical to SEQ ID NO: 486924

SEQ ID NO: 488945 - DNA, 354 bp, Shigella sonnei
gtgaacttcgtcaacggaaacagcgacgccgatccggaacaggaggtgatcagccgctggcgcatcgagcagtgcagcgaactgagcgcggtcagtgcctcttttgtgctggccacaccaacggagacggatggcgcggttttcccggggcgtatcatgctggcgaatacctgtatgtggacttaccgttctgatgagtgtggttacacgggcagggcagtggctgacgagttcgacaaaccaacgacggatatccggaaggacaaatgcagcaagtgtatgcgcgggtgtgagttgcgcaacaataccggtaatttcggcggtttcctttccatcaataaactttctcagtaa

SEQ ID NO: 488946 - DNA, 141 bp, Shigella sonnei
atgctgacgatggagcatatccggaaaccgctggcagcacgtcaggcactgtcccggtcagaaacggtgttgcagaaaagtctggagataacggaagaggcagatttggcactgagaagcgcgatggcccggattaaataa

SEQ ID NO: 488947 - DNA, 132 bp, Shigella sonnei; identical to SEQ ID NO: 486934

SEQ ID NO: 488948 - DNA, 381 bp, Shigella sonnei; identical to SEQ ID NO: 458903

SEQ ID NO: 488949 - DNA, 642 bp, Shigella sonnei
atgaacgacgtgttcctgaaacgcctgacggctcccaccattaccagcggtggcagtcctccggcattttccctgacacctggcggacggctgacggcgaaaaatgccgatatcagtggtagtgtgaatgcgaactcaggaacgctcaacaatgtcacgattaaccagaactgtacgattaagggcatgctggaggcgacccaggtcagaggggatttcgttaaagctgtatcaaaagccttcccgaaaaaagtcggtacgtggggtaacacggaaacaccaaacggtacggttacagtcaccatcagcgatgatcataactttgaccgccagattattattccgcccattatctttaacggaatagcgtatagcgatccgggaagtggtaataaccccagaggcacgagatacacaggttatggttttgaagttcgcaaaaacggcgtattaatcgcatccagagaaactaaaggggccattcccggtagttacagtgcggttattgatatgccgagtggcagaggaagcgtcactctggagtttaagattttccagaaaggcaatcagggggcaggtaatatcaccgactgtacggtgattgtgaccaaaaaagcggcttccggcatcagtattcgttga

SEQ ID NO: 488950 - DNA, 642 bp, Shigella sonnei; identical to SEQ ID NO: 486871

SEQ ID NO: 488951 - DNA, 495 bp, Shigella sonnei
gtgcgacagactgaagataaacagcaccagaacagcgaaccggaggagggaacaccctgcaatcagactggcgaggataactgccctgactgtggcgcggtgatgggagacgcaacttatcaggaaacttttgacgaaaaaaaaccagatgaagcacaggaagaagagccgaagaaaacggaaaaagctgatgatttgttaccggagaacgctggcagcgatcagcataatgatagcaataatgaaactggcgaagatgaactcaactggaaaagacaggtgttgattgcggcggtttacggtttatgtgcgaatcctgcgtgcatagcctatgcgcctgcaatccctgacatcgcaatgatgattgccaacaagcttgaaaattttggagtgaccagtgatgagcgcttactgcgtattccgctctattcgatcacggattggcatcgaagttcgatcagcgattcgcatccattcgatcaaccgggaacttaa

SEQ ID NO: 488952 - DNA, 234 bp, Shigella sonnei; identical to SEQ ID NO: 487009

SEQ ID NO: 488953 - DNA, 495 bp, Shigella sonnei
ttggcccgggcatgggcatctgcccgcgatgatttacggcatgcaaggcaacgtctgaaatcgtttcttctggttcatggggtccattatgtcgggcgagcagattggggccctgcacaccgacgctggctcagcaaatactcattcgaaagtccctggcgacaattagcttttgacgaacaccgtcgtacaatagaagaccggcaggcacaatgtgaacggctggaatccgccctgaaggaggccgttaccgaatggaggctgtatccggtagtagaggcgctgcaagccatgcgagggattcagtttattactgcggttggattaatttctgaactgggtgatctgacccgttttgaacatccacgacaactgatgtcatggtttggtatcacgccatcagaatattcatcgggtggaagcagacatcagggcagcattaccaaagccggaaacagctatgccagaaagctattggtcgaggcagcgtggtga

SEQ ID NO: 488954 - DNA, 342 bp, Shigella sonnei
gtgttcttcggtagcgatcacggcggcgagcgtggtgcactgttgtacgggctgatcggcacctgccggttgaatggtatcgatccggaagcgtatctgcgccatatcctgagcgtactgccggaatggccttccaaccgagttgacgaactcctgccatggaacgtagtactcactctaataaataagcgtcaatacggtgctccgttgacgcttacgaattattgctggagtggcattaggctttgtgattgcgccaatgattatttagcactatcaaacatcagtatcgatggtttatacacaataaagacagatatggcggaatatagtctgttgtaa

SEQ ID NO: 488955 - DNA, 276 bp, Shigella sonnei; identical to SEQ ID NO: 487394

SEQ ID NO: 488956 - DNA, 381 bp, Shigella sonnei; identical to SEQ ID NO: 458903

SEQ ID NO: 488957 - DNA, 186 bp, Shigella sonnei
gtgttcttcggtagcgatcacggcggcgagcgtggagcactgctgtacgggctgatcggcacctgccgtctgaacggtatcgatccggaagcgtatctgcgccatattctgagcgtactgccggaatggccctccaaccgtgttgacgaactcctgccatggaacgtagtactcaccaataaataa

SEQ ID NO: 488958 - DNA, 147 bp, Shigella sonnei
atgccggaactggaagaactggcggcagcaatggtgcaggctgttgttgaacgcaatgacgagatttatcgccgtcagcgtgaaatgaaagaggagctgagcagtctggatgatttggcttcaattcgggcgtttgacgttaagtaa

SEQ ID NO: 488959 - DNA, 207 bp, Shigella sonnei; identical to SEQ ID NO: 488913

SEQ ID NO: 488960 - DNA, 261 bp, Shigella sonnei
atgcctgccccggtctggcaaagctggtactggcagtggggcttacagcaggcgggagaacaactgctaaaaacggttcttacccgtttgcgccagcacaaattgcctgcttcgaccgcggatatggctgccgctcatctgcatgcgatggcgctggcacagttgcgcggacataaactaccgttacgcactgactggctggatgccatagcaggctcgctgattaaagaagccctgaacgcgccgttgccgtggatgtaa

SEQ ID NO: 488961 - DNA, 534 bp, Shigella sonnei; identical to SEQ ID NO: 484954

SEQ ID NO: 488962 - DNA, 999 bp, Shigella sonnei
atggaatccttcgtggcgattatggcactggtttccgcctgtatcatcgatccgggcgtgtacttcgccatgaacagcccgatggcggtgctggctccggcagggacggcggatgtggtcgcttctgccgcgcaggtggtgagtagctggggctttgcgattactccggatacgctcaaccagattgccagcgaagtgggtgaacagtcgatcatttcccgtgcgggcggtgcgccgacgctggcggtggggatggcttacatcctgcacggtgcgctgggtggtatgatggatgtggcgttctggtatcacttcgccattctgtttgaagctctgtttattctgacggcggtagatgcgggtacgcgtgctgcgcgctttatgttgcaggatctgctgggcgtggtgtctcctggcctgaagcggaccgattcactgcctgctaacctgctggcaacagcgctgtgcgtactggcgtggggctacttcctccatcagggcgtggtcgatccgctgggcggcattaacactctgtggccgctgtttggtattgccaaccagatgctggcagggatggcgctgatgctctgtgccgtggtgttgttcaagatgaaacgtcaacgttacgcctgggtggcgctggtaccaacggcctggctgctgatttgtaccctgaccgcaggctggcagaaagcgtttagcccggatgcgaaagtcggcttcctggccattgctaataagttccaggcaatgatagacagcggcaatattccgtcgcagtatactgagtcacagctggcgcaactggtgttcaacaaccgtctggatgccgggttaaccatcttctttatggtggtcgtggtggttctggcgctgttctcgattaagtcggcactggcggcattgaaagatccgaagccaacggcgaaagaaacgccgtatgagccaatgccggaaaatgtcgaggagatcgtggcgcaggcaaaaggcgcacactaa

SEQ ID NO: 488963 - DNA, 1089 bp, Shigella sonnei; identical to SEQ ID NO: 483496

SEQ ID NO: 488964 - DNA, 279 bp, Shigella sonnei
atgactgctattaatcgcatccttattgtggatgatgaagataatgttcgccgtatgctgagcaccgcttttgcactacaaggattcgaaacacattgtgcgaacaacggacgcacagcattacacctgtttgccgatattcaccctgatgtggtgttgatggatatccgcatgccagagatggacggcatcaaggcactaaaggagatgcgcagccatgagacccggacacccgttattctgatgacggcctatgcggaagtggaaaccgccgtctaa

SEQ ID NO: 488965 - DNA, 471 bp, Shigella sonnei
atgagcagagtcaccgcgattatctccgctctggttatctgcatcatcgtccgcctgtcatgggctgttaatcattaccgtgataacgccattacctacaaagagcagcgcgacaaaaacgcaagagaactgaagctggcgaacgcaaccattactgacatgcagcagcgccagcgtgatgctgatgcactcgatgctaaatacacgaaggagttagctgatgcgaaagctgaaaatgatgctcttcggcgcaagcttgataatggtggtcgggtgctcgtcaaaggaaaatgccctgtgccatcctcagccgaaacctccagcgcctccggcatgggcaatgatgccaccgtcgaactctctccagttgctggacgaaacgttctcggtatccgggacggaatcatcagcgaccagacagcattgagaatgcttcaggagtacatcaggatccaatgccttggggggtag

SEQ ID NO: 488966 - DNA, 138 bp, Shigella sonnei; identical to SEQ ID NO: 485026

SEQ ID NO: 488967 - DNA, 876 bp, Shigella sonnei; identical to SEQ ID NO: 485027

SEQ ID NO: 488968 - DNA, 777 bp, Shigella sonnei; identical to SEQ ID NO: 485028

SEQ ID NO: 488969 - DNA, 2262 bp, Shigella sonnei; identical to SEQ ID NO: 485029

SEQ ID NO: 488970 - DNA, 1335 bp, Shigella sonnei; identical to SEQ ID NO: 486094

SEQ ID NO: 488971 - DNA, 129 bp, Shigella sonnei
atgagacaggttaactttgatgtcattaatttcattgtcagtagctttcttattattaagaagataattatttactgcgttaaggtcatctatttctttcagtatccctttttcaccaagcaagtatga

SEQ ID NO: 488972 - DNA, 216 bp, Shigella sonnei; identical to SEQ ID NO: 485679

SEQ ID NO: 488973 - DNA, 261 bp, Shigella sonnei; identical to SEQ ID NO: 485837

SEQ ID NO: 488974 - DNA, 216 bp, Shigella sonnei
atgaccgttcacgggattttttacggtgatgttcggcgcgggggcgttccggtcgctccagtcaatcgcagccccctcgcggtcaacgtcaaaaaccagccagaactgcgcatgaggctggttctgctggatgtaccgcgcaagaagcgcacgccctttgccggagatgcgaagaccaaaagcgagatcatccgtgtgatagggacggtggggtaa

SEQ ID NO: 488975 - DNA, 144 bp, Shigella sonnei; identical to SEQ ID NO: 478466

SEQ ID NO: 488976 - DNA, 252 bp, Shigella sonnei; identical to SEQ ID NO: 484376

SEQ ID NO: 488977 - DNA, 822 bp, Shigella sonnei; identical to SEQ ID NO: 16544

SEQ ID NO: 488978 - DNA, 2109 bp, Shigella sonnei; identical to SEQ ID NO: 16545

SEQ ID NO: 488979 - DNA, 1668 bp, Shigella sonnei; identical to SEQ ID NO: 16546

SEQ ID NO: 488980 - DNA, 1068 bp, Shigella sonnei
atgagaaactttcctgttccgtactcgaatgagctgatttatagcactattgcacgggcaggcgtttatcaagggattgttagtcctaagcagctgttggatgaggtgtatggcaaccgcaaggtggtcgctaccttaggtctgccctcgcatttaggtgtgatagcaagacatctacatcaaacaggacgttacgctgttcagcagcttatttatgagcataccttattccctttatatgctccgtttgtaggcaaggagcgccgagacgaagctattcggttaatggagtaccaagcgcaaggtgcggtgcatttaatgctaggagtcgctgcttctagagttaagagcgataaccgctttagatactgccctgattgcgttgctcttcagctaaataggtatggggaagccttttggcaacgagattggtatttgcccgctttgccatattgtccaaaacacggtgctttagtcttctttgatagagctgtagatgatcaccgacatcaattttgggctttgggtcatactgagctgctttcagactaccccaaagactccctatctcaattaacagcactagctgcttatatagcccctctgttagatgctccacgagcgcaagagctttccccaagccttgagcagtggacgctgttttatcagcgcttagcgcaggatctagggctaaccaaaagcaagcacattcgtcatgacttggtggcggagagagtgaggcagacttttagtgatgaggcactagagaaactggatttaaagttggcagagaacaaggacacgtgttggctgaaaagtatattccgtaagcatagaaaagcctttagttatttacagcatagtattgtgtggcaagccttattgccaaaactaacggttatagaagcgctacagcaggcaagtgctcttactgagcactctataacgacaagacctgttagccagtctgtgcaacctaactctgaagatttatctgttaagcataaagactggcagcaactaggtaagcgtcaacggaacaccgtattgacgcttatttattggtga

SEQ ID NO: 488981 - DNA, 276 bp, Shigella sonnei; identical to SEQ ID NO: 484087

SEQ ID NO: 488982 - DNA, 1683 bp, Shigella sonnei; identical to SEQ ID NO: 484981

SEQ ID NO: 488983 - DNA, 462 bp, Shigella sonnei; identical to SEQ ID NO: 486824

SEQ ID NO: 488984 - DNA, 327 bp, Shigella sonnei; identical to SEQ ID NO: 16555

SEQ ID NO: 488985 - DNA, 474 bp, Shigella sonnei; identical to SEQ ID NO: 52832

SEQ ID NO: 488986 - DNA, 354 bp, Shigella sonnei; identical to SEQ ID NO: 486875

SEQ ID NO: 488987 - DNA, 717 bp, Shigella sonnei; identical to SEQ ID NO: 485546

SEQ ID NO: 488988 - DNA, 1386 bp, Shigella sonnei; identical to SEQ ID NO: 485526

SEQ ID NO: 488989 - DNA, 612 bp, Shigella sonnei; identical to SEQ ID NO: 488262

SEQ ID NO: 488990 - DNA, 444 bp, Shigella sonnei
gtgaaataccgttatgagtttacggacgcgctggggctgattacgtccttcagttatgccaatgctgaggatgagcaaaaaacgcactacagcgatacccgctggcatgaagattccgtgcgtaaccgctggttcagcgtgatggcggggccgtctgtacgcgtgaatgaatggttcagcgcgtatgcgatggtgggtgtggcttacagccgtgtgtcgactttctccggggattatctccgcgtaactgacaacaaggggaaaacgcacgatgtgctgaccggaagtgatgacggtcgccacagcaacacgtctctggcgtggggggctggcgtgcagtttaacccgaccgaatccgtgaccattgaccttgcttatgaaggttccggtagtggtgactggcgaacggatgcatttattgttggtatcggataccgtatctga

SEQ ID NO: 488991 - DNA, 657 bp, Shigella sonnei; identical to SEQ ID NO: 488106

SEQ ID NO: 488992 - DNA, 1293 bp, Shigella sonnei
atgcgcgacgatgtcgcattccagattatcaatgacgaattatatcttgatggcaacgctcgtcagaacctggccactttctgccagacctgggacgacgaaaatgtccacaaattgatggatttatccattaacaaaaactggatcgacaaagaagaatatccgcaatccgcagccatcgacctgcgttgcgtaaatatggttgccgatctgtggcatgcgcctgcgccgaaaaatggtcaggccgttggcaccaacaccattggttcttccgaggcctgtatgctcggcgggatggcgatgaaatggcgttggcgcaagcgtatggaagctgcaggcaaaccaacggataaaccaaacctggtgtgcggtccggtacaaatctgctggcataaattcgcccgctactgggatgtggagctgcgtgagatccctatgcgccccggtcagttgtttatggacccgaaacgcatgattgaagcctgcgacgaaaataccatcggcgtggtgccgactttcggcgtgacctacaccggtaactatgagttcccgcaaccgctgcacgatgcactggataaattccaggccgacaccggtatcgacatcgacatgcacatcgacgccgccagcggtggcttcctggcaccgttcgtcgccccggatatcgtctgggacttccgcctgccgcgtgtgaaatcgatcagtgcttcaggccacaaattcggtctggctccgctgggctgcggctgggttatctggcgtgacgaagaagcgctgccgcaggaactggtgttcaacgttgactacctcggtggtcagattggtacttttgccatcaacttctcccgcccggcgggtcaggtgattgcacagtactatgaattcctgcgccttggtcgtgaaggctataccaaagtacagaatgcttcctaccaggtcgctgcctatctggcggatgagatcgccaaactggggccgtatgagttcatctgtgccggtcgcccggacgaaggcatcccggcggtttgcttcaaactgaaagagggtgaagatccgggatacaccctgtacgacctctctgaacgtctgcgtctgcgcggctggcaggttccggccttcactctcggcggtgaagccaccgacatcgtggtgatgcgcattatgtgtcgtcgcggcttcgaaatggactttgctgaactgttgctggaagactacaaagcctccctgaaatatctcagcgatcacccgaaactgcagggtattgcccagcagaacagctttaaacatacctga

SEQ ID NO: 488993 - DNA, 897 bp, Shigella sonnei; identical to SEQ ID NO: 486979

SEQ ID NO: 488994 - DNA, 381 bp, Shigella sonnei; identical to SEQ ID NO: 458903

SEQ ID NO: 488995 - DNA, 189 bp, Shigella sonnei; identical to SEQ ID NO: 463227

SEQ ID NO: 488996 - DNA, 189 bp, Shigella sonnei; identical to SEQ ID NO: 463227

SEQ ID NO: 488997 - DNA, 276 bp, Shigella sonnei; identical to SEQ ID NO: 487938

SEQ ID NO: 488998 - DNA, 189 bp, Shigella sonnei; identical to SEQ ID NO: 463227

SEQ ID NO: 488999 - DNA, 381 bp, Shigella sonnei
atgctgggagcggtggaacgccgcttcggcaacgatcttccgtcgtctccagtggagtggctgacggataatggttcatgctaccgggctaatgaaacacaccagttcgcccggatgttgggacttgaaccgaagaacacggcggtgcggagtccggagagtaacggaatagcagagagcttcgtgaaaacgataaagcgtgactacatcagtatcatgcccaaaccagacgggttaacggcagcaaagaaccttgcagaggcgttcgagcattataacgaatggcatccgcatagtgcgctgggttatcgctcgccacgggaatatctgcggcagcgggcttgtaatgggttaagtgataacagatgtctggaaatatag

SEQ ID NO: 489000 - DNA, 684 bp, Shigella sonnei; identical to SEQ ID NO: 487131

SEQ ID NO: 489001 - DNA, 354 bp, Shigella sonnei; identical to SEQ ID NO: 487004

SEQ ID NO: 489002 - DNA, 687 bp, Shigella sonnei
atgattaatcctgcgaatggcaacacaaagccgatgtttgttggtcagggcgatcagatattcatgaacgacgtgttcctgaaacgcctgacggctcccaccattaccagcggcggtaatcctccggcattttccctgacaccggacggaaaactgaccgctaaaaatgcagatatcagtggcagtgtgaatgcgaacgccgggacgctcaacaatgtcacaattaatgagaactgtcagattaaggggaaactgtcagccaaccagattgaaggcgatatagtcaaaacagtgggtaaggcttttccgcgggactcccgggcaccggagcggtggccatcagggaccattaccgtcaggatttatgacgatcagccttttgacaggcaaattgttattccggcggtggcattcagcggcgctaaacatgagcgggagaataacgatatttattcgtcatgccgcctgatagtacggaaaaacggtgctgaaatttataaccgtaccgcgctggataatacgctgatttacagtggtgttattgatatgccagctggtcgcggccacatgacgctggagttttcggtgtcagcatggctggtgaataactggtatcccacagcaagtatcagcgatttgctggttgtggtgatgaagaaagccaccgcaggcatcagtatcagctga

SEQ ID NO: 489003 - DNA, 189 bp, Shigella sonnei; identical to SEQ ID NO: 463227

SEQ ID NO: 489004 - DNA, 276 bp, Shigella sonnei; identical to SEQ ID NO: 484087

SEQ ID NO: 489005 - DNA, 663 bp, Shigella sonnei
gtgaccagcctgcaccgtgaggctgaagcacagttccgtcctgaactggaaaaaatcgtcaggggtattgaaacaggttttcgtggtacggccctgtacgccacagaaaatattgccggacgcatcaatgcccgtctggaggatgaaggtttcactgtaaaaatcagttttccggcagtcagccagttacagacccggctcgcagtaaaaacaaatctgagcgcgcttatggaggaaagaacggagacagtaacccgtcgctgtcgacaggatggtgtctggggtacgctttgtcgatgggcaaacaccagtgactggggctggaaagagtacagtgtggatgtgagccgcagcgtgatcaatatcaacaaggtcagagaggaagtgatgtcactgacccgggcatatttcggggagctgcaggcatccattgagcaggatattaaccagcccgtccgccaggaaatcgatgcctttttctgtacattcagggagaaagttgaacagctgcgtaacacgctgattcagagctctgaagatcataaacgcgatcagcaggcgcaggaacggctgaccgggcgtcttcaggcgttaaatgaaagggttcctgagctcattactgacagtaaggcgttaagggaagaactggagacaatgctgtga

SEQ ID NO: 489006 - DNA, 276 bp, Shigella sonnei; identical to SEQ ID NO: 485876

SEQ ID NO: 489007 - DNA, 381 bp, Shigella sonnei; identical to SEQ ID NO: 458903

SEQ ID NO: 489008 - DNA, 279 bp, Shigella sonnei; identical to SEQ ID NO: 11573

SEQ ID NO: 489009 - DNA, 381 bp, Shigella sonnei; identical to SEQ ID NO: 35582

SEQ ID NO: 489010 - DNA, 189 bp, Shigella sonnei; identical to SEQ ID NO: 463227

SEQ ID NO: 489011 - DNA, 381 bp, Shigella sonnei
atgctgggagcggtggaacgccgcttcggcaacgatcttccgtcgtctccagtggagtggctgacggataatggttcatgctaccgggctaatgaaacacgccagttcgcccggatgttgggacttgaaccgaagaacacggcggtgcggagtccggagagtaacggaatagcagagagcttcgtgaaaacgataaagcgtgactacatcagtgtcatgcccaaaccagacgggttaacggcagcaaagaaccttgcagaggcgttcgagcattataacgaatggcatccgcatagtgcactgggttatcgctcgccacgggaatatctacggcagcaagccagtaatgggttaagtgataacaggtgtctggaaatatag

SEQ ID NO: 489012 - DNA, 189 bp, Shigella sonnei; identical to SEQ ID NO: 463227

SEQ ID NO: 489013 - DNA, 189 bp, Shigella sonnei; identical to SEQ ID NO: 488910

SEQ ID NO: 489014 - DNA, 189 bp, Shigella sonnei; identical to SEQ ID NO: 463227

SEQ ID NO: 489015 - DNA, 147 bp, Shigella sonnei; identical to SEQ ID NO: 22867

SEQ ID NO: 489016 - DNA, 999 bp, Shigella sonnei
atgaagaaggtcctttgcgcgttaggcttgatgttcaccgccgtcagttccgcgctggcaacaacctaccccctgacgattgaaaactgcggctatcaggagaccttcacccggccgccggagcgcgtggtcgcgctggggcaaaatacggtcgaaattctgctgctgctcgggctgcaaaagcaggtggtcgccagcgccttctggccgaccagcgttttaccgcagctggctgagcaaaacgcgaagattaaaaccttgacggtggaaattccgagcctggaatcggtgctggcgcaaaatcctgatttcgttcccgcccagttgccgctgctgctggggccggaaagcaaagtcgccaggcgtgaagatctcgccaccgtcggcgtgaacagctacgtctcaccggggatgtgcgccaccaaaaaggccaccggcgatatgtacggcagccggcaaaagctgtgggatatgacctggctgtatcaggaaattagcgatttttcccgcattttcaacgtcgaagatcgtggtcaggcgctgattgccgatttcaaaaaacgtgaagccgacctgcgccaggagtttggtaaaagcaaaaaggatctctccttcgtcttctggttctccagcgcctcaccttcggccgatgcctatgtcggcggcaaaaacagcgcctccggatttatcgccagcgtgctgggcggacataatgcgattacctccgaaaccgagtggcccacggtgagctgggagagcattattgccgccaacccggatgtgatcgtggtcgccagcctggatcgtaaccgctgggcgctggataaggccgaggaaaagatcaaattcctcaaaagcgatcccgccgtcagccagctggaggcggtgaaaaaaggccatatcgtggtcatggacggtcaggcgatgaatccgaccattcgcacgctttacggcgcggagcaggtgggcgagcagctgagaaaaatggggctgaactga

SEQ ID NO: 489017 - DNA, 1038 bp, Shigella sonnei
atgagcgtcgccgcgattgagacgcgccgcagcatactgctcaccggctggtgtgtactggcagcgatcgtgctggcgctggtgatcgctgtgggcgtcagcgttggcgagctggccatcccgctgcagaatgtcttttatgctatcagcaacagaaccggcttaaccgttgagccgctcaaccgtatctatgagagcgttatctgggatttccgcctcagccgcgcgctggtcgccgcctgctgcggcgccggcctcgctatctgcggtgttgtgctgcaaagcttgctgaagaatgccctcgccgaaccctacgtcctcggcgtctccgccggggcctccaccggcgcggtgtcgatcgtggtgctgggccttggcgctggcgcaatttccctctcggcaggcgcctttgccggggccttcgccgccttcgcctttgtcgccttgctgactaacggcgcgcgcggcggcaatgagcgtacgattcttgcgggcgtcgccgcctcgcagttatttaacgccatcacggcctataccatcagcacctccgccagcgcgcagcaggcgcgcgatgtgatgttctggctgctgggcagcttcagcggcgtccgctggcccgaattccagttggtcatcgtggtggtgctcgcgggtctggcggtctgcctgtggtatgcccgggcgctggacgcgttcaccttcggcgacgatgccgccgcctcgctggggattgctgtgccgcgcgtgcgcctgatcctcttcaccactgcggcgctgatcaccgccaccatcgtcagcatggccggctcaatcggctttgttggcctggtggtgccgcacgtgatgcgtttcttctttggcccgctgcaccgaacgttgctgatcgccagcgcgctggcaggggcgatattgatggtactggcggacattgcgtcgcgcctgctgattgccccgcaaagtctgcccgttggggtagtaaccgccctggttggggtgcctttctttgccgtgattatctaccgctcaagaaataagtga

SEQ ID NO: 489018 - DNA, 762 bp, Shigella sonnei
atgagtatttgcgctgaaaatatcacctggaaggcaggcaaaaaggtcatcgtcaataatgtctcgctgcgggtgccgcgcggcgaaacggtcggactgctggggcccaacggctgcggcaaatcctcgctgctgcgcgttctggcgggcctgcgccgcccggatgcaggtcgcgtcaccctcgacggccaggatatcgcccggatggcgaaaaagcagctcgcccgccgcgtggcttgcgtcgagcaacacggcatgaccgaggccaatatgcgggtgcgcgacgtcgtgcgcctgggacgcattccccaccactctccgttctcaaactggagcgctcaggatgacgaagcgattgccgccgcgctgcagcgggtagcgatgctggagaaaagcgaacagggatggttaagcctctccggcggcgagcggcagcgggtgcatatcgcccgcgcgctggcgcagagcccgagcgaaatcctgctggatgagccaaccaaccatctggatatacaccatcagatgcagttaatgcagttgatcagcgagctgccggtaaccagcattgtggccattcacgatcttaaccatgccgcgatgttctgcgattcgctgatcgtgatgcagcaggggcagatcctcgccagcgggacgccggaggagattttgtccgaagcgctgctgtgggacgttttccgggtgaaaaccaaaatcgagatctccccttaccacggcaaaaagcacattcatttcatcgtttag

SEQ ID NO: 489019 - DNA, 222 bp, Shigella sonnei
atgcctcttttctccctgcgccctgcggcaaccctctggcctccggtgttactgggaagccagttcgtttttaatattggcttttacgcggtcgttcctttcctcgccctcttcctgcgcgacgacatgctgctctcaggcggacttatcggcctgatcctcgggctgcgtaccttcgatgtttatcctcggcgggacgctggccgaccgctatggcgctaa

SEQ ID NO: 489020 - DNA, 1044 bp, Shigella sonnei
atgtttatcctcggcgggacgctggccgaccgctatggcgctaaggcgatcattctcgccggctgcgtcgttcgcgtcgccggttttctcctgctggcgtgcggggcgtcgctgtggcccattatccttggcgcctgcctgaccggcgtcggcggcgccctgttctccccgtcgatagaggccctgctggcgcgggccggtacccacagccaggccaacgggaaacgcagccgcgccgagtggtttgcgctgtttgcggtatgcggtgaactgggagcggtgatcggcccggtggccggaggcgtgctgagcgggatcggctttcggcatatcgccctcgccggcgcgggaatatttcttctggcgctggcggtgctctttttcggtctgcccgccgacgggcacacgacaacaacgcgcagacgagtcccatggtggacgcctttgcgccagccgcgctttgtcgcgtttattctcgcctacagctcatggctgttgagctacaaccaactgtacctcgccctgccggtggagatccaacgttccggcggccgcgagcaggatctggcgccgctctttatgctggcctcgctgttgattatcaccctccagctccctctcgcccgcttcgcccggcgaatgggcgccgtgcgcatcctgccggtgggctttctgctgctgtcggcttcctttgccagcgtggcgttattcgccgccgccccacccgccgaaagttggctgcgattaatgccggcggctggttttgtcacactgctcaccctcggccagatgctgttagtgcccgcagccaaggatctgatcccgctgttcgccgaggagtcgacgctgggtgcccactacggagcgctcgccactgcaggagggtgcgcggtgttagccgggaatttactgctcggtcatttacttgaccaggcgctcattccgtcgccgcaggcggtttatccctggcttctgctggcgctgtttccgctgtgcagcgccgtcgccctgcgggcgatctgtcgcccgctggcggcaacatga

SEQ ID NO: 489021 - DNA, 255 bp, Shigella sonnei
atggattcagaaacagttcacggaacggtcaggtctggcgctggcagcgtgccggaagccgggccgttattctggaggtcagtggacgctggatggaagcggcagaagcatggcgacgggctgccggtgttgcaccccggacagactggcagcagtttgcccgaaaaagggctgaacaatgccaccggcgctgccggggaagggtgtaacgaaaaagcagccttcattactccagggattcagaaggctgaataa

SEQ ID NO: 489022 - DNA, 420 bp, Shigella sonnei
atggaaacttaccctgaccctgatgatatccggaaaaacacagcagacatactgaaagcgttaaccgtggacaatattcctgagcgtcatggcttcagggaggagctggcatcgctgaaaaactgcataaacgatgatgagtattgctacatgacgttttatgaaacggggtacgctttcctgaaagccttactgagaacccggctgaggcttaaaagaaccgaccctgcgcattcgttgctgcccctcatctcttcgtcggtggaagcactcagggctcagcttaaggaaaatgaagcttatgtccgccttttaatcgggatggatgcggtctcccgatggaccgggcctctgttctgctttgccgcgctgatgatactgattctggtgggaactgtgtttgcacacgtatggttttaa

SEQ ID NO: 489023 - DNA, 228 bp, Shigella sonnei; identical to SEQ ID NO: 460260

SEQ ID NO: 489024 - DNA, 399 bp, Shigella sonnei
atgctgaagtttatgctcgataccaacatctgcatttttacgataaagaacaaacccgccagcgtcagggagcgttttaacctgaaccaggggagaatgtgtatcagttcggtcaccctgatggagctgatatatggtgcagaaaaaagccagatgcctgaacgtaatctcgctgtgatcgagggatttgtttcccgcattgatgttctggattacgacgctgctgcagccacacacaccggccagataagagcagaacttgcccgtcagggacgccctgtcgggccatttgatcaaatgatcgcaggtcatgcccgcagtcgggggctgattattgtgactaataacacccgggaatttgaacgtgtgggcggcctgagaactgaagactggagctga

SEQ ID NO: 489025 - DNA, 225 bp, Shigella sonnei
gtgaatgcagatgttggggatttgatttgtaaagaagattatgaagctaaaccatatcaatatcccgggactgcttattataaagcatatgttgaaaaaaaagaaaaaaataaacttcagcttagactagtttggcatggtggtaatggcttcgttattaatgatattacgccttcgaataacattatatggtcatcgccaaacggctggaaacattgtaattga

SEQ ID NO: 489026 - DNA, 564 bp, Shigella sonnei
atgaaaacaaaaaaattaatgatggttaccctggtcagttccacgctggccctttcagggtgtagtagcgttggcaatataaaacatgtggaaccatctaaatacgtacatgttacggactatttaaatgatgcttttgaaaaagcaaattgcgttggctctattttcctttcgcagggaaggatatttactgatgctgatggactgaagtatcagttgaattggccaaataccaagtgttcctctaattctatcgagtatgctgtagaaaaatattgtattcataaaggggggaagatggtacaggagggacggtggtgtaaggtaaatggcgagccattattttatgttgattatggcagtaattggaaacattatggtgaaaattttatggctgtggaacaagggagttttcagggaagacagcaatggttaaatgctgctgagcgacttggatttttgagtaaacgtgtccagttacaacaaaagctagaagatgaaatcaatgcaaaaaaagaagctgccgaattacaacgaaaaatgaaagaaaaaacacacctgtga

SEQ ID NO: 489027 - DNA, 510 bp, Shigella sonnei
atgatcactcactatgatataaaaacggagacacagaaactaaaggatgtactctctgtagagggggttaatattccgccattattacaagtcataaaaccaggggggtatgtatttttatgggttttattatggccgacatttcttcgtttgctggcagataaagttgatatccgagatgctggatttgatatatgttttagtggcgtaatgggttttatcctttttgttgccattactaatggaatgatgctgtatcttgctatccccaaaaaattcagagatgagtcgaaagtcatatctttcatgtatgataagaataaaacgtatattttgctatttttgattgctttttcaatggtttcatttgcccatacactcttatatgagtttttattgattgctttgtttataatctttttctttatttatgctatagacataaatcgttataacctctccgcaatagtttcagtaataggactgttcaaaaaagagtctgttagttaa

SEQ ID NO: 489028 - DNA, 381 bp, Shigella sonnei
atgatgacagaaaacaaaaagaatcaggaattcaaaatcagaaaaattaagcgggatattgagcgcggttgtgataatgccgaaaaatacttctggctttttgtggttttctttgttgccggcttgcttttatggcacggtatgcatgctattttcagcgccggtattgattcgtggaaagcgaacccggaattaaataatttgatttatatgtggaacatcctgatgtatgccattccgtatacgttatatgcgcttgctgccgggtttcttgttacatttttttctgtccccaatgtacgaattaatattcgggaatatcatgatattcctgctgaaacgccgtatgcgccgggagaacaaattaagggagggcagtaa

SEQ ID NO: 489029 - DNA, 123 bp, Shigella sonnei
atggggagggagtgcaataatgaatacaccagtaaagcaaaagccgcattacctgataatgactctcttatgatgtttctcactatttccagtttttctttaaaagataactttttcatataa

SEQ ID NO: 489030 - DNA, 342 bp, Shigella sonnei
atgcatacaggggatttgtgtttttttacaggtgccagcctgtttatcgtgggggttgttggttatttctttacaggaccaaataataaaggagtttatctgctgagctcgtttgtcttctttgtagtaaatgtcataagtgtatgtatgctgccagataatttcttgtttctttgtggtgcggttatgaatcagtgtgccgtaccggttgtttcaatggcagtcagtaccatgccggttatcacgaagtttgacagtttcagaaggatgtttgtttgtattatgttgtcagccatatggtctggagtgatgtggttttttattatttcattagtgaaatga

SEQ ID NO: 489031 - DNA, 258 bp, Shigella sonnei
atgaaggtcatattcacttctaatcgtattgttgattttattatccggcttttgattacagcgattgtcatttccccggtaattatttggtcgtgggatacggtaaaagaaaccacggcagacgggatgcttgccgctgctttcgttatcctttactccggtgtgctcctgtttattctgtatttttgtttttctgccctgactgacctgcagaaaactgatgaaagaaaaagtgatgaaaggaatgaagatgaataa

SEQ ID NO: 489032 - DNA, 594 bp, Shigella sonnei
atgcaggagttaatcgatcacgctattaatcaggcagataacaataaagttggggttgtgtatcttgatttggataattttaaaaaggtcaacgacgcctatgggcatttgtttggtgaccagttattacgcgacgtgtcattggctattttaagctgtctcgaacatgaccaggtgttggcgcgtccaggtggcgatgagtttctggtactggcatccaatacctcacaaagcgcgctggaagcaatggcatcacgaattttgacccgcttacgcctcccctttcgtattggtttaattgaagtttataccagctgttcagtaggtatttcgctctctcccgaacatggttcggacagcgcgactattattcgtcacgccgacacagcaatgtacacagcgaaggaaggcggacgaggacaattttgcgtttttactccagaaatgaatcagcgggtatttgaatatctctggctggataccaacttgcgtaaagcactggaaaacgatcagttggttattcactatcaaccgaaaatcacctggcgtggcgaagtgcgcagtctggaagcactaaatagctgcgcggaatag

SEQ ID NO: 489033 - DNA, 276 bp, Shigella sonnei; identical to SEQ ID NO: 484087

SEQ ID NO: 489034 - DNA, 1026 bp, Shigella sonnei
atgaaagcgttatccaaactgaaagcggaagagggcatctggatgaccgacgttcctgtaccggaactcgggcataacgatctgctgattaaaatccgtaaaacagccatctgcgggactgacgttcacatctataactgggatgagtggtcgcaaaaaaccatcccggtgccgatggtcgtgggccatgaatatgtcggtgaagtggtaggtattggtcaggaagtgaagggcttcaagattggcgatcgcgtttctggcgaaggccatatcacctgcggtcactgtcgcaactgtcgtggcggtcgtacccatctgtgccgcaacacgatcggcgtcggcgttaaccgcccgggctgcttcgccgaatatctggtgattccggcgttcaacgccttcaaaattcccgacaatatctccgacgacctggcttccatttttgatcccttcggtaacgccgtgcataccgcgctgtcgttcgatctggttggcgaggatgtgctggtctctggtgcaggcccgattggtattatggcagcggcggtggcgaaacacgttggtgcacgcaatgtggtgatcactgatgttaacgaatatcgtctcgaactggcgcgcaaaatgggtatcacccgtgcggtcaacgtcgctaaagaaaaccttaatgatgtgatggcagaactgggcatgaccgaaggctttgatgtcggtctggaaatgtccggtgcgccgccagcgtttcgtaccatgctcgacaccatgaaccacggcggtcgcattgcgatgctgggtattccaccgtccgatatgtctatcgactggaccaaagtaatctttaaaggcttgttcattaaaggtatttacggtcgtgagatgtttgaaacctggtacaagatggcggcgctgattcagtcaggtctggatctctcgccgatcattacccatcgtttctctatcgatgatttccagaagggctttgacgctatgcgttcgggccagtccgggaaagtaattctgagctgggattaa

SEQ ID NO: 489035 - DNA, 270 bp, Shigella sonnei
atgcagcggctggacgatgcttttgtatatggcgcatgtgacagagttgtttccgatattgtcaatgaactgatggaggaaaagcgcgtaaaccgtcttgtaacagtccctgcggtgctgctggaaaaagtgatggtgatggctggtagtgaaatttatcgcctccatgctgtcgggagcgagaacgggggcgacggtgacgcatttgtcagggaagaacgtgagattatgcgggtgatgcgtcaggcgctggacggggagaacgggtaa

SEQ ID NO: 489036 - DNA, 186 bp, Shigella sonnei
atgacttacagtcataaatggattccttatgacaaattggttaacaatgccgtcaaaattggtcgcacaattcttacggcgtggattaagcaggtccctgacctgcttttttcatatctgcatctgactctttccggtgttttcctccttctgttcctgcgttctcattacctgtcagccggatga

SEQ ID NO: 489037 - DNA, 294 bp, Shigella sonnei
gtgatcggcttccgcaatgttgatatggcggaactgcgtatccacaccccggctgagcgcgtagctatagctgaaggccatcttttccgggtggcttttgcgatattttttcagctcagtcaggctgctgaattccaggacgtcccactcttccccggtgtttttttcttcccggcaataagaagcatgtacgacgcggtgttaacgtggatatttcgggtactcatcctgctttctcctctctctggttttcagcccccatcatcttttgagtttcgggagccgcggttttga

SEQ ID NO: 489038 - DNA, 672 bp, Shigella sonnei; identical to SEQ ID NO: 469032

SEQ ID NO: 489039 - DNA, 366 bp, Shigella sonnei
atgaatgctattttgagtgttcagggtgcttctgcgcccgtcaaaaagaagtcgtttttttctaaattcactcgtctgaatatgcttcgcctggttcgtgcagtgatcccggttgctgttttgatgatgttgttccctgagttagctatggcttctgctggtaaaggcacggacctgatggctaaaggtcaggaaacggttaaagcaactttcggtaaggactccagtattgttacatgggttatcctggctgaagtgctggtcggtgcagtcatgtacatgatgaccaaaaacgtcaagttcctggccggctttgccatactctctgtatttattgctgtgggtatgtctgttgccggattctga

SEQ ID NO: 489040 - DNA, 225 bp, Shigella sonnei
atgaacatgcgtaatattaatattattaaaagcagtcctgaatcactgccgcacaattttaatatagccgctgtcggtgtgatgaagaagggtatgtcgatgagtttattttcttctccggggcatattgtggttgccggacaaacctgtgcggggaaagcaaatctgacagcagagttaatttctgctgttgtggggaataataaaaaaggagaagggcaatga

SEQ ID NO: 489041 - DNA, 618 bp, Shigella sonnei; identical to SEQ ID NO: 484991

SEQ ID NO: 489042 - DNA, 462 bp, Shigella sonnei; identical to SEQ ID NO: 486824

SEQ ID NO: 489043 - DNA, 579 bp, Shigella sonnei
atgaatgcacgaaaagcggtactggcagacaatccggaattgatcctgcgtgtgctacaactgagatttgacgagtcactgtcgtacccgcgcatttctgcgcagaccggtatcagcaaaaccgccattttttctctggtgaggcgatttcaccaggtattcactgactggcctctttccggggaatattcctgcgtgcaactggcccgggctttgttcccggggcgatacccttcagccccgacagtaactcagactgtgaaaacagagaaaaaccgccggaaccgattttcaccggagtttaaatggagacttgttcagcaaactcttttacccggtgcctgtgtcgcacaaatagctcgtgagaacgaaatcaacgataacctgctctttaactggcggcatctctggcgtaacggcggcctgcagccgaccggcgaacatgaaacatcgctacttcccgtgacgttaactccggagccggataataaaatcccggcaccagtgcagatacctgaacagatgcccgacagtctgtgctgtgagctggttctgtcggccggaaccacggcagcctga

SEQ ID NO: 489044 - DNA, 189 bp, Shigella sonnei; identical to SEQ ID NO: 469030

SEQ ID NO: 489045 - DNA, 348 bp, Shigella sonnei
atgatatctctccctgccggttcgcgtatctggctggttgccggtatcaccgacatgcgaaatggttttaacggcctggcatcaaaagttcagaacgtcctgaaggatgacccgttctccgggcatctgttcatcttccgcggacgccggggtgaccagataaaagtgttgtgggctgacagtgacggactgtgcctcttcaccaaacgcctggagcggggccgcttcgtctggccggttacccgtgacggcaaggtgcaccttactccggctcagttatctatgcttcttgaaggtatcaactggaagcacccgaaacgaacggaacgcgctggcatccgcatataa

SEQ ID NO: 489046 - DNA, 1572 bp, Shigella sonnei
atggacacctcacttgctcatgagaatgcccgcctgcgggcactgttgcagacgcaacaggacaccatccgccagatggcgaaatacaaccgcctgctctcacagcgggtggcggcttatgcttccgaaatcaaccggctgaaggcgctggttgcgaaactgcagcgcatgcagttcggtaaaagctcagaaaaacttcgcgctaaaaccgaacgacagatacaggaagcacaggagcgaatcagcgcacttcaggaagaaatggcggaaacgctgggtgagcaatatgacccggtactgccatccgccctgcgccagtcttcagcccgtaaaccgttaccgacctcacttccccgtgaaacccgggtcatccggccggaagaggaatgctgtccggcctgtggtggtgacctcagtcctctggggtgtgatgtgtcagagcaactggagcttatcagcagcgcttttaaggttatcgaaacacaacgtccgaaactggcctgttgccggtgcgaccatatcgtgcaggcaccagtaccttcaaaacccattgcacgcagttatgccggagcggggcttctggctcatatcgtcaccgggaagtatgcagaccatctgccgttataccgccagtcagaaatataccgtcgtcagggcgtggaactgagccgcgccacgctggggcgctggaccggtgccgttgctgaactgctggagccgctgtatgacgtgctgcgccagtatgtactgatgcccggtaaagtccatgcggatgatatccccgttccggtccaggagccgggcagtggtaaaacaagaactgcccggctgtgggtctatgtccgtgatgaccgtaacgccggttcacagatgcccccggcggtctggttcgcgtacagcccggaccggaaaggtatccatccacagaatcacctggccggttacagcggtgtgcttcaggcagatgcttacggtggttaccgggcgttatacgaatccggcagaataacggaagccgcgtgtatggcccatgcccggagaaaaatccacgatgtgcatgcaagagtgccaaccgacatcaccacggaagccctgcagcgtatcggtgaactgtatgtcatcgaggcagaagtccggggatgttcagcagaacagcgtctggcagcaagaaaagccagagcggctccactgatgcagtcactgtatgactggatacagcaacagatgaaaacactgtcgcgtcactcggatacggcaaaagcgttcacatacctgctgaaacagtgggaggccctgaacgtgtactgcagtaatggctgggtggaaatcgacaacaacatcgcagagaacgccttacggggagtggccgtaggccggaaaaactggctcttcgcgggttccgacagcggtggcgaacatgcggcggtgttgtactcgctgatcggcacatgccgtctgaacaatgtagagccagaaaaatggctgcgttacgttattgagcatatccaggactggccggcaaaccgggtacgcgatctgttgccctggaaagttgatctgacttctcagtaa

SEQ ID NO: 489047 - DNA, 543 bp, Shigella sonnei
atggcagttcgtggcattaacaaggtcattctagtaggccgtctgggaaaagatccggaagtccgttacatccccaacgggggcgcagtggcaaacctgcaggtggccacgtcagaaagctggcgtgacaaacagacgggggaaatgcgggagctgacggaatggcatcgcgtggtgctgttcggcaagctcgcggaagtggcaggtgaatatctgcgcaagggcgcgcaggtctacatcgaggggcagcttcgcacccgtagctgggacgacgacaacggcgtcacccgttacatcactgaaatccttgttaaaaacacgggcaccatgcagatgctgggacgtaccgcaggtgctcagactcagccgggagaggcgcaacagttcagcggtcagcctcagccggaaccacaggcggagtccggtacgaaaaaaagaggcgcgaaagcgaaaggccgtggacgtaaggccgcgcagccggagcctcagccgcaaccgccagagggtgaggattacgggttttcagacgatatcccgttctga

SEQ ID NO: 489048 - DNA, 207 bp, Shigella sonnei; identical to SEQ ID NO: 24440

SEQ ID NO: 489049 - DNA, 828 bp, Shigella sonnei
atgactgtgtacattggaattgatattgccagaaagaagtttgatgcagctgaactctgtgacggggcttacaggtgtaagacatttgaaaacacccctgctggatttacagcgctatacgactggcttaaagcgggcagcattccggacattcatgtatgtcttgaagcaacaggcaactatggtactgccctcgctacttttctgtacgaaaagaatctgaaagtgagcgtagttaatcccgcaagaatcaagggattcgcggcttctgaacttacccgaaccaaaaccgacaaagctgactccagactgattgcacgcttttgtaaagccgcgcagccagatccatggagacctgtgcccgcccccgtcagaaaacttcaggctctagtgagacgtatcggtgcgctgaacggcatgctcagaatggaatgcaaccgtcgtgaaaatgcagatattgacgctcaggaatcggttgaacgcatgatcaaccatttaaagatggagcttgaatcggtgcgccgggcaataaaagagcatatcagtaatgttcctgagctgaaaaaacagaacgacctcctgctgtctattccgggtattggcactgtttcagccagcctgatactgtccttcatggccagtaaagagttcacaaaagctaaggaagtgaccgcttttctggggctcaatccccgccatcaccagtccggaacgtcggttagggtgaagtggcacactgaatttggccacctgaacagaggtgatatgctcacctcagaacaacacaggtgctccaatgaaaaaaagaaatttcagcgcagagtttaa

SEQ ID NO: 489050 - DNA, 351 bp, Shigella sonnei
atgaaaaaaagaaatttcagcgcagagtttaaacgcgaatccgctcaactggttgttgaccagaactacacggtggcagatgccgccaaagctatggatgttggcctttccacaatgacaagatgggtcaaacaactgcgtgatgagcgtcagggcaaaacaccaaaagcctctccgataacaccagaacaaatcgaaatacgtgagctgaggaaaaagctacaacgcattgaaatggagaatgaaatattaaaaaaggctactgtagattcaatctgtcaatgcaacacccctttcaattatctctttcggtgttttgaacttcagtgtctttctcggtctgttgtttag

SEQ ID NO: 489051 - DNA, 1152 bp, Shigella sonnei
atgagacgaacatttacagcagaggaaaaagcctctgtttttgaactatggaagaacggaacaggcttcagtgaaatagcgaatatcctgggttcaaaacccggaacgatcttcactatgttaagggatactggcggcataaaaccccatgagcgtaagcgggctgtagctcacctgacactgtctgagcgcgaggagatacgagctggtttgtcagccaaaatgagcattcgtgcgatagctactgagctgaatcgcagtccttcgacgatctcacgtgaagttcagcgtaatcggggcagacgctattacaaagctgttgatgctaataaccgagccaacagaatggcgaaaaggccaaaaccgtgcttactggatcaaaatttaccattgcgaaagcttgttctggaaaagctggagatgaaatggtctccagagcaaatatcaggatggttaaggcgaacaaaaccacgtcaaaaaacgctgcgaatatcacctgagacaatttataaaacgctgtactttcgtagccgtgaagcgctacaccacctgaatatacagcatctgcgacggtcgcatagccttcgccatggcaggcgtcatacccgcaaaggcgaaagaggtacgattaacatagtgaacggaacaccaattcacgaacgttcccgaaatatcgataacagacgctctctggggcattgggagggcgatttagtctcaggtacaaaaaactctcatatagccacacttgtagaccgaaaatcacgttatacgatcatccttagactcaggggcaaagattctgtctcagtaaatcaggctcttaccgacaaattcctgagtttaccgtcagaactcagaaaatcactgacatgggacagaggaatggaactggccagacatctagaatttactgtcagcaccggcgttaaagtttacttctgcgatcctcagagtccttggcagcggggaacaaatgagaacacaaatgggctaattcggcagtactttcctaaaaagatatgtcttgcccaatatactcaacatgaactagatctggttgctgctcagctaaacaacagaccgagaaagacactgaagttcaaaacaccgaaagagataattgaaaggggtgttgcattgacagattga

SEQ ID NO: 489052 - DNA, 654 bp, Shigella sonnei; identical to SEQ ID NO: 22209

SEQ ID NO: 489053 - DNA, 486 bp, Shigella sonnei
atgaaaaataaatcaggcaattcttattatagagaagcggtcgatattcatagctcacttgagctttcatttatattgcataaatatcatttgcgtgtagatgagaagaaatctcgaaatgtattcagcgccatacgtgatgagctcatccttgatggggattcacgacaaaacttagctactttctgtcaaacatggattgatgatgaaatccgtgagttgcttaatttatctattgatagaaacatgatttataaagatgaatatccacaaatggcggaacctgaaggtcgctgtgtgcgtatgctttccgattcgtggagttttcccgattcgcgacacaccttaggttgctcaaccattggttcatctgaagctgctatgctcggccgcttggcgttaaaatggcagtggtgtaaaaaacgcgaagtacaaggtaaatcaaccgaacctgatttgcgatcctgtgcaaatatgctggcataa

SEQ ID NO: 489054 - DNA, 1461 bp, Shigella sonnei
atgtcgaatgctaatatcgcacccaaaagtaagaaaatgacagtggggacactcgctatcatgaatataactgctgtagtaagtctacgatttataccttctgaagcagaatacggcttaggtgccattttttactatacctttgctgcaattatgtttttagtacctgttgcctttgttgcggctgagctagctacaacatatccacaaaaagggggggcatttcgatggataggagaagcatttggggctcgctggggttttgtaggaatgcttatgacctggctacaagtcatcccctactttccaacagtactgacatttggtgcagtctcggttgcatttattgatgttgatatgggggtggcagaatcaattgccagtaataaatggtatattttatttttcgtactatttgtttactggggagctatttgtgttgcattacgtggcgttggtattttctcgcaggtatctaagtggtgcggtattatagggacaattattccagctattatccttgttattcttggtttctcctatctgtggttcagcggtaaaccagcggtgatcccattaggttggggtgatcttttccctaatatagctaacttccagaatattgttcttgccgccagcatatttcttgcttatgcagggatggaaatgaatgcggtccatgttaacgatttagataatccaactaaaaaatacccaattgcaattaccatcgcttctataggtactattgcaatattcctgctcagtactttaggggtcgcctttattattcctacagataaaattagtctaactcaaagtttgttggttgcctacgatatgctgttcgaatgggctggagtgccatggcttggctctgtgatggcatttatgctagcaattggcgtactgggtggggtggttacttggattgcagggcctaatacaggtgtattagcgatcgcgaaagctggttatttacctaagtttttccaaaaaaccaatcgtcatggaatggggcaccatctgatgtttgtacaaggtataattgtctcagttctttctgttacttttgtgataatgccttcagttcaagcagcttttcagattttatcacagttaacagttatgctctatttagttatgtatatgctcatgttcgctggtgctatctatctacgacattctcaacctgataaaaaacgcccatatcgagcccctgctttattcttctgggcaacacttggattcttagggtcttttctggcttttgtattaagttttattccgcccgagcaaatcccaactggtagtccaaccagctatgttctttatttgttagtattagttgccctatttttattaattccaatattaatttacgccttccgaaaatctgactggaaagatccaaactctgatttcgaaccattttcttgggaaaaaagaactagtaattaa

SEQ ID NO: 489055 - DNA, 810 bp, Shigella sonnei
atgtttagtgctgaatctccaattggtgtaatagactcaggtgtaggtggattgacatcggtaaaggaaataattaatttgcttcctggcgaagatattatctattgtggagataatacgaatgcaccttatggcaaccgttctgccgatgatatcatcagtttgactaaaaaaatgctgacttttttacagtcaaggaatgtcaaactagttgctgttgcatgtaatactatatcctcaactttggaatccgaagaatacagcggatatgctaagagctttccgtttcctatcttatccatcattgaacctgcagtagaagatgtgattcgccagcagtataaaaatgtgggtattatcgctaccgagtttactattaaaacggggtgtcacaaagagctaataaaaaaattgaacccaacaataaatatatttggagaaccaagcaaaaatcttgcaatgttaattgaggaaggtaatcttaatgctcctgcaatattgaatgatatcaaaaaacatgttaaccatttaatttccctccatccagtaaatgaaattattctcggctgtactcactatccaattgttcagaatttatttgaagcagttgcaccggatataaaatttattaatcctgcacatgatcaggctatctctattaaaaatcacttgggacagctaaatttattaaactcctcaaatataggaactttgcaaataaatactagtggaagtatggagatctacaaaacggtactaggggaattgagcattacgaaacctcatacattcagtatcaggcagttttaa

SEQ ID NO: 489056 - DNA, 207 bp, Shigella sonnei; identical to SEQ ID NO: 24440

SEQ ID NO: 489057 - DNA, 483 bp, Shigella sonnei
atggcaaataataatagaatacgtgtagatattacgggtgattcttccggtttacagcgtgctttaaggtctggtactgaatcattagaggaatttggtagtactgctggtggcattgttgaagagttcacaggccgaataactggtatggctggcgggttcggtactgctatgaccgggatcgcgggtgctgcggctattggtattggtggcctggcagcattagtagaatcatcacgtgaatatgtgcgtgaaatgaaccagatcagtaagagtaccggattgtccgtggttcagttacaacagctatcagcggcgtttagtggcctcggtcttgagattgataagtttggtgatttcaacaaggataccttggataagctcggtgatgcttttcgtgctggcggtgtgaagtggtcaacaaaaactggccaccgagttagagtttttccagtatcgattttccgattcgtttgggggtaa

SEQ ID NO: 489058 - DNA, 381 bp, Shigella sonnei; identical to SEQ ID NO: 458903

SEQ ID NO: 489059 - DNA, 327 bp, Shigella sonnei; identical to SEQ ID NO: 486130

SEQ ID NO: 489060 - DNA, 381 bp, Shigella sonnei; identical to SEQ ID NO: 458903

SEQ ID NO: 489061 - DNA, 207 bp, Shigella sonnei; identical to SEQ ID NO: 24440

SEQ ID NO: 489062 - DNA, 366 bp, Shigella sonnei; identical to SEQ ID NO: 488120

SEQ ID NO: 489063 - DNA, 687 bp, Shigella sonnei
atgcagcttaaaccactcacaaaaggtcgttttcataatatctggcagcaaaatgatgctttcattgagaaaacgtttcgtgaactgctttctgaaacccagctaatccatgaaggcgactatctttttcgccagggacaggtggtcgaccgtctgatcatggtggagactggccgaatatccttgagctacagtgctgaaaatggtcgctgtttccagttcggaacaatggattgcgacgaacagttgtttggtgaaatggagttctttacaggttatctctgtcaacttgatattgtcgcagaagaacctctcatcgttggggtatgtagtagtgaacgccttgaggctgcgctggatcaacatcctaagctggccttgttctttgccagcgctatagctgtcgactaccaggatacactggaaatcttcttacatcggatgctctatcctattgcgcacaacatcgcctatgatctgtatcgccagcatcaaaataagcaaccgatggacggttttagtaaaaattataaggaagctgaacgatttggtaccacagatcgcgtttatcgccgtgcagtaaaaactctggtagatgccggtctggttattcgtaccaaacaggggctggaaattaagaacttagatgagttaaggcgattcttgggtaacgactcgtttgattaa

SEQ ID NO: 489064 - DNA, 837 bp, Shigella sonnei
atgtcacatacaaataaaatgaacgttaagatagttttaatatccatggcgataggcatggcatcagtaaatacatttgctgctgattacgcagatggaaatattcggaaaaatgacttcaactggatgcaaatcaatttaatgcagagtgttgatgcaaaagttccatatggtattcgcgatgatacctacctggaactggaatttggtgctcgatctggcatagtcgatctctatggttatgtggatttcttcgatgttttcgacaacaagcatgatgaccgccacggtggcgataacttctttgccaagatttcaccacgtttttctctggatgccatttttaataaggacctttctgtcggtccgtttaacgaattttatattgctacggttaacaatattggcgatcgtgagctttttgagcactatgttggcatgggcaccgatgtgaaggtaccgtttttgggtctggtagggatgaacgtctatgcccattatgtccgcgaaaactatggcgcagataacgaaggaaagtgggatggttatatgttttccactaactggtctacgcctgtctggaactttgcgaacggtagttacctgaactatcagggatattttgactatcagtttgcagccaacaagattgccgaccaggcgctctacagcaacaacgctattgaatggtacaacggtatttactggcactctgaaaactatgctattggctatggactgaaatacttccgtaacatggcgttgatgcaaaaccacggtggagcaggtcgaacaacaggtttagggcattatttcaatttgacctacaagttctaa

SEQ ID NO: 489065 - DNA, 1164 bp, Shigella sonnei
atgaaaaataaaattgcacttacgctgattagtttcttggcaaatttcattatggcaggatttgccagtcagtttggcatgctgattgaacccattgcccagcggtatgatgctgatatcaatgctgtagcttcaatattttccttacttaatggtggtgctctggcaggcacaatcgccgcctttttccttatagaaaaaatcggtgtgaagcgcatgacgttcatcatttattctctcgttttcctctgtgctgtcgtgatgcacctgagtccaacattatggggagttatggtagcgatgacggtgattggtttctgcggagggattggtttgtgcatagcaggaactattgtggtttcagtctggcaggatcgtatacaaagcacgatgttggtagtgcaggacgcaacctttaacgtggctggtgttgttttcccactggtaacaacctatgcgcttacgcacaatatgtcctggagctatagctacttaactgtcggcgtagttgcattgcttacgttagcagttgtcatactcacacgttttaatctttgcgaattgtcagccccctctgactcgtcccccattgtcaaatctgaatggaattcaggtattattagtggaggcataggattatttctgggaatgctggcgctctatacttttctgacgtggtcgcctttatttgttaaaaataaatttggtatcccatttgaagaggcggggaatatcattacccaatattgggctgctgcactgattggtgctctggtttcaacggttatcgttacccgagtgaaaatacattatttcctgctgtgtattatttcattagcctgcataatcactaccattatcgtaactaaagaaagcctctctgggcttgattatctggcttacagttatgggttcgtatgtgctgctttatataattcgtttattgcctacggagtgtcttttgtcaggcgcgccagtagtcagaatgtttcttatattttgataagcggcagtgccggtgcaatgtttagccctgctattagttctctgatggagaagatgatggggttacagaaaataatgtatgcaataccgattctgtatcttgttattttcatcatgttggttaccacattgaaaatcaaaaatgaagtagcaaaataa

SEQ ID NO: 489066 - DNA, 708 bp, Shigella sonnei
atgactgcacatataaatgctaaaccaggcgattttgcaccaacagtaattatgccaggagatcctctaagggcgaaatttatagccgaaaactatctgcaggaccaccgtgaagtcacaaatgttcggaatatgttgggatacacgggattctattcagggcaactcatttctgtgatggggcacggaatgggaattccatcaatgacattatatgcccatgaactggttaatgattttgatgtaaaacggattattcgtgttggcagtcttggtgcaacacaacgtacaattaaaatgcgggatattattttagcggtcgcttccggaacagactctgtcactaattttaaacgtagttcgggttactttatggcgtcctccgcatatttccccttattacaaaaagcatggtcattagctcaggaagccggtttagaggtaaaagctggcaatgtatttagcggcgacatttattacgatccggatgataatttaattccggcacttgagaaattcggagtgctaggtatcgatatggaagtcgcagggttatatgcacttgcacatcaattcggtattgaagcgttggcaattttaacggtatccgatcactgtctgacaggagaagaaacaacagcagaagagcgacagttaacatttaacaacatgattgaattggcgctgaatactgctgtcgccatttag

SEQ ID NO: 489067 - DNA, 906 bp, Shigella sonnei
gtgacctcaccatttattcaacaaattgctgataaccgggtatgtcaggtactcagttgccttcctgaaaaatttgtggttgattttgcaaacggtattgatgttgcacaggagcataaccgcacggccggggggcgcacgtttttccggcgtttaaaagaaggtctgactggcaaaggcgctgtacgccagaatgccatcaatgcttcgcttgcacagggcgttgaggcgtccctgcgctggctgacggagctgacaacgtcgcttgccaccacaaattacgcgattacccgggtaaacgacagggtcagttcactggtcagtgatactgccaggctggcgcattattcggcagacacgcgggagcagttactcaccctggcagaacaggttcatcagaaactgaatcatcttgaagaaaaactccaccgtgttgaccaggttcagcgggcacagttacatcttgagcagatattctcatggtggagcgccgggcgatacgcgtcattttcccctgccggacgttgttatgtggcgcttgaagagcttcgctggggcgcgtttggtgatgtgatacgtcagggtgaaacaggccaggttaaccagttactggatatcctcagacataaagcattaacgcaaatggcacaggagaatggcggtagcgcaacagtacgtctgaacacactggactggcttggtggtcagagccgggaacaggctgataacgaatggcatgaagcggttaactggctgggggactggtgcagtgaagagcggcatcctgtgatctggtcaaccacacaggctgcagaacacttaccggttcgtatgccccgtctctgctctgcagaacgcctctctgaaagtatggttgatgaaatatttcagaagggggaggcatga

SEQ ID NO: 489068 - DNA, 684 bp, Shigella sonnei; identical to SEQ ID NO: 487131

SEQ ID NO: 489069 - DNA, 186 bp, Shigella sonnei
atggcacacaccgaaggagaaatggggaggggtatgcagcctgaacctgcgtggttacaggccacagccattacggcgaatacatatcccaaaatcaaacggcaaaacgcgaccactgggcatacccacaatgagggaccgtgccatgcaggcactgtggctgctggctctggaacccgtatctga

SEQ ID NO: 489070 - DNA, 1143 bp, Shigella sonnei; identical to SEQ ID NO: 485707

SEQ ID NO: 489071 - DNA, 189 bp, Shigella sonnei; identical to SEQ ID NO: 486857

SEQ ID NO: 489072 - DNA, 189 bp, Shigella sonnei; identical to SEQ ID NO: 463227

SEQ ID NO: 489073 - DNA, 543 bp, Shigella sonnei; identical to SEQ ID NO: 21048

SEQ ID NO: 489074 - DNA, 381 bp, Shigella sonnei; identical to SEQ ID NO: 458903

SEQ ID NO: 489075 - DNA, 1533 bp, Shigella sonnei
atgtttactgaagaagaaaaaatccgcgccattgagctttatttcaaatatggtaagaagctggctcccgtcgtacgcgaactgggctacccttcgaaaagaaatctgcggcgttggatccgctcatgggaagcaggtggtggcgcaaaagaatccattcgtcataagcaccgttactccgatgaacaaaaacaggttgccgttgaacattatcttaaccacggctgctgcctggcgtttaccagcagagccctgggttatccctgcactgatgtactcgctcgctgggttaatgaactttatcccgacagacgacgtatatttaccagtaaggccaacccggttgcgccctttgaaccagaagtcaaacgtcaggctgtcatggcactctgtacacgacaagtatcagccagtgaaatcgccaggcgtattggtgtcagtcgtgcggtattgtataaatggaaagatgaaattatcggcaacagtgcttaccagactatgcgtaaacataacgaaccttccctggaggcagaacgcgatgcgttgcgggaggaagtcgcccgactgaatcaggaaatacgccgccggcagatggagctggatattctgaaaaaggcggaggaaatcataaaaaaagacccgggcatcagtatcagtcacctgaacaacagagaaaaaacaaagatcgctgatgccctgagacaaacatatcccctgacagaattactgcatgttctgggccttgcccgtagcagttatttttatcaccgggctgccctgaaagccggtgataaatacgccacgatacgtacgatgctgacagatatatttaacagtaattaccagtgttatggctatcgtcgcctgcatgcgatgctcaggcatgagggggttcggctatcagaaaaggttgtacgcagacttatggtggaggaacagcttgtcgtcagccgtaaccgtcgtcgccgctacagctcatattgcggagaaatcggaccggctccggataaccttatcgccagagattttaaggcggagcaacctaatcagaaatggctgacagatatcacggagttccagctccctgcaggtaaagtctggctgtcaccggtggtggactgcttcgatggaaaagttgtgagctggtctctcagtacacgccccgatgctgaactggtcaacactatgctggatagcgctgtcgaaacgttaaatgctggcgaacgaccggtgatacacagtgacagaggtgggcattatcgctggccaggctggctggaaagagtgaatacagcaggtcttattcgctcaatgtcccgtaaaggatgttcacctgataatgccgcatgcgaaggctttttcggcagactgaaaacggaaatgtattatgggcgtaaatggtcgggcatcacgccagaaaagttcatgcagcatgtagatgcttacatcagatggtataacgagcggcgtataaaattatcgctgggtgcagtcagccctgaaatgtaccgccaacaatgcgggctggaatga

SEQ ID NO: 489076 - DNA, 189 bp, Shigella sonnei; identical to SEQ ID NO: 463227

SEQ ID NO: 489077 - DNA, 570 bp, Shigella sonnei; identical to SEQ ID NO: 486993

SEQ ID NO: 489078 - DNA, 189 bp, Shigella sonnei; identical to SEQ ID NO: 463227

SEQ ID NO: 489079 - DNA, 909 bp, Shigella sonnei
atgacgccgctgaatgatgccctgtacagttatgtgatgaacacccgcaaggttcacactgatgacacaccagtaaaagtactggcaccgggcaggaagaaggcgaaaacaggatatatctggacgtatgtccgggatgaccgaaatgccggttcgccagaacctccggcggtctggttcgcctactcaccggaccatcagggtaaacatccggagcaacaccttcgtcccttccggggtatcctgcaggcagatgcgttcgcaggttacgatcggctgttcagtgccgaacgtgaaggcggcgcgttgacggaagcaggatgctgggctcatgcgcggcgcaaaatccacgatgtatatatcagtaccaaaagcgcgacggcggaagaagcactgaaactaatcggcgaactgtacgccattgagcacgaaatacgcgggttgccggtgtctgaacgcctggcggtcaggcaaatgcagagtaaaccgctactgacttccctgtataagctgatgcaggagaaagaacacacgttatcgaaaaaatgccgtctgagagatgcgttccggtatatcaggaagcactgggttgcgttgtgcaacttctgtgatgacggtctggcggaggcggacaataacacagcggaaagagcgcttcgtgcagtctgtctcggaaagaaaaattacgtgttcttcggtagcgatcacggcggcgagcgtggtgcactgttgtacgggctgatcggcacctgccggttgaatggtatcgatccggaagcgtatctgcgccatatcctgagcgtactgccggaatggccttccaaccgagttgacgaactcctgccatggaacgtagtactcactctaataaataagcgtcaatacggtgctccgttgacgctgatatga

SEQ ID NO: 489080 - DNA, 189 bp, Shigella sonnei; identical to SEQ ID NO: 463227

SEQ ID NO: 489081 - DNA, 381 bp, Shigella sonnei; identical to SEQ ID NO: 458903

SEQ ID NO: 489082 - DNA, 381 bp, Shigella sonnei; identical to SEQ ID NO: 458903

SEQ ID NO: 489083 - DNA, 366 bp, Shigella sonnei; identical to SEQ ID NO: 488786

SEQ ID NO: 489084 - DNA, 426 bp, Shigella sonnei
atgcaatatgcgaaatctgtcactctgaacgttgaagagtgcgaccgtctgtcttttctgccttacctgtttggccaggattttctgtatgccgaagcgtctgtatacgcgctggcgaaaaaaatgatgccggaatatgaaggcggattctggcacttcatccgcctgccggacggtggcggttacatgatgccggatggcgaccgtttccacatggtgaacggtgcaaactggtttgaccgtaccgtgagtgccgatgccgcaggtgtcattctgacttcccttgtgattaaccgccagttgtggctgtaccacgacagcggtgatgcggggctgactcagctttaccggatgcgtgatgcgcagttgtggcgtcacatcgaatttcaccctgaatgcaacgcgatttacgcggcactggactga

SEQ ID NO: 489085 - DNA, 189 bp, Shigella sonnei; identical to SEQ ID NO: 463227

SEQ ID NO: 489086 - DNA, 366 bp, Shigella sonnei; identical to SEQ ID NO: 10065

SEQ ID NO: 489087 - DNA, 189 bp, Shigella sonnei; identical to SEQ ID NO: 463227

SEQ ID NO: 489088 - DNA, 249 bp, Shigella sonnei; identical to SEQ ID NO: 487383

SEQ ID NO: 489089 - DNA, 381 bp, Shigella sonnei; identical to SEQ ID NO: 458903

SEQ ID NO: 489090 - DNA, 222 bp, Shigella sonnei
atgactagtctaaaaactagtattaagactatcacttatttaagtgatactggttgtctggagattcagggggccagtctagtggtacgccgtctgcgtttctccggccctaagacatcaatcatctgtactccaatgactagtctaaaaactagtattaagactatcacttatttaagtgatactggttgtctggagattcagggggccagtctagtgtaa

SEQ ID NO: 489091 - DNA, 189 bp, Shigella sonnei; identical to SEQ ID NO: 463227

SEQ ID NO: 489092 - DNA, 408 bp, Shigella sonnei
atgactagtctaaaaactagtattaagactatcacttatttaagtgatactggttgtctggagattcagggggccagtctagtggtacgccgtctgcgtttctccggccctaagacatcaatcatctgtactccaatgactagtctaaaaactagtattaagactatcacttatttaagtgatactggttgtctggagattcagggggccagtctagtggtacgccgtctgcgtttctccggccctaagacatcaatcatctgtactccaatgactagtctaaaaactagtattaagactatcacttatttaagtgatactggttgtctggagattcagggggccagtctaccccgtccaacacaggtagccattataaacagtaaaaaattgtattcgctgttatga

SEQ ID NO: 489093 - DNA, 273 bp, Shigella sonnei
atgcagcggctggacgatgcctttgagcatggtgcggatgtcagcgttgttcacgacgttgttcgtgaactgatggaggaaaagcacgccagccgtcaggtgacagtcccggcggtgatgctggaaaaagtgatggcgctggcaggcagtgaaatgaagcgcctgtatgccgtcgggagtgagaacgggggcgacggtgacgcattcgtcagggaggaacgcgaagcaatggacgttgtgttgcaggcgctggacggggagacgatgtcatga

SEQ ID NO: 489094 - DNA, 186 bp, Shigella sonnei; identical to SEQ ID NO: 488957

SEQ ID NO: 489095 - DNA, 234 bp, Shigella sonnei
atgactagtctaaaaactagtattaagactatcacttatttaagtgatactggttgtctggagattcagggggccagtctagtggtacgccgtctgcgtttctccggccctaagacatcaatcatctgtactccaatgactagtctaaaaactagtattaagactatcacttatttaagtgatactggttgtctggagattcagggggccagtctaatccctatctttatctga

SEQ ID NO: 489096 - DNA, 207 bp, Shigella sonnei; identical to SEQ ID NO: 24440

SEQ ID NO: 489097 - DNA, 147 bp, Shigella sonnei; identical to SEQ ID NO: 488958

SEQ ID NO: 489098 - DNA, 225 bp, Shigella sonnei; identical to SEQ ID NO: 486592

SEQ ID NO: 489099 - DNA, 543 bp, Shigella sonnei
atggcctgcagctggtccgtgtcaccactggccacggcacgaccgccaccggccgcaatcagggcgtatgcccgtgccatctcggtattgcccaccattgagctctcatcgagcaggaacagcgtgttgctgaaatccggcgtttctccgctgcgctgctgcagctgcgtgtcatgcagaaaggacgccagtgtctgcgcatccacgccggcgctgcgcatctccccgaccgcacggtgcgtgggccccagccccacaacacggggacgctcactcgccggcagcatgttcacggctgacatcaccgcccggaactgtgtggtcttacccacaccggcatacccctgtaccaccgtgaaacggtcggacgtttccagtatcatacgggtggcggcacgctgtcccgacgtcagtgtctccatgagttcgccgggtactctctccatcagcggcgtgaccgcctccttaccttcgagaatatggcgaagaatacttttttctgcctcatacgacgcacgggaaaccagcaggcctgtgccatag

SEQ ID NO: 489100 - DNA, 816 bp, Shigella sonnei; identical to SEQ ID NO: 195523

SEQ ID NO: 489101 - DNA, 1479 bp, Shigella sonnei
atgccaaactgcgatcgattcagatgccattttgcacgggagcgcgaaatagaccatctgcaggcgcagctggataaactccgccggatgaacttcggcagtcgttccgaaaaagtctcccgccgtatcgcacaaatggaagccgatctgaaccggcttcagaaagagagcgatacgctgactggtagggtgtatgacccggcagtacagcgtccgttgcgtcagacccgcacccgtaagccgttccctgaatcactaccccgtgacgaaaagcgactgttgcctgcggcgccgtgctgcccgaactgcggcggttcactgagctatctgggcgaggataccgccgaacagctggagttgatgcgtagcgccttccgggttatccggacggtacgggaaaaacatgcctgtactcagtgcgatgccatcgtgcaggcacctgcaccttcgcggcccatcgagcggggtatcgccggaccggggctgctggcccgcgtgctgacctcgaagtatgcagagcacaccccgctgtatcgccagtcagaaatatacggccggcaaggtgtggagctgagccgttcactgctgtcgggctgggtggatgcatgctgccggctgctgtctccgatggaagaggcgcttcatggctatgtgctgactgacggtaagctccatgttgatgacacgcctgtcccggtgctgttgccaggcaataagaaaacgaagaccgggcggttgtgggcgtatgttcgtgacgaccgtaacgccgggtcaacgctggcgccggcggtgtggttcgcttacagcccggacagaaaaggcatccatccgcagacccatcttgcggggttcagtggtgtactgcaggcggatgcatacgccgggttcaacgagctgtaccgggatggccggataacggaagccgcctgttgggctcacgcccgccgtaaaatccacgatgtgcacgttcgcaccccgtcagccctgacggaggaagcgctgaaacggatcggcgaactgtacgccatcgaggcagagataaggggaatgacggcggaacagcgccttgccgaacgtcagttgaaaacgaaaccgctgctgaaatccctggaaagctggctgcgtgaaaagatgaaaaccctgtcgcgacactcagaactggcgaaagcgttcgcatacgccctgaaccagtggccggcgctgacgtactatgcagatgatggctgggctgaggcggacaataacatcgctgaaaatgcgttgcggatggtcagtctgggccgcaaaaactacctgttcttcggttcggatcatggaggagagcggggagcgctgctgtacagcctgatcgggacgtgcaaactgaacggagtggagccagaaagctacctccgctatgtccttgacgtcatagccgactggccgataaaccgggtcggcgaactgctcccctggcgcgtagcactgccgactgaataa

SEQ ID NO: 489102 - DNA, 222 bp, Shigella sonnei; identical to SEQ ID NO: 472333

SEQ ID NO: 489103 - DNA, 873 bp, Shigella sonnei; identical to SEQ ID NO: 486804

SEQ ID NO: 489104 - DNA, 1311 bp, Shigella sonnei; identical to SEQ ID NO: 5783

SEQ ID NO: 489105 - DNA, 333 bp, Shigella sonnei; identical to SEQ ID NO: 5122

SEQ ID NO: 489106 - DNA, 258 bp, Shigella sonnei; identical to SEQ ID NO: 5121

SEQ ID NO: 489107 - DNA, 654 bp, Shigella sonnei; identical to SEQ ID NO: 7676

SEQ ID NO: 489108 - DNA, 699 bp, Shigella sonnei
  misc_feature (656)..(665): n is a, c, g, or t
atggttccagtctttcagttcaacaatgatcacgttgcagtgtgttacaataactatttcaaaccgcacccagctaccaaggttcttaacaaggatttccatcttttcgatgatttgttcctagggcctcagacggcaccaaaagccttgagagttaatggctatgaagctaatgatatgattttcgaacatcctaaaaaggtgtatcgagaatatctggcaaaatctgagatatcaacgaacagcgaagcgctactcagagtatggaattttagaaatataacgggaacgaaagcgaataccccggaaggacgagctcagattgtttcacgtgagcgcgaagtgttacagcacatcaatcaccagaatcgtgacctgtataaccactgtctcaggtctttgacgagttttcagaaagacgaggtgacggccgagtatagcgaagtctacgaagttccgccgggtcatgtccggtttaatgagtttatcggaaaatatggtaagaacttttctgatatggaccgcttgaatgtggtgaaactgctcattgcaaagtttagtgatctccatgagatgaaaattgcgcacagggatgtcgccgatcacagtctgtggatttcaccttcaaaagaagttgctctttcgaactttatttnnnnnnnnnnacggttggcgattaccgtaagcttttatccgtag

SEQ ID NO: 489109 - DNA, 648 bp, Shigella sonnei
atggtgacaactcaggctatgcaatcggggcaaactatcactgataatgttcagagagcacctaagaccatctctattagcggtgttgtagtggttgattcgacgggttcagttctattaaccagacaggggcaacttgtagaaacctttatttctacggttgaacaatggcgagaccagaagcaaatcatcactattgtttgtagagatggaatagctatcactgatagtatcattactcagtttaaagcgagtaaagagcataccattgctaacggtcttcgtattcagatgaccttccaaggtgtagagtttcgttcaatcgtaggtcagactgatgtttcggctgctactggaaagaccgctaccacgaatgatggcggtgctaccagtaaaaagaacaccggaaacactacaacgagccttggaagccctatgctgacctgtaaagagctttttggctattcggcaagtgagttatcagatgaagcgctaaaagcccgtgtaacgtgctctaagagcgttagcgttaaaaatggtgagagcaccttctcagatgccgctaatgagcaagcttcaaaggtgcttaagccgggtaatgctctgcgaaagtactctgtgaaccctaacaagaagggcacttattga

SEQ ID NO: 489110 - DNA, 657 bp, Shigella sonnei; identical to SEQ ID NO: 463703

SEQ ID NO: 489111 - DNA, 1869 bp, Shigella sonnei
atgagtgatattttctcaggaagagaattatcagtacagtataatgctgatattggtaacagaacaccacagggagcaggcaatgtagtaattaaacagattaatacttttccaaccttaacaataaattcagaagcaaataattttgaaacgtatgatagtgattacaggacagtactactatctgataaatcagtagcaccatttgatattgtagttaactacctacctgatgatcctacacatcaattcttggataatgccgctaagtctcagcagcttttccagatcatcattcagtaccagatgaataaggatgaaaataccattacttatgcgatggtgaatggttatatcacctcttataagttggacggtgataaaggttcagtagtaaccaaggcatacagttttgccccacatgatgtgatcgcacgtgcaatgaccattaacgcactatcgccaatctatcagggggactacggtttaggttcgaacactacggatgtacctcagtactcaccatcagtacctacgggtaacagcttcatcaaagtaccatcatctcaagcaggcaatcctgccggggcggatctgatgggagtagggcttgtagatggcactactgtaagttctcttgcgatgacaaagacgggtactctaagtatctatgcaaagaacgctacaaccgcctggacacgcatatataccgctacacagatggacgggcgatacgtaccccttacacgtaccatcaacggccatgcactcacggccaatttagtactgaacagtgaagatacaggttcagtacctgatacacgtactgtgaatggtaagcctctaagtgaggatgtagtacttaccagtactgataccggctctgtaccagatacacggacagttaatggtcatgtactcagtgaagatatagtactgagtagtgaagatacaggttcagtacctgacacgcgtacagtgaacggtcatgtacttagtgaaaatgtagtactgagtagtgaagatacaggttcagtacctgatacacgtatggtcaacggtcatgtactcagtgaggatgtagtacttaccagtactgatgttggcttagggaaggttacagatgatgcccagcttacgatagcaggtaatctaagtgatctgggggacgtggaagaagcacgtattaaccttgctgtttactcaatggatgaagtagatgcagaggtaacggctttagctgacagtattacttcccttgattccgcttccatgaagaaagcgagtaacctttctgatctatccagtctctctacagcacgtactaacctacaggtgaaccgtttgactcagggtgctacgtacaccgatctgatgagtaatgacctgactaaccgtatccgaattcaggataacggggcatggggtgcaagtactatgaagaaagcgagtaacctttctgatctatccagtctctctacagcacgtactaacctacaggtgaaccgtttgactcagggtgctacgtacaccgatctgatgagtaatgacctgactaaccgtatccgaattcaggataacggggcatggggtgcaagtactggtactggatggattgctttaggtataggtcagggggggacaggggctacagatgctttgagtgctcgcctaaactttcaggtggatcgctttaatcaaggtagtaatttaacaactattaaatccgctgattcttccgctgcattagtggtttatgatggagggcaatggggttcagctacatatattgcgggtgctttcactggctggaaagcattagcaattccgcagggcggtactggtgttaagactcaggctgagttatag

SEQ ID NO: 489112 - DNA, 657 bp, Shigella sonnei; identical to SEQ ID NO: 463703

SEQ ID NO: 489113 - DNA, 378 bp, Shigella sonnei
gtgcttatcgacgtgcctaaaccgtggaatgatcccatagcgaataaccctctgacgacgctcaatttgctggaacacgatgatagccatgtcggcgttcaactggtgaaggcgcaaacggttattgggtcgggtggctcattaacgttacgtgatttacagggcgacgaggtggaagcggacaaaacgttacacattgcgcaaaacggaacggtggtcgccgagggtgattatggattccgcctcacgaccgcaccaggtgatggtttgtacgttaactatgggctgaaagcgctgaacatccatggtgggcaaaagctgacgttagccgaacatggcggagcctatggcgcaacggccgatatgtcggcaaaatag

SEQ ID NO: 489114 - DNA, 657 bp, Shigella sonnei; identical to SEQ ID NO: 487972

SEQ ID NO: 489115 - DNA, 561 bp, Shigella sonnei; identical to SEQ ID NO: 474233

SEQ ID NO: 489116 - DNA, 657 bp, Shigella sonnei; identical to SEQ ID NO: 463703

SEQ ID NO: 489117 - DNA, 861 bp, Shigella sonnei
atggcctacctgacggtatggcagggcgatgacgtacagcgccgggtgaaaggtgtggtgacctggtttgaactgggggagaacgacaaaaaccagatgctgtacagcatgaaggtatgcccaccgctgtggcgcatagggctgcgccagaacttccgtatcttccagaatgaggacatcgaaagcatcctcgcgacgatcctgaaggaaaacggtgtgaccgagtggagtccgctgttcagcgagccgcatccttcccgtgagttttgtgtccagtacggcgaaactgattacgatttcctgtgccggatggcggcggaggaaggcatcttcttttatgaggagcacgcgcaaaaaagtaccgaccagagcctggtcctgtgcgacaccgtgcgttatctgccggagtcctttgagatcccctggaacccgaacacccgtaccgaggtaagtaccttctgcatcagccagttccgctacagcgcacaaatccgtccttcttccgtagtgaccaaagactacacctttaaacgtcccggctggccagggcgttttgatcaggaaggccagtaccaggattaccagcgcacacagtatgaagtgtatgactaccccggacgtttcaagggtgcccacgggcagaactttgcccgctggcagatggatggctggcgcaacaacgcagaagtggcgcgcggaacaagccgttctccggagatatggccgggacggagaattgtgctgacggggcatccgcaggcgaacctgaaccgggaatggcaggtggtggcgagcgatcttcacggcgagcagccgcaggcggtaccgggacggcagtggttcaggaaccacgctggataa

SEQ ID NO: 489118 - DNA, 189 bp, Shigella sonnei; identical to SEQ ID NO: 463227

SEQ ID NO: 489119 - DNA, 486 bp, Shigella sonnei; identical to SEQ ID NO: 487387

SEQ ID NO: 489120 - DNA, 657 bp, Shigella sonnei; identical to SEQ ID NO: 463703

SEQ ID NO: 489121 - DNA, 276 bp, Shigella sonnei; identical to SEQ ID NO: 485876

SEQ ID NO: 489122 - DNA, 366 bp, Shigella sonnei; identical to SEQ ID NO: 488786

SEQ ID NO: 489123 - DNA, 366 bp, Shigella sonnei; identical to SEQ ID NO: 10065

SEQ ID NO: 489124 - DNA, 189 bp, Shigella sonnei; identical to SEQ ID NO: 463227

SEQ ID NO: 489125 - DNA, 189 bp, Shigella sonnei; identical to SEQ ID NO: 463227

SEQ ID NO: 489126 - DNA, 366 bp, Shigella sonnei; identical to SEQ ID NO: 10065

SEQ ID NO: 489127 - DNA, 189 bp, Shigella sonnei; identical to SEQ ID NO: 463227

SEQ ID NO: 489128 - DNA, 189 bp, Shigella sonnei; identical to SEQ ID NO: 463227

SEQ ID NO: 489129 - DNA, 1533 bp, Shigella sonnei; identical to SEQ ID NO: 484646

SEQ ID NO: 489130 - DNA, 276 bp, Shigella sonnei; identical to SEQ ID NO: 486783

SEQ ID NO: 489131 - DNA, 621 bp, Shigella sonnei; identical to SEQ ID NO: 479960

SEQ ID NO: 489132 - DNA, 189 bp, Shigella sonnei; identical to SEQ ID NO: 463227

SEQ ID NO: 489133 - DNA, 276 bp, Shigella sonnei; identical to SEQ ID NO: 486783

SEQ ID NO: 489134 - DNA, 1575 bp, Shigella sonnei
atggcacaagtcattaatacaaacagcctgtcgctgttgacccagaataacctgaacaaatctcagtcttctctgagctccgccattgaacgtctctcttctggcctgcgtattaacagtgctaaagatgacgcagcaggtcaggcgattgctaaccgttttacagcaaatattaaaggtctgactcaggcttcccgtaacgcgaatgatggtatttctgttgcgcagaccactgaaggtgcgctttctgaaatcaacaataacttacagcgtattcgtgaattgtcagtacaggccactaatggtacaaactctgactccgacctgaattcaattcaggatgaaattacacaacgccttagtgaaattgatcgtgtttctaaccagacacaatttaatggtgtaaaagttctggcttctgatcagactatgaaaattcaagtaggtgcgaacgatggtgaaaccattgagattgcccttgataaaattgatgctaaaaccttggggcttgataactttagcgtagcactaggaaaagttccaatgtcctctgcggttgcacttaagagcgaagccgctcctgacttaactaaggtaaatgcaactgatggtagtgtgggaggtgctaaagcattcggtagcaattataaaaatgctgatgttgaaacttattttggtaccggtaatgtacaagatacaaaggatacaactgatgcgaccggtactgcaggaacaaaagtttatcaagtacaggtggaagggcagacttattttgttggtcaagataataataccaacacgaacggttttacattattgaaacaaaactctacaggttatgaaaaagttcaggtgggtggtaaggatgttcagttagcaaactttggtggtcgtgtaactgcatttgttgaagataatggttctgccacatcagttgatttagctgcgggtaaaatgggtaaagcattagcttataatgatgcaccaatgtctgtttattttgggggaaaaaacctagatgtccaccaagtacaagatacccaagggaatcctgtacctaattcatttgctgctaaaacatcagacggcacctacattgcagtaaatgtagatgccgctacaggtaacacgtctgttattactgatcctaatggtaaggcagttgaatgggcagtaaaaaatgatggttctgcacaggcaattatgcgtgaagatgataaggtttatacagccaatatcacgaataagacggcaaccaaaggtgctgaactcagtgcctcagatttgaaagccttagcaaccacaaatccattatccaaattagacgaagctttggcaaaagttgataagttgcgcagttctttgggtgcagtacaaaaccgtttcgactctgccatcaccaaccttggcaacaccgtaaacgacctgtcttctgcccgtagccgtatagaagatgctgactacgcaaccgaagtgtctaacatgtctcgtgcgcagatcctgcaacaagcgggtacctctgttctggcacaggctaaccagaccacgcagaacgtactgtctctgctgcgttaa

SEQ ID NO: 489135 - DNA, 246 bp, Shigella sonnei
atgactagtctaaaaactagtattaagactatcacttatttaagtgatactggttgtctggagattcagggggccagtctagtggtacgccgtctgcgtttctccggccctaagacatcaatcatctgtactccaatgactagtctaaaaactagtattaagactatcacttatttaagtgatactggttgtctggagattcagggggccagtctaacgatacagcgcatgatgtgtcaggcttga

SEQ ID NO: 489136 - DNA, 621 bp, Shigella sonnei; identical to SEQ ID NO: 479960

SEQ ID NO: 489137 - DNA, 588 bp, Shigella sonnei; identical to SEQ ID NO: 486977

SEQ ID NO: 489138 - DNA, 561 bp, Shigella sonnei; identical to SEQ ID NO: 486982

SEQ ID NO: 489139 - DNA, 621 bp, Shigella sonnei; identical to SEQ ID NO: 479960

SEQ ID NO: 489140 - DNA, 621 bp, Shigella sonnei; identical to SEQ ID NO: 479960

SEQ ID NO: 489141 - DNA, 258 bp, Shigella sonnei; identical to SEQ ID NO: 485585

SEQ ID NO: 489142 - DNA, 366 bp, Shigella sonnei; identical to SEQ ID NO: 488897

SEQ ID NO: 489143 - DNA, 537 bp, Shigella sonnei; identical to SEQ ID NO: 486147

SEQ ID NO: 489144 - DNA, 681 bp, Shigella sonnei; identical to SEQ ID NO: 486140

SEQ ID NO: 489145 - DNA, 189 bp, Shigella sonnei
atggaaagcttctggggaacgctgaaaaatgagagcctgagccactatcgttttaataaccgggatgaagccatcacagtaatacgggaatacattgagattttctacaatcgtcagcgtcgtcactctcgtctggggaatatctccccggcagccttcagggaaaaatatcatcagatgactgcttaa

SEQ ID NO: 489146 - DNA, 657 bp, Shigella sonnei
atgcctgcgatcaatgccaaacgtgtttaccggatcatgcgccagaatgcgctgttgcttgagcgaaaacctgctgtaccgccatcgaaacgggcacatacaggcagagtggccgtgaaagaaagcaatcagcgatggtgctctgacgggttcgagttctgctgtgataacggagagagactgcgtgtcacgttcgcgctggactgctgtgatcgtgaggcactgcactgggcggtgactaccggcggcttcaacagtgaaacagtacaggacgtcatgctgggagcggtggaacgccgcttcggcaacgatcttccgtcgtctccagtggagtggctgacggataatggttcatgctaccgggctaatgaaacacgccagttcgcccggatgttgggacttgaaccgaagaacacggcggtgcggagtccggagagtaacggaatagcagagagcttcgtgaaaacgataaagcgtgactacatcagtatcatgcccaaaccagacgggttaacggcagcaaagaaccttgcagaggcgttcgagcattataacgaatggcatccgcatagtgcactgggttatcgctcgccacgggaatatctacggcagcaagccagtaatgggttaagtgataacaggtgtctggaaatatag

SEQ ID NO: 489147 - DNA, 165 bp, Shigella sonnei
atgcggtatccaacccgcgaatatcagcgtgattcaccgtcggatttactgctacgtcgccctcagggaattaaacctaaaaagaaaatcgtcaaaattagagattccggtttgacacggaaagtcatatcagccgaaccgtctggtcagaatctgacgaattag

SEQ ID NO: 489148 - DNA, 252 bp, Shigella sonnei; identical to SEQ ID NO: 17416

SEQ ID NO: 489149 - DNA, 234 bp, Shigella sonnei; identical to SEQ ID NO: 21482

SEQ ID NO: 489150 - DNA, 189 bp, Shigella sonnei; identical to SEQ ID NO: 463227

SEQ ID NO: 489151 - DNA, 2562 bp, Shigella sonnei; identical to SEQ ID NO: 481939

SEQ ID NO: 489152 - DNA, 597 bp, Shigella sonnei
ttgttcagtgcagaacgtgaaggtggtgcactgacagaagttgcgtgctgggcccatgcccggcgaaaaatccacgatgtatacatcagcagcaaaagtgcgacggcagaagaagccctgaagcgaatcagtgaactgtacgccatcgaggatgaaatacggggattaccagagtcagagcgtcttgcagccaggcagcagcgaagcaaagcgttactgacgtcgctgcatgaatggatggtggagaagaatggcacgctgtcgaaaaaatccagactgggcgaagcgttcagctatgtactgaatcagtgggacgctctctgttattacagtgatgatggtctggcagaagcggacaataacacagcggaaagagcgcttcgtgcagtctgtctcggaaagaaaaattacgtgttcttcggtagcgatcacggcggcgagcgtggagcactgctgtacgggctgatcggcacctgccgtctgaacggtatcgatccggaagcgtatctgcgccatattctgagcgtactgccggaatggccctccaaccgtgttgacgaactcctgccatggaacgtagtactcaccaataaataa

SEQ ID NO: 489153 - DNA, 1308 bp, Shigella sonnei; identical to SEQ ID NO: 464626

SEQ ID NO: 489154 - DNA, 1545 bp, Shigella sonnei
atgaggaaggtttacagttacattcgcttttcgtcaacgaaacaagcctttggtgatagtcatcgaagacagagtaaggccatacaggattggttagccagccatccagaccacatcctagacgaatctcttagttttgaagatttaggtcgttcagcctttcacggtgaccatctaaaagaaggtggagcactcagggcttttcttgaagctgttaagcaaggtctgataccaccagattctgtcttgctggtggaatcgttagaccgtgtaagccgtcagtcaatcagccatgcacaggaaactatcagggctattcttgagcaaggtattacggttgtcactctaagcgacggtgaaacgtataaccgccaatcccttgatgattctctcgcattaatcagaatgattatcctacaagagcgtagccataacgagtctgttattaaatctgaccgtattaaaaaggtatggtcacataaacgacaacagtttgaacaggatggaacaaagataaccggtaattgccccggatggttaaaactcaattctgacggaaaatcattttcgttaatacctcaccacgtagaaacaattcatagaatctttgacgaaaaactttcaggaaaatcactacatgcaatagccagagatttaaatcttgaaaatatccccacaattacaaataaaaaggtagacacaggctggacacctacaagagtacgtgaccttttattaaaggagtctctaattggcgttgcttacggagtcagtgactatttcccccctgctatttcaaaagaaaagtttcatgccgtacagatgattagaggtcaaggcaaaggcaagaagccaacctcacgacaaccaagttctattgatatctttaaagggatatgcaagtgtgcagaatgtggttctacactgcgtcagcgtaataccaagaagacaccagaaggacgctaccctagaggctatcttgaatgtcgtaatcgtcaacttggacgttgtaattctaaggcatttaaccgttcattgattgaagatatactcattcaaaaggtattccccacacttcagtatctgagccttaagagtaatggtgacaatatttctgttaccacgcttaaagccgatatcacatcactagaaaaagggattaataacctaattagccttgcagaaagaggattgggtgaccttgacgcattagcccaaagaataacaaacaaccgtgttgaacttgaatctaagaagaaggatttaagacaggctgaagctatccagtcattaaggtcagacaatgatatccaagacagtgaccggaaaactgtagagggtcgtatcaagctacaacttgccataaagtcatttatcaaagagatgatttttgactactacaagcaagaaataactatacgcttattgaatggtaaatctttctctggtatttcagttgcacgagaaaacaaagactttgaccatagttcagtctttgaagtgcttcaaaagtcattgttagacattgatgaagtacacctgtaa

SEQ ID NO: 489155 - DNA, 543 bp, Shigella sonnei
atggctaacattggttatgttcgagtttcatcaatccagcagattacagaccgtcaacttgaaggggtcgtactggataaggtatttactgataaagcatctgggaagaatacagaccgtccacaactaaaggctatgctcgattatgttcgtgaaggtgacactatccatgtacacgacctgtcacgtttagggcgttctaccgtggatgtattaacgctggtggataaactttcacagagaggtatcaaggttcactttcacaaagaaggtctgataactggtgacgataaccccacgtctaagatgattctcacaatcttttcagcagtggctgaagctgaacgtaaaatgatgcttgagcgtcaacgagaaggctatgaagctgctaaagctgctggtcgtgtagttggaaggggtaacggtaaagcggttgacagagaaggtattaaagctgctcttgctgctggtagttcaatcgctaaagtagccgctcaattcaacgttgccaagtcaactgtacagcgtattaaagctgaataa

SEQ ID NO: 489156 - DNA, 213 bp, Shigella sonnei
atgattgaagaacgtttagagactattcggtctatttgcgaaagactccaactacaaccaaatagacaaaagctacgaattaaaaacaaacgtcaagttatcacctcacacaaaccaaaaacacgcaagattccaaagtggtgtattgaccgtatcccttctgatgctcaaatcataggtgaaacggaattacattatcttgtcaggcattaa

SEQ ID NO: 489157 - DNA, 2133 bp, Shigella sonnei
atgagcaaattcacagttgatagttttatcgttgagttaggcttcagcgagaacgttattaagggcttgcaaagagttgaaaaggcagctttgcagtcagcacaaagaattgagcgtaatttgaatagagcgtttaaggtcgataccaagaaacttgacaacaatctgtcaagttctttagggcaacttgaaagaaagtttaataagacctttgacaagattgaacagagagcaagaagcacaaaagcatttcagtttgccaccagatttaatgacactgttaatcctccaaaacaaccaagacagccacgaattagcggaaacagagcaatcacagcagcttattcagctaatatgaccaagctaaaaggctttgaccctattttgcagaaatacatcaaatctcagttttacgggctatctgctaaagctgggtcaatggataattcaaaattcaatgaagcccttgctaaactaaattcaagtgtacgagaagcaattgctaaagctaaagttcacacatccaccagcattaacggtgacagagcagctaatagtcttgatagtctgtcttcagcagcagttaaaacagcaggtgcatttatctcaatgcaggctgtattagccagttatcagaagattatggaaattggtttacagcgtgcaagtgctgaacgttcaattgatttcgtatttgataaagatgcaggtcaggtaaaagagttcacaaagtcattagcccaaacaacgggtttagatatcgctgaactgcaatcacagtttgctggttttggtgcttcagctaaagaatctatgggtattcagggttctgaagagctttttcgaaatatggttggctattctcgtttaatgggtcgaagtgaagaggaaattaagcgagcattaacagcgctatcgcagatggctggtaagggtcaggtgatggctgaagagcttaaggggcaactggctgaagctgttcctggtatggttcaggtattcgctaaagcaaccggaaagagtgaacaggaattatttgatgccatgaagaagggggctttaaaatctgccgatactcttcagaaggtcactcaggaactgaataaacaaatcaccgctaaaggtggctggaaaactatttcagaaagtacacaggcacaactagggaacttgaaaaactcttggaataccacgcttgacagtattttcagaggttctgaagatggtttacaggacttcacaagaagcttaaccaatcttctaaacgctcttggtggaactggtaaaacattaggtgaaagttttggtagcttgatgagcgatatgtcacatggtatcgattcattgactgatatctcttacagggtacgaggtttctttgatgaggtgacattggcttatcgttcactaaatgacactcagaaaaaaattgttgatggtttatctgatgggttaattgatggcttgaagatgcttgctgtggctgttactgctcaaaaggctgcaaatgtagctggaggcttgttaaaccttgcaaatgctgttacttcattcggtgacgctgttaataaagctaaagctggaaaggctggttcttcaggtggtgcattaagtaaagtcggtagagttgtcctttatgctgagttagtgaactttgctcttgataatttaaaccctgaagctgctaagaatccgaacttacatcaatcaggtattggcacagaaacaaacttcaaccctgaatacaaaggcgattcatctaagccaaatcaaattaatgaggggtgggctaagattggtagttctatcgctgactggtttaatggtgcggctaataaaattgctaacttccaagagccaatgagtaaccttgttaataacacacaatcaactccaccagctatcacaggtgacatggttaatagcaatgctcaacttgcaatggctgtatcagagttaggacgaaaggtagatgccttaacagcagaaactaggaagcctttggcggttaatatcactggtgaagcgactattagacctgatgaaccagcattctttagatttacacaagcatctagtgaccagttcacagcggatatgctattaagctcaggctatccagaggaagaataa

SEQ ID NO: 489158 - DNA, 1479 bp, Shigella sonnei
atgttagttagtaaaagcaacgaatttaacactagctcatttatagatagtggaaattgtaatgaaagaaaatcttctgaatccatggagctactagcttatagtattataaatttaatttgtaaggaagctgcctcagggacgtatcgcggtgctcttgaaactttacaaaaaatgatgtctgaatgtatatatcatgaaggcaacgcctttgtcattatgggatctggagagcaattaaaacgtattaaatatgatgttgatgaaaataacttaaaagtattcaacgtatactttgataataatgaagagttagttactgatggtgagcctgacgtagtatgtttaagcaagcaggtctgggaagatcttctcattaaactaaagctggagaacaaagaaaatgcggtttctgaaactgacctgtcatcgaataaaaataatgttgatcagtttattgaatgcgctaagagaaatgaacagaccctattcgataatataagaaaaagtgattttcatgttgattcatttaagccaggtagtacacgtagtgttattttagaaacacaaccaaatgtctgtatggaaccacataatttatatgacaaccaaatagataaggtttcacctgtaactaaaaactctcagcaagttaaaggccactatggagataaatttaaagaaatgcagatgttccttaaccagatgagcaatgcacttcaacagactccatctttgtcagagtcaaaggaacacaccatagatattcaaaaaataacggatgcctttgtgaaagaattccggggggtattaattgataaaaatgggaattgttcagaacgtttattcaatttttatgagtgctgctataagtttttaccaagagcgcagcctcaagataaaatcgaaagctataattcagcactacaagctttttccatctttcgttcatctactttgaataataatgatgtagggtttaattttaaattattcccagaagtcaagctgtctggtgaaaatcttgaaacggtattcaaatacaaaaaaggaagttttgtccgggagatagccagaattaacattactctccaaaaagaagaggatggtttatataatttaggtggattggattttaagggatgcttcttttctggacagaacttcagtaactatgatattcaatatgtgaactggggaacgtcattgtttgatcttgatactccgtgtatttttaatgcgcctgcttacaacaagagtaatgaaaaatcattaaaacctgtgagcgaaaacggtttaagtggagtcttgactgatcgtaataataaaataaaactcatcacgggcgtggcaccattcgatgatattttatttatggatgatgactttgatgatagttcctctgaggatgatcccgttgagaatagtcctgttgtgactagtcccgttgtatcaagttctaaaagcagttttcaatga

SEQ ID NO: 489159 - DNA, 597 bp, Shigella sonnei; identical to SEQ ID NO: 489152

SEQ ID NO: 489160 - DNA, 537 bp, Shigella sonnei; identical to SEQ ID NO: 16554

SEQ ID NO: 489161 - DNA, 246 bp, Shigella sonnei; identical to SEQ ID NO: 486098

SEQ ID NO: 489162 - DNA, 1593 bp, Shigella sonnei; identical to SEQ ID NO: 486946

SEQ ID NO: 489163 - DNA, 597 bp, Shigella sonnei; identical to SEQ ID NO: 489152

SEQ ID NO: 489164 - DNA, 597 bp, Shigella sonnei; identical to SEQ ID NO: 489152

SEQ ID NO: 489165 - DNA, 597 bp, Shigella sonnei; identical to SEQ ID NO: 489152

SEQ ID NO: 489166 - DNA, 378 bp, Shigella sonnei
atggacgaacagtggggctatgtcggggctaaatcgcgccagcgctggctgttttacgcgtatgacagtctccggaagacggttgttgcgcacgtattcggtgaacgcactatggcgacgctggggcgtcttatgagcctgctgtcaccctttgacgtggtgatatggatgacggatggctggccgctgtatgaatcccgcctgaagggaaagctgcacgtaatcagcaagcgatatacgcagcgcattgagcgacataatctgaatttgagacaacatctggcaaggctgggacggaagtcactgtcgttctcaaaatcggtggagctgcatgacaaggtcatcgggcattatctgaacataaaacactatcagtaa

SEQ ID NO: 489167 - DNA, 303 bp, Shigella sonnei; identical to SEQ ID NO: 21213

SEQ ID NO: 489168 - DNA, 165 bp, Shigella sonnei; identical to SEQ ID NO: 489147

SEQ ID NO: 489169 - DNA, 342 bp, Shigella sonnei; identical to SEQ ID NO: 488954

SEQ ID NO: 489170 - DNA, 276 bp, Shigella sonnei; identical to SEQ ID NO: 485876

SEQ ID NO: 489171 - DNA, 237 bp, Shigella sonnei
atgactagtctaaaaactagtattaagactatcacttatttaagtgatactggttgtctggagattcagggggccagtctagtggtacgccgtctgcgtttctccggccctaagacatcaatcatctgtactccaatgactagtctaaaaactagtattaagactatcacttatttaagtgatactggttgtctggagattcagggggccagtctaattggctttagcttcgcgtag

SEQ ID NO: 489172 - DNA, 1683 bp, Shigella sonnei; identical to SEQ ID NO: 484981

SEQ ID NO: 489173 - DNA, 765 bp, Shigella sonnei; identical to SEQ ID NO: 476262

SEQ ID NO: 489174 - DNA, 585 bp, Shigella sonnei; identical to SEQ ID NO: 487741

SEQ ID NO: 489175 - DNA, 378 bp, Shigella sonnei; identical to SEQ ID NO: 476066

SEQ ID NO: 489176 - DNA, 1287 bp, Shigella sonnei; identical to SEQ ID NO: 486968

SEQ ID NO: 489177 - DNA, 354 bp, Shigella sonnei; identical to SEQ ID NO: 487004

SEQ ID NO: 489178 - DNA, 249 bp, Shigella sonnei; identical to SEQ ID NO: 487383

SEQ ID NO: 489179 - DNA, 189 bp, Shigella sonnei; identical to SEQ ID NO: 489145

SEQ ID NO: 489180 - DNA, 315 bp, Shigella sonnei
gtgtctggaaatataggggcaaatccaggcgcggcgaatgatcccacgattaaaggcgggcgcttaattgttgaaaaagatgggattgccgtctttgccgctatcgaaaagggaggattactggaggttaaagacgggggattagcatttgcggtagatcagaaagcaggcggtgctattaaaacaaccacgcgggtcatggaggtattcggaacaaaccgtctcggtcagttcgaaatcaagaatggtattgctaacaatatgctgttggaaaacggcggaagtttgggtgatgctgccaacttactgatttag

SEQ ID NO: 489181 - DNA, 276 bp, Shigella sonnei; identical to SEQ ID NO: 485876

SEQ ID NO: 489182 - DNA, 546 bp, Shigella sonnei
atgcgctatcgcattttccttctcttttttttcgctttgttgccgacgtctttggtgtgggcggcactagcgcaacgggcgttttccgactggcaggtcacctgtaataaccaaaacttctgcgtggcgcgcaatacgggcgatcataatggactggtgatgaccctgagccgcagcgccggggcgcataccgatgccgttttacgtattgagcgcggcgggttgaagtcgccggatgcgtctgaaggagagatagcgccacggctgctgttagatggtgagccgttggcgttaagtggtgacaagtggcggatttcaccatggttattagtaaccgatgatacggcaaccatcaccgcgtttttgcagatgattcaggaagggaaggcgatcaccttacgcgacggcaatcagaccatttctctgagtggcttaaaagcggcgttgttgtttattgatgctcagcaaagcgcgttggcagtgaaaccgcgtggatcaagaaaggggacgaaccgccgctcagcgtaccgcccgcgcctgcgctga

SEQ ID NO: 489183 - DNA, 951 bp, Shigella sonnei; identical to SEQ ID NO: 481844

SEQ ID NO: 489184 - DNA, 141 bp, Shigella sonnei; identical to SEQ ID NO: 488946

SEQ ID NO: 489185 - DNA, 189 bp, Shigella sonnei; identical to SEQ ID NO: 463227

SEQ ID NO: 489186 - DNA, 174 bp, Shigella sonnei
atggtcgcattcgtaaatgtctccattactttcaacaaccagattatccttgcaggactcctggaaaatacaacttgtatgcccattccccaaaaaacggctgacaaagctttcaaactgacgaatgaaaatttcacccacatcgtttttaacccattgcataaaaatggttga

SEQ ID NO: 489187 - DNA, 543 bp, Shigella sonnei
gtgaaagatagtaatcagcgatggtgctctgacgggttcgagttccgctgtgataacggagaaaaactgcgagtcacgttcgcgctggactgctgtgaccgtgaggcactgcactgggcggtcactacgggcggcttcaacagtgaaacagtacaggacgtcatgctgggagcggtggaacgccgcttcggcaacgagcttccggcgtctccagtagagtggctgacggataatggttcatgctaccgggctaatgaaacacggcagtttgcccggatgttggggcttgaaccgaagagcacggcggtgcggagtccggagagtaacggcatagcagagagcttcgtgaaaacgataaagcgtgactacatcagtgtcatgcccaaaccagacgggttaacggcagcaaagaaccttgcagaggcgttcgagcattataacgaatggcatccgcatagtgcactgggttatcgctcgccacgggaatatctacggcagcaagccagtaatgggttaagtgataacaggtgtctggaaatatag

SEQ ID NO: 489188 - DNA, 372 bp, Shigella sonnei; identical to SEQ ID NO: 486985

SEQ ID NO: 489189 - DNA, 348 bp, Shigella sonnei; identical to SEQ ID NO: 485869

SEQ ID NO: 489190 - DNA, 348 bp, Shigella sonnei; identical to SEQ ID NO: 485869

SEQ ID NO: 489191 - DNA, 366 bp, Shigella sonnei; identical to SEQ ID NO: 10065

SEQ ID NO: 489192 - DNA, 189 bp, Shigella sonnei; identical to SEQ ID NO: 463227

SEQ ID NO: 489193 - DNA, 270 bp, Shigella sonnei
atgcggaatggtgatgagaatgctgatgacattgcagggcgcttcaccgggacgtataccggagctgatgcgcgatcttgcaagtatgggacaacttgtgaaattaccgacgagaagggaaagggccttcccgagagtggtaaaggagaggccctggaaataccccacagccccgaaaaagagccagtcagttgcttaactgactggcattacagcccggaggctggcatttttaaatcagataaagtcagtcttatgcctggcctttga

SEQ ID NO: 489194 - DNA, 189 bp, Shigella sonnei
atgaagccggaaaacaaactacctgttctggaccttatttctgctgaaatgaagaccgttgtgaatactcttcagccggatttaccgtcctggcccgcaacgggaacgattgctgagcaacgacagtattacacgtttcaatatcagcaggcgggatcgcattttcatggcagtggttccttacaatga

SEQ ID NO: 489195 - DNA, 1764 bp, Shigella sonnei
gtgggagcggcaaaaacaagaaactggctggcgctgctgaccaaaacggtctggctgccgtggatcaagctcgaaaagcccgacgcgcgcctgattcgcctctccgaaaagaacaataactggacgtttaatcttgccaacgatgacaacaaagacgcgaatgcaaagccgtcggcatggtcgtttcggctggataatattcttttcgatcaagggcggatcgccattgatgacaaagtaagcaaagcggatctggaaatttttgttgatccgttaggcaagccgctgccgttcagcgaagttactggatcgaaaggtaaagcggataaagaaaaggtgggcgattacgtttttggcctgaaggcgcagggacgttataacggtgaaccgctcacgggtacgggaaaaataggcggtatgctggcgctgcgtggcgaagggacgccgtttccggtacaggctgatttccgttcaggtaatacccgtgttgcttttgatggcgtcgtgaatgacccaatgaagatgggcggtgtcgatttacggcttaaattttctggcgattcactgggtgatctctatgaactgacgggcgttctgctgcccgataccccgccgtttgaaacggatggtcggctggtagcgaaaatcgacactgaaaaatcgtcggtctttgattatcgcggttttaatgggcgaattggcgatagcgatatccacggttctctggtctacaccaccggaaagccacgaccaaaactggaaggtgatgtcgagtcgcggcaattgcggctggcggacctgggaccgttgattggcgttgattccgggaaaggggcagaaaagtcgaaacggtctgaacagaagaagggcgaaaaaagcgttcagcctgcgggcaaagtgctgccttatgaccgcttcgaaaccgataaatgggacgttatggatgccgatgttcgcttcaaagggcggcgcattgagcatggcagtagcctgccgattagcgatctttctactcatatcatcctcaaaaatgctgacctgcgcctgcaaccgctgaaatttggcatggcgggcggcagcattgcggcgaatattcatctggaaggcgataaaaagccgatgcaggggcgggcagatattcaggctcgtcgactgaaactgaaagaactgatgcccgatgtggaactgatgcagaagacgctgggggaaatgaacggtgacgcggaactacgcggtagcggtaactcggtggcggcgcttttaggcaacagtaacggcaacctgaaactgttgatgaatgacgggctggtgagccgcaacctgatggagattgttgggctgaatgtcggcaactacattgtcggtgcgatatttggtgacgatgaggtgcgggtgaactgcgcggcggcgaatctgaatattgccaacggcgtggcgcgcccgcagatttttgctttcgatactgagaacgcgttgattaatgttaccggcacggcaagttttgcttcagaacagctggatttgactattgatccggagagtaaagggattcggattatcacactgcgttcgccgctgtatgtgcgtgggacgtttaaaaatccgcaggctggggtgaaagccggaccgctgattgcccgtggtgctgttgctgcggcactggcaacgctggtaacaccgacggcggcgttactggcactgatctcaccttccgaaggggaggctaatcagtgtcggacgatattgtcgcagatgaagaagtga

SEQ ID NO: 489196 - DNA, 987 bp, Shigella sonnei
atgtcttctgtttctacatcgggttctggcgcacctaagtcgtcattcagcttcgggcgtatttgggatcagtacggcatgctggtggtgtttgcggtgctctttatcgcctgtgccatttttgtcccaaattttgccaccttcattaatatgaaagggttgggcctggcaatttccatgtcggggatggtggcgtgtggcatgttgttctgccttgcttccggtgactttgacctttctgtcgcctccgtaattgcctgtgcgggtgtcaccacggcggtggttatcaacctgactgaaagcctgtggattggcgtggcagcggggttgctgcttggcattctctgtggcctggtcaatggctttgttatcgccaaactgaaaataaatgctctgatcacaacactggcaacgatgcagattgttcgaggtctggcgtacatcatttcagacggtaaagcggtcggtatcgaagatgaaagcttctttgcccttggttacgctaactggttcggtctgcctgcgccaatctggctcaccgtcgcgtgtctgattatctttggtttgttgctgaataaaaccacctttggtcgtaacaccctggcgattggcgggaacgaagaggctgcgcgtctggcgggtgtaccggttgttcgcaccaaaattattatctttgttctctctggcctggtatctgcgatagccggaattattctggcttcacgtatgactagtgggcagccaatgacgtcgattggttatgagcttattgttatctccgcctgcgttttaggtggcgtttctctgaaaggtggcatcggaaaaatctcatatgtggtggcgggtatcttaattttaggcaccgtggaaaacgccatgaacctgcttaatatttctcctttcgcgcagtacgtggttcgcggcttaatcctgctggcagcggtgatcttcgaccgttacaagcaaaaagcgaaacgcactgtctga

SEQ ID NO: 489197 - DNA, 1218 bp, Shigella sonnei
atggcagtattgacggatacgaaagcaagacatatcaaacctgatgacaaaccattgccccatgggggaattaccggactgacccttcatccttcttcagtaaaggggcgggggaaatgggtttttcgttatgtaagtccggtgacacaaaaaagacgtaatgctggattgggaacttacccagaggtcagtattgctgaagctgcacgtactgcccggataatgcgagagcaacttgctgcaggtgatgatcctctggagattaaaaaggctgaatctgagaaagtcgttatcccaacatttgccgatgcagccaggcgtgtacatgcagaactgtctcctggatgggaaaatccaaagcatgtaaggcagtggttatcgacgcttgagaattacgcgtttcctcaactgggagcaaaaacgctggattcgattacggctgcggacgtggcagaaacactgcgtccagtctggttaaccttgtcagaaacggcaagccgggttaaacagcgcattcatgttgttatgcagtggggatgggcgcacggtttttgtgtggcaaatcctgttgatgtggttgaccatttgcttcctcagcagacaagaggacgtgatgaacaccaacccgcaatgccctggaggcagttaccgctttttgtggcgaccagtgtgtatagtgatgaaccttataatgttacccgcgcactgttattaatggtgatacttacagcaactcgctcgggcgaagccaggggaatgcgctgggctgaaattgattttcataagcgggtatggactatacctgcagaaagaatgaaagctaggctacagcatcgtgttcctttatcccggcaggctatttacattctggaaaatatacgtggcctgcatgatgaactggtgttcccttcacccagaaagcagcagatcctttccgatatggtgttgacaagttttctgcgtaaaaagaaagccgtcagtgacattccggggcgagttgccacggcacatggttttcgctcaacattcagggactggtgtagtgaacaggggtattcgcgggatctggcggaaagggcgctcgctcatacgctgaaaaataaggttgaggcggcatatcatcgtactgatctactggagcagcgtgtaccgatgatgcaggcatgggcggattatgtgatgtctcaacttgctaaaaacactaaggaattcgcttag

SEQ ID NO: 489198 - DNA, 303 bp, Shigella sonnei; identical to SEQ ID NO: 458125

SEQ ID NO: 489199 - DNA, 354 bp, Shigella sonnei
atgccactgctggataagctgcgtgagcagtacggggtcggatcggtatgcagtgaactgcatattgccccgtcaacgtattaccactgtcagcaacagcgacatcatcatgataaacgcagtgcccgtgcgcagcgcgatgactggctgaagaaagagatactgcgcgtatacgatgagaatcatcaggtatacgctgtaaagtctggcatcagttgttacgggaaggtatcagagtggccagatgcactgtggcacgtctcatggcggttatggggcttgccggtgttctccggggtaaaaaggtccacactaccgtcagccggaaagccgttgccgcaggcgaccgcgtaa

SEQ ID NO: 489200 - DNA, 219 bp, Shigella sonnei
atgactaaaaatacacgtttttcccctgaagtccgtcaacgggcagttcgtatggttctggaaagtcagggcgaatatgactcacaatgggcagcgatttgttccattgccccaaagattggctgtatactggagactctgcgtgtctgggtacgccagcatgagcgggataccgggggcggtgaggtgggctcaccaccgctgaacgtcagcgtctga

SEQ ID NO: 489201 - DNA, 1203 bp, Shigella sonnei
atgcagacatcaaacataactaaccatgaaagaaatgactcatcatggatgtcaactgtcaaatcaactacagaagtaagttggaataaattgagtttttgtgacgttttactgaaaataataactttcggcatatattctccacacgaaactctagccgaaaaatatagcgaaaaaaaactaatggatagtttctcaccatcactatcacaagataaaatggacggagagtttgcccacgcaaacatagatggcatttcaatacggctatgccttaacaaaggcatatgttcggttttttatcttgatggagataaaatacaatccactcaactttcatcaaaagaatataataacttgttaagttcactcccccccaaacaattcaacttaggaaaagtacatactattacagctccggtatcagggaattttaaaactcacaagcctgcaccagaagttattgaaacagccattaattgctgtacatcgataataccaaacgatgattgcttccccgttaaagacactgattttaatagtgtttggcatgatatttacagagatattagagcatctaacagcaatagtacaaaaatatatttcaacaatattgaaataccactaaaattaattgcagatctaattaatgagttaggaattaatgaattcattgatagcaaaaaagagcttcaaatgctaagttacaaccaagtaaataaaataatcaattcaaacttcccccaacaagacctatgttttcaaacagaaaaacttttgtttacttcactctttcaagaccctgcatttatatctgcactaacatctgcattctggcaatctcttcacatcacgtcttcctctgtggaacacatatatgcccaaattatgtccgaaaacatagaaaacaggcttaatttcatgcctgaacaacgagttattaacaattgtggacatattataaaaatcaacgcagttgtccctaaaaacgacactgcaatctctgcctctggggggagggcttacgaagttagctcatcaatattaccatcgcacataacatgtaatggtgttggtattaataaaatagaaacaagctatctcgttcatgctggaacacttccaagcagtgaagggcttcgcaatgctatccctccagaaagtcgtcaagtatcatttgccatcatatctcctgatgtttaa

SEQ ID NO: 489202 - DNA, 3309 bp, Shigella sonnei
atgaatcaaattcacaaatttttttgtaatatgacccaatgttcacaggggggggccggagaattacctacggtaaaggaaaaaacatgcaaattgtctttttctccttttgttgttggtgcatccctgttgctcggggggccaatagcttttgctattcctctttcgggtactcaagaacttcatttttcagaggacaattatgaaaaattattaacacctgttgatggactttctcccttgggagctggtgaagatggaatggatgcgtggtatataacttcttccaacccctctcatgcatctagaactaagctacggattaactctgatattatgattagcgcaggtcatggtggtgctggtgataataatgatggtaatagttgtggcggtaatggtggtgactctattaccggatctgacttgtctataatcaatcaaggcatgattcttggtggtagcggcggtagcggtgctgaccataacggtgatggtggtgaggctgttacaggagacaatctgtttataataaatggagaaattatttcaggtggacatggtggcgatagttatagtgatagtgatggggggaatggaggtgatgccgtcacaggagtcaatctacccataatcaacaaagggactatttccggtggtaatggaggtaacaattatggtgagggtgatggcggtaatggaggtgatgccatcacaggaagcagcctctctgtaatcaataagggcacgttcgctggaggcaacggaggtgctgcttacggttatggttatgatggctacggtggtaatgctatcacaggagataacctgtctataatcaacaatggagctattttaggcggtaatggtggacattggggggatgctataaatggtagcaatatgaccattgctaatagcggatatataatttcaggtaaagaagatgatggaacacaaaatgtagtaggtaatgctatccacatcactggtggaaacaattcattaatactccatgaaggttctgtcattactggtgatgtacaggttaacaattcatccattctgaaaattatcaacaatgattacactgggaccacaccaactattgaaggtgatttatgtgctggtgattgtacaactgtttcactatcaggtaacaaattcactgtttcaggtgacgtttcttttggtgagaacagttctttaaatttagctggaatcagtagtctggaagcttctggaaatatgtcatttggcaacaatgtaaaagtggaagctattataaataactgggcgcagaaggactataaactgctaagtgcagataaagggataacaggtttcagtgtttctaatatatctatcatcaatccgttactcactactggtgctattgactatacaaaaagctatatcagtgaccagaataaattgatctacggtttgagctggaatgatacagatggcgacagtcatggagagttcaatctgaaagaaaacgctgaacttactgttagtactattctggcagataatctcagccatcataatataaatagctgggacggaaaatccctaacaaaatcaggggagggaactctcattttggcggaaaaaaatacctactctggtttcaccaacatcaatgcaggcattctaaaaatggggacagttgaagctatgacacgtaccgctggtgttattgttaataaaggtgctaccttgaatttttcaggcatgaaccaaactgttaacactttattaaatagtgggactgtgctaatcaataatattaatgccccttttttgcctgaccccgtcattgtcacaggtaacatgactctggagaaaaacggtcatgttattctcaataatagttcgtcaaatgtcggtcagacctatgttcagaaaggtaattggcatggaaagggcggaatattatctttgggcgcggttctcggcaatgacaacagtaaaactgaccggctggaaattgcaggccatgcgtctggtattacctatgttgcagtgacaaatgagggaggctctggagataaaactcttgaaggtgttcaaattatttcgacagattcttctgataagaatgcttttattcagaaaggccgtattgttgctggtagttatgactatcgcctgaaacagggcactgtatctggactgaataccaataagtggtatctaactagtcagatggataatcaagaatcaaaacagatgagcaatcaagagtctactcaaatgagtagtcgccgagctagttcacagcttgtatcttcacttaatttgggtgaaggtagtattcacacatggcgccctgaagctggcagttatattgctaacctgatagcaatgaacacgatgtttagtccttctctctatgaccgacacggtagcactattgttgatcctactacaggtcagctcagcgaaaccaccatgtggattcgtactgttggtggacataatgagcataatttagctgatagacaattaaaaaccacagctaacaggatggtttatcagattggtggagatattttgaagacaaacttcactgatcatgatggcttgcatgtgggtattatgggagcttatggatatcaggatagcaaaactcataataagtatactagttatagttcacgaggaactgtgagcggttatactgccggtttgtacagttcttggtttcagaatgaaaaagaacgaacaggtctatatatggatgcttggttgcagtacggttggtttaataatacagtcaaaggagatgggttaactggtgagaaatattccagcaaaggaataacaggagctttggaagctggctatatctacccaaccatacgctggactgctcataataatattgacaacgcattgtatctcaatccacaagtccagataactaggcatggggtaaaagcaaacgactatattgaacacaatggcactatggtcacatcctctggggtcaataatattcaagcaaaattgggattgcgtacatccttaattagtcagagttgtatcgataaggagactcttcgtaagttcgaaccatttttggaagtgaattggaaatggagctcaaagcaatatggtgtaattatgaatggcatgtcaaatcaccagataggcaaccgtaatgtgattgaactcaaaactggtgtgggggggcgtcttgcagataacctaagcatctggggaaacgtatctcagcaattgggtaataacagttacagagacacccaaggtattttgggtgtgaaatataccttctga

SEQ ID NO: 489203 - DNA, 327 bp, Shigella sonnei; identical to SEQ ID NO: 485848

SEQ ID NO: 489204 - DNA, 354 bp, Shigella sonnei; identical to SEQ ID NO: 466835

SEQ ID NO: 489205 - DNA, 693 bp, Shigella sonnei
atgattagtcccatcaagaatattaagaacgtatttccaataaatactgcaaatactgaatatatagtgagaaatatttatcctagagttgaacatggttactttaatgaatcaccaaacatatatgacaagaagtatatctctggtataaccagaagtatggcacaattaaaaatagaggagtttattaatgagaaatccagacgacttaattatatgaagacaatgtattctccatgtccggaagattttcagcctatttccagagacgaagccagtacaccggaaggaagctggttgacagttatatctggaaaacgtcctatggggcaattttctgtggatagtttgtaccatcctgacttacatgcattatgtgagctcccagagattagttgtaagatcttccctaaagaaaatagtgattttttgtatataattgttgtattcagaaatgattctccccaaggagaactacgggcaaatcggtttatagaactatatgatataaaaagagagattatgcaagtgttaagagatgagtcgccagagttaaagtctattaaatctgagattattattgctcgtgaaatgggagaactttttagttatgcatcagaggaaatagatagctacataaaacaaatgaatgacaggctttctcaaatcaaggctcgaatgcctgttacttaa

SEQ ID NO: 489206 - DNA, 948 bp, Shigella sonnei
atgaaattaaaattccttgtacttgcactttgtgtaccagcgatctttactacacatgctaccactaactatccacttttcataccggacaacatcagtacggatattagtctaggatctctgagtggcaaaacaaaagaacgcgtttatcatcccaaggaaggggggagaaaaattagtcaactggactggaaatacagtaatgcgactattgttagaggtggcatcgattggaagctaattccaaaagtgtctttcggagtttccggttggactactttaggtaaccagaaagcaagcatggttgataaagactggaacaattccaatacccctcaggtatggaccgaccagagctggcatcccaatacgcatctccgtgatgctaacgaattcgagctgaatcttaaaggttggttattaaataatttggattatcgacttggactaatagcaggttaccaagagagtcgttacagttttaatgcaatgggagggagttatatttatagtgaaaacggggggaacaggaataaaaaaggggcacatcctagtggtgaaagaacaatagattacaaacagctcttcaaaataccttatattggattaactgctaattaccgccatgagaattttgagtttggagcagaactgaaatatagtggttgggttcgttcatctgatacagataaacactatcagactgagacaatttttaaagatgaaataaaaaaccaaaattactgctctgttgctgcgaatattggatactatgtcacccccagtgcaaaattttatatagaaggctccagaaattacatttctaataaaaaaggtgatacatctctttatgagcaaagtaccaatatatctggcaccattaaaaatagtgcaagtattgaatatattggttttctcacttccgcaggtataaagtatattttttga

SEQ ID NO: 489207 - DNA, 168 bp, Shigella sonnei; identical to SEQ ID NO: 464689

SEQ ID NO: 489208 - DNA, 465 bp, Shigella sonnei; identical to SEQ ID NO: 476983

SEQ ID NO: 489209 - DNA, 867 bp, Shigella sonnei; identical to SEQ ID NO: 461376

SEQ ID NO: 489210 - DNA, 741 bp, Shigella sonnei; identical to SEQ ID NO: 474314

SEQ ID NO: 489211 - DNA, 168 bp, Shigella sonnei; identical to SEQ ID NO: 461648

SEQ ID NO: 489212 - DNA, 273 bp, Shigella sonnei; identical to SEQ ID NO: 488057

SEQ ID NO: 489213 - DNA, 1209 bp, Shigella sonnei
atgacccgaagtggtggtgattttcagccccgcccgctgaaacgtctgttcacggccaaccagtgctggacgtccttcctggatgcgggcggtctgcgcgatatcgaggttgaggctgtcacaaaaatgctggcctgcggcacgcggatactgggagtgaaggaatacaactgcgataaacctgagtgcccccacgtcagatacgtcactaactcatgcggcagccgtgcctgcccgtcctgcggaaaaaaggccacagacctgtggatagcgacacagctgaatcgtcttcctgactgcgactgggtacatctggtcttcaccctgccggacacgctgtggccggtgttcgaaagcaaccggtggctgctgaatgacgtgtgccgtctggcggtggagaatctgctgtatgccgcccggaaacgggggcaggaacccggtatcttctgcgccatccacacgtatggccgtcgtctcaactggcatccgcatgtacatgtgtctgtaacctgtggatgtctgaataagcatggtcagtggaaaaagctgagcttcctgaaagacgcgatgcgttcgcggtggatgtggaatatgcggcaacggcttctgaaagcgtggtcagaggggctggcgatgccggagtcgttgtcacatatcacgacggaatcacagtggagaagcctggtgctgaaagccggaggaaaatactggcatgtgtacatgtcgaaaaaaacggccggcgggaggaatacggcgcgctacctgggtcgttatctgaagaagccgccgatagcggcctcccggctggcacattacaacggaggggcgagcctgagcttccgttacctggaccacaaaacgggagaaacggcgacggaaacgctgacacagcgtgagctggtcgcgaggctgaaacagcacatcccggagaagttttttaagatggtgaggtacttcgggttccttgccaaccgggtgtgtggagagaagctgccgcaggtgtaccgtgctctggggatggataaaccggaaccagtggcgaaagtgtgctatgcacaaatggtgaaacagttcctgagtcgtgacccgttcgaatgcgtgctgtgtggcggccggatggtataccgccgggccattgcggggctgaatgtggaggggctgaagaaaaacgcgcgggatatcagtctgctgaggtatatgccggcctga

SEQ ID NO: 489214 - DNA, 189 bp, Shigella sonnei
atgttgacccgcaaaagtatagataccgttctgctctctgttggtgctgagaagctctcacaatgtgaatgggactggatgaagatgctcaaacccatggacccaccacctgcgatggtcgcggcctccatcctggagcgccgtggcgacacagcagcccttacccggctacaggataccgggggttaa

SEQ ID NO: 489215 - DNA, 1200 bp, Shigella sonnei
atgttgtccgcttttactccccgcccgctgaaacgtctgttcacggccaaccagtgctggacatccttcctggatgcgggcggtctgcgcgatatcgaggttgaggctgtcacaaaaatgctggcctgcggcacgcggatactgggagtgaaggaatacaactgcgataaacctgagtgcccccacgtcagatacgtcactaactcatgcggcagccgtgcctgcccgtcctgcggaaaaaaggccacagacctgtggatagcgacacagctgaatcgtcttcctgactgcgactgggtacatctggtcttcaccctgccggacacgctgtggccggtgttcgaaagcaaccggtggctgctgaatgacgtgtgccgtctggcggtggagaatctgctgtatgccgcccggaaacgggggcaggaacccggtatcttctgcgccatccacacgtatggccgtcgtctcaactggcatccgcatgtacatgtgtctgtaacctgtggatgtctgaataagcatggtcagtggaaaaagctgagcttcctgaaagacgcgatgcgttcgcggtggatgtggaatatgcggcaacggcttctgaaagcgtggtcagaggggctggcgatgccggagtcgttgtcacatatcacgacggaatcacagtggagaagcctggtgctgaaagccggaggaaaatactggcatgtgtacatgtcgaaaaaaacggccggcgggaggaatacggcgcgctacctgggtcgttatctgaagaagccgccgatagcggcctcccggctggcacattacaacggaggggcgagcctgagcttccgttacctggaccacaaaacgggagaaacggcgacggaaacgctgacacagcgtgagctggtcgcgaggctgaaacagcacatcccggagaagttttttaagatggtgaggtacttcgggttccttgccaaccgggtgtgtggagagaagctgccgcaggtgtaccgtgctctggggatggataaaccggaaccagtggcgaaagtgtgctatgcacaaatggtgaaacagttcctgagtcgtgacccgttcgaatgcgtgctgtgtggcggccggatggtataccgccgggccattgcggggctgaatgtggaggggctgaagaaaaacgcgcgggatatcagtctgctgaggtatatgccggcctga

SEQ ID NO: 489216 - DNA, 288 bp, Shigella sonnei
atgacttatacggtaaaattcagggatgatgcgctcaaggaatggctgaaactggataagaccattcaacaacagtttgtgaaaaaactaaaaaaatgcagcgaaaatcctcatataccgtcggcaaaactaagagggctaaaggactgctacaaaattaaactacgtgcatcgggatttcgtctggtttatcaggtgattgacgatatgttaattattgcggttgttgcggtaggaaaacgagaacgtagtaacgtttataatctcgccagtgagagaatgagatag

SEQ ID NO: 489217 - DNA, 252 bp, Shigella sonnei
atgcctaacatcattctgtctgagaccagtgcaagtgtcagtgaactgaaaaaaaatcctatggctacagtcagtgccggagatggttaccctgtcgccattcttaaccggaatcagccggcattctactgtgtgcctgctgaactgtatgaaaggatgcttgatgctctggatgaccaggaactggtgaaactggttactgaacgcagcaatcagccactgcatgatgtggacctggacagttatttatga

SEQ ID NO: 489218 - DNA, 678 bp, Shigella sonnei
atgtcaataaataactatggattacatccagcaaacaacaaaaatatgcacctaataatagacagcaatactgctaatgaaaataaaggaatgaaaagtaatatcattaacgtgacaaattccgctatatcccacgccatcaatgaagaaaaatcaggggggggatatagtggtgtttctttcagaaaattggccaaaatacagagcatatccattccgacaaagaataataaggagtataaccgccataatttgttttcattgatttggcatggaaatgccgatgcagcgcgtaaatacggtgaatcgctgttggcagccgaaatacccaaagaggaaaaactagaagttcttgcagcacgaaataatgctggggaatctgctttgttcatagctcttcaagaaggtcattccgctgcgattcaagcttatggagattttattaaaacttttgatttatcaccaaaagaaacgattaaactattggatgtaagagataatgagggtttaccaggattatttctggccgcagggaaagggaatatcgaggctatgatggcatatataaatatatgccatcatagtgggataaaacttacagaaatagcagacagacttaacaataatgaacaagacatgtttaatattatttctgacaaaatacaagagttgttttaa

SEQ ID NO: 489219 - DNA, 231 bp, Shigella sonnei
atgcattccgtattgggcactatgatgccagaaatctgcgaggctccacaccttcctgtatttcccttcctctatcacagtgcactttacttaatagggtgggatgtgttcattacatttattgtgttttttatgattgtttttgcgtccagtgtcgttcgtcatgggaaactggttctatgggtagtatcgctcagtctagttaactgtttgtttctttttagaaattaa

SEQ ID NO: 489220 - DNA, 225 bp, Shigella sonnei; identical to SEQ ID NO: 474096

SEQ ID NO: 489221 - DNA, 477 bp, Shigella sonnei
atggggaaaaggatagtaaaaatatcatcaaccaaaataaatactagtattttgagctctgtttcagaacaaatcggtgaaaatattacagattggaaaaatgatgaaaaaaaagtctacgtatcccgggtggtaaaccaatgtattgataagttttgtgcagaacacagccgagaaatcggcgataacctccgtaaacagatatttaaacaggttgagaaagattatcgcatttctctagacatcaatgctgcacaaagttccataaatcatcttgtatcaggaagcagttatttcaaaaagaaaatggacgaactttgtgaagggatgaatagaagcgttaaaaatgatacaacaagcaatgttgcaaatcttatttccgatcagttttttgagaaaaatgtgcaatatattgatctaaagaaattacgtgggaatatgagtgactatattacaaatttagaatcgcctttctga

SEQ ID NO: 489222 - DNA, 300 bp, Shigella sonnei
atgacaaaaacagtatcaaccagcaaaaaaacacgtaaacagcattcgcctgaatttcgcagtgaagccctgaagcttgctgaacgcatcggtgttgctgccgcagcccgtgaactcagcctgtatgaatctcagctctatgcgtggcgcagcaaactgcagcaacagatgacctcgtctgagcgtgaaagtgaactggccgctgaaaatgcccgcctgaagcggcaactggcggagcaggcagaggaactggctatcctccaaaaggccgcgacatactttgcgaagcgcctgaaatga

SEQ ID NO: 489223 - DNA, 870 bp, Shigella sonnei
atgaagtatgtctttattgaaaaacatcaggctgagttcagcatcaaggcaatgtgccgcgtgctccgggtggcccgcagcggctggtatacgtggtgtcagcggcggacagggataagccctcgtcagcagttccgtcagcactgcgacagcgttgtcctcgcggcggcctttacccggtcaaaacagcgttacggtgcaccacgcctgacggatgaactgcgtgctcagggttaccactttaacgtaaaaaccgtggcggcaagcctgcgccgtcaggggctgagggcaaaggcctcccggaagttcagcccggtcagttaccgcgcacatggcctgcctgtgtcagaaaatctgctggagcaggatttttacgccagtggtccgaaccagaagtgggcgggagacatcacgtacttacgtacagatgaaggctggctgtatctggctgtggtcattgacctgtggtcacgtgccgttattggctggtccatgtcaccacgcctgacggcgcaactggcctgcgatgccctgcagatggcgctgtggcggcgtaagagaccccggaacgttatcgttcactcggaccgaggaagtcagtactgttcagcagattatcaggcgctgctgaagtggcataatctgcgtggcagtatgagcgcaaagggctgctgctacgataatgcctgcgtggaaagcttctttcattcgctgaaagtggaatgtctccacggagaacactttatcagccgggaaataatgcgggcaacagtgtttaattatatcgaatgtgattacaatcgctggcgacggcacagttggtgtggcggcctcagtccggaacaatttgaaaaccagaacctcgcttag

SEQ ID NO: 489224 - DNA, 273 bp, Shigella sonnei
atggtcacagttaaccttcattgcccccgttgccagtccgttcaggtttaccgtcacgggcagaacccaaaaggacatgatcgattccgttgccgtgactgtcaccgggtgtttcagctcacttactgttacgaggcccgtaaaccgggagttaaaaaccaaatcactgaaatggctttcaacggtgccggagttcgcgatactgcccgtacgctgaaaatcggcatcaataccgtcatacggacattaaaaagctcccgccccggcggataa

SEQ ID NO: 489225 - DNA, 1245 bp, Shigella sonnei
atgttgttagaatatgttgaaagaaaaatttccttagccttgagtaagtatcctaaggtaagggatgttattaagttcttttatttatatatcgcatcattattcggaattattttgaataaaaataagacggttattcaatcaaaaatatacgagatttcaattgatgattctgaagaatcattttttggctattatgaccatagtccaatgagctctaatgggcggtacgtattgttccactctagtgcgtttagcactaaacgacatccaaagaaagttaagtatatatctatttgcgtaaaagaccttcttaataacaaagtttataagctatatgatacgcgagcatttaattggcagcagggaagccgattaatgtggattgatgatgacaatataatttttaatgactatgaaaataatggatacattagtgttgtctattctttgtctttgatgaaggttataaaaaaaataaactatccgatttatgatgtgaataattacaaggctgtgacgttagatttctcatggctggctaaatatgatagcgattatggttattataataaaaaatcattttctacagatatttcaatcattaatttgaacacggggggaatagaattatttttatccttagacgaaatgctaaagagaactaattttaaatgtaatattgatgttgaacatgtggtcaatcattttatgtttgctcccgatggacgttccgttatgttcatacatcgatactatacacctaaaggaaagcgtgaaaggttaatacattggaatttaataaatgataatgttcgagtcctaataaatgaatcgattattagtcattgttgttggaatgggaatgatgaaattataggtttttttggtgcagaaatagattcgctaaattattatagattgtcaattgaatcctgtaatacagagaaattgttttttgatgcaagaaaatattctgatggacatcctactatagttcataatagatatattatatctgatacttacccagataaaaatagaattaaaaagttgtttgtttatgaccttgtcaaaaatgattatcgcgagcttggattattttatgagtcaatgagttttttttcttattctcgatgtgacttacatccaaggatctcggttgataatagatttttgtttgttgattcagttcactcagggaaaagaaaactatattttatgaggagtggtatttgtgagtga

SEQ ID NO: 489226 - DNA, 987 bp, Shigella sonnei
gtgagtgatgttctagtatctttaattatagtttgctttaatgcagagaagtatattgaaaaatctcttttggcatttattaatcaagatgttggattagataaatttgaattgattattgtagatggggattcatctgataatacaatatctattgttcaggatgttttttctaaacatagcaacattaagcataaaattatcaataataaaaaaagaactcttgctacgggttggaatattggggtgctagaagctaatggtaagtttgtgtgtagagttgatgcacatagtgatattccaaataactatatatctaaattattagatgattattttaatattatgcagtttgatgatagcgttgttggtgttggaggtgtattaactaattcttataaaactaagtttggttcaattgtagcggatttttatgcatcgaaatttggtgttggtaattctccatttaggtgcgtagacaaaaataatcgactaaaaaaaacagatacggctgtctttgctttatatagtaaagatgtgttttttgatgttggactttttaatgaagtattagatagaaatcaagatattgattttcataagagagttttaagcaataatttgtcattatatacagataatagtttatttgttgagtattatgttagagataattttaaagatttcataaagaaaggttttcttgatggtttttgggttgttatgtctggagcatattattttagacatatagtgccacttttttttgttttgtatttaattgtatctttttctcttttctttgctactggtgattatatatatttatcttttttatttttttattttcttatttctattttgttttcaattcgagatgggcgaagttttataggtagagtatttcttccttttatatttttgtcttatcatatttcttatggatgtggatcgttattatcttttttgaaaaggtattttaaatga

SEQ ID NO: 489227 - DNA, 1155 bp, Shigella sonnei
atgaaaaattttattccttttgcgttacctgaaattggcgaagaagaaattgcagaggtaattgactctttacgttcaggttggattacgacaggtcctaaggctaagcaatttgaacaagaattttctaattacctaggagcgaacgttcaatcattagctgttaactctgctacgtcgggcttacatttggctcttgaagctgttggcgtaaagccgggagaccaagttattgtcccatcatatacattcactgctactgccgaaattgtcaggtaccttggtgctgatcctgtaattgttgatgtagatcgtaaaacatttaatatatcagttgatgccattgagaaggctattactaatgaaacaaaggcgattattccagtacacttcgctggattagcttgtgacatggattcaatcttatcaattgctaaaaaatatgacctaaaggttgtcgaggatgccgctcatgcatttcctacaacatataaaggaagtaagataggaacgcttgattcagatgctacggtttttagcttctacgccaataaaactatgacaaccggtgaaggcggaatggttgtttcaaaaaataaagatataattgagcgttgtaaggtaatgcgtttacatggaatcagtcgtgacgcttttgaccggtaccagtctaaaactccttcttggttttatgaggttgtagctccagggtttaaatacaatatgcctgatatctgtgcggcaatcggtattcatcaacttagaaagatcgatgattttcagaaaaaacgtcaacgaatggcaaaaatttacgatgatgcgttaaaagaattgccacttgaattgcctgaatggcctactaatgctagtgatattcatgcttggcatctatatcctatccgcttaaaaactgattcggctattaatcgcgatgattttattaagaagttatcagatcttggaattggttgttctgtccattttataccgttgcataagcaaccggtttggcgtgatacatataatttgaacgccagtgactttccagtttctgaggagtgttatttaaatgaaatatctattcctctttatactaaaatgacggatcaagatcagttgttcgttatcaaatcgattagacaattatttatgtaa

SEQ ID NO: 489228 - DNA, 591 bp, Shigella sonnei
atgaaacgtatttttgatgttatcgtggcaggcttaggcctgctttttctatttcctgtttttatcattgtgtcaatgttaattgttgctgattctaaagggggggttttttttaggcagtatagagttgggagatttgggaaagattttaggatacataaatttagaacgatgtttatcgattcagaaaaaaaaggacggataacagttggtcaagatgctcgggtaaccagagttggatggtatttacggaagtacaaaatcgatgagcttcctcaattgatagatgttctttctggaacaatgagtttggttggcccaagaccggaagtgagggagtttattgatgagtatcctgatgatataagggaaaaagttttatcggttaggccagggataactgacttagcatctatagaaatggtagatgaaaatgagattttgtctagttatgatgacccacgtagggcttatatagatataattcttccaatcaagcaaagatattatttagattatgttgctaacaattcagtaaagtatgattgtgtgataatttggaaaactattattaagattttgtcgcgataa

SEQ ID NO: 489229 - DNA, 1920 bp, Shigella sonnei
atgattgatagaatattggagctgccaagaattgttaagagaggtatcatcatctgcattgatgtagttatggtgatattctcattttggttgtcttattggttgaggcttgatgagcaaacggcttttcttagtgcaccgatgtggtttgctgcagctattcttaccatatttaccgtgtttatatttatcaggattgggctttatcgggcagtcttacggtatgttagtgcaaagataatgttgctaataccagttggtattctggcctcaacgttatctcttgtcgttatatcatattcgctatccataatgttgccgcgcactgttgtcggaatttattttttggttttacttttactgacatcaggctctagattgctttttagaatgatacttaactatggagttaagggtagtgcgcctgttttgatttatggcgctggtgaatctggccgacaattattgccagcattaatgcaggcaaaagaatattttcctgtggcatttgtggatgataatcctcgcttgcataaggctgtcattcatggtgtaacagtttatccctcggataaactgagttaccttgtagatcgctatggtataaagaaaattcttttggcgatgccgagcgtcagtaagtcacaaaggcagaaagtgattactcgtttagagcatctaccgtgtgaagttctctctattccgggtatggtcgatttagtcgaaggtcgagcacaaatcagtaatctaaaaaaagtatcgattgatgacttactaggtcgtgatccggttgctcctgatgccaaattgatggccgaaaacattactggcaaagccgttatggtcactggggcgggaggctcgatcggctctgagctttgtcgtcaaattgttcgatataagccggccaaattggttctatttgaactgtctgaatatgccctctacgctattgagaaagagctctcggcgctgtgtgacaaagaagttttgaatgttccagtgatccctctgttgggctcggtgcagcgtcagaatcgcttacagatggtgatgaagtcctttggtattcaaacggtttatcatgcggccgcttataaacatgtgcctctggttgagcataatgtggtggaaggggtacgtaataacgtgtttggtaccttgtactgcgctgagtcagcgatcgaaagtggcgttgaaacttttgtgttgatttccaccgataaagcggtgcgcccgaccaacactatggggacaactaagcgtctggccgaattggtattgcaggctttgtctgcacggcaaagccaaactcgcttttgtatggtgcgatttggtaatgtactcggttcttcgggctctgtcgtgccgttgtttgaaaaacagattgcccaaggtgggccagttaccttgactcatcgtgacattattcgctatttcatgacaattccggaagcatcacagttggtgattcaagcgggggcgatggggcatggcggcgatgtctttgtcttagacatgggcgatccggtcaagatttatgacttagccaaacgcatgatccggttaagtggcttgagtgtacgggatgataaaaatccagatggcgatattgccattgaagttacgggattacgtccaggtgagaaactgtatgaagaattactgattggtgattcagttcaaggtacctctcatccacgaattatgacggccaacgaagtgatgctaccgtggcaggatctatcgctcttacttaaagagctggatcaagcttgtcatgactttgatcatgagcgaattcgcagtttgttgttacaagcaccagcggcattcaatccaactgatgatatttgcgatctagtttggcagcagaaaaaatcgctgttatcacaagcgagcaatgtcattcgcctgtga

SEQ ID NO: 489230 - DNA, 513 bp, Shigella sonnei
atgtttaaaccttttagcgccgaatttttcggcactttctggctggttctgggtggctgtggtagcgccttgatctctgctgctttcccacagttaggtataggctttttgggcgtggcgttggcgtttggtctgacagtagtcaccatggcttatgcggtcgggcacatctctggtgcgcattttaaccccgcggtgaccttgggtctgtgggccggtggacgcttccctgcagcgcgcgtgttaccttacattatcgctcaggttatcggcggtattgccgctgcggcagtgctgtatggtatcgccagcggtaaggctgggtttgatgcgacaaccagcggttttgcggctaatggttatggcctccattcacctggcggctatgcgttaagcgcctgtatgctgagcgagtttgtcctcagtgcgttttttgtccggagcgacagaaaaacgcgctcctgcgggctttgcgccactggcgattggtctggtaatcaccccgtaaattaa

SEQ ID NO: 489231 - DNA, 327 bp, Shigella sonnei
atgactaaaaatactcgtttttcccccgaagtccgtcaacgggcagtccgtatggttctggaaagtcagggcgaatatgactcacaatgggcgacaatttgttccattgctccaaagattggctgtacgccggagactctgcgtgtccgggttcgccagcatgagcgggataccgggggcggtgatggagggctcaccaccgctgaacgtcagcgtctgaaagagctggagcgtgaaaatcgtgaactgcgccgcagtaacgatatccttcgccaagcttccgcttattttgcgaaggcggagttcgaccgcctctggaaaaaatga

SEQ ID NO: 489232 - DNA, 1173 bp, Shigella sonnei
atgttaatatacctatatcctgtacttttgttatttaatatccttccggtttttttttatggacaaatgaactctgatttagagcgtttttttggagttcctattggctatattccagatctaatattttatttctttgttgttttaacatctataataacgttgaggtttcacgtttctctgtggacaaagaaattattatttttaggcatcatattcctgatttatatcagcattcagatgttgttgttatcagcggatatatcaggtgtcgtaattttattatcgtttttttctaattttatagctttggttcttttggtgtcattttgcattggtaaagatgagctttatttaactcattcggttagaaatataaatgttgtaatgtgttttggtattatctgtggagttgtaaaattatttattggttattctgaagatagtaattttatagtttatttaaatagaaatgccaccgcaattatagtagtgtgcttttattgtgtatattcatacttttatcgtggtcgaaagtcttggtatgtctcatctgtattgtactctctgttctttctttttctggatagccgagcaggaataatatcatttgctatatcgttgttttttgtttttcttcagttaacaaagaaggaaaagttattaatatcattgttttttgttcctcttctaactttaggtatttcttttactgatataggcactcgtcttgaacgaatgctgtcttcgtcacaggttatattctctggtggtaacactcttacaaaaagtcagaatgattatcgtcgagttgagttagtatttattggggttgatgttttaaaagaaaattatttaattggcactggattaggtgttgcaaattatgtaaaggctatagataaaaagtttttaggaagtaccaactttgggttggcgcataatttttatttatcttattcggctcagttagggattattggttttattttgcttatttctgtattttatataatgctgtctccaatttttaaatgcggagggtatattggtaaaggatgcgtttttgctttggctttctatgtcttttttaatgagtatatattgacgccagcgatatatatttatatttctatttttttatcggtggtttttatacgtaattctaaatag

SEQ ID NO: 489233 - DNA, 1269 bp, Shigella sonnei
atgattgatgcaggtggtacatttttacttaaagcaatatttcaaataggagtttttgtttatttcacacatgtgtcagatattactacatttggtattattagttatgtgtttactgtttattggtttgtgcttaacttctctgattatggatttagaacaaaattagtgaaagatatttctgataatagttattctgcatcagaattattatcaagaagtgatggagttaaaacatatgtttttttcttcatttttataatcttcatgttttattcttatgtttctgattcaatttcattaactctgcttgtttatatttcatctgcatattttgtttgtatttcaagtggtagatttagcttgctacaggctgttggtcggtttagatgtgaattatatataaatatctactcaacaattatatatattgggtgtaatttatttttatctctgtttatcgaacctctatattatagtgcgatatcaatattcatatactcaatttcgcttttggttttctcatcacataaatgcaatgtgccatgttttcatataaaaagaccaagtattttagtttataaagattttttggatgcaactccgttcgctattctggtgttactaaatgttgttttatctagtattgacctttttatattaaaagaatatttctcttataatagtgttgctatatatcaggtggtaactagggttaataccggtctaataatagtgtttaatgttatttatactgttttattgccttcattttcttattatctgaaaaattctgaatggggtaatataaggaaattacaacgatatatatcactgttagtcttattactatgtttatgctattatttttttggcatctatttcgtagggatattgtttggtgatgagtataaggtaatatcttctgcaacatttttgataatgtttatggctcttattaaatataatttttggctaataaatgaactttatcttgtgtgtagtggaaatcaaagcgagcgagttaaatcgtattgtattggtgtggtcatttcaatggcggttttcttttattttatacctcggtatggatggagtggggcggtttttggaagtgccattgcaacattagtaattggaatattttatattatttctgtgaaaaaagattgtgggaaaattcttcatgataagtattcactaatgatgatctttgtcccaattttcttttattttattattaatggtcagcagcggttgttatattaa

SEQ ID NO: 489234 - DNA, 1026 bp, Shigella sonnei
atgtctcgctatgaagagattacacagcagttaattttttcaccgaaaacttggttaattactggtgtcgctggctttataggatcaaatcttttagaaaagttacttaaattaaaccaggttgttattgggttagataacttttccacgggacatcaatataatcttgatgaagttaaaacattagtttccactgaacagtggagtcgattttgctttatagaaggtgatattcgagatctcactacctgtgagcaagttatgaaaggtgttgatcatgtcttacatcaggctgcgctaggttctgtacctcgttcaattgttgatcctataacaaccaatgcaactaatattactggatttttgaatatcttacatgcggctaaaaatgcacaagtacaaagttttacttatgctgcatcaagctcaacttatggagatcatcccgcactaccaaaagtagaggaaaacattggtaatccactttctccttatgcagttactaaatatgttaacgagatttatgctcaggtatatgctcgaacatatggttttaaaactattggattacgttattttaatgtatttggtcgtcgtcaagatcctaatggagcttatgctgcagtaattccaaaatggacagcagcaatgcttaaaggtgatgacgtatatattaatggcgatggtgaaacgagtcgtgatttttgttatatagataatgttatacaaatgaatatattatctgcattagcgaaggacagtgctaaagataatatatataatgttgcagttggtgatagaacaacgttaaatgaattatctggttacatttatgatgagcttaatttaattcaccatatcgataaattgagcattaagtatagagagtttagatctggagatgttaggcattctcaggctgatgttactaaggctatagatttactaaagtatagaccaaatataaaaatcagagagggattacgactttcaatgccgtggtatgtgagatttttaaaaggctaa

SEQ ID NO: 489235 - DNA, 1281 bp, Shigella sonnei
atgaaattcgatactttgaatgcgaaaattgggattataggccttggttatgttggattgcctcttgctgttgagtttggaaagaaagtaacgacgattggatttgatattaataagtctcgtattgatgaattacgaaatggtcacgatagtacattagagtgctcaaatttagagttgttagaagcaactaaattgacgtacgcctgttcattagatgcactaaaagagtgtaatgtatttattgtaactgttccaactccaattgataaacataaacagccagatctaacacctctaattaaagcatctgaaacattgggtaagataataaagaaaggcgatgttattatttatgagtcaacagtttaccctggagcgacagaagaagattgtataccagttgtagagaaagtatcaggtcttaagtttaatattgatttttttgccggttattcacctgagcgtattaatcctggggataaagagcatcgtgtaactaatatccttaaggtgaccagtggatctacaccggatgttgctgagtatgtagatcagctatataaattaataattactgtcggtacgcataaagcatcatcgataaaagtagcagaggctgcaaaagtaattgaaaacacgcagcgagatgtcaatattgcattgattaatgagttatctattatatttaataagttagggattgataccttagaggttcttgaggctgcaggtacgaagtggaattttttaccttttaggcccggtttagtaggtggccactgtataggtgtagatccttattatcttacacataaagcgcaaagtgtcggctatcatccggagatgattttagccggacgtcgtttaaatgatagtatggggcagtatgtcgtttcccagttagtcaaaaaaatgttgaaacaacggattcaagttgaaggggcgaatgtgttagtgatggggcttacatttaaagagaattgcccagatctacgaaacactaaagtgattgatattatttcagagttaaaagaatacaatatcaatatagatattatagatccatggtgttctaccgatgaggcacaacatgaatatggattaactttatgtgaagatcctaaagttaatcattatgatgcaataattatcgctgttgcacacaatgagtttcgcgagatgggagagagcgctattcgtgcattaggtaaagacgagcacgttttgttcgatttaaaatatgtgcttgataaaaaaagtatcgatatgcgcttgtaa

SEQ ID NO: 489236 - DNA, 1107 bp, Shigella sonnei
atgtcaaaagcatctgaaccacaacagaccccttatctgatcccgcaaggggtctatccaacttatatgccaaaagcagaggatgaaatcgatcttttcgagcttttaggcaccttgtggaagaaaaaatgggttattttatgtgtcacgttgctgactacggggttagcagcagtgtatgcctttaccgcaaaagagcagtggacggctaaaacctatattcaagcaccacgtattgctgaattaggcagctatcttaaatttcaccaagcgtatgcccgaatattaaatcaaccgttagatacgaatgcgttggctaatggattgttttccgatttgattttgattgctgaatcgccagacaccaaagttaaatttctagagagtactgagtattataaaaaggaaacaaataatttatctactgaacaagataagaaaatttggttagctgagcaagcgaataaaggtcttgtgattacgccaccaaaggaaaagggaaatacaagttactacataatacaagcatcggcagactcagcgcaagaggcatataaactactgcagggatatctaaagaatgttaataatcaagctgtaacattaagtcttgatgagtttggtcaaaatgttaatactcttttggttaatctaaataaagaaattattgacatagatttccagagaaaatcagaaaagcttgatcaaatagctcatattcagcgagatttaacaactgcggaacaagccggaatcattgattatcgctctagcaaaggcggcttcgataatgcgcaaagtagctataagttcttgctcggcgaaaaactgttatcagcagagctaaaagcaactaaagatgcgccaattatttacccatttagatattacgaagtgaaacgtcaaattgatgagttagaaggaatgttacgcgataacattcaggcgcaagcatatcgatatcaaatgaagccatctgagccagttataaaagacaaacccaacaaagcattaattttgattcttggtgcattaccaggggcaatgtttgctatagttggtacattagtttatgcgacattaaaagataaaaccaagttagattaa

SEQ ID NO: 489237 - DNA, 300 bp, Shigella sonnei
atgggctggcaaaagtgtagcggtattaagcgcagctatttagcctcacagaatttacaaacatactgttatcattttgaaggcagatttggtcttatacaggcattgctttataatctgcactccaaattctgcgggctatccgccggtttgcagcagggaagtgtgggactgtatatgtctcttcacacggagtgttctcgattatgtcctctaatcccagatatcacttgttgtatcgcagttggctatatcctgtttctgcgcagcgctttgggagctgaaactcaagggcggtag

SEQ ID NO: 489238 - DNA, 348 bp, Shigella sonnei
atgacaagccgcagccgtcaggctgcctactcgatcagcctgctgaagcggcttaaagcgacataccgtcgggcgaaaaccatcacgctgatcgtggacaactacattatccacaaaagccgggaaacacagagctggctgaaggagaacccgaagttcagggtcatttatcagccggtttactcgccatgggtgaatcatgttgaacggctatggcaggcacttcacgacacaataacgcgtaatcatcagtgcagctcaatgtggcaactgttgaaaaaagttcgccattttatggaaaccgtcagcccattccccggaggcaaacatgggctggcaaaagtgtag

SEQ ID NO: 489239 - DNA, 177 bp, Shigella sonnei
atggcccgttcagctaaaccccgtaaacgtaaacccgcctctcaaagaagcaaacttccccgctatgtcgtgaagcttcacgaagatgatttttttgacgaagaagacgcagaagttctgcgctttgatagttttgacgatgccgttgaatgctgcgcagacctgaatattccgtga

SEQ ID NO: 489240 - DNA, 1317 bp, Shigella sonnei; identical to SEQ ID NO: 482254

SEQ ID NO: 489241 - DNA, 1440 bp, Shigella sonnei
atggaaacaaatgggaaggtaaactatcagcttcttagcacccctgatgctattgcaaaaaatgtatgtttggaaaaaacggaagatttttcaaaatcaccagcttatatttattttgtggaaaataaaaagtggggaacagttattactaattttttttataacatgaaaaaaaatggagactttatcagaacattatcagcatgcacattaaaccaccaaatggcgttagggttgaaaataaagcgcgtacaagaaagtgaaaaatgggttgttcagtttttcgatcctaatcgaactgttactcataaacgtactgtatttacttgtgatagccatttcgaactgagtcaattatccgctaaggatttttttgatgatttttattggaaaatttatggtctggagcaacccgggcaggtaatatttgaagataggcataattcccctctaacaaacacagtgaaacttttaccagatgaattgatcaattccagagttatatatcatgcgataacaaagaatctgacagaagtattatttatactgatggaaaaatacaaaaatggtgaaatttctcaatctaaactggtgaaccttctggccacgagaagctctgatggtactcctgcattttatatagcacttcaaaacggatgttcagacattattcaagtatatggtaagatattaaatatgtgcaatcttagtcaagaaacaatacttacattgcttgctgcggtaggggcaaacaatgtgccgggtttatgcatgtcttttatgaacggacatgtagacacaataaaagcctatggggaaatagtctttaaaaccccgttaacttccgataagagattatatctattagctgcgaaagacagccatgatttacctgggttattttttgcattgcagaatggacatgcagatagtattcgtatgttcggaagtctgcttaataagaaaatgcttagtagtgaacaaattaaagaattattgaaagtaaagcatgggttgtttatggcacttcaaaatgggcacacaaaggccattatggcgtatggagatatactaaaaatactcccccctcaccaggaatatatagatgaattattatggataaaaaatcccaacggtacatcaggactttttatggcattttataatggccataccgaaacaatacgtgccttttgtaatattctaaaaaactatagttttaccacaagacgattggtcgaaatgctgtccgcaactaataaagatggtattcctggtgtatttgtatctgtagtaaatagagacaaagaaacaatattagagtattgtagaataataaaagagaacaatctggaaccggatactatagcagaacaattttcaaagaagatgaaaaaaacgtttattgaaataataaatagatttaatcattttttatga

SEQ ID NO: 489242 - DNA, 720 bp, Shigella sonnei
atgcccataaaaaagccctgtctaaaactaaatttagattctttgaatgttgtgaagtctgaaataccgcagatgctttctgcgaatgaaagattgaaaaataacttcaatatattgtacaaccaaatacggcaatacccagcgtactatttcaaagtagcatcgaacgtgccaaattactctgatatatgtcaatttttttctgtcatgtaccaaggattccagattgtgaaccatagtggagatgtgtttattcatgcatgtcgtgaaaatcctcagagtaagggggattttgttggggacaagtttcatattagtatagctagggagcaagttcctctggcattccaaattttgtctggtttattattttcagaggacagtcctatagataaatggaagataactgatatgaatcgagtttctcagcaatctcgtgtggggataggagctcagtttacgctatatgtaaaatcagatcaggaatgctcgcaatatagtgctttattacttcataaaatacgacaatttataatgtgtctcgagtctaatctattaagaagcaaaatcgctcccggggagtatccggcgtcagatgttagacctgaagactggaaatatgtcagctatcgtaatgaactacgaagcgatcgagatggaagtgaaaggcaagagcaaatgttacgagaggaaccattttatcgtttgatgatagagtag

SEQ ID NO: 489243 - DNA, 546 bp, Shigella sonnei
atgctaaactggctcagcaaactaagagcagcgcgcatccacttacccaatgcggttgagaaaatagccttcgatcgctttcatgtggcgaaacaaccgggtgaggtggtggataaaacccgccagaatgaacatccgcatcttcctgttgaaagtcgtcgtcaggcaaagggaactcgcttcctgtggcagcacagcaataaatggatgaccgaatccaggcaggaaaagctgatatggctgcgtgcgcagatgaagctgacgagcctgtgctgggcgctgaaagaactggcaaaggatatctggagcagaccatggagcgaggaaagacgcaacgactggcagagatggctgtcgctggcggccaacagtgacgtccccatgatgaagaatgtggctaaaacgatagggaaaaggttgtacggtatcctgaacgccatgcgccatgcgccatggcgtatcaaacggaaatgcggaagcactgaacagcaagatcaggctgctgagaataaaagccaagggctaccgcaaccgggagcgctttaa

SEQ ID NO: 489244 - DNA, 579 bp, Shigella sonnei
atgaaagtctcgtttaagtctttaggctatatttttcatgatatatataataaaaaacacactatcgatgagttcaacgatgtggtaagaaaagcagttttatcaggtaaaattaacgagctgaatgcatgtcataaagtggcaatttttcttgccgaaaaagacaatgagataacaaagaaagacaaagccaagataatagatacattaactgaaaactattccattgaatttcaacaattaatgaatattagtgagcgcacgttaaattcatctttatatattactcctggtgaaagtggttttgtcagttttgttaatcgtgaaggaaaaatatgtcatactgcatatgtaaaatcatcagataatagcatggcatattaccatgcaaattatagcagcattgacaaatatattacggatatgtgcggccttatttgtatgaggcatattgagtctactggcattattttttatatgcttgatgaaaaagttttatctgccattgctgaatttatgaatgaaaaaggatggcgggctgcgttttgttcagcaaagaacttatataaatgtgtttaa

SEQ ID NO: 489245 - DNA, 1095 bp, Shigella sonnei
ttgccccattgtgctgatggtgcggcggcaaccacgggcgacaatgccgatgggaggactgctgtaaaatcggcaaagccatttcctgtaagtaaacgacaggtatgggaagcttataaacgagtaaaagccaaccgtggggcggcaggcattgacgggcagacactggccgggtttgacgagaatgttacagacaatctctacaaactgtggaacagaatggcttccggcagttatatgccgcaggcggtaaggcgtgtggacattcccaaagctgacggtggtgtacgtccgctcggtattccggccgtgtcggaccggatcgcccagatggtcgttaagcagatactcgagccggtactggaacccctgttccatgcagactcgtatggttatcgaccgggtaaatccgcacaccaggcgattgcgcaggcgaggaaacgctgctggaagtttgactgggtggtggaagtcgatattaaaggcttctttgatgatatcgatcatgacctgctactgaagacagtgcagcatcatactcaggcacgctgggtggtgatgtacattgagcgcaggctgaaggcaccggtgcaaatgccggatggagcaatgctggcacggggtcgaggaacgccgcagggcggcgtaatctcccccctgctctcaaatctgttcctgcactatgcctttgatatgtggatgcaacgtcagtttcccggcgttcccttcgaaaggtacgccgatgatgttgtatgccactgtcacagccagtggcaggctgacgctctgataagtggactgaggcagcggcttgcgcaatgcgggctgcagctgcatccgcaaaaaacacgaatagtttactgtaaggatgctgaccgacggggggactacccggaaacgagcttcgactttctgggctatacattccggccgcgtctgtcgatgaatcgctggggtaagaccttcgttaacttcagtccggcgatgagtgccagagcaggaaaagcaatccgtcaggaggtgaggagaatcgcagtgacaagtccttgtacgagctggcgcatatgttcaatgcgaaaatcagaggctggataa

SEQ ID NO: 489246 - DNA, 558 bp, Shigella sonnei
gtgactcgacttgtagtacattgttcacgaatgagtgatgcaacaaggctgaagaacaggttatcggtgcgcttctcggaagtcgggttggtcctgaacgcagggaagacgaatatcgcctacattgacacgtttaaaaggagaaacgtcgctacgagtttctcctttctcggatatgacttcaaagtgcgtactctgaagaatttcaaaggcgaattgtacagaaaatgtatgccgggtgcatcaaatgcagcaatgtgcaaaataacagaaacaatcaagaagtggcgtatacatcgctcaacagctgagagtttgctggattttgcgaggcgctacaatgcgatagtgagaggctggattgagtactatggaaagttctggtccagaaacttcagctatcgactgtggagtgcaatgcagtcacgtttgcttaagtggatgcagtctaaatacagactttcgaaccggaaggctcagcgaaagctggcgctggtaaggaaacagtatccgaagctatttgcccactggtatttactacgtgcatcgaatgagtga

SEQ ID NO: 489247 - DNA, 186 bp, Shigella sonnei; identical to SEQ ID NO: 462937

SEQ ID NO: 489248 - DNA, 1620 bp, Shigella sonnei; identical to SEQ ID NO: 462936

SEQ ID NO: 489249 - DNA, 207 bp, Shigella sonnei
atggcggagagcatcaatggtctttacaaagcggaagtaatacaccgtaagagctggaaaaaccgtgcagaagtggaactggccacactcacgtgggtggactggtataataatcgacgattgctggaaaggctgggccacatccctccggcagaagcagaaaaagcttattatgcttctatcggaaacgatgatctggcagcctga

SEQ ID NO: 489250 - DNA, 1200 bp, Shigella sonnei
atgactagttttgagcagttaagtaaggttgcgcagcgtgcagataaaatgttgctcgccctaacaaaacagattcaggagcaaaagcaggagtttcaggctgatgttttttatcaagtctattcaaagtctgctgtagctaagcttccaaaattaacgcgcgcaagcgtggatggtgcagtcggtgagatggaggctcagggctatcagtttgaaaaacgcccagcaggaaccgcgacaaaatatgcattaaccatccagaacattatcgatatctatgcacatcgtggcattcctaaatatcgcgatcgttatagtgaggcatattccatattcatcggtagtctaaaaggcggtgtgtctaaaaccgtgagtagtgtttccgtagctcacgccctgcgtgctcatcctcacctgctgtcagaagatttacgtattctgctccttgatttagatccccagtcatcagccactatgtttctgaactacttgcatgcggtggggctggttgatacaaccgcaccgcaggctatgttgcagaacgtgagtcgtgaggaactactggaagattttatcgttccgtcagttatccctggcgtttatgttatgccggcttctattgacgacgcctttattgcatcaaactgggatactctgtgcgaggagcatctattaggacaaaacaaacacgcgatattgcgtgagaatattattgataagctgaagcatgatttcgacttcatccttattgatacaggcccgcatctggacgcatttttgaaaaatgccattgctgccgcagatatcatgtttacaccggtgccgccagcacaagttgatttccattccacgcttaaatatttggctcgtttacctgaacttgtacagattattgaacaggatggatgttcatgccgtttgcaggcaaatattggcttcatgtcgaaactggcgaataagtcagatcataaatactgccatagcctgacaaaagagattttcggtggtgacatgcttgatgtttcaatgccacgtcttgatggttttgagagaagcggcgagtcgtttgataccgtgatatctgcgaatcctgttacttatgttggcagtggtgaagctttgaaaaatgcacgtatggcagcagaagatttcgctaaagcagtttttgatcgtattgaatttataagggccaactactga

SEQ ID NO: 489251 - DNA, 981 bp, Shigella sonnei
atggaaaacagaaagcaccgaccgactattggccgtacgctgaatacaaatatcctgaataatactgaagaaatatcggctccagttcatgtatttaccctcaatactggccgaaaggcaaaatttactgagatcaaggttgatcatgacaaagtggacactcaaacttttgtggttgaagaggtgaatggccgcgaacagacagccctgacgccggactcactaaaagacatcaccagaactatacatttacaacaattctatccatgtattgggattcggactggcgatcttattgagattttggatggttcccgtcgtcgggcagcagctttgctatgcaaggttggattacgtgtacttgtaacggatgatgagcttactgtttctgaagctcagcatctggcgaaagatttgcagacgtcacttgaacataatattcgtgaaattgggttgcgtttagtacgtctcaaagaggccggtatgaaccagaagcaaattgcggaaagagagggattgtcggcagctaaggtgactcgtgccctccaagcagcgtccgtacctaaagattttgtgtctctttttcctgttcagtctgagctgacatacgccgattacaggcaactggctgaattaagtgaacgactgaggctgggtgatatatctattgatgaagttgtgaagaatatctcgccgagtattgagcttattactgctgatgacaatctttctgaagacgaggttaaaaacagtattatgcggcttataaccaaggaaatgtcttcattgcttgattcaggagtaaaggataaagcggttgtaactttgttatggaaatttgatagtaaagataaatttgctcgaaaacgagtaaagggacgtacgttctcatatgaattcggcagattaccgttggaagttcaggataagttagatcgtatgattgctcttgtactaaaagataatctgaattcgctgtga

SEQ ID NO: 489252 - DNA, 486 bp, Shigella sonnei
atgtctgaacagaaaatcaccggcattgatctggctaaaacgaacttttatcttttcagtatcaatgctcatggcaaacccgcaggaaagaccaaactttctcgcaatcaactgcttaactggctggtgcaacagcctaaaatgactgttgcgatggaggctggcggggcatctcattactgggcccgggaaatcaggaaactcgaccatgatgtaatattgcttccggcacaacatgttaaagcttatcagcggtgccagaaaaatgattataacgacgcacaggcaatagctgaggcctgccaacatggaactatacgacccgtaccaataaaaactctggagcaacaggacgtccagacttttttgaatatgcgtcggttggtttcaatggaaaggacacaactgataaatcacattcgtggacttcttgctgaatacggcattgtgttcagtaaaggcgcagcagatttacgccaaaagtaa

SEQ ID NO: 489253 - DNA, 519 bp, Shigella sonnei; identical to SEQ ID NO: 484141

SEQ ID NO: 489254 - DNA, 891 bp, Shigella sonnei; identical to SEQ ID NO: 484144

SEQ ID NO: 489255 - DNA, 2850 bp, Shigella sonnei
atgaaaatctgtctttatcatactctgaatcctgacacgatcccgggttataaaaaatttgcacaggctattgccaccgataactttgttcaggctgatgttcgtaaaattgacaccaatctttaccgcgcccggctcagtatccgggaccgattactgttttcgctgtatcgctaccacggtgaaactatctgccttgttctggaatatattcgcaatcatgcctataacacttcacgttttcttcgcagaaacgtggtgattgatgaagggcgcttacaacaacaaccagtgccggatcctgttgatatcgcgactgaagcgctgacgtatatcaatccgtctcatgggcgtttccaccgcctggataaaatgctgtcctttgatgatgatcagcaggcactgtacgaacacccgctaccgctggtgattgttggctcggcgggaagtggtaagacggcgctggtactggaaaaaatgaagcaggctgctggtgatatactgtatctcagcctttcctcatttctggtggaaaaagcgcgtactctctatgacgcttcaggggaagggagtgaggtacagaatattgactttctttcgctgacggaatttctggaaactctgcgcattccggaaggcagggaggtgactttcagtgcgttcagcgactggctgccccgcaacagggctatcgccgcactgggggctgcccataccctgtatgaggagttcaggggcgtgatcggtgcggttgcctccgggaatgggccgctgtcccgggaggcgtatctgtcactggggatacggcagtcgctctatggcatggaggaccgcccgacggtctatgtcctgtttgaacgttatatcgcatggctgaaacagtcgcatcagtatgacagtaatctgctcagtcatcagtatctttcgttggcaactccccgttatgatgtcatttttgttgatgaagttcaggatatgacgcctgttcaactgcaactggtactgaaaacgctacgtcatcccggtcagtttttactctgtggtgatgccaatcagatagttcatccgagctttttctcatggagttcgctcaaaagtctctttttccggcagcaacagggaaacgacacaaccgttaatatcctgcaggcgaattaccgtaacgggcaccacgtcactgcactggctaaccggttgctgagactcaaacaggtccgctttagtgctattgatcgggaaagtcaccattttgtcagaagctgcggtcaggcagaagggaccatccggttgctggacgacagggaagagacaaagcaggaactgaatgccaaaacctcactttcgaatcgtgtagcggtcattgtgatgcatccggaacagaaagcacaggcgcgatgctggttcagtacgccgctggtcttttcggttcaggaggttaaggggctggaatacgaaacggtgatcctttacaatatagtaagcgctgcccggcaggcatttgatgatatttgcgagggtcttacaccggctgatcttgagggcgaggcccgttattcccgtccgcgggacaggcaggatcgttcagcggaaatctataaattttttaccaacgcgctgtatgttgcgctcacccgtgctacacacaatgtgtatcttgttgaacagcaggtggagcatcctctgtggagtctgcttgcgctcacgcatcaggaagagcctctgaatctgcaggaagagatttccagccgtgatgagtggcagaaaaccgcacatctgcttgaaaaacaggggaagcaggagcaggcggacaccatccgtagccggatcctgcagacatctgagatgccatggcagattatcaccgcagaggatgcacgacagtggaaacagcatatcctcgcaggtacagccgataaaaccatacaactgcaggcgctggagtacagtctgatttattccctgttcccgctgtataatgcactgtaccgggaagattttaagcccacaaggcagcccagaacgaagactctgcagttactggagctgaagtatttccggccatactcaatgaataacccggttgccgtgttgcgggatattgaacgttatggtgttgatcaccgttcgccgtttaatcttactccgctgatgtcagcagcccgggcaggtaatattgcactggttcagttactgctggagcgtggtgcagatcccttgctgaccggtaatgacgggctggcggcttatcatcaagttctgtcagcggcggtcagtacgccccgttatgcgcaacagaaaagtgcgcagttgtataccctgctgaaacctgaaagtctgtcactgcaggtggaaggacgcctcatcaaactggacaaccggcagatggcaatgtttctggtgatcctgatgcaggcgctgttccacacgcatctgggaagtgctctgtttttttcggaagccttcagtgcggcacgactggcagagtgtgtggttcatcttcctgaagcgttgctgccggaacgccgcaaacgaaggagttatatcagcagccagctctctcaacatgaagttaacagcaaaaatccttatggaaaaaagctttttctgaggctgaaccacggacagtatattcttaacccggggcttaaaataaggcagggtgatgtgtggcgcgcggtttatgagttgcagtcaccggaagatctggggcatgatttgcagacttatctgcaggatatgtcaccggaattagtggatatgctgggagggaagaagggtttttacgaacgcagtgaaaagtctgtcggatactgggtgggggggatccgtcgtgccgctcaaaaagcgtga

SEQ ID NO: 489256 - DNA, 192 bp, Shigella sonnei; identical to SEQ ID NO: 464514

SEQ ID NO: 489257 - DNA, 606 bp, Shigella sonnei
ttgctgggtgagaagaagctggcagcccagctctgcaaacttgcgcctcgtctgggtaaacgccttgcagcagacatagctcaggcactggccgaacaaaccgtcgtcgttcccggcacgaatgccgctgccgtagtactgccacgtctggcactccagctcatcacgctgcgtaagcaaagagacgaggtggcgcttgaggtagaacagcgagttcttgctcaccctctttacccggtcctgaccagtatgcccggagtcggtgtcaggaccgcagccagactcctcaccgaggtcgcctgccgcgccttcgcctctgccgcacatctcgctgcttatgctggccttgcgccggtaactcggcgatccggctcgtcaatacgcggtgagcatccctcgcgacggggtaataaagctctcaaacgggcgttgttcctgtcggccttcgccgcgctcagggatccgctctccagggcttactacacccgcaaaatgagtcagggaaaacgacacaatcaggcgcttatcgccctggcgagacgacgctgcgacgttctgttcgccatgatgcgcgacgggactttttataccccgcaggggtcataa

SEQ ID NO: 489258 - DNA, 252 bp, Shigella sonnei; identical to SEQ ID NO: 464288

SEQ ID NO: 489259 - DNA, 234 bp, Shigella sonnei
atgcttcatgaagaaaaactggcacgtcatcaacgtaaacaggcgatgtatacccgaatggtagccttcccggcggtgaaaatgttcgaagagtatgacttcacgttcgccaccggagcaccgcagaagcagctccagtcgttacgctcactcagcttcatagagcgcaatgaaaacatagtgttacaggggacatctgacatcacaaatccccgggtggggatttgtgtataa

SEQ ID NO: 489260 - DNA, 273 bp, Shigella sonnei; identical to SEQ ID NO: 474417

SEQ ID NO: 489261 - DNA, 639 bp, Shigella sonnei; identical to SEQ ID NO: 461272

SEQ ID NO: 489262 - DNA, 186 bp, Shigella sonnei; identical to SEQ ID NO: 474415

SEQ ID NO: 489263 - DNA, 246 bp, Shigella sonnei; identical to SEQ ID NO: 486098

SEQ ID NO: 489264 - DNA, 669 bp, Shigella sonnei
gtgtgtcgtctggcggtggagaatctgctgtatgcagcccgaaaacgggggctggaaatcggcatcttctgcaccatccacactttacgccttcactttgaagaacatttacccctcgttgtagccggacgtcgcctgggcgtaccaaaatcaacagtttgtagtatgtttgtgcgcttccgcaaagctggcctttcatggcctctgcccgcaggtatgtcggagcgggaacttgacgcccgtctttacgggagtgcctccacagtacctgtcgtacttactgaaagtaccgttatgcccgaagtccccggggtaaaaaagcgtccccggcgccccaacttcccttatgagttcaaaatcgccttagtggagcagtcactgcagcccggagcctgtgtggcgcagattgcccgtgaaaatggaatcaacgataacctgctcttcaactggcgccatcaataccggaaaggtggcctgctgccttccggaaaaaatatgccggcactgcttcccgtgacgttaacgccggagccggataaccatggttttgacatcatctatatgctttcgacacatcatcagcggttcactttcgttcgtctcttcgatccatacctgatcggctcacgtccgaccttttcccatctcgctcaccaccacatctcttaa

SEQ ID NO: 489265 - DNA, 204 bp, Shigella sonnei
atgcgcgtaagtgaactgccggactacctgaggcaccactggccagagctgaaagcgcaactgctgtccggcagataccgcccatcccctgtgagaagagtatccatactgaagcccggcggcggcgaacgtctgctgggcatccagatggtggtggatcgcttcatccagcaggctatgatgcaggtattgcaggcactgtga

SEQ ID NO: 489266 - DNA, 678 bp, Shigella sonnei
atgaagacacatctggagcaggaaggatgtcgaactcgggttactgttgtgcctcctggctttgatttccaggaattatacgttgattcccgaaacagtttgcctccgagtgttctttcctggctggcgtcacgaagaggatgccccgtaattgctcaggtaggaatgttgcgcccggaaaaagggcacgaatttatgttgaatttactgttccatttaaaaatgaatggacgacagttctgttggttgattgtggggtctggttcgcctgaactgcgggagcatttacagtatcagattgacagtatgggcatgcatgatgatgtttttattgctgacaatgtttttcctgccgcccccgtatatcgggttgccagtctggtggttctgccttcagaaaacgaatcttttggtatggtgctggcagaagcatcggcattttctgtgcctgtagtggccactcagattggtggaatccctgaggttattcagaacaaccagaccgggacattgttaccagcaagtaataagcacgcatggatgtgcgccctgaatgatttttttaatgaccctgggcgtttttatcagatggctcgccaggcaaaacaggatatagaagagcggtttgatattaataaaactgcgttaaaaatactcacattagcgaagcaaaagtaa

SEQ ID NO: 489267 - DNA, 951 bp, Shigella sonnei
atgttttctataagtaacttatcatttatcggtttccttaaaaggattattttttcctcagattcactaccggggaagtgggaacacagaaaatttcggttcatgtacattttgcgatgttctataaatccggttgtcagtattcgatattattatgaactgcgttccttgccgtgcattgaggatattctggcaatacaccccacgttgccagcaagaattcatcgcccttatttgcataaaggggggcgcgcctggacccgtggacaatatattcttgagcattatcgctttgtgcaaaatttgccagaaaaatattctaaatttttgtttccacaaaaatcggtatcattagtccaattcatcgggaaagatggagaggattttgatatccagtgttctcccagtggttttgaccgggaaggagagttgatgttgtcattgttttacaataaaacagttattgcccggttaacattttcagtcattctgactcaaaatggacacattgcttttattggcggattacagggagcccctaaaaataccggacctgatgttattcggtgcgcaacccgggcctgttatgggattttcccaaaacggattatttttgaagcattttgtgcgttgatgaaagcttgcaatatctctgagtgtctggcagtcagtgagcacagtcatgttttccggcaattgagatactggtatcagaaacgcaaaacctttgttgcggtctatagtgatttctgggagtctgtagcaggaaaaacctgtggtgactggtacagattaccaacccaggtgattcgaaagccgctaagcgatatagccagtaaaaaacgctctgagtaccgaaaacgatacgctttgctggattatatccatgaaactactatccgctctttggatgcatatcctgtacactcagaacatcagaatttaaattaa

SEQ ID NO: 489268 - DNA, 591 bp, Shigella sonnei; identical to SEQ ID NO: 474515

SEQ ID NO: 489269 - DNA, 135 bp, Shigella sonnei
gtgatccacggtattgctcgtggtactgcacaggtcactattaaacaaaatgggtatgacatttataatagtacggtgccgccggggccttttaccatcaacgatatctatgccgcaggtaatagtggtgactag

SEQ ID NO: 489270 - DNA, 354 bp, Shigella sonnei; identical to SEQ ID NO: 466835

SEQ ID NO: 489271 - DNA, 528 bp, Shigella sonnei
atgagtgatgcaacaaggctgaagaacaggttatcggagcgcttctcggaagtcgggctggtcctgaatgcagggaaaacgaatatcgcctacattgacacgtttaaaaggagaaacgtcgcaacgagtttcacctttctcggatatgacttcaaagtgcgtacgctgaagaatttcaaaggcgaacggtaccgaaaatgcatgccgggtgcgtcaaatgcagcaatgcgcaaaataacagaaacaatcaagaagtggcgtatacatcgctcaacagctgagagtttgctggattttgcgaggcgctacaatgcgatagtgagaggctggatcgagtactacggaaagttctggtccagaaatttcaactatcgactgtggagtgcaatgcagtcacgtctgctcaagtggatgcagtctaaatacagactttcgaaccggaaggctcagcgaaagctgacgctggtaaggaaggagtatccgaagctatttgttcactggtatttactacgtgcatcaaatgagtga

SEQ ID NO: 489272 - DNA, 690 bp, Shigella sonnei
atgcaacgaaaatcatttgaaataccaaaagcactggtctgggcatcatatctggatgtgcgtcgcaacaagggagcccccggatgcgacgggcagactttgaaaatgttcgaccagcaacgtgatggcaatctatacaagatctggaaccggctatgttcgggaacatggtttccgccaccagtgctggaaaaacggatcccgaagtcgaatggcaaggaacgcattctggggatcccaacagtatccgatcgaattgctcagggagcgataaaacttttcatggaagaaaagcttgacccgattttccatgctgattcatatggttaccgaccaggcaaatcagctcatgacgctctgaaacaatgtgccatccggtgctggcgttatagctggatactggaagtggacatcagtgcgtttttcgaccatgtgagacatgatctggtgctcaaagctctggaacaccacgggatgcctaaatgggtcatcctgtactgtcgacgctggatggaagcgccaatgcagagttgtgaaaatggagaattaataacccgaacacgaggcactccgcagggcggggtcattagtccgctacttgctaacttgttccatcactatgcatttgatttgtggatggaaagagaatatcgggggtaccgtttgagaggtacgctgacgatattgtag

SEQ ID NO: 489273 - DNA, 267 bp, Shigella sonnei
atgaagttgattatttttattctcattgttctgattattgcagcgctacttatccggattatcctcagaagtgtaaatcagcattctcctttgctgatgcaattgcatgcggcaggtatacggaccggtgatgcagagcgaatactgtccagcggtgaatactggcaacgtcagaagacgctgctgacagaaagggaagtcagttttatgaaaggactgttcagaattgtggatatgaagcggtgggtaatgactccaacttattga

SEQ ID NO: 489274 - DNA, 327 bp, Shigella sonnei; identical to SEQ ID NO: 486146

SEQ ID NO: 489275 - DNA, 507 bp, Shigella sonnei
atgattcacccatggcgagtaaaccggctgataaatgaccctgaacttcgggttctccttcagccagctctgtgtttcccggcttttgtggataatgtagttgtccacgatcagcgtgatggttttcgcccgacggtatgtcgctttaagccgcttcagcaggctgatgaacagcgccgaacttttgctgttgccgcccacacagctgactttacctgtcccgctgtgcagcgctccggccagataatatttttcattctgtcccggcgtgaccacccgtttttgctgtccgcgcagttgccagtccgcaccgattttgggattaagatggatatccacttcatcttcataaaagaccggatgctctgcgctgcattcgtccagtgctttatggattgctgccatcttttcatctttatgcgggtcacggatacgcagagttggcgcagcccttcgccacacaatccccgcagacggcaaccagcggcgaacggttccggcatttaa

SEQ ID NO: 489276 - DNA, 276 bp, Shigella sonnei; identical to SEQ ID NO: 484087

SEQ ID NO: 489277 - DNA, 327 bp, Shigella sonnei; identical to SEQ ID NO: 488592

SEQ ID NO: 489278 - DNA, 288 bp, Shigella sonnei; identical to SEQ ID NO: 468183

SEQ ID NO: 489279 - DNA, 615 bp, Shigella sonnei
atggtagtgtccgctattgccagtacacctcagtattacgaagcaaaaaatgacaaagtaagaaaacgcctcggtattaaaggcggtttttactgggctgaagcgaaaaaattatccattgccatctcccgtggtgctgttgcgattgacgatgctggctacgatgaagatgactttaaaaaacctgttcgcgtcaatttgcccgttgttggtgacctcccaccagaaggcgtgtttgatacggaattctgcaaccgttacgaaaaaggcggggaagatggcatcacaatggtatttatcgcatcttctccctctgttcaggacaaaccagccagcactgacaataccaacgtcaacggcgaagacatgacagaaattgaggagaacatgctcctgccagtttccggtcaggaactgcccattcgctggcttgctcaacacggcagcgaaaaaccggtaacgcacgtttcacgcgacggactccaggcattacacattgctcgggctgaagaactaccggctgttactgccctggctgtttcccacaaaaccagcctgctcgacccgctggaaattcgcgatctccacaaactggttcgttgtcagcgccaatga

SEQ ID NO: 489280 - DNA, 483 bp, Shigella sonnei
atggcggatatggtcggtgttgccggagctgcactggccccgctggcgaaactgctacgccatgagcttctgacacgggatgttattcatgcagatgaaacgtccctgaggctccttgatacccggaaaggcggtaaatcctgctccggctggctgtgtgcttacgtcagcggtgaaagaagcggtccgccggtcgtctgttttgactcgcagaccggacgggccctcagataccctgagacctggctgcagtgctggtgtggcggtacgctggtgagtgacggatacagcgtgtacaaatctctggcggataatcacccctgcatcacatcagcctgttgctggagtcacgcagggcgcggcttcgcaaatctgtataaggccagcagggagccccgtgcaggcgtggagctgagaaaaatcgcgggtctttaccgcattgagaaactcatccgtgagcgctgtcaacgccacgatgtttga

SEQ ID NO: 489281 - DNA, 207 bp, Shigella sonnei; identical to SEQ ID NO: 14967

SEQ ID NO: 489282 - DNA, 285 bp, Shigella sonnei; identical to SEQ ID NO: 460874

SEQ ID NO: 489283 - DNA, 837 bp, Shigella sonnei; identical to SEQ ID NO: 22759

SEQ ID NO: 489284 - DNA, 816 bp, Shigella sonnei; identical to SEQ ID NO: 6090

SEQ ID NO: 489285 - DNA, 1578 bp, Shigella sonnei
atgcgccagaatttaccagtgacgggtcgaaacttagaactcccaaaagatgccaatattctttcgactacctcccctcaaagccatatcacgtacgttaatcctgacttcattaaaatcagtggtttcactgaggaagaactattaggccagcctcacaacatcgtaagacacccagatatgccgcctgctgcatttgagcatatgtggagtacattaaaatctggccgctcatggatggggctagtaaaaaatcgctgtaaaaatggcgaccactattgggtaagtgcttatgtaacgccaatagctaagaatggttcgattgttgaataccagtctgtaaggaccaagcctgaacctgagcaggttttggctgcggaaaaattatatgctcaattgagaagcgggaaggccgcgaggccgaaattggctgctagcttttccgtgaaaatactcttgctcatatggggtagtattatatcaagcgcaatggctgccggcatgcttactgatacatcaataagcagcttattgttagccactttaatgtcaggaagcttaagctctgttagtgttttggctattctctctcctcttggaagactggttgaaagagccaagaatatttccaataacccattaagtcaatccctctacactgggcgcaccgatgagtttggccaaatagagtttgctttacgaatgatgcaagctgaaacaggcgccatagtaggtcgcataggtgatgcatcaaatcggcttagcgaacacacccgaggcctactaaaggatattgagtcaagcaatgtacttacagttgagcagcaggcagagacagatcaaatagcaacggcagtaaaccaaatggtggcaagcattcaagaggttgcgagcaatgcacagcatgctgcagatgcggccggaagagcagacactgagacggcatctggccagcgtctggtagcccacacaagccagtcaatcactgcccttgaaggtgaaattaggcaagccactcaggttattcatgagcttgaaggtcaaagtaacgagatatcaaaagttcttgacgttatacgagggatcgccgagcaaacgaatttgttggcactcaacgcagcaattgaggccgcgcgtgctggtgagcaggggcgtggttttgctgttgtcgccgatgaggttcgcagtcttgctgctcgcacacagcaatcgacaacggatattcaaagcatgatcagcgctctacaagagcgagcgcaatccgctgttacagtcatggagcaaagtagtcggcaagcgcacacgagtgtagctcacgcagaggaagcagctacagctcttgatggaattggccaacgcgttaacgaaattaccgacatgaacgcgcaaatagcgactgcggtcgagcagcagggagcagtaagtgaagacataaaccgcagtattatcaatatacgcgatgctgctgataccaatgtacagaccgggcagaataatttgcaaagtgcgaaatctgtcgctcagttaactagcgctctgagcgaactggcaaaacagttttgggaaaaacgaggataa

SEQ ID NO: 489286 - DNA, 561 bp, Shigella sonnei; identical to SEQ ID NO: 5006

SEQ ID NO: 489287 - DNA, 2967 bp, Shigella sonnei; identical to SEQ ID NO: 5007

SEQ ID NO: 489288 - DNA, 243 bp, Shigella sonnei; identical to SEQ ID NO: 15164

SEQ ID NO: 489289 - DNA, 678 bp, Shigella sonnei; identical to SEQ ID NO: 54015

SEQ ID NO: 489290 - DNA, 1200 bp, Shigella sonnei; identical to SEQ ID NO: 6086

SEQ ID NO: 489291 - DNA, 885 bp, Shigella sonnei; identical to SEQ ID NO: 54013

SEQ ID NO: 489292 - DNA, 1797 bp, Shigella sonnei
atgttcatactcttcgccgagcgaaaagttggggaacagcacgggccggccgcgcaaggcgtgctggcagccgtgcagaccctgcgtgagatgaacgccgacaacctgcgcaaggtgccggccgatgcacccacggccttcatcaagccgcgctggaagccgctggtgatcaccccggaaggcctcgaccggaaattctacgaaatctgcgccctgtccgagctgaagaacgccctgcgctccggcgacatctgggtcaagggctcgcggcagttccgcgacttcgacgactacctgctgccggccgagaagttcgccgcactcaagcgcgagcaggccctgcccctggcgatcaacccgaacagcgaccagtacctggaagagcgtttgcagctgctggacgagcagttggccaccgtcacccgcctggccaaggacaacgagctgcccgatgccatcctcaccgagtcagggctgaaaatcaccccgctggatgcggcggtgccggatcgggcgcaggcgctgatcgaccaaaccagccagttactgccgcgcatcaagatcaccgaactgctgatggacgtggacgactggacgggcttcagccgccacttcacccacttgaaggacggggccgaggccaaagacaggacgttgctgctgtccgcaatcctcggtgatgcgatcaacctcgggctgaccaagatggccgagtcgagccccggcctgacctacgccaagctgtcctggctgcaagcctggcacatccgcgacgaaacctattcggcggccttggccgagctggtcaaccaccagtatcgccacgcctttgccgcccactggggcgacggcacgacctcatcctccgatggccagcgcttccgcgcgggtggccggggcgagagcaccgggcacgtcaacccgaagtacggtagcgagccgggacggctgttctatacccatatctccgaccagtacgcgccgttcagcacccgcgtggtgaatgtcggcgtccgcgattccacctatgtgctcgacggcctgctataccacgagtccgacctgcggatcgaggagcactacaccgacacggccggcttcaccgatcacgtctttgccctgatgcacctgctaggcttccgcttcgcgccgcgcatccgcgacctcggcgaaaccaagctgtacgtgccgcagggcgtgcaagcctacccgacgttgcgcccgctgatcggcggcaccctgaacatcaagcacgtgcgtgcccactgggacgacatcctgcgcctggccagctcgatcaagcagggcaccgtcaccgcctcgctgatgctgcgcaagctcggcagctacccgcgccagaacggactggccgtggccctgcgcgagctgggccggatcgagcgcacgctgttcatcctggactggctgcaaagtgttgaactgcgccgccgcgtgcatgccggcctgaacaaaggtgaggcgcgcaactcgctggccagggcggtgttcttcaaccgccttggggaaatcagggatcggagcttcgagcagcagcgctaccgggccagcggcctcaacctggtgacggcggctatcgtgctgtggaacacggtgtacctggaacgcgccacccaggggttggtcgaggccggcaagccggtggacggcgagctgctgcaattcctgtcgccgctgggctgggagcacatcaacctaaccggcgattacgtctggcggcagagccgcagactggaagacgggaagtttcggcccttacggatgcccggaaaaccttag

SEQ ID NO: 489293 - DNA, 342 bp, Shigella sonnei; identical to SEQ ID NO: 9360

SEQ ID NO: 489294 - DNA, 810 bp, Shigella sonnei
gtgtattacttctgtagcagacacggcaaaatcgttgcattacaggtgcatctgctggggcgtctgtttatcgatgcatcagatttaatgtctgacagttacttttctgtatcacccacactctctgctttttcattgctactgtcatatttatgtctgttgcgcggttttatctgtgtatataaaatacatctgtattcattgttttctaaaaatttgcgtatgttgataaaaaatccgatttcttatttccatattggcacgtttttattttcaggaaaaaaacgtcatcttctggaatactggaaagcagaagttatcatgcgggataagtttgtttttcaccggcttatcaggaacggtatgcagaggcagagaggttttcttctgtggtggcgcctggctaatgaaatgtatatattggggaataaaaaacaacgaaaatgtgcgatcaagataaaaaatgcgcttatggcaaagtatggatgtgatattggtctgggggcgcagattggtaaaggcctcgtgctgccccaccattcaggcgtcgtcattcacggaaatgtaaaaatcggtgagaatgtgattatacggcagaatacgaccattggcgaaaaggaatctgacagcagagagaattatatcgttattggtgataatgtcgatatcggtgcccatacgtgtattatcgggcttaacgtaaaaataggcagtaatgtaaaaattggagccatgtcttttattatggaggaggttccggataactgtacttacgttaccaggaaagaatcacgggtaattatgcgttaa

SEQ ID NO: 489295 - DNA, 378 bp, Shigella sonnei; identical to SEQ ID NO: 476066

SEQ ID NO: 489296 - DNA, 420 bp, Shigella sonnei
gtgtctttaggttatgccttattggaggatatagtaagcaaattaaaacggggtaaatttgaactccaaataccaggaggtggaattaaagaatgcgatggatggtatattcacgaaaaaataattgatgataattttgccatagtcatagaatctttgggctttgcgcttaaaatctatggaggggatgaacgttttcgtaatggttcctctgttgttttggaggatgaagattactcccttatttataattttctggttaatgcaggttgccaacaagtggaattagccgaacaagtggatgcgatagtaagtgcgaatctggccgcagatagtaatattaccaaagaaaagatttgcgagaaatataagtcgaccattgaggcgtttaaaaaagagcaactagcgttaccagtatga

SEQ ID NO: 489297 - DNA, 219 bp, Shigella sonnei; identical to SEQ ID NO: 486042

SEQ ID NO: 489298 - DNA, 228 bp, Shigella sonnei
atgaaaaaagtaaatcattggatcaacggcaaaaatgttgcaggtaacgactacttccagaccaccaatccggcaacgggtgaagtgctggcggatgtggcctctggcggtgaagcggagatcaatcaggcggtagcggcagcgagatcgaccagaacgtgccagagatcgccgcgatggaaaccgcggacaccggcctgccgatccatcagaccaaaaatgtgttga

SEQ ID NO: 489299 - DNA, 1218 bp, Shigella sonnei
atggaaaccgcggacaccggcctgccgatccatcagaccaaaaatgtgttgatcccacgcgcttcccacaactttgaatttttcgcggaagtctgccagcagatgaacggcaagacctatccggttgacgacaagatgctcaactacacgctggtgcagccggtgggcgtttgtgcgctggtatcgccgtggaacgtaccgtttatgaccgccacatggaaggtcgcgccgtgtctggcgctgggcaataccgcggtactgaaaatgtcggaactctccccgctgaccgctgacagcctgggtgagctggcgctggaagccgatattccggcaggcgtgctgaacgtggtacagggctacggcgcaaccgcaggggatgcgctggttcgtcatcatgacgtacgtgccgtgtcgttcaccggcggtacggccaccgggcgcaacatcatgaaaaacgccgggctgaaaaaatactccatggaactgggcggtaaatcgccggtgctgatttttgaagatgccgatattgaacgcgcgctggacgccgccctgttcaccatcttctcgatcaacggcgaacgctgcaccgccggttcgcgcatctttattcagcaaagcatctacccggaattcgttaaacgctttgccgaacgcgccaaccgtctgcgcgtgggcgatccgaacgatccgaatacccaggttggcgcgcttattagccagcagcactgggaaaaagtctccggctatatccgtctcggcattgaagaaggcgcaaccctgctggcgggcggcccggataaaccgtccgacctgcctgcgcacctgaaaggcggcaacttcctgcgcccaaccgtgctggcagacgttgataaccgtatgcgagtcgcccaggaagagattttcgggccggtcgcctgcctgctgccgtttaaagacgaagccgaaggcttacgtctggcaaacgacgtggagtacggcctcgcgtcgtacatctggacacaggatgtcagcaaagtgttacgcctggcgcgtggcattgaagctggcatggtgttcgtcaacacccagaacgtgcgtgacctgcgccagccatttggcggcgtaaaagcctccggcaccgggcgtgaaggcggtgagtacagcttcgaagtgttcgcggaaatgaagaacgtctgcatttccatgggcgaccatccaattccgaaatggggagtctga

SEQ ID NO: 489300 - DNA, 258 bp, Shigella sonnei
atggctggtttaaggaataacaacaacacacagaatgcacagtgggctgattatgtgggtgacattcttcggggggctcagccgataaaccagctagtacctcagcacccttatcttaacgacgtcccactcattgatgagttaaggcatcagaacactcatcatgttattctcttgacacttgatgttgcaaaaaaaaaaaaaaaaaaaaaaaaaaaaaaaaaaaaaaaaaatactcagcccaataacatcatttga

SEQ ID NO: 489301 - DNA, 480 bp, Shigella sonnei; identical to SEQ ID NO: 464934

SEQ ID NO: 489302 - DNA, 480 bp, Shigella sonnei; identical to SEQ ID NO: 464934

SEQ ID NO: 489303 - DNA, 918 bp, Shigella sonnei
atgcaaagattgagtcctggtgaatttaaaactctaatttctaaagagagaaagtcgcattttattacgccatttgctttggtttataaaacattttgtgatttagggtatgatcaaaaaaatagtgattattttttgaataatccaagtgaatatataattgcaatgagaaaaaactgttggaaagaatttgaaccatttgaaaaagaattcacaacaagaatgttatcatatcttattgatgaagaaagaataaaagatatgagtccttatgatgccattcgtgattttacgatggaataccctacacacatatatgatttggcactgtctaacactcaatccagacgtagcagggcaggaaaagagtttgagtctattcttgagctattaatgatgggggcaggaattcctgttgatgtgcagggggctattgggaagtcattttttcaaaaaaaccaaataggtaaacttgtagatcttgttatgccaggtgtagtccagtacacatctaacaaaagaaatacaatgttgatttccgctaaaacaacgctgagggagcgatggcaagaagtacctgaagaggttaatagaacaggtattagagaaatgtatctagctacactagatgattcttttagcgaggagacaataaatatattatacgaggctaatgtggtcgttgtaacgacgatagaaaataaaaatttcaaatataaaaataataatagggtgctaacctttgaagatatgctacagtcagcaatggaattatcaagaaagtggaataatgtaagttacacagactctgaaaaagaggaaattcaacagtcaatattaaaacaaatagaaaaatatagtgatttcccttatgttgttaattattatagaaataggcttagtgctctttttgactaa

SEQ ID NO: 489304 - DNA, 1089 bp, Shigella sonnei
atgactcaaaaagagtttgcagacgcccttggtctttcaaaatatggagacagaaccataagaagatgggagcgcggggaaacaaaacctactggggcggaactaaaagcagttatggactttccagacacaccaccttacccaaacaacgagaatggcagatatcgcatgatcgatttatttgctggaatcggtggaaccagacttggatttcatcaaactaacgctgtaaatgttgttttttccagcgaatgggataagtttgctcaaaagacatatcatgcaaattatggtgatttccctgatggggacataacaaaaatcgatgaaaaagatattcctgatcatgaaattcttgtcggtgggtttccttgcgtagcattctctcaagcagggctcaaaaaaggatttaatgatacaagaggaactttgttttttgatatagcaaggataataaaggaaaaaaaacctcatgcttttttacttgaaaatgtaaaaaacttgctaggacatgataaaggtagaactttttcaataataaaaaacacacttgaagaattgaattacactgtgtattacaatatcttcgctgcaaaagactttggtgttccacaaaatagagaacgcatatacattgtaggctttaataaagaaaaagtaagaaatcatgaacattttacttttccaaccccattaaaaacaaaaacaagagttggagatattcttgaaaagagcgtagacaataaatatacgctatcagatgcgctctggaatggacaccaacgcaggaaacttgtaaatgcagcagccggtaaaggctttgggtatggtttatttaatgaaaatagcccatatactaataccataagtgcgaggtactataaagatggtagcgaaatattaatagagcaaaaaggaagtaacccaagaaaaataactccgcgggaagcgtcaagacttcaagggtttcctagtgattttattatccctgtatcggatacacaggcttataagcaatttgggaattcagtcgcagtccctgttatcaatgcaatagcagaaaaaatcatatcgaccttagattcataa

SEQ ID NO: 489305 - DNA, 480 bp, Shigella sonnei; identical to SEQ ID NO: 464934

SEQ ID NO: 489306 - DNA, 318 bp, Shigella sonnei; identical to SEQ ID NO: 483127

SEQ ID NO: 489307 - DNA, 480 bp, Shigella sonnei; identical to SEQ ID NO: 464934

SEQ ID NO: 489308 - DNA, 750 bp, Shigella sonnei; identical to SEQ ID NO: 485661

SEQ ID NO: 489309 - DNA, 378 bp, Shigella sonnei; identical to SEQ ID NO: 476066

SEQ ID NO: 489310 - DNA, 153 bp, Shigella sonnei; identical to SEQ ID NO: 38791

SEQ ID NO: 489311 - DNA, 393 bp, Shigella sonnei; identical to SEQ ID NO: 485788

SEQ ID NO: 489312 - DNA, 804 bp, Shigella sonnei; identical to SEQ ID NO: 485810

SEQ ID NO: 489313 - DNA, 504 bp, Shigella sonnei
atggacgaacagtggggctatgtcggggctaaatcgcgccagcgctcgctgttttacgcgtatgacagtctccggaagacggttgttgcgcacgtattcggtgaacgcactatggcgacgctggggcgtcttatgagcctgctgtcaccctttgacgtggtgatatggatgacggatggctggccgctgtatgaatcccgcctgaagggaaagctgcacgtaatcagcaagcgatatacgcagcgaattgagcggcataacctgaatctgaggcagcacctggcacggctgggacggaagtcgctgtcgttctcaaaatcggtggagctgcatgacaaagtcatcgggcattatcttgccagtcgacgcatcgcactgtttttttgggcgctgatagttttattacttttcttaagcaacgaagctatctggttgatgccccatcctttacctaatagccgcagtaccttgcgctctgaaagagtgagaatgacggagcgatag

SEQ ID NO: 489314 - DNA, 360 bp, Shigella sonnei; identical to SEQ ID NO: 372517

SEQ ID NO: 489315 - DNA, 303 bp, Shigella sonnei; identical to SEQ ID NO: 485854

SEQ ID NO: 489316 - DNA, 480 bp, Shigella sonnei; identical to SEQ ID NO: 464934

SEQ ID NO: 489317 - DNA, 480 bp, Shigella sonnei; identical to SEQ ID NO: 464934

SEQ ID NO: 489318 - DNA, 480 bp, Shigella sonnei; identical to SEQ ID NO: 464934

SEQ ID NO: 489319 - DNA, 408 bp, Shigella sonnei
ttgattgaaggcccggctgattttaatgaccgggtagacgaactgtttttagcccaccagcttccggtagctatttacagttattgccagtatcaggacggtgcagcccccgggcgtggtgcctggacgccatttgctgaattttcgccggagtggcaggcgctacaagccgcacgtcgtattcaggcacaaacttacttcatcgatttgccttgctgggcgcagagtgaagaagtggacgattcgcctgatacgcaagaggaaagccaggccttgctgctgcgtgccacccgcatggataacagcgacaccctgtgggatcacttgttcgaagatgaaagccagcaaactgcattaccctctgcactggcgcactattttgcccaactgcggggcgattccccataa

SEQ ID NO: 489320 - DNA, 378 bp, Shigella sonnei; identical to SEQ ID NO: 476066

SEQ ID NO: 489321 - DNA, 126 bp, Shigella sonnei
atgggctggcaaaagtgtagcggtattaagcgcagctatttagagaggcttgttgatgttggtgttttcaggatgatgtttcacttagtttgtttgccgtatcgcccggcgaatagctgtgattga

SEQ ID NO: 489322 - DNA, 351 bp, Shigella sonnei
gtgagttatgattatgtcgatgcgcgcaatgcgattaccgacacgccgttgttacgccgtgctaaacagcaggtgaaataccagctcgactggcagttgtatgacttcgactggggtattacttatcagtatttaggcactcgctatgataaggattactcatcttatccttatcaaaccgttaaaatgggcggtgtgagcttgtgggatcttgcggttgcgtatccggtcacctctcacctgacagttcgtggtaaaatagccaacctgttcgacaaagattatgagacagtctatggctaccaaactgcaggacgggaatacaccttgtctggcagctacaccttctga

SEQ ID NO: 489323 - DNA, 213 bp, Shigella sonnei
gtgtatgatggtgtttttgaggtgctccagtggcttctgtttctatcagctgtccctcctgttcagctactgacggggtggtgcgtaacggcaaaagcactgccggacatcagcgctatctctgctctcactgccgtaaaacatggcaactgcagttcacttacaccgcttctcaacccggtacgcaccagaaaatcattgatatggccatga

SEQ ID NO: 489324 - DNA, 1566 bp, Shigella sonnei; identical to SEQ ID NO: 486798

SEQ ID NO: 489325 - DNA, 246 bp, Shigella sonnei; identical to SEQ ID NO: 486098

SEQ ID NO: 489326 - DNA, 483 bp, Shigella sonnei; identical to SEQ ID NO: 483872

SEQ ID NO: 489327 - DNA, 270 bp, Shigella sonnei
atgccaaactgcgatcgattcagatgccattttgcacgatacacgggttatggttttgaagttcgcaaaaacggcgtattaatcgcatccagagaaactaaaggtgccattcccggtagttacagtgcagttattgatatgcctagtggtggtggtagcgtcactctggagtttaagattttccagaaaggcaatcagggggcaggcaatatcaccgactgtacggtgattgtgaccaaaaaagcggcttccggcatcagtattcgttga

SEQ ID NO: 489328 - DNA, 570 bp, Shigella sonnei
atgcagtcggtactccgtccgccgtcccgccgcatccgtctgcgccttcagcctccccgcctcatcatactcgctgcgggtgatgctcccgtcggcatgctccttcttcaccacccgcttcaggccaccctcgccttccgtgtacagcacctcccgccggttcaggctgtccgtgatgattacccggctctctccgtactcaaagcggtagtccagcccctccgggttgacctgctccgtcacccgaccggtatcatcataccggtagcagctctccggcctccccgcataatggtgcgccaccatccgcccggcgtgctccgcatcataagtaaacccgcgcacctgcatcccgctgcggtcatacaccgcccgcagttcaccaccggccgtgtacgtgtagcgcgccagcggcgcagtcggctgttcatccgggtatgccgggtcgtgtgtcagccataccgcctccagccggataccgttatcggcaccgtactctgtaccggcgggcagcgtgtcggggaaaacctgagaagaggaaacagaacggggactggccggggaagataa

SEQ ID NO: 489329 - DNA, 570 bp, Shigella sonnei; identical to SEQ ID NO: 489328

SEQ ID NO: 489330 - DNA, 537 bp, Shigella sonnei; identical to SEQ ID NO: 486147

SEQ ID NO: 489331 - DNA, 570 bp, Shigella sonnei; identical to SEQ ID NO: 489328

SEQ ID NO: 489332 - DNA, 684 bp, Shigella sonnei; identical to SEQ ID NO: 487131

SEQ ID NO: 489333 - DNA, 303 bp, Shigella sonnei; identical to SEQ ID NO: 487011

SEQ ID NO: 489334 - DNA, 216 bp, Shigella sonnei; identical to SEQ ID NO: 485850

SEQ ID NO: 489335 - DNA, 381 bp, Shigella sonnei; identical to SEQ ID NO: 35582

SEQ ID NO: 489336 - DNA, 348 bp, Shigella sonnei; identical to SEQ ID NO: 381156

SEQ ID NO: 489337 - DNA, 1881 bp, Shigella sonnei; identical to SEQ ID NO: 381155

SEQ ID NO: 489338 - DNA, 246 bp, Shigella sonnei
atgggaaaaaatcaggaagaaaggaaaactcccgtcattgtggtgaaaaaacgtcgtactttttcgccaccgtccttatccgaaaaaacagatattatcgcacctgtatttactgaacagacggcagaatcagccccccgccggaataaattcatctgccgtcgaaacacatatccccgaagcgccagccaggaagaagaaaaagaaaagacaccgttttccacgtccctcccactggacccgtga

SEQ ID NO: 489339 - DNA, 234 bp, Shigella sonnei; identical to SEQ ID NO: 79140

SEQ ID NO: 489340 - DNA, 474 bp, Shigella sonnei
gtgagagacaaaaccagggaggccatgcggctttttttaggcggcaggtgctacacggctgaaaaacttgaaaaggattatctggctgaagtggctaattacagtaacgaccgctgggaagcaccgcaacgtgcctcacgcctggctgccagcgtaaagcgttacaagacatcagaaatgctgcgctttatttttgctaccattgcctacgatcccgatccagatttaaccccgctaactgtgagacgtttgtgcaaggcattgttcggcagaaccggaagccagtggctggttgttgaagtttttggggagaaggggcgtcagcaccgcagcgcggacagcaatccggagatggtggaaaaaatggctgccagatatcgtcatgccgccgaactacactggtccgcaacgctggcagaaattgaacgggtaaagcggctttatcagacgaaaattaagaaatccaaaaaataa

SEQ ID NO: 489341 - DNA, 849 bp, Shigella sonnei
atgaataatgatgagctggccaccagacgtgcgcaggcgattgccgaagacaggtgtttctcgaaaggacgtttgcgcgatgaattcagaatgaaaccagcccccggtgctgagccggttaagtggtataaaaacacttatggtggcaggttcgctgtataccgaattgcagactgtgttccgatgcgtgagaaatgccctctgacgagtaaacaacagctggctggccagcgactttccgttttatccagacttaacagcaccagtggccggatggcacggcaggcatatgactggctgagtctggcaccgctctttctggatactgaaacgacaggactggataataccgcggaagccctggaaatcggcctgaccgatgcggccggtcaggtggtatttgaaaccaggctgaagcccacggtcgccatcggggcgcaggccgccgctgtgcatggtatcagcgagcaggctctctgcggcgcaccatcatggacagatgtggcgcggcaactgcgtcatgcaatcggggaccgaccagtaattatctttaatgcccggttcgacatccgcattctgaaacagactgctgccgcacatagcgatccggctgactggctggaagaactgacggtatattgtgcgatggagctggctgcaggatattatggggccaccaaccgctatggcacgatttcactggcctgtgctgccagtcaggccggactgacctgggaagggcaggcacactcagcgatcgccgacgcacggatgacggcaggggtggtaaacgctattgctgcatatcatctggaactgctgcaggaacaggcacggctgaaaatctga

SEQ ID NO: 489342 - DNA, 567 bp, Shigella sonnei; identical to SEQ ID NO: 19456

SEQ ID NO: 489343 - DNA, 591 bp, Shigella sonnei; identical to SEQ ID NO: 19457

SEQ ID NO: 489344 - DNA, 1176 bp, Shigella sonnei
atgttaagagcaacaaaaatacgcatctatcctactcctgaacaggctgcatttctcaacgcccagttcggtgcggtacgttttgcgtacaacaaagctcttcacatcaaaaaacacgcttaccagagacacggagtaaatttaagtccgcgtaacgatctgaaaccgttgttgtctgtggccaaaaagtcccgtaaatatgcctggctcaaagaatttgactcaatggcattgcaacaggcggtaatcaatattgatgtggcattttccaacttttttaatccgaagctgaaagcgcggttcccgacgtttaaacgcaaacacggaaaacaatcgagctatcactgtgtcgggattaaggtgctggataatgccatcaaaatccccaaactggccccgatagaagcacgccttcatcgtgaacttcatggaaagctgaaaagcatcactgtcacccgttctgcaacggggaaatactacgcttccattctttgtgacgatggcgcttccgcaccagagaaacccacgtacctgaaggaagaaaagattacaggtctggatatgggactggagcactatgccatcacttctgatgctgtaaaagttccgaatcctcgccatcttatcaatgtaagtcgtaatctgcgacgcaaacaaaaagcattatcccgtaagcaaaagggaagcgcgaatcgtaaaaaggccagaatccgtcttgcggccttacacgaacgggtggcgaatgcccgtgctgattttcaacacaagctctctcgcgcgattgtcgacgaaaaccaagcggtaattgtggagacgctgaaaacagccaacatgatgaaaaaccacaatctggcaagagcgataggtgatgctggctggcacagcttcatcacaaagctggagtacaaggcagcgacaaaaggcgttcacctggtaaaactcgaccagtggtttgccagttcgaaaacgtgccattgttgtggttacaaaatgccggaaatgccacttcataaacgcatctggcgatgccctgagtgtggagcagagcacgaccgcgatatcaatgcggcactcaacatccggcaaaaaggaatactggaactaaaggcggcgggactcgtcgtctctgcccatggaggccagcgtaaatccgtcgcacagacggttgcggcctga

SEQ ID NO: 489345 - DNA, 927 bp, Shigella sonnei; identical to SEQ ID NO: 36033

SEQ ID NO: 489346 - DNA, 255 bp, Shigella sonnei; identical to SEQ ID NO: 36034

SEQ ID NO: 489347 - DNA, 345 bp, Shigella sonnei; identical to SEQ ID NO: 36035

SEQ ID NO: 489348 - DNA, 1002 bp, Shigella sonnei
atggccgatccattcaatctgcagaccgatgtggtcaggcagcatacggttccccgttttttactgaagcatttcagtacgccgggaaagggtaagcggcagcgcttatacgcctttgacaaggctgccgggcgcgcctatgccaccacgccggatgacgcgaccgtccgcaacacgttctacaacctcgataatcacccggaccgtctgagtcttgaaccactgctggggatttacgagcaccacgcggcaccggtaattgcagccctgctggcgcacagggatattcgcaggctgacagatgatgaacgctacaggctggccgtgtttgttgccgtgcagcgcgcacgaaccttcggtgaactggagcgtatctcaggcatgatttcggtgcttaccgataagatggaggccatcggctcgactaaagagcaggccatggaaaccctgggcctgtcgtccgggggcgataccaaggatatttttctgcggcagctcgtccagcaggtgtcacatattgatctcctgctgaaaaaggactggtaccttctggaaaccaggccagaacgtccgttttacgtatcagacaatcccgtagtgcttaagaacagcaatgacttcggtccgtacggtaatcttggtctggccgttcgcgggatacagatttacctccccctgtcatcgacgctgatgctggccatgtattgcccctccatccgtgaacagatggttcgtcaaaagcagcatcttcaacatctgctcgccagggcgccgcatcttatcccccgtcacattcggccttttgaaagactggaacatatccggaggtatacggactatcttcttatgccgcttaccccggagcatgtcacgcattacaattccctgcaggtggagttcgcggagcagtacgtgttctgcggtgaaaaggatttctctctggttgagagaatgctggccgatagtgaacgctaccggactggcccgcggtttacgttttag

SEQ ID NO: 489349 - DNA, 591 bp, Shigella sonnei; identical to SEQ ID NO: 373261

SEQ ID NO: 489350 - DNA, 300 bp, Shigella sonnei
ttgcaccatgcccagagaatgataaggcaggaaatactgctcaaaacgcttctcttcgtaagcatcaagccaggtaaaatcgggctggttatcggcaaaaataccggtcatcagttcgatatacgggccgttattgtcggtcagactcttatcccacgcctggccaaattcactgtgtccccaactccactgttttttacctggcgcaatatggtggttggcaacgtgcagcaaaccgccatcttcatcgtgacaccacgcgccgacaaaatcgtactgcgatttttcggccatatatga

SEQ ID NO: 489351 - DNA, 192 bp, Shigella sonnei; identical to SEQ ID NO: 484083

SEQ ID NO: 489352 - DNA, 267 bp, Shigella sonnei; identical to SEQ ID NO: 5638

SEQ ID NO: 489353 - DNA, 936 bp, Shigella sonnei; identical to SEQ ID NO: 485515

SEQ ID NO: 489354 - DNA, 537 bp, Shigella sonnei; identical to SEQ ID NO: 486147

SEQ ID NO: 489355 - DNA, 1245 bp, Shigella sonnei; identical to SEQ ID NO: 485771

SEQ ID NO: 489356 - DNA, 954 bp, Shigella sonnei; identical to SEQ ID NO: 485725

SEQ ID NO: 489357 - DNA, 261 bp, Shigella sonnei; identical to SEQ ID NO: 485837

SEQ ID NO: 489358 - DNA, 348 bp, Shigella sonnei
gtgacctttgagcagaaaaaagcccgggccattgccctgatggacagcaaaaagatgtggcggagcaattatgcccctcctcttctgcgtattctctggcggctgggtatccggcttccgccattaccctttatgccgttctggcaggtcgcggtgctgacggggggcttatggggcacttcctggggatgtgcaatgtggtttatctactgggggccgtcaggaatggtggcaggtgaggccattattataagtatcacgggtggttttttgttcggactgctcacggcctctttccactggtggcgcaggaaagttaaccggctgccaccatgggatgacgtgtaa

SEQ ID NO: 489359 - DNA, 885 bp, Shigella sonnei
atgagcggaaaaccggcggcgcgtcagggcgacatgacgcagtatggcggtagcattgtccagggttcagccggggtgcgcatcggtgcccccaccggcgtggcctgttcggtgtgccccggcggggtgacgtccggccatccggtcaatccgctgctcggtgcgaaggtccttcccggtgaaaccgacatcgccctgcccgccccgctgccgttcatcctctcccgcacctacagcagttaccggacaaaaacgcccgcgccggtggggagcctcggccccggctggaaaatgcctgcggatatccgcttacagctgcgcgataacacactgatactcagtgataacggcggcagaagcctgtattttgagcacctgtttcccggtgaggacggttacagccgcagcgaatcactctggctggtgcgcggcggcgtggcgaaactggatgaaggtcaccggctggccgcactctggcaggcgctgccggaagaactccgcttaagtccgcatcgttatctggcgacaaacagtccgcaggggccgtggtggctgctcggctggtgtgagcgggtgccggaagcggatgaggtgctgcctgcgccgctgccgccgtaccgggtactgaccgggctggtggaccgcttcgggcgcacacagacgttccaccgcgaagccgccggtgaattcagcggcgaaatcaccggcgtgacggatggtgccgggcgtcacttccggctggtactgaccacgcaggcgcagcgggcagaagaagcccggcagcaggccatttccggcgggacggaaccgtccgcttttcctgataccctgccgggttacaccgaatatggccgggacaacggcatctgtctgccgtgtggctga

SEQ ID NO: 489360 - DNA, 282 bp, Shigella sonnei; identical to SEQ ID NO: 487352

SEQ ID NO: 489361 - DNA, 189 bp, Shigella sonnei; identical to SEQ ID NO: 463227

SEQ ID NO: 489362 - DNA, 189 bp, Shigella sonnei; identical to SEQ ID NO: 464712

SEQ ID NO: 489363 - DNA, 1719 bp, Shigella sonnei; identical to SEQ ID NO: 485613

SEQ ID NO: 489364 - DNA, 189 bp, Shigella sonnei; identical to SEQ ID NO: 463227

SEQ ID NO: 489365 - DNA, 465 bp, Shigella sonnei; identical to SEQ ID NO: 483873

SEQ ID NO: 489366 - DNA, 813 bp, Shigella sonnei
atgtgggctgtgaagctgcaacagatgaaggacggacgcctttatattgcgggtatcggtgccggtattgagaatacgccagcaggaatgcagagtcaggtgctgctggcggcagacaggattgcgatgattaatcctgcgaatggcaacacaaagccgatgtttgttggtcagggcgatcagatattcatgaacgacgtgttcctgaaacgcctgacggctcccaccattaccagcggcggtaatcctccggcattttccctgacaccggacggaaaactgaccgctaaaaatgcagatatcagtggcagtgtgaatgcgaacgccgggacgctcaacaatgtcacaattaatgagaactgtcagattaaggggaaactgtcagccaaccagattgaaggcgatatagtcaaaacagtgggtaaggcttttccgcgggactcccgggcaccggagcggtggccatcagggaccattaccgtcaggatttatgacgatcagccttttgacaggcaaattgttattccggcggtggcattcagcggcgctaaacatgagcgggagaataacgatatttattcgtcatgccgcctgatagtacggaaaaacggtgctgaaatttataaccgtaccgcgctggataatacgctgatttacagtggtgttattgatatgccagctggtcgcggccacatgacgctggagttttcggtgtcagcatggctggtgaataactggtatcccacagcaagtatcagcgatttgctggttgtggtgatgaagaaagccaccgcaggcatcagtatcagctga

SEQ ID NO: 489367 - DNA, 435 bp, Shigella sonnei
gtggcaaacctgcaggtggccacgtcagaaagctggcgtgacaaacagacgggggagatgcgggagcagacagaatggcatcgcgtggtgctgttcggcaagctcgcggaagtggctggtgaatatctgcgcaagggcgcgcaggtctacatcgaggggcaactccgtacccgtagctgggaagataacggtatcacccgttacgtcactgaaattcttgttaagaccacgggcaccatgcagatgctggggagtgcaccacagcagaacgctcaggcgcaaccgaagcctcagcagaatgggcagccacagagtgctgacgcgacgaaaaaaggtggcgcgaaaacgaaaggccgtggacgtaaggccgcgcagccggagcctcagcagccgtctgaacccgcgtatgacttcgatgacgacattccgttctaa

SEQ ID NO: 489368 - DNA, 378 bp, Shigella sonnei
atggacgaacagtggggctatgtcggggctaaatcgcgccagcgctggctgttttacgcgtatgacagtctccggaagacggttgttgcgcacgtattcggtgaacgcactatggcgacgctggggcgtcttatgagcctgctgtcaccctttgacgtggtgatatggatgacggatggctggccgctgtatgaatcccgcctgaagggaaagctgcacgtaatcagcaagcgatatacgcagcgaattgagcggcataacctgaatttgaggcagcacctggcacggctgggacggaagtcgctgtcgttctcaaaatcggtggagctgcatgacaaagtcatcgggcattatctgaacataaaacactatcaataa

SEQ ID NO: 489369 - DNA, 327 bp, Shigella sonnei; identical to SEQ ID NO: 485848

SEQ ID NO: 489370 - DNA, 189 bp, Shigella sonnei; identical to SEQ ID NO: 463227

SEQ ID NO: 489371 - DNA, 423 bp, Shigella sonnei
atgtactgtactgttaaagaaattatccgcgaagtgctggatacagacgtgccggacagtgaatgcgtttttgccgtggtgctgactcgtggggatgtgcgtcacatagcccaggactggagtctgacagacgatgagctggaaaccgtcatgcagcggctggacgatgcctttgagcatggtgcggatgtcagcgttgttcacgacgttgttcgtgaactgatggaggaaaagcacgccagccgtcaggtgacagtcccggcggtgatgctggaaaaagtgatggcgctggcaggcagtgaaatgaagcgcctgtatgccgtcgggagtgagaacgggggcgacggtgatgcgttcgtcagggaagaacgcgaagcaatggacgttgtgttacaggcgctggacggggagcacatgtcatga

SEQ ID NO: 489372 - DNA, 366 bp, Shigella sonnei
atgctggaagcggccagagaggccagacgtcaggaaattgaagcatggcgcacagaacaggaggcgaagccgttcacgtttgaatggaacggtcgtatctggaatgctggccccaactcactgggccgcctgtccccggtagtcatgctggcaaaatctgtcacagcacaaacacatatggcgtggggtgatgccgataatcagcaggtgaaactgtcgatgccggaactggaagaactggcggcagcaatggtgcaggcggttgttgaacgcaacgatgagatttatcgccgtcagcgtgaaatgaaagaggagctgagcggtctggatgatttggcttcaattcgggcgtttgacgttgagtaa

SEQ ID NO: 489373 - DNA, 408 bp, Shigella sonnei
ttgagattttctacaatcgtcagcgtcgtcactctcgtctggggaatatctccccggcagccttcagggaaaaatatcatcagatggctgcttaaaaaaagaacaaatggtagtgtccgctattgccagtacacctcattcaaagccgaagctgtcagaacggttcttgaaaatcaactttcgatcagtgaaggcgcttcccgattatctcttcctgaaggcactttaggacaatgggttaccgccgccagaaaagggctcggtactcctggttcccgcacggtggctgaactggaatctgaaattctgcaactgcgtaaggcgttaaatgaagctcgccttgagcgagatatattaaaaaaagcaacagcgtattttgcacaggagtcgctgaaaaatacgcgttaa

SEQ ID NO: 489374 - DNA, 402 bp, Shigella sonnei
atgacgacattcctgtcactcagtcaggaggtgctgttatccctgctcagtttctgcaccgcatgtagccttaacggtgtccagacccgcgagtgtggtcacacgtcacgcagtccgctggattcgctggagagcgccatcggttttcacatgcgcgactggtggcagccgacgaaagcaaacttcttcggacacctgaaaaagccgcagattatcgcagccctgaatgatgccggactgtccggtgccgcacgggacgcggagaagatgaagaaaggtgatgcggctgaacatgcagagcaccatatgaaagacaaccgctgggtgcctggctggatgtgtgcaccacatccacagacagataccactgaacgcactgataacctggctgatgccgcctga

SEQ ID NO: 489375 - DNA, 288 bp, Shigella sonnei
gtgataacaggtgtctggaaatataggggcaaatccagaacggttcttgaaaatcaactttcgatcagtgaaggcgcttcccgattatctcttcctgaaggcactttaggacaatgggttaccgccgccagaaaagggctcggtactcctggttcccgcacggtggctgaactggaatctgaaattctgcaactgcgtaaggcgttaaatgaagctcgccttgagcgagatatattaaaaaaagcaacagcgtattttgcacaggagtcgctgaaaaatacgcgttaa

SEQ ID NO: 489376 - DNA, 240 bp, Shigella sonnei
atgatgccggatggcgaccgtttccacatagtgaacggtgcaaactggtttgaccgtaccgtgagtgctgatgcctgcggcatcattctgacttcccttgtgattaaccgccagttgtggctgtaccacgacagcggtgatgcaggactgacccagctttaccggatgcgcgatgcgcagttgtggcgtcacatcgaatttcaccctgaatgcaacgcgatttacgcggctctggactga

SEQ ID NO: 489377 - DNA, 240 bp, Shigella sonnei
atgatgccggatggcgaccgttttcatctggtcaacggtgaaaactggtttgaccgtaccgtgagtgctgatgccgcaggcatcattttgacttcccttgtgattaaccgccagttgtggctgtaccacgacagcggggatgcaggactgacccatctttaccggatgcgcgatgcgcagttgtggcgtcacatcgaatttcaccccgaatgcaacgcgatttacgcggcgctggactga

SEQ ID NO: 489378 - DNA, 207 bp, Shigella sonnei
atgctggtcactgacaccataacagaggccaccctgtacgaaaacgggctgtatacgcgccacatcagactcagtcgcccagtatctgacagcaaataccccttgccacccggatctcagctcattaaaaatatgaccttacgactgcgcctgcaggatcagcaggaagaaacatccgtgacattggtaatgactccaacttattga

SEQ ID NO: 489379 - DNA, 240 bp, Shigella sonnei
ttgagtggggagttgcgaaatcgtcaatatgttgtgaatcaattggttgtggcgaaagtgggggatgttgattttatgccatttcagtatcaattgagcccaacgttaccggtcagaaaggatgggccaagtaatgccataattgtaattctttcttctgtcattggagggatgcttgcatgtggctatatacttttacgtcatgccatggaggccagaaagatgagtgtgattgagtaa

SEQ ID NO: 489380 - DNA, 249 bp, Shigella sonnei
atggcgacgctggggccaccctttgacgtggtgatatggatgacggatggctggccgctgtatgaatcccgcctgaagggaaagctgcacgtaatcagcaagcgatatacgcagcgaattaagcggcataacctgaatctgaggcagcacctggcacggctgggacggaagtcgctgtcgttctcaaaatcggtggagctgcatgacaaagtcatcgggcattatctgaacataaaacactatcaataa

SEQ ID NO: 489381 - DNA, 756 bp, Shigella sonnei
atgaaaaaagcgggtcttctttttttggtgatgatagttatcgccgttgtggctgccggtattggttactggaaattaaccggtgaagagtcggatacattacgtaagattgtccttgaggaatgtttgcccaatcagcagcaaaatcaaaatccttcgccatgtgcggaagtcaaacccaatgccggatacgtggttttaaaagatcttaatggtccactgcaatatctgttgatgccaacgtatcgtattaacggtactgaaagtcctttgttgaccgatccttcaacgccgaacttcttttggttggcctggcaggcgcgtgattttatgagcaaaaaatacggccagccggttcccgatcgcgcggtttctttggcgatcaactcccgcaccgggcgtacgcaaaaccattttcatattcatatctcttgtattcgtcctgatgtgcgcgaacaactggataacaatctggcgaacatcagcagccgctggttgccactgccaggtggtttgcgcgggcatgaatacctggcgcgtcgggtaacggaaagcgaactggtacaacgcagcccatttatgatgctggcagaagaagtacctgaggcgcgggaacatatgggaagctacgggctggcgatggtacggcagagtgataactcatttgtattgctggcgacacaacgaaatctactgacgcttaaccgtgcttcagccgaggaaattcaggatcatcagtgtgagattttgcgttaa

SEQ ID NO: 489382 - DNA, 312 bp, Shigella sonnei; identical to SEQ ID NO: 487692

SEQ ID NO: 489383 - DNA, 840 bp, Shigella sonnei
atgacgcaatactcctctctccttcgtggtcttgcagcgggttctgcatttttattcctttttgccccaacggcattcgcggcggaacaaaccgttgaagcgccgagcgtggatgcgcgtgcatggattttaatggattacgccagcggtaaagtgctggcagaaggcaacgcggatgagaaactggatcccgcgagcctgactaaaatcatgaccagctatgtggttgggcaggcgcttaaggccgataagattaaactcaccgatatggtgacggtcggtaaagatgcctgggcgacgggaaatccggcactgcgtggttcatcggtaatgttcctcaaaccgggcgatcaggtttcggtggcagacttgaacaaaggtgtgattatccagtccggtaatgacgcctgtattgcgctggccgattacgttgccgggagccaggagtcatttattggtttgatgaatggttatgccaaaaaactgggtctgaccaacactaccttccagacggtgcacggtctggatgcgccggggcagttcagtaccgcgcgcgatatggcattgctgggtaaagcattgatccacgatgtgccggaagagtacgccattcataaagagaaagagttcaccttcaacaaaattcgtcagcctaaccgtaaccgtctgctgtggagcagcaatctgaatgttgatggcatgaagacaggaaccacggcaggtgcgggatataatctggttgcttcggctacccagggtgatatgcgtttaatctccgtagtgctgggggcgaaaactgaccgtatccgttttaatgagtctgagaaattattgacctag

SEQ ID NO: 489384 - DNA, 273 bp, Shigella sonnei
atgcagccagtgattaacgcgccggaaattgccactgcccgagaacagcagttgtttaatggcaaaaacttccatgtgtttatctataacaaaactgagagtatcagcgggctgcatcagcacgactattatgaatttactctggtattaaccgggcgttatttccaggagattaacggtaagcgcgtgttactggaacggggcgattttgtttttattccgttaggttcgcaccatcaaagttttatgagtttggtgccacgcgtatattga

SEQ ID NO: 489385 - DNA, 570 bp, Shigella sonnei
ttgaacgttgggatcagtaaacgcttttttgagcagcattacctgccgttgttgccttattgctttgtcgcttcgcaggtataccggaccaataacgcttttctcacctatgtggaaacagtgatttcttcattgaatttccgcgaaacagggctggaagagtttgttgagatggttactttttatgtcattaaccgtttacgtcattaccgcgaagaacaggtgattgatgatgtaccgcagtggctgaaaagtacggtagaaaagatgcatgataaagagcagtttagtgaatcggcgctggagaatatggtgacgttgtcagccaaatcacaggaatatttgacgcgagcgactcaacgatattatggcaaaacaccaatgcagattattaatgagatccgtattaattttgccaaaaaacaactggaaatgaccaactattccgtgacggatattgcgtttgaggccggttatagtagcccgagtttgtttattaaaacgtttaagaaattaacgtcctttacgcctaagagctatcgtaagaaattgactgaatttaatcagtaa

SEQ ID NO: 489386 - DNA, 156 bp, Shigella sonnei
atggcaggtgatccgcccgatattctgattcaacctgtttgcccgcaaatatctacgcttgatttccatcgcgcgcacgctgccattgcggccggacagctggcagtggaaaggaaaatggacgaacttttgccgttggtacgcaccaacatttga

SEQ ID NO: 489387 - DNA, 474 bp, Shigella sonnei; identical to SEQ ID NO: 488161

SEQ ID NO: 489388 - DNA, 1176 bp, Shigella sonnei; identical to SEQ ID NO: 488190

SEQ ID NO: 489389 - DNA, 549 bp, Shigella sonnei; identical to SEQ ID NO: 488236

SEQ ID NO: 489390 - DNA, 282 bp, Shigella sonnei
atgaccgaatctgaaatactgcgattaatccgctgtgctggtggaattagccagttggctgacgaacaggccgcgcagccggatacagtcaccgctgaaaattacgcgcgtgtggtggctgaggtgatgcgccgtgacggtattgagcttaacggcgtggatatgcgcaacatacgaaccagagtccttgagttgctggcataccgtcgccgttctcaacaacggagggagagcgcgaaaaatacttatcagtggaagaagccggagcacttacggcggtaa

SEQ ID NO: 489391 - DNA, 486 bp, Shigella sonnei
atggatcgggaactgaaaaatctgatgctgaacattaaccagctggcggcgatagcgggaatatgtcgccagactgcggcggcaaggctgaaaaatatccagccagccggaggacatgacaagctgaaactctatcgggtgactgacattctgacttgttttcttgatcttcccgttccggcatcactggaagaaatggagccacacgaccgtaaggcctggtatcagtccgaacgtgagcgcctcaagttcgaacaggaaacggcgcaactcatacccgccgatgatgtgcgaaaagagatggctatatggggagaaatcgtaagcgaggaactggaaaaactccccagtattctggcacgtgatgttgggcttaaaccgatggcagtaaacagagtgcagtcaattattgacgatttgtgtaatcagattatcagccggatggtaaaaaatgacgtagtgaatgaggtcgcaaaacaggcatga

SEQ ID NO: 489392 - DNA, 1914 bp, Shigella sonnei
atgaatcgctggtacaccattaaggcggcggatgttcgtggagcggcggatatatctatctatgaggagattggcggcttcggtgttactgcaaagcagttcgcggaagacctgaaagcccttggcgatgtttcacatatcaatctgaggatccattcaccaggtggtgatgtgtttgaaggcatcgccatctataacctgctacggaatcatccggcagacattacggtttatatcgatggtgttgcggcttcaatggcttcggtggtcgcaatggctggcgatcgtgtagtgatgccggagaacgccatgatgatgatccataaaccgtgggggatctctggcggaaatgctggcgatatgcgtgattatgctgatttgctggataaggtggaaaccgtgttaatccctgcttatgccagaaaaacgggcaaatcagcacaggaaattaccgccatgctggaggatgaaacctggatggatgggaaagaatgccttaagcacggttttgctgatgaattgttgccatccgtcagagcaatggcgcgaattgaatcgaaacgcacaggagattttttacatatgccggaaaccattaaaggaatgattacaccgccacagggagcggcaaatattgctggtaatgaacagaagcgcatcaatggaataagtgaagtgtttagcctgttcggcagtcgttacgacgggatcaaaatggcgtgtctggaagatgcatcatgtacaccggaaatggcccgtgaaaagctgttgaacgagctggggcgcgagtccacgccatccaataaaaataccccgcctcatatctatgctggaaacggaaacataacaggtgatgcaattcgtcaggggctttattcccgtcttgggtatgaacggcctgaacgaggcaacccttacgcgatgatgagtctttttgaaatggcccaggcatcactggttgatcgtggtatcactgtgagcggttttattaatcgctcgcaggttgttaatgcggcttttacacacagcagcagtgatttttctcatattctggctggtggggctgaaaaatctgtactgaaaggctggcaggacagcggcgaaacgttccagaaatggacgcgtaccggttcgctttcaaactttcatgaagcaaagcgcgttggtctgaatggtttttcaaagctggataaagtaccggaaggtgcggaatataaatacatcaccaccagcgataaaggtgtacctattgcgctggccacgtacgggaatatattttccgttacccgtcaggccattatcaacgatgacctgacccagttaactacaatccccatggcgatgggacgcgcagctgccagaacagttggcaatctggtttatctcctgttaaccagcaacggcaagtttacggatggtaaagcgttattccatgccgatcataaaaatcttattgcgaaggatatggacatggaggggcttaacgaagcccgtaagctgatgcgcctccaggaagacgctaacggcgattcgctgaatattacccctgcatttgtcctggtccccgccgcgctggagtctgccgcacatcgcgccattctgtcatcgtcatcactctttccggttgatggcgtgggcactatcaatcagaaccccggcatcattaacgtggtgaaagatatggcggaggtaatcgttgagccacgtcttgataaagccaataacaaggagtggtatgtggcagcggcgaagggtatggacacgatagaggtcgcttatcttgatggtattgatacgccatatcttgaggagcaggagggctttactgttgatggcgtcgcctggaaggtgcgcatagatgcaggtgtcgcggccctcgactatcgcggattactgaaatcgagtggagcatga

SEQ ID NO: 489393 - DNA, 207 bp, Shigella sonnei
gtgagttgtattaatgacctgaacacgggcgatatcagggggggggccgttcatctggatgcgcagaccgttatgcgccttaagcagtacaggatcgaccatataaatcatcatcctgacaaaccattaccaggtgtggcgcagattgtcagacatgccgtaaacacctggcttaatcagaatggttttgcatcggtgggggaataa

SEQ ID NO: 489394 - DNA, 252 bp, Shigella sonnei
atgatccgtacggggataacataccgttttaagcaacgagtaacagaagccggagcaatccggcttttttatgggtcctcccggtgtagtgacctgccacggggcgggagcgtcgcggaaaaaggctggtttttgcattttcatggcggcggcagcatgtgtgataatttattgataattaaaagttatttctgttttcacctgtacaatatttttttctccctgtcattagaccagtttgcaattaattga

SEQ ID NO: 489395 - DNA, 1125 bp, Shigella sonnei
atggctgatgaagatatcaacccggtagtgcttctcgcagatcctaaagtaaatcatcgcgtgtgggctgcctgtcttaaatggactcctgtcgtaaaaaaacagcgcgtcccctcacatcataaacacaagtctcatgtaaaacccagacggcttacctccctgaaagtgactgtaggcagcagaaattcccgtggaaagatcagccgccttaccggcacaggaatactgaccaggccagaacgcaatcattatttttccctggcactggctttctgctcatgggtcagaaatggatacggtgtcttccggtacagcgataaggagctcttattccttgcttccattaatggccagcctgccgttatggctgacttatcaggaaatgatgccgacgttgcccaaaaggtcagcctttttctggcgatgaacgaagagccccccgaaaaatggcaggttgtatcgtctctggaacatcctgataactgggaaagtattattacccggttatcatcagcagacctccgccgttgcaaacttactgtcggcaatcgcagcaaattcacacttcctgccgtactgtttttagtagcagccggcgcaggcacagtattctggatgactcagccagagcctgatgtcggaccgaccgccgaggagatagctgcacgggcaagattacagtttaaaaagctcgaaccaccaccggagctcccgcatccatgggcgtcacaacctgtaatcagtgattttctgaaagcctgcgcggaccttcgaaaaccatcaccggtcgcgctagaaggctggaaacttaccggtggaacatgtactcccgagacattcacactgatttacgaacgacagccaggaggaactattgaaggctttctggcaagaagcaaagaaatctttaatgttattcctgactttaaccttaaagatggtgcacgcctggcttctgtaacccgaccactgccttccctgccccgcagggatgaggcagtccctgccccctcagaacaactgatgcgggtgttcacgtggtttcagaaaaaacagttaacgccggccattaatgaaatagccataccggaaccattaccaggtaacgatggtgaaccatga

SEQ ID NO: 489396 - DNA, 603 bp, Shigella sonnei
atgggaaaaaatcaggaagaaaggaaaactcccatcattgtggtgaaaaaacgtcgtactttttcgccaccgtccttatccgaaaaaacagatattatcgcacctgtatttactgaacagacggcagaatcagcccccgccggaataaattcatctgccgtcgaaacacatatccccgaagcgccagccaggaagaagaaaaagaaaagacaccgttttccacgtccctcccactggacccgtgagtatactcacgagtgcgtggaaaaaataaaggccctgtttcctcatcttcgtgctgaaggtggtggatttattcccctgaaaattggcataaacaatgatatttcggcatttctggcagaacacccggagacagaactgaccatggacgaatggctctgtgcagtgtcctgcatcacatcccgccgcgtatatctgcagcggacagctgtcgccggcgtcccacgttatggcctggatggtcaccccaaagggcaggtctcagactctgaagcacagagtgccggtcgcagactggcgacattagaacaaaagttgctcaggatgcaggcacagcaggagaatatttctgggcaataa

SEQ ID NO: 489397 - DNA, 204 bp, Shigella sonnei
atgttaaatcataccacacacccgcaagggcgggactcgcacaacctgaataaatacatctggcgttttatcgccctgagcaccgcacaaccgcgcgtgattcacatcgtggccaccagcgaacaggaagcacgccagcaatccccggctggctgcgtgatggtattcgccgcccgtattcgtcagggggtatgccatgcctga

SEQ ID NO: 489398 - DNA, 195 bp, Shigella sonnei
atgtcaacaataattaaacgcgataaaaaacccaaagggacaggaaaggctccccctttccatatgcgtatagctccagaactgaaagaacagtttgatagcgaggctaataatgatggtgtaagccttgctaactggcttaaagagttagggcgctccgaactaaagcggcgcggtatcgaacctaaggggtga

SEQ ID NO: 489399 - DNA, 444 bp, Shigella sonnei
atgaagagatttagaacaatattactgaaaatactcggtgcaaaaacatccattgccatattatgtgttttttgtggagcaagctttttgttcggccaatatcttaatgatatgaatctattcgccagctcaggtgcaattatttcagtttttggattgttgtatacaatcaagttcacaactttaaaaaaattatctaatcgcgaagctgaaattaattcacgcagtggcgtaactggcccgccattgtctgcggaagaatcacaaaagatacgagaagaaaacttagctaaagctcgagttgaggtcagagaggaaataaaagctgaagtactcggggttggactaactgtttttggcaccattatatgggcatatggcggatacataaaaattattccatccctcgtaatatggataagacattcattgttgatgcaatag

SEQ ID NO: 489400 - DNA, 582 bp, Shigella sonnei
atgaataaaaatattgccgtgacgggcaaggggtacgctcgttcagtaaaaaaattctgcgatattcgtgatcttgtcgttctgcgctttgatggcgtggatgttcgtgtggtgtatctgaacggcgatccgtggtttattgcaaaggatgtttgtgaagctctggaaataagcaactcacgcgatgctctaaaagctctggatgtggatgagaagaataccgtcgctttaagctacggtattcgcggaaatccaaatcatagcgtcgtttctgaatctggtttttacaagctgatcgccagaagtcgcaaagctgttactcctggcacgttcgcccatcgtttcagtaactgggtattcaggaatgtgataccaggtatcagaaaaacgggggcttatggtatcccgtggggtgcattacaggatttttcccgccgtaaagagcaatatcaaataagtgccagcgagaaggggagggagctacaggcatgtaagcgcaaaaagcgtgagctggaggaagaagaaaaaaggctgatacgtgaatatcagcctgagttttactttggtgagcgtattcagtaa

SEQ ID NO: 489401 - DNA, 204 bp, Shigella sonnei; identical to SEQ ID NO: 20124

SEQ ID NO: 489402 - DNA, 1239 bp, Shigella sonnei; identical to SEQ ID NO: 20123

SEQ ID NO: 489403 - DNA, 276 bp, Shigella sonnei; identical to SEQ ID NO: 484087

SEQ ID NO: 489404 - DNA, 342 bp, Shigella sonnei; identical to SEQ ID NO: 486917

SEQ ID NO: 489405 - DNA, 447 bp, Shigella sonnei
atgacaaatcttgaagagtggttaagtgcaaaaattgcctacatcaacggtctgaaatcaccatctgagcagcagcgattacttgtattactggcagagaaaaaaaaccgaacaacgacggatgaaaaaacgttatccgcactaatacgagcagaaaaaaccgcggagaaagccgccgctgcaaaagctagggtaacagcaatccttgcggcagaacggaaggctgccgcaagggcagaacgaaaggcgcgggatcacgaactctacaaagccgcaggcctcatgattgttgctggactagtggacagcaaaaccggaaaaccaaaatttaatgctgccgaactggtaggcgcactagcaggagtagcagagctaccacgcaaccatccaaaatggcaggaatgggaaaaacgcgggaaagagctactcaccaaagacggtgcgtaa

SEQ ID NO: 489406 - DNA, 1086 bp, Shigella sonnei; identical to SEQ ID NO: 7144

SEQ ID NO: 489407 - DNA, 717 bp, Shigella sonnei; identical to SEQ ID NO: 7145

SEQ ID NO: 489408 - DNA, 906 bp, Shigella sonnei
atgagcgccgtacttcaacgcttcagggaaaaattaccgcacaaaccgtactgtacgaacgatttcacgtacggcgttcgcattctgccgaaagatatcgccatccttgcccgtttcatccagcagaaccagccacatgcgcagcactggcttgtttttgacgtggaccggacgggcgcagcgatagactggagcgaccggaactgtccggccccgaatatcaccgtaaaaaatccccgtaacgggcacgcgcatctgctttacgcactcactcttccggtgagaaccgcgccggatgcatcggcttcggcgctcaaatacgctgctgcgattgagcgtgcactgtgtgaaaaattaggcgcggatgtgaactacagcggcctgatctgcaaaaatccgttccatcaggaatggcaggttgtggaatggcgtctggaactctataccctcgatgaactggcggattatctcgatttgagcgcctcagcgcgccgtcgcgtcgataaagattacgggatggggcgaaactggtatctgttcgaaaagagccgtaaatggtcttacagggcgattcgtcagggttggccagcattctcacagtggcttgatgccgtgattcagcgtgtcgaaatgtacaacgcatcgcttctcgttccgctttcaccggctgaatgtcgggctattggcaagagtattgctaaatacacctaccgaaaattctctcctgaaggtttttctgcggtacaggctgcgcgtggtcgcaaaggtggaaaaataggcggtgctaaatccaagcgtgtagcagttcctacatcagcgcgttctctgaagccgtgggaggcattagggatcagtcgagctacgtactaccgaaaattaaaatgtgatccagatctcgcaaaatga

SEQ ID NO: 489409 - DNA, 951 bp, Shigella sonnei; identical to SEQ ID NO: 21031

SEQ ID NO: 489410 - DNA, 1155 bp, Shigella sonnei
atggacaaatataatctgaaggatgctctcctttttatatcccggggagacacccatgaaattctcatcgaaacaaatcagcgaacaagacctgacgtacagagtaatctccaggaactgctaaacttataccctgacatcaccccaaaagtagtctcgctgtctgagttacaggaagccggtcaggatgatgaaaataaaggtccgaaagaacggattattcatctgaaagatcttgcagatgttagtgaaagtgagaagaaagttctctcctattttgaaacagccagaaaacttggtgcttcagatattcattttttaatttcagagtctattttcaaagttcgcatgagaatattcggtgaactgcaaactgtagatgaagatcaacctgcgttgggttattcactttgcgcaacagccattctgtcaatggctgatgtgactgaaaccagtttcttccctcaaagggaacaggatgcgcgcctgtccccacaattaatgcgaaaaataggaatatttggtgcacgatacagtcacagacctacgggagatggtctgattgcagttatgcgcctgatacccgatgacggagacaaagttcccacgtttaagcaactgggctttataccggagcaaatccggttgctgaacgtcatgctgcgccgcccggaagggaaaatagttctgtctggtccaacaggttcaggtaaatcaacaacgttacgcagtgcctgccgtgtatatcttgacgataatcaggggcgacacctgctgacgatcgaagatccgctggaaggacagattctgggggcaacacaaaccccgattatctgtgacaaatccgacgaagaggccgtcaaactggcatggagtcgtgctatttcatcggcaatgcgacttgaccccgatgccatcatggaaggggaaatgcgcgatcttgtctcgatgatgtcaacaacctacgcggctcagaccggtcacatcgttctgacgacattacatacaaactcagctctgggtataccggagcggatgattacgatgggtatgaatgccgatcttatttgcgatgcgcaattactgattgggatgatcagccagcgtcttgtaccaactctgtgtccctcctgccgtattccatgggaaaagtga

SEQ ID NO: 489411 - DNA, 210 bp, Shigella sonnei
atggctgttgcgtcaattggtagcctgatgtggcatgcgtcagaaaatgaggaatatgacgaaaaggctatgcgcattgacatgggtaatattggcttgttactggcaatgcttgggcagtttgatatttcgttacggtgcaccattgaaaatgccacagatgcattaaatgccataaagaaagcgaatactgattcaaatctgagataa

SEQ ID NO: 489412 - DNA, 462 bp, Shigella sonnei; identical to SEQ ID NO: 488384

SEQ ID NO: 489413 - DNA, 624 bp, Shigella sonnei; identical to SEQ ID NO: 486859

SEQ ID NO: 489414 - DNA, 768 bp, Shigella sonnei
atgcaatatcctctgcccgttttgccgctgtctcagcgcgcgttgctgcagattccgccgtacttttgctctgagctgctgccgtcgcactgccagcagcctctgtcgccttcgtggatgccgtcgtggcgctgcccctcgctgctgacgcctgtctggtcgcctcatcttttgaagcagacgcagatgatgccgatgacgccgccgaactggcggacgatgcggcagccgtttttgaggattctgcacgggtttccgacgctttcgcgttcgtttcggatgtcttcgctgcggaagcagacctcgctgctgcgctggcctgttcagtggcttcgccagccttcgttgtggctgttgaagcggatgatgcggcgctttctgccgattttccggcggcggtggcactggctgaggcctgcccggcacttgttgacgcggcgctggcagacgacgcagccgctgtttttgagcctgccgcagctgaggcactctgtcccgctgccgtttcagaagacctggcgttcgtctcggacgttttggccgccttcgcagaatttgcagccgccgtcgccgaggaagctgcgctactggcgcttgatgatgcgttcgtttctgatgattttgccgcctcttttgaagccgacgcatcccgggctgaggtggcagcttctgacgctttcgtggtcgcggtggatgcagaagtggctgctgattgttgtgacgctgccgcattcgtttctaacgttttcgccgcaccggcactggtag

SEQ ID NO: 489415 - DNA, 498 bp, Shigella sonnei
atgtcgccatcattacgcaaggctgttgcagctgctattggtggtggggctgttgctatagcatctgtgttaatcactggcccaggtggtaacgatggtctggaaggtgtcagctacatactatacaaagatatcattggtgtatggactgtatgtcacggacacaccggaaaagacatcatgcctggtaaaacgtataccgaagcagaatgcaaagctctcctgaataaagaccttgccactgtcgccagacaaattaacccgtacatcaaagtcgatataccggaaacaacgcgcggcgctctttactcgttcgtttacaacgtgggcgctggcaatttcagaacatcgacgcttcttcgcaaaataaaccagggctatatcaaaggcgcatgtgaccagctatgtcgctggacatatgctggcggtaagcaatggaaagggctgatgacccgtcgtgagattgagcgtgaagtctgtttgtgggggcagcaatga

SEQ ID NO: 489416 - DNA, 177 bp, Shigella sonnei; identical to SEQ ID NO: 487752

SEQ ID NO: 489417 - DNA, 279 bp, Shigella sonnei
atggcgaattaccgtcttatatcactggcgctgacacatgatccggtaaacacgtttggcattgatcgcaggcataccatcaagttctgcctgtctgcgaagcagcgcccatacccgacgataaccatacgtgggcagctctccgataacatggtgtatacggagaagcacatccgtatcatcagtgtgacgactgcggcggccatccatccagtcatcggttcgtctgagaatgacgtgcaactgcgcacgcgacacccggagacaacggctgactaa

SEQ ID NO: 489418 - DNA, 279 bp, Shigella sonnei; identical to SEQ ID NO: 463003

SEQ ID NO: 489419 - DNA, 366 bp, Shigella sonnei
atgctggaagcggccagagaggccagacgtcaggaaattgaagcatggcgcacagaacaggaggcgaagccgttcacgtttgaatggaacggtcgtatctggaatgctggccccaactcactgggccgcctgtccccggtagtcatgctggcaaaatctgtcacagcacaaacgcatatggcgtggggtgatgccgataatcagcaggtgaaactgtcgatgccggaactggaagaactggcggcagcaatggtgcaggcgcaggtcgatcgcaacgatgagatttatcgccgtcagcgtgaaatgaaagaggagctgagcagtctggatgatttggcttcaattcgggcgtttgacgttgagtaa

SEQ ID NO: 489420 - DNA, 132 bp, Shigella sonnei; identical to SEQ ID NO: 488245

SEQ ID NO: 489421 - DNA, 783 bp, Shigella sonnei; identical to SEQ ID NO: 468198

SEQ ID NO: 489422 - DNA, 1029 bp, Shigella sonnei; identical to SEQ ID NO: 28131

SEQ ID NO: 489423 - DNA, 444 bp, Shigella sonnei; identical to SEQ ID NO: 482956

SEQ ID NO: 489424 - DNA, 726 bp, Shigella sonnei
gtgcgggcggtggtggctgaaaagaacaactccttaatcccccgcatatcgccgtcaggggtggcaaaacaaagtccatgctataacgttgtgtcgcgtaagcgacgccgtttcctcaatcgctggattaaatcgctgacgacggtcgcagggcgtatcaaaatcaaaaacgaactccgccgccgtatccggcataaccgctattgggttaatgaggctaacaagtttggcatagaggctctttgcgaattgatgttagctattctggacgatctcgatttacgctcgtgggaaaccaggcataaccttgaaacgcttgccgaacgtgccggactggttacacgcagcgatgcgggacataaatccatttctcgcgccagtcgtggttgtgatcgcctggtttggttgaatgccatcattacagagaaggctccgtttaacccgtatgatgcacggtgtgcctgtaaacacattgaagtaaccgaggatttctttgccatccttggcattccgttaaaactggtttatcgggaacgtgccaggctgttaaaggcagatcctgatgaagtgatttactccggtgatgccagacttatagctatcagagttcagaactggacgcggaaagcggcagccggattagccaggatgaaagcaaaacgcgacgcagctcgacaacgcaaaaaagaatattacgcacattcacctacccccattccggcctga

SEQ ID NO: 489425 - DNA, 366 bp, Shigella sonnei; identical to SEQ ID NO: 19507

SEQ ID NO: 489426 - DNA, 480 bp, Shigella sonnei
atgggggcttgtgtccgtaaggtgacgcttatgaatgcatggtatcttctatattgtaataacaacgatttagaccgcattgcatatcgttgtaaaactatgaacgttgtggctttctgtccgagatacataaagatcacacctcggaaagattgcaacgcagtacgcaaggaagaaaaagttttatttcctaactacctcttcctccattttgatgtgaatgtcacgcacacatcagcaataacctctattccaggtgcaattggcttcgtaagtttcggttccacaatatgtactgtaccggaaaaagtcgttatcgctattaaatgcgccaagatactggcgctaaatcctgatgatgattccatagagtgccgtaacatcggtagtgacctactggcagaaattcaacgcatatcttcaatcatctcaccgttagaacgtcaaacggccttctccaggcttttacagaatcagtaa

SEQ ID NO: 489427 - DNA, 213 bp, Shigella sonnei; identical to SEQ ID NO: 19505

SEQ ID NO: 489428 - DNA, 207 bp, Shigella sonnei; identical to SEQ ID NO: 19504

SEQ ID NO: 489429 - DNA, 705 bp, Shigella sonnei; identical to SEQ ID NO: 19503

SEQ ID NO: 489430 - DNA, 297 bp, Shigella sonnei; identical to SEQ ID NO: 19502

SEQ ID NO: 489431 - DNA, 2745 bp, Shigella sonnei
atggcaaagctgcttaaggcgatgaaacgtccggcggcgctgtggggggtgccaatggtgcccctgctgactgtcgtgggcgtgacaattattgttgctatctggacttccatagccctacttctcttcctccctattgagtttctggttatgaaatcactaaccagaaatgaacctctgagatttaacctgatagctgtctggctaagggtaaggggtaatccggtagcaaaccgtttatttggcgcaaccgcatttatgcctgttgaacataatgctgttgatatccaggagtttattgatgcgatgaagctaaaccaatgtgccaccataaaaaaatacattccttactcgtcacatattcaccctaatgttgtccgttcactgaatagcgattttttctgtacctgggaactgacaggaacgccgtttgattgtgaatctgacgagacactacagttcggtacaaaccagttgcacgggctaatacgctcatttgaaggctttccggttacattttatgtacataacagccgtgaacagtttacggactcactgcataaggtttcaggaaacccttacgcggataccgtgagcgaacgctattacgcatcactgaataaaaggccattccgacgtaaccgcctgtttgtgaccatctgctatcgtccgtttgccagtctggataaggcaaaccgtaaacgtatgaaagacggtcagaagctaaaagagatagacagcgcattacttgaagtgctggaaatcaaaagtacgctggatacagccttatcccgttatggtgctcacgcgctcggtactttcaccgaaaacgaggctgtattctcgtcccaactggcattttatgaataccttctcacgcatcaatggcgaaaagtcagagttacacgtacccccgcttacaacgtaatgggaaatgttgcgctgtacttctccgccgaatcagggcaaataaatcatgttaatggcactcaatatttccgtggtctggaggttaaagagttttcggaagaaaccgcaacgggcatgacagactccttactgtacgcgccgtgcgattatgtgattacacaatcctatacctgcatgtcccgtgaggaagcgaaaaaggcgattaagcgcacccgacggctgatgatgagtgctgatgatgatgctgtatctcaacgtttggatctcgatgtggcgcttgacctgctcacctccggtaaaatcgcctacggtaaacatcatttatcaattatggtgttttcgccgtcactggaaagtctgattgcagacacaaacgagatcagcaatgcactcaacaatatagggataacccctgttcctgctgaaatctcattgtctgcggcctatatggctcaattaccaggcaattacaatctgcggccacgagcgggagagttgagtagcctgaactttgttgaactggcatcacttcataatttctatccaggaaaacgcgacaaagccccgtggggtgacgcgatggctctggtgcgaaccccgtcaggtgatggctactatctgaatctgcataacactctggcagataaagacgagttcaacgaaaaaaatcctgcaagtacctgcattctgggtacaaacggctcaggtaaaacaatgctgatgacgtttttacaaatcaatcagcaaaaatataaccgtgatgacagcttttcaccggatgccaggactaaacgactaaccacagtttacctcgataaagaccgtggtgctgaaatcaacattcgcgcacttggaggaaagtactacagggtattcagcggtgagccaacaggctggaatccgtttgctctgccagccactaagcgaaacatcaatttcattaagcaactgatgaaaatcctttgtacccgcaacggtgcaaccataacgccacgtgatgaacgtcgcctcaatgatgctgtaaatgccgtcatgagtgacgagcctcaatatcgcgtctacggcataacccgaatgctggagaacctaccggaaccggcaacgcgtgaagcgcaagaaaatggcctgagtatccgtctttcacagtgggcgcgcggtggtgaatttggttgggtgtttgataacgaacacgacactttcgatatcagcaactgcgataatttcggaattgacgggactgaatttctggatgacccgaatgtctgcgcccctatctcgttttatctgctgtaccggataaccagcctgctggatggcagacgacttgttattttcatggatgaattctggaagtggttacgcgaccctgtatttaaggattttgcgtataacaagctgaaaactatccgaaaactgaacggtatgctggttgttggcacgcaatctccagcggaaataatcaaggatgagatagctccggcagttattgagcaatgtggtactcaaatactggccgccaacccaagcgcagatcgttctcattacgtggatggaatgaaatttgaaccagaagtgtttgatgtcattaaaggacttgatccacaggcgcgacagtatgtcgttgtcaaaaatcagttccgccgtggagatacaaaacgctttgcagcccgtatcacgctggatctgtctggtatcggcagatacacaaaagtaatgagcggcgacgcacctaacctggaaatattcgaatcactctatcaggagggaatgaagcccagcgactggctggattcctacctagctaaagcactataa

SEQ ID NO: 489432 - DNA, 705 bp, Shigella sonnei; identical to SEQ ID NO: 19500

SEQ ID NO: 489433 - DNA, 228 bp, Shigella sonnei; identical to SEQ ID NO: 19499

SEQ ID NO: 489434 - DNA, 1068 bp, Shigella sonnei; identical to SEQ ID NO: 19498

SEQ ID NO: 489435 - DNA, 144 bp, Shigella sonnei; identical to SEQ ID NO: 19497

SEQ ID NO: 489436 - DNA, 684 bp, Shigella sonnei; identical to SEQ ID NO: 19496

SEQ ID NO: 489437 - DNA, 906 bp, Shigella sonnei; identical to SEQ ID NO: 19495

SEQ ID NO: 489438 - DNA, 1266 bp, Shigella sonnei
atgactgacgaaaataaatccccctctacggaagaagaaaagccagtgatgacatctgatcaggatgatatcgccacgctggaacgagaagccagagcaaaacgtgaggctgaattacaagcatcacaggacgatgaaaaggagaactcattacaaccagcagtaaacaaactgaaaaaacgtcagaaggggaaagcagcggcctttctggcaatatgcgcagtagccctgattggcctgacatggggcggtaactgggtatatcaaaacttcctgaagcaagaaaatggagagaaaacaaaggaggttacaccacctaaaaaaacgaatgactaccggaaacgaaccgatttaggcatggccaccaatgagccggaaaattcgactgagggtgagcaagctgttagccaggataacacgggcaatgtatccggtactgccggacagatgaaaacatttgagccaccacaactgaataaggccagcttccttgttcgtcgtaataatacggccagcccccaaaatcaggtaaaaacaagacaacaggaaatgatactggctgcggaaaacaacgccacacagcctacagacagtacagcaaccacaacacaacatggcactgcatcacaggcaatttcccccgcaacagtgcgaagaatcccctacaaccctgatttgtacataccggaaaacacagtcattccatgctctatggattaccgctttgtttccgatcgcgctggaaaaatacgatgtacggtagctaaagatatctggagtgccagcggcaatacaaaacttatcgagaagggaaccacagcaacaggaatataccagacaggaattacgcaagggcaggggcgcgcttttatcatgatgacaaaattacgcacccgacagcgaccatatctggatattccgctgattgataccaacgccgctggcgagcttggagaatcaggtgttgatggatggattgatacccacttctgggagagatttggcggcgcattaatggtcggcatgatcccagatattggcgcatgggcatcaaacaatgcgggtaaaaaagaccgcaatacagactatacagagaacagccgccaggctatggcggatatggctcgaaccacgctggaaaacagtatcaatatcccccctacgctctacaaaaaccagggcgaaattatcaacctgattacagggcaggatattgacttttcaaatatctacacgctgaggctgaaaaatgaactgcaaagataa

SEQ ID NO: 489439 - DNA, 192 bp, Shigella sonnei; identical to SEQ ID NO: 19494

SEQ ID NO: 489440 - DNA, 1026 bp, Shigella sonnei
atgaccgctaagaatatttccctggaccgctataaacagcgattttttggtgactttctggaattaccaggactgacagaaatagctgttaatcgtccaggtgaactctggacaaagatagatggtgtctgggggcaacataccgttgatctgaaatttgacgattgctataactttgctcggtgtcttgcaaaacaccataacgataatatcgaggatatcaaaccaggactttctgcaaccctggaatcaggagaacgatgtcaggttgtcgtacctccggcgtgcgaacgtgacacgatctcaatcacgatccgtaaaccgtcaaaaattcaaattccgcatcaggcatatattgatagcggtttttataaccgcgtcacaggcattgaaaaagcatccacacataacgaagaattgattgaattatacaaatcaaaaaacattcctttgtttatggaaaaatgtgtggagtatggaaaaacattagccgtcgcaggtgaaaccagtacgggtaaaacaacatacatgaaaatgttgatacaatatatacccgtccatttacgcataacgacgatagaagacaacccagagataatattctacaaacataagaactatgttcatctgttttatccttctgagtcatccgatgaaaaaggttctgttgtaacaccagcggcgcttatacgctggaattaccggatgaatccagacagaattttattaacagaagtgaggggtggagaggcatgggattttctgaaaataacggggtcaggccatgaaggaagtatgacctccattcatgctggttcagcccatgaagcaatcgacggttttattacccgctgtactgaaaacccacagtgtgcgcaattaccatattcattcttgctacgtaaagttctcgactctctggatgttgttgtgagcattgatttagatggaaacgtacgccgtatgaatgatatttatttccgaccgttacaccgcaatcaatattacgaggaaatgaaagtatga

SEQ ID NO: 489441 - DNA, 399 bp, Shigella sonnei; identical to SEQ ID NO: 19493

SEQ ID NO: 489442 - DNA, 216 bp, Shigella sonnei
atgaatacagatgaaaacatggtattttatctgacaaactccgatcttgtttatagctatgcacacaagatagtgtgttccattccatcaggaatgaaagggaatttcattacttctatcggcgaaacgcttgaagatttaaagaaacgatatcctgatattattctcattacagaatcggaagcattagcattgcaatcgaagagggaaaattaa

SEQ ID NO: 489443 - DNA, 306 bp, Shigella sonnei; identical to SEQ ID NO: 19491

SEQ ID NO: 489444 - DNA, 1728 bp, Shigella sonnei; identical to SEQ ID NO: 19490

SEQ ID NO: 489445 - DNA, 735 bp, Shigella sonnei; identical to SEQ ID NO: 19489

SEQ ID NO: 489446 - DNA, 465 bp, Shigella sonnei
atgaaaatattaatcatattcgcattatatatcttgtcgccttcactatatgccaatgcagcggatatacagggaaaagttattcgtgtacttgacggcgataccatcgaaattttacagaataaaacgccagtaaggattcgtctggccaatattgatgcaccggaaaagaaacaggcttacggacgctggtcaactgaccaacttaaaagcctgattgccggacaattcgtcagggtgacatattcacacaacgaccgttacggtcgcattatcggacgtgtattcacaacaggcggtagtgaggctaaccgctttatggtgcaatcgggtgctgcatgggtgtatgagcattacaacacagataacgctctggcagatctacaacaggaagctcgctcacaaaaacgaggtttgtgggctgaccccaatcccgttccaccgtgggaatggcgacataaatag

SEQ ID NO: 489447 - DNA, 516 bp, Shigella sonnei; identical to SEQ ID NO: 19487

SEQ ID NO: 489448 - DNA, 264 bp, Shigella sonnei; identical to SEQ ID NO: 19486

SEQ ID NO: 489449 - DNA, 234 bp, Shigella sonnei; identical to SEQ ID NO: 19485

SEQ ID NO: 489450 - DNA, 648 bp, Shigella sonnei; identical to SEQ ID NO: 75842

SEQ ID NO: 489451 - DNA, 351 bp, Shigella sonnei; identical to SEQ ID NO: 19483

SEQ ID NO: 489452 - DNA, 300 bp, Shigella sonnei; identical to SEQ ID NO: 19482

SEQ ID NO: 489453 - DNA, 246 bp, Shigella sonnei; identical to SEQ ID NO: 19481

SEQ ID NO: 489454 - DNA, 270 bp, Shigella sonnei; identical to SEQ ID NO: 19480

SEQ ID NO: 489455 - DNA, 543 bp, Shigella sonnei; identical to SEQ ID NO: 19479

SEQ ID NO: 489456 - DNA, 534 bp, Shigella sonnei
atgaatatccaagaagcattaaatatttttggcttgtctggccagttgactgaaaaagacatcaaaaacgcctttaagaaagctgcattaaaatatcacccagaccgtaatccggtaggtgctgaaatgatgaaggcggttaattcagcattcgattttttaatggcgaatcttgataagattaatcagtaccaaagtcctgaacaaagtgcaatatataactatggtgatgaactagaaaatgttttaaaggctctttacggtttgtctggtttagtttatgaggttattggtaactggatctggattagtggaaatactatcgagtacaaagaagcattaaaagaaatagggtgtaaatgggcggcaaagaaaaaacaatggttttatcgtccagaagaacataaaagttactggaaccgtgaagagcacacgatagaggaaatccgcgcaaaatatggcacaagcggaaaattccaggccggaggatggcaacaagttgaaggcagggcaagagttgaagccagagcataa

SEQ ID NO: 489457 - DNA, 138 bp, Shigella sonnei; identical to SEQ ID NO: 75849

SEQ ID NO: 489458 - DNA, 300 bp, Shigella sonnei
atggctcgcttaccttatattgaatcaaccacgcaacagatttttatttttaatactttgacactttgtactattggattaattcatatagagactgatgaaaaatatattgtagtatttacagataacaataagattagagattataaaaatggtgtaatagaagaattaggggaaattacgcaagaagatattgaactgattgagtattatgctaaaaaatatgaaaagtattttgatgatttaaaaataggtgaggagcctttgaatcttaaagaatatatagaatgtatgcaatag

SEQ ID NO: 489459 - DNA, 273 bp, Shigella sonnei
atgagtgcatttatttttagaaccacatttaaagcaactggcgatcagcaaaaagacgctattacccaaattgaagttatgcaggaacaagcagtaaaagcctttgtttcctggatgaccaaccaggagggtacagaatttttaagcactttgcaggaaatcacaacagaacttgacgcactgattgatgcggtagagtcccattcccctattttcagaaagaaagcgactgaactggaagcgcttttagcccattacaaaacgttgctgtaa

SEQ ID NO: 489460 - DNA, 267 bp, Shigella sonnei
atggcgacgctggggcgtcttatgagcctgctgtcaccctttgacgtggtgatatggatgacggatggctggccgctgtatgaatcccgcctgaagggaaagctgcacgtaatcagcaagcgatatacgcagcgaattgagcggcataacctgaatctgaggcagcacctggcacggctgggacggaagtcgctgtcgttctcaaaatcggtggagctgcatgacaaagtcatcgggcattatctgaacataaaacaccatcaataa

SEQ ID NO: 489461 - DNA, 234 bp, Shigella sonnei; identical to SEQ ID NO: 488405

SEQ ID NO: 489462 - DNA, 267 bp, Shigella sonnei; identical to SEQ ID NO: 11114

SEQ ID NO: 489463 - DNA, 267 bp, Shigella sonnei; identical to SEQ ID NO: 487623

SEQ ID NO: 489464 - DNA, 240 bp, Shigella sonnei
atggctggtttaaggaataacaacaacacacagaatgcacagtgggctgattatgtgggtgacattcttcggggggctcagccgataaaccagctagtacctcagcacccttatcttaacgacgtcccactcattgatgagttaaggcatcagaacactcatcatgttattctcttgacacttgatgttgcaaaaaaaaaaaaaaaaaaaaaaaatactcagcccaataacatcatttga

SEQ ID NO: 489465 - DNA, 348 bp, Shigella sonnei; identical to SEQ ID NO: 485869

SEQ ID NO: 489466 - DNA, 1215 bp, Shigella sonnei; identical to SEQ ID NO: 485225

SEQ ID NO: 489467 - DNA, 267 bp, Shigella sonnei; identical to SEQ ID NO: 11114

SEQ ID NO: 489468 - DNA, 267 bp, Shigella sonnei
atggcgacgctggggcgtcttatgagcctgctgtcaccctttgacgtggtgatatggataacggatggctggccgctgtatgaatcccgcctgaagggaaagctgcacgtaatcagcaagcgatatacgcagcgaattgagcggcataacctgaatctgaggcagcacctggcacggctgggacggaagtcgctgtcgttctcaaaatcggtggagctgcatgacaaagtcatcgggcattatctgaacataaaacaccatcaataa

SEQ ID NO: 489469 - DNA, 267 bp, Shigella sonnei; identical to SEQ ID NO: 11114

SEQ ID NO: 489470 - DNA, 267 bp, Shigella sonnei; identical to SEQ ID NO: 11114

SEQ ID NO: 489471 - DNA, 960 bp, Shigella sonnei; identical to SEQ ID NO: 485466

SEQ ID NO: 489472 - DNA, 267 bp, Shigella sonnei; identical to SEQ ID NO: 11114

SEQ ID NO: 489473 - DNA, 267 bp, Shigella sonnei; identical to SEQ ID NO: 11114

SEQ ID NO: 489474 - DNA, 369 bp, Shigella sonnei; identical to SEQ ID NO: 485529

SEQ ID NO: 489475 - DNA, 393 bp, Shigella sonnei; identical to SEQ ID NO: 381712

SEQ ID NO: 489476 - DNA, 267 bp, Shigella sonnei
atggcgacgctggggcgtcttatgagcctgctgtcaccctttgacgtggtgatatggatgacggatggctggccgctgtatgaatcccgcctgaagggaaagctgcacgtaatcagcaagcgatatacgcagcgaattaagcggcataacctgaatctgaggcagcacctggcacggctgggacggaagtcgctgtcgttctcaaaatcggtggagctgcatgacaaagtcatcgggcattatctgaacataaaacactatcaataa

SEQ ID NO: 489477 - DNA, 390 bp, Shigella sonnei; identical to SEQ ID NO: 485650

SEQ ID NO: 489478 - DNA, 1335 bp, Shigella sonnei; identical to SEQ ID NO: 486094

SEQ ID NO: 489479 - DNA, 267 bp, Shigella sonnei
atggcgacgctggggcgtcttatgagcctgctgtcaccctttgacgtggtgatatggatgacggatggctggccgctgtatgaatcccgcctgaagggaaagctgcacgtaatcagcaagcgatatacgcagcgaattgagcggcataacctgaatttgaggcagcacctgacacggctgggacggaagtcgctgtcgttctcaaaatcggtggagctgcatgacaaagtcatcgggcattatctgaacataaaacactatcaataa

SEQ ID NO: 489480 - DNA, 2214 bp, Shigella sonnei; identical to SEQ ID NO: 485713

SEQ ID NO: 489481 - DNA, 267 bp, Shigella sonnei; identical to SEQ ID NO: 488690

SEQ ID NO: 489482 - DNA, 504 bp, Shigella sonnei
atgccgggcaactgcacgcattatgggcgttggcctcaacacgattttacgtcacttaaaaaactcaggccgcagtcggtaacctcgcgcatacagccgggcagtgacgtcatcgtctgcgcggaaatggacgaacagtggggctatgtcggggctaaatcgcgccagcgctggctgttttacgcgtatgacagtctccggaagacggttgttgcgcacgtattcggtgaacgcactatggcgacgctggggcgtcttatgagcctgctgtcaccctttgacgtggtgatatggatgacggatggctggccgctgtatgaatcccgcctgaagggaaagctgcacgtaatcagcaagcgatatacgcagcgaattgagcggcataacctgaatctgaggcagcacctggcacggctgggacggaagtcgctgtcgttctcaaaatcggtggagctgcatgacaaagtcatcgggcattatctgaacataaaatactatcaataa

SEQ ID NO: 489483 - DNA, 504 bp, Shigella sonnei; identical to SEQ ID NO: 487594

SEQ ID NO: 489484 - DNA, 504 bp, Shigella sonnei; identical to SEQ ID NO: 487594

SEQ ID NO: 489485 - DNA, 267 bp, Shigella sonnei; identical to SEQ ID NO: 11114

SEQ ID NO: 489486 - DNA, 267 bp, Shigella sonnei; identical to SEQ ID NO: 11114

SEQ ID NO: 489487 - DNA, 1725 bp, Shigella sonnei; identical to SEQ ID NO: 381714

SEQ ID NO: 489488 - DNA, 633 bp, Shigella sonnei; identical to SEQ ID NO: 488137

SEQ ID NO: 489489 - DNA, 267 bp, Shigella sonnei; identical to SEQ ID NO: 489460

SEQ ID NO: 489490 - DNA, 267 bp, Shigella sonnei; identical to SEQ ID NO: 11114

SEQ ID NO: 489491 - DNA, 267 bp, Shigella sonnei; identical to SEQ ID NO: 11114

SEQ ID NO: 489492 - DNA, 267 bp, Shigella sonnei; identical to SEQ ID NO: 11114

SEQ ID NO: 489493 - DNA, 246 bp, Shigella sonnei; identical to SEQ ID NO: 486098

SEQ ID NO: 489494 - DNA, 267 bp, Shigella sonnei; identical to SEQ ID NO: 11114

SEQ ID NO: 489495 - DNA, 267 bp, Shigella sonnei; identical to SEQ ID NO: 11114

SEQ ID NO: 489496 - DNA, 267 bp, Shigella sonnei; identical to SEQ ID NO: 11114

SEQ ID NO: 489497 - DNA, 267 bp, Shigella sonnei; identical to SEQ ID NO: 11114

SEQ ID NO: 489498 - DNA, 378 bp, Shigella sonnei; identical to SEQ ID NO: 476066

SEQ ID NO: 489499 - DNA, 267 bp, Shigella sonnei; identical to SEQ ID NO: 11114

SEQ ID NO: 489500 - DNA, 267 bp, Shigella sonnei; identical to SEQ ID NO: 487623

SEQ ID NO: 489501 - DNA, 435 bp, Shigella sonnei; identical to SEQ ID NO: 484502

SEQ ID NO: 489502 - DNA, 378 bp, Shigella sonnei; identical to SEQ ID NO: 476066

SEQ ID NO: 489503 - DNA, 378 bp, Shigella sonnei; identical to SEQ ID NO: 489368

SEQ ID NO: 489504 - DNA, 267 bp, Shigella sonnei; identical to SEQ ID NO: 11114

SEQ ID NO: 489505 - DNA, 738 bp, Shigella sonnei; identical to SEQ ID NO: 487141

SEQ ID NO: 489506 - DNA, 378 bp, Shigella sonnei; identical to SEQ ID NO: 476066

SEQ ID NO: 489507 - DNA, 327 bp, Shigella sonnei; identical to SEQ ID NO: 486130

SEQ ID NO: 489508 - DNA, 2952 bp, Shigella sonnei; identical to SEQ ID NO: 486379

SEQ ID NO: 489509 - DNA, 390 bp, Shigella sonnei; identical to SEQ ID NO: 485650

SEQ ID NO: 489510 - DNA, 267 bp, Shigella sonnei; identical to SEQ ID NO: 489479

SEQ ID NO: 489511 - DNA, 378 bp, Shigella sonnei; identical to SEQ ID NO: 476066

SEQ ID NO: 489512 - DNA, 528 bp, Shigella sonnei; identical to SEQ ID NO: 485392

SEQ ID NO: 489513 - DNA, 267 bp, Shigella sonnei; identical to SEQ ID NO: 487831

SEQ ID NO: 489514 - DNA, 267 bp, Shigella sonnei; identical to SEQ ID NO: 487831

SEQ ID NO: 489515 - DNA, 267 bp, Shigella sonnei; identical to SEQ ID NO: 11114

SEQ ID NO: 489516 - DNA, 267 bp, Shigella sonnei; identical to SEQ ID NO: 11114

SEQ ID NO: 489517 - DNA, 513 bp, Shigella sonnei; identical to SEQ ID NO: 485852

SEQ ID NO: 489518 - DNA, 477 bp, Shigella sonnei; identical to SEQ ID NO: 485853

SEQ ID NO: 489519 - DNA, 642 bp, Shigella sonnei; identical to SEQ ID NO: 486151

SEQ ID NO: 489520 - DNA, 528 bp, Shigella sonnei
atggcttcgtacgcttttgaggattatgcccgcagcgcagcgagtaaaaagcagtgcccttgttgctatggggaaaaatttattgaaagcgaggtttttacaaacaagatccagtatccggatggtaagccgccggtatgggcaaagtgtacgaaaggtgtgtatccgtcttactgggaagaatggaaaaaagtcagggaggtggtaaaagttgcctgtccggagtgtggcggaaagggtgaggtttccaccgcctgtaaggattgccgtgggcgtggtgtcgccattcatcgtgaagagtcggtaaaacgtggtatgcctgttatcagagactgccagcgttgtggtggtcgtggctatgaaagactaccatcaacggaggcatttaatgctatatgcgaggtgacaaaccagataacacgcgcgtcatgggaaaaaacagttaagaaattttatgatgcgctggtgacccggtttgatattgaagaagcatgggctgagcggcagttaaaaaaggtaactaggtaa

SEQ ID NO: 489521 - DNA, 303 bp, Shigella sonnei; identical to SEQ ID NO: 484410

SEQ ID NO: 489522 - DNA, 267 bp, Shigella sonnei; identical to SEQ ID NO: 11114

SEQ ID NO: 489523 - DNA, 189 bp, Shigella sonnei
atgttcggcataattatatctgtcatcgtattaattacgatgggctatttgatcctgaaaaactacaaacctcaggtggtgctggctgccgcaggtgtcttcctgatgatgtgcggagtctggttagggttcggtggtgtactcgatcccgccaaaagcagcggctacttgatcgtcgatcatttataa

SEQ ID NO: 489524 - DNA, 255 bp, Shigella sonnei; identical to SEQ ID NO: 79134

SEQ ID NO: 489525 - DNA, 909 bp, Shigella sonnei
atgtcactattacctgaatatgaagatgcagaagtatccacaaagtctctctatgaaatatccttaaagcatcagatagagaagcttctattttttcgtgaaaaattcgttacatcactaaacagacctcgacacacaaactatgtagaacctgactgcgaatatttttttgattctgtcataaataattcagcagcactagcagaatactatctcccttatatcatctattctatcattggtacgacactcacccccccacaaagaccatggtttagtaagtttaaaaataagtgcggtgaagatggttatcagaaagcaaaatcagcactattttcaaaatatgagatcggtattcttatcaaatctaccagcattgataatgaaatttatttaaaaaaatgccatgatttatttgataagtctatagagactataattgaaggaaaatatgatattgttttcactttaaacaactatataaaacacaactcaatgactttttgttacgcccctttatcaaacactagcgatgataaatgcaaaagtaatcttttccttagcttcacaaaagatcaatgttttatgcttgaagattcaatacttaaaacattgatttcaagtgatttaaatgaaaccaacaacactggtgagataattgatataaatggaatgaaattcacaaacaaaggaagcataggggcagccaaattattagaaaataacaatataacatatattaaatgtaatgagtttactggaatcatggcagaaaatttgttagaacttattgatgacatgataagaactattgtgaataatgtaatttcaaatgccaaaggacaaactaccacttctgaaacatataaaaaatatttagacattattgaaacaagacaaacagcataa

SEQ ID NO: 489526 - DNA, 360 bp, Shigella sonnei
atggcgtcctgggcaacccgtacgcctgctatccgcgatattctctctgtctcgatcgctgaaatgggcggtgttctctttggtctgtcgatcggttcgatgagcggtattctctgctcggcgtggttagtgaaacgctttgggacacgtaatgtcatcctggtcacgatgtcctgcgcattgatcgggatgatgatattaagtctggcactctggctgacatcgcccctgctctttgccgttggtctcggcgtctttggggcaagttttggttctgcggaagtggcgataaacgttgaaggtgccgccgttgagcgagaaatgaataaaacggttttgccgatgatgcacggtttttaa

SEQ ID NO: 489527 - DNA, 285 bp, Shigella sonnei; identical to SEQ ID NO: 482225

SEQ ID NO: 489528 - DNA, 303 bp, Shigella sonnei
atgacggtcagatattatatcagttctgctgatttaaccgcagagaagttcgccacagcaatccgaaaccactggcacgtggagaataagctgcattggcgtctggacgtggtaatgaatgaagacgactgcaaaataagaagaggaaatgcagcagaattattttcagggatacggcacatcgctattaatattttgacgaatgataaggtattcaaggcagggttaagacgtaagatgcgaaaagcagctatggacagaaactatctggcgtcagtccttgcggggagcgggctttcgtaa

SEQ ID NO: 489529 - DNA, 180 bp, Shigella sonnei
atgatcaccaagggccagaaggtcaatgagatctcagaacagctcaatctcagtccgaaaacggtgaacagctaccgctatcgtatgttcagtaaactaaacattcatggcgatgttgagctgactcacctggcaattcgccatggtctgtgtaatgcggagacattatcaagtcagtga

SEQ ID NO: 489530 - DNA, 444 bp, Shigella sonnei; identical to SEQ ID NO: 488990

SEQ ID NO: 489531 - DNA, 657 bp, Shigella sonnei; identical to SEQ ID NO: 486144

SEQ ID NO: 489532 - DNA, 282 bp, Shigella sonnei; identical to SEQ ID NO: 485308

SEQ ID NO: 489533 - DNA, 270 bp, Shigella sonnei
atgcatctgttcgaaacgatggggcagattcaggccaaaatcccaaccgaggtgctggtcaccgatcgccgcgaatttgaactggctgaagagggttttatcacccttaccatgcgtaaagactctgataatgcagcctttttctctgcaaactcggtacaaaaaccgaagcactttccgggaaaagatgcagaaaccaactataagctgggtacgcagcttccttatctcttcatcatcaatcggttagcgcactatgaggtagcctga

SEQ ID NO: 489534 - DNA, 942 bp, Shigella sonnei
gtgggggagtctgtacgtgtcgacaatatgtctttgtatggatatacacgctctacgacaccgcaagttgaagcacaaagaaaacagatcaaactgtttaatcaatcaataagcggcgcaccttacactgcgctgtcggttcccctttctttaactgctgattctgttttgagtcatgacattcataattaccccgacaacattattaatatggctaatcaagcaggatttcagactttctggctaagctcgcaatccgcttttcggcagaatggtacagcagttaccagtatcgccatgcgcgccatggaaacagtttatgtcagaggatttgatgaattgttgttgccgcatttatcgcaagcattacagcaaaatacgcagcaaaagaaactgattgttcttcatttaaatggaagccatgaaccggcttgtagcgcctatccgcaatccagcgccgtgtttcaaccgcaggacgatcaggatgcctgctatgacaactccattcattacacagatagtttgctaggtcaggtttttgaattattaaaagatcgccgcgcctcggtcatgtattttgccgaccacggcctggaacgtgaccctacgaagaagaacgtctattttcatggaggcagggaggctagccagcaggcatatcatgtcccgatgtttatctggtatagccccgttcttggggatggcgtggatcgtacaacggaaaacaacatcttttcgacagcttacaataattaccttattaatgcgtggatgggggtaacaaagccggaacaaccgaaaacgctggaggaagtgattgcacactataaaggagactcacgggttgtggatgcaaaccatgatgttttcgattatgtgatgctcagaaaggagtttacagaggataagcaaggtaaccccacccctgaagggcagggttga

SEQ ID NO: 489535 - DNA, 1551 bp, Shigella sonnei
gtgagcttcctgctccgtctgaccgtaacagcggatgacggcagtgagcggctggtcagcacggcccggacgacggaaaccacttaccgcttcacacaactggcgctggggaactacaggctgacagtccgggcagtaaatgcgtgggggcagcagggcgatccggcgtcggtatcgttccggattgccgcaccggcagcgctgtcgcggattgagctgacgccgggctattttcagataaccgccacgccgcatcttgcggtttatgatccgacggtacagtttgagttctggttctcggaaaagcggattgcggatatcaggcaggttgaaaccacagcacgctatcttggcacggcgctgtactggatagccgccagtatcaatatcaaaccgggccatgattattacttttatatccgcagtgtgaacaccgttggcaaatcggcattcgtggaggctgttggtcagccgagtgatgatgcatccggttatctggattttttcaaaggcgagatagggaaaacccatctggctcaggagctgtggacgcagattgataacggtcagcttgcgcctgacctggctgaaatcaggacgtccattacggatgtcagcaatgaaatcacgcagaccgtcaataagaaactggaagaccagagtgcggcaattcagcagatacagaaggttcaggttgatacaaataataacctgaacagcatgtgggctgtgaagctgcagcagatgcaggacggacgcctttatatcgcgggtattggtgccggtattgagaacacccctgacggcatgcagagtcaggtgctgctggcggcggacaggattgcgatggttaatcctgcgaatggcaacacaaaaccgatgtttgttggtcagggcgatcagatattcatgaacgacgtgttcctgaaacgcctgacggcccccaccattaccagcggtggaaatccatcggcattttccctgactccggacggaaagctgaccgctaaaaatgcggatatcagtggcagtgtgaatgcgaacgccgggacgctcaacaatgtcacggtaaatgaaaactgtacgattaagggcatgctggaggcgactcaggtcagaggtgacttcgttaaagctgtatccaaatcatttccgaaacaggctggtacgtggggtaacacggaaacaccaaacgggacggttacagtcaccataagcgatgatcataactttgaccgccagattattattccgcccattatttttaacggtatagcgtatgacgatccggggagcggaaataacccaggaggcacgcgatacacgggttatggttttgaagttcgcaaaaacggcgtattaatcgcatccagagaaactaaaggtgccattcccggtagttacagtgcagttattgatatgcctagtggtggtggtagcgtcactctggagtttaagattttccagaaaggcaatcagggggcaggcaatatcaccgactgtacggtgattgtgaccaaaaaagcggcttccggcatcagtattcgttga

SEQ ID NO: 489536 - DNA, 1209 bp, Shigella sonnei
atgacccgaagtggtggtgattttcagccccgaccgctgaaacgtctgttcacggccaaccagtgctggacatccttcctggatgcgggcggtctgcgcgatatcgaggttgaggctgtcacaaaaatgctggcctgcggcacgcggatactgggagtgaaggaatacaactgcgataaacctgagtgcccccacgtcagatacgtcactaactcatgcggcagccgtgcctgcccgtcctgcggaaaaaaggccacagacctgtggatagcgacacagctgaatcgtcttcctgactgcgactgggtacatctggtcttcaccctgccggacacgctgtggccggtgttcgaaagcaaccggtggctgctgaatgacgtgtgccgtctggcggtggagaatctgctgtatgccgcccggaaacgggggcaggaacccggtatcttctgcgccatccacacgtatggccgtcgtctcaactggcatccgcatgtacatgtgtctgtaacctgtggatgtctgaataagcatggtcagtggaaaaagctgagcttcctgaaagacgcgatgcgttcgcggtggatgtggaatatgcggcaacggcttctgaaagcgtggtcagaggggctggcgatgccggagtcgttgtcacatatcacgacggaatcacagtggagaagcctggtgctgaaagccggaggaaaatactggcatgtgtacatgtcgaaaaaaacggccggcgggaggaatacggcgcgctacctgggtcgttatctgaagaagccgccgatagcggcctcccggctggcacattacaacggaggggcgagcctgagcttccgttacctggaccacaaaacgggagaaacggcgacggaaacgctgacacagcgtgagctggtcgcgaggctgaaacagcacatcccggagaagttttttaagatggtgaggtacttcgggttccttgccaaccgggtgtgtggagagaagctgccgcaggtgtaccgtgctctggggatggataaaccggaaccagtggcgaaagtgtgctatgcacaaatggtgaaacagttcctgagtcgtgacccgttcgaatgcgtgctgtgtggcggccggatggtataccgccgggccattgcggggctgaatgtggaggggctgaagaaaaacgcgcgggatatcagtctgctgaggtatatgccggcctga

SEQ ID NO: 489537 - DNA, 366 bp, Shigella sonnei; identical to SEQ ID NO: 32776

SEQ ID NO: 489538 - DNA, 573 bp, Shigella sonnei; identical to SEQ ID NO: 488218

SEQ ID NO: 489539 - DNA, 675 bp, Shigella sonnei
gtggtaagaacgccggagggggaaagatatttcccctgcgtgaatatctccggtgagccggaggcgtatttccgtatgtcgccggaagactggctgcaggcagagatgcagggtgagattgtggcactggtccacagccaccccggtggtctgccctggctgagtgaggccgaccggcggctgcaggtgcagagtgatttgccgtggtggctggtctgccggggggcgattcacaagttccgctgtgtgccacatcttaccgggcggcgctttgagcacggggtgacggactgttacacgctgttccgggatgcttaccatctggcggggattgagatgccggattttcatcgtgaggatgactggtggcgtcacggtcagaatctctatctggataatctggaggccacgggtttttaccgtgtcccactgacagcggcgcagccgggcgatgtgctgctgtgctgttttggttcatcggtgccgaatcatgccgccatttactgtggtgacggcgagctgctgcaccatattcctgaacaactgagcaaacgagagaggtataccgacaaatggcagcgacgcacacactccctctggcgtcaccgggcatggcacgcatctgcctttacggggatttgcaacgatttggccgccgcatcgaccttcgtgtga

SEQ ID NO: 489540 - DNA, 600 bp, Shigella sonnei
atgtcgccggaggactggctgagtgcagaaatgcagggagagattgtggcgctggtccacagccaccccggtggtctgccctggctgagtgaggccgaccggcggctgcaggtgcagagtgatttgccgtggtggctggtctgccggggggcgattcataaattccgctgtgtgccgcatctcaccgggcggcgctttgagcacggggtgacggactgttacacgctgttccgggacgcttaccatctggcgggaattgagatgccggattttcatcgcggggatgactggtggcgtcacggccagaatctctatcttgacaatatggaggcaacgggtttttaccgtgtcccactgacagaggcgcagccgggcgatgtgctgctgtgctgttttggttcatcggtgccgaatcatgccgccatttactgtggtgacggcgagctgctgcaccatattcctgaacaactgagcaaacgagagaggtataccgacaaatggcagcgacgcacacactccctctggcgtcaccgggcatggcacgcatctgcctttacggggatttacaacgatttggccgccgcatcgaccttcgtgtga

SEQ ID NO: 489541 - DNA, 549 bp, Shigella sonnei
gtgaaaacgggggctgaagccatccgggcgctggccacacagcttccgtcgtttcgccagaaactgaatgagggctggtatcaggtgcgcatttccgggcgtgatgcaggcgaaaatgaattatctgcccgtcttaatgaaccgctggcaaatggtgccgtgatccacgtcgttccgcgtctggcgggtgccaaaagtggcggtgtgtttcaggcggtgctgggtgcggcgctgattgcggtggcatggtggaaccctgttggctggctgggggccgcggctgtatcgggtatgtatgcagcaggggccagtatgatcctgggtggtgtggcgcagatgctggcaccgaaagccaggacgcccacggcagccagtacagataacggcaaacagaacacctatttttcttcactggataatatggttgcccagggcaatgttctgcccgttctgtacggtgaaatgcgcgtgggatcacgtgtggtatctcaggagatcagcacagcagatgaaggtgatggtggtcaggttgtggtgattggtcgctga

SEQ ID NO: 489542 - DNA, 444 bp, Shigella sonnei
gtgaaataccgttatgagtttacggacacgctggggctgattacgtcattcagttatgccaacgctgaagatgagcaaaaaacgcattacagcgatacccgctggcatgaggattccgtgcgtaatcgctggttcagcgtgatggcggggccgtctgtgcgcgtgaatgaatggttcagcgcgtatgcgatggcgggtatggcttacagccgtgtttcgactttctccggggattatctccgcgtaactgacaacaaggggaaaacgcacgacgtgctgaccggaagtgatgacggtcgccacagcaacacgtctctggcgtggggagctggcgtgcagtttaacccgaccgaatccgtggccattgatattgcttatgaaggctccggcagtggcgactggcgcactgacggtttcatcgtgggtgtcggttataagttctga

SEQ ID NO: 489543 - DNA, 471 bp, Shigella sonnei
gtgacgggcatattcaacgtggtagtcagggccaaccttcacggctttgtattccgtgtattcataaggctccagaggcagcggagagagtgctggtgcatccagcatgcggaagcgttctgcgcgggtttgattaccgtatcccttcattggtcggttattcatgtccgtcagcaactcccgaaggcgtgcattcagcgccctgagcgtgtggaaggtttcattacggatgcgggcaagaagccatcgctcgacgatgaggacgccgttttctgcttttggtttatctttaggtttgcgcgggcgggccgggataataaccgtgccatagtgctcagccagcgcctgataactgtcgttgatgacaggctcatagcgatcggcttttttcactgcgcttctgaggttatcggggatgagcagcttcggtacgccgcccaggaaggtcaggcaacggctgtgggcatttaa

SEQ ID NO: 489544 - DNA, 240 bp, Shigella sonnei
gtgaaggatacggaagcagaaaaactgttccggatccgggaggcggaagaaacaaaaaacagcctgatgcaggtagccagtgagcatatagcgccgcttcaggatgctgtggatctggagatcgcaacggagaaagaaaccttgttgctggaagcctggaaaaagtatcgggtgttgctgaaccgtgttgatacatcaactgcaccggatattgaatggccagtagcacctatagggtaa

SEQ ID NO: 489545 - DNA, 654 bp, Shigella sonnei
atggatagttatatcgcgattacactgtttggctgtttttttgtgctggtctttattggtgtgcccatttcgttctcaatcggtattgccactgtagcttcaatgcttttgatgtttccctgggatatcgcggcaatcactgtttcgcagcgactggctaatggactggataactttgccctattggcaatcccctttttcatctttgccggaacgctgatgaacagcggcggtattgcgatacgtttgattaacctcgcccaggtaatggttggtcgggttcctggttcacttggtcatgtgaacgtcctggcgaatatgatgtttggttccatttctggttcagccgttgcggcagctgctgccgttggtggcacactgaatcccattcagaccaaacaaggttatgatccggcattttctaccgctgtaaacgtctcatcttgtattactggattactgataccgccctcaaacgtgttaattgtgttttccctgacagctggcggcgtttctgtagcatcgctatttatggcgggatatttgccagggatcttaatgggtcttgcggtaggtaatgactccaacttattgatagtgttttatgttcagataatgcccgatgactttgtcatgcagctccaccgattttga

SEQ ID NO: 489546 - DNA, 426 bp, Shigella sonnei; identical to SEQ ID NO: 84903

SEQ ID NO: 489547 - DNA, 327 bp, Shigella sonnei; identical to SEQ ID NO: 485848

SEQ ID NO: 489548 - DNA, 177 bp, Shigella sonnei; identical to SEQ ID NO: 487752

SEQ ID NO: 489549 - DNA, 528 bp, Shigella sonnei; identical to SEQ ID NO: 33882

SEQ ID NO: 489550 - DNA, 303 bp, Shigella sonnei; identical to SEQ ID NO: 484410

SEQ ID NO: 489551 - DNA, 357 bp, Shigella sonnei
atggaagcgcacctcttcagtgctttccgtggcgatggcctccctgaaagaacggtactcacgcgcctcactgtccatccggaaaccactgtcacgtccgtaataagccgtcacaccgtccaccgggttctgaagcgtatgcccggcgggtttgtcgcaacggggaccgaggcaacggatatcaccgtgttcaaccagggcttcggcctgctgaccggtggcatagtgggtatgcaggatgcgaccgttccaggtcggctcaccgtgcaggtggcagtaaacggtacggaacaccccgtcgcggcaaaaaacggaaatcgtgctgctgactgtcatgaaaacgtctccttctgctga

SEQ ID NO: 489552 - DNA, 267 bp, Shigella sonnei
atgaggccatcaattatcttcgcaaccgccgagtatgtaaagcgtctgcgtgaagagtgcctgcgggagaataaacccctgcaccgccatacccgcttcagacgtcaggagctggcacaggatgagattaacccggacgtcctggcgatgagcggccatatcgccagacgctgcagtgagcagaagcgggtgcgtatccccgctatgaaagtcagcgaatggggccacctgctccgcgcgcttgaaattgagcgggtctgccactga

SEQ ID NO: 489553 - DNA, 162 bp, Shigella sonnei
atggctgcagatttttgtgacgctgccgcattcgtttctgacgttttcgcggcactggcactggtagctgccgcgctttttgaggactctgtagcagcagcacttttcgatgcttcactggcctttgttgatgccattcctgcgctggaagatgctgactga

SEQ ID NO: 489554 - DNA, 207 bp, Shigella sonnei; identical to SEQ ID NO: 488007

SEQ ID NO: 489555 - DNA, 195 bp, Shigella sonnei
atgggcgtcggaaatgagagtccctctgctccgccggagacaatgccggacatacagacacgggaactggttatgttgatcaagcgactagcatcatcgctgaaagcggtgaaacccgacagtagcgtggtgcgtgaagcgcaggactggctgtgcgacagaaaacttgtggatatcacagatattctccggtga

SEQ ID NO: 489556 - DNA, 282 bp, Shigella sonnei
gtggcattcagcggcgctaaacatgagcgggagaataacgatatttattcgtcatgccgcctgatagtacggaaaaacggtgctgaaatttataaccgtaccgcgctggataatacgctgatttacagtggtgttattgatatgccagctggtcgcggccacatgacgctggagttttcggtgtcagcatggctggtgaataactggtatcccacagcaagtatcagcgatttgctggttgtggtgatgaagaaagccaccgcaggcatcagtatcagctga

SEQ ID NO: 489557 - DNA, 159 bp, Shigella sonnei; identical to SEQ ID NO: 80733

SEQ ID NO: 489558 - DNA, 1347 bp, Shigella sonnei; identical to SEQ ID NO: 399314

SEQ ID NO: 489559 - DNA, 879 bp, Shigella sonnei
atgagcgacgacaattcacacagtagtgacacgataagcaacaagaagggatttttctccctgttactcagccaacttttccacggtgaaccgaaaaaccgtgacgaactgctggcgctgatccgtgattccgggcagaacgaccttatcgacgaagatacgcgcgatatgctcgaaggggtgatggacatcgcagaccaacgcgttcgcgacatcatgatcccccgctcccagatgattaccctgaaacgcaaccagacgctggacgaatgccttgatgtcatcatcgagtccgcccactcacgtttcccggtgattagcgaagacaaagatcacattgaagggattctgatggcgaaagacttgctgccgtttatgcgcagcgatgctgaaaccttcagcatggacaaagtgttacgtcaggcggttgtcgttcctgaaagtaagcgcgtagaccggatgctgaaagagtttcgctctcagcgttaccacatggcgatcgtcattgacgaattcggtggggtttccggtctggtgaccattgaagacatcctggaactgattgttggtgagattgaagacgagtatgacgaagaagatgatatcgacttccgtcagctgagtcgtcatacctggaccgtgcgtgcactggcttccattgaagacttcaacgaagcgttcggcacccactttagcgatgaagaggttgacactatcggtggtctggtgatgcaggcatttgggcatcttccggcgcgtggcgaaactatcgacatcgacggttaccagttcaaagtggcgatggccgacagtcggcgtattattcaggttcatgtcaaaatcccggatgactcaccccagccgaagctggatgaataa

SEQ ID NO: 489560 - DNA, 249 bp, Shigella sonnei
atggcgacgctggggccaccctttgacgtggtgatatggatgacggatggctggccgctgtatgaatcccgcctgaagggaaagctgcacgtaatcagcaagcgatatacgcagcgaattgagcggcataacctgaatctgaggcagcacctggcacggctgggacggaagtcgctgtcgttctcaaaatcggtggagctgcatgacaaagtcatcgggcattatctgaacataaaacactatcaataa

SEQ ID NO: 489561 - DNA, 2049 bp, Shigella sonnei
atgagcaaattcacagttgatagttttatcgttgagctaagcttcaatgaaaacgttgttaagggcttgcaaagagttgaaaaggcagctttgcagtcagcacaaagaattgaacgtaatttgaatagagcgtttaaggtcgataccaagcaacttgacagcaatttaacggcttctttaaagtcaatggaagggaaaattaataagacctttgaccgtctggaagctagagcaaaaaatactaaagctttccgtttcacaagtcaggttaatgatgctattaatcccccaaaacaaccaagacagccacgaattagcggaaacagagcaatcacagcagcttactcagctaatatgaccaagctgaaaggtcttaacccaattgtcgagaaatacattaagagtcagttttacgcattaagtagtaaagctggtcagagggataacaccaagtttaatgaagcccttgctaaactaaattcaagtgtacgagaagcaattgctaaagccagaggtcatacatccaccagcattaatggtgacagagcagctaatagtcttgatagtttgagttcagcagcagttaaaacagcaggtgcatttatctcaatgcaggctgtattagccagttatcagaagattatggaagttggccttcaacgtgcatcatcggaaagaagtattgatttcgtattcggtgaccaaagtacacaggttaaaaagttcattcaagatttaactcagattactggtatggacacaaccgaaacacaagcacaatttgcttcatttggtgcatctgcaaagaatacgatgggtcttgaagggtcagaagagttatttaaaaaccttacaggttactcccgtctaatgggtcgttcagatgagcagattcaaagagcattaaccgcagtgtcacagatggcttctaagggtcaggtgatggctgaagagcttaaggggcaactatctgaagctttaccgggtgctactcaggcatttgcaaaggctttaggtctgactgaaaaacagcttttcgataagatgaaaaatggtgatgttaaagcctctgatgcacttcctaagtttgctaaagaacttggttcacagattgattcaagaggtggctggaaagctattcaggactctacgcagacaatgttagggaacttaaagaatacctggaataactcattaacggatatttttagaggttctgaaaatggtctgcaagattttacacgaagcttaaccaatcttttaaatgctcttggtggaactggtaaaactttaggtgaaagtcttggcaatctcatgacttctatgtcacatggtgttgatagtatgaccgatattagttacagggtgagagcgttctttgatgaggtgacattagcttatcgtggtttaaccgatgaacaaaagaaagtagttgatgctttaggctctggcttgattaatagcttaaaagtcttggctggtgttattgctgcaaataaagttattggtgttaccagaagtatttacgggcttatgactgctatcacaagattaggtcaggtcgctgatactacagcggataacgtgaatagaaagaacgggaaaccatcaaggtttaatcttgggaatatgctattagctggtagtgctatctatgcaggttatgagagattagcttctacgcctgaacgaatggaagcacaagctaaattaccagagctggctaaagagtctggacttaagccagtatttactatggacgatgtgaaaggttggtttaatagtgcagctatgaatcttgctaacttccagcatccagaattaatcaccatgagacaagatgcggcattaacgaatacggatatccaaagcctgagagatgaaattagtgctttgagcaaacgtattcaggagcctgtgaaagtttcacttggtggtgaagttgccattaaaccagatgaaaccagctttatgacctttagcagtaatatctacgaccaatacgcagaagctacgctattaagttcatcattcccagaagatgattga

SEQ ID NO: 489562 - DNA, 324 bp, Shigella sonnei
atgagcaattacgaattacagattttcgttgataacgacactgctatgatggtgcaaagcttcattgatgcaggtattagcattgactttgacaggctgttaaagcgaatggctgaaaactcagaagcaattgaagactttattcagtcggtggagtttaacgagcctcgaatgatgctaccaattacaaacagcagaatgaaaagattggttgtcgagcaaacgaacaaatacagtatttccccagagcaatttttgaaaggtgctgtgacaatcctgtatgctgacaatattctggtgacggattctgtgagggttcactga

SEQ ID NO: 489563 - DNA, 387 bp, Shigella sonnei
atgtatgacttttataaacatcgcgaccatttggtaagatttgacggtaaaatctggaaagacgtaacacaaaccaataaacccaagtttacccaccagcaattagcctcaagatttgatatctggactgaagcacaaaaagataatggtgatttcgagtttatcaggggttttgattatgcttacgaagacgaccttaaagacgccattaaattaattgagaatttcaactctattaaaaatggtgacaagcacaaagccaatggcaacagatacgataaagatttaatcattgatgcaatcaccaaaggacaatcacaaagttatatttctgagaaatacggtttatcacgcagtcaatactacaagattaaagcgtctgtgtaa

SEQ ID NO: 489564 - DNA, 345 bp, Shigella sonnei; identical to SEQ ID NO: 477416

SEQ ID NO: 489565 - DNA, 138 bp, Shigella sonnei; identical to SEQ ID NO: 16164

SEQ ID NO: 489566 - DNA, 468 bp, Shigella sonnei; identical to SEQ ID NO: 464389

SEQ ID NO: 489567 - DNA, 549 bp, Shigella sonnei
atgaaggttaataaaaagaggcttgccgaaattttcaacgtggacccgcggacgattgaacgctggcagtctcagggactcccttgcgcctccaaaggtagtaagggcattgaatctgtatttgatactgccatggcaattcagtggtatgcgcagagggaaactgatatcgaaaacgaaaagctccgcaaagaactggacgatttgcgtgcggcagcggagtcagatttacaacccggcaccattgactatgaacgctaccggctcacaaaagcgcaggcagatgcgcaggaactgaaaaatgcccgtgaagacggagtagtgctgggaactgaactgtttaccttcattctgcaacgtgtggcacaggagatttcggggatacttgtgcgtgtgccgttgacattacagcgtaaatatccggacatttcaccatcacaccttgatgtggtgaaaactgaaatcgcgaaagcctccaatgttgcagctaaggccggtgaaaacgtgggcgggtggatcgatgatttcagacgcacagaaggcagctaa

SEQ ID NO: 489568 - DNA, 369 bp, Shigella sonnei
atggcaacaaaagaagaaaatcagaaacgtcttcgtgaactggctggtctgctggggcgcgaggcggatatgtcggggagtgctgcggatatcgcacagcgtgtggcagagtgggaagaggaggtttgcgcctcgaaaaatgaaatcgcagatgttgatgataccgttcatgagcaggcatgcaggcacaccggtgaggatgacgttggtattctggaacgtatcaggcttctgaagtgtttttacctgtgcggtgttgacgatgaaacaggtgagcctgttgagcatgttgatgctggcagagtaattctgatgcccccctcagtggcaaaagacatggtcaggagcggaatggccgtttatgcatga

SEQ ID NO: 489569 - DNA, 558 bp, Shigella sonnei
atgagagacgcagaatttagagcgatgcttcaggcatcgagacaacgtaacaagcacaactcctacgcttacacaaactcccccaccagccacgaattacccaagtttaccaagaaagaacgcaaaggcattgacgaagtaattcgggcaattacaccgaggaaccgttacatgccaacacgcaaaacaacaaagaacagcatcaagaattatctggctagctttgacagctacgcgcaactaccgagcaagcttgatgatatttttattggattttgcagaagcgagggtcaccagaaatacaaccagaaggttttttatttactgcgaagtcttgatgaaattaactcagccaccgtgacaaatcatcttcagcgtcaagcaaccagacttagccatgaattaccaagcgataaatattgcgctttgcttgctgtaatgtgcgcaaagttaattggtgttgttgagcatcatattgccgttggaaatattgagccaatggaaaacgagcaaccagatttcgagtttgacccgtatttagttacagaggaattttaa

SEQ ID NO: 489570 - DNA, 669 bp, Shigella sonnei
gtgtcacatccaataatcaatgtcggtcgttatcatggtggttctgatgactggcgtacaccgtatcgtttatttcgtaacctacaccgtgaatttggtttttcgatggatggtgctgcaactgagcatgacgcattgttgccacggttcaccgatgatataagccgtcaatcatgggttggtgaacgggtcttcgttaacccgccgtttagcatggctgaacggttcatcttaaaagcccctgaagctgatgtgtgtgtatgtctggttccgcacaggtcaaagacaacttactggcttcggtgtgtatatacaaaccccttcctgcatgagattcgaacgttacaccgagcggttaaatacctcccaccagcaggaaaaaaaggtgctgtagtgcgttcaccatttgcaagctgtgttttgatatacaggaacgtaccccgcaaaccgaaagttgaagttacccagacaatctattgcggcgacacaatgcttttacttgccgtggttaacaggggtggtttacgtggaagacctcatatacacgatgcacagacgcttgacaggttgattaaaatgcatgaccaagggcaacccatcaagagtatcgcagaagcactaagaatgcctctaagcaccacttacaggattgctcaaaggttgagctaa

SEQ ID NO: 489571 - DNA, 573 bp, Shigella sonnei; identical to SEQ ID NO: 7146

SEQ ID NO: 489572 - DNA, 525 bp, Shigella sonnei; identical to SEQ ID NO: 487961

SEQ ID NO: 489573 - DNA, 144 bp, Shigella sonnei
atgaccattgaaaaagctgtatctgaggaatacatcacaatttaccgtccttttattacggtcaaaggtaaacggatctttgctcgtcaaaaaggcttggcagcctttcctatcaaaattcctgcctctaagtatcgaggataa

SEQ ID NO: 489574 - DNA, 150 bp, Shigella sonnei
atgcaaaaagataacgaaaaagccagcgaaccgctgtcgctggcttctcctatcgtaagcaaatacgaaaaacttggcggttgtgagtatacgcttaccttaggttttgtcaacagcgaaactttacaggtaacacgatatgaccattga

SEQ ID NO: 489575 - DNA, 534 bp, Shigella sonnei
atgattgcgaaacgagaacttggccatcgcgtttcacctctcagcaccagcatgattaaatcatacgctcatcgtctgagagacgttcttcagatatcaaatcacacatatctgagactggatgtattactagaaggtcttatggcctcagaaagcattgagctagaaattgttgaagatcatgaactgcccaaacgctatgcagtgacttatccagataagaacaaaattgttttacagcgatctgtttacgatgcagtgtgcaatggtgagaaccatgcgagattcactgttgcgcatgaacttggtcatttagtcatgcatcgcaatcaaagtatctatgcacgtaataagactagtggagggcataaaatctatgaagacagcgaatggcaagcagatgtttttgcaagccacttcttaattgactcaagactagttttgcccacaatgactgttgaagatataagcaaaacatttggtgtcagtcaacaagcggctgaaacctggatgagaaaaaatgcaaaaagataa

SEQ ID NO: 489576 - DNA, 351 bp, Shigella sonnei
atggtaactagctttggtaagactctcagaaaaatgagaatagaccggggtatggtgctcaaaaatatggctgatctgttaggcgttagttcggcttacttatccgccattgaattaggcaaaagagctataccggactcattagtaaatacgattgcaacaacttttgagcttagcggacaagacatcatcaatctcaagaaacaggcagagatttctcaaccgtccattaaggttgatatgtcggatgcaaatgagcagaacaaagaactaatgcttgtttttgctcgtaaatttaaggacctgagtccagagcaactcgataagcttaataaaatgttaaaggactga

SEQ ID NO: 489577 - DNA, 762 bp, Shigella sonnei
gtgcaaaagaatttgttacaattatgctacgaaggagagtgtggagaaaattatatccgtagcatgaatgaaaaagggcagatttttgtttcactttcagatgtgctaagaacgctttctgctgagaacagaaaactggatggaaagacttctcaaagcttgctcactgtaataagagcggtaataaaaactttagatccagatgagtttaggaatgtttctcttgtcgtggatggtgaaactatctctgaggtatttcttactgaaccaggtctatatagagtacttgctcaggatactactgctgcggggaaaaaattccaacgctggctttttcatcaggtccttccgtctattcgtgaatttggtgtatatcctccgccacctaaacaagaacgttcagaactgagtgcttttgctaacagtctgcagcagacggttcaagcattggtaatggaaatagaaaaacgtgaagagttagaaagtagagtaaaccaagttgaactaaaagttaactcgttagaaagtttaagagatttgtctcagttcagaagtgttcctcaacgattgatggagttaggtttggatacctattcagttgaggaactttggcaatggtgtgaaaaattgcgtagtgaacgtggagcagaaagaattaagtgcccctccggattgaatataaattcttgctatccattagctttggttgatgaagctatcgctatataccagaaagtagttgaggcaagaacacgtcagtga

SEQ ID NO: 489578 - DNA, 234 bp, Shigella sonnei; identical to SEQ ID NO: 38839

SEQ ID NO: 489579 - DNA, 912 bp, Shigella sonnei
atgaccatactggtacccccaagcaaattttgcatttactcagatgattctagggctgggacattgaacttcatcaactcgattgaatcgattggagtaaaaaataaaggtcgagttatagttgatttgtccaaggtaaaatttgcctcagctgcggcatcggtactgttctttgccatagtaaatagagctcaatttttaacccgggaccctaattttatacgttttaaatggcctaaaaaggatgataacccatctgggcatagatggatcgttggtactggacttgctcgtgctttgcttgctggcacagaagagaaactgaatgcacttacgagggaggaacgatactttcagtcagctgtcgaaccttacgagcatattgttgaaacagtactcatgctgcagaaaagtgctctgcttaataatgaacagttaggcttactgctgacagcgattagtgaagctttgctcaatgtttctcatcatgcgtatgaagatgaggggttcgagtcagatattcagcttctcaaaggtaaacgatggtggcagtgcgcttggttcaatcgtgatgaaaataaagtcgtttttatcgtttgtgaccttggattggggatttatagaagtttcgtgcctaatggtgatggtcatagcattcaaaacgaagtatcttctgtggaaagagctatgttagtaggggaatcccgctttgttggttccggacggggaaatggctctgaagatatcaagagacctattggggcaggttgtgaggataatgagacacttctgatactaacaggaagggctcgttatagctataattctaatgacagtagtcctcgatgtgagaagctagctgagtacataccgggtactttactacaatggtcgctggttcccaggagatga

SEQ ID NO: 489580 - DNA, 327 bp, Shigella sonnei; identical to SEQ ID NO: 8609

SEQ ID NO: 489581 - DNA, 618 bp, Shigella sonnei; identical to SEQ ID NO: 8608

SEQ ID NO: 489582 - DNA, 249 bp, Shigella sonnei; identical to SEQ ID NO: 10801

SEQ ID NO: 489583 - DNA, 687 bp, Shigella sonnei
gtgaaaacactggcagaacgattaaagataggtagagagaaagctggcatgagccaagctcaactagctgaaaaaattggactttcacaacaatctgtagccaaaatagagaatggcgaaactctacaaccgcgcaaaattaaagaaattgcaaaagttttaggtgtatcacaaaagtggttacaacttggtattgaagacaacgcatccatacctgatcttgttgtaaaagaagcagaaagcaccgcattagaccccgatattttcgtaaacattcctgttttagatgtcgagttatcggcaggtaacggatgtctggctgaaatagttgaatcagctattgactggtttccattaagaagagcagatttgagaaaatctggcgtatgtgcatctaatgccaagatcgtaaaaatatgggggaacagtttattaccggttctcaataatggagatcttgttgccgttgatatttctcaaaccgttcctattcgtgatggcgatctttatgccgtacgagatggtgtattgctaagggttaaaatacttatcaacttacctgacggtggcttgattcttagaagcttcaacaaagatgagtacccagatgaaatactcacctttgaagatagacgagccagaattcatgttataggtagggtattctggtcatcgcgaacttggtaa

SEQ ID NO: 489584 - DNA, 891 bp, Shigella sonnei
atggaagacgcgctttacgcttttaattacacacagaaccgggacaagttatttgctaacttgattagcatcattgatggaatcattgcagatggagttgtccgtgaagaggaggttctttacttagatacatggttacttgaagcaaagcagattatcaataatggagttataaaaagtctatcagcacgggtgtcggatattcttgcggatggaataatcacatcagaagaacgtgatgaccttaaaaatagccttctccaaatacagagggaaattcttgatatccctgaaattgatttttactccaaggatgtagatgtccatttacttaatggactatgtaaaggattaattgctgatcggaacttaactcaagaagaaataagatatcttaattggtggcttgagcaaaatggagctttgaagaacaactacccaggaaaaaaactttatgcacttgtaaaggaaattcttaaagatggtgttattactgaagatgagagtttaactctacataaggcattagtagacttcacaggatgtgacttggaaagtggggtggtggatggtttggcgaccaggctgcctattgatgtaggggcttcgatagagttagagggtaaaacctattgtcttacaggcacttttgttgcaggaaagagagccgtagttgaagatttgattaaaaatgctggtgggaacatcagtagtggaattactcaaaagttggattttttagtaattgggacgctttcctcccgtgattggaaattctcaagtcacggaaggaagatcgaaaaggctatatcttatagggatgataatggtgcaaaacttaaaattatttctgaagaaatgcttttcgatgcattaccaagttcgcgatga

SEQ ID NO: 489585 - DNA, 207 bp, Shigella sonnei; identical to SEQ ID NO: 7994

SEQ ID NO: 489586 - DNA, 435 bp, Shigella sonnei; identical to SEQ ID NO: 7993

SEQ ID NO: 489587 - DNA, 897 bp, Shigella sonnei
atgtacctggacgaataccttgaaatctgcgaaacgagaaaactttcaccctctacgattggtggttataaaaaatgccgtagtgcgttagcctcactccacatttgccctgcaagtgaattaacaccagcaatcctgaaagcgtggattcaaagccagaaaacgaccttaaaaacaattcgcaaccagttatctttcctgcggtcagcacttgatgaagccgtaaccgatggggtacttcaaattaaccccgtatcgttggtaactgcttcgcgctaccaaagtgataagtcagaagcagaaagcagctacgtggttgatccgctatcaccagcagaagttgatgcattactagcagcagccggaaacaaacaatgggaaaatctgttccggttcgctatacatacaggcctgcgtagttctgaattatgtgcccttcgatggcgtgatatcgactttgttggaaaaactgcccatgtccagagcgcaagtgttgtcggtgttatcaaaggaacaaagacaaaagccggtactcgtaaagttgaactgacagaagaggcaatgttggcgctgataaatcagaagccatttacattcatgaaggatgctactgtctttgaagatccaaagacaaacaaaccgtgggccagcgccgatgcgataaggaaaaaagcgtggataccaaccttacgtaaagcaggtatccggtaccgtaacccatatcagaccaggcatacattcgccaccagccatatcagccgtggtgcgaacctgttctggcttgcaggccagatgggccataagggaccagaaatgctatttcgtcactatggcagttaccttgctgcatatgacggacataccgctaaaaatactaatgatacaaaacaggcttga

SEQ ID NO: 489588 - DNA, 363 bp, Shigella sonnei
atgcgtgatatgtatgaagtattggaccgctggggagcatgggctgcagcagaaaatagtggtgtggactggcagccgatagcggctggtttcaagggacttttaccacacggtaaaaagtcacgtctccagtgtgatgatgatgaaggcatcatgatagacggttgtgtggctcggttgcgaaagtataaaccagaggaatatgagctgatcatagctcactttgttattggtatctcattacgcactattgccaagaagagaagatgttcagatggcacaattaggaaggaattgcagactgccatggggtttatcagcggtgtaataataactataaaccccattatggtagttaattaa

SEQ ID NO: 489589 - DNA, 576 bp, Shigella sonnei
atgattagtatattttcacatttatttagaccgtttggttaccttttcattaagggaattagtggtaagtgcgcatacgatttttatgcacctgccgggcttgctgtgatttcttttttttacttttatttatttaaaatacccacatcagacctactaaaagatggcggctttattaagtctatatctggatttgtatcaaatctgccaggtttttatatagcagctcttgcagcaatagccactttcaacagagaacaaattgactaccctctgataggaactaatggcacgccttttattaaaattacacgaacaaaagaaaatggtagaattgttgacactcaagagaaacttaccagaagattatttctgtgcatgttattttcatttttaactgccctcagcatatgcatagtgattttcaacgcttttatcacaccactaataaacatactgaataatgatatagcaaactggtgctatatcattatctttttattccttacatggcaaatgcttgtttcaacattttttggactatactatcttggtgataggattcacattaattaa

SEQ ID NO: 489590 - DNA, 810 bp, Shigella sonnei
atggctacactggacgcattcagtagagtaataactcatcatactattacgatcgatacacaataccgtacacagaaaattgatgatagcatcagatcgaactgtgtttgcccggtaccaacaatgcgtgaacttgcttctaaaatagtacgttgtaaagcaatgatgcacagttatgaaaaaggagacttagttttaactttgcaagatgtaatcttcttatcaaacagagccgataaaaaacccagccatcttggtcttttaattaatgctgtagataaaaatggaagcactactgtgttaaaaaacattaatacagatgttcgtaccgaaatatcaccaaaacatgaggaaggtgaaggttacgaagtttcttctcatatgattatttctctagacggaaatatgcgaacctatgacatgagttttatgccaataccaggagtttccacagcaaaaataaatggtttcctgaataaagttctctttaacgtagccaaagataatgaagatatcttttcatgtaacactttaacaaatgaagtatcaagtttaacaaagaaaaaaataaaagtattatacaagccagtctttgatatatctggaaagttagatgaagatttgttcaataaaataaataaagaaggactttctgatgtcgttttggtaaagaatgaatacagaactattaatgcgccagatgttaacgcggctattattcctaaagaaagtactttacgcttagtaccaaaccatggccccaacaatgtccttggatggataaaatctgtctcaaacttctttaaataa

SEQ ID NO: 489591 - DNA, 240 bp, Shigella sonnei; identical to SEQ ID NO: 25727

SEQ ID NO: 489592 - DNA, 1110 bp, Shigella sonnei
atgcggcgtggcggttatctgaaaatagcccggcgtcagctcaatccgcgacggcgctgccggtgcggcaatccggaacgataccgacgccggatcgccctgctgcccccacgcatttactgcccggactgtcagcctgtagttccccagagccagttgtgtgaagcggtaagtggtttccgtcgtccgggccgtgctgaccagccgctcacggccgtcatccgctgccacggtcaggcgaagcaggaagctcacgcccttcaccaccttcggcgtgtcccagcgggccagcatctggtattccccgctgtctgcggtgacttctgcggtcaggtgctgcaccgctggcggcgtgacaccatttaccgtgccgctctggtcgccgtcaaagtgcgccccgttatccacgatggcctctttttccggtacatgctgcacggcggtgatggcatacgtgccgtcgtcgttctcacggatactcacgcagcggaacaggcgctggcgcaacgtcggcagcttcagcccccatacgctgtattcagcaacgccgtcaggaacacggctcactttcaccttcacgccgtcggtgacggactgaacctccacgctgaccggattgccacttccgtcaaccaggcttatcagcgtggtaccggaggatggcagcgtgatttcacggtcgagcgtcagcgtccgggtctggctgtttaccgccagcacgcgcccgccgatgctgataccggcatagtcatcatcacagatttcaatgacatcgccctgcacatggcgaagcccttctgcacccacgctgaagtccacggtctgcgtttccagcagttctgttttaatcagccacagcccggcgcgatgtgcctgcccccggctggtacagccaaaggcatccatcttcgcgacattacgaccgtaacgggcaatggcctgcgtgtcctccacaagctctgtcgccgtctcccagccgttatccgggtcaatccagttcacctcaacggcattatggcggtccttcagggcgctgaagctgtagcggaacggcgcgccatcatccggcatcaccacattactgcggttataggtccacaccttatctga

SEQ ID NO: 489593 - DNA, 1728 bp, Shigella sonnei
atgcaggcgattgcagcagaaggtgatgtggtggtcagtggtgcaactgagccggattggtactacgtcatcgtactggccgggcagtccaatgccatggcttacggtgaagggcttccgctgccggattcatacgatgcgccccatccgcgcattaagcaactggcccgtcgtaacacagtgactcccggtggtgaagtatgcgtatttaacgacatcattcctgctgaccattgtctgcatgatgttcaggatatgagtacgattaaccatccccgggctgacctgagcaaagggcagtacggctgtgtcggacagggcttacatattgccaaaaaactgcttccgtatatccctaataacgcggggatcctgctggtaccatgctgtcgtggtggttcggcattcacccagggcacggaggggacattcagcgagtccacgggggccagtcaggattcggctcgctggggagtgggtaagccgttatatcaggatctgcttttccgcacgaaggcagcattgcagaaaaacccgaaaaacgttttgctggcgatatgctggatgcagggggaattcgatatgacgaatgccagttacgcccagcagccagcagcatttcttgcaatggtacagcagttccgtgctgaccttgccgggctggcggcgcagtgtcacggtggaagtccggcatcagtcccctggatttgtggcgacacgacatacgcgtggaaacaagaacacggtacgcaatatgaagtggtatatggtgcatataaaggtaaagaatcccagcagatttattttgttccctttatgaccgatggtagcggagttaatacaccgacaaacaacccgtcagaagatcctgatattgccgggtctggttattacggttcggcatcccgaacgaacaaaaactgggtatcatcaaatcgcccgacgcatttcagctcatgggcgcgtcgtggcattattcccgatcgtatggcaactgctattctgaacgtagccggtcgcaccttagccttcattagtggtaaggcaccggaaatcaaaccctcgcccggcggcgacactccatcggggccgtctgatggtgacacatccgttcgtacagtctccctgctgccgacagccggagaggctgctgcgcagggctggaccatcaccggcggcagtgttgcgctggaagatggtgtgtttaaggttaccaagcagagcaataaaacttggtccctgatgcatccggtggatgacgcagtctccctgctgacacggggtggcagactgagctgtaagtttcgactgtcaggcgcactgaccaacaaccagttcggtctgggaatttatctgtgtaccgatgtagcgttacctgacgtcgtggcgatgaccgggactggtaacccgttcctgatgtcgttcttcacccagaccacagacggcaaactgaatctgatgcatcacaggaaagcaggaaacacaaagttgggcgagttcgggaattacagtaacgactggcagacgctggagctggtgttcaccgccggcagtgccacggttactccgaaactgaatggagtggctggcccggcattccaggtcataaaagacagtctgacagtgggactaaatgcactgacgctgacggatattaccaaaaatgcaacgtatggcgttgagatagaaagtctggtgctggagataaatgcaccggcatcatcataa

SEQ ID NO: 489594 - DNA, 1254 bp, Shigella sonnei; identical to SEQ ID NO: 487979

SEQ ID NO: 489595 - DNA, 1167 bp, Shigella sonnei; identical to SEQ ID NO: 487978

SEQ ID NO: 489596 - DNA, 381 bp, Shigella sonnei; identical to SEQ ID NO: 486772

SEQ ID NO: 489597 - DNA, 672 bp, Shigella sonnei; identical to SEQ ID NO: 487616

SEQ ID NO: 489598 - DNA, 867 bp, Shigella sonnei
atgaatcaaaatccattctcattctatgactttcttggatatttaataccaggtggtttttttatcctattaatgtatttctgtggtttgacattcgatctagatattgttattgacttaagtgaattgctcagaggtcaaagtcaaatctttggcattttgaactacgcttcaatagttattatatcttatatagctggacattttatttctatcacatcagcattttttatcgaaaaatacatgaataaagaattaggatatccttccaaatatctatttaaaaaattgatagatacctcagaaagcatttgtagcccatcatgcgatgagagaagcgctgataaaaaaacaaaaataaagaatcgcataatcaaatgcgtattatgtccaataatactatgggattttataacacaaaaactatgttattctcaatctctaccatttcatttagctaatacaacatggttaatgatcaaagaaggttatgagaaaaagttcataacaaatcgccaattattacaagataaaaacggacttgatgatgatctcttcagattggcatatcattatgtttatgagttttcaaaacaacatcaaacaaaaattcaaaactatgttgcattatatggtttttgcagaaacatatgtttaatctttataatttcattttgggtatcagttccaacctttatttatcgattatgtactcatagtgattatctttatagtttactttcaataatgcttagctttttcttcgtctatgttttctatgttggttttgttaaattttatagaagatatactttagaagtattaatggcatttgctgtacttcaaagtaacgacactattcgttaa

SEQ ID NO: 489599 - DNA, 672 bp, Shigella sonnei
atggcagcgacgcacacactccctctggcgtcaccgggaatggcacgcatctgcctttacggggatttgcaacgatttggccgccgcatcgaccttcgtgtgaaaacgggggctgaagccatccgggcgatggccacacagctccctgcgtttcgtcagaagctgagcgacggctggtatcaggtgcgtattgccgggcaggatgtcagcacgtccggattaacggcgcagttacatgagactctgcctgatggcgctgtgattcatattgttcccagagtcgccggggccaagtcaggtggcgtattccagattgtcctgggagcagccgccattgccggatcattctttaccgccggagccacccttgcagcatggggggctgccattggtgccggtggtatgaccggcattctgttttctctcggtgccagtatggtgctcggcggtgtggctcagatgctggcaccgaaagccagaactccccgcacacagacaacggataacggtaagcagaacatctatttctcctcactggataacatggttgcccagggcaatgttatgcctgttctgtatggtgaaatgcgcgtggggtcacgtgtggtatctcaggagatcagcacggcagacgaaggggacggtggtcaggttgtggtgattggtcgctga

SEQ ID NO: 489600 - DNA, 315 bp, Shigella sonnei; identical to SEQ ID NO: 462911

SEQ ID NO: 489601 - DNA, 654 bp, Shigella sonnei; identical to SEQ ID NO: 487363

SEQ ID NO: 489602 - DNA, 606 bp, Shigella sonnei
ttgcaacgatttggccgccgcatcgaccttcgtgtgaaaacgggggctgaagccatccgcgcactggccacacagctcccggcgtttcgtcagaaactgagcgacggctggtatcaggtacggattgccgggcaggatgtcagcacgtccggattaacggcgcagttacatgagactctgcctgatggcgctgtgattcatattgttcccagagtcgccggggccaagtcaggtggcgtattccagattgtcctgggggctgccgccattgccggatcattctttaccgccggggccacccttgcagcatggggggcagccattggggccggtggtatgaccggcatcctgttttctctcggtgccagtatggtgctcggtggtgtggcgcagatgctggcaccgaaagccagaactccccgtacacagacaacggataacggcaaacagaacacctatttctcctcactggataacatggttgcccagggcaatgttctgccggttctgtacggtgaaatgcgcgtggggtcgcgggtggtctctcaggagatcagcacggcagacgaaggggatggtggtcaggttgtggtgattggtcgatga

SEQ ID NO: 489603 - DNA, 366 bp, Shigella sonnei
atgctggaagcggccagagaggccagacgtcaggaaattgaagcatggcgcacagaacaggaggcgaagccgttcacgtttgaatggaatggtcgtatctggaatgctggccccgactcactgggccgcctgtccccggtagtcatgctggcaaaatctgtcacagcacaaacgcatatggcgtggggtgatgccgataatcagcaggtgaaactgtcgatgccggaactggaagaactggcggcagcaatggtgcaggcgcaggtcgatcgcaacgatgagatttatcgccgtcagcgtgaaatgaaagaggagctgagcggtctggatgatttggcttcaattcgggcgtttgacgttgagtaa

SEQ ID NO: 489604 - DNA, 303 bp, Shigella sonnei; identical to SEQ ID NO: 21213

SEQ ID NO: 489605 - DNA, 216 bp, Shigella sonnei; identical to SEQ ID NO: 485850

SEQ ID NO: 489606 - DNA, 129 bp, Shigella sonnei
atgcgctacttaaacacaaagaatctcattgcagcaggagtattactcgcctgcatgagcagcattgcctggggtgccatcatcccggtggatttgcccctatatttccagacatctgttatcacttaa

SEQ ID NO: 489607 - DNA, 825 bp, Shigella sonnei
atgagactgaatacgaccggtattgcggccagaatgatgctctcgctggacaaaaaagcaatcggcgaaaaactcatcaacggtcgtcagataaacccgacaccgctgcaggtccgttacccacaaggggtgagagacgtgctggggataatgagcgagcaattagccatatccaccgctgatttgacccgaatcctgcttgaggatgctctgcataatatgttcatgcctgcggataacaccacgggaaacatcataagcagaattgaatgcatcatgctgtcgcatgatataaatgcaccattgctggcaacattgttgtcgccatggaatatccgttcgacggttatacaggacccggcaagacttgctgactatctctcaactgacgctctcgaacatctggctgaatattttaatcttaatccggactgggtgaatggccgcgaaaattatccgatagcattgtcctgtgaatggccagatactgctgataatttcagaatgcttattaatgatagcagcaacactgacattattttctggcatagtttcccctacgcaggaaacgcaaaaagggaatattgcggagtaatattgcgacagaaaaaacttataaacggttccgtaatatatcccgctctgtcattagtacccacactaatgaacgatgagaaaagaaaatggttaactgaatatacaaccaggcagagtgcaacaatgtctttgcgccgcgtcacgttgcgacctggccttgccggtaaccttattacaggacaaatactacctgttagtttatttaatacgtctttattaccctggtaa

SEQ ID NO: 489608 - DNA, 1200 bp, Shigella sonnei
atgaagaaaaatcatattacccgcaccatcattgcatctgctgtattattttcatttaacgctgcagcagcgacgtcatattttgaagcgcgtaacgatgcaatgggtggcaccggggtggcatcctcccattatggtgtggctcctctggcaaacccggctttactgacaaagcacaacagcaatgatgatttcagcctgttactgccgtccgtgggcgcacaattgtcagacccgaacgacatcgctaacaaagccgatgacattcaggatgactgggatgccttcgaccgcgcggtcgacagcaattacggtgttggccaggcagcggcaaacctgaaacagcgcctgcaggagttccgcaatatccacgctgatgcgcaggtgggtgtttctgccgttgcggcactgccgaatgacacgctgccggttgccctgatggtgaaatcctacggtacggtcagcgttgacggcaaagtcagcgacgccgacctggactatctggagaaggtcgccaacggcacaatcacggatgtggacaaaaacgcgctcacctcccgcgcgtatggtcgtgccgcagtggtcactgatgtgggtatttcctttgcaaaagaactggaaaccgccggtcagaaatggtcactgggcttcacacccaaataccagcgcgtggatctgttcaactacaacgtctccgtgcgtgactacgacaacagcgatttcagcgacgacaaataccacaacacgaaaaacggcgtgaacgccgacatcggggcatataccgacctcgatgacaactggacgctgggtctggttgcgcagaacctcattccacgcagcatcgatacgaaagtggtcgacggtgttaaggaaacctacaaaatccgtccgcaggccactgtcggtgtgtcctggcacaacgacctgttcaccaccgcactcgatgttgacctgacaccggccagcggattcaccaccgacagcaaacgtcagttcgccagcatcggcgcagaattcaacgcatggaaatgggcacaactgcgtgccggttatcgccagaacatggcatcaaactccggaagcgccttcacggcaggcgttggcatctctccattcgacgtcgtacatatcgatgtatccggcctggtcgggaccgaccatgattacggtgcaatcgcacaactccagttcactttctga

SEQ ID NO: 489609 - DNA, 333 bp, Shigella sonnei
gtgagtgataaacgtcaaagaagtggtagtgaaagacggcaaaagacgatcctgagagcggtccggttctcaccggatgaggatgaaactatctgtaagaatgctgaagattccggacttactgtatctgcttacatccgaaatgcagcactgaataagcgaattaactcccggacagatgatgcttttctgaaggagttaatgagactgggaaggatgcagaagcatctgtttgttcagggaaaaagaaccggtgacaaggaatacgcagaagtgcttgttgccataaccgaacttacaaatacattgcgtaaacagttaatggaaggttga

SEQ ID NO: 489610 - DNA, 192 bp, Shigella sonnei; identical to SEQ ID NO: 403751

SEQ ID NO: 489611 - DNA, 681 bp, Shigella sonnei
gtgaacacaacagaacatcccgtgcgccagttactctggtgcgcccttaatgccctgcatgccgctcaggaaaaccacggcatcaacagtgaatccggacttcgccgctacctgcttgagtggctctccggtgccggcagacaccctgaattccggaacatcccggaagaaatcatggcgctgaaggcgctggcggaacagaaccgtgatattcccatcagcggcacgctgaacacgctctttctcagctcggccacggtcggggagtgcccactgttccgctttcgcgccgcaatgggcagcttacagaaggccggatggcgcacaaccgtctgcccctggacggagcgggtcttcagcgaatccattgaactggcctgtaccggcagacgtcatctgctgcagctgagtcgcacggaggaatgcttcatgccgtccgggaagatgtgcgcccccgtatacctgcagctcatcaccccgctgcaccgcagaacagagcagcttctggacgcggcagaaaacgcactggctgatgaaggctttcaggtggtgaggggatttgagcatcagttcggcatcgaacgacgtgaaatcctctttcacaccctgtttgtcggccttcccggcctgcctgaagaggcatggggcatcaggccggaacagaccattaccgtacattaa

SEQ ID NO: 489612 - DNA, 582 bp, Shigella sonnei
ttgaagcgtgaacgtcttattccactaaccatgctgggcggatggtgtgtgttagttgtgttcatatccctgccggggctacgtcagattggctcctggcctgtacataaccggaacgtcatgctgctcatgatgttcaccaccatgtgccttcccctgctgttacgcccgctgttcgcgctctttcgcaaaatatgcaggcagaccagcttttatgaccgggagctgccggacaaccacacggtccatattttcctgagtgcacacgccaacacagccaccccggaggccatgcgccatcactggaaggtgctgaacggactgctgaccaccgcgttacgccagggtaaacgtgtctcgatgacatcgcatcttctgacgcaggccaggacggacaaactggttcgtgccctgcagaaacagggggtggaggttaccgtgaaacgggaggaatgcccgacaccggctttcgaacgctggaccatcactgccagcaagaccatcagccagtggaagattccccacgtgaacagacacagcggcattgtcatcctgacaccggagagctggcgtcagccataa

SEQ ID NO: 489613 - DNA, 279 bp, Shigella sonnei
atgaacaaagaagacagtaccaggaaaacatccacaggtatgcatctgtgcttttctcccctttccaaaaaaattgtactggccagaatgcgggaatcgaaaggtcgcctgcgccgcgtcggcaatgaccggggacgtgatgtcacgaatgaagctgcccgcctggtatgggaagtcgtccgggctgaaggcggaaaaatctggtgggaagaggaagacggcacctgcctggttttaaaagccgaaatcataaaaacagatgaggaagaaaacgcatga

SEQ ID NO: 489614 - DNA, 585 bp, Shigella sonnei
atgaaaacacgtattttatcgataatcaccgccgccacagtactgtcagggtgcgcaggcagcagcacgcaaccggcgtcagggatgcagacgttactcccggaacataacccgaaggtgacgttctcggtcgataccgtgcgaacagacacaacggccagcaatcctgcatgcctgccggaaaaatacggaaaccttcttcacgagcgccatccggacctgtttgccggtgctcaggggattatttcacgcagtgcattttttaatgacagcctgacgctgacacctgaaacgctccacgggatgatagagaatacgctctgtgttgaatcactggtaacgtccgtaggtccggataccttcactgcagatgtctctcccggtgtcagaatgcaggtatcaccggatattcacggtgcgcccggaaatatcactctgcgactctcgaccacagaccagaaacgaaaacagaccgttgagcagcgtatttctctcagaccggaacagtctctggtcgtgaatggattcaccggcgatgacacaggcgaaaaacgcgttgtcttcatcacgcctcacgtgcgctga

SEQ ID NO: 489615 - DNA, 255 bp, Shigella sonnei
atgccacagcaacatcccggacgactgcaggtactggtcgtcaacacacactgcgaacgcagactgttttcagcgacagcgcaggcagaccccgatgcgctggcccgccgtttctgcacgccggacaactgcctggtggtggtacttcgcgacaaccgctttctgttccgactggaacgtgcgccgggcagtcactaccgctggcacagagggtgccgctcccgccattcagggagaaataccgcccgttggtga

SEQ ID NO: 489616 - DNA, 456 bp, Shigella sonnei
atgagctcagaagataattttcccgaccagaacaatacaggcacaataaagaaactaataacgaaactactcgataaactggatgacgcgtcagaattttatgacacgtcagaattttcgcctgtctttctcgtagtgttattcatgtgcatatgctttgttacaccagttgtccgggagtacagggaagatatgctctggcaacatgagaaaaatgaacaccagtgcagagtcgcggaaatacattccggacagagcgcctggatatgcaacgacggctctgtacgctggagaacgagcactccggacgatcagcgttttctgtgggaaaagttcaaagcagatcatgcctgcagattaattgagtcccgcgatgaggataataacggacctgcacgggacgcctggaaatgtgatggtggtgcggtttactggaaaaaccggctaccgggataa

SEQ ID NO: 489617 - DNA, 1332 bp, Shigella sonnei
atgcaaaaaaaacacctgacgctctttctgccgtcactcctgaccggctgcgccggtttcgcctcgccaccggagcctgagaactctgccaccgccctggtctttgtcgacgggcaaatcagcgaaagcagctcgctcctggcacagacacagcggcggctgagtccgccgcccgtcagccgcccggttgccgtgacaaacacgtccgcgcaggccgtgacggcgcagtctcttcccctgccggcaccggcactcacggcagacgccgccctgtcaaatatcatcatgaccggcacaccgggaagtgccccggtcacggcgctgcctctgacacgtaaccgcacggtcagcgactgggtgaaacagctgcttcccgccggctggcagttccgccaggagaatgccgccacaccggcactccggacgcgtatcgcctcctggtcggccaatgaccagtggacgcgttcactgaaccggttactggctgaacagcatctgtgggggcacctggactggaaaaatcgcaccctgaccgtcaccacctcaccggcagcgccagccacagacagcagcccgcaggccaccgcgccggcatccgccacgtctgcggtggcagcaacgccggtgaaaacaacgccctctcccgcgccggtcagccccttccgtaacagcacgaccacaggtaaatcatccgcctcacaccttaaggtgtcgggacagcccggtgacattccggtcgttttcctgtcggaagcccgtaatctcaccacggaacagtgggtgagccggttactgcctgacggctggaaaaccgactggcgtaccgacagacaggcacgtcagcaccgcactgaccggcttgccgtgaacgaccagtggacacgggcgctcgatgccctgctgacacgccagaacctgtgggggcacctggactggaacagccgcacgctggtcatcaccccgaccgctgccgcaccactcagtaccggcgggacaggcacggcgaaggcgacgggtgccaccgtttctgcactgccccctcttcccgcgccgggctggacagcagaaaaaggtgccacactgcgacagacactcacccgctgggcagcacaggtaccctgcgccgttaccggtcatcagccagggcagacctggtctgtggtctggtccgcgtctgtggactaccccatcgacgcggcattcaccctgcgcgggggctggaaggatgttctgacgcagaccttcgacctctacagccgcgccaatacgccgctgctgggaacgctgtttgagaaacagtgcatcctcagcgtccgcgaccggaaagactga

SEQ ID NO: 489618 - DNA, 471 bp, Shigella sonnei
atgccttttgccgtactcgcactggccatcgtgatgacgctcttcacgctcctttcatacgaaaccgggaagcaggccacccgcacggaagagcgcgtgctgaaacgggaggcagacgatgtcgcctcacagatgatgttgctgagtcaggccctgacacactggcggtgggattacccgtcttccaccgccttaccggctgtctacaaactcggactgccgttcacctcgccagactcccgtatcgggtacgcactcagtggcgggcgtctgtgggtctgggctgcagaagacaacactccgggactggccgcccgcctcatcacactcacacacggctccggtctgctgttccggttcagcaacggcaccctgaaggacatgcagggtaatactgtcagtaccgccggtctgaccctgccctcagccctgcagtccgcatcaggcacccgactggttcacctcaattaa

SEQ ID NO: 489619 - DNA, 1647 bp, Shigella sonnei
atgcgaataaaacccattgctgcggcccttgtggcgctgcagttgtccggctgcgccacgcaccgggagttcagggagatcgatgcgcagacatcggccacccgcgatcacgttcagtcactgctggacgaaacaaacagacagatgtccggcagcgcactgaccgtatcagacagcacctggatcaacccggagccggtccgtgccacagatgaaaagaagcaggtccccgtctgctggctgcaggtcaaccggactgacagcctgtccgtggatgatgtggcggccctgattgccgacagctgccacgtcaatgtccgtgtcctgccggatgcgcgcgtcagtcacgtggccaccgccggtctcacccgtgccgtccagggtgaactcccgctgcccggcagcacctccgccgccgacagccggggaagaacaccgctcggaaacacgggcagcagtggtcccaccacgtcggtctccaccggaggcaccctgtccggcctgcgctgggacggcagtctcagcggactgctggatgacgtgacggcgcggatggggatttcctggcgctggcgcaataatcagatacaactgttccgtctcgatacccggaccttccagctcgccatcctgaatgccgacacctcaatgaacgcgaaggtcgtgggcggaaccacctcgtcctccgggtcttccggcacgtcaggcagcagttctctgagcggcgaacagagcacctcccagcagaccaacgtggcggtcgcctcaaaggtgtacgacgacatcaaagccaccgtgtcggcgatgctctcggcagaaggcagctcctggctggcaccgggcagcgccacgctgaccgtgacggacacaccggaagtgcttaaccggattggagaatacatcgaccgccagaacgccatccttgaccggcaggtgaagctgaaggtcgatgtctaccgcatcaccttccgcgacacaaagcagataggtatcgactggacggcggtgtacagcgcagcaaagggcatgggctataccctgaccagcgccttcggggatgcggcgtctgatgtggccaccatcggtgtcacctcctcttccggtcgtctgtccggttcagaggtactgattaaggcactgaaccagcaggctaatatcagttcggccaccaccaccaacacggtgaccacgaacatggtgccggccccactgcagatagcgaaagaaaccacctatctggccaaaacgtccaccaccacgtcggacagctacagttccacagagctggaacccggcaccatcaccaccggtctgttcatgaccgtgctgccgtatatccgcgacaacggtaccatccagttgcagatgagcttcagcctgagcgacgacccgaccattaccaccgtcagcgcgaaagacggcagcacctccatccagacgccgaccacggatgtccgttcgctgacccagcgtgccaacctgaagcccggacagacgctggtgctgaacggtttccagagcctgtataacgaggcaaaccggcagggtaccacgtcaaaaagctggttcggcttcggcggtggggaaagtgctgagcgtgaccgctccatgctgctcgtgctcgtgaccccggcactctcctcgtga

SEQ ID NO: 489620 - DNA, 1311 bp, Shigella sonnei
atgagcacatcagacattattcctgtcaccctgcccggaagacgtcccggacgtcccggccgtcgcatcgccgtcattgccgggcttgagtggaaagatattcccgccggacagtccacaggcaggcatctcccgccgggacgggggcagttcgtgaaactgcgcgccgacagcggtggtacacacgtccgcgtgggcttcacccggtcacccggtcgcctgtattcactggccgtgctggccatccctgccctgaaggggaacgggtatgccttcgtccgttacgccggcgaacgcattgctttcgtggcctgcctgcatgatatgcccgccctcaccggggatgtgaccggcaacgcagcacaggtcagcaacgcctgtacggtgttcaggacaatgcacgaccgcgacgagcccccggacggctgggtgattctgggctcgccggaagcaccggtggatattcaggacgtcctgccgtccaccctgccgggtaaggcacgtctgcatccggtgaaccaggcaatacggctcgtcaccctcggcgtgctgggcatcgcccttgccggcagcgccctgtggggctacagccactggcaggaggagcagcggctgcgtcagctgcaggccatgaatctccggcaaatgcaggccgcgcagcagaacggtccggagcggcaggccgaaccccatccgtggccgcaactgccgctggtgcagaccttcctggatacctgtatcccggcacttcgtgcgctgcatgtctcagagggcggctggcagctgacggccgcagaatgcacaccggacacgctgcgggctgactatgaacgtccgaaaggctccacggtcacctatgaagacttccgcagggccatcacgccgcacaggcgtttttcctttgtcaccctgcaggacggcggggaaaaagcacaggcaggttacagcctgagcatgacgaccggaacggatgaatccctgcaacccgttgagcagcatcttgcccgcttcctggcccccttccagcgcggggaccgcccgctgcagatggaaacggagaaaattccggatatcgccgggcacacggtcactatcggagaccgggaggttctgcttttccgcgactggcagcagtggcagttctcactggaagaacgtctgcagccggatgcagccctgttcacgcagccgggcacgcggctgaccgccgtcaccctcctgctcagcgaagacggcgaactcacctggaaaacccgtggccagacctgggccacgcaggcacaacaacctacggagaacactcatgaataa

SEQ ID NO: 489621 - DNA, 450 bp, Shigella sonnei
atgaataacatccctccggcagcacggcggctgctcatcagcaccctgctgctgatgtccgccggcagcagccatgctgccctgaccgtcggcgacgtcgatgacctgcagcagcagaacgtcatcctttcccagcaggcccgcgccgctgaactgcgtcagcgcattgcccaggcacagagtcagggggccgccaccgtccccgcgccggttatcagcagcgacggtgcacccgccgcgccacaggaaaatgcccgtccgcaactgacaggcattcagggagctcgcggacaccttgaggcccgtgtgcagcatggacgccaggtcgcgagactcaccaccggtcagaactggcccggcaccaccatcaccctgctggaaattcgtcctgacagcgtgacgctgagcgacggcacccgcctcagcccgggagacagctatgctcagtaa

SEQ ID NO: 489622 - DNA, 1065 bp, Shigella sonnei
atgctcagtaacactgaagtaccggacaaactccggcatctggtacaggtgctgccggccgcggcggggacgcccggccaccgcgtctgctttcccgtcacggaaaccgggaatccggaaatacaggcattcatcaccggcctgctgcgcaccaccggtcagccggtcatccctgagccggtatctccggaggcgttccgcgacctgcagaaggatgcgggggatgccctccgccatgacagcgcagaccacagccactcagaggttcagacccgcgtgctgaacatgttccgcgaagcctgccgggtcggcgcatcggatattcatatcaccgtcgacgcctcccgcactcgtatcgagatgcgtatcaacggtctgctctacccggttgccacactgtcgagagacgaaggcatcagctggctgatgaccatctatcagtccatgtcagacctgtccgacaacatgttcaaggcctacatgccgcaggacgcgcgcctgaaacaggagttcctgcaggccgttaaacttttcggtgcccgttatgcgcacatcaacacgccgaagggtgtctttgctgtgatgcgtcttatccctgacgacggcagtgcacctccctcactggagacactcggctttctgccggcacagattgcggtcatccacgccatgctcgccagtccggatgccatcatcatcaactccggccccaccggttccggtaaatccacgaccgggcgcagcttcatggcgctctggctacagcacggcaacggacagcgacgcatcatcacccaggaggacccggtggagggggaagtcgaaggggccatccacacctcggtgaccgccgaccgctccagcgaggaggacatcaacctcgcctggctgcgtggtcgtcgtgccatgctccgtctggacccggatgcggtctatatcggtgaaatccgcgaccatgactccgccatggccgccatcaactttgccgaatccggtcacatcgtgctgaccacacaacacgccaacaggggggcacctcagaaaacggaaaataaagcacgctaa

SEQ ID NO: 489623 - DNA, 435 bp, Shigella sonnei
atggaaaataatttggaaaacctgaccattggcgtttttgccaaggcggccggggtcaacgtggagacaatccgcttctatcagcgcaagggcctgttgcgggaaccggacaagccttacggcagcatccgccgctatggggaggcggacgtggttcgggtgaaattcgtgaaatcggcacagcggctggggttcagtctggacgagattgccgagctgttgcggctcgacgatggcacccactgcgaggaggccagcagcctggccgaacacaagctcaaggacgtgcgcgagaagatggccgacttggcgcgcatggaaaccgtgctgtctgaactcgtgtgcgtctgccatgcacgaaaggggaatgtttcctgcccgttgatcgcgtcactacagggcgaagcaggcctggcaaggtcagctatgccttag

SEQ ID NO: 489624 - DNA, 351 bp, Shigella sonnei; identical to SEQ ID NO: 10325

SEQ ID NO: 489625 - DNA, 276 bp, Shigella sonnei; identical to SEQ ID NO: 10326

SEQ ID NO: 489626 - DNA, 423 bp, Shigella sonnei; identical to SEQ ID NO: 10327

SEQ ID NO: 489627 - DNA, 1695 bp, Shigella sonnei; identical to SEQ ID NO: 31949

SEQ ID NO: 489628 - DNA, 363 bp, Shigella sonnei; identical to SEQ ID NO: 39670

SEQ ID NO: 489629 - DNA, 237 bp, Shigella sonnei; identical to SEQ ID NO: 10330

SEQ ID NO: 489630 - DNA, 708 bp, Shigella sonnei; identical to SEQ ID NO: 10331

SEQ ID NO: 489631 - DNA, 1680 bp, Shigella sonnei; identical to SEQ ID NO: 10332

SEQ ID NO: 489632 - DNA, 861 bp, Shigella sonnei; identical to SEQ ID NO: 19455

SEQ ID NO: 489633 - DNA, 1545 bp, Shigella sonnei; identical to SEQ ID NO: 23311

SEQ ID NO: 489634 - DNA, 1515 bp, Shigella sonnei; identical to SEQ ID NO: 52478

SEQ ID NO: 489635 - DNA, 786 bp, Shigella sonnei; identical to SEQ ID NO: 16905

SEQ ID NO: 489636 - DNA, 348 bp, Shigella sonnei; identical to SEQ ID NO: 6026

SEQ ID NO: 489637 - DNA, 204 bp, Shigella sonnei; identical to SEQ ID NO: 21458

SEQ ID NO: 489638 - DNA, 243 bp, Shigella sonnei; identical to SEQ ID NO: 20534

SEQ ID NO: 489639 - DNA, 249 bp, Shigella sonnei; identical to SEQ ID NO: 20513

SEQ ID NO: 489640 - DNA, 225 bp, Shigella sonnei
atgaactgtaacaaaaatgaagaaactcgcctggtttggacggtagtcatcggagataaaaagggcggtgaagagcctcattttgattattctgtggctttgcaggctctcatccttgaagcgcagagataccaacaagagatgcagaagaaccctcaactggaacctcgaccaattggcctattctgcgagcgagtatcagcggcggaactccctgatatctga

SEQ ID NO: 489641 - DNA, 783 bp, Shigella sonnei
atgagcgcgttagctgtattttcgtttcaggaagagcatcaggttcgtgtagtgatgattgatagcgatccgtggtttgtagcggctgatgtttgtaatgccatcgggattatcaatcatcgtgatgctgttggtaagttggatgaagacgaaaagggggtcggttcaacagacacccttggaggtaaacagggagtgacaattatcaacgaatccggcctctataccctaatcctccgctgccgtgatgcggtgaagcaaggcacaacagcttggcggtttcgcaaatgggtaacgaacgaagtcttgccctctattcgcaaaaatggagagtacgtttacatcgagcctgagccaatgcgagcagcagagccgttgaactggaggcagaaagagtatctgcgagggctgattaacgatattgcacaaagttttcaataccgaaatgcctggattagtggtgtatggttggctttgcgtcgggcgtgtcgtaatccatccccgaaccccataacggttgatgatttgccagcaattacggcagaactgcgccggattttgacggctgctgagtcggcattggggaacatgcgcacgtatgaacgagagttgttgcgtgatgttgttcgtgggggtaggcggagtatgtcgtgtggtgatttgcccatcaccgatattaactctgatctggaaaaggcgttacccgcgcattttgaactggcagttcaaaaacttgagcagttatccgcgcagctaaagccagcagaaatcaccaataaatag

SEQ ID NO: 489642 - DNA, 1884 bp, Shigella sonnei
atgagcaaagtaaaaatcggtgaattaataaactcacttgttagcgatgttgagtcaatagataactctgaccgtcctcaaggggagaaaacaaaaaaaataaaggctgttgcattaaaatttaaaaatgcattatttaatgacaagcgaaagtttagggggaaaggattagaaaaaagaattacagccaacacattcaatgcctatatgagcagggccagaaaacggtttgatgataaacttcatcatagctttgaaaaaaatatacatcgcctatctgaaaagtatcctttatataatgaggagctattgtcatggctttctctacctgctgccgatattcgccagagaatgtcagctttacaggcaaaattaaaattaattctccctctatcagaagatttatctaatatcagaattggcgataacaaaagtcataataagttattaaaattatcaaataaatataaagagtggcaattcgccatttctgatttaactagcgataactggaaagataagcgcgattatttatataaattactacagcaaggatctgccttacttgaggagttgaatcagctaaaagttaaccatgagattctctatcatcttcaactaagccctgccgaacgtgcatctatccagcaacgatgggcggacgttctgcacaacaagaaacgtaacgtggtggtcattgattaccctaaatatatgcaagctatttacgatattataaatagccctgctacattaaataatctaaacactcgttcaggtatggctcctttggcatttgcgcttgctgcattgtcaggaagacgaatgattgagattatgtatcaaggtacatttactgtctctggtaagtataccgttgattttttaggtcaggctaaaaaaagaactactgatgatgtgaccagaaaaatatatacattatgcgaagcaaaaacgtttgtttatttaataaatgtacttcgttcatgcccagcagcatctgattttgatgaagtcgttatgggttacggaaataacgacacgcggtctgaaaacggacgtattaatgccatattagcaaaggcttttaacccgtgggttaaatcatttttcaaagatgaccgccgtgtttataaagatagtcgtgctatttatgcccgtattgcgtatgaaatgtttttccgcgtagatcctcgttggaaaaacgtagatgaagatgttttctttatggaaattttaggccatgacgatgaaaacactcaattacactataagcaattcaagctggccaacttctcaaagacatggaggccaaatactggaaacgaaaataccaggctggaagcattgcagcagcttgatgacgaaatgcctggattcgccagaggagatgccggggttcgtctgcataacacagttaagcagctggtagagcaggacccctctataaaaatcacgaacagcactctaagagcgttcaaatttagcccaacaatgattagtcgatacctggaatttgctgctgatgctctggggcaatttgttggcgaaaacggacaatggcaactgaaaatagatactccagaaatcgttatgcctgacgaagaagaactggaagcaatacctgaactggcggatgaattatcagaggatgacgatctggatgacgacgaaattgagatagaggaagagagcgtagaagaacagcaaccgcctgcaccttcttcgcctgtatctaagccggtatttaagccggtaagaaatattggtgatggctcatatgttgttgagtttcattataatggccagaattatgcgtggtccggcagtgcaaacagcccaatgtcagcaatgcagttagcatggctgacatatttcggttaa

SEQ ID NO: 489643 - DNA, 783 bp, Shigella sonnei; identical to SEQ ID NO: 489641

SEQ ID NO: 489644 - DNA, 234 bp, Shigella sonnei
atgaatcaggtaaaaatgaacactgttggcctgctggagtcgttggatgaacgtctggctcaggtctatgcgctcgtgtcatcagcccaccggacagtatccagctgtgaggcgtcgatttatctatcagaagccgggaagctccttcaaattgcgtgtgagctaacacacgaagcacaggggtattcagcatctctctcgtcgcaattgcagcacaataaggaggccaaatga

SEQ ID NO: 489645 - DNA, 225 bp, Shigella sonnei; identical to SEQ ID NO: 489640

SEQ ID NO: 489646 - DNA, 3984 bp, Shigella sonnei
atgacattaaacgatttctatgcggatcgctttggcagcgatccgttctcgctaattgaagcagcacgggatgaactaaccgagctggcacagatggctggtatcaactggtctgcctgttccgacaacatccaactcaaccctcgcgggggtgttgagcgttactcttcatacaataaaacatctccagaagctctcgaaaagagcctcaaaggacgcgtagaaatttactcccggctggaacacagcaaagggattgattacccgttcattaacttcgtccataaaggcagcgatgctggctcatggagcggtttctccttcctgttttctgaatatcgccgtgagcaacaacggaataatgcgaccgtggtcgcacaaccggaagaagaacgggcaagaatagaacgtcaggccgaagcacgtcgtcgccgtgaagaacaaaaacgaattaatgacctgaaaaacaaccaaatggaccatgaacgtttgctgggatggctggcattccacagcgcgtgggaacatgctcctgcagaagacggctcatggccatatgcgattaaaaaaggtattcgtgacgtttttaattcgtgtgatgtgcgtcgcgtgaccagtcacgacagcgcaaaatggagcagggggccaaccacgtatatggctatccctctggctcacctggacggtcgttacgatggtcgtattgtgggttggcagcgaatcgacaaacaaggtggaaaataccagaccagcgccgtaaccagcggcgatttcgtcggtgcctgctttgttatcggtgagctaaaaggggcgcaaaacatcgctgttacagaaggttttgctactggtgcatccatctggcttgccacgaaaaaagataaacgctttgacgctgtggttgtcgctgtatccgctaataacatggttcatgttgtggaacaactggtaaacatgtacccggcggcaaaaatcacctgcgcactggataatgaccggaaatcagccacagaaggaaaagggaataccggcctgcggactggctatgaaatcttatcgaaattcaacgatgtccgctgcgtctatccaacttttgaagacgatccgcaaatggagtgcagtgacttcaacgacctgcacaaactgcgtggacttcgtgaaacagcacgtcaactgtttgcaactgcaaaccgcctgaaaaccggcactgatttgctatctctgacgctcaaccgcctgaagacaattaagcgggataaccgtcgtacttttgccaaagagctgctgagagcggtggatattggcatgctaacctgtccggttcctaacagtccgtcagacttatttaacatgttctgcatcgttctgcgtgaaatggggctggaaaatatctatcgcgctacggtaaaagaccacattgcccgtcgcctgaataaaaagtgccgtattgcccaggctccgcgctcattcagcgaacgcataactgatcccaataaacgtcctcaacatatcacctataagcgttttgaaacttcggtaatgaccgatgacgtcctgaagtatgtgcaatcactacaggggatagtcatcgttcgtgctggtatgggttccggcaaatctactggattgttacgacctttaatgcatagctcagaacgtggtatctctgttgctcaccgtgtttcccttattggtggcctgtgggaaatgatgacagaaggaaaaggtgtaaaagccgatatcctgcactatcaggaccctggctatcaggaaatggctccatacgccagtaaactgaccatctgcataaactcgattgttaaaaactgctggcaaccgttgatgcgccagcacgactattttggctttgacgaggccacgcaagggctacgtgccgttctttccggtcgggctatggaaaacccggtggctgtattcaatacgttaatcgacgcgctggccagaacggaacaacacccaataatggtggatgctgatgcgaacgatctgctggttgacctggctgaactggctatgaaacgccgtgaagaactaggtttaccggcatggctgcagatccacgtaattgaattacctgttgatgttcgcaaccgcgaaacaggtgagccaatccgggttttttatacagaaaaagatcgcattatgaccgaggtggtgaaagctgtatcggatggcgaaaaaatcatgttggccaccgacagctccacctttgcagaagatgtgacagccaccctgagaatgcattttcctggtaagaaatttctgtgtgtaaaccagaaaagtaaacaggatgaagaagtcgatgcctttaccaaccagccaaaagtaatggtgatgaaatacgatggactgatctacagtccgtcaatttcctccggggtgtcatttgagaaaaaacattttgaccgtcatttcggcatgttctgcggtgaagttgtgcccagcgacgcagtgcaaatgctacgccgcgaccgtacagcaaaagaatttattatcggctttgataaagctcgtgcaaaacgcgagactgatccgcaaaaaatagaacgtgcattcgcccaggcattacttgctaccgcaggcatgaacggtgaactgacggatgtcgttttcgatggcgaccgtatatcaatgggggtggccaataccgactttaccaggatgaaaattaaagctgccgcaattgaagcgtctgcgcgtaacgactacgccagcaacatgatctgcatcatgcacagcgacggttataaggtatcgccattagctaccgattatgccgcgaatgattttggtaaagagctgcgcaaagaagcgcgggatattgtgtgggaacagacgctggatctgcacctcaatacagagacaccagaagaatcagagcgtgaagaactgctaaaaaaacgtgcgctaacgcttgaagaacaggcaaaactggtccgctgggatattgagaacgaactgaaattaccggttgaagaaggctcgctgaaattctatttcgatggcgctcgagacaaaattcgccgttatgaaacgatgctgcttgatgaagtcacagcccgtcgttatgaccgtgaagaagcggctatcaattttacatacgcataccgccagaccggacagtggcaatattttgtggtgaccgcgatgacgcgcgagcaggctgatgatgtattcaaagcgaaatttccaggaataatcgactacaaggtaaaagccacccctgctgttgaggtcggcatgcgcggattctatgcgcttaaatcagcgactctccggcagtactttatcgactgcggtatcgaccctgaaactatgaccggcgaagcgacgcaggaacgccttaagttcgctcgagataatctcatgacagcagaacgccgtgatctgttgaataacgttctgcgcattggtggttttatgacaccaaaagggaagcctaaagtgccggaagcactgtttaaaaacatctgcgactctctcggcctaaaaacaggaaaacgtcgcggcagagatggcgataagcgcccgacattgcgttttgttgagcctgagtctgtagcatttatgcttgatattcttgcgcaacgtcaggaggacggtatgacgttgaaagctcgcaaggcggaaaaatcaacgaccgaagtggatcgcgatttgtcattaaatatatatatgaatggtgaaacgcgatccacaaacacggtggaacaggattcccctcgttcagctatatcacaggctttggccgtattgccggtggctgttcctgagtcctgggcgatgagtgctctgccatcagctgaactggaatctatcagggggtggtcagttgacagcatcgcatacacgtttgcagccctttatatgactgagtttatggatttgctgtccggtcatgagattaagttgctgaaggcttttataggcccacgacatgccagcgatgagttttgtgtagtttag

SEQ ID NO: 489647 - DNA, 597 bp, Shigella sonnei; identical to SEQ ID NO: 20514

SEQ ID NO: 489648 - DNA, 249 bp, Shigella sonnei; identical to SEQ ID NO: 20513

SEQ ID NO: 489649 - DNA, 600 bp, Shigella sonnei; identical to SEQ ID NO: 20511

SEQ ID NO: 489650 - DNA, 660 bp, Shigella sonnei
atgaaattttccaaattttctgagttggtgaatcgtattttgtccaacaaccacagccatcgtcgcgatatggatgtaacaatcgttattcattcgcctggcagcattggttcaacaccctcagttgaggttcagtcaattcacgctggttttgattgggattccgggaaagtgctgattttcccagcacagccactgaccacgctaacaccagaacagattactgatattactgatagtgtgcgcaaaggtcagtcctggcacgcatatcaggaatacaagaagcataaagagcagttggaaaaattgtcgattgaactggatgctgcaaaacagcgcgtagcagaactggaagccaaacctgtaagccaaacttacaagttaacttttgagcaatggctggaacagcagcatgacaaaattgatgttgattgtggatgtgtaagtactgaaatgtttattcactggataagggtcgcgtatgaggctggcaactctccggtaactccggatggtcatgttcagttttctgtttcacttcctgcagcgtttggtggagataaatattttattgatggtgtatttcaacctttgagatatgagcgtgattgtgaaagggcggttgtggccgctggcggtgtagttagttgggttaagtaa

SEQ ID NO: 489651 - DNA, 243 bp, Shigella sonnei; identical to SEQ ID NO: 20534

SEQ ID NO: 489652 - DNA, 288 bp, Shigella sonnei; identical to SEQ ID NO: 37050

SEQ ID NO: 489653 - DNA, 312 bp, Shigella sonnei; identical to SEQ ID NO: 37051

SEQ ID NO: 489654 - DNA, 273 bp, Shigella sonnei; identical to SEQ ID NO: 27568

SEQ ID NO: 489655 - DNA, 498 bp, Shigella sonnei; identical to SEQ ID NO: 21460

SEQ ID NO: 489656 - DNA, 183 bp, Shigella sonnei
gtggtgacgctgggcgatccggcgctgtacagtcgtttcggctttgaactggcggcgcatcacgatctgcgttgccgctggccgggcactgaaagcgccttccaggtacatcgtttagcggatgacgcgctgaatggcgtaaccggtctggttgagtatcacgagcatttcaatcgcttttaa

SEQ ID NO: 489657 - DNA, 384 bp, Shigella sonnei
atgaggggatctctcagtacccagtgggtgattgattcgatgcgggtaaaaacgccgggtcatcggacgcaaattggttcgctctccggtggtaatcagcaaaaggtgattattggtcgctggctactaacgcaaccagaaatattaatgctcgatgaaccgacgcgcggtattgatgtcggggcgaagtttgaaatttatcagttaattgccgaactggcgaagaaaggcaaggggattattattatctcctctgaaatgcctgagttgttagggataacagaccgtattctggtcatgagcaatggtctcgtttccggaattgtcgatacaaaaacaacaacgcaaaacgaaattctgcgtcttgcgtctttgcacctttaa

SEQ ID NO: 489658 - DNA, 336 bp, Shigella sonnei
atgtcagactatcaaatgtttgaagtacaggtgagtcaggtggaaccgcttaccgaacaggtgaaacgcttcacgctggtggcaaccgatggcaaaccgctgcctgcgttcaccggaggaagtcacatcattgtgcagatgagcgatggtgataaccagtacagcaatgcgtattcactactgagttcgccgcatgacacctcttgttatcagattgccgttcggctggaggaaaactcgcgcggcggttcccgctttttgcatcagcaggtaaaagtgggcgtttgcgctaattccctcagccagaaagcatctgtttatcgcgggcggtattag

SEQ ID NO: 489659 - DNA, 264 bp, Shigella sonnei
atgtataaacaattcgataaactgcttaatgttacgctgtgttatccggacaataaccgtcagccgttcttcgatatgttaagcggtaaactgacgcggattgtcgtacatgtggatttacagcctattgccgatgagttacatggcgactacatcaatgacaaaagctttaagcgccattttcagcaatggctgaactcattgtggcaggaaaaagaccggcttctgacgtctctcatgtcatcacagcgtcagaataagtaa

SEQ ID NO: 489660 - DNA, 480 bp, Shigella sonnei; identical to SEQ ID NO: 229897

SEQ ID NO: 489661 - DNA, 891 bp, Shigella sonnei
atgattacgctcattctttctgcaccagtaacagaaatggctgaagcatttaagcgggtatttgcaaacgcagataatgtgaatattgtcggaaagccatttgaaacaatcagagaatttgactgcatggtaagtgcggcaaatagtttcggcctgatggatggcggcgttgatgccgccattaccgcattcttcggtactcagttacagtcccgcgttcagaatcatattcttcgtgaatatctaggcgaacagcctgtaggttctgcatttgtaattgaaacggggcataatcatcacccctggctggtacatgcgccaacaatgcgtgttccgctgacaattgacggaacagacgctgtatataatgcaacctgggccgctctgcttgccatctttcagcacaataaaaacgcaacgacagacaggaaaataaagacggtggtattccctgcaatgggggccggatgtggtcaggttccgtttgaaagcgttgcctggcaaatgaagcaggcatgggataactttaataagaaaacagaatcaattaactgggaatacgcacactcccgccagtcggcagtatttggcacatatgcatactgtccgggtaattctgtttgccgttatgcggatactaaatatattggatgcggcgattatcggacgtattgctcacgttccgggcagttctgtattagccatgtgcatcaggctgatgacgtgctgactaataatcgctctcgccctgattcgcatacacaccggtttaatccagaaaatcccgtaggcaatctcacctctggcgcacatagccacggaagtagcatcgttattggtgctcccacccatacgctcaataaacaatattctgtctctgatattaagtag

SEQ ID NO: 489662 - DNA, 123 bp, Shigella sonnei
atgaaaacaaaattgatgacattacaagacgccaccggcttctttcgtgacggcatgaccatcatggtgggcggatttatggggattggcactccatcccgcctggttgaagcattactgtaa

SEQ ID NO: 489663 - DNA, 255 bp, Shigella sonnei; identical to SEQ ID NO: 5118

SEQ ID NO: 489664 - DNA, 861 bp, Shigella sonnei; identical to SEQ ID NO: 5113

SEQ ID NO: 489665 - DNA, 1851 bp, Shigella sonnei
atgaaacgtattttacctctgatactggctctggttgccggcatggcacaggctgacagcaacagtgattaccgggccggttctgattttgcccgtcagattcaggggcagggtacaggcagtattcagggctttaagccacaggagagtatccccagctataacgcgaatccggacgagacaaaatattacggtggcgtgactgccggcggggatggcggcctgaaaaatgacggcaccacggaatgggcgaccggtgaaaccggaaaaaccatcacagagtccttcatgaacaagccgaaagacattctgtcaccggatgcaccgttcattcagaccggcagggatgtggtgaaccgggctgacagcattgtgggaaataccggacagcagtgcagtgcgcaggagataaaccgcagtgaattcacaaactatacctgtgagcgggacacgatggtggaggagtactgcacacggactgccagtatcaccggggactggaaatacacggatgaatatcgtgaagtgacgataccgcactcacagttccggttcagtatgaacgggctgaaactggtgttcagtgtcacggctccggtaaccggtacagtggaaagtgcatcattgtctgtatacgccgcttttttcttcctgaactcccgttataccttcatgaatacaacctttaatgtcggcctggcaaacgggcagtcggatacttaccccctgtccggggcgacaggtttgcaggtgacacaggggcaggttctgaccggtagtggctgtactgctaacggtaattgcctcccgcacgggaatggtgacaggaaagtctatgaatcgcttgtcagtggtgcttccacctttacgctgaaactcaggatgaaggtccgtgataaagaatgggttccccgggtggagtgggtggagagttgtccgtttaataaagcggatggcgtgctgacaggcactgagtgttcagagccgggtggtacgaaaaccggagtgatggaaggtaaaccctggaacatcacacaggcatgctgggcataccgggataaatatgtcactcagtccgcagataacggcacctgtcagaaatatgtcgataatccggcctgtacgctggcctcacgtcagtgcgcgttttattccgatgagggaacctgtctgcatgagtacgccacgtactcctgcgagtccagaacatcaggaaaagtgatggtctgtggtggtgatgtcttctgccttgacggtgaatgcgataaggcacagagcggaaaaagcagtgattttggtgaagcagtatcacagctggctgcgcttgccgccgcaggtaaggatgttgccgccctgaatggtgtggatgtcagggctttcacgggtgaggcgaaattctgccgtaaggccgcagccggcttcagtaactgctgtaaggatggtggctggggtcaggatgtgggtctggcgaagtgcaacagcgaagaaaaggcgctgggaaaggcaaaggacaacaaactgaccgtcagtgtcggagagttctgttcgaagaaagtgctgggtgtctgtctgcagaaaaagcgcagctactgccagtttgattcgaagctggcgcagatagtccagcagcaggggcgtaacgggcagttgcgtatcgggtttggcagtgcgaagcatcctgactgtcgggggattacggttgatgagctgcagaaaattcagttcgacagactggatttcactaacttctacgaagacctgatgaataaccagaaaatcccggacagtggcgttctgacgcagaaagtgaaagagcagattgctgaccagctgaaacaggcaggacagtaa

SEQ ID NO: 489666 - DNA, 258 bp, Shigella sonnei; identical to SEQ ID NO: 5104

SEQ ID NO: 489667 - DNA, 369 bp, Shigella sonnei; identical to SEQ ID NO: 5354

SEQ ID NO: 489668 - DNA, 567 bp, Shigella sonnei; identical to SEQ ID NO: 229889

SEQ ID NO: 489669 - DNA, 360 bp, Shigella sonnei; identical to SEQ ID NO: 5291

SEQ ID NO: 489670 - DNA, 672 bp, Shigella sonnei; identical to SEQ ID NO: 5292

SEQ ID NO: 489671 - DNA, 474 bp, Shigella sonnei
gtgccgcagggcttcctgcgcagcagccgtctgtttcaggggctgattgcccagcgtctgctgccgacactctgtccgcactgcgcacggacacgcgaagaggccgccctgacaccggagcaacagcagttcacggaccgctggttcacgccacagcagcaggaagccctgcgtttccgcaatcctgacgggtgcagtgaatgcatccgtccggtgatgggcaccgcaaccagtcacggtctgaaaggccggacggtggcagcggaagtgatgaaaaccagtccggaaatcctccgcacctaccacgatgagggcgaggatgcggcacgcacactgtggctgcgtcaggggggaatcagtctgagtcagcatgcccggcatcatgtgctggccggacaggtggacccgtttatggccaatgacatcgtgccgtttgaagatgcaaatgcacaggaggcgaagcatggccggtga

SEQ ID NO: 489672 - DNA, 1068 bp, Shigella sonnei
atggccggtgaaatgcaacgcagaatggcccgtctggcgctctccggcagcaaccgtatccgcttctatgaggtgctgaaaatgcaaatcatgagcggacggacacttgagcaggccatgctcaacatccgcgaggtgtacacacggggagggcaacgctttcacccctttggcgtactggcacaggactgtctggactccctgtcggtgaaccgggaaggaaacctgctcccggacgttttccggcgctggttttccggtgaggaggccgcctcgcttgccgtgggcatgcgtgccggctccctgctgacggcgctggacagtctcatccggctgatcaggtccctgcagtccatccgttcagtcattaccggggctgcccttgccccgttcggtgccattcttgccctgagcgggatactgaccctgctgtccgttcagctggttccgcagttcgtcaaaatcatcccgccggagaaagcccgtggtgcccttgccatcacttacggtctggcggacttcgtcaccacagcaggtccctgggtgctgggtatgatcattgtgttttttttgctggcgctctggtccctgccccgctggaccggccggatacggcagtttttcgatcatatccttcccccctggactatgtacaagctgatgcagagcagtgttttcctgctcaacctctccacgctgattggtgcccgcatgacctttcaggatgccctgaaaacgctcagcgacggcggtgtgccgtggctgcaggagcgtctgattccggcacagcatcatttcagcaacggtgcggatctggggaccgccctcgaacgtgccggacacaacttcccctcacaggagatgatccttcacctgaaggcgctctctgctggtgaaggcgcggagctggctattgccaacctggccgactggtggctgggaagaacccgcgcaattgccagaggcatgctctacctgagtctgctgatttcggtcgtcatggttttcggctgtctgggcattatggccagcagcatgatggccctgcgcgaccttgtgaacatgtaa

SEQ ID NO: 489673 - DNA, 606 bp, Shigella sonnei
atggaaacgaaaccggatgtatcactggcggctcacgactgcccgcagaccacgacaactggcaactcacgccgtcgcaagccccatcgggggatcgagatgctgtcggcaatggggtggtggagttatgccatcatcctcttcgtctgcgtgctcgggatgctgtttggtctgtatgtcttcagccgctccggcagcgaagcggccaacctgacccagctggccaccgccacacagcgtgtcggccgtacacaggcagggtacggcacggccaatctgaacaccgtgctctacaacgccgggcaaatcccgagtggctggacctacagcagcgggaccatttacaaccagtggaacggcaccgtcaccgtgaccgggaaaacctcctatttcaccatcacggacaccggtattccgagctctgagtgtatttccatcgcacagtcactggcgtccggtagtgcagcgagctacctgacgatcggaggcacgaaaatcaccccggccagcgatattgccaccatcaacaccgcctgcggtaacgccaacagcagcgtcaacagcacgacaaaaaccatcgtcatgtatgttggcgcactccagtaa

SEQ ID NO: 489674 - DNA, 501 bp, Shigella sonnei
atgacgacacgcatcctgtcgtgcctgctccttttcatctgttttctttttcttccggcacacacgcaggctgccatgcaaccctcagcgggaatgtgtttttccactgcagggaaaatgtaccagatagacccactgttactggaagccatcgcccggcatgaaagcggtctgaatccccgggcaatgaatctccgcaaccgtaacggtacggtcgactacggactgatgcaggtgaactcatcgcatatcccgctcctgaaacagaaagggattatccgcagctggcaggatctgttcgatccctgtctgaatattcagataggtgcctgggtactggcacgccacttccagagctgtggtgtgaactggaactgtcttggcagctacaacgcgggattccgcagcacaatgaaccagcgacgggaggactacgcagacaatatttatgccatctaccggaaactgaaccgggagcgccgcaacatggcattacgttaa

SEQ ID NO: 489675 - DNA, 576 bp, Shigella sonnei
atggcactgacattcttttttgtaccggcaggaacgctcgctgccttcgccctgatccgctactacgacgatcattccggacggctgaaccgtcgggatatctgtaccggcctgctctggtgtgttctgtggctgctgctgagcattttttcacgctcgccgctgtccctgcccctgtcgctgagcatgggactgctgtgtgcatgtaccgtaactgacgccctgcgcacctggctgccagccgaactgacgctgccccttgccgtatccatgctctggcatgccagcctcttcccgtgggggtttcagaatgccctcatctggggggcggtctgggccacattttacggtggtcgctggctgttttaccggctgcagcgtcgggaggacagtccaggcggcggcgacattattctggcgggtatcgccggcattgccggcggcccgtcatccgcgtttctgattgcatccgccattgcaggtcatctggcctggggaaccgtgcgccatctgcacgaagctccgttcggcccctggctctgtctggctatcactgttcaactgctcttcttctga

SEQ ID NO: 489676 - DNA, 219 bp, Shigella sonnei
atgagccgtgttcctttcaccgtcgctgcgcgaaccttgcctgtcacatccagactggtgttgctggtcgttttgatccacacgctctctttgtcactgctggatggcgcggaggtcgaaaagtacatgcctgctctcagtgatgttgcatcactggcggttccgcttgcactacttgatgcccatcccacaaaaccggttgagccgctgctgccatga

SEQ ID NO: 489677 - DNA, 1767 bp, Shigella sonnei
gtgtccattaaatggtacgaggacggcacgctgaatctggcggcaaactgccttgaccgccatctgcaagaaaacggcgatcgtaccgccatcatctgggaaggcgacgacgccagccagagcaaacatatcagctataaagagctgcaccgcgacgtctgccgcttcgccaataccctgctcgagctgggcattaaaaaaggtgatgtggtggcgatttatatgccgatggtgccggaagccgcggttgcgatgctggcctgcgcccgcattggcgcggtgcattcggtgattttcggcggcttctcgccggaagccgttgccgggcgcattattgattccaactcacgactggtgatcacttccgacgaaggtgtgcgtgccgggcgcagtattccgctgaagaaaaacgttgatgacgcgctgaaaaacccgaacgtcaccagcgtagagcatgtggtggtactgaagcgtactggcgggaaaattgactggcaggaagggcgcgacctgtggtggcacgacctggttgagcaagcgagcgatcagcaccaggcggaaaagatgaacgccgaagatccgctgtttattctctacacctccggttctaccggtaagccaaaaggtgtgctgcatactaccggcggttatctggtgtacgcggcgctgacctttaaatatgtctttgattatcatccgggtgatatctactggtgcaccgccgatgtgggctgggtgaccggacacagttacttgctgtacggcccgctggcctgcggtgcgaccacgctgatgtttgaaggcgtacccaactggccgacgcctgcccgtatggcgcaggtggtggacaagcatcaggtcaatattctctataccgcacccacggcgatccgcgcgctgatggcggaaggcgataaagcgatcgagggtaccgaccgttcgtcgctgcgcattctcggttccgtgggcgagccaattaacccggaagcgtgggagtggtactggaaaaaaatcggcaacgagaaatgtccggtggtcgatacctggtggcagaccgaaactggcggtttcatgatcacgccgctgcctggcgctaccgagctgaaagccggttcggcaacacgtccgttcttcggcgtgcaaccggcgctggtcgataacgaaggtaacccgctggaaggcgctaccgaaggcagcctggtgatcaccgactcctggccgggtcaggcgcgtacgctgtttggcgatcacgaacgttttgaacagacctacttctccaccttcaaaaatatgtatttcagcggcgacggcgcgcgtcgcgatgaagatggctattactggatcaccgggcgtgtggacgacgtgctgaacgtctccggtcaccgtctggggacggcagagattgagtcggcgctggtggcgcatccgaagattgccgaagccgccgtagtaggtattccgcacaatattaaaggtcaggcgatctacgcctacgtcacgcttaatcacggggaggaaccgtcaccagaactgtacgcagaagtccgcaactgggtgcgtaaagagattggcccgctggcgacgccagacgtgctgcactggaccgactccctgcctaaaacccgctccggcaaaattatgcgccgtattctgcgcaaaattgcggcgggcgataccagcaacctgggcgatacctcgacgcttgccgatcctggcgtagtcgagaagctgcttgaagagaagcaggctatcgcgatgccatcgtaa

SEQ ID NO: 489678 - DNA, 1227 bp, Shigella sonnei
atgcgttttcatgttgcctgcccgcactgcggggaggagcagtaccttaaatttggcgacaaagagacgccgtttggcctcaaatggacgccggatgatccctccagcgtgttttatctctgtgagcataatgcctgcgtcatccgccagcaggagctggacttcactgatgcccgttatatctgcgaaaagaccgggatctggacccgtgatggcattctctggttttcgtcatccggtgaagagattgagccgccggacagcgtgacctttcacatctggacggcgtacagcccgttcaccacctgggtgcagattgtcaaagactggatgaaaacgaaaggggatacgggaaaacgtaaaaccttcgtgaacaccacgctcggtgagacatgggaagcgaaaatcggtgaacgtccggatgctgaagtgatggcagagcggaaagagcattattcagcgcccgttcctgaccgtgtggcttacctgactgccggtatcgactcccagctggatcgctacgaaatgcgcgtatggggatgggggccgggtgaggaaagctggctgattgaccggcagattattatgggccgccacgatgatgaacagacgctgctgcgtgtggatgaggccatcaataaaacctatacccgccggaatggtgcagaaatgtcggtatcccgtatctgctgggatattggcgggattgacccgaccattgtgtatgaacgctcgaaaaagcatgggctgttccgggtgatccccattaaaggggcatccgtctacggtaagccggtggccagcatgccacgtaagcgaaacaaaaacggggtttaccttaccgaaatcggtacggataccgcgaaagagcagatttataaccgcttcacactgacgccggaaggggatgaaccgcttcccggtgccgttcacttcccgaataacccggatatttttgatctgaccgaagcgcagcagctgactgctgaagagcaggtcgaaaaatgggtggatggcaggaaaaaaatactgtgggacagcaaaaagcgacgcaatgaggcactcgactgcttcgtttatgcgctggcggcgctgcgcatcagtatttcccgctggcagctggatctcagtgcgctgctggcgagcctgcaggaagaggatggtgcagcaaccaacaagaaaacactggcagattacgcccgtgccttatccggagaggatgaatga

SEQ ID NO: 489679 - DNA, 207 bp, Shigella sonnei; identical to SEQ ID NO: 12686

SEQ ID NO: 489680 - DNA, 492 bp, Shigella sonnei
atggctgtaggggttgccatccaccttatggctgccgctgtaaatcagcgtgatttccacgccctgtttctccagcgcagcgccgtaattactgtgagccatcatgacgccgatggagcctgtccgggcggtctgcgtgaccagacgtcgggaggcggcgctggcaagcagctgccctgcactgcagttcatgtcgttggccagcgcccataccggctttatgtcacgcacacgggcgatgatgtcagcgcagtcaaatgcccctgccaccatcccgcctggcgtgtccatatcgagcagaatgccgtccaccatcgggtcgctggcagcctgttgcagacgggcgataatgccgttgtaaccggtcatccccgaatacggctgcagcgcccgcgtccggctgaccagcgtgccggaaaccggcagcacggcgatgccgttcatgacctgataactgcgggcctgtcgtggtccgtcatcatcaccggataa

SEQ ID NO: 489681 - DNA, 144 bp, Shigella sonnei
atgcggctgttttctgccgcaaccgctgcggtgatctgcgcgttcacgtccgactgcgccgcgctggcgttctcgccctccttcgctggctccacgctggtgatgtcagcctgcgaggcagtagctgaaacagttgttgattga

SEQ ID NO: 489682 - DNA, 708 bp, Shigella sonnei; identical to SEQ ID NO: 12498

SEQ ID NO: 489683 - DNA, 225 bp, Shigella sonnei; identical to SEQ ID NO: 5227

SEQ ID NO: 489684 - DNA, 237 bp, Shigella sonnei; identical to SEQ ID NO: 5228

SEQ ID NO: 489685 - DNA, 510 bp, Shigella sonnei; identical to SEQ ID NO: 486925

SEQ ID NO: 489686 - DNA, 546 bp, Shigella sonnei
gtggcttgctcagtggctttgccagccttcgttgtggctgttgaagcggatgatgcggcgctttctgccgattttccggcggcggtggcactggctgaggcctgcccggcacttgttgacgcggcactggcagataatgcagccgctgtttttgaacctgccgcagctgaggcgctctgtcccgctgctgtttcagaagacttagcgttcgtctcggacgtttttgccgccttcgcggaatttcctgccgccgttgccgaggaagctgcactactggcacttgatgatgcattcgtttctgaagatttcgctgcctcttttgaggccgccgcaccccgtgccgaggtggcagcttctgacgccttcgtggtcgctgtggatgcagaagtggctgccgatttttgtgatgctgcggcattcgtttctgacgttttcgcggcactggcgctggtagctgccgcgctttttgatgactctgcagcagcactttttgctgcttcacgggcctttgtcgatgccgttcctgcgctggaagacgctgactga

SEQ ID NO: 489687 - DNA, 348 bp, Shigella sonnei
atggatgatattgatgaactaaaaattcagcttaaggaactgaaccagaagcgcacagaactacagaccacgattgataacatgaggcgtaaggcttcactcactgataaggaactaccccagcttaaagatattgaccttatgactaaagcgggtcgtgtcgagtgtcagttgattttgtccaagcatctaaaagggcttacattgggtaaggattcggtaactgtaacgctacagaacgacactgaaatcaccatacctacaaacccgttaccgctaaatgatgggtcaccaatctttgaaattgctgataaagagctactggatattgacgcttatcaactgtaa

SEQ ID NO: 489688 - DNA, 483 bp, Shigella sonnei; identical to SEQ ID NO: 483872

SEQ ID NO: 489689 - DNA, 210 bp, Shigella sonnei; identical to SEQ ID NO: 486270

SEQ ID NO: 489690 - DNA, 159 bp, Shigella sonnei
gtgttattttatttttgtaatggacttctgacggacggttttattttgcgtgaggacgaatttgtcacatcattacgggttttgaaagagattggttttaaggctggttttctgcttttgctgaagaataaactcatctacaatcttgagcaggattga

SEQ ID NO: 489691 - DNA, 264 bp, Shigella sonnei
atgaaaatttacgcgcgtggcgggaatccgccctacagaacaattgacgcaggagatgcagacaactgtgctaataccttttccctggtggctactgttggcggacaggtagttgctaattctactgacaacaattcaaactggggaaagtcagggaatatcattttcgatgttcccgctggttcggcattttctgtcacatctgcgggaatggtgaactacggctgtgactacggcactttctcgatgttgcagtatcagtag

SEQ ID NO: 489692 - DNA, 198 bp, Shigella sonnei
gtggactacaacgcctgcaagtggtatgcgtcctctgtggcatttaatcatttcatcggcggcgatagcggtggttcgatctactacaaacctgtttcctgccctacaggatatgtgatgacgggcacccggatgtacggcataggtgatggagttgatgaggagcatgtggatgcctactgttgcccgtttaattga

SEQ ID NO: 489693 - DNA, 165 bp, Shigella sonnei; identical to SEQ ID NO: 489147

SEQ ID NO: 489694 - DNA, 507 bp, Shigella sonnei
gtgtccgttaaactcaggctacctcataccgtattgtttatgtcttcggtcatgctgcctttgtttatggcagaaggcaccaatatcgacaaactgatccgcgcgctggttggcgtgatcctgtttcagtcagcatatgttgcggaagtcgtgcgaggcggattacaggcgctgcctaaagggcaatatgaagcggcagagtcactggcattgggttactggaaaactcaggggctggttattctgccacaggcgttgaagctggtaattcctgggctggtaaataccatcatcgcactcttcaaagataccagcctggtgatcattatcgggttgttcgatcttttcagtagcgttcagcaggcaaccgttgatcccgcctggttgggtatgtcgacggaagggtatgttttcgccgcactgatctactggatcttctgtttcagcatgtcgcgctatagccagcatctggaaaaacgttttaacaccgggcgtacaccgcattga

SEQ ID NO: 489695 - DNA, 159 bp, Shigella sonnei; identical to SEQ ID NO: 489690

SEQ ID NO: 489696 - DNA, 291 bp, Shigella sonnei
atgtggtccagtaccatcagcaccagcgccaccgttttgatgatatcccgctgtccgggtgaccagaccagaaacgactgcaaccaggtatcggtccgtgcagccagtgaatcgttacgtgtcgtgttcgtgttatccgttgtcatcagcgtttatcttcctgtatcagtctccgcccagggttttctctttctgcaggtcacgaaccatatcccgctctatctgctgcagacgctcctgcagcagattttcccgggcaacctcccggaccgcttcctgctcccgttgtga

SEQ ID NO: 489697 - DNA, 366 bp, Shigella sonnei
atgattgatgtcttaggaccggagaaacgcaaacggcgtaccacacaggaaaagatcgcaattgttcagcagagctttgaaccggggatgacggtctccctcgttgcccggcaacatggtgtagcagccagccagttatttctctggcgtaagcaataccaggaaggaagtcttactgctgtggccgccggagaacaggttgttcctgcctctgaacttgctgccgccatgaagcagattaaagaactccagcgcctgctcggcaagaaaacgatggaaaatgaactcctcaaagaaaccgttgaatatggacgggcaaaaaagtggatagcgcacgcgcccttattgcccggggatggggagtaa

SEQ ID NO: 489698 - DNA, 462 bp, Shigella sonnei
atgctcaatacaatcgctgaccaggtacatttccaccgacgaaaaacgtgcgccccggttcaggatggcatcgagcacctcaggcagattttcgtcatcttcatcaagccagcaggggtaatcgctttccttcacgaccaggcgaaagctgcgcgtctggcgggtcagcaatgtctgaccggtggtggtcagcgccgcccggatacaccgcgcatcttctgccacccggcaactgacactgcatactgcatcgcgcaccgcatcaagaactgccctgatttcgtcctctgccagccactcaccggcatacgggaaagacacctgcgttccgtctgccggaagtaccggcagcgactgccactgactgccggacagaacaagttccgctccggttccggtcagtttctgaatggcggaggccaggagcggcggcagtacgccgccgtgacggttgataagtaa

SEQ ID NO: 489699 - DNA, 381 bp, Shigella sonnei; identical to SEQ ID NO: 458903

SEQ ID NO: 489700 - DNA, 354 bp, Shigella sonnei; identical to SEQ ID NO: 466835

SEQ ID NO: 489701 - DNA, 327 bp, Shigella sonnei; identical to SEQ ID NO: 485848

SEQ ID NO: 489702 - DNA, 192 bp, Shigella sonnei; identical to SEQ ID NO: 5763

SEQ ID NO: 489703 - DNA, 423 bp, Shigella sonnei; identical to SEQ ID NO: 5317

SEQ ID NO: 489704 - DNA, 366 bp, Shigella sonnei; identical to SEQ ID NO: 488120

SEQ ID NO: 489705 - DNA, 576 bp, Shigella sonnei; identical to SEQ ID NO: 5316

SEQ ID NO: 489706 - DNA, 576 bp, Shigella sonnei; identical to SEQ ID NO: 5316

SEQ ID NO: 489707 - DNA, 366 bp, Shigella sonnei; identical to SEQ ID NO: 488120

SEQ ID NO: 489708 - DNA, 276 bp, Shigella sonnei; identical to SEQ ID NO: 484087

SEQ ID NO: 489709 - DNA, 357 bp, Shigella sonnei
gtggtgctgttcggcaagctcgcggaagtggcaggtgaatatctgcgtaagggggcgcaggtctacattgaaggccagcttcgcacccgtagctgggaagataacggtattacccgttacgtcaccgaaatccttgttaaaaccacgggcaccatgcagatgctggggagtgcaccacagcagaacgctcaggtgcaaccgcagcctcagcagaatggtcagtcacagagtgctgacgcgacgaaaaaagggagcgcgaaaacgaaaggccgtggacgtaaggctgcgcagccggagcctcagccgcaaccaccggagggggaggattacgggttttcagacgatatcccgttctga

SEQ ID NO: 489710 - DNA, 333 bp, Shigella sonnei
atgacgagcaaagaaacctttacccattaccagccgctgggcaacagtgacccggctcataccgcaaccgcgcccggcggattgagtgcgaaagcgcctgcaatgaccccgctgatgctggacacctccacccgtaagctggttgcgtgggatggcaccaccgacggtgctgccgttggcattctggcggttgatgctgaccagaccagcaccacgctgacgttctacaagtccggcacgttccgttatgaggatgtgctctggccggaggctgccagcgacgagacgaaaaaacggaccgcgtttgccggaacggcaatcagcatcgtttaa

SEQ ID NO: 489711 - DNA, 321 bp, Shigella sonnei
atggaaatttctctgaccggtcatgaaatcaggaccgtcctggcacgcctggaggacatcccggaagaccagcggattgagtccggtatttcttccgctgcggtgatggagattatccgcaacgagagcgaaaaccgcctggtgaccgtccctgctgaactgctggcgtccctgattcagaccgctgaacaggcattgtggaaacgtgaatgggccgcccgggatcatggcctcgccgtcccggaatgcgtcacccgccgtcaggaggtggttaatcaggcccgcaccctgctgagaaacaacacacacgaaaacgactga

SEQ ID NO: 489712 - DNA, 267 bp, Shigella sonnei; identical to SEQ ID NO: 11114

SEQ ID NO: 489713 - DNA, 249 bp, Shigella sonnei
atgacgttttcactcagctatgaacaactgacccggtttgcggaacgacgcatccgggaatgcaatctggacagccacggcgtaacttatctctgcgagtcagccaaagccggagccgtgctgatcttctggcatgaactggccataaatggctatgcctcaatgaatgccataaagagacaggagatcattgacgccgaccatcagcgcctcagaaagctcatctggccggaggatgactggaaatga

SEQ ID NO: 489714 - DNA, 2163 bp, Shigella sonnei; identical to SEQ ID NO: 481645

SEQ ID NO: 489715 - DNA, 738 bp, Shigella sonnei
atgcctgaccattctctttttcgattacggattcttccgtggtgcattgcgctggcaatgtcagggagttatagcagtgtctgggctgaagacgacattcagtttgattcccgttttctggaattaaaaggcgacacaaaaattgatctgaagcgtttttccagccagggatatgttgagcccggaaaatacaatttacaggttcaactaaataaacagccattggcggaagagtacgatatttactggtatgctggtgaagatgacgcgagcaaaagctatgcttgtctgacaccggaactggtagcgcagtttggtttaaaagaagacgtggcgaaaaatctgcaatggagccacgatgctaaatgcctgaaatccggtcaactggaaggcatggaaattaaggttgatttaagccagtccgcattagtcatttcactgccacaggcttacctcgaatatacttatcccgactgggatccgccttcacgttgggatgacggcatctccgggatcgtcgcggactacagcatcaacgcacaaacccggcacgaagaaaatggcggtgatgatagtaacgagatcagcggcaacgggacggtcggggttaacctggggccgtggcgtatgcgtgctgactggcagactaactatcaacatactcgcagtaatgatgacgatgaattcagcggcgatgaaactcaaaaaaaatgggagtggagtcgctactatgcctag

SEQ ID NO: 489716 - DNA, 495 bp, Shigella sonnei
atggcgcaattctactctgcaaaacgacgcacgacgacgcgtcagatcataaccgtttcagtcaacgacctcgactcttttggtcagggcgtggcgcgacataacggcaaaacgctatttatccccggattattgccgcaggaaaacgcggaagttactgttactgaagataaaaaacagtatgcccgcgctaaagtcgtacgccggttaagcgatagcccgggacgcgaaacgccacgctgtcctcattttggcgtatgcggcggctgtcagcaacaacacgccagcgtggatttacagcagcgaagcaaaagtgcggcactcgcccgattaatgaaacacgaagtctctgaagtgatcgccgatgttccctggggctatcgccgtcgcgcgcgtttaagtctgaactacttaccgaaaacacagcaacttcagatgggtttcgcaaagcgggctccagtgacattgtcgacgttaaacaatgccccattttag

SEQ ID NO: 489717 - DNA, 1884 bp, Shigella sonnei; identical to SEQ ID NO: 489642

SEQ ID NO: 489718 - DNA, 783 bp, Shigella sonnei; identical to SEQ ID NO: 489641

SEQ ID NO: 489719 - DNA, 165 bp, Shigella sonnei
atgttcaaattcaaatttgcggcagtcgttcgcacagacaaaaagtcacacatccatcatctttccactatcgcgtcatctgaacgggaagctcgtcgccagttcgccagccggtttgtcctggtattgtctgcccgtattccggtgcgcgaggtggctgcatga

SEQ ID NO: 489720 - DNA, 225 bp, Shigella sonnei; identical to SEQ ID NO: 489640

SEQ ID NO: 489721 - DNA, 249 bp, Shigella sonnei; identical to SEQ ID NO: 20513

SEQ ID NO: 489722 - DNA, 660 bp, Shigella sonnei; identical to SEQ ID NO: 489650

SEQ ID NO: 489723 - DNA, 204 bp, Shigella sonnei; identical to SEQ ID NO: 21458

SEQ ID NO: 489724 - DNA, 288 bp, Shigella sonnei; identical to SEQ ID NO: 37050

SEQ ID NO: 489725 - DNA, 228 bp, Shigella sonnei; identical to SEQ ID NO: 27566

SEQ ID NO: 489726 - DNA, 468 bp, Shigella sonnei; identical to SEQ ID NO: 20547

SEQ ID NO: 489727 - DNA, 597 bp, Shigella sonnei; identical to SEQ ID NO: 21463

SEQ ID NO: 489728 - DNA, 546 bp, Shigella sonnei; identical to SEQ ID NO: 27574

SEQ ID NO: 489729 - DNA, 759 bp, Shigella sonnei; identical to SEQ ID NO: 482532

SEQ ID NO: 489730 - DNA, 510 bp, Shigella sonnei; identical to SEQ ID NO: 483719

SEQ ID NO: 489731 - DNA, 1449 bp, Shigella sonnei
atgcaccgcactcttcctggaaaacgccccgcccgggggattgatcttatcggcacctttgcatccgtggctgttggttttttgattgtcggtctggcgctgaccatgctctaccggagcagcgaggacagcaataacaacgttgtggcccgtcaggcaaccagctgggccacagcggccaaactgtatattgccgcgaactacgacaccctgctggcctcagcccccaccacaatcagccgcagcacgctggtcaacagcggatacctgaacagtggtgaaccggagaccaatctgttccagcagacctggaaagtcgctgtcaggaaaaacaccaaaaacagcgatcaactggatgccgttctgctgtccagtggcgggcaggcaatggattacccgacgctgcgctacattgcggcggccattgacggttacggcggttttgtctacagcggcagcatgccgtcaggctgtaccagcagcaccaccacggtgaacggtgcggcctgtggctggacgctggatctgtccggattcggtatcagcacaaccagcggtcacattgccgtcaatctgggggcagacattgccggcagcgccagcagcggcggcgacttcctgcaccgctattccgtgccgggtcatgccgaatacaaccagatgaacacggcgctggacatgaacggcaaaaacgtaaaccgtgccggcaaccttctggtgacgtctgacggaaaatcatcagatgatcatggcagcagcggctcaaccggttttgtgggatgggcatcaagtagtgcaagcggaaccgccagtgatgcaacatcactgagagcaggcatgtacttttcgacctccgcgccatccagcagtgacaaagagagcgtgtggatcaaaacgaccagcaacaccagtctggatgtgacaggcaaggttcgcgcagcgacggtgaaaggaacacggctcatcacatccgagggctatctgatgccaggaaaaacggtaacagcaaacacatcctgtacgccagccgcactgggtatttcggaccttcttgcagacacaacaggccttgtagcccatgacagcactggtgccacactttcgtgccaatccggtgtgtggaagagtttaggaacaacaaacgggacgtatacaaatctgggttctcatagcggcagcttttcaggttcgaacaacggtacgggaacactgtttgtatacgccagtggaggaaacggcggttcctcctgtgtgaatccagccaaactacagggatttgttaatggtaatgagattgctgttaacgccaacaacaatccggattacgggaaaacggtatttatcacattcgcggtgccgaatggagcatcataccaaataacttcatatccgacggagaaccactcctgtggacccggttatttttccgtctggggataccagacctga

SEQ ID NO: 489732 - DNA, 264 bp, Shigella sonnei; identical to SEQ ID NO: 489659

SEQ ID NO: 489733 - DNA, 888 bp, Shigella sonnei; identical to SEQ ID NO: 483279

SEQ ID NO: 489734 - DNA, 1965 bp, Shigella sonnei
gtgagcatggatataagcgatttttatcagacattttttgatgaagcggacgaactgttggctgacatggagcagcatctgctggttttgcagccggaagcgccagatgccgaacaattgaatgccatctttcgggctgcccactcgatcaaaggaggggcaggaacttttggcttcagcgttttgcaggaaaccacgcatctgatggaaaacctgctcgatgaagccagacgaggtgagatgcaactcaacaccgacattatcaatctgtttttggaaacgaaggacatcatgcaagaacagctcgacgcttataaacagtcgcaagagccggatgccgccagcttcgattatatctgccaggccttgcgtcaactggcattagaagcgaaaggcgaaacgccatccgcagtgacccgattaagtgtggttgccaaaagtgaaccgcaagatgagcagagtcgcagtcagtcgccgcgacgaattatcctttcgcgcctgaaggccggggaagtcgacctgctggaagaagaactgggacatctgacaacgttaactgacgtggtgaaaggggcggattcgctctcggcaatattaccgggcgacatcgccgaagatgacatcacagcggtactctgttttgtgattgaagccgatcagattacctttgaaacagtagaagtctcgccaaaaatatccaccccaccagtgcttaaactggcagccgaacaagcgccaaccggccgcgtggagcgggaaaaaacgacgcgcagcaatgaatccaccagcatccgtgtagcggtagaaaaggttgatcaattaattaacctcgtcggcgagctggttatcacccagtccatgcttgcccagcgttccagcgaactggacccggttaatcatggtgatttgataaccagcatggggcagttacaacgtaacgcccgtgatttgcaggaatcagtgatgtcgattcgcatgatgccgatggaatatgtttttagtcgctatccccggctggtgcgtgatctggcgggaaaactcggcaagcaggtagaactgacgctggtgggcagttctactgaactcgacaaaagcctgatagaacgcattatcgacccgctgacccacctggtacgcaatagcctcgatcacggtattgaactgccagaaaaacggctcgccgcaggtaaaaacagcgtcggaaatttaattctgtctgccgaacatcagggcggcaacatttgcattgaagtgaccgacgatggggcggggctaaaccgtgagcgaattctggcaaaagcggcctcgcaaggtttgactgtcagcgaaaacatgagcgacgacgaagtcgcgatgctgatatttgcaccaggcttctccatggcagagcaggtcaccgacgtctccgggcgcggcgtcggcatggacgtcgttaaacgtaatatccaggagatgggcggtcatgtcgaaatccagtcgaagcaggggactggcactacgatccgcattttactgccgctgacgctggccatcctcgacggcatgtccgtacgcgttggggatgaagttttcattctgccgctgaatgctgttatggaatcactgcaaccccgtgaagccgatctccatccactggccggcggcgagcgggtgctggaagtgcggggtgaatatctgcccatcgtcgaactgtggaaagtgttcaacgtcgcgggcgcgaaaaccgaagccacccagggaattgttgtgatcttacaaagtggcggtcgccgctacgccttgctggtggatcaattaattggtcaacaccaggttgtggttaaaaaccttgaaagtaactatcgcaaagtccccggcatttctgctgcgaccattcttggcgacggcagcgtggcactgattgttgatgtctccgccttgcaggcgataaaccgcgaacaacgtatggcgaacaccgccgcctga

SEQ ID NO: 489735 - DNA, 123 bp, Shigella sonnei; identical to SEQ ID NO: 489662

SEQ ID NO: 489736 - DNA, 261 bp, Shigella sonnei
atggatcaggaaatgacgttttcactcagctatgaacaactgacccggtttgcggaacgacgcatccgggaatgcaatctggacagccacggcgtaacttatctctgcgagtcagccaaagccggagccgtgctgatcttctggcatgaactggccataaatggctatgcctcaatgaatgccataaagagacaggagatcattgacgccgaccatcagcgcctcagaaagctcatctggccggaggatgactggaaatga

SEQ ID NO: 489737 - DNA, 294 bp, Shigella sonnei
gtgatcagggtcgtccgtggagcaaacataaccctgaggcttattgagcatgaagtaacgtggaccgtgttgctgcgccagcgggttgccatcgtaagcgacatcatgttcaggaagcagtttgaacgctgcattacggacgatttcgccatcgacggtgacacgattgccgcggatttcacgcccggcaatagcacggctaacgccgagttgctgtgcgataaatttatcaagtcgcatgtgtgtgattttgcctgtaaaaaacggaggtcgggtaatgacccgaatatctga

SEQ ID NO: 489738 - DNA, 615 bp, Shigella sonnei; identical to SEQ ID NO: 482875

SEQ ID NO: 489739 - DNA, 1227 bp, Shigella sonnei; identical to SEQ ID NO: 489678

SEQ ID NO: 489740 - DNA, 480 bp, Shigella sonnei
atgtggcggggtcagtcggcggatgcgttccagaacgccgcctgtcgcaatatttttcatggtccgttaccccctgaagcctggcgggatcgcactgtccggcaacgagacggtgttaacctgtcggagcaacgtctcaggccgaacacctttcggcgcgaacaggccctggtattcattggcgatgctgtgtcgaatcacctgctcaggtgtaaaaccctgctgacggaatttttccagttcccgtatcgccccgttagcgccctgctccgttcgaatcggttttcgcaatgcctgtctgaaccggacccactcatgccagagtgtttccggcaaccaatcgggcagctcaatagcctccggctcgaattttttagacgctcgtttttggcgagggggagatcagtatttagatcttcctcttcctcttcctcttcctcttcctcttcctcttcctcttcctctggtaacgctttttga

SEQ ID NO: 489741 - DNA, 378 bp, Shigella sonnei; identical to SEQ ID NO: 476066

SEQ ID NO: 489742 - DNA, 1683 bp, Shigella sonnei; identical to SEQ ID NO: 484981

SEQ ID NO: 489743 - DNA, 738 bp, Shigella sonnei; identical to SEQ ID NO: 487141

SEQ ID NO: 489744 - DNA, 483 bp, Shigella sonnei; identical to SEQ ID NO: 11476

SEQ ID NO: 489745 - DNA, 198 bp, Shigella sonnei; identical to SEQ ID NO: 489692

SEQ ID NO: 489746 - DNA, 741 bp, Shigella sonnei; identical to SEQ ID NO: 483622

SEQ ID NO: 489747 - DNA, 570 bp, Shigella sonnei
atggaggttttcccattcatccttagagatgttatctttacttgcttcgaagtcttttgcagtgagatgtatatcttctggatggatttgtttacgttcttttgttactggatctttaatgaatggaatcaaaacctgaccttgccaatagccagggataccaccttctatatctttactgatcttcgctcgtatatcagcagagggataatccaggtcatttttaccactacccccaattcccataaagttaaaggtataatcaggaatgatatcgataccaaattttttagcatctttaaccaatgcaataaaatcctgcaaatctcccattggattatggatggtacaaagatcttcgggttgataagcatgaaaccagtaacccttttcttcttcgggagtttctggtccgtcggcgcggaaagttgtcactggagggatttgtatatacccataatggcaacgtgcaaactcagacatattttccctgatttgctggtaggtggcattaaaagcatgaagaatcgcttcgccgggttttttaggggtgatgatttcacattgtga

SEQ ID NO: 489748 - DNA, 153 bp, Shigella sonnei
atgttaatcaatatccgtctttctgatgggatgcttgagattgtggaacccggttttgatgcaagggttaggagatctcccccgaatgaaaaggcttttatcgtcttcatgagcaatgaaaaatcaatggcgcttaaatcatctctttcataa

SEQ ID NO: 489749 - DNA, 1476 bp, Shigella sonnei
atgattcagtcaacacgtatttccatggggttattctttaaatattttttatcgttaacgaaaattgatcctggtcaaaactatatatctctgccatcaataaaatccagcactcacattgctctcctttttatggtttctatgggtacacaaaaattaaaagctcaaagcttttttattttcagtttattgctgacgttaattttattttgcattactaccttatataacgaaaacacaaatgtaaaactcatcccacagatgaattacctgatggttgttgtggctttgtttttccttaacgccgtcatttttcttttcatgttaatgaaatatttcactaacaaacaaattttaccaacactcattttaagccttgcatttttaagtggccttatctatttagttgaaaccattgtaattatccataaaccaattaacggcagtacactgatccagacaaagtcgaatgatgtttctattttctatattttccgccaactcagttttatttgtttaacctcgctggcactcttttgttatggaaaagacaacatccttgacaacaataagaaaaaaacgggaatcctgttgctggcgctgattccttttttagtttttccccttctggcacacaatctgagcagttataacgctgactattctttgtatgtcgtcgactactgtccggacaaccatactgcgacctggggaatcaactatacaaaaatattggtttgtctgtgggcatttttactgttctttattatcatgcgtacacgattagccagcgaactatggccgttaatagcattattatgtctggcatcgctatgctgcaacttacttctactgactctggatgagtataattacaccatctggtatatcagtcgcgggattgaagtttccagtaaactgtttgttgtgtcttttctgatttataacatttttcagaaactgcaactctccagcaaactggcagttcatgatgtgctgaccaatatttataatcggcgctactttttcaacagcgtagagtcattattgtcgagacctgttgttaaggacttctgtgtcatgctggttgatattaatcagttcaaacgcatcaatgcccaatggggacatcgtgtgggtgataaagtgctggtttcaattgtcgatattatccagcaaagcatccgccccgatgatattttagcgcgactggagggtgaggtgtttggcttgctatttaccgaactcaatagtgcccaggcaaaaatcattgcggaacgtatgcgtaaaaatgtcgaactcctgaccggctttagtaacagatatgatgttcctgaacaaatgaccatcagtattggcacggttttttcaacgggtgacacgcgtaatatctcgcttgtcatgacggaagcagataaagccttacgcgaagcgaaaagcgaggggggcaacaaagtgattattcatcatatttaa

SEQ ID NO: 489750 - DNA, 297 bp, Shigella sonnei; identical to SEQ ID NO: 484519

SEQ ID NO: 489751 - DNA, 561 bp, Shigella sonnei
atgacagagcagaagcgaccggtactgacactgaagcggaaaacggaaggggagacgcctgtccgcagccggaaaaccatcatcaatgtcaccacgccaccaaagtggaaggtgaaaaagcagaagctggccgagaaagcagcccgggaagcagagctggcggcaaaaaaagcgcaggccagacaggcactgtccatttatctgaacctgcccacgctggatgaggccgtgaataccctgaaaccctggtggccgggattatttgacggtgacaccccccggcttctggcctgcggtatccgggacgtgttactggaagacgtggcgcagcggaatatcccgctctcgcataaaaaactgcgcagggcgctgaaggccatcacccgttcagaaagctatctgtgtgccatgaaagccggtgcctgccggtatgacacggaagggtatgtgacggagcatatttctcaggaggaggaagcgtatgcggcagagcgtctggataaaatccgccgccagaaccggataaaggcagaacttcaggccgtgcttgatgagaaataa

SEQ ID NO: 489752 - DNA, 189 bp, Shigella sonnei; identical to SEQ ID NO: 463227

SEQ ID NO: 489753 - DNA, 189 bp, Shigella sonnei; identical to SEQ ID NO: 463227

SEQ ID NO: 489754 - DNA, 483 bp, Shigella sonnei; identical to SEQ ID NO: 483872

SEQ ID NO: 489755 - DNA, 777 bp, Shigella sonnei
atgaacgaaaacagcacgctgaacgcactgatttgtcgtcacgcccgcaacctgctgctggcgcagggctggccggaagagacggatgttgaccagcgtaacccgaagtatccgggctggatcagcatttatgttctgctggatgcgccccggctggcgaccttacttatcaaccgtcacggcggcgtactgccgccgctcctggcctccgccattcagaaactgaccggaaccggagcggaacttgttctgtccggcagtcagtggcagtcgctgccggtacttccggcagacggaacgcaggtgtctttcccgtatgccggagaatggctgaccgaagacgaaatcagggctgtacttgcggcggtgcgcgatgcggtacgcagtgtcagttgccgggtggcagaagatgcgcggcgtatccgggcggcgctgaccaccaccggtcagacgttgctgactcgccagacgcgccgctttcgtctggttgtgaaggaaagcgatcacccctgctggctcgatgaagatgacgaaaacctgcccgtggtgctcgatgccatcgtgaaccggggagcacgtttttcgtcggtggaaatgtacctggtcagcgattgtattgagcatatcctgtccagtgggctggcctgcgatgtgctgcgtataccggatgaaccgccccgccgctggtttgaccgtggtgttctgcgggaggtggtccgggaagcccgggctgaaattcgcagcatggcggatgccctggcaaaaatccggaaatga

SEQ ID NO: 489756 - DNA, 519 bp, Shigella sonnei; identical to SEQ ID NO: 484141

SEQ ID NO: 489757 - DNA, 561 bp, Shigella sonnei; identical to SEQ ID NO: 486982

SEQ ID NO: 489758 - DNA, 225 bp, Shigella sonnei
atgtatttgacactcaaagaatggaacgcccgtcagttacgtccacgaagcccagaaacggttcgccgctgggtgcgagaatgtaagatttttccaccaccgataaaggatgggcgtgaatatttatttcatgagtcagcaaaaaaaattacacctcaaacgactggcgggcttttgcagagaatcagaaatggccggacgaagaagaaactcaaacacacgtga

SEQ ID NO: 489759 - DNA, 633 bp, Shigella sonnei
atggcacgcatctgcctttacggggatttgcaacgatttggccgccgcatcgaccttcgtgtgaaaacgggtgccgaagccatccgggcgatggccacacagctccctgcgtttcgtcagaagctgagcgacggctggtatcaggtgcgtattgccgggcaggatgttagcacgtccggattaacggcgcagttacatgaggctctgcctgacggcgctgtgattcatattgttcccagagtcgccggggccaagtcaggtggtgtattccagattgtcctgggagcagccgccattgccggatcattctttaccgccggagccacccttgcagcatggggggctgccattggtgccggtggtatgaccggcattctgttttctctcggtgccagtatggtgctcggcggtgtggctcagatgctggcaccgaaagccagaactccccgcacacagacaacggataacggtaagcagaacatctatttctcctcactggataacatggttgcccagggcaatgttatgcctgttctgtatggtgaaatgcgcgtggggtcacgtgtggtatctcaggagatcagcacggcagacgaaggggacggtggtcaggttgtggtgattggtcgctga

SEQ ID NO: 489760 - DNA, 633 bp, Shigella sonnei
atggcacgcatctgcctttacggggatttacaacgatttggccgccgcatcgaccttcgagtgaaaacgggggccgaagctatccgggcgctggccacacagctcccggcgtttcgtcagaaactgtgcgacggctggtatcaggtacggattgccgggcgggacgtcagcacgtccgggttaacggcgcagttacatgagactctgcctgatggcgctgtgattcatattgttcccagagtcgccggggccaagtcaggtggcgtattccagattgtcctgggggctgccgccattgccggatcattctttaccgccggagccacccttgcagcatggggggcagccattggggccggtggtatgaccggcatcctgttttctctcggtgccagtatggtgctcggtggtgtggcgcagatgttggcaccgaaagccagaactccccgtacacagacaacggataacggcaaacagaacacctatttctcctcactggataacatggttgctcagggcaatgttttgcctgttctgtacggtgaaatgcgtgtggggtcacgggtggtttctcaggagatcagcacggcagacgaaggggacggtggtcaggttgtggtgattggtcgctga

SEQ ID NO: 489761 - DNA, 189 bp, Shigella sonnei; identical to SEQ ID NO: 463227

SEQ ID NO: 489762 - DNA, 366 bp, Shigella sonnei
atgatcccgggcggcccattcacgtttccacagtgcctgttcggcggtctgaatcagggacgccagcagttcagcagagacggtcaccaggcggttttcgctctcgttgcggataatctccatcaccgcagcggaagaaataccggactcaatccgctggtcttccgggatgtcctccaggcgcgacaggacggtcctgatttcatgatcggtcagagaaatttccataccgtcagccagtgcctgaatctcttccggggaccagacaaccagcatcagcggcgtgtctcccggatactgcgctgccagctcccggcagagtgtttcgcatgttccgtacatactctcttccttctcaatctttga

SEQ ID NO: 489763 - DNA, 528 bp, Shigella sonnei
atgagtgcacgtggtatcaacaaggtcatcctcgtcgggcgtctgggcaatgatccggaagtccgttacatccccaacgggggcgcagtggcaaacctgcaggtggccacgtcagaaagctggcgcgacaaacagacgggggagatgcgggaacaaaccgaatggcaccgcgtggtgctgttcggcaagctcgcggaagtggcaggtgaatatctgcgcaagggcgcgcaggtctacatcgaggggcaactccgtacccgtagctgggacgacaacggcatcacccgctacatcactgaaattcttgttaaggccacgggcaccatgcagatgctggggagtgcaccacagcagaacgctcaggctcaaccgaagcctcagcagaatggtcagccacagagtgctgacgcgacgaaaaaagggagcgcgaaaacgaaaggccgtggacgtaaggccgcgcagccggagcctcagccgcaaccgccggagggtgacgattacgggttttcagacgatatcccgttctga

SEQ ID NO: 489764 - DNA, 156 bp, Shigella sonnei
atggcacattgtatagcagctattacatcactgttcactgtttccgttgaaagcactgtcgcacattatctggcacatacagctactgagcggaaacagctcgtgatagttccggtacctccgacaacccaacgtttattattccagtctgggtaa

SEQ ID NO: 489765 - DNA, 321 bp, Shigella sonnei
gtggttgggtacaaggtgaaggatgttactgatgtccacggcgcagcagaaccgattgatttccacaaaccggattggcacggaggccagtgccaatccggtatctggcaaggaggaacttcagtggactacaacgcctgcaagtggtatgcgtcctctgtggcatttaatcatttcatcggcggcgatagcggtggttcgatctactacaaacctgtttcctgccctacaggatatgtgatgacgggcacccggatgtacggcataggtgatggagttgatgaggagcatgtggatgcctactgttgcccgtttaattga

SEQ ID NO: 489766 - DNA, 156 bp, Shigella sonnei; identical to SEQ ID NO: 489764

SEQ ID NO: 489767 - DNA, 249 bp, Shigella sonnei; identical to SEQ ID NO: 487383

SEQ ID NO: 489768 - DNA, 192 bp, Shigella sonnei; identical to SEQ ID NO: 5763

SEQ ID NO: 489769 - DNA, 423 bp, Shigella sonnei
atgtactgtactgttaaagaaattatccgcgaagtgctggatacagacgtgccggacagtgaatgcgtttttgccgtggtgctgacccgtggggatgtgcgtcacatagcccaggactggagtctgacagacgatgagctggaaaccgtcatgcagcggctggacgatgcctttgaatatggtgcggatgtcagcattgttcacgacgttgttcgtggactgatggaggaaaagcgcgccagccgtcaggtgacagttccggcggtgatgctggaaaaagtgatggcgctggcaggcagtgaaatgaagcgcctgtatgccgtcgggagcgagaacgggggcgacggtgacgcattcgtcagggaagaacgcgaagcaatggacgttgtgttacaggcgctggacggggagcacatgtcatga

SEQ ID NO: 489770 - DNA, 498 bp, Shigella sonnei; identical to SEQ ID NO: 486152

SEQ ID NO: 489771 - DNA, 249 bp, Shigella sonnei; identical to SEQ ID NO: 489713

SEQ ID NO: 489772 - DNA, 198 bp, Shigella sonnei; identical to SEQ ID NO: 489692

SEQ ID NO: 489773 - DNA, 198 bp, Shigella sonnei; identical to SEQ ID NO: 489692

SEQ ID NO: 489774 - DNA, 156 bp, Shigella sonnei; identical to SEQ ID NO: 489764

SEQ ID NO: 489775 - DNA, 156 bp, Shigella sonnei; identical to SEQ ID NO: 489764

SEQ ID NO: 489776 - DNA, 156 bp, Shigella sonnei; identical to SEQ ID NO: 489764

SEQ ID NO: 489777 - DNA, 156 bp, Shigella sonnei; identical to SEQ ID NO: 489764

SEQ ID NO: 489778 - DNA, 156 bp, Shigella sonnei; identical to SEQ ID NO: 489764

SEQ ID NO: 489779 - DNA, 333 bp, Shigella sonnei; identical to SEQ ID NO: 489710

SEQ ID NO: 489780 - DNA, 198 bp, Shigella sonnei; identical to SEQ ID NO: 489692

SEQ ID NO: 489781 - DNA, 156 bp, Shigella sonnei; identical to SEQ ID NO: 489764

SEQ ID NO: 489782 - DNA, 213 bp, Shigella sonnei
atgcagttccgcctgccaggtatcgctgtccagctcttcgcccgtgtattcagcgccggtgagataaacggcaactgccggaaaatccgcctcatcaaaaacagcggggcgaccatcaaaaaacgtcgccccggtgtcatgcttctccagtgcatccagtacggctgcacggagttcagtatgtttcatcgctttattaccatcctcagttga

SEQ ID NO: 489783 - DNA, 138 bp, Shigella sonnei; identical to SEQ ID NO: 31384

SEQ ID NO: 489784 - DNA, 270 bp, Shigella sonnei
atgacatccggtgagcagtcaggtgcggtgatacgtggtgtttttgatgaccctgaaaatatcagctatgccggacagggcgtgcgcgttgaaggctccagcccgtccctgtttgtccggactgatgaggtgcggcagctgcggcgtggagacacgctgaccatcggtgaggaaaatttctgggtagatcgggtttcgccggatgatggcggaagttgtcatctctggcttggacggggcgtaccgcctgccgttaaccgtcgccgctga

SEQ ID NO: 489785 - DNA, 132 bp, Shigella sonnei; identical to SEQ ID NO: 486934

SEQ ID NO: 489786 - DNA, 966 bp, Shigella sonnei
atgctttcaacacaatttaacagggataatcaatatcaagccatcaccaaaccgtcactacttgccggttgcatagcactggcactattaccttctgccgcttttgctgcaccagccactgaagaaacggtgattgttgagggttcagccacagctccagatgatggcgaaaatgattacagcgtaacgtctacctctgcgggtaccaaaatgcagatgactcaacttgatattcctcagtcggtcactattgttagccagcagcggatggaagatcagcagttacaaacgctgggcgaagtgatggaaaacacgctggggatcagcaaaagtcaggcggattccgatcgtgctctttattattcccgtggattccagatcgataactatatggttgatggtatccccacctattttgaatcgcgctggaatctgggcgacgcactttctgatatggcactctttgaacgcgtagaagtagtgcgtggcgcgacaggactcatgaccgggacgggtaatccatctgcggcaattaatatggttcgaaaacacgcgaccagtcgtgaatttaaaggcgatgtctcggcggaatacggtagctggaacaaagaacggtatgtggcggatttacaaagcccactcaccgaagacggtaaaatccgcgcgcgaattgtcggcggctaccagaataacgactcatggctggaccgctacaacagtgaaaagaccttcttctcgggcattgtcgatgctgatttaggcgatcttacgacgctttcagccggttacgaatatcagcgcattgatgttaatagcccaacctggggcggtttaccgcgctggaatactgatggcagcagcaacagttacgatcgtgcacgcagtaccgcacctgactgggcgtacaacgataaagagatcaacaaggtctttatgaccctgaagcagcggtttgctgatacctag

SEQ ID NO: 489787 - DNA, 444 bp, Shigella sonnei; identical to SEQ ID NO: 481860

SEQ ID NO: 489788 - DNA, 798 bp, Shigella sonnei
atgcatgaactggaagtcctgctgagtcgcctgaaaatggagcatctgagttatcacgttgaaagcctgctggaacaggcagctaaaaaagagctgaactaccgggagttcctgtgcatggcgctacagcaggaatggaacggcaggcatcagcgcggtatggagtccaggctgaagcaggctcgtctgccgtgggtcaaaacgctggagcagttcgactttaccttccagccgggcatcgaccgtaaggttgtccgggaactggctggtctggcgttcgtggagcgcagcgaaaacgtgatcctgctgggccctcctggtgtcggaaaaactcatctggccatagctcttggcgtgaaagcggtggatgcgggacatcgggtactgtttatgccactggacagactgatcgcgacactgatgaaagcgaaacaggaaaaccggctggagcgtcagctacagcaactgagttatgcccgggtgttgatcctggatgaaataggctatctgccgatgaacagagaggaagccagtctgttcttccggctactgaaccgtcgatatgaaaaagcgagcatcatactgacgtcaaacaaagggttcgcagactggggagaaatgttcggagatcacgtactggcaacagcgatcctggatcggctgctacatcactcaaccacgctgaatatcaaaggagagagttaccggttaaaagagaaacgtaaagctggagtgctgaccaaaaacacaacgccaatcagtgatgatgaaatggtggaaagcggacagcatcagtaa

SEQ ID NO: 489789 - DNA, 330 bp, Shigella sonnei
gtgaatttcgtcagtaccgatccggcgtattccggttcgcttgcgccgatcgttaaagcgtggtttgcgcaagaaaacagccagccaaatatcgtccaggtggcaacgaatattctggtgaccatgaatctggtgggcatggggctgggcgtcactttgatacccggttatatgaataattttaataccgggcaggttgtttttcgtcccattgccggaaatgtgccttccattgctttactgatggcgtggaagaaaggggagatgaagccggcattacgcgatttcatcgccattgtgcaggaacgtttggcaagcgtaacggcataa

SEQ ID NO: 489790 - DNA, 1362 bp, Shigella sonnei; identical to SEQ ID NO: 482162

SEQ ID NO: 489791 - DNA, 177 bp, Shigella sonnei
atgaggggcaaacccgcgaaccataaacgcggtaaaaacccggtgtgcatcgtttttgattattcccgcacactcgcgcagaaagagttccccgtcgggctacggtctctgttaagacgggaatacggcgacgatatagcgcatgatgtgtcaggcttgaatacctttatccgttaa

SEQ ID NO: 489792 - DNA, 438 bp, Shigella sonnei
atgagcagggtaaccgcgattatctccgctctggttatttgcatcatcgtctgcctgtcgtgggctgttaatcattaccgtgataacgccatcgcctacaaagagcagcgcgataaagccacatccacaatcgctgatatgcagaagcgtcaacgtgacgtagcagaactcgatgccagatatacaaaggagcttgctgatgctaacgcgactatcgaaagcctccgtgctgatgtttctgctgggcgtaagcgcctgcaagtcgccgccacctgtgcaaagtcaacgaccggagccagcggcatgggcaatggagaaagcccaagacttacagcagatgctgaactcaattattaccgtctccgaagtgggatcgacaggataactgcgcaggttaactacttgcaggaatacatcaagacgcaatgcctgaattaa

SEQ ID NO: 489793 - DNA, 222 bp, Shigella sonnei; identical to SEQ ID NO: 27559

SEQ ID NO: 489794 - DNA, 165 bp, Shigella sonnei; identical to SEQ ID NO: 39229

SEQ ID NO: 489795 - DNA, 165 bp, Shigella sonnei; identical to SEQ ID NO: 39229

SEQ ID NO: 489796 - DNA, 165 bp, Shigella sonnei; identical to SEQ ID NO: 14505

SEQ ID NO: 489797 - DNA, 288 bp, Shigella sonnei; identical to SEQ ID NO: 27151

SEQ ID NO: 489798 - DNA, 711 bp, Shigella sonnei
gtggagcttgagtatatacgcagctgcgtctctacggcattggctgatgttcattatcgccagcgtggcattctggaggtccagcttgagcagatgcgtctcggtagatcaggacggtttaacaataaaccagtccggtcaatcagtgtgggggatgataactcatacgaagtgtccgttcctgctgagccggttagattccatcaggggaaaacatttaaacaatcatcaatgttgctcactgatattgattttcagagcgccagctggcgcagggctattggtcagttgaataacgaggaatcagcctggctttattattgctacggatgcaagcctgattacaacaatgatgtgattgtttgtcagtggttatggcttgattttctggttgctcattcggggggcggctttaaaaaaatgaaggcctccacgaaaaaagccatgcggaaattgatttattacgcggcacaacaggttaaatcagaacttacgtgtgctgaggcagttgatgagagagaacaggacaggcatctgagttttctactgaatatatctattgatagctggagacaagattataaagaacgctggcttttaattaagtcgcgatgtctgagcttaaatcgaactgcattattaaatgcggcggagaagcgcagtgaaatcatcaaacgccatcgggcaggaagtgccattctgcctttgtaa

SEQ ID NO: 489799 - DNA, 420 bp, Shigella sonnei; identical to SEQ ID NO: 27558

SEQ ID NO: 489800 - DNA, 222 bp, Shigella sonnei; identical to SEQ ID NO: 27559

SEQ ID NO: 489801 - DNA, 327 bp, Shigella sonnei; identical to SEQ ID NO: 14494

SEQ ID NO: 489802 - DNA, 243 bp, Shigella sonnei; identical to SEQ ID NO: 34324

SEQ ID NO: 489803 - DNA, 204 bp, Shigella sonnei; identical to SEQ ID NO: 40065

SEQ ID NO: 489804 - DNA, 288 bp, Shigella sonnei; identical to SEQ ID NO: 14491

SEQ ID NO: 489805 - DNA, 312 bp, Shigella sonnei; identical to SEQ ID NO: 14490

SEQ ID NO: 489806 - DNA, 222 bp, Shigella sonnei
atgaattatcaaggtaacgaaaaaatgcgcgacgatgttgcggagatagctaacgaactgtatgagttgtggcagaaggttgaacgtttcgaaaaggaatatggtttcaacagtaccaacctaacagaccgactggctggtcgcttagttgggactatggggccaaaactggctgagttgaaccgctttatggctgatgttgatttccagtttcaagattga

SEQ ID NO: 489807 - DNA, 228 bp, Shigella sonnei; identical to SEQ ID NO: 14488

SEQ ID NO: 489808 - DNA, 1122 bp, Shigella sonnei
atgcgcatcgccgggttagcttacccaggcaaaaaaataatagctatgttcaaaaccactaatattcatggcgcacaactcgtttgcgcagattctctgcaatttatcaaaaccatccctgataactcggtcaatttgattgcaacagacccaccatacttcggcgtaaaggctaacgcatgggataaccagtgggatagcgatgctgactttttggggtggattgacgaatttttggcagaattttggcggatattggcccctaatggcagcctgtatatgtttaccggctctcgccttgcgtcaaaaattgaattattaactcgcgaccgtttcaatgttctgaaccatatcatttgggctaaaccaagtggtatgtggcgcggttgtcataaagaaagtttaagggcttattttcctgctactgaaagaatattatttgcagagcattacggcgcgtcaggttatgctaaaggtcagtcaggttatgcttcaaaatgtgcagatttaagaaaaaatattttttctccactaattgatgctttttcgctggctcgccgtcagttagatatatcagccgcagacattaattcagcgacaggaaagcagatgtgttcacactggttttcttattcgcagtggcggcttccatcattaattgattttaataaactatgcgaattatttcgcaggaaggcagattcactcggtgtcccgtgtccatatccttttaatgttgattattcagaacatgaaaagcgttatagcgatctgaaattgcattatgaggaagtaaagaagcagtatgatgatttgaaggctcagtatgaaaatttacgccgtccatttcatgttactgctgatgtaccttataccgatgtatgggagtttcctcctgtgcaatattatcctggcaagcacccatgtgaaaaacctgcagcgatgatggaacatattataaagagtagttcacgccccggagatatcgttgccgatttctttatgggatcaggctcaactattaaagctgcgctgaagttaggacgtcaggcaataggtattgagattgagggcgaacgttatcttcagacagttgatgaagtgaaaaagttatttgagtaa

SEQ ID NO: 489809 - DNA, 273 bp, Shigella sonnei; identical to SEQ ID NO: 14486

SEQ ID NO: 489810 - DNA, 438 bp, Shigella sonnei; identical to SEQ ID NO: 489792

SEQ ID NO: 489811 - DNA, 312 bp, Shigella sonnei
atgaaaatttatattgccgggccaatgacgggatatgagaactttaatcgtgacgcctttaataaagaggcagatcgtttgtcacgacatggtcactctgtcttgaatccagccactttgcctaatggtctgacacaacgtgaatacatggatatttgctttgcaatgcttcgttgtgctgatgctattttgatgcttcctggctggaaagcgtctgctggagcaactgctgagtatcattacgcatacaagatggagatgccggtattcactacgctgaattacccgccagcttgttcctctgtagcataa

SEQ ID NO: 489812 - DNA, 861 bp, Shigella sonnei
atgaaagagttgcaaaaaattaattcaataatggaaaggttaagtgctcttgagcgtaagctggacgattgtggaaagctgtgtgttgaaaagcaaaatgagctttaccgggaattttttacaatcgtaagtgagctgatgccaattgttaataactgcctgatgacatccagattttttaatgtcgatgctactacatccagaaaattttctgtgaaaattcaagaaagagtttctggtagtgtgacaagagagatggctgaacagttggtggcaatgagcaataaaacaaaaagaaaaaaggcattgcttgtaacagcaaatcagctttcagggcgcgttgactttcaggtcagacagggtgggcgtgtactggtaaatgatgcgttcgttggacgtagctttagtccttactcgatgaaatatgatgttgatgcagatgatcaggatatcagcatttcctggaaatctgagacagcagggattgtattaacagcagagttgttgagtgatgataaaaatgatgtccagcatcatttggacgaaaagaatcatatttctgaaatttgtatgaagccacgcagcggaatgactttattgtcacgcactcttgctgctggcttttctgcaccggaaaaacgtgtgcttctggtagtgcctgaagatgcagatattcgaccactgaatggctgtgatgttattagtgcaaaaacattgcatacccgcgtcattcctgtaccggatgtggtcattattgatgatgttgagaaatgcaagtctgtttcctcaactgccacaatcaagcgaattttacgttgtagcacgtcggctgttgtattccggaagcagttacataactaa

SEQ ID NO: 489813 - DNA, 450 bp, Shigella sonnei
atgcaagaagaagcaaataaaattcttgttgatttattgaagaaggccagcgatggaattgattccgccattgtattcagtcaggctcaaattccggatgttgttcatcagttgctggtatggaatatggttgatagcctgattaaaacattaatagccatttcaacaattccgctggttatttggtttatgaagaaacagtgcaaaaaagttgaaattggtaagttcgataatgaaggacgctcatgcgataatggacagcctaaatataaaccaactatgctttgggaaagtgacggtaggttaagtggttttgtcttaccattagtagcagtttttattctatggttcagttttattatttctgtagtagccaatatgacatggttaaaaatttggctggcacctaagttatatctaatcgaatacgcagcatcactaattaaatag

SEQ ID NO: 489814 - DNA, 177 bp, Shigella sonnei; identical to SEQ ID NO: 489791

SEQ ID NO: 489815 - DNA, 546 bp, Shigella sonnei
atggaagtcaacaaaaagcagctggctgatattttcggtgcgagtatccgtaccattcagaactggcaggagcagggaatgcccgttttgcgaggcggtggcaagggtaatgaggtgctttatgattctgccgccgtcataaaatggtatgccgaaagggatgctgaaattgagaacgaaaagctgcgccgggaggttgaagaactgcggctggccagcgaggcagatcttcaccccggaacacttgaatttgagcgccatcgcctgactcgtgctcaggcgacggcgcaggaactgaaaaatgccaaagaatcggctgaagtggtggaaaccgcattctgtactttcgtgctgtcgcgtatagcaagggaaatatccagtattctcgacggtattcctctgtcggtgcagcgacgttttcctgagctggataaccggcatattgatttcctgaaacgggatatcatcaaagccatgaacaaagcagccgcgctggatgaactgataccggggttgctgagtgaatatatcgaacagtcaggttga

SEQ ID NO: 489816 - DNA, 267 bp, Shigella sonnei
atgttgggtggagcggacaatccaaatggcgaattaccgtcttatatcactggcgctgacagttacgacaacgctccgatggaaagcttctggggaacgctgaaaaatgagagcctgagccactatcgttttaataaccgggatgaagccatctcagtaatacgggaatacattgagattttctacaatcgtcagcgtcgtcactctcgtctggggaatatctccccggcagccttcagggaaaaatatcatcagatggctgcttaa

SEQ ID NO: 489817 - DNA, 276 bp, Shigella sonnei; identical to SEQ ID NO: 484087

SEQ ID NO: 489818 - DNA, 1527 bp, Shigella sonnei; identical to SEQ ID NO: 16547

SEQ ID NO: 489819 - DNA, 1668 bp, Shigella sonnei; identical to SEQ ID NO: 16546

SEQ ID NO: 489820 - DNA, 465 bp, Shigella sonnei
atgcgtaaaaaccgcttgcaaaaaattatcacggggctgtatgcttcccccgtcgcccacatggcgaccgggtttgacagcctgaatactacagcggacagccgcttacattccgatatgcggtttttttgtgtccgtaaacctacccatacccgcattatggcggggcgtaacgggggagcctttgcgctcgctggttcctgtagtgccagtctgtcaaccctgttacgtctcgccaccatgtttgacagcgtagtagcgagactccttaatttcactacaggagcctttcacatggctgtattcgcacgcccttattttgtctggcgctttatgcagtgcctgacagacagcattgcaatattcaccgttaccgctgccactgagcgcgaagcacgcgcacagctgccgcacgcacatcttatttttgtcgcccgtattcgtcagggggtgtgccatgcctga

SEQ ID NO: 489821 - DNA, 198 bp, Shigella sonnei; identical to SEQ ID NO: 24586

SEQ ID NO: 489822 - DNA, 792 bp, Shigella sonnei; identical to SEQ ID NO: 466059

SEQ ID NO: 489823 - DNA, 1218 bp, Shigella sonnei
atgaacaaactgagcgataccttgctaaggaaacttcatggtaagccagcggagaaaaacacgttttatagtgatggcggaaacctgagcgtgaaatatttaacatcagggaaattgacctggtatttcacatacagggccggaacgggaagggagacacgacccgaacgcattaagctgggaagttatcctgatctgagcctgaaatcagccagggaaaaagccgcccagtgtcgcgcatggctggcagaggggaaaaatccacgtcatgagcttaattacaccgtacaggaagcgttaaagccggtaacggttggcgatgcgctcacctactggcttgagtattacgtaaaggaaaaccgcgtggattatatcgccctgaaaaggcgacttaataatcacgtaatacagcagattggtgctatgccgctggataaatgcgagctacggcactggctggcctgttttgaccaggtggcaaagcgaacgcctgttactgccggattcgtgctacaggcgtgcaaacaggcgcttaagttctgccgtaggcggcgctatgcaatcagcaacgttctggacgatctgaacgtggcggacgttgggaaaaaaccggatataagcgaacgtgtcttaagtaacaaagaacttggcgaattattgcaggcactggacaaaaaaatattctccccttactacgtcgcgttaatccgcctcctgattgtcttcggagccagaacggtagaactgaggttatcggagatcggggagtgggattttacggaaatgctatggaccgttccgaaggagcacagcaaaacgaaggtcgcaatattccggcccataccggaagcgatcctgccgttcgtcacgcagctggtggagcagaacaggcacacgggcttattgctgggggaagtgaaacaggaggccagcgtatcgcagtatggaagattagcgcacaggaggcttaatcatcctcactggtcactgcatgacatccggcgcacctttacaaccatgctgaacgatttaggcgttgatccgcatgtcgtggagcagcttacaggccaccagatgccaggaatgcagcgagtttataatcattcccgttatctggatgctaaacgcaatgcgctggatatgtggacggagcggttagggatactggcgggaacacatgaaaacgtaaccacgctaccagtagccagaagaaaataa

SEQ ID NO: 489824 - DNA, 597 bp, Shigella sonnei
gtgcacgaaatattcaacatgctgctggcggtcttcgatcgggcagcgttaatgcttatctgcctgttctttctcatccgtatccgcctgtttcgcgaactgttgcacaagtcggcgcactccccaaaagaattgctcgccgttaccgccattttctcgctgttcgccctgttcagcacctggtccggcgttcccgtagaaggctcgctggtgaacgtacgtattatcgcggtgatgtccgacgggattctgtttggcccgtgggtaggcatcattaccggcgtgattgcgggtattcaccggtatttaattgatatcggcggcgtgacggcgatcccctgctttatcaccagcattctggcgggttgtatatcaggctggataaacctgaaaatccccaaagcacagcgctggcgcgtcagtattctcggcggcatgttgtgtgagacgttgaccatgattctggtaattgtctgggcaccaactaccgcgttggggatcgatatcgtctctaaaatcggcattccaatgatcctcggtagcgtctgtatcggctttattgtgcttctgggtgatgctgccaacttactgatttag

SEQ ID NO: 489825 - DNA, 753 bp, Shigella sonnei
atggaattgttgcaaaatggcgcactggatatgaccaaaggttccgccagtgatctggagtcttttgataatatttatgctatctataatttgccgttcttatttaaagatcaggctcacttcaacaaagttgtttttggtgaagttggtaaagaaattatggactcaacaaaagacaaaggcttttttgctttatcagcttatgtagcgggtacacgcagtttctatgcgaaaaaaccgattactaagccagaagatcttaaagggctgaaaattcgtgttcagccaagtccgaccaccatcaaaatgattgaactgatgggtggttcacccactccaatttcatttggcgaagtttatactgcgatgcagcaaggtgtagtagatggcgcagaaaataacgtgccttcctgggtgcagactcgacatattgaaattgccaaagttttttctgaagatgaacacgcctcaattcctgactttttggttatctccaccaaaacatggaataaattaaccccagaacagaaacaaatcctcgaaacagcagcgaagaaatccgaagcttatcaacaaaaattgtgggaaaaaattgacgctgacacacgtgctcaggcgaaagctatggggggtgaaattgtaaaagtggataaagcaccattccgtgccgcagttcagcctctgtttgacgacttcaaaaaagatccaaaacaagctgctttgttagagaagttcgacaacgctgctcaataa

SEQ ID NO: 489826 - DNA, 330 bp, Shigella sonnei; identical to SEQ ID NO: 485224

SEQ ID NO: 489827 - DNA, 381 bp, Shigella sonnei
atgcgcgtattgatcaaaaacggcactgtcgttaacgcagatggacaagccaaacaggatttgctgattgaaagcgggattgttcgccagttgggcaacaatatttcgccgcagctcccgtatgaagaaattgatgccactggctgttacgttttccctggcggcgtggatgtccatacgcatttcaatattgatgtcggcatcgcgcgcagttgtgatgattttttaccggtacccgcgcagctgcgtgtggcggtacaacaaccattattgaccatatgggatttggcccaaacggctgtcggttacgccatcaactggaggtttatcgtggttatgccgcccataaagcggtcatcgattacagctttcacggtgtga

SEQ ID NO: 489828 - DNA, 204 bp, Shigella sonnei; identical to SEQ ID NO: 466304

SEQ ID NO: 489829 - DNA, 276 bp, Shigella sonnei; identical to SEQ ID NO: 466303

SEQ ID NO: 489830 - DNA, 216 bp, Shigella sonnei; identical to SEQ ID NO: 261393

SEQ ID NO: 489831 - DNA, 549 bp, Shigella sonnei
atggcaaccacccgcaacaaggtgatgtggcaggaagggatgctgatgcgtccacaccatttccagcagcagcagcgttacaacgactacctggataaccagcgtttccgggccatgaatgatttatcctggggatttaccgaactcaccctcaacaatgaactgctggcgcagggtaagatcatgattgacagcgcgtcaggcacactgcccgacggcaccgtcttttctatccccgaccaggacgcactgcccgatccgctgcacccgcaaaattttccggacgaaagaagccgcaatatctacctcgctctgccggtcgccagtgatgtgagaaatgaaatcagcgacggacggcgaatcgggcgttaccggctgaattatgccgatgtccgggatttgcattcagaagaaggtgacgcgcgaacattgacgctgggtcaactgacgccgcgcattatgagcggtgcagaagatatgagcgcctatattacgctcccgctttgccgtatcagcgatcgccgccgatggctccctgacgttggatga

SEQ ID NO: 489832 - DNA, 162 bp, Shigella sonnei
atgactaacctgtttgttcgtagcggaatttcttttgtcgatcgtagcgaagttttaacccatatcggtaatgagatgctcgccaaaggtgtggttcatgatacctggccacaggcattaattgccagagaagcaggtgatgctgccaacttactgatttag

SEQ ID NO: 489833 - DNA, 822 bp, Shigella sonnei
atgttatcgccgcctgccctgcgggcggcgatacagggagaacgcttaatcatgaacaaaacgctgaatgcactggtttgtcgtcacgcccgtaacctgctgctggcgcagggctggccggaagagacggatgttgaccagcgaaatccgaactatccgggctggatcagcatttacgtgcggctggatgcgccccggctggcgacgttacttatcaaccgtcacggcggcgtactgccgccgctcctggcctccgccattcagagactgaccggaaccggggcggaactggtactgtccggcagtcagtggcagtcgctgccggtacttccggcagacggaacgcaggtgtctttcccgtatgccggagaatggctgaccgaagacgaaatcagggctgttcttgatgcggtgcacgatgcggtacgaagcatctgttaccaggtggcagaagatgcgcggcgtatccgtgcggcgctgaccaccaccggtcagacgttgctgacccgccagacgcgccgctttcgcctggtcgtgaaggaaagcgatcacccctgctggctcgatgaagatgacgaaaacctgcccgtggtgctcgatgccatcgtgaaccggggagcacgtttttcgtcggtggaaatgtacctggtcagcgattgtattgagcatatcctgtcctgtgggctggcctgcgatgtgctgcgtatacccgatgaaccgccccgccgctggtttgaccgtggtgttctgcgggaggtggtccgggaagcccggaccgaaatccgcagcatggcggatgccctggcaaaaatccggaaatga

SEQ ID NO: 489834 - DNA, 240 bp, Shigella sonnei
gtgacaggcattattctcgctgtctttgctctgctggcaatcactcgcggtcttcatggcgtcgcccggctcatgcaggggtttgtcccgttgatggcgataatctgggtgctgaccagcatggtgatttgcgtaataaatatcgggcaacttccccacgtcatttggtctatttttgagagtgcttttggctggcaggaagcggcaggcggcgcggcgggatataccttaagccggtaa

SEQ ID NO: 489835 - DNA, 576 bp, Shigella sonnei
atggcattcagaatgagtgaacaagcacggaccataaaaatttataatctgttgtccggaactaatgaatttattggtgaaggtgatgcatatattccgcctcatacaggtctgccagcaaacagtaccgatattgcaccgccagatattccggctggcttcgtggctgttttcaacagtgatgagtcatcgtggcatctcgttgaagatcatcggggtaaaacggtttatgacgtggcttccggcgacgcgttatttatttctgaactcggtccgttaccgaaaaatgttacctggttatcgccggaaggggagtttcagaagtggaacggcacagcctgggtgaaggatacggaagcagaaaaactgttccggatccgggaggcggaagaaacaaaaaacagcctgatgcaggtagccagtgagcatattgcgccgcttcaggatgctgcagatctggaaattgcaacggaggaagaaaactcgttgctggaagcctggaagaagtatcgggtgttgctgaaccgtgttgatacatcactatctccagatatcgagtggccaagtcaaccataa

SEQ ID NO: 489836 - DNA, 966 bp, Shigella sonnei
atgaaacagcgctctcttctaaaaaatgctccagatattaatcgcattatgagtaataatcatcatgcccctgaacatcagcccgtatcacctatggttggtgatttaaaacgtcaactgagttcattaaccggtaacagcataactttgccagtatgcggacgtaatgttaactttaagttagagacaattcccgcagataaagttgaaatggcaacaatggtatggctaggtaatgaacgcgatcaagatttattaaatgaatcctctctagccgatttaattccatcttttctaacgtctggacaacaaaatccagctttcgccagaaaagtatctggaatcgttgaagtcgctgacggctcacgtagaagaaaagcagcgatattaacaggatgtgactatcgcgtcttaattggtgatctcgacgatgaacagatgcattggttatcccaaattggtaacgattataggcctattagtgcatacgaaagaggaaagagatacttacgcaagctaaatgactttgatggtaacgttaaagcattagccgaggctgaaaatatagatagaaatattatcactcgctgtattaatacagctggtctaccaaaagatatattagctatcttcaatcatccaggagaactgtcagctcgtgctggagattctttgtttaaggtttacaaaaaaaacatgactgccatgagcaatgctgctcatcatcttctggcaattaaaaaaaacggcgaggatttagaagcttcacggattatacaaatattatctgactctgttctggttggcgacgaggaaaaaacaaaagacgagaaaaaatatggggaagggatcacggctagatataaaggtaattttgtaactataaaaattgatagccgcaaaatatctaaagaaatactaagcagaattgagttgttactagaggaacaatctactgataattaa

SEQ ID NO: 489837 - DNA, 273 bp, Shigella sonnei
atgatacatgaccgcatagcggaggaactcgaggcgaaaggattttaccggagggcggcggcgcgatggggtgaagtcatgcagctggtggagacagacaaggaacggcatcaggttacgatgcgacggctggaatgttccaggaaggcacagaggccaccggagccgccggataacttcggagacctgagaaaggcagtcgatcgcacttatgctgaaatgagtatagatggtgtaagcgatgaaatatggcgtaattacccaggcagctaa

SEQ ID NO: 489838 - DNA, 207 bp, Shigella sonnei
atggctgaagagaaaaaaggcggtgtttcggtgtacataagccccgaaatcgtggaggtgctcaagcagcgccacaaaaaaaactatgaggctggcgtggcagctggactggatccgctgatgacgccggagccgtcgataggttcacttgtgcgctcttatttacttgcggcgcttgggatgcataaaaattatgggggtgaataa

SEQ ID NO: 489839 - DNA, 1056 bp, Shigella sonnei
atgacagtaaaagcaatggcacttaacactaaccagctttttgcgtacctgaatcgcggggatattgcggaatttaaattcagtccgctgtttaccacgctgtttttcccgaacgtggcgacattcagcacccaaaacatcatgctggataccctggacattgaagaagtcaccatgtcggcgttttgttcgcctatggtgggtagccaggttcagcgcgataaagggtacgaaaccagcacaatcaaacctggctacatgaagccaaagcacgaaatcgatccaacaaaaaccatcatgcgcatggctggagaagatccagcacagcttaacgaccctacctaccgccgtatgcgcctgattactggcaacatgcgccgccagataaacgccattaaagcgcgcgtggaatggctggcggtgaatgcgataacgaccggaaaaaacatcattgagggcgaaggcatagaacgctatgaaatagactggaagatcccaagtaaaaacatcgccagacagggaccgggtaaaaagtggtcagaggcagataaggaaacacacgatccaatctatgacatcgagctttatgctgatcaggctggttgccccgcaaacgtcatgattatgggcgctgaggtatggcgcacgttacgcagctttaaaaaattccgtgagctgtacgatctttcccgtggttcagagtccgccgcagagctggcctgtaaaaacctgggcgaagtggtgagctttaaaggctatctgggcgatattgcccttatcgtctattccggcaaatacgccgacagcgacggcacagaaaaatatttccttgagcctgatttgcttgtcctgggcaacaccaacaataaagggctggtggcctatggtgcgattatggatcaggacgcagtaagaacgggcgcaacgcaaaacatgttttacccgaaaaactggattgaggacggcgatccggcgattgagtacgtgcagacgcacagcgcaccgcagccggttccggcagatattcgcaaatttgttaccgtcaaaattgcttaa

SEQ ID NO: 489840 - DNA, 336 bp, Shigella sonnei
atggacactccatacattgagttatttgcaggcagtcagcaggtcgccacgacgctggtacattttgccgttgatgctggcgttattcaggaatttaccccgctgatgctggcggacaatggcgagtttaagccgtgggatggtcaggaatctggcaaggctgtttatctgacttcgtatcctgtggacacgtcaaagcagaaatcagcacagtgttacaagacggggatattcaatattgccgccgttaactggcctgagagcgtcgacaccgatgcgaaaaaatgcgccgcctttgcgggttctggcgtatccgttcagccgctggcccgataa

SEQ ID NO: 489841 - DNA, 414 bp, Shigella sonnei; identical to SEQ ID NO: 20747

SEQ ID NO: 489842 - DNA, 543 bp, Shigella sonnei
atgaaatcgcacctgatgaacaaaaaaaacatggcgaaaagctgccgtgtaagtgcgacagcgttcgacaagtggggagtgactcccgttgaacgtaaaggccgtgaggcgttttacgatgttgccagcgtgatagacaatagggttaacaatgcaattagccagcttacaaacgacaaaggcgatattgatgatgatgaactcttacgagtcaggatcagattactgacagcacaggcggaggcgcaggaacttaaaaacgagcgcgatcgcggtgacgtgatcgatactgagttttgcctgtacgcgctttcaaagctggcgagtcagatttcatcaatcatggacagcctcccgcttactatgcaaaggagcttcccacagattacccccgccatgctggataggcttaaaagggaagtggttaaagcctgtaatgccagtgccagagttgccgacaacctcccacagatactggctgattacttgaaagaaacaaccggaaacgtaccggaaaagttgcagccgaataaagataagtaa

SEQ ID NO: 489843 - DNA, 282 bp, Shigella sonnei
atgactgaatccgaaatactgcgattaatccgccgcgtctctggaatcagccagcaggctgacgaacagaccacgcagccggacagcgtgacagccgaaaactatgcgcgtgttgttgctgaggtgatgcgccgtgatggtatagaacttaatggcgtggatatgcgcaacatacgaaccagagttcttgagttgctggcctaccgtcgccgcgtggagatgtatcgggagaaggagaaaataacgtaccactggaagaagccggagcggttgcggcggtaa

SEQ ID NO: 489844 - DNA, 165 bp, Shigella sonnei
atggcaaagccgatcatcacgctcaatggcctaaaaatcgtcattatgttgggaatgctggtcattattctctgcggtatccgttttgccgccgagatcatcgtgccgtttattctcgcattatttattgctgttatatataacttatttcacataacaccttga

SEQ ID NO: 489845 - DNA, 192 bp, Shigella sonnei
gtgactaaacaggaaaaaaccgcccttaacatggcccgcttcatcagaagccagacgctgaccctgctggaaaaactgaatgaactggacgccgacgaccaggctgacatctgcgaagcgcttcacgaccacgctgacgagctttaccgcagctgcctcgcacgcttcggggatgacggtgaaaacctctga

SEQ ID NO: 489846 - DNA, 348 bp, Shigella sonnei; identical to SEQ ID NO: 23228

SEQ ID NO: 489847 - DNA, 1599 bp, Shigella sonnei
atgatagttaagtttcatgccaggggaaaaggcggtggcagtggtccggttgattacctgctgggccgggagcgtaaccgggaaggggcgagagttctgcggggtgctcccgaagaggtgcgggaactcatcgatgccacgccgtttgcgaaaaaatacacctcgggggttctgtcttttgcagagcagaccctgccaccgggagagcgtgaaagggtgatggagagctttgagcgggtactgatgcccggtcttgaaaaaaatcagtacagcatcctgtgggtggagcaccaggacaaggggcgtcttgagctgaattttgtcatcccgaatatggagctggcgagcggaaaacggctccagccctattacgaccgagcagaccgtccgcgaatcaatgcctggcagacactggtgaatcaccattacgggctgcacgacccgaacgcaccggagaacaggcggacacttgtcaccccgaataatctgccgaaagcgaaacaggaggccgcagaagcgattacgaggggactggaggctctttaccatgccggagcgctaaaaacgcgtcaggatgtcactgaggcgcttacagcggcaggttttgaggttgtgaggacaaccaggagcagtatcagtatcgccgacccggagggtgggcgtaatctcaggctgaaaggggcgctgtatgagcaatcttttacaaatggggacagacttcgagaagaaactgaaagagcgtgccgtctctacagagaacatgctgaacagcgagttcaggaagctcgaagcgtctgtagacagggaactgaacttaaacgggcagaaaatcagagacgctatcagcgcacacacagcagcggtgaaagaacaactggagacgctgaacagtgccgtgaacgcgcagttcagcgccacagagaacgaactggcccggcggcaggaagagctgctctggaagctggtcaaagggcggatactgtacccgtcgctgacggcgctttgcgtcacgggcgggatttttctggcgtcatgggggctgattcagtggcaggaaagccggattgcggcgaacatcctggctatcagggaccaggaagagacgctggcgaaactccgggaaaaaacatggggtgtgacgtatcacgagggcaggaacgggaaatttctggtgttgccgtccggggtgaagggggaaaacaactggacggtggagaagaagaacgcagtaagactggtcagggagtaagtgagtatgacagagctggaaatgcacttactgaacgccttagagcaattgcagcaggactatacgcagcggctgaaagactgggagagcgccttcacggatttgcagcatatgttcgagctgacacgacaggagaacgggcaactgagggaacagtgcgacgacttgagtcagcaggtgcagagattagccgggcaggtggaccacttgagtcggttatttatcacgaacagcagataagggatgaacaggaaaggcaggcacgcctggaacgggagcgtgcgcggtcctggcatgaagagcaggaacgggaagcacgggtatggcgtggcccgtcaatagggatgtga

SEQ ID NO: 489848 - DNA, 423 bp, Shigella sonnei; identical to SEQ ID NO: 23226

SEQ ID NO: 489849 - DNA, 279 bp, Shigella sonnei; identical to SEQ ID NO: 23225

SEQ ID NO: 489850 - DNA, 291 bp, Shigella sonnei
gtgagcaaatccccccgccataaactgaacaaaacagacaaacgacttctcgacacccttgttgctgccggatatgagcatgacaaagcccgtgacctcatccagaaacaggtttacacgctgacactggctgatcagcgtcatgtggtcagtgaaatcagtaatggtgtgaatcccacccaggcttactcggcggtataccaggcaagacgcattcgcctcgcccgtaaatatctgaacggtaaaaaggttatggaagaaaccggggaaaatacgcccccatcagcgtaa

SEQ ID NO: 489851 - DNA, 1647 bp, Shigella sonnei
atggctaaagaactaagtggatatggaccaactgctggtgagtctatggggggaacaggggcgaatctgaatcagcaaggtggaaataataatagtaatagtggggttcactggggtggtggctctgggcatggtaataatggtggtcagggaaattcaaattcatctggttctacatcaactgtgatgaaaaccggtgagtcatatctgactccgtggggtgatgttgtcattaataatgatggccttccggtgatgaatggtattgttatgacagaagagaattcaactctggttgataatccatttggaggggtctccagagttcttaattctttaattagtgatatgccatcactttttgcagaaagctcaggaaataacaacaataacactgcttcagttaatactgcaccaacgaatgctcaggtcagtgatatggataagagttcgaaggtggtgggtaatgtaattaatgaaaaacaaaagcagaagaataaaattgctacacagattagtgaaaaacagaagaaaatcgaggagatgaaaaaagtattcaagcatcattcttatcatggtatcactgatcttgagagggatgttgatgagttgcaaaaaaaatcaaatcagcttgatgcagatattagcaaacttaattcttataaaaatacattgcaaagtaaaattggtgatgtgaataaacagaaggaagctgaagaaaaggctcgtgaaaatgcagaggtcgctgaacatgaaactcttaatgaagagaaacaggcggtggcggaagcagagaagcgtttagctgaggcgaaagctgaactggcgaaggctgaaagtgatgtacagagtaagcaagctactgtttccagagttgcaggagagcttgaaaacgctcagaagagtgttgacgtgaaggtcaccggatttccgggatggcgtgacgttcagaaaaaactacagcgtcagcttgaagctaagcaggctgagtactccgcagttgaaaatgaacttaagaatgctgttagtttcagggatggtaaggccgctgaggttaaagaggcagagcagaaattaaaagaagctcaggatgctcttgaaaagagccagataaaagatgctgttgatactatggttggattttatcaatatataaccgaacaatatggagaaaaatacgcaaaaattgctcaggatttagcggaaaagtctaaaggaaagaaaattcaaggtgttgatgaagctctggcagcatttgaaaagtataagaatgtactggataagaaattcagtaaggttgatcgggatgctatttttaatgcgttagagtctgttaattatgatgagttatctaagaatttaacgaagatatcaaagtcgcttaaaatcaccagtcgagtatcttttctatatgatgttggttctgattttaaaaatgcaatagaaactggtaactggcgacctttgtttgtcacgctggagaaaagtgcggtcgatgtaggtgtggcaaaaattgtggcattaatgtttagttttattgttggtgtgcctcttggtttctgggggattgcaattgtcacaggtattgtttcttcttacataggggatgatgagttgagcaaacttaatgagttgttagggatttaa

SEQ ID NO: 489852 - DNA, 267 bp, Shigella sonnei; identical to SEQ ID NO: 489460

SEQ ID NO: 489853 - DNA, 366 bp, Shigella sonnei
atgttcctgctccagcgcgaagcgctgttccggcgtttctttgaactggcgaagctcccgtttgtcagccacatcggctatccattgctccagttgttgattgacatgagtgaagctgtcgaacctgcggtaccggacgaagaagttctccttgaggtatttcaccatccgctcaaccttaccttttgttctggccctgcgtggacggcatgcccgtggcaggaagttatagtggtcagccagcaacaggaatccggagttgaacacgactttcccgttgttattcttcagcaccgcagccttctggttatcaaccagcaccgttttcacacaaccaccgaagtagcggaaggcgcgaaccagtga

SEQ ID NO: 489854 - DNA, 180 bp, Shigella sonnei
atgttgggtggagcggacaatccaaatggcgaattaccgtcttatatcactggcgctgacacttcttctgccgtcagacgaacagggcgactgatagcccgcctgcgcgtattacttccacttcgttttgtcataaaacatggctccgtatctgacatgggtgtcggggcaaagccctga

SEQ ID NO: 489855 - DNA, 267 bp, Shigella sonnei; identical to SEQ ID NO: 11114

SEQ ID NO: 489856 - DNA, 267 bp, Shigella sonnei; identical to SEQ ID NO: 11114

SEQ ID NO: 489857 - DNA, 204 bp, Shigella sonnei
atgttgggtggagcggacaatccaaatggcgaattaccgtcttatatcactggcgctgacaatatcaatgattttctggtgcgtaccgggttgagaagcggtgtaagtgaactgcagttgccatgttttacggcagtgagagcagagatagcgctgatgtccggcagtgcttttgccgttacgcaccaccccgtcagtagctga

SEQ ID NO: 489858 - DNA, 1110 bp, Shigella sonnei
atgggaaaaatgaatattaactttaaacatatccttcctttattgtcgtcattttttatttcaggatgcgactctgatggaataagcaaggtaaagtctttcgtatattacgacattgacgactcaatgactgttggtaaagccttcgatacaaggagtgattgcatcaatggcacatggagtgaaaaagaggatgatcgaggaagaaccatcgtcacatatacctgtgatattagtgaaagtggcctaaaaataataaattcagccattatgcaagaacctgaagataaggctgaatattctatagcacaaaataacaacagcataaaatcaaccaatgaatcactagaggaatacaaacagaaaacgcctctggtggaaaaaacaaaagaggtcataatagatcatataagaaagctaaacagtgcttttaatgaagatccaatgatatatagcaaactcacaattagcccttatttagacagaatgctatatctaaaggaccataatgacaatgcgctaaatgaaatttgtggtgggtacgaatacattcaatctgccgatagttacagttggcgtgatgtaagtgaagagtatgcaaaagaatcatgcgaaaagcatatatataaagtatatcaatcgtttaagaaaaatgcatcaccattaataactaaaaacttccccggtttctacgaacgtgtccccccctgtgagaacgcagatgaatgcataaaaaaaacaaatatatactttgatgataactttctaaatatctacaaaagaagccaagatagagcacctcaaataatttctgatttaaaaaaacacaatatagaaataggtgaaaagttaaatgattgtaggaaaaaactaaatatctcagatgtcaaattaacctattactggtttgtaacagataccggaggagttgattatttagatggggtgttgacatataattttcagggaaagaatagagctgaaaactttcataaacaactattgcaatatgcatacattaactacagcaaaaatcaaatacctcgggactttgtaacatcaataaaaaatagtatttattataaaatagaagattgcactaagttttag

SEQ ID NO: 489859 - DNA, 267 bp, Shigella sonnei; identical to SEQ ID NO: 26235

SEQ ID NO: 489860 - DNA, 2859 bp, Shigella sonnei
gtgaaacagtgctacccgaacacggcgctggtcggcgtgcaggtggattcagagcagttcggtaaccagcaggtgagtcgcaattatcatcttcgcgggcgcattctgcaggtgccgtcgaactataacccgcagacgcggcaatacagcggtatctgggacggaacgcttaagccagcatacagcaacaacatggcctggtgtctgtgggacatgctcactcatccgcgctacggcatggggaaacgtcttggtgcggcagatgtggacaaatgggcgctgtatgtcatcggccagtactgcgaccagtcagtgacggacggatttggcggcacggagccgcgcatcacctgtaactcttacctgaccacacagcgtaaggcgtgggatgttctcagtgatttctgctcggcgatgcgctgtatgccggtatggaacggacagatgctgacgttcgtgcaggaccgaccgtcggataaggtgtggacctataaccgcagtaatgtggtgatgccggacgatggcgcgccgttccgctacagcttcagcgccctgaaggaccgccataatgccgttgaggtgaactggattgacccagataacggctgggagacggcgacagagcttgtggaggatacgcaggccattgcccgttacggtcgtaatgtcacgaagatggatgcctttggctgtaccagccgggggcaggcacaccgagccgggctgtggctgattaaaacggaactgctggaaacgcagaccgtggacttcagcgtgggcgcagaagggcttcgccatgtaccgggtgatgtcattgaaatctgcgatgatgattatgccggtatcagcaccggtggtcgcgtactggcggtgaacagccagacccggacgctgacgctcgaccgtgaaatcacgctgccgtcctccggtaccacgctgataagcctggttgacggaagtggcaatccggtcagcgtggaggtccagtccgtcaccgacggcgtgaaggtgaaagtgagccgggttcctgacggcgttgcagaatacagcgtgtgggggctgaagctgccgacgctgcgccagcgtctgttccgctgcgtgagtatccgtgagaacgacgacggcacgtatgccatcaccgccgtgcagcatgtgccggaaaaagaggccatcgtggataacggggcacactttgacggtgaccggcgcggcacggtgaatggtgtcacgccgccagcggtgcagcatctgaccgccgaagtcaccgcagacagcggggaatatcaggtgctggcgcgatgggacacgccgaaggtggtgaagggtgtgagcttcctgcttcgcctgaccgtggcagcggacgacggcagtgagcggctggtcagcacagccaggacgacggaaaccacataccgcttcaggcagctggcgctggggaattacagtctgacagtccgggcggtaaatgcccgggggcagcagggcgatccggcgtcggtatcgttccggattgcggcaccggcagcgcctgtcactattgaactgataccggggtattttcagataacggcggtcccgaaactggctgtatatgacccgacggtgcagtttgagttctggttttcggaaaagcggattgcggatatcaggcaggttgaaaccagcgcccgctatcttggcacggcgctgtactggatagccgccagtatcaatatcaggccgggccatgattattatttttacgttcgcagtgtgaacaccgttggcaaatcggcatttgtggaggccatcggtcgggcgagcgatgatgcagaaggttatctgaatttttataaagggttgatcaataaaacgcatctcggcaaggagttgtggacgcagattgataacggtcagcttgcgccggacctgactgaaatcaggacgtccattacgaatgtcagcaatgaaatcacgcaaaccgtcaataaaaaactggaaaatcagagtgctgcaatccagcagatacagaaagttcaggttgatacaaataataacctgaacagcatgtgggctgtgaagctgcaacagatgaaggacggacgcctttatattgcgggtatcggtgccggtattgagaatacgccagcaggaatgcagagtcaggtgctgctggcggcagacaggattgcgatgattaatcctgcgaatggcaacacaaagccgatgtttgttggtcagggcgatcagatattcatgaacgacgtgttcctgaaatgcctgacggctccgaccattaccagcggcggtaatcctccggcattttccctgacacctggcggacggctgacggcgaaaaatgccgatatcagcggtaacgtgaacgcgaactccgggacgctcaacaacgtcacgattaataagaactgtcgggttctgggaaaattgtccgcgaaccagattgaaggcgatctcgttaaaacagtgggcaaacctttcccacgggactcccgggcaccggagaggtggccatcagggaccattaccgtcagggtttatgacgatcagccgtttgatcggcaaattgttattcccgcggtggcgtttcgcggtgctaaacatgagcggaagaataacaatatttattcgtcatgccgcctgatagtgaagaaaaacggtgctgaaatttataaccgaacgaccctggataatacgctgatatatacgggtgttattgatatgcctgccggtcacggtcacatgacgctggagttttctgtatcggcatggctggtaaatggctggtatcccacagcaagtatcagcgatttgctggttgtggtgatgaagaaagccactgcaggcatcacgattagctga

SEQ ID NO: 489861 - DNA, 600 bp, Shigella sonnei
atgcgtaaagtttgtgcagccattttgtccgcagccatctgtctggccgtatccggtgcgcctgcatgggcgtctgaacatcagtccacgctgagcgccgggtatcttcagacccatactgatatgccaggcagcgatgacctgaagggcattaacgtgaaataccgttatgagtttacggacacgctggggctgattacgtcattcagttatgccaacgctgaagatgagcaaaaaacgcattacagcgatacccgctggcatgaggattccgtgcgtaaccgctggttcagcgtgatggcggggccgtctgtgcgcgtgaatgaatggttcagcgcgtatgcgatggcgggcgtggcttacagccgtgtgtcgaccttctccggggattatctccgcgtaactgacaacaaggggaaaacgcacgatgtgctgaccggaagtgatggcggtcgccacagcaacacgtctctggcgtggggggctggcgtgcagtttaacccgaccgaatccgtggccattgaccttgcttatgaaggttccggcagtggtgactggcgcactgacggtttcatcgtgggtgtcggttataagttctga

SEQ ID NO: 489862 - DNA, 369 bp, Shigella sonnei; identical to SEQ ID NO: 487152

SEQ ID NO: 489863 - DNA, 330 bp, Shigella sonnei
atgctgagcagagaggacttttacatgataaagcaaatgcgccagcagggcgcgtacatcgtcgatattgcgactcagattggttgctctgaacggacggtcagacgctacctcaaataccctgaaccgccagccagaaagacccgccacaaaatggttaagctgaaaccgtttatggattacatcgacatgcgcctggcagagaatgtctggaatagcgaggttatcttcgcggagattaaggcaatgggttatacgggcggacgttccatgctgcgttactacatccagcccaaacgtaaaatgcgtccgtcaaaaagaacagtttga

SEQ ID NO: 489864 - DNA, 492 bp, Shigella sonnei
atggagcattttctttctggcgaccatggagccaatacctttaaagcaaacatggaggaagccccagagcaggttatcgccttgttgaataaatttgctgtttttccctcagactatatctctgattgcgctaataatcgctccggtaaatcctcggcgaagctaatatgggcggcggaattatcatggatgacctcgatatcaagcacagcttttcaaaacgggacaattgaagaagaactggcctggcattatataatgcttgcttctcgaaaggcgcacgagttgttcgaaagcgaagaagattatcaaaaaaatagtctaatggggtttctttactggcatatctgctgctatcgcagaaagttaacggatgctgaacttgaagcgtgttatcgttacgacaagcaattttgggagcactacagtaagaaatgccgttggcccataagaaatgttccctggggagcatcatccgttaaatactcataa

SEQ ID NO: 489865 - DNA, 699 bp, Shigella sonnei; identical to SEQ ID NO: 487150

SEQ ID NO: 489866 - DNA, 2517 bp, Shigella sonnei; identical to SEQ ID NO: 485610

SEQ ID NO: 489867 - DNA, 726 bp, Shigella sonnei; identical to SEQ ID NO: 13308

SEQ ID NO: 489868 - DNA, 324 bp, Shigella sonnei
atgacaaaacgaagtggaagtaatacgcgcaggcgggctatcagtcgccctgttcgtctgacggcagaagaagaccaggaaatcagaaaaagggctgctgaatgcggcaagaccgtttctggttttttacgggcggcagctctcggtaagaacgttaactcactgactgatgatcgggtgctgaaagaagttatgagactgggggcgttacagaaaaaactctttatcgacggcaagcgtatcggggacagggagtatgcggaggtgctgatcgctattacggagtatcaccgtgccctgttatccaggcttatggcagattag

SEQ ID NO: 489869 - DNA, 195 bp, Shigella sonnei
atgaacaagcagcagcaaaccgtactcaacatggcgggattcataaaaagccagagcctgacgctgctcgaaaagctggacgcactcgatgccgacgaacaggccgccatgtgtgagaagctgcacgaaatcgcggaagaactccagaacagcatacagacacgctttgaagcggaaagtggcaccggggtataa

SEQ ID NO: 489870 - DNA, 744 bp, Shigella sonnei
atgacacagacagaatcagcgattctggcgcacgcccggcgatgtgcgccagcggagtcgtgcggcttcgtggtaagcacgccggagggggaaagatatttcccctgcgtgaatatctccggtgagccggaggcgtatttccgtatgtcgccggaagactggctgcaggcagaaatgcagggtgagattgtggcgctggtccacagccaccccggtggtctaccctggctgagtgaggccgaccggcggctgcaggtgcagagtgatttgccgtggtggctggtctgccgggggacgattcataagttccgctgtgtgccgcatctcaccgggcggcgctttgagcacggtgtgacggactgttacacactgttccgggatgcttatcatctggcggggattgagatgccggactttcatcgtgaggatgactggtggcgtaacggccagaatctctatctggataatctggaggcgacggggctgtatcaggtgccgttgtcagcggcacagccgggcgatgtgctgctgtgctgttttggttcatcggtgccgaatcacgccgcaatttactgcggcgacggcgagctgctgcaccatattcctgaacaactgagcaaacgagagaggtacaccgacaaatggcagcgacgcacacactccctctggcgtcaccgggcatggcgcgcatctgcctttacggggatttacaacgatttggtcgccgcatcgaccttcgtgtga

SEQ ID NO: 489871 - DNA, 327 bp, Shigella sonnei; identical to SEQ ID NO: 488592

SEQ ID NO: 489872 - DNA, 303 bp, Shigella sonnei; identical to SEQ ID NO: 21213

SEQ ID NO: 489873 - DNA, 267 bp, Shigella sonnei; identical to SEQ ID NO: 11114

SEQ ID NO: 489874 - DNA, 330 bp, Shigella sonnei; identical to SEQ ID NO: 39306

SEQ ID NO: 489875 - DNA, 486 bp, Shigella sonnei
atgataatcagcgaaaagccaaccactaacgcgcgttcccttgcatcttccagcgccttcatgcttgccgatactgtgttggccttacccgccagcatggtgcaaatctccgccatcacgcttttaccacttccccctggacctgttacctcaatgaataactgccagtcgtaccggttcgccagcaccatgaataatacagccagtacgcgatccgccttgcggtcattctcagccaccgaacggcgtaaccacttccagaaattcggcgcatgtgttgccagcgtttccccctctgctggtgggctgaaaggtaattcactggcaattaacaaccagtcgtttttgttatgctcccgaaaattacctgttctggtatcaaataccccgttactgaatccaatcaggttacgggctgtattccccattacaggcaaacttaacttcatggtatcgaccgccgatttaatggcgttctgcgaatag

SEQ ID NO: 489876 - DNA, 804 bp, Shigella sonnei; identical to SEQ ID NO: 485810

SEQ ID NO: 489877 - DNA, 267 bp, Shigella sonnei; identical to SEQ ID NO: 11114

SEQ ID NO: 489878 - DNA, 573 bp, Shigella sonnei; identical to SEQ ID NO: 483870

SEQ ID NO: 489879 - DNA, 303 bp, Shigella sonnei; identical to SEQ ID NO: 21213

SEQ ID NO: 489880 - DNA, 336 bp, Shigella sonnei; identical to SEQ ID NO: 485666

SEQ ID NO: 489881 - DNA, 303 bp, Shigella sonnei; identical to SEQ ID NO: 484410

SEQ ID NO: 489882 - DNA, 267 bp, Shigella sonnei; identical to SEQ ID NO: 11114

SEQ ID NO: 489883 - DNA, 267 bp, Shigella sonnei; identical to SEQ ID NO: 11114

SEQ ID NO: 489884 - DNA, 267 bp, Shigella sonnei; identical to SEQ ID NO: 11114

SEQ ID NO: 489885 - DNA, 267 bp, Shigella sonnei; identical to SEQ ID NO: 11114

SEQ ID NO: 489886 - DNA, 267 bp, Shigella sonnei
atggcgacgctggggcgtcttatgagcctgctgtcaccctttgacgtggtgatatggatgacggatggctggccgctgtatgaatcccgcctgaagggaaagctgcacgtaatcagcaagcgatatacgcagcgaattgagcggcataacctgaatctgaggcagcacctggcacggcagggacggaagtcgctgtcgttctcaaaatcggtggagctgcatgacaaagtcatcgggcattatctgaacataaaacactatcaataa

SEQ ID NO: 489887 - DNA, 267 bp, Shigella sonnei; identical to SEQ ID NO: 11114

SEQ ID NO: 489888 - DNA, 291 bp, Shigella sonnei
atgttgggtggagcggacaatccaaatggcgaattaccgtcttatatcactggcgctgacacttcttctgccgtcagacgaacagggcgactgatagcccgcctgcgcgtattacttccacttcgttttgtcataaaacatggctccgtatctgacacggggtgtcggggcgaagccctgaccagggtaattgtaatagcgtgcatgtatgcgcggtataacaattacacatcctgtcctgtcagcaagttcgaattaccgacaaaggcacggcagtttttttggcagtga

SEQ ID NO: 489889 - DNA, 195 bp, Shigella sonnei; identical to SEQ ID NO: 5251

SEQ ID NO: 489890 - DNA, 303 bp, Shigella sonnei; identical to SEQ ID NO: 21213

SEQ ID NO: 489891 - DNA, 477 bp, Shigella sonnei; identical to SEQ ID NO: 5326

SEQ ID NO: 489892 - DNA, 642 bp, Shigella sonnei
atggcagcgacgcacacactccctctggcgtcaccgggcatggcgcgcatctgcctttacggggatttacaacgatttggtcgccgcatcgaccttcgtgtgaaaacgggggctgaagccatccgggcactggccacacagctcccggcgtttcgtcagaaactgagtgacggctggtatcaggtgcgcattgccgggcgtgatgcaggtgaaaccgaattgtctgcccgtcttaatgagccgctggcaaatggtgcagtgatccacatagtaccgcgtctggtgggagctaaaagtggcggtgtgtttcaggcggtgctgggggcggctgttatggcggttgctatatggatgccgggggtaggaattatggcgagtaatctgctgttttctctcggtgccagtatgacgcttggcggtgttgcacagatgctggcaccgaaagccagaactccccgtacacagacaacggataacggtaagcagaacacgtatttctcgtcactggataacatggttgcccagggcaatgttctgcccgttctgtacggtgaaatgcgcgtggggtcacgtgtggtttctcaggagatcagcacggcagacgaaggggatggtggtcaggttgtggtgattggtcgctga

SEQ ID NO: 489893 - DNA, 267 bp, Shigella sonnei; identical to SEQ ID NO: 11114

SEQ ID NO: 489894 - DNA, 303 bp, Shigella sonnei; identical to SEQ ID NO: 484410

SEQ ID NO: 489895 - DNA, 291 bp, Shigella sonnei; identical to SEQ ID NO: 467055

SEQ ID NO: 489896 - DNA, 267 bp, Shigella sonnei; identical to SEQ ID NO: 11114

SEQ ID NO: 489897 - DNA, 285 bp, Shigella sonnei
atgtgtgatggtctgttagtgggtaatgccgaaattattccgttcagtccgcgcaggtatctttatcacgcctatctggcatatatgagggcacacggattcggtaaacctgtaacactgacgcgcttcggtaaagatatgccgggggcaatggcggaatatggcagggagtatatgaaacggaaaacgaagcacggtttgcgttctaatgtgaccctgacagaggattcagaagactggatgccatcatgtgcatcggtcacaaatgacgatggaaaaaattaa

SEQ ID NO: 489898 - DNA, 267 bp, Shigella sonnei; identical to SEQ ID NO: 11114

SEQ ID NO: 489899 - DNA, 198 bp, Shigella sonnei
atgttgggtggagcggacaatccaaatggcgaattaccgtcttatatcactggcgctgacactgtttcactgttgaagccgccggtagtcaccgcccagtgcagtgcctcacgatcacagcagtccagcgcgaacgtgacacgcagtctctctccgttatcacagcagaactcgaacccgtcagagcaccatcgctga

SEQ ID NO: 489900 - DNA, 180 bp, Shigella sonnei
atggaccgccagttcaaactcgccattatctttggtgatccagttattatatttgacaacgattttgtcgtagccagatatgctttcaagatttctttcctgaccaaggaagatgtttttatttacggtctgtatcttacaattttctttgctattatttttacaataagcgatcgttaa

SEQ ID NO: 489901 - DNA, 480 bp, Shigella sonnei; identical to SEQ ID NO: 464934

SEQ ID NO: 489902 - DNA, 174 bp, Shigella sonnei
atggatagccaggataagtattttgaagcaacccaaacagtgtatgaatggtgtggtgttgcgacgcaattgctcgctgcgtatattttgctatttgatgagtacaatgagaagaaagcatccgcccagaaagacattctcattaagggtgatgctgccaacttactgatttag

SEQ ID NO: 489903 - DNA, 267 bp, Shigella sonnei; identical to SEQ ID NO: 11114

SEQ ID NO: 489904 - DNA, 138 bp, Shigella sonnei
atggccgcaggtggcgcggagtccgtcgctgtgtacgttaacgacgtcaaaggcggttcgaaatcgttcgttaaagtgatcatcctcgccggaatttttatcggcgtactgggtgatgctgccaacttactgatttag

SEQ ID NO: 489905 - DNA, 225 bp, Shigella sonnei; identical to SEQ ID NO: 133446

SEQ ID NO: 489906 - DNA, 816 bp, Shigella sonnei
atggggcgggagatgttttctacaaacttaatacagagtaattatggtgatttaaatattaaaagcctggctttcgactcttttaaagaaaggcttgagtctaccatggcggcactcactttctttatatcaacgggtcaatgtgactgcgatgaaatagcagagtcgaacttcaatcgtatgattgcctatatgtctaacattaactatgatgcctcaaagccaggagctccagcacttagttttgatacgtatctgcaggacaatgttaaatatagagtgataattaataatctttatggcagtgagtttcggataagagatattaatgagaattttgttgggatggattttacctgtgaattccgacccgaaaaaatgacgaatttgatcaatataaaaaataggttggttattcattatttaaggactatatactatgaaaaaaattatatacatcctgccgggagcatttttgctgcgattcaaaaaaatgagagtctcctaaagtttccttcgataatatcaatgcttaatatcaatcttctttttaatccactaaatcttccgggaatgggaagtggtgtgcttgaagatattatgagtattccagatagttcacttagaaaacgtctcgggtatgaggttttaagcttctcactacaggcacattcattgagccaggaatgtattgataagttggacatttttttcgctgacgatctgtttaaatatgagtcagtatgcatcgccgcgatggaacatttaaaaagtaaagcaacggcccctatacaaaacggaccgttgccagcataa

SEQ ID NO: 489907 - DNA, 2847 bp, Shigella sonnei
atgaaacgacatctgaacaccagctacaggctggtatggaatcacattacgggcaccctggtggtggcttccgaactggcccgctcacggggaaaacgcgccggtgtggcggttgtgctgtctcttgctgctgtcacatcagtcccggcactggctgctgacacgattgtacaggcgggagaaaccgtgaacggcggaacactgacaaatcatgacaaccagattgttctcggtacggccaacggaatgaccatcagtagcggtctggagtatgggccggataacgaggccaataccggcgggcaatggatacaaaatggcggtatcgccaacaacactactgtcaccggtggtggtcttcagagagtgaatgccggaggaagcgtttcagacacggttatcagtgccggaggcggacagagccttcaggggcaggcagtgaataccactctgaacggcggtgagcagtgggtacatgaaggcgggattgcaacgggtaccgtcattaatgagaagggctggcagaccgtcaaatccggcgcaatggcaaccgacacggttgtgaataccggcgcggaagggggaccagatgcagaaaatggtgataccgggcagtttgttcgcggaaatgccgtacgtaccactatcaatgaaaatggtcgtcagattgtggctgctgaaggaacagcaaataccactgtggtttatgccggcggcgaccagacggtacacgggcatgcgctggataccacactgaatggcggttaccagtatgtgcacaacggcggtacggcgtctggcactgttgtaaacagtgacggctggcagattatcaaggaaggtggtctggcggatttcaccaccgttaaccagaaaggcaaactgcaggtgaacgccggtggtaccgccacacatgtcaccctgaaacagggtggagcactggttaccagtactgcggcaacggttcttggcagcaaccgtctgggcaatttcacggtggaaaacggtaaggctgacggagttgttctggagtccggcggtcgcctggatgtactggaaggccattcagcgcagaaaacacgggtggatgacggcggaaccctggcagtgtctgccggtggtaaggcaacaggtgtcaccatgacatccggtggtgccctgattgcagacagtggtgccactgttgaggggaccaatgccagcggtaagttcagtattgatggcacatccggtcaggccagcggactgctgctggaaaatggcggcagctttacggttaatgccggaggactggccagcaacaccactgtcggacatcgtggaacactgacgctggctgccgggggaagtctgagtggcagaacacagctcagtaaaggtgccagcatggtactgaatggcgatgtggtcagtaccggcgatattgttaacgcaggggagattcgctttgataatcagacgacaccggatgccgcgctgagccgtgctgttgcaaaaggcgactccccggtaacgttccataaactgaccaccagtaacctcaccggtcagggtggcaccatcaatatgcgtgttcgccttgatggcagcaatacctctgaccagctggtgattaatggtggtcaggcaaccggcaaaacctggcttgcgtttacaaatgtcggaaacagtaacctcggggtggcaacctccggacagggtatccgggttgtggatgcacagaatggcgccaccacagaagaaggtgcgtttgccctgagtcgcccgcttcaggccggcgcctttaactacaccctgaaccgtgacagcgatgaagactggtacctgcgcagtgaaaatgcttatcgtgctgaagtccccctgtatacatccatgctgacacaggcaatggactatgaccggattctggcaggctcccgcagccatcagaccggtgtaaacggtgaaaataacagcgtccgtctcagcattcagggcggtcatctcggtcacgataacaacggcggtattgcccgtggagccacgccggaaagcagcggcagctatggcttcgtccgtctggagggtgacctgctgagaacagaggttgccggtatgtctctgacgacaggggtgtatggtgccgcaggccattcttccgttgatgttaaggatgatgacggttcccgcgccggcacggtccgggatgatgccggcagcctgggcggatacctgaatctgacacacacgtcctccggcctgtgggctgacattgtggcacagggaatccgccacagcatgaaagcgtcatcggacaataacgacttccgtgcccggggctggggctggctgggctcactggaaaccggtctgcccttcagtatcactgacaacctgatgctggagccacaactgcactatacctggcagggacttaccctggatgacggccaggataacgccggttatgtgaagttcgggcatggcagtgcacaacatgtgcgtgccggtttccgtctgggcagccacaacgatatgagctttggtgaaggcacctcatcccgtgacactctgcgcgacagtacaaaacaccgtgtgagtgaactgccggtgaactggtgggtacagccttctgttatccgcactttcagctcccggggtgacatgagcatggggacagccgccgccggcagtaacatgacgttctcaccgtcccggaatggcacgtcactggacctgcaggccggactggaagcccgtgtccgggaaaatatcaccctgggcgttcaggccggttatgcccacagcgtcagcggcagcagcgctgaaggttataacggtcaggccacgctgaatgtgactttttga

SEQ ID NO: 489908 - DNA, 159 bp, Shigella sonnei; identical to SEQ ID NO: 6188

SEQ ID NO: 489909 - DNA, 276 bp, Shigella sonnei; identical to SEQ ID NO: 486783

SEQ ID NO: 489910 - DNA, 459 bp, Shigella sonnei
gtgggtctgctttccctgttcacacctgcagtgtggggcaacggctatagcaccgtacaatcctttttaaccgccccaccactgttaatgatcattgccgggatcttcctttgtaaactgtgtgccgtgctggcgagtagcggttccggcgcacccggtggtgtctttacaccgacgctatttatcggtcttgccattggcatgttgtatggtcgtagcctgggattatggttccctgatggcgaagaaattacgcttttactcggattgaccgggatggcgacactgttggcggcaaccacgcacgcgccgattatgtcgacgttgatgatatgtgaaatgaccggggagtatcagctactccccggtttattgattgcctgcgtcattgcgtcggtaatttcgcggacgttacaccgtgactctatctaccgccagcacactgcgcagcatagctaa

SEQ ID NO: 489911 - DNA, 357 bp, Shigella sonnei; identical to SEQ ID NO: 485447

SEQ ID NO: 489912 - DNA, 621 bp, Shigella sonnei
atggcggttatgggacttgccggtgttctccggggtaaaaaggtccgtacgaccatcagccggaaagccgttgccgcaggcgaccgcgtaaaccgtcagttcgtggcagaacgacctgaccagctgtgggtggctgattttacttacgtcagcacatggcagggcttcgtctatgtggcgttcatcattgatgtgtttgccggatacatcgtggggtggcgggtctcatcgtccatggaaacgacattcgtgctggatgcactggagcaggcgttatgggcccgtcgaccgtccggcacggtccatcacagtgataaaggttctcagtatgtatcgctggcctacacacagcggcttaaggaagccggattactggcatcaacaggaagtacaggcgactcgtatgacaacgcgatggcggagagcatcaatggtctttacaaagcggaggtaatacaccgtaagagctggaaaaaccgtgcagaagtggaactggccatactcacgtgggtggactggtataacaatcgacgattgctggaaaggctgggccatactcctccggcagaagcagaaaaagcttattatgcttccatcggaaacgatgatctggcagcctga

SEQ ID NO: 489913 - DNA, 747 bp, Shigella sonnei
atgaaaaatattgcgacaggcggcgttctggaacgcatccgccgactgaccccgccacatgtaaccgccccattcagaacggtagcggagtggcgcgagtggcaacttgctgaaggccagaaacgtagcgaggagatcaaccgcctgaatcgccagttgcgggtggaaaaaattctgaatcgctcaggcatccagccgttgcaccgtaaatgctcgtttgcgaattaccaggtgcagaacgacggccagcgatacgcgttaagccaggcgaaatccatcgccgatgaactgatgaccgggtgtacaaattttgcgttcagcggaaaacttggtaccgggaagaatcacttagcggcagctatcgggaatcgcctgctgaaagacggtcagacagtgattgtggttaccgtggctgatgttatgagcgccctgcacgccagctatgacgacgggcagtcaggcgaaaaatttttgcgggagctgtgcgaagtggatctgctggttcttgatgaaattggcattcagcgcgagacgaaaaacgagcaggtggtgctgcaccagattgttgatcgccggacagcgtcgatgcgcagcgtggggatgctgacaaacctgaactatgaggtgatgaaaacattgctcggcgagcgggtgatggatcgcatggtcatgaacggcgggcgctgggtgaattttaactgggagagctggcgtccgaatgttagccattcgagggttgttaagtag

SEQ ID NO: 489914 - DNA, 534 bp, Shigella sonnei
gtggcgaccgtcatcacttccggtcagcacatcgtgcgttttccccttgttgtcagttacgcggagataatccccggagaaagtcgacacacggctgtaagccacacccgccatcgcatacgcgctgaaccattcattcacgcgcacagacggccccgccatcacgctgaaccagcggttacgcacggaatcttcatgccagcgggtatcgctgtagtgcgttttttgctcatcctcagcattggcataactgaaggacgtaatcagccccagcgcgtccgtaaactcataacggtatttcacgttaatcccgttcagattatcgctgccgggagcgttcgtacgggcatgaagataccccgcgctcagtgtggactgatgttcagacgcccatgcaggcgcaccggatacggacagacagatggctgcggacaaaatggctgcacaaactttacgcataattacctctcgcttttctgcaataaaaaaggcgccatttctggcgcccgtatatgggttataaaattcagctga

SEQ ID NO: 489915 - DNA, 303 bp, Shigella sonnei; identical to SEQ ID NO: 458125

SEQ ID NO: 489916 - DNA, 246 bp, Shigella sonnei; identical to SEQ ID NO: 486098

SEQ ID NO: 489917 - DNA, 378 bp, Shigella sonnei
atggacgaacagtggggctatgtcggggctaaatcgcgccagcgctggctgttttacgcgtatgacaggctccggaagacggttgttgcgcacgtattcggtgaacgcactatggcgacgctggggcgtcttatgagcctgctgtcaccctttgacgtggtgatatggatgacggatggctggccgctgtatgaatcccgcctgaagggaaagctgcacgtaatcagcaagcgatatacgcagcgaattgagcggcataacctgaatctgaggcagcacctggcacggctgggacggaagtcgctgtcgttctcaaaatcggtggagctgcatgacaaggtcatcgggcattatctgaacataaaacactatcagtaa

SEQ ID NO: 489918 - DNA, 690 bp, Shigella sonnei; identical to SEQ ID NO: 482246

SEQ ID NO: 489919 - DNA, 849 bp, Shigella sonnei; identical to SEQ ID NO: 482262

SEQ ID NO: 489920 - DNA, 489 bp, Shigella sonnei
atgtcgattctgaaagtgggtctggtcgcctcgattccggcactgtgtggttttgcgggcggcgtgctgggaggtgtcttctcggattatctgatcaaacgcggtttatccctgaccctggcacgtaagctaccgattgtgctgggaatgttgctggtttccaccatcatcttatgtaactacaccaacaacaccacgctggtggtcatgctgatggcgctggctttttttggcaaaggatttggtgctctgggctggccggtgatttctgacaccgcgccgaaagagattgttggcctctgtggcggcgtctttaacgtctttggcaatgttgcctccattgtcactccactggtgattggctacctggtaagtgaactgcactccttcaatgcagcactggttttcgtgggatgttcagcgctgatggcgatggtctgctacctcttcgtagttggcgacattaaacgtatggaattgcagaaataa

SEQ ID NO: 489921 - DNA, 267 bp, Shigella sonnei; identical to SEQ ID NO: 489468

SEQ ID NO: 489922 - DNA, 1041 bp, Shigella sonnei; identical to SEQ ID NO: 485547

SEQ ID NO: 489923 - DNA, 390 bp, Shigella sonnei; identical to SEQ ID NO: 485650

SEQ ID NO: 489924 - DNA, 396 bp, Shigella sonnei
atgacagatactaagaaagacaaaacagaaaaaaacgctaaaaagggtgctgcttggctcgataactttgatgattttcagaatgtctcgctggaaacctcttttgctaaagataatggcacatactggagctaccgtacagaaagcttaggtgatattcaggccgggactacgccctatgtccgttctacggtcaaagtcactaagcatgatgatgctcgtttgattaacgtccgtattcctgctgcgcttgaagaaaaactaaaagaagtttcttttgatattccaatccccactcttcttttaatttgtgctgattatttaactgatgaactcattaaagaaaacaaacaaatattagcacttccaaaagaaagcgatgaacggaagatataa

SEQ ID NO: 489925 - DNA, 624 bp, Shigella sonnei
atgtttgctatgagtgtgttcaatttgaagggaggggttggcaaaacgacccttagcctgaatctgtgcggatattttgcttccaaaggtcagtcaacaacgttagtagactttgacccacagggaggttcacttacatgtgcagcctttgcgatgaagaacggtaaacctctaccgtttgaagtgacccgtaaaccgaaggtagcaaccgacttcatgatctttgaccatgcgccgggtgtagacagcggcggtcagttagcgccattggtattggtaccaaccatcctcgatgcttccagctattcaaccactctaaagagcattgataacctgaaagaaatgaacaaacctttcatccttgttccaaatcgggttgaagttcagaacaaagagcaaatggctctcttgaagaaactcgaaacgtattcagaaaatcttggctattcacagccctacatccgtaagcgtgttgcgtatccccgcgcctatggcaacgggatcactatctttgatgaaaaggccgcattgccaaacatcactgatgcccgtaatgagtttgctcacttgattgaaatcatcaaactgaaaatcaaagaacaggctgaagccaaaaagaaatga

SEQ ID NO: 489926 - DNA, 1158 bp, Shigella sonnei
atgaatgaacaatttttagataagtttgatagagctttcattgctgatcctaccgaagcattaaaggccgttgacgacatggccacatctctaatgtcagagatagaacagaagaggaaagcaggtattaaagagttagatcctgttatggtaaagctacaggaagaccatgcttatctttctggcctccatgaagaaaagagcgaagaactggcattacatcagcgcctacataagcaagctggcatcgagatagacaacccctttaaacagctcacagaacaggctccagccgtctttaatgagtttgacatacaagaagacgttgccccggctccagctcctgtggctccctctcttatgacgaacgacgacatagcgaagttggctaaggccgtcagtgataagcagactcctgcagctccggctccggtagaacaaccggaaggtatggacatatcaaagttcaagccagaacctaagccactggatctttcaggacttgatacgttcaccatgcgtaaagcagaagaggcaaaacagaaagctaaaccaaaagtggatactgacgaactggataactttagtaatcgctatgcggggaatagttttattgaaaaagtgacaaaaaaactacaggaaacattttcagctacttctcatgctcctgttaactttgtgccagaacatgagataaaggctatgtttggtaattctctttctaaaatagttaataacaccaatagtagaagcattcattttgttgataaatctgttcttaaagaagatgcgcagggattatcaattgccacaaaggatagaaccttagccgcaagaagattaactctaatggctaaagctaaaggatggagcagcatcagttttgatggtaatcagcttttccttgaagaagcatatgaagaagcaacaagagcgggtttggtagtaaagccatcatcagaagaacaagccagatttttcaaagaagttcatgaagcgaaaaagttagatagttttatgccttttggcggtatgaaggaaagcaaaaaaaaggatatagataaagatattgaaaatcccggacatagccatgaacaagcccctgttcctgttcaagcccctgtctacaacgcaagaataccaacaagaatgaaataa

SEQ ID NO: 489927 - DNA, 294 bp, Shigella sonnei
atgctaaacttatatattgattcattactgaacttatcaacagtgttctacggtattccgctgttagctctttcggcgttaactactgttgttttaggtttcgtggtgttttatccgcttggtaaaatgatgaacactaacgcttataaaagctttccagtgtttcatatgatgcctgtaaacaactatgcctttaagttgattgtaggttttcccgtgagtatggttgtattcttaacgttgggtatcactattctttctttcgtcaacgttctgattaaaatcttcatgtaa

SEQ ID NO: 489928 - DNA, 297 bp, Shigella sonnei
atgctaacgtgtgttgctctgttctttggttttagttttatgacaagagctgatttaacaattccattaaggatggttccttttgtcgctgcgcttgtcggttttgccgggtattttaatcttatcgtaaatgcttattgccttaaagcaagaacctttgagaataaacttaatgtcttcaaatccgttgaagacattatacctaaccctttttatgaatttacttcttgtgtcaaagataaaaacaacaaaagtagaaatgttccagttatgttttatccgaaaaataaaaaataa

SEQ ID NO: 489929 - DNA, 1041 bp, Shigella sonnei
atgactgtatctaaaaaatccaaatctaatattcttcatcttgatattgatgctttcattgctaaagcacgtaatattattcatgaagtctaccataacaaaactattctctctgttcctgattaccagactaaaacagcagcaaacgatcaggactacatcaccaaaccacttactcccctttacgcatgggctggcggcaaacgtcgccttatcaaagcgtatcgcccctatatgccagattttaagcgtattcgatactacgcagagccgttcttcggcgcaggcgctatgttctgtgaagttttcaatcagcaccgtgaacacatcagaagctaccacctgaacgacattaacccggagatcatcaacctactgaacaccattaaaagggattgttctggcttcattgacgagctgaaggctattgaagaacgcaaccactataaaacgctggaaggtcaaaaacacttctactatcgcttacgtgaagaataccgttccttaccagtaggagctgaatattcagtgagaggaacagctatgttctacttcctcttaaacaatatgttcaggggcttatacagtcagaaaaacgggcgaattttcacgtcattccagacgaataaaaatggttttgattatgaaaatatcaaaaactggtcaacagcattacagaaagctgtgatcacatgtggaagctatgaagacgttaaggttaataaaaatacgttcctgttttgtgatccgccttatcgtgattgctcgattatgtattcaacagattttaatgatgaacagcataagcaatgctacgcatgggttcagaaaaaagtagaagagaaaaaaactgtaggtatgttgtgtaataaaaacctgaatgatggtttctttagttcactaccaaccacaacagaaagcgaacatatcaatattgaatattcgcatacaaaagcaagagttggcgaaaacagaaacattgttgagctgttaatggtattcaaagaaaaagtggctgttcccgctcttaaagcagcttaa

SEQ ID NO: 489930 - DNA, 564 bp, Shigella sonnei
atgatagcggcattacttaaccagatccgtagaaccggctttgtgcttctctcccaatttgacgctgttttgtcttccccggctcctacgccggaagaacaggaacagaaagacgcttcattaaagatgcttctcccgctgttagagaagaaccatgatgaaagatacctgataacacgtttactcgattacagcgctcaggatctgttagcggtctacctcttaggccgttccgggagcatgaaagcgtatgcgcttctccagctcatacagaacacatccaaattgtggccgtcaggtttctatcatgctgttgcccgttccggcatacgcctgaacgacgagctggacacatccgggctaacccctatccagttagcagcaaaaacaggaaacgtagagctgtttaagcttcttctcttggatggggcagatctctatcagaagaacaaagacggtatgagtgcttatgatttggtgttgaacagcaataacgcagagctgttaatgttcatgatccgctatgaaaatgctgatatttcgaactaccgccgaaaagcttga

SEQ ID NO: 489931 - DNA, 291 bp, Shigella sonnei
ttgttaacgcttggcgctaaccctaatgctatagacatatacggaagaacgccgctgttctataccgctttcagccctaagtacaatggtcgtcagttagatgaagctctcatagcgggaaatgctgataccaccatttacgatgttaacgggcatacacgcgatcagttcgtgtatagcttcaaaagctcgatgttctaccgtccagaaccagaagcagtagaagaggaacaaccggaagaggtagccccttcagctcctgtgaaaagggcaggaagacgtaaagcatga

SEQ ID NO: 489932 - DNA, 894 bp, Shigella sonnei
  misc_feature (811)..(820): n is a, c, g, or t
atgccaattgaaagtgttgatatgctggattctgatattcaggaatcagtatttgatgaagaaaatcaggtttcatccaaagacacaaaaacttatactaaagttcgtttcttggatctaaatggtcaggaaagatttgtcaaaatccctcagtctgaactatctcaaatcagtaaacagtctttgttagctaaacgctggcctttacccccggctaacaaaatgtcaaaggttgctgacatcatgttgaaggtgctggctgatgggcgtagaacggttgtttctcctgcgggtgttgaatacgaaccatgtataaaaatcacttccggctctgataactgcggctgggttaatggtgaacacattaaacccggtcaccctcgctatgtcggtgatgaagaatgtatgacattcaaggcaggtaaagcagagattcagattgatattttaggccagtggtacgcacaagatgaacagttagctttaatcgctgctcatcaactggtaggttatacattcggtaatatcttttctccttcggtaaaccttatcattgagttaacaggtgatccgggagatgggaagtcagtaagattaattgcccaatcgtcctatgaaggtataccgatcaaaggtcataatatcctttattttgacgctacagcgtctattgcaggtatggagcgtttattcccgcttttaaacagcggtagtgtacttttggatgagtttgataaaatcgtaaataataaaggggcaaatgttgccactgaaatgatttttatgatttgtaatggtactcagcgtgttnnnnnnnnnngttttcccccgttgttgcgtctaataaaccaatcgttgaacgccttgatggtcatgaaagtattatggctataa

SEQ ID NO: 489933 - DNA, 951 bp, Shigella sonnei
atggctataaaagatcgtatctggactattcacacttgcgatgaagagattttaggctttaaaggcgatctatctatcgttaacgtctggagaagattacttgaagaaaactatggtcatatttacggcatagctattgattatataaaaaacaaccgaattgctcttattaaaaagttcgaagatttaaggaatgagctttataaaaaagagtatggcgatcattatagtaaagatatgcgtgatgctgaaatgattgcttcacttcaattaggtgctgatttagtttcagaaattttcggtgaagaagctggtttatcagctcatagagcggtagatgtattcaaaagaagagtagcaaataccacttttaacgctgataacaactacaaaattgttattgaaagatttaaagaatggattgctgataacatcggttctattcgtattgatggttttgcttacacaggctcttatggtagaaacagtgaagaacaacagttagatcaggctgaacgcctcactaacaacgctatcatgtctaacagaggtgctatagctggacttgagcaatcaagacctatgcagcatagaactgattttgaaggttgcatctggttaaaaccagaagcagaagcaagcttaaagaaatctggtatagcaattgatgaacttatgcgagcagcaaaagaacttgatttgttgccaaaaacaaaacgcggtgagttgattgataaacaaaaacttagtggtcagaaaaaagactggttagaaaataaaacgtcttacgccattaagatattgctttatccattccctgaagaagaagatgaagttaataatgagtttgaggatgaagtgttttattcaaacgttgatcgtgaggatatagattcacttgttgaacaaaacattaatgctcatatgttcgatttacctaaaattgattaa

SEQ ID NO: 489934 - DNA, 282 bp, Shigella sonnei; identical to SEQ ID NO: 388558

SEQ ID NO: 489935 - DNA, 864 bp, Shigella sonnei
  misc_feature (820)..(829): n is a, c, g, or t
gtggttgttgtatctggtgttagcggtgtaggtaaatcgactttgcttaaagagatagcaaaagaaagacatatacattattcgaatccgacttataactgcattaagttcggcattaaacatagcgatcttattgctattgatgatgtgagagaaacggaactaaaaaacgttatacaaaaaattcaggatggtgtagctaaaacaaacataaaaactaaagcgatcatagtagttgataagtttgataagtctgtacttgatagcgttgtattgaaaataaagcattacagaatggtaaagccaaaatcaaaaggtgtcttaccaaaaataaaagagtatcaagagcttttaaaatcaatagaagaacaaaggtttcttactgataatgttcagatctcatgtttgaacgatttgtatcaaatggaacaagaattgaagtatttgagagatttgaatgaaaagtatgaatgcgaagctgttttacatgaccataactatacacaattagctcttgatttggatgatagcaaagctaaagtagaagagcttgaaagtgaaattgttgagttgaaagcattaataaaagaaatcactgataaaactcaggaagagttgactgatttagaagagcataacatcattttaattgaaaggttgagaaatgaagaaagtgaaaacaaagatctgataaaagagaactacagcttacacttaaaaataaaagagcttaatgatttactctatgaccaaaacgaagaaaaaatagaacttgaaggttctaatcaggagttagagcagtctctttcccaatgtctgnnnnnnnnnnatccaaacataccaaaatacagtagctgtttttga

SEQ ID NO: 489936 - DNA, 147 bp, Shigella sonnei
atgtcagaagactttattactcagataaaatggttaaataacacgattgaggtttatcgaggtgaagttgatgaagacaccatacgcagagttgaatacacggttcaacagctcagggaaagtttcggtgatgattatgaggtctga

SEQ ID NO: 489937 - DNA, 402 bp, Shigella sonnei
atgggctttccatcaccggctgcagactacactgaaaaaccactctcactggatgcgttatgcatccataaaccgcacgctacgtactttatgcgggctggacaggcatatttaagggctggcatacaaaagggcgctacgctcgttgtagacgcttctgttaagcctttcgatggaagcattgtgatagtggcgttaggtggggagttcgtagtgaaacggctaaggcttcatccagctccggtattgatgcctgtagactacgcaggaaccccggtaccgatcgatctcgatgatatggacgagaacaacgctacccggattttcggcgttatgacgtattgtgtaaacgacatgcgaacaggcgggttcgacgacacgccttatggcttagagggctaa

SEQ ID NO: 489938 - DNA, 1584 bp, Shigella sonnei
atgattggttataccttcggctatccagatggaaacgcattttcaggttataaagcagataaatgcggaagtacgaaaatgaagcttcttaatgaagataaaatgccagatcccggttcattattaataaacacgaacgggatagcgatgaatgttcaaaaagctcagatagctgctaatgctgctttagtatctggtgctatggcatatgctgaagctaacttgaaagacaggtctaagactattgatgttgaaacattaaacaaacacattgatcttatgactaatgcttatgctcaaattgttcaaactgctgctgaagctgctatgaaagatgctgttaatcaatcacaggttgataagttaacagaagctggatggacttatagctatgcgttttatatgagaataacaacggctgcgtcttctgctaatgctgctttaaataacttccctatttcctcagcaacattgaaagaagaagattttaaatacaatacatggggtgaggtttacagtagacttgataaagtaagaacgttattgaatgctactaataaactcaattctaacctttctgatgaaggtgataatgatgggttatatcaaaaagccatagggattatcggaggcaatttaggtgtattcggaactcaaaaagctgatacagcaagtttaatgcctttaaccgtttcggcaaatatcggtgagcatgttatatatggcgtagatgctatgttagcggctttaactgtaggttctatgttaggtagccttcctgtcattggtggcggtatacaagcggttgtcggtcttctgtctggaacattgacatcgttcttcgttccactattgatagtaggaaacatgttagctcatgttatgcctatgatgccttatatcattggtttcgggtgtgttataggttatatcgttcttgttcttgaagctatatgcggtgctccacttcttgtagtggcttcaataacacctgatcaggatggtgtagttggtaaacaaggacaaggttatatgttgcttttatccttattgcttagacctgctttaaacgtggctggctatgcggcttcatttgtagcgatgaatatcagttttgaatatataaacagtacgttctttgctgctgcgagcgatgtagaaggaggattcttaggtattcaaaaaggtataaccatgattgttatatattgtgtattaacgctttcagctacattagcatgttgtaagttaatgcatttattacctgacactatctttaaatggataggcggggcttcttcaactgttcttggcatgttatctactcatgctgaatcaggtatgttaaaagctcaggctgctgttggggcaagtatgcaatatgctaccgctggtcaaggcagcatgataaataaagcgggtaaattcggtcaaagcttaggtgataaaataatacctcaacctaaaaacactgctactaatggagataatggtgaaggttcaggtgaaagtgaagaaaaatcagaatcatcaaataataaacctaaagataccagtgtagatttacaggattttaataaataa

SEQ ID NO: 489939 - DNA, 267 bp, Shigella sonnei; identical to SEQ ID NO: 11114

SEQ ID NO: 489940 - DNA, 276 bp, Shigella sonnei
atgctcgaaaccgatcaggcgtgggaagtgttcgaaaaactggaagactgttatttcaaccagaaacagccaccagcggcacaaaacacatctatcgaaaatgatggatgcgcattactgagccacttcgataaacacggtcaggttgagttcacggaaaaggtacccgccgatgcgatggtatgtactctggaacggtttaaattttatctggagcaacacgggtggatcgttgcccgtaaagagcaactggtggagcggttgatgcggttttaa

SEQ ID NO: 489941 - DNA, 954 bp, Shigella sonnei
ttgttttccgatgaaaaaataaaacagattaaaatcggtgaacgcgatggtaaaaaaataattgaaaagtatcaaaaagaagagaaaaaatataatgaatatcttgaaagggtagagaaatacaaagaagacccaaacaagaacccattaccttctacggctgtagcaccgccaaaggttcctgagccattcatttacacgaactcttacaaagatgtctcatcgaaaaatccagatgccgcaatagaatgctaccaaatcattcttaatcttgaacatgttcctgttgaagaagtagaagctgtatggaaagtagcaactcatgcgatggcgcatgataactatgtatatgattatcctcaaggcggtagtaatactacgcctcgcggcctgaaaggaagacgcccggttatcttcaataatatccatgttaaacaggatgctcctatacacggtcaggcgtatgtttttactcgtgatgtttcagaagcaaaatatgttcctttgactgacgagaaaagagcgtatttagagaaagaaggtaagttagatcttataacttatttccctaatgataaaagagcttttgttcctgagcaaaacggtgtttatccgtgggctaaatggtcaaatgctaaaacaaaacttcaagatgaaaagtttatggaagttttccaaaaacacatcgaaagagagttaaagaatgcgggttataattatccgttcacaatggttagtgtttgtaaaagatataaagatgctgataaagcagaagcagtaagaaaagttcatactgatttacctaaagctatagatacctataaagaaagctttgttgattcaacaaagcttgaacttgatccagaacataaacaccatgctattttaaataaatacaatactaatatcaagacaaaacaaaatcaggctgctgatttacttgctcaactttaa

SEQ ID NO: 489942 - DNA, 267 bp, Shigella sonnei; identical to SEQ ID NO: 11114

SEQ ID NO: 489943 - DNA, 336 bp, Shigella sonnei; identical to SEQ ID NO: 150359

SEQ ID NO: 489944 - DNA, 231 bp, Shigella sonnei
atgcgtaaagagctttttgatgatctgattgcttctgctaaggaagctgtagaaatccataagggtttacgtgagccagcgcgggttacccgttttgaacgtccagatgtgaaagctattcgggctaaggttcatatgaaacaagatgattttgccagtctgatcggggttagctcccatatccttactaactgtttatttgtttctatgtttttggattttgtaatatga

SEQ ID NO: 489945 - DNA, 522 bp, Shigella sonnei
atgagaaaaggatttaaaaaaggttttagtctcatagagctgttgttagttcttgccgttgctacaagcgtagtggcggctacgttctatgtctatggtaaggttcaggcgcataacagggtaaaccgggctacgcatgatctggcgagtatcagtaaaacaatgaatgccattctgacgacaaggccaacgatagctgaggctaatactatgctgaccagctcaaagactttaccctcttctatgctcgataaaacaggctcgttcgtaaacgcctacgggggaaagctcactataaccgctcatagcggctcaaatgacttctatgatgtttcctactacaacgtaccacctgatgcgtgtatagagcttgtaagcgccagcagagcgatttaccgcactataaccaacacttcctatagcccgaagataacagccgcttcaggcgtgagtgatatagcttcattctgttccgggtttacctctaccagctcagtgatggtctttactgacgcagcctga

SEQ ID NO: 489946 - DNA, 294 bp, Shigella sonnei
atgaaaaagcttctggcggtatgcgtgatcgggctggcctccttccttaccgggtgtggtgatgatggaatttatggtagctacgtgaacaagcagtatggcgtaaagctcgatgttcagaaggatgttatcaagtttcgtgatggtgttttcaacgttaaagaatgggatgaaagcaaaaagcctgtatacattgccagaacgcagaacaaggatttaggatcatggacatttaaaatcgaaaaggtaaaacagggtgtggtttatcagggcgcagtatttgaaaaagattaa

SEQ ID NO: 489947 - DNA, 294 bp, Shigella sonnei
atgaaaaaagacataacaagagagttgaaacgtttgggtttacacaatggtaatgagttcatagcaaaagcagcgttgatagaagggcagagagcagaggcaatattagaactgatagaacgcttgggaagacgcaaaatcattcctgatgctgttcagcatggttttaatcaggttaaggctacatatcgcttatcgggctacatcaatcaagcactgactgttatagcgtttaaagcgtatgtgaacgaacctaaagagaacttcaaagcagatatacactggaatatataa

SEQ ID NO: 489948 - DNA, 348 bp, Shigella sonnei
atgatcccgttaccttccgggaccaaaatttggctggttgccggtatcaccgatatgagaaatagcttcaacggcctggctgcgaaagtacaaacggcgctgaaagacgatcccatgtccggccatattttcattttccggggccgcagcggcagtcaggttaaactgctgtggtccaccggcgacggactgtgcctcctgaccaaacggctggagcgtgggcgcttcgcctggccgtcagcccgtgatggcaaagtgttccttacgcaggcgcagctggcgatgctgctggaaggtatcgactggcgacagcccaagcggctgctgacctccctgaccatgctgtaa

SEQ ID NO: 489949 - DNA, 489 bp, Shigella sonnei
atgaatagcattaatgaattattattgatatacggttcaaatataacaaaaatcaaagaacttgttttagcaggggcaaatgttaactacatatcgccggaaggtttaacgcctttatcctgtgctgaatctgttgaagtggctcagtttcttcttagccgtggcgctgatgtgaacgctaccaatgaagacgggaaaacagccttgttcagcgttagcaacgttgatacatgccgcttcctgatagagaaaggcgcaagggtaaatcatgttaacaataaacatgaaacagcattgttttatacaacggatatgaaaaaaatcagattactggttgaagctggatgtgatcccttagtcagaagttatgatggtaaacgccattacgatttgttggcacataatcagaaagttagttttattaacttcttggctaacagaaaaaagaaaatggaaactgttaacgcacctttagcacttgccttttaa

SEQ ID NO: 489950 - DNA, 312 bp, Shigella sonnei
gtgttttctcttgatacaaagataaaaggtaaggattatgtttatgaagtggagcatttacatgcttcatatcaaacaggcgatattacagactatttatctttaaaaatgaagagcaaggataaagatagtgatttcaaaactgaaactatcaatatggcttattttgataatctgaaaccggaacagcatgaagattttaaaaagaagataaaagagtttgctaatgaagcttataccagaatggaaattgacatggagcctgtttatcaggaaaacatgaaaaacttacgttcactaagctttaaataa

SEQ ID NO: 489951 - DNA, 288 bp, Shigella sonnei
atgattcaggacggaaagcttatcaatgaatggaaaggcaacgtacaggttgagtattcagggaaccacggcaaatacaacattatctatgatgctgttcccgcttctgactgttcaaagttgatagcggctgtatcaggaaactttgtgagcatagacgtttacaacgggaacggcggtacgcaggttaagaaccttgaagaagggaagaacattgatatagcggcaacatcagcagcgtgtttttcagaagataactccaccattatttttgcgtcaataatataa

SEQ ID NO: 489952 - DNA, 267 bp, Shigella sonnei; identical to SEQ ID NO: 11114

SEQ ID NO: 489953 - DNA, 303 bp, Shigella sonnei
atgaaaaagaaaaccatgattgaagaaatgagagaaagagcaaataaactttcaaatggtgaagccctcattttattagaccatattttaaaaagagaaggacaagaggcaatgattagtatcttcatgaatgaaatgcctcaaatcaaaagcaggataagttatggcggtttcaatctggaaggttgtagaaatatcaacactcagttagctaatgagctgatagcttatatagagcgtgaaaaactcatggtaatactggaatctaatctaaaagaaagtgccataaagaaacgtttataa

SEQ ID NO: 489954 - DNA, 267 bp, Shigella sonnei; identical to SEQ ID NO: 11114

SEQ ID NO: 489955 - DNA, 276 bp, Shigella sonnei; identical to SEQ ID NO: 485876

SEQ ID NO: 489956 - DNA, 246 bp, Shigella sonnei
atggatgttgatcagtataacaaatcatcatgtagattttatatagtaaatgaagaggttcgttatcatgagttcataatggactatgaagaagctttaaagataatgcgcattgataaaaggatgaaatataaacttgaaaataccttcaatgatacaaggaagcttcttccgtgggagatctcagagttcaggaaagaagatttttataatatatcgaaagaagacttacaaaaactcatataa

SEQ ID NO: 489957 - DNA, 183 bp, Shigella sonnei
atgaatcatgattatggtcatgactattttgatacagaagaagagttaaaagagtatgttttaaaagctaacttatatcttatcaatgactctttagctgttgatgatgtatcagatgagtatgatgcttgtaagcaggttttagaaatgcttgaagctgacataaacgataacgatgaataa

SEQ ID NO: 489958 - DNA, 165 bp, Shigella sonnei
atgtctgtagtgatatcaggtgcgctgactgatggcgcaggcatccccatgtccggatgccagattattctgaaatcccgtgtaaacatctcagaagtggtgatgcgtaccagggctgatgtagtggatttgcccctatatttccagacatctgttatcacttaa

SEQ ID NO: 489959 - DNA, 750 bp, Shigella sonnei; identical to SEQ ID NO: 485661

SEQ ID NO: 489960 - DNA, 267 bp, Shigella sonnei; identical to SEQ ID NO: 487831

SEQ ID NO: 489961 - DNA, 1362 bp, Shigella sonnei
  misc_feature (1281)..(1290): n is a, c, g, or t
atgatggaaattctgcgtggttcgcctgcactgtcggcattccgaatcaacaaactgctggcacgttttcaggctgccaggctcccggttcacaatatttacgccgagtatgtccattttgctgacctcaatgcgccgttaaacgatgatgagcacgcacaacttgaacgcctgctgaaatatggcccggcactcgccagccacgccccgcaaggcaaactcctgctggtgaccccgcgtcctggcaccatctctccctggtcttcgaaagcgaccgatattgcccataactgcgggctacaacaggtaaaccgccttgagcgcggcgttgcttactatatagaagccggtacgctgaccaatgaacaatggcagcaggttaccgctgaactgcacgaccgcatgatggaaacggtcttttttgctttagatgatgcagagcagttgtttgcccaccatcaaccgactccggttaccagcgttgatttgctggggcagggccgtcaggcgctgatcgacgctaacctgcgtcttggcctggctctggcggaagatgaaattgactatctgcaggatgctttcacaaagcttggtcgtaacccgaacgacatcgagctgtatatgttcgctcaggcgaactctgagcactgccgccacaaaatttttaatgccgactggattatcgacggtgaacagcagccgaaatcgctgttcaagatgatcaaaaatactttcgaaaccacgccagatcacgttctctctgcttataaagataacgccgccgtaatggaaggttctgaagtgggccgctactttgctgaccacgaaacgggccgctacgatttccatcaggaaccggcgcatattctgatgaaagtcgaaactcacaaccacccgacggcgatttctccgtggccgggcgcggcgacgggttccggcggcgaaattcgtgatgaaggcgccaccggacgcggtgcgaagccgaaggctggtctggttggtttctccgtttccaacctgcgaattcctggcttcgaacagccgtgggaagaagatttcggtaagcctgagcgcattgtcaccgcgctggacatcatgaccgaaggcccgctgggcggcgcggcgtttaacaacgaatttggtcgtccggcactgaatggctacttccgtacttatgaagaaaaagtgaacagccacaacggcgaagagctgcgcggttatcacaaaccgatcatgctggcgggcgggatcggcaacattcgcgccgatcacctacaaaannnnnnnnnngcgccgatcacgtacaaaaaggcgagatcaacgtcggtgcgaagctggtcgttctcggcggcccggcaatga

SEQ ID NO: 489962 - DNA, 267 bp, Shigella sonnei; identical to SEQ ID NO: 489460

SEQ ID NO: 489963 - DNA, 267 bp, Shigella sonnei
atggcgacgctggggcgtcttatgagcctgctgtcaccctttgacgtggtgatatggatgacggatggctggccgctgtatgaatcccgcctgaagggaaagctgcacgtaatcagcaagcgatatacgcagcgaattgagcggcataacctgaatctgaggcagcacctggcacggctgggacggaagtcgctgtcgttctcaaaatcggtggaactgcatgacaaagtcatcgggcattatctgaacataaaacactatcaataa

SEQ ID NO: 489964 - DNA, 723 bp, Shigella sonnei; identical to SEQ ID NO: 487523

SEQ ID NO: 489965 - DNA, 267 bp, Shigella sonnei; identical to SEQ ID NO: 11114

SEQ ID NO: 489966 - DNA, 1041 bp, Shigella sonnei; identical to SEQ ID NO: 485547

SEQ ID NO: 489967 - DNA, 1038 bp, Shigella sonnei
atgggtgaaacgaacaagaaagcgcccttaaatagtcctgcactgaccggaacgccaacaacaccaactgcgcgacagggaacgaataatacccaaatcgcaagcacggctttcgttatggctgcgattgccgcccttgtagattcgtcacctgatgcactgaacacgctgaacgagctggctgcggcgctgggcaacgacccgaattttgcgacctccatgactaacgcgcttgcgggtaagcaaccgaaagatgccaccctgacggcgctggccggacttactactgcggcaggcaagtttccgtattttacggggaatgatgtcgccagcctggcaaccctgacaaaagtcgggcgggatattcttgcgaaatcgaccgttgctgccgttatcgaatacctcggtttacaggaaacggtaaacaaggctggtaacgccgttcagcgttccggcgataaaatgaccggagaactgaaaattggcacggtgaatgcgctgcgaattttcaatgataccttcggtctaattttccgtcgttcagaagattttcttcatttcattccgacggctgaaggacaaggcgaaaacggtaatatcggcccattaaggccattcgctataaatctgagaacaggtgctatatctgtcagccacggggccaaaattaaaggaggtctagctattggagctactgataacgcactgggtgaaaactccattgttctgggagataacgacaccggatttaggcaagatggagatggtattattagcttctattcaaatggttcgcgcatcggacatattgatgagttaggattacatctttataaagatattgaatctaatggcagcaattttagattaaaaagtaattaccgccaccacattacattcgccaacgaagacggaagaattcgtatgtttttgtggaaagataacggtggtgatggtgttcatattaataacggttcagatggtggtggtgatttcatttttaaaacagatgggggatttgaggtgtactggcaatag

SEQ ID NO: 489968 - DNA, 303 bp, Shigella sonnei; identical to SEQ ID NO: 458125

SEQ ID NO: 489969 - DNA, 813 bp, Shigella sonnei; identical to SEQ ID NO: 484788

SEQ ID NO: 489970 - DNA, 267 bp, Shigella sonnei; identical to SEQ ID NO: 11114

SEQ ID NO: 489971 - DNA, 267 bp, Shigella sonnei; identical to SEQ ID NO: 11114

SEQ ID NO: 489972 - DNA, 267 bp, Shigella sonnei; identical to SEQ ID NO: 11114

SEQ ID NO: 489973 - DNA, 258 bp, Shigella sonnei
atggttaaggcatcaagaggtgctggtcagtttatttacatgactaataagagcgatgaagaactcgctgaaattgctagacagaacatcttggcatcacgtaacaagcaacttgataatgttaagttgtatctctcaagagagcttcaggctatgaaagagcttgtgaaagaatatgaagatgctaagaagattgctatgcaggctgatattgagcagcttacgaagatttctagcaaatatgcaaaggctatttaa

SEQ ID NO: 489974 - DNA, 1026 bp, Shigella sonnei; identical to SEQ ID NO: 485458

SEQ ID NO: 489975 - DNA, 378 bp, Shigella sonnei; identical to SEQ ID NO: 489368

SEQ ID NO: 489976 - DNA, 267 bp, Shigella sonnei; identical to SEQ ID NO: 489479

SEQ ID NO: 489977 - DNA, 2214 bp, Shigella sonnei; identical to SEQ ID NO: 485713

SEQ ID NO: 489978 - DNA, 297 bp, Shigella sonnei
atgaaagaatatcacggtgaaaagagatacaaagattacctgttaaagcgttacagcatttctcgtgaaggtcatcttatgaaggatactcacggggaagtttaccggattagaccaaagaaagaagggaggggttatttcttttacgatggtgtgacagatttaaagattgacgctttgaagtttgcggtgctgtatcattacgatttatgggattcagtccaccagctacgattaaaagacggtgaccccggtaatctgagggccaccaatattatcaaggtcaacatccggtaa

SEQ ID NO: 489979 - DNA, 267 bp, Shigella sonnei; identical to SEQ ID NO: 11114

SEQ ID NO: 489980 - DNA, 276 bp, Shigella sonnei; identical to SEQ ID NO: 484087

SEQ ID NO: 489981 - DNA, 267 bp, Shigella sonnei; identical to SEQ ID NO: 11114

SEQ ID NO: 489982 - DNA, 267 bp, Shigella sonnei; identical to SEQ ID NO: 11114

SEQ ID NO: 489983 - DNA, 267 bp, Shigella sonnei; identical to SEQ ID NO: 11114

SEQ ID NO: 489984 - DNA, 267 bp, Shigella sonnei; identical to SEQ ID NO: 11114

SEQ ID NO: 489985 - DNA, 267 bp, Shigella sonnei; identical to SEQ ID NO: 11114

SEQ ID NO: 489986 - DNA, 219 bp, Shigella sonnei; identical to SEQ ID NO: 477964

SEQ ID NO: 489987 - DNA, 366 bp, Shigella sonnei
atggcactgacgaaaaaacaacgtgcagagctgcgcatgaagttcggcggtcgctgtgcttattgcggctgcgaacttggcgaaaagtggcatgcagaccatgtaaaaccggtcattcgttttgctggaaatatgcttcaccaggaacgtgacgatatatccaacatggttccggcatgccacccatgcaatctgcacaagcattgcagtagcctggaagattatcggcgaattatcagtgatggtcgtcgtgaattccttgcgtccgggaaaggcaaagcgctggttcgtatgggattggttgaaatgaaatctgacccggttgtgttctggtttgaaaaatatcaagaaggggttacggcatga

SEQ ID NO: 489988 - DNA, 1902 bp, Shigella sonnei
atgagcaaagtaaaaatcggtgaattaataaactcacttgttagcgatgttgagtcaatagataactctgaccgtcctcaaggggaaaaaacaaaaaaaataaaagctgttgcattaaaatttaaaaatgcattatttaatgacaagcgaaagtttagggggaaaggattagaaaaaagaattacagccaacacattcaatgcctatatgagcagggccagaaaacggtttgatgataaacttcatcatagctttgaaaaaaatatacatcgcctatctgaaaagtatcctttatataatgaggagctattatcatggctttctctacctgctgccgatattcgccagagaatgtcagctttacaggcaaaattaaaattaattctccctttatcagaagatttatctaatatcagaattggtgataacaaaagtcataataagttattaaaattatcaaataaatataaagagtggcaattcgccatttctgatttaactagcgataactggaaagataagcgcgattatttatataaattactacagcaaggatctgccttacttgaggagttgaatcagctaaaagttaaccatgagattctctatcatcttcaactaagccctgccgaacgcgcatctatccagcaacgatgggcagacgttctgcacaataagaaacgtaacgtggtggtcattgattaccctaaatatatgcaagctatttacgatattataaatagccctgctacattaaataatctaaacactcgttcaggtatggctcctttggcatttgcacttgctgcattgtcaggaagacgaatgattgagattatgtatcaaggtacatttactgtttctggtaagtataccgttgattttttaggccaagcaaaaaaaagaacttctgatgatataaccagaaaaatatatacattatgcgaagcaaaaacatttgtttatttaataaatgtacttcgctcatgcccagcagcatctgattttgatgatgtcgttaaaggttatggagataacgacacacgctctgaaaacggacggattaatgccatattagcaaaggcttttaacccgtgggttaaatcatttttcaaagatgaccgccgtgtttataaagatagtcgtgctatttatgcccgtattgcgtatgaaatgtttttccgcgtagatcctcgttggaaaaacgtagatgaggatgttttctttatggaaattttaggccatgacgatgaaaacactcaattacactataagcaattcaagctggccaacttctcaaagacatggaggccaaatactggaaacgaaaataccaggctggaagcattgcagcagcttgatgacgaaatgccaggattcgccagaggagatgccggagttcgtctgcataacacagttaagcagctagtagagcaggacccctctataaaaatcacgaacagcactctaagagcattcaaatttagccctacaatgattagtcgatacctggagtttgctgctgatgctctggggcaatttgttggcgaaaatggacaatggcagctgaaaatagattctccagaaatcgttatgcctgacgaagaagagctggaagcaatacctgaacagacggatgaattatcagaggatgacgatctggatgacgacgaaattgagatagaggaagaggaagaggaagaggaagagagcgtagaagaacagcaaccgcccgcgccttcttcacctgtatctaagccggtatttaagcctgtgagaaatattggtgatggctcatacgttgttgagtttcattataatggccagaattatgcttggtccggcagtgcaaacagccctatatcagcaatgcagttagcatggctgacatatttcggataa

SEQ ID NO: 489989 - DNA, 711 bp, Shigella sonnei; identical to SEQ ID NO: 14499

SEQ ID NO: 489990 - DNA, 366 bp, Shigella sonnei; identical to SEQ ID NO: 489987

SEQ ID NO: 489991 - DNA, 243 bp, Shigella sonnei; identical to SEQ ID NO: 34324

SEQ ID NO: 489992 - DNA, 204 bp, Shigella sonnei; identical to SEQ ID NO: 40065

SEQ ID NO: 489993 - DNA, 228 bp, Shigella sonnei
atgaatattaatgaaattcgtggaaatatgactgaagcggccctgagtgtggaatgtgttatgcgtggatacccacacatttccctgaaagagttaagcgaagcctgttttttgagtcaagctgccgttgaatttatcatcgaacagatgatctgttttggggttgcaaagcgtagcggatctggtcgatattctttgaccgatgaatataagcaggcaactttctaa

SEQ ID NO: 489994 - DNA, 1122 bp, Shigella sonnei; identical to SEQ ID NO: 14487

SEQ ID NO: 489995 - DNA, 309 bp, Shigella sonnei
ttgcgtggctggttgcagacccgccaggacttacatgcttttgcagatctagtgatgcagcgcgagaaagagggactaaccctttcctatatcaaaaatgtcatctggcaggcggagcggggactggggcaggaaacccccgttgagtctctgttgacgcagtaccatgatgcccgtgcgcagaagcagaatacagatgcgctggaaaaacaaattaatgagcgactcgaaggcgtgttaagccgctggctgctgctgaagaataacgtcatgccagaggcggcaaccggtaccacggccgaaaaataa

SEQ ID NO: 489996 - DNA, 765 bp, Shigella sonnei; identical to SEQ ID NO: 476262

SEQ ID NO: 489997 - DNA, 5085 bp, Shigella sonnei
atgaacaaaatatttaaagttatctggaaccctgcgacagggaattatactgttaccagcgaaacggcaaaaagccgtggcaagaaatctgggcgcagtaagctgttaatttctgcgctggttgcgggtggaatgttgtcgtcgtttggggcattggcgaatgccgggaatgacaacggccagggtgttgattacggtagtggatcagctggcgacagctgggttgctataggcaaaggggcgaaagcaaatacttttatgaacaccagtggttccagtactgctgtgggttatgacgctatagctgaaggccaatatagctctgccatcgggtcaaaaacccatgcgattggtggtgcatcaatggcctttggggttagtgcaatatcagaaggcgatagaagtatagcactgggtgcctcttcgtattcattgggccaatactcaatggccctcggccgttattcaaaagcattgggtaaattgtctattgctatgggggactcttccaaagcggaaggagcaaacgccattgccctgggaaatgccactaaagctactgagattatgagtattgctcttggcgacaccgccaatgcgtcaaaagcgtattcaatggcgctgggagcaagtagcgtcgcatctgaagaaaacgcaattgccctggggcgtagcagtgtagctagcggtactgacagcctcgcatttggcagacaatcacttgccagcgcagcgaacgctattgcgataggtgctgagaccgaagccgctgaaaatgcaactgctattggcaataatgcgaaggcaaaagggactaatagcatggcaatggggttcggaagccttgccgataaagtcaatactatcgcattaggaaatggcagccaggctctggcagataatgcaatcgccataggccagggcaacaaagctgatggcgtggatgccatcgctctgggtaatggtagccagtcgagaggcttaaacaccattgccttaggcacagccagtaatgcaactggtgataagagtcttgcgcttggtagtaatagcagtgccaacggtattaactctgtcgcgctgggcgcagattccattgcggatttagacaataccgtctctgtcggcaatagttcattaaaacgcaagatcgttaatgtgaaaaatggcgcgatcaagtctgacagttacgatgccattaatggttcacagctttatgccattagcgactcggtagcaaaaacgcttggaggaggggctgcagtagatgttgatgacggtactgttacagcaccaacctacaatttaaaaaatggtagcaaaaataacgtaggggctgcgctcgctgtacttgatgaaaacaccctgcaatgggaccaaaccaaaggcaaatacagcgctgctcatggtactagtagcccaactgccagcgtaatcaccgatgttgcggatggcacgatttcagcctccagtaaggatgcggttaacggttcccaactgaaagctaccaatgacgatgtcgaagccaacaccgccaatatcgctactaataccagcaacattgccacgaatacagcaagtattgccaccaataccaccaatatcaccaacctgacggattccgttggtgaccttcaggctgatgccctgctctggaacgaaactaaaaaggcattcagtgcagctcacggccaggataccaccagcaaaatcaccaacgttaaagatgccgacctgacggctgacagcactgatgctgttaacggctctcagctgaaaaccaccaacgatgctgtggcgacgaataccaccaatatcgccaataacacttccaatattgccactaacaccaccaacatctctaatctgactgagacggtgactaatcttggtgaggatgcgctgaaatgggataaggacaatggtgtattcacggcagctcatggcaccgagaccaccagcaaaatcaccaacgttaaagatggcgacctgacgactggcagcaccgatgccgttaacggctctcagctgaaaaccaccaacgatgccgtggcgacgaataccaccaatatcgccactaacaccaccaacatctctaatctgactgagacggtgactaatcttggtgaggatgcgctgaaatgggataaggacaatggtgtattcacggcagctcatggcaccgagaccaccagcaaaatcaccaacgttaaagatggcgacctgacgactggcagcaccgatgccgttaacggctctcagctgaaaaccaccaacgatgccgtggcgacgaataccaccaatatcgccactaacaccaccaacatctctaatctgactgagacggtgactaatcttggtgaggatgcgctgaaatgggataaggacaatggtgtcttcactgcagctcatggcaacaataccgccagcaaaatcaccaatatcctggacggcacagtcactgcaaccagttccgatgccattaacggtagccagctttatgacttaagcagcaatatcgccacctacttcggcggcaatgcttctgtgaatactgacggtgtgtttaccggtccaacctacaaaatcggtgaaacaaattattataacgtcggcgatgcactggctgcgattaactcctcatttagcacgtctctcggcgatgctctgctttgggatgccaccgcaggtaaattcagtgccaaacacggtactaatggtgacgcaagcgtgatcactgatgtcgcagatggtgaaatttcagactccagttctgacgcagtaaacggctcacaactccacggcgtgagcagttatgttgttgatgcgctggggggtggtgccgaagtcaatgcagacggcaccatcactgcgccgacgtacaccattgctaatgctgattacgataatgtcggtgatgccctgaatgctatcgataccactcttgacgacgctctgctctgggatgcggacgccggtgaaaatggtgcatttagcgccgctcacggaaaagataaaactgccagtgtaatcactaacgtcgctaacggtgcaatctctgctgccagcagcgacgcgattaacggctcacaactctataccaccaataagtacatcgctgatgcgctgggtggtgacgcagaagtcaacgctgacggcaccatcaccgcaccgacttacaccattgcgaacgccgagtacaacaacgtcggtgacgccctggatgcgcttgatgataacgccctgctgtgggatgagactgccaatggcggtgctggagcctacaatgccagccatgacggtaaagccagcatcatcactaatgtcgctaatggcagtattagtgaggacagtaccgatgcagtgaacggttctcagttgaatgcgacgaatatgatgattgagcagaacacccaaattatcaatcagctcgctggtaacaccgacgcaacctatatcgaagaaaatggcgctggtatcaactacgttcgtactaacgacaacgatttagcctttaacgatgcaagcgcctctggtgtcggcgctacagctgtaggttataacgctgtcgcgtctggtgccagcagcgtagccattggtcagaacagcagcagcaccgttgataccggtattgcgctgggtagcagctccgtttccagccgtgtgattgccaaaggttctcgtgacactagcgtaacggaaaatggcgtggtgattggttatgacaccactgacggcgaactgctaggtgcattgtcaattggtgatgacggtaaataccgccaaatcatcaacgtagctgatggttcagaagcccatgacgccgttacggttcgccagttgcagaacgctattggagcggtcgccactacgccaaccaagtactttcacgccaactcaacggcagaagactcactggccgttggtgaagactcgctggcaatgggtgcgaaaactgtcgttaatggtaatgcaggtattggtatcggtttgaacactctggttctagctgatgcgatcaacggcattgctatcggcagtaacgcacgcgcaaaccatgcaaacagtatcgcaatgggtaacggttctcagaccacccgtggtgcacagactggctacaccgcctacaacatggacgcaccgcagaactctgtaggtgagttttctgtcggtagtgaagacggtcaacgtcagatcacaaacgtcgcagctggttcagcggataccgatgcggttaacgtgggtcagttgaaagtcactgatgagcgcgtagcgcaaaatacccagagcattactaacctgaacaatcaggtcactaatctggatactcgcgttactaatatcgaaaacggtattggcgacattgtcaccaccggtagcaccaagtacttcaagaccaacaccgatggcgtagatgccaacgcccagggtaaagatagcgttgctattggttctggttccattgctgccgctgacaacagcgtcgcactgggtaccggttccgttgcagaggaagaaaatacaatctctgtaggttcttctactaaccaacgccgtatcaccaacgtagctgccggtgttaatgccaccgatgcggttaacgtgtcgcagctgaaatcttctgaagcaggcggcgtgcgctacgacaccaaagctgatggttctatcgactatagcaatatcaccctcggtggtggcaacggcagtacgactcgtatcagcaacgtctccgctggcgtcaacaacaacgacgcggtgaactacgcgcagttgaagcaaagcgtgcaggaaacgaagcaatacaccgatcagcggatggttgagatggataacaaactgtctaaaactgaaagcaagttgagcggtggtatcgcttctgcaatggcaatgaccggtctgccgcaggcttatacaccgggtgccagcatggcttctattggtggcggtacttacaacggtgaatcggcagttgctttaggtgtatcgatggtgagcgccaatggtcgttgggtctacaaattacaaggtagtaccaatagccagggtgaatactccgccgcactcggtgccggtattcagtggtaa

SEQ ID NO: 489998 - DNA, 303 bp, Shigella sonnei
atgacggtcagatattatatcagttctgctgatttaaccgcagagaagttcgccacagcaatccgaaaccactggcacgtggagaataagctgcattggcgtctggacgtggtaatgaatgaagacgactgcaaaataagaagaggaaatgcagcagaattattttcagggatacggcacattgctattaatattttgacgaatgataaggtattcaaggcagggttaagacgtaagatgcgaaaagcagctatggacagaaactatctggcgtcagtccttgcggggagcgggctttcgtaa

SEQ ID NO: 489999 - DNA, 204 bp, Shigella sonnei; identical to SEQ ID NO: 484673

SEQ ID NO: 490000 - DNA, 576 bp, Shigella sonnei
atggcattcagaatgagtgaacaaccacggaccataaaaatttataatctgctggccggaactaatgaatttattggtgaaggtgatgcatatattccgcctcatacaggtctgccagcaaacagtaccgatattgcaccgccagatattccggctggcttcgtggctgttttcaacagtgatgagtcatcgtggcatctcgttgaagatcatcggggtaaaacggtttatgacgtggcttccggcgacgcgttatttatttctgaactcggtccgttaccggaaaatgttacctggttatcgccggaaggggaatatcagaagtggaacggcacagcctgggtgaaagatgcagaagcagaaaaactattccggatccgggaggcggaagaaacaaaaaacagcctgatgcaggtagccagtgagcatattgcgccgcttcaggatgcggtagatcttgagatcgcaacggaggaagagaaatcgttactggccgcatggaagacatatcgggtgttgttgaatcgtgttgatacatcactatctccagatatcgagtggccaagtcaaccataa

SEQ ID NO: 490001 - DNA, 213 bp, Shigella sonnei
atgcagctccgcctgccaggtatcgctgtccagctcttcgcccgtgtattcagcgccggtgagataaacggcaactgccggaaaatccgcctcatcaaaaacagcggggcgaccatcaaaaaacgtcgccccggtgtcatgcttctccagtgcatccagtacggctgcacggatatcagtatgtttcatcgctttattaccatcctcagttga

SEQ ID NO: 490002 - DNA, 552 bp, Shigella sonnei
atgagagccgcgacgggtatccagcttctccctgacggctttgaaggaacggaacagcgcccagcctttcggatcaaacacgatgatattcaccactccgctggcgttcagcgcataggcttcgatatcgtcggtcgggtcatacgtggacttgtcacgcttgctccactccgtaccaccggactgtgtgatgttgttcgccgcactgcggcccatatccacctcaaccggatcgaaggcttcaccggtcatggtgtatttgcccttaagcacggcagaaacggcctgcatctcttcgacctgggcaatggccagctcttcatcacgcatgttctgcatgatgatgcgacggcggcggtaagccgggtccgccagattctgcggatcttcatccggcaggcgacgcagggtcatctgcggattcacctcatgcttgggtttgacatatcccggcgtaaattcagaggtggagccgccacgggaacggataacctcaccggaaacaatcggcgaaacgtacagcgccatgtttaccagtcccggaatttgtga

SEQ ID NO: 490003 - DNA, 3300 bp, Shigella sonnei
gtgtggctgacgcacgacccggaatacccggagaatttacctgccgcgccgctggtgcgctatggctggacgccgcgcggcgaactggcggcagtgtatgaccgcagtggcaaacaggtgcgcagctttacttacgatgataaataccggggccggatggtggcgcaccgtcacacgggccggccggaaatccgttaccgttacgacagcgacgggcgggtgacagaacagctaaacccggcaggcttaagctacacgtatcagtatgagaaggaccgcatcaccatcaccgacagcctgaaccgccgtgaagtgctgcacacgcagggtgaagccgggctgaagcgggtggtgaaaaaggaacacgcggacggcagcgtcacgcagagtcagtttgatgcggtgggcaggctcagggcacagacggatgccgcaggccggacgactgagtacagcccggatgtggtgacgggactcatcacgcgcatcaccacgccggatggcagggcatcggcgttttactataaccaccacagccagttaacgtcagccaccgggcctgacgggctggaaatgcgccgcaaatatgatgaatccggccgtctgattcaggaaactgcccctgacggcgatatcatccgctaccgttatgataatccacacagtgacttaccctgcgcaacggaagatgccaccggcagccggaaaaccatgacgtggagccgttacggtcagttgctgagcttcaccgactgttccggttatgtaacccgttatgaccatgaccgcttcgggcagatgacggcggtgcaccgcgaggaagggctgagtcagtaccgcgcatacgacagccgtggacagttaattgccgtgaaagacacgcagggccatgaaacgcggtatgaatacaacgccgccggtgacctgaccaccgtcattgccccggacggcagcagaaacgggacacagtacgatgcgtggggaaaagccatctgtaccacgcagggcgggctgacgcgcagtatggaatacgatgctgccggacgggtcatccgcctgaccagtgaaaacggcagccacaccaccttccgttacgatgtactcgacctgctgatacaggaaaccggctttgacggccgcacacagcgttatcaccacgacctgaccggcaaacttatccgcagcgaggatgaggggctggtcacccactggcactatgacgaagcagaccgcctcacgcaccgcaccgtgaagggtgaaaccgcagagcggtggcggtacgacgaacgcggctggctgacagacatcagccatctcagcgaagggcaccgggtgacggtgcattacgggtatgatgagaaaggccggctgaccggtgagcgtcagacggtgcatcacccgcagacggaagcactgctctggcagcatgagaccagacatgcgtacaacgcgcaggggctggcgaaccgctgtataccggacagcctgtccgccgtggaatggctgacctacggcagcggctggctgtcaggcatgaaactcggcgacacaccgctggtggagtacacccgcgaccgcctgcaccgggaaacgctgcgcagcttcggccgttatgaactcaccatcgcttatacccctgccgggcagttacagagccagcacctgaacagcctgctgtctgaccgcgattacacctggaacgacaacggcgaactcatccgcatcagcagcccgcgccagacccggagttacagctacagcaccaccggcaggctgaccggcgttcacaccaccgcagcgaatctggatatccgcatcccgtatgccacagacccggcggggaaccgcctgcccgacccggagctgcacccggacagcaccctcagcatgtggccggataaccgtatcgcccgtgacgcgcactatctttaccggtatgaccatcacggcagactgacagagaaaaccgacctcatcccggaaggggttatccgcacggatgatgagcgcacccaccggtaccattacgacagtcagcaccggctggtgcactacacgcggacacaatatgcagagccgctggtcgaaagtcgctatctttacgacccgctgggccgcagggtggcaaaacgggtatggcggcgtgaacgggacctgacgggctggatgtcgctgtcacggaaaccgcaagtgacctggtacggctgggacggcgaccggctgaccacaatacagaacgacagaacccgcatccagacgatttatcagccggggagcttcacgccactcatcagggtcgaaactgccaccggtgagctggcgaaaacgcagcgccgcagcctggcggatgcccttcagcagtccggcggcgaagacggtggcagtgtggtgttcccgccggtgctggtgcagatgctcgaccggctggaaagtgaaatcctggctgaccgggtgagtgaggaaagccgccgctggctggcatcgtgcggcctgacggtggagcagatgcaaaaccagatggacccggtgtacacgccggcgcgaaaaatccacctgtaccactgcgaccatcgcggcctgccgctggtgcttatcagcacggaaggggcaacagaatggtgcgcagaatacgatgagtggggcaacctgctgaatgaagagaacccgcatcagctgcagcagcttatccgcctgccggggcagcagtatgatgaggagtccggcctgtattacaaccgccaccgctattatgacccgctgcaggggcgatatatcactcaggatccgattggactgaaggggggatggaatttttatcagtatccgttgaatccgataactgatattgacccgttgggattagcgacctgtttatacagcataactttaagtatgctttcatgcgtttcagatacgcaaaatgatgataactcttatgatgtgcttactattcctgtcgcctctggtaataatggtaataatatgcaatgtaaaaataatcctggttgtacacacttacaaaatagaggtccaatacctcaaggggtatggagctggaatgttaatggtcctggagcaaccaatagaaaacctaatggtatacgtttagtaccgtcagcaaatacagaaacatataatcgtgatggatttttaacacaaagttgtttaaacgctttcggtccgtctttaggacctcgattctgttccgagggttgtataactggttcatctaatgacatgcaaaaattaaatgagttaatattttcagagccagatagcacattaacagttacggactaa

SEQ ID NO: 490004 - DNA, 450 bp, Shigella sonnei
atgcaagaagaagcaaataaaattcttgttgatttattgaagaaggccagcgatggaattgattccgccattgcattcagtcaggcacagattccggatgttgttcatcagttgctggtatggaatatggttgatagcctgattaaaacattaatagcaatttcaacaattccgctggttatttggtttatgaagaaacagtaccaaaaagttgaaattggtaagttcgataatgaaggatggtcatgggaaaaagggaagcctaaatacaaaccgactatgatttgggaaagtaacggtgagattagttttcttatcttaccattagcagcagtttttgttctgtgggtaagttttattattgctgtagtaaccaatatgacatggttaaaaatctggttggcacctaagttatatctaatcgaatacgcagcatcactaattaaatag

SEQ ID NO: 490005 - DNA, 1413 bp, Shigella sonnei
atgcggcgttgcggttatctgaaaatagcccggagtcagctcaatccgcgacggcgctgccggtgcggcaatccggaacgataccgacgccgggtctccctgctgcccccaggcatttactgcccggactgtcagcctgtagttccccagcgccagctgcctgaagcggtatgtggtttccgtcgtccgggccgtgctgaccagccgctcactgccgtcatccgctgccacggtcaggcgaagcataaagctcacccccttcaccaccttcggcgtgtcccagcgcgccagcacctgatattctccgctgtctgcggtgacttcggcagtcaggtgctgcaccgctggcggcgtgacaccattcaccgtgccgctctggtcgccgtcaaagtgcgcaccgttatccacgatggcctcttttgccggtacatgctgcacggcggtgatggcatacgtgccgtcgtcgttctcacggatactcacgcagcggaacaggcgctggcgcagcgtcggcagcttcagcccccacacgctgtattctgcaacgccgtcaggaacacggctcactttcaccttcacgccgtcggtgacggactggacctccacgctgaccggattaccctgaccgtcaaccaggcttatcagcgtggtaccggaggatggcagcgtgatttcacggtcgagcgtcagcgtccgggtctggctgttcaccgccagcacgcgtccaccggtgctgacccccgcatagtcatcatcgcagatttcaatgacatcgcccggtacatggcgaagcccttcagcacccacgctgaagtccacggtctgcgtttccagcagttctgttttaatcagccacagcccggctcggtgtgcctgcccccggctggtacagccaaaggcatccatcttcgtgacgttacgaccgtaacgggcaatggcctgcgtgtcctccacaagctctgttgccgtctcccagccgttgttcgggtcaatccagttcacctcaacggcattatggcggtccttcagggcgctgaagctgtagcggaacggcgcgccatcatccggcatcaccacattactgcggttataggtccacaccttatccgacggtcggtcctgcacgaacgtcagcgtctgcccgttccataccggcatacagcgcatcgccgagcagaaatcactgagcacatcccacgccttgcgctgtgtggtcaggtaagcgttacaggtgatgcgcggctccgtgccgccaaagccgtccggcaccgactggtcgcaattctggccgatgacatacagcgcccatttatccacatccgccgcaccaagacgtttccccatgccgtagcgcggatgggtcagcatatcccacagacaccaggccatgttgttgctgtatgccggttttaa

SEQ ID NO: 490006 - DNA, 672 bp, Shigella sonnei
atggcagcgacgcacacactccctctggcgtcaccgggcatggcgcgcatctgcctttacggggatttacaacgatttggtcgccgcatcgaccttcgtgtgaaaacgggggctgaagccatccgggcactggccacacagctcccggcgtttcgtcagaaactgagcgacggctggtatcaggtacggattgccgggcgggacgtcagcacgtccgggttaacggcgcagttacatgagactctgcctgatggcgctgtgattcatattgttcccagagtcgccggggccaagtcaggtggcgtattccagattgtcctgggggctgccgccattgccggatcattctttaccgccggagccacccttgcagcatggggggcagccattggggccggtggtatgaccggcatcctgttttctctcggtgccagtatggtgctcggtggtgtggcgcagatgctggcaccgaaagccagaactccccgtacacagacaacggataacggtaagcagaacacctatttctcctcactggataacatggttgcccagggcaatgttctgcctgttctgtacggggaaatgcgcgtggggtcacgcgtggtttctcaggagatcagcacggcagacgaaggggacggtggtcaggttgtggtgattggtcgctga

SEQ ID NO: 490007 - DNA, 672 bp, Shigella sonnei
atggcagcgacgcacacactccctctggcgtcaccgggcatggcacgcatctgcctttacggggatttgcaacgatttggccgccgcatcgaccttcgtgtgaaaacgggtgccgaagccatccgggcgatggccacacagctccctgcgtttcgtcagaagctgagcgacggctggtatcaggtgcgtattgccgggcaggatgttagcacgtccggattaacggcgcagttacatgaggctctgcctgacggcgctgtgattcatattgttcccagagtcgccggggccaagtcaggtggtgtattccagattgtcctgggagcagccgccattgccggatcattctttaccgccggagccacccttgcagcatggggggctgccattggtgccggtggtatgaccggcattctgttttctctcggtgccagtatggtgctcggcggtgtggctcagatgctggcaccgaaagccagaactccccgcacacagacaacggataacggtaagcagaacatctatttctcctcactggataacatggttgcccagggcaatgttatgcctgttctgtatggtgaaatgcgcgtggggtcacgtgtggtatctcaggagatcagcacggcagacgaaggggacggtggtcaggttgtggtgattggtcgctga

SEQ ID NO: 490008 - DNA, 699 bp, Shigella sonnei
atgcaggatatccggcaggaaacactgaatgaatgcacccgtgcggagcagtcggccagcgtggtgctctgggaaatcgacctgacagaggtcggtggagaacgttattttttctgtaatgagcagaacgaaaaaggtgagccggtcacctggcaggggcgacagtatcagccgtatcccattcaggggagtggttttgaactgaatggcaaaggcaccagtacgcgccccacactgacggtttctaacctgtacggtatggtcaccgggatggcggaagatctgcagagtctggtcggtggaacggtggtccggcgtaaggtttacgcccgttttctggatgcggtgaacttcgtcaacggaaacagtggcgccgatccggagcaggaggtgatcagccgctggcgcattgagcagtgcagcgaactgagcgcggtgagtgcctcctttgtactgtccacgccgacggaaacggatggcgctgtttttccgggacgtatcatgctggccaacacctgcacctggacctatcgcggtgacgagtgcggttatagcggtccggctgtcgcggatgaatatgaccagccaacgtccgatatcacgaaggataaatgcagcaaatgcctgagcggttgtaagttccgcaataacgtcggcaactttggcggcttcctttccattaacaaactttcgcagtaa

SEQ ID NO: 490009 - DNA, 567 bp, Shigella sonnei
atggcggcgatgctgaccggcagtgaacagaactggcgcagcttcacccgctccgtgctgtccatgatgacagaaattctgcttaagcaggcaatggtggggattgtcgggagtatcggcagcgccattggcggggctgttggtggcggcgcatccgcgtcaggcggtacagccattcaggccgctgcggcgaaattccattttgcgaccgggggatttacgggaaccggcggcaaatatgagccagcggggattgttcaccgtggtgaatttgtcttcacgaaggaggcaaccagccggattggtgtcggcaacctgtaccgcctgatgcggggctatgcggaaggtggttatgtgggcggtgccggaagtccggcgcagatgcggcgggctgaaggcattaattttaatcagaacaatcacgtggtgattcagaacgacggtacgaatggtctgccaggtccacagatgatgaaggcggtgtatgacatggcccgcaagggtgcccgtgatgaaatccaggcacagatgcgcgatggtggtctgttctccggaggtggacgatga

SEQ ID NO: 490010 - DNA, 189 bp, Shigella sonnei; identical to SEQ ID NO: 463227

SEQ ID NO: 490011 - DNA, 189 bp, Shigella sonnei; identical to SEQ ID NO: 463227

SEQ ID NO: 490012 - DNA, 831 bp, Shigella sonnei
atgtgggctgtgaagctgcagcagatgcaggacggacgcctttatatcgcgggtattggtgccggtattgagaacacccctgacggcatgcagagtcaggtgctgctggcggcggacaggattgcgatggttaatcctgcgaatggcaacacaaaaccgatgtttgttggtcagggcgatcagatattcatgaacgacgtgttcctgaaacgcctgacggcccccaccattaccagcggtggaaatccatcggcattttccctgactccggacggaaagctgaccgctaaaaatgcggatatcagtggcagtgtgaatgcgaacgccgggacgctcaacaatgtcacggtaaatgaaaactgtacgattaagggcatgctggaggcgactcaggtcagaggtgacttcgttaaagctgtatccaaatcatttccgaaacaggctggtacgtggggtaacacggaaacaccaaacgggacggttacagtcaccataagcgatgatcataactttgaccgccagattattattccgcccattatttttaacggtatagcgtatgacgatccggggagcggaaataacccaggaggcacgcgatacacgggttatggttttgaagttcgcaaaaacggcgtattaatcgcatccagagaaactaaaggtgccattcccggtagttacagtgcagttattgatatgcctagtggtggtggtagcgtcactctggagtttaagattttccagaaaggcaatcagggggcaggcaatatcaccgactgtacggtgattgtgaccaaaaaagcggcttccggcatcagtattcgttga

SEQ ID NO: 490013 - DNA, 189 bp, Shigella sonnei; identical to SEQ ID NO: 463227

SEQ ID NO: 490014 - DNA, 189 bp, Shigella sonnei; identical to SEQ ID NO: 463227

SEQ ID NO: 490015 - DNA, 396 bp, Shigella sonnei
atgacgaaagatgaactgattgcccgtcttcaggtgctgggtgagcaactgaaccgtgatgtcagcctgacggggacgaaagaagaactggtgctccgtgtggcagagctggaagaggagcttgatgacacggatgacgctgccggtcaggacacatctgtcagcccggaaaatgcgctgaccggacatgaaaatgaggtggtatcagcgcagccggataccgtgactgatacggctgatctggtcacggttgtggcactggtgacgctgcatactgatgcacttcacgccacgcgggatgaggctgtggcatttgtgctgccgggaacggcgttccgtgtctctgccggtgtgtcagctgaaatgacagagcgcggcctggccagaatgcaataa

SEQ ID NO: 490016 - DNA, 276 bp, Shigella sonnei; identical to SEQ ID NO: 485876

SEQ ID NO: 490017 - DNA, 144 bp, Shigella sonnei
atgcggctgttttctgccgcaaccgcagcggtgatctgcgcgttcacgtccggctgcgccgcgctggcgttttcgccctccgtcgctggcaccacgtcagtaacgtcagcctgcgaagcagtggctgaaacagttgttgattga

SEQ ID NO: 490018 - DNA, 246 bp, Shigella sonnei
atggccatcgatggtctgaaagaagttcaggaagcggtgatgctgatagaagccggactgagcacctacgagaaagagtgcgcgaaacgcggtgacgactatcaggaaatttttgcccagcaggtccgtgaaacgatggagcgccgcgcagctggtcttaaaccgcccgcctgggcggctgcggcatttgaatccgggctgcgacaatcaacagaggaggagaagagtgacagcagagctgcgtaa

SEQ ID NO: 490019 - DNA, 291 bp, Shigella sonnei; identical to SEQ ID NO: 467055

SEQ ID NO: 490020 - DNA, 432 bp, Shigella sonnei
atggcactgggttacaaggcgacgcaagccggcatcaagacgcgcttcacgactgcggccgacctgatgctggcgttgacgacggcgcatacccagaacaatctgaaggcggtgatgcaccgcgcgatcaaggcatatcggctcttgatcatcgacgagataggttacttgccgatgaaccgggaacaggcaaacctgttcttccaggtgatcgcagccttgtatgaacgcagcagcctgatcgtgaccagcaacctgccgttcgggcaatgggacacgaccttcgcgcaggatacgacgctgaccgcggccctgctcgaccggctgctgcaccatgcgcacatcgtgccgattgccggggaaagctatcggctgaagcaccagcgacaggccgggatgatgagggggagcgatgttgcagaaattggctga

SEQ ID NO: 490021 - DNA, 705 bp, Shigella sonnei; identical to SEQ ID NO: 8686

SEQ ID NO: 490022 - DNA, 777 bp, Shigella sonnei; identical to SEQ ID NO: 31903

SEQ ID NO: 490023 - DNA, 222 bp, Shigella sonnei
atgacgttggaggggcaaggtcgcgctgattgctggggcaagacgtggagcggatcggggattgtctttcttcagctcgctgatgatatgctgacgctcaatgccgtttggcctccgactaacgaaaatcccgcatttggacggctgatccgattggcacggcggacggcgaatggcggagcagacgctcgtccgggggcaatgagatatgaaaaagcctga

SEQ ID NO: 490024 - DNA, 1026 bp, Shigella sonnei; identical to SEQ ID NO: 31905

SEQ ID NO: 490025 - DNA, 753 bp, Shigella sonnei; identical to SEQ ID NO: 31906

SEQ ID NO: 490026 - DNA, 954 bp, Shigella sonnei; identical to SEQ ID NO: 21439

SEQ ID NO: 490027 - DNA, 1902 bp, Shigella sonnei
atgctgcctgatgaacttgagaaaagattagatggaattgaggatgcttcaaaaaaagggtatccagtacgtaatctatacaaaattgcgtgtgagcccggactgtggctgcaagcctacgtgaatatacgggccaatgcaggtgcactgactcaaggtgtatcaacagataccattgatggcttctctatcgaaagagcagagaagctggcaaaaacattgcggagtagagaatacgtagcgaaacctgtacgcagagttcagatcccaaaaaaggacggaaaaaccagaccgctggggattccaggtggagacgataaactggcgcaagaagtagcaagaattattctggaaagggtttatgaaccagtattctctgaacactctcatggattcagaccaaaacgttcgtgtgaaactgcgctcagatctattcgtccagtctggaacggagttaaatggatcgtggatgttgatatcaaaggtttctttgacaatatcccccacaaactattgctgaatacactggcagagaaaattaaggataagaatttcctgaaattaatcgaacagtggctgaaggcaggatatgtggacaattggaaataccatcgctcatattctggcacgccacaaggtgggataatttctcccttactggcaaatatatacctcgacaaactggaccgttttgtagaacagaacttaattcctgcatatacaagcggtacaaaacgaagagcgaatccagatatgaacaggctggcccataagattcataaactacgaaagaaagtagacggtatggcaactgattctgaatcagaaaaagaagccataaagaaagaaattgaacgactgcttgaagaaaaacgttctataccatctcaggtcatgaacgatccaaacttcaggcgtatgtactatgttcgatatgctgatgatttcgtaattggtgtcatcggctcgaagaaagatgctgaacatatatcaagacaggtcagaaactttattactacttcactgggattggaagttaatgaagcaaagaccaggatccgccatatctcagaaggagttaattttttaggctatgaaatcagacaggcagatgcaaagaaattgctgaagcagaaaatgcaagggcggcacgctctccggagatccaccacaggaattgtgcagctcttcgttcctgacaatatagccgctaaattttgtcaccaaaagaaatatggctgttatgagaatatgaaggctgtacatcgttcaagtctacaaaatctcagtgaagctgaaattgttctgactttcaacgcggaaatgcgcggattggcgaactactacagtctggcgctggacatgaaatataaattatcaaaattatatttcatatggcaaataagcctttttaagaccctagcgaataaacgacgtagttcagtgaataaagtcgccaaatcgctacggcaaaataatggagatctggctattaccgttcaggccaaaaatggatcccgaaagattgaggttttcaaactcaaacatgtcaatcgcaaccgaacaacgattgtcgatacggaaccgagaaccgcacatatcacaacccgcacaacagagatcatgcgtcgattaggggcaaggatctgcgagtattgtgcgaagactgggcgctgcgaagtacatcatgtcagaaagctaaaagacctgaagaaaggtcgtaaggccggatataaacccagcctgtggcaactaatgatgatcgcacgccgccggaaaacgatgattttgtgcgcaagttgccacgacaagttacatagcggaaaactacccgatctgagacaggaaaagggaagaatactcctgcaaccacctgtctcaagtggggattctgctaaatga

SEQ ID NO: 490028 - DNA, 531 bp, Shigella sonnei
atgcaacactccataaaacaccgcgcttcaacggcgcaccccgacgaggatgaccttgttgataccacgtgcactcataagaacctcctgactgaaagatgtgagataaaccggataccggcgacgggacgttcatgtgccccttcagaggagcgaaagctcctcctgccgtccacttcttcggggtttctccccgcagtggacctttccgatgggggcccgtttaccgcctcacgggacagctgtccgggggcggacgcaaaattttttgccgggttcatggctaaaaattttgtggccggtgcatctcaccctggacagatggaacgggagggggttacgtctgcccccggaaagtccacagcgggaaacaggccgcaggggtggcggcaggagggaggactgctgcgccatcaggcgcagtttcctcacacaccgtcaggtgtgcagggagcgcaggtcacggcgcgacaggggcggcgcgaccgtaacggtcgctgcaagcccgggttttcacgcatcggaccgtag

SEQ ID NO: 490029 - DNA, 735 bp, Shigella sonnei
atgccattacccgattttcatgtttctgaaccttttaccctcggtattgaactggaaatgcaggtggttaatccgccgggctatgacttaagccaggactcttcaatgctgattgacgcggttaaaaataagatcacggccggagaggtaaagcacgatatcaccgaaagtatgctggagctggcgacggatgtttgccgtgatatcaaccaggctgccgggcaattttcagcgatgcagaaagtcgtattgcaggcagccgcagaccatcatctggaaatttgcggcggtggcacacacccgtttcagaaatggcagcgtcaggaggtatgcgataacgagcgctatcaacgaacgctggaaaactttggctatctcatccagcaggcgaccgtttttggtcagcatgtccatgttggctgcgccagtggcgatgacgccatttatttgctgcacggcttgtcacggtttgtgccgcactttatcgccctttccgccgcgtcgccatatatgcaaggaacggatacgcgttttgcctcctcacgaccgaatattttttccgcctttcccgataatggcccgatgccgtgggtcagtaactggcaacaatttgaagccctgtttcgctgtttgagttacaccacgatgatcgacagcattaaagatctgcactgggatattcgccccagtcctcattttggcacggtggaggttcgggtgatggataccccttaa

SEQ ID NO: 490030 - DNA, 966 bp, Shigella sonnei; identical to SEQ ID NO: 482560

SEQ ID NO: 490031 - DNA, 954 bp, Shigella sonnei; identical to SEQ ID NO: 482561

SEQ ID NO: 490032 - DNA, 642 bp, Shigella sonnei; identical to SEQ ID NO: 482562

SEQ ID NO: 490033 - DNA, 264 bp, Shigella sonnei; identical to SEQ ID NO: 482563

SEQ ID NO: 490034 - DNA, 1284 bp, Shigella sonnei
atgcctgccggtagtgcatttgctatagtagggcacttttttaattccatcacggatgtcgtagttcagaccatgaataccattttttccgctcgtatcatgaagcgcctggcgctcaccacggctctttgcacagcctttatctctgctgcacatgccgatgacctgaatatcaaaactatgatcccgggtgtaccgcagatcgatgcggagtcctacatcctgattgactataactccggcaaagtgctcgccgaacagaacgcagatgtccgccgcgatcctgccagcctgaccaaaatgatgaccagttacgttatcggccaggcaatgaaagccggtaaatttaaagaaactgatttagtcactatcggcaacgacgcatgggccaccggtaacccggtgtttaaaggttcttcgctgatgttcctcaaaccgggtatgcaggttccggtttctcagctgatccgcggtattaacctgcaatcgggtaacgatgcttgtgtcgccatggccgattttgccgctggtagccaggacgcttttgttggcttgatgaacagctacgttaacgcactgggcctgaaaaatacccacttccagacggtacatggtctggatgctgatggtcagtacagctccgcgcgagatatggcgctgatcggccaggcattgatccgtgacgtaccgaatgaatactcgatctataaagaaaaagaatttacgtttaacggtattcgccagctgaaccgtaacggcctgttatgggataacagcctgaatgtcgacggcatcaaaaccggacacactgacaaagcaggttacaaccttgttgcttctgcgactgaaggccagatgcgcttgatttctgcggtgatgggcggacgtacttttaaaggccgtgaagccgaaagtaaaaaactgctaacctggggcttccgtttcttcgaaaccgttaacccactgaaagtaggtaaagagttcgcctctgaaccggtttggtttggtgattctgatcgcgcttcgttaggggttgataaagacgtgtacctgaccattccacgtggtcgcatgaaagatctgaaagccagctatgtgctgaacagcagtgaattgcatgcgccgctgcaaaagaatcaggtcgtcggaactatcaacttccagcttgatggcaaaacgatcgagcaacgcccgctggttgtgttgcaagaaatcccggaaggtaacttcttcggcaaaatcattgattacattaaattaatgttccatcactggtttggttaa

SEQ ID NO: 490035 - DNA, 1089 bp, Shigella sonnei; identical to SEQ ID NO: 482565

SEQ ID NO: 490036 - DNA, 1113 bp, Shigella sonnei; identical to SEQ ID NO: 482566

SEQ ID NO: 490037 - DNA, 1902 bp, Shigella sonnei; identical to SEQ ID NO: 482567

SEQ ID NO: 490038 - DNA, 468 bp, Shigella sonnei; identical to SEQ ID NO: 26948

SEQ ID NO: 490039 - DNA, 318 bp, Shigella sonnei; identical to SEQ ID NO: 459634

SEQ ID NO: 490040 - DNA, 525 bp, Shigella sonnei
atgcgactgtggttaattcgtcatggtgaaacgcaagcgaatatcgatggtctttacagcggtcatgcgcccacccccctgaccgcgcgcggtattgagcaagcgcaaaatctgcatacgctgctacatggtgtttcctttgatctggttttatgcagtgaactggaacgggcacagcataccgcacgactggttctcagtgaccgccagctccccgtgcaaatcatccctgaactcaacgaaatgttttttggcgactgggagatgcgacatcatcgcgacctcatgcaagaagatgccgaaaactatagcgcgtggtgcaatgactggcagcatgcaatccccacgaacggtgaaggatttcaggcattttcgcaacgtgtggaacgctttatcgcaaggcttagtgaatttcagcactatcagaatattttagtcgtcagccatcagggtgtactgagtctgttaatcgcccgtttaattggcatgcctgccgaggctatgtggcattttcgcgttgactag

SEQ ID NO: 490041 - DNA, 642 bp, Shigella sonnei; identical to SEQ ID NO: 482571

SEQ ID NO: 490042 - DNA, 1032 bp, Shigella sonnei
atgattcggttgtacccggaacaactccgcgcgcagctcaatgaagggctgcgcgcggcgtatcttttacttggtaacgatcctctgttattgcaggaaagccaggacgctgttcgtcaggtagctgcggcacaaggattcgaagaacaccacactttttccattgatcccaacactgactggaatgcgatcttttcgttatgccaggctatgagtctgtttgccagtcgacaaacgctattgctgttgttaccagaaaacggaccgaatgcggcgatcaatgaacaacttctcacactcaccggacttctgcatgacgacctgctgttgatcgtccgcggtaataaattaagcaaagcgcaagaaaatgccgcctggtttactgctcttgcgaatcgcagcgtgcaggtgacctgtcagacaccggagcaggctcagcttccccgctgggttgctgcgcgcgcaaaacagctcaacttagaactggatgacgcggcaaatcaggtgctctgctactgttatgaaggtaacctgctggcgctggctcaggcactggagcgtttatcgctgctctggccagacggcaaattgacattaccgcgcgttgaacaggcggtgaatgatgccgcgcatttcaccccttttcattgggttgatgctttgttgatgggaaaaagtaagcgcgcattgcatattcttcagcaactgcgtctggaaggcagcgaaccggttattttgttgcgcacattacaacgtgaactgttgttactggttaacctgaaacgccagtctgcccatacgccactgcgtgcgttgtttgataagcatcgggtatggcagaaccgccggggcatgatgggcgaggcgttaaatcgcttaagtcagacgcagttacgtcaggccgtgcaactcctgacacgaacggaactcaccctcaaacaagattacggtcagtcagtgtgggcagagctgaaagggttatctcttctgttgtgccataaacccctggcggacgtatttatcgacggttga

SEQ ID NO: 490043 - DNA, 582 bp, Shigella sonnei
gtgcgatatctggcaacattgttgttatctctggcggtgttaatcaccgccgggtgtggctggcatctgcgtgataccacgcaggttccttccactatgaaggtcatgatcctggactcaggcgatccgaacgggccattaagccgtgcagtgcgtaaccagttacgtctgaatggtgtcgagttgcttgataaagaaaccacgcgtaaggacgttccatccctgcgtttgggtaaagtgagcatcgcgaaagataccgcatcggtattccgtaacggtcaaacagcagagtatcagatgatcatgacggtgaatgcgaccgtgttgatccccggccgtgatatctacccgattagcgccaaagtcttccgttcgttctttgataacccgcaaatggcgttagcgaaagataacgaacaagacatgatcgtaaaagagatgtacgaccgtgctgccgaacagctgattcgtaagctgccaagcatccgtgctgcggatattcgttccgacgaagaacagacgtcgaccacaacggatactccggcaacgcctgcacgcgtctccaccacgctgggtaactga

SEQ ID NO: 490044 - DNA, 2583 bp, Shigella sonnei; identical to SEQ ID NO: 482574

SEQ ID NO: 490045 - DNA, 483 bp, Shigella sonnei; identical to SEQ ID NO: 482575

SEQ ID NO: 490046 - DNA, 978 bp, Shigella sonnei; identical to SEQ ID NO: 482576

SEQ ID NO: 490047 - DNA, 708 bp, Shigella sonnei; identical to SEQ ID NO: 482577

SEQ ID NO: 490048 - DNA, 1428 bp, Shigella sonnei
atgaaaaattgctggaagatcctcgaaatagaggaaacgactgacgtcgatattatccgccgcgcttatctggcgctgttaccgtcctttcatccagaaaccgatccgcagggttttaaacaacttcgtcaggcgtatgaggaggcgctccggattgcgcagtcgcctgctaaatctgtttggcaaccagaagaatatgaggtagcagaacatgaaattctgctcgcctttcgcgcgttacttgcctctgatagcgaacgttttctgccctccgcctggcagcgattcattcagcaattaaattattgctcgatggaagagattgatgaattacgctggtcgctgtgcacaatcgccatgaacactgcccatttatccttcgagtgcgtggtgttattagcagaaagattgcggtggttgcaggaggaaaacgtcggggaaatagacgaagaagaactggaatcctttttatatgccattgcgaaggggaatgtttttaacttccagaccattctgcatctgcccgttgccgtgcaaaatgacaccatcgatttttaccaaatgttcgctcggatttggtcatcgcatccagaatggctgacattgtatttagcgcaacatcgcgcagtgatcatccccgatgatgcaaaactgcacagaaatttactccgctggtatagcgcaggtcgcctggatatccccgaacttctggattacgcccggtcgtggcgggaagctgaacctgataatgaagatgcgcgttattatgaatacgcgcaacgcgtctattgtggagaaggcgaaagcttgctggcagaactttgtgactactggcgcgagtatccctccacccaggcggatgctttaatattgcaatggtgccgtcagcatcgggtcgattattacccgttagtggtgatgatgattgaagctcgtgaactggttaacgatcagggtaaacagctactttatgtccccggcgacagcgcccgtacgcgttttcatttatacgaaatactcagcgatgaaaaactctctgcgctggggcgttcactggtcgagatggttttgcacaaaggacgtaagccgcggatctcactcacgcgtgatacagaacatcccttatggccattatatttagttgccaaacaattagtgcaggccagccaaccgacagaagaatcattaatgccgattgtgagccgccttgatgcagaagatcgttgtccactggaagcattaattattcgtcgattattaattcaggcggcgaattttaccggtcaggaaaccgtcgagccggagccgcaaccgcagccaatgcccgttgacgatggcgggctgggctgtctgggcgtcatcaaaattattttctacatttttatctttgccggtttgataggaaaaatactccatctcttcgggtga

SEQ ID NO: 490049 - DNA, 555 bp, Shigella sonnei; identical to SEQ ID NO: 482579

SEQ ID NO: 490050 - DNA, 708 bp, Shigella sonnei; identical to SEQ ID NO: 482580

SEQ ID NO: 490051 - DNA, 1452 bp, Shigella sonnei
atgaaaacatgttggcaaatcctcgaaattgaaagcacgacgcaaatagacattatccgccaggcttatcttgctcgcttaccgttgtgtcatcccgaaaccgatccgcaggggtttaaagcattacgccaggcctatgaagaggcgctgcgactggcggtaaatcctgtcgaggaagcagatgatgaagaaaaagatgccaccgctgaacatgaaatactacgtgcattcaggacattactggattcagaaagtgatcgttttcagccctccgcctggcagaaatttattcagcaattaaatacctggaacatggaggatgtcgatcaattacgctggccgctgtgtgcaatcgctatagaagcgcgatatctttcattaaattgtgcttctttgttggcagagcgtttgaactggcattcgtttaatgacagcgaaggaatggatgaggaagaaagggaggcttttcttgaggccattcaggctggtgattgtttcgatttccttagccttctggaatatcccgtcgcgttacagaaccagactgttgaatattacttcgcgctggaacgttgctgccgttaccatcctgactatgtcactgcgtttttggcgatggaaggaccgtggttcattcctgatgatgcaaagttacatcgcaaactgttgcgctggtacagctcggtgcaaacaggtatggcggaactcattcctgtagccaaacagtggcaagcggaagaaccagaaagcgaagatgcccggtattaccagtgtgcacaacgtttgtactgcggcgagggggaaagcctgcttgccgatctctgcgcgtactgggaaagttacccatctacaaaagctgataatttgttgttgcagtggagcaagcgtcattgcccggattatttcgcgttattagtgatggttatcgaagcgcgaagcatggtagatgcgcaaggtaaaccgttgaaatatgttcctggtgagagcgcccggacgcggctgttatgggcggagattttacatagcggaaaattatcgccgttaggtcaatcgtttattgagtcgttattcttcaagcgcaaagcatgggcgtggtggaaatcgagagtcggtagcgagacagagcaagattcaccgttactggatttgtatcgggtagcggaacaggttgtgctggaagcgttcccgaaacaagagatgctggcccgtcttaatacaaggctggaaggtggagatgctcatccattagaggccattatcacccagatgctgttgacgaaagtgaaactcgagccggaggatgaagatgtcgatgagccaacacctgaaaaccatgaagaaaaaaatgatgaggatgaaaaaccacagagcattaccagtattatcaaaatcagcttaacggtgctgatgataggttatgcgctcggaaaaatcgcgatgttgtttagctga

SEQ ID NO: 490052 - DNA, 1671 bp, Shigella sonnei; identical to SEQ ID NO: 482582

SEQ ID NO: 490053 - DNA, 936 bp, Shigella sonnei; identical to SEQ ID NO: 482583

SEQ ID NO: 490054 - DNA, 726 bp, Shigella sonnei; identical to SEQ ID NO: 482584

SEQ ID NO: 490055 - DNA, 675 bp, Shigella sonnei; identical to SEQ ID NO: 458313

SEQ ID NO: 490056 - DNA, 741 bp, Shigella sonnei; identical to SEQ ID NO: 482586

SEQ ID NO: 490057 - DNA, 909 bp, Shigella sonnei; identical to SEQ ID NO: 482587

SEQ ID NO: 490058 - DNA, 1878 bp, Shigella sonnei
atgtctgcatcttcggttaagccgttaaatgttcaattacccgcaataacccttatcctttttgcactctgtattgggatattttgttatctcgcacaatggatgagttatgaagaggtcgatcaatccgcacttatccatctcggcgcaaacgttgcgcctcttactttgtcgggtgaaccctggcgcttattgagcagtatctttctgcacagtagtgtttctcatctgctgatgaatatgtttgcattcctggtcgtgggaggcgtggcggaacagattctggggaaatggcgactcctgattacctggttattctccggcgtctttggtgggctcatcagcgcctgttatgcgttacgcgaaagtgagcagatagtcatcagcgttggggcatccggggcgattctgggaatagctggtgcagcgatagcaacacagtttgcttcaggtacgggcacataccataaaaaccagcggcgagtatttcctctgttgggtatggtggcgctgacactgttgtacggtgcccggcaaacaggaatagataacgcttgccacattggcggcctgattgcgggtggcgcgttgggttggctgagcgcgcgtttatctgggcaaaaccgactcgttacggaaggcgggattattgttgcgggcagtcttcttctgaccggggctatctggcttgcgcagcagcagatggatgagtcagttttacaggtcaggcaaagcctgcgtgaagcgttttatccacaggagattgaacaagagcgacggcaaaaaaagcagcagttagcggaggaacgcaacgccctcagggaaacattatccgctccggtaagtcgtgaacaggccagtggtgatttgctcgctgagattgccgatatccatgatatggcgatcagtcgggatggtaatatgttgtatgccgcaattgaaaacacgaacagcattgttgttttcgacctcggacaaaagaaaatcctgcatacctttacagcgcccatagcgaaagaaaagtcagtcaaacattgtggtggctgtaaagatcagggcgtcagatcgctggcattaagcccggatgaaaagttgatttatgcgacttcatttgaagcgaatgcgttatcggtcattaacgtggcgacaggggagattattcagtcgattaccaccggtgcacatcctgacagccttatcctctcgcgtgatggcacaaaagcctgggtgatgaatcgcaccagtaatagtgtgtcagcgattgatctggtgacttatcagcatgtggcggatatcccgctggagaaatacgacgggacggggacgagcggtaaaccaggcgcctgggttatggcactttccccggatgaaagaacattactggttccgggagcaggcagaggtaacatcgtgcggatcaataccatcacgcatcagaaagaagactttcccgcaggtgatgcgcgtggaacgatatcggcgatgcgttttcgacctgaaaacggcgaggttatttttgccgatagtcaggggatttcacgtataagcgtaggggatcaacaagccagcattatgacgcaatggtgtagcaggagcgtttattccgttgagggtattagcccggacggtcaatatttagcgttggtgtcatatggcctgcaaggttatgtcatcctgctcaatattaatgccgggcagattattggcgtttatcctgccagctacgttaatcaccttcgtttttcagcggatggtagaaaaatatttgtcatggcgaagaacgggttgatccaaatggacaggacgcgctcgcttgatccgcaggcaattattcgtcatccccaatatggcaatgtggcttgtatccctgaaccgtaa

SEQ ID NO: 490059 - DNA, 1539 bp, Shigella sonnei; identical to SEQ ID NO: 482589

SEQ ID NO: 490060 - DNA, 879 bp, Shigella sonnei; identical to SEQ ID NO: 482590

SEQ ID NO: 490061 - DNA, 468 bp, Shigella sonnei; identical to SEQ ID NO: 482591

SEQ ID NO: 490062 - DNA, 1080 bp, Shigella sonnei; identical to SEQ ID NO: 482592

SEQ ID NO: 490063 - DNA, 1425 bp, Shigella sonnei
atgaccaaaaaactccatattaaaacctggggctgtcagatgaacgagtacgattcatcgaagatggccgatctgctggatgccacccacggctatcaactgaccgacgtggcggaagaagcggatgtgctgctgctgaacacctgctcaatccgcgagaaggctcaggaaaaagtcttccatcagttgggtcgctggaaactgttaaaagagaagaatccagacctgattatcggcgtcggtggctgcgtggcatcgcaagaaggcgagcacattcgccagcgcgcccactatgtcgatattatttttgggccgcaaacgctgcaccgtctgccggagatgatcaactccgtgcgcggcgaccgcagcccggttgtagatatcagcttcccggaaatcgagaagtttgaccgtctaccggaaccgcgcgccgaagggccgaccgcgtttgtctccatcatggaaggctgcaataaatattgcacctactgcgtggtgccttacacccgtggtgaagaggtaagccgtccgtctgacgatattctgtttgagattgcccagcttgcggctcagggcgtgcgtgaagtcaacctgctcggtcagaacgtgaacgcctggcgtggtgaaaactacgacggctccaccggatcgtttgccgatctgctgcgtctggttgctgcgatcgacgggatcgatcgtattcgctttaccaccagccatccgatcgaattcaccgacgatatcatcgaagtgtatcgcgacacgccggagctggtgagcttcctgcatctgccggtacaaagcggttccgatcgcattctgaacctgatgggccgtactcacacggcgctggagtacaaagcgatcatccgtaaactgcgtgcggcgcgtccggatattcagatcagttctgacttcattgttggcttccctggcgaaaccaccgaagacttcgagaaaacgatgaagctgattgccgacgtcaatttcgacatgagctacagctttatcttctctgcacgtccgggtacaccagccgccgatatggttgatgatgttccggaagaagagaagaagcaacgtctgtatattctgcaagaacgtatcaatcagcaagcgatggcatggagccgccggatgctcggcaccacccagcgtattctggtagaagggacttcgcgtaagagcatcatggagctttccgggcgtaccgaaaataaccgcgtggtcaacttcgagggcacaccggatatgatcggtaaattcgtcgatgtagaaattaccgacgtctacccgaactctctgcgcggtaaagtggtgcgtactgaagatgaaatgggtctgcgcgtggcagaaacaccggaatcggtgattgcccgtacccgcaaagaaaacgaccttggcgtgggttattatcagccgtaa

SEQ ID NO: 490064 - DNA, 1176 bp, Shigella sonnei; identical to SEQ ID NO: 482594

SEQ ID NO: 490065 - DNA, 192 bp, Shigella sonnei; identical to SEQ ID NO: 484083

SEQ ID NO: 490066 - DNA, 228 bp, Shigella sonnei; identical to SEQ ID NO: 488164

SEQ ID NO: 490067 - DNA, 330 bp, Shigella sonnei
atggagcaggcagacaacattgccgactgggtgatgatgtcgccaggtgctgcgctgccggtgaataaagcggttgtcactaccgccacctggaaagacaacgacgttattaaggcgctgggtgaactaccgaatcagctaatcggtgaactgccaaatattcaggtctttggcgcagtaggggataaaaactttacccgcatgggtgatgtgacgggttctggcgtggtgagctccatggtgcataacgtcaccgtgggtaaagccgatctccctggcacgctgcaagcgagccagaaaaagctggatgaactgatcgaacagcactaa

SEQ ID NO: 490068 - DNA, 684 bp, Shigella sonnei; identical to SEQ ID NO: 487131

SEQ ID NO: 490069 - DNA, 441 bp, Shigella sonnei; identical to SEQ ID NO: 478325

SEQ ID NO: 490070 - DNA, 1167 bp, Shigella sonnei; identical to SEQ ID NO: 487978

SEQ ID NO: 490071 - DNA, 1254 bp, Shigella sonnei; identical to SEQ ID NO: 487979

SEQ ID NO: 490072 - DNA, 789 bp, Shigella sonnei; identical to SEQ ID NO: 485823

SEQ ID NO: 490073 - DNA, 441 bp, Shigella sonnei; identical to SEQ ID NO: 478325

SEQ ID NO: 490074 - DNA, 441 bp, Shigella sonnei; identical to SEQ ID NO: 478325

SEQ ID NO: 490075 - DNA, 642 bp, Shigella sonnei
atgaacgacgtgttcctgaaacgcctgacggcccccaccattaccagcggtggaaatccatcggcattttccctgactccggacggaaagctgaccgctaaaaatgcggatatcagtggcagtgtgaatgcgaacgccgggacgctcaacaatgtcacggtaaatgaaaactgtacgattaagggcatgctggaggcgactcaggtcagaggtgacttcgttaaagctgtatccaaatcatttccgaaacaggctggtacgtggggtaacacggaaacaccaaacgggacggttacagtcaccatcagcgatgatcataactttgaccgccagattattattccgcccattatttttaacggtatagcgtatgacgatccggggagcggaaataacccgggaggcacgcgatacacgggttatggttttgaagttcgcaaaaacggcgtattaatcgcatccagagaaactaaaggggccattcccggtagttacagtgcagttattgatatgcctagtggtggtggtagcgtcactctggagtttaagattttccagaaaggcaatcagggggcaggcaatatcaccgactgtacggtgattgtgaccaaaaaagcggcttccggcatcagtattcgttga

SEQ ID NO: 490076 - DNA, 630 bp, Shigella sonnei
atgacgaagcccttcagcacccacgctgaaatccacggtctgcgtctccagcagttccgttttaatcagccacagcccggcgcggtgtgcctgcccccggctggtacagccaaaagcatccatcttcgtgacgttacgaccgtaacgggcaatggcctgcgtgtcctccacaagctctgtcgccgtctcccagccgttattcgggtcaatccagttcacctcaacggcattatggcggtctttcagggcgctgaaactgtagcggaacggcgcgccatcatccggcatcaccacattactgcggttataggtccacaccttatccgacggtcggtcctgcacgaacgtcagcgtctgcccgttccataccggcatacagcgcatcgccgagcagaaatcactgagcacatcccacgccttgcgctgtgtggtcagccaggcattacaggtgatgcgcggctccgtgctgccaaagccgtccggcaccgactggtcacagtactggccgatgacatacagcgcccatttatccacatctgccgcaccaagacgtttccccatgccatagcgcggatgggtcagcatatcccacagacaccaggccatgttgttgctgtatgccggttttaa

SEQ ID NO: 490077 - DNA, 522 bp, Shigella sonnei
atgattttgccgcctctttggaggccgccgcatctctggctgaagtggcggcttctgacgctttcgtcgtcgcagtggatgcagaagtggctgctgatttttgtgacgctgcagcattcgtttctgacgttttcgccgcaccggcactggtggccgccgcgctttttgaggactctgcagcggcagcactttttgatgcttcagtggcctttgttgatgccgttcctgcgctggaagacgcctcctgagccgaagtcgcggcctgtccggctgacgtgctggctgcacgcgctgagcctgcagcatcagtcgcatgggttgccgcctcacgggcagatgtgccggcatcactggctgacttcttcgcggctgccgtgttctgtgccaccgcggacgcgttacgcgtcacctcttccaccatcagttcaaaacggcgcagagcctccggacgggcatcatcctccgtcatggcaccgagaaaatcattcagcgtaccgggtcgggaatcttcatacacggtga

SEQ ID NO: 490078 - DNA, 303 bp, Shigella sonnei; identical to SEQ ID NO: 21213

SEQ ID NO: 490079 - DNA, 366 bp, Shigella sonnei; identical to SEQ ID NO: 487995

SEQ ID NO: 490080 - DNA, 366 bp, Shigella sonnei; identical to SEQ ID NO: 488097

SEQ ID NO: 490081 - DNA, 510 bp, Shigella sonnei
atgacgaccgaccaacaccaggagatcctccgcaccgaaggattaagtaaatttttccccggcgtcaaagcgttagacaacgttgatttcagcctgcgccgtggcgaaatcatggcgctgcttggtgaaaacggggcgggaaaatcaacgctaatcaaagcattaactggtgtataccacgccgatcgcggcaccatctggctggaaggccaggctatctcaccgaaaaataccgcccatgcacaacaactcggtattggcaccgtctatcaggaagtcaacctgctacccaatatgtcggttgctgataatctattcataggtcgcgaacccaaacgtttcggccttctacgccgtaaagagatggaaaagcgcgccaccgaactgatggcatcttacggtttcttcctcgacgtgcgcgaaccgcttaaccgcttaaccgcttttcagtcgcgatgcagcaaatcgtcgccatttgccgggctatcgatctctccgccaaagtgctga

SEQ ID NO: 490082 - DNA, 1134 bp, Shigella sonnei; identical to SEQ ID NO: 482939

SEQ ID NO: 490083 - DNA, 396 bp, Shigella sonnei
atgatggcgcagaatgcattaaccgcagcggaatcgctgggattgggcggggtatatatcggcggcctgcgcaataatattgaagcggtgacgaaactgctgaaattaccgcagcatgttctgccgctgtttgggctgtgccttggctggcctgcggataatccggatctcaagccgcgtttaccggcctccattttggtgcatgaaaacagctatcaaccgctggataaagacgcactggcgcagtatgacgagcaactggcggaatattacctcacccgtggcagcaataatcgccgggatacctggagcgatcatatccgccgaacaatcattaaagaaagccgcccatttattctggattatttgcacaaacagggttgggcgacgcgctaa

SEQ ID NO: 490084 - DNA, 753 bp, Shigella sonnei
atggctttcgtcagtctgaaaccgtgggaagagcgtagtggtgacgaaaacagtgcggaagcggtaatccatcgtgccaaaatggaattgggcaagatccgcgacggttttgtcattccattcaatatgccagccattgttgaactgggcacggcaacgggtttcgactttgagttaattgatcaggctgggctgggtcacgatgccctgacccaggcccgtaaccagttgcttggcatggcggcgcaacatcctgccagcttagtcagcgtgcgtcctaatggtctggaagacaccgcgcagtttaaactggaagttgaccaggaaaaggcgcaggcattaggtgtttcactttctgacatcaatcagaccatttcaacggcgctgggtgggacttacgttaacgacttcatcgaccgtggtcgcgtgaaaaaggtgtatgttcaggcggatgccaaattccgtatgctgccagaagatgtcgataaactttatgtccgcagcgccaacggcgaaatggtgccattctctgcctttaccacttcacattgggtgtatggctctccgcgactggaacgctacaacggtctgccgtcaatggagattcagggggaagccgcgccaggaaccagttccggcgatgccatggcattgatggaaaaccttgcgtcaaaattacctgcgggcattggttatgactggacaggtatgtcgtatcaggaacgcggtgatgctgccaacttactgatttag

SEQ ID NO: 490085 - DNA, 1146 bp, Shigella sonnei; identical to SEQ ID NO: 483149

SEQ ID NO: 490086 - DNA, 858 bp, Shigella sonnei; identical to SEQ ID NO: 482862

SEQ ID NO: 490087 - DNA, 240 bp, Shigella sonnei
atggctggtttaaggaataacaacaacacacagaatgcacagtgggctgattatgtgggtgacattcttcggggggctcagccgataaaccagctagtacctcagcacccttatcttaacgacgtcccactcattgatgagttaaggcatcagaacactcatcatgttattctcttgacacttgatgttgcaaaaaaaaaaaaaaaaaaaaaaaaaaaaaaaaaatactcagcccaataa

SEQ ID NO: 490088 - DNA, 1413 bp, Shigella sonnei
atgactccgtttatgactgaagatttcctgttagataccgaatttgcccgccgtctgtatcacgactacgcaaaagaccagccgattttcgattaccattgccatttgccgccgcagcagattgcggaagactatcgttttaaaaacctgtatgacatctggctgaaaggcgatcactacaaatggcgcgctatgcgtaccaacggtgtggccgagcgtctgtgtaccggtgatgcatctgaccgtgaaaaatttgacgcctgggcggcgactgttccgcacactatcggcaacccgttataccactggacgcaccttgaactgcgtcgtccgtttggtatcactggcaaattgctttctccgtcaactgccgatgaaatctggaacgaatgtaacgaactgctggcgcaggataacttctccgcgcgcggcatcatgcagcagatgaacgtgaaaatggtcggcaccaccgatgacccgatcgattctctggagcatcacgcagagatcgccaaagacggctctttcaccatcaaagtgctgccgagctggcgtccggacaaagccttcaacatcgaacaggcgacctttaacgactacatggcgaagctgggcgaagtttccgataccgacattcgccgctttgctgacctgcaaactgccttgaccaaacgtctggatcacttcgccgctcacggctgtaaagtgtctgaccatgcgctggacgtggtgatgtttgctgaagcgaacgaagcggaactggacagcattctggcgcgccgtctggctggcgaaaccctgagcgagcacgaagtggcacagttcaaaactgcggtactggtgttccttggtgccgaatatgcacgtcgcggctgggtacagcagtaccacattggcgcgctgcgtaataacaacctgcgtcagttcaaactgctggggccggatgtaggctttgactccatcaacgaccgtccgatggcggaagagttgtctaagctgctgagcaagcagaacgaagaaaacctgctgccgaaaaccattctctactgcctgaacccgcgcgataacgaagtgctgggcaccatgatcggtaacttccagggcgaaggtatgccgggcaaaatgcagttcggttccggctggtggtttaacgatcagaaagacggtatggaacgtcagatgacccaactggcgcagctcggtctgctgagccgctttgtcggtatgctgactgacagccgtagcttcctgtcatacacccgtcacgaatacttccgccgcattctgtgccagatgatcggtcgctgggtggaagcgggcgaagcaccggcggacatcaacctgctgggcgagatggtgaaaaatatttgctttaacaatgcgcgtgactacttcgccattgaactgaactaa

SEQ ID NO: 490089 - DNA, 321 bp, Shigella sonnei
atgtctgaaaaattgcaggtggttacgttactggggagcctgcgcaaaggctcatttaatggcatggttgcacgtaccctgccgaaaattgctccggcgagcatggaagtcaatgcgttaccttccattgccgacattcccctgtatgacgctgacgtacagcaggaagaaggttttccagcaacggttgaagctctggcggaacagatccgtcaggctgacggtgtggtgatcgtcacgccggaatataactactctgtaccgggtgggctgaaaaatgccatcgactggctttcccgctggccggtaaaccggtgttga

SEQ ID NO: 490090 - DNA, 1185 bp, Shigella sonnei; identical to SEQ ID NO: 485218

SEQ ID NO: 490091 - DNA, 1056 bp, Shigella sonnei; identical to SEQ ID NO: 485278

SEQ ID NO: 490092 - DNA, 2292 bp, Shigella sonnei; identical to SEQ ID NO: 486347

SEQ ID NO: 490093 - DNA, 198 bp, Shigella sonnei; identical to SEQ ID NO: 489899

SEQ ID NO: 490094 - DNA, 348 bp, Shigella sonnei; identical to SEQ ID NO: 485869

SEQ ID NO: 490095 - DNA, 738 bp, Shigella sonnei; identical to SEQ ID NO: 487826

SEQ ID NO: 490096 - DNA, 2460 bp, Shigella sonnei
atgcagcacagcgaactgcgcggcggcgtgttgctgctggccctgctgcattcgccgctgcgttatataccgcctgctgccgcccggctgttgaccggcattaaccgtgaccgtctgcaacaggactttgtgcagtggacacaggagtcggcggaatcagtcgtgccggatgcagacggtaaaggcgcaggcacaatgacggacgcctctgacaccctgcttgcccgctatgccaaaaacatgaccgcagacgcccgtaacggcaggcttgacccggtactgtgccgcgaccacgaaatcgacctgatgatcgacattctctgccgccgccgtaaaaacaacccggtggtggtgggcgaagcgggcgtgggcaaaagcgcactgattgaagggctggcgctgcgcatcgtggcaggccaggtgccggacaagctgaaaaacaccgatatcatgacccttgacttgggcgcattgcaggccggggcgtcggtgaagggtgaattcgaaaaacgtttcaaagggctgatggcggaggtcatttcctccccggtgccggtcattctgtttatcgacgaagcacataccctgattggcgcgggcaaccagcagggcgggctggatatctccaacctgctcaaaccggcgctggcgcgcggcgagctgaaaaccatcgccgccaccacctggagcgagtacaaaaaatacttcgaaaaagatgccgccctgtcgcgccgcttccagttggtgaaggtcagcgaacccaacgctgccgaagccaccattattctgcgcggtctgtcggcggtctatgaacagtctcacggcgtgctgattgatgatgacgccttgcaggccgctgcgacattaagcgagcgttatctctccgggcgtcagttaccggacaaagcgattgatgtgctggataccgcctgcgcccgtgtggccatcaacctgtcgtcgccgccgaagcaaatctcggcgctgaccactctgagccaccagcaggaggcggaaattcgccagcttgagcgcgagcttcgcatcggactgcgtaccgacacatcacggatgaccgaggtgctggtgcagtatgatgaaacgctgacggcgctggatgaactggaagcggcctggcaccagcagcagacgctggtccgggagattatcgcgctgcgccagcagttactgggcgtggcagaggacgatgcggcgccgttgccggacgcagataccgtggaggatacgcagccagagtcagagtcagagtcagagtcagagcaggataataccggtgccgaaccggctgatgaggccgacagagaacaaccggaagagaccgctgaaacagtttccccggtacagcggctggcccagctcactgccgaactggacgccctgcataacgaccggttgctggtctccccgcacgtcgataaaaaacagattgcggcggtgattgccgaatggaccggcgtgccgctcaaccgcctgtcgcagaatgaaatgtcggtcatcaccgacctgacgaaatggctgggtgacaccatcaaaggccaggacctggcgattgccagcctgcataagcatctactgaccgcacgcgccgacctgcgtcgtccgggacgcccgctcggtgcgttcctgctggctggccccagcggtgtgggtaaaaccgaaaccgtcctgcaactggcagagctgctctacggcggtcgccagtacctgaccaccatcaatatgtccgaattccaggagaaacacaccgtctcgcggctgattggttcgcctccgggctacgttggctacggtgaaggcggcgtactgaccgaagcgattcgccagaaaccctactcggtagtactgctcgatgaagtggaaaaagcgcacccggatgtgctcaacctgttctaccaggcgttcgataagggcgaaatggcagacggtgaaggccgcctgattgactgcaaaaatatcgtcttcttcctgacgtccaacctcggctaccaggtaatagtcgagcatgccgatgacccggaaaccatgcaggaagtacagtatccggtgctggccgacttcttcaaacctgccctgctggcgcgtatggaagtggtgccgtatctgccgctgtcgaaagagacgctcgccaccattatcgccggaaaactggcccgtctggataacgtgctgcgcagtcgctttggtgtagaagtggtcattgaaccggaagtgacggacgaaatcatgagccgcgtcacccgcgcggaaaacggcgcgaggatgctggaatcggtcatcgatggcgacatgctaccgccgctctcgctgctgctgttgcagaaaatggcggctaacacggcgattgcccggattcggttgtcggcagtggacggcgcatttacggcagacgtggaagatgctcagaacgacgagtccgtcacaaaggatgaaacggttttatga

SEQ ID NO: 490097 - DNA, 996 bp, Shigella sonnei
atgaatgaatttataaaagaacggttttcgtatttagcagataataaaaaagaaaacgccccagaactaaatgtttcctacggtatcgataagaattttttgtatggtgctggcgtttcaatttcttccgttttgattaataattcagatattaattttgtctttcatgttttcactgattatgtggatgatgattatttaaagtcatttaatgaaacagcaaaacaatttaatacctcaattattgtatatttaattgacccaaaatactttgctgatctgccgacgtcacagttttggtcgtacgcgacatacttcagggtattgtcctttgaatatctgagtgaaagtatttccacactgctgtatctggatgccgatgtcgtttgtaaaggaagtctgaagcctctcacagaaattatatttaaagatgagtttgctgcggtcattcctgacaatgttagtactcaggcggcatgtgcaaaacgcctcaacattcccgagatgaatggacgttatttcaatgcaggcgttatctatgtcaatattaaaaaatggcatgaagcaaatttgacaccgtatttactcacgcttttacgaggggaaactaaatatggctctcttaaatatttagatcaggatgcgttgaatatcgcatttaatatgaataatatctacctcgcgaaggattttgatactatttataccctgaaaaacgaacttcatgatcgtagtcatcgaaagtatcagcaaaccattaccgataaaacagtattgattcactatacagggataactaaaccatggcatagctgggctggttatccgtctgcatcatactttaatatcgcgcgtgaacaatctccctggaagaaatatcctcttaaagaggcgcggactgttgcagaaatgcagaaacaatataagcatctgtttgcccatggtgagtatattaaaggcataacttcattaattaagtacaagcttaagaaataa

SEQ ID NO: 490098 - DNA, 483 bp, Shigella sonnei
atgggctggcaaaagtgtagcggtattaagcgcagctatttagcgtgggcgcaggagtccgtttctgctaaagcgatgtcgatgcttgctgataaagccgtcgtttcccgtttaacctatatggatcaagatatacttaatcttatcctgtcagggaaagttaaattcattgatgctaaatacaatactcaatttagtttaaattatgaattaaaaaaatcatttgtttgtccaattaatgatgaaaccgtattaattcattatgtcggcccgacaaaaccctggcattactgggccggttatccaagtgcgcaaccttttatcaacgccaaagaagcatcgccctggaaaaatgaaccgtttatgcggccaattaattcaaactatgctcgttattgcgccaagcataattttaaacaaaatgaaccaattaacgggataatgaattatatttattatttttatttaaagataataaaatga

SEQ ID NO: 490099 - DNA, 204 bp, Shigella sonnei; identical to SEQ ID NO: 489857

SEQ ID NO: 490100 - DNA, 327 bp, Shigella sonnei
atgaagtggcttttattaatcaccttgagtctatattcttttattgtgcaaagtgctccctgtgcattgaccaatgtcggggaacaacgtggaacatatatactcaagccactgagtatgaaaggtaatctcaccgccgaaaaaattgaaaacaccggaaatatcattgagtgtgcagacttacaagagacgaccaacgccattaaagttcattttttaacacagaacgctttaaggtttaaagtcggaagtcgtcattatattattaatttcccctttgaatctgacggtaaaaaaaatagagcttccaggaaggtcatcttataa

SEQ ID NO: 490101 - DNA, 600 bp, Shigella sonnei; identical to SEQ ID NO: 489861

SEQ ID NO: 490102 - DNA, 258 bp, Shigella sonnei; identical to SEQ ID NO: 485585

SEQ ID NO: 490103 - DNA, 129 bp, Shigella sonnei; identical to SEQ ID NO: 488912

SEQ ID NO: 490104 - DNA, 657 bp, Shigella sonnei; identical to SEQ ID NO: 489146

SEQ ID NO: 490105 - DNA, 753 bp, Shigella sonnei; identical to SEQ ID NO: 490084

SEQ ID NO: 490106 - DNA, 264 bp, Shigella sonnei
atgatgaacggacaaactgacaacgtaaaaatatttatgcaagaaattcagtcactggtatacaatcatatcattcatgaagataatctggttaaattactgcaaactaaaagtgctaacgaaacacctggactctatatctccatgttgtatggattcgatgaaataatcgatatctttctgaatgcattaaccactccaatagcacaagaacttttaaacaaaaaaaatggtgatgagtattttagccatgaaaatacatga

SEQ ID NO: 490107 - DNA, 483 bp, Shigella sonnei
atgcgtaaagtttgtgcagccattttgtccgcagccatttgcctggccgtatccggtgcgcctgcatgggcgtctgaacatcagtccacgctgagcgcggggtatcttcagacccatactgatatgccaggcagtgatgatctgaacgggattaacgtgaaataccgttatgagtttacggatacgctggggctggtgacgtcattcagctatgccaacgctgaagatgagcaaaaaacgcattacagcgatacccgctggcatgaagattccgtgcgtaaccgctggttcagcgtgatggcggggccgtctgtgcgcgtgaatgaatggttcagcgcgtatgcgatggcgggtgtggcttacagccgtgtgtcgactttttccggggattatatccgcgtaactgacaataaggggaaaacgcacgatgtgctgaccggaagtgatgacggtcgccacagcaacacgtctctggcgcactga

SEQ ID NO: 490108 - DNA, 1125 bp, Shigella sonnei
gtgaacaccgttggcaaatcggcattcgtggaggctgttggtcagccgagtgatgatgcatccggttatctggattttttcaaaggcgagatagggaaaacccatctggctcaggagctgtggacgcagattgataacggtcagcttgcgcctgacctggctgaaatcaggacgtccattacggatgtcagcaatgaaatcacgcagaccgtcaataagaaactggaagaccagagtgcggcaattcagcagatacagaaggttcaggttgatacaaataataacctgaacagcatgtgggctgtgaagctgcagcagatgcaggacggacgcctttatatcgcgggtattggtgccggtattgagaacacccctgacggcatgcagagtcaggtgctgctggcggcggacaggattgcgatggttaatcctgcgaatggcaacacaaaaccgatgtttgttggtcagggcgatcagatattcatgaacgacgtgttcctgaaacgcctgacggcccccaccattaccagcggtggaaatccatcggcattttccctgactccggacggaaagctgaccgctaaaaatgcggatatcagtggcagtgtgaatgcgaacgccgggacgctcaacaatgtcacggtaaatgaaaactgtacgattaagggcatgctggaggcgactcaggtcagaggtgacttcgttaaagctgtatccaaatcatttccgaaacaggctggtacgtggggtaacacggaaacaccaaacgggacggttacagtcaccataagcgatgatcataactttgaccgccagattattattccgcccattatttttaacggtatagcgtatgacgatccggggagcggaaataacccaggaggcacgcgatacacgggttatggttttgaagttcgcaaaaacggcgtattaatcgcatccagagaaactaaaggtgccattcccggtagttacagtgcagttattgatatgcctagtggtggtggtagcgtcactctggagtttaagattttccagaaaggcaatcagggggcaggcaatatcaccgactgtacggtgattgtgaccaaaaaagcggcttccggcatcagtattcgttga

SEQ ID NO: 490109 - DNA, 489 bp, Shigella sonnei
atggcgaagcccttctgcgcccacgctgaagtccacggtctgcgtttccagcagttccgttttaatcagccacagcccggctcggtgtgcctgcccccggctggtacagccaaaggcatccatcttcgtgacattacgaccgtaacgggcaatggcctgcgtatcctccacaagctctgtcgccgtctcccagccgttatctgggtcaatccagttcacctcaacggcattatggcggtccttcagggcgctgaagctgtagcggaacggcgcgccatcgtccggcatcaccacattactgcggttataggtccacaccttatccgacggtcggtcctgcacgaacgtcagcatctgtccgttccataccggcatacagcgcatcgccgagcagaaatcactgagaacatcccacgccttacgctgtgtggtcaggtaagagttacaggtgatgcgcggctccgtgccgccaaatccgtccgtcactga

SEQ ID NO: 490110 - DNA, 630 bp, Shigella sonnei
atgacgaagcccttcagcacccacgctgaaatccacggtctgcgtctccagcagttccgttttaatcagccacagcccggcgcggtgtgcctgcccccggctggtacagccaaaggcatccatcttcgtgacgttacgaccgtaacggacaatggcctgcgtatcctccacaagctctgtcgccgtctcccagccgttatccgggtcaatccagttcacctcaacggcattatggcggtctttcagggcgctgaaactgtagcggaacggcgcgccatcatccggcatcaccacattactgcggttataggcccacaccttatccgactgtcggtcctgcacgaacgtcagcgtctgcccgttccataccggcatacagcgcatcgccgagcagaaatcactgagcacatcccacgccttgcgctgtgtggtcagccaggcattacaggtgatgcgcggctccgtgctgccaaagccgtccggcaccgactggtcacagtactggccgatgacatacagcgcccatttatccacatctgccgcaccaagacgtttccccatgccatagcgcggatgggtcagcatatcccacagacaccaggccatgttgttgctgtatgccggttttaa

SEQ ID NO: 490111 - DNA, 480 bp, Shigella sonnei; identical to SEQ ID NO: 485825

SEQ ID NO: 490112 - DNA, 267 bp, Shigella sonnei; identical to SEQ ID NO: 487831

SEQ ID NO: 490113 - DNA, 954 bp, Shigella sonnei
gtggatagtaataatcaaattgaaccctgtttaagcagaaagtcgtcagaaggtaaaccacaaatatttacaaccttacgaaatattgatcttaaccttctgactatttttgaagctgtatatgtacataaagggatcgttaatgcagcgaaagtgcttaatctgaccccctcggcaatcagtcagtctattcagaaactgcgcgttatattccctgacccattgtttattcgcaaaggccagggtgtcactcctaccgcatttgcgatgcatctacatgagtatatcagtcagggccttgagtccattcttggcgcgctggatatcgaaggaagctatgataagcaacgaacgataactattgcgaccactccctcggtcggagccctggtccttcctgtcatctatcgggcgattaaaactcactatccgcagcttttactgcgcaacccgcccatcagcgacgcggaaaaccaactcagtcagtttcaaaccgatctcatcatcgataacatgttttgcaccaatcgtacggtgcaacatcatgttctgttcaccgacaatatggtgttaatttgccgcgagggaaatccactactctctttagaagatgacagagagactatcgacaacgctgcgcatgtactcctgttaccggaagggcaaaatttcagcggtctgcggcagagagttcaagagatgtttccggaccggcaaatcaatttcaccagctacaacattttgacaatcgctgcactggttgccagcagtgacatgttagcgattattcccagccgtttttataacctgtttagtcgttgctggccgctggaaaaactgccttttccgtccttaaatgaggagcaaatagatttctctatccactacaacaaattcagcctgcgtgatcccatcctgcacggggtaatagatgttatccgtaatgcattttga

SEQ ID NO: 490114 - DNA, 444 bp, Shigella sonnei; identical to SEQ ID NO: 482956

SEQ ID NO: 490115 - DNA, 774 bp, Shigella sonnei
atggatcgtataattgaaaaattagatcacggctggtgggtcgtcagccatgaacaaaaattatggttgccgaagggagaattgccatatggcgaagcggcaaatttcgatcttgtgggtcagcgcgcactacaaatcggcgaatggcagggggaacctgtttggttagtacaacagcagcggcgtcacgatatggggtcggtacgtcaggtcattgatctcgatgttgggctgtttcaactggccggacgaggcgtacaactggcggagttttaccgatcgcataaatactgtggttactgcgggcatgaaatgtatccgagcaaaaccgaatgggcgatgctgtgcagctattgccgtgagcgttactacccgcaaatcgccccctgcattattgttgccatccgtcgcgatgattcgatcctcctcgcccagcatacccgccatcgtaacggtgtccatacagtacttgccggattcgtcgaagtgggcgaaaccctcgagcaggcagtcgcgcgggaagtgatggaagagagcggaattaaagttaaaaacttgcgttacgtgacttctcagccgtggccgtttcctcagtctttaatgaccgcgtttatggcggaatatgacagcggcgacatcgtgatcgacccgaaagaattgctcgaggcgaactggtatcgctatgacgatttgccgttactcccgccgcccggcaccgtagcgcgccgtctgatagaagatactgtggcgatgtgtcgggcagagtatgagtga

SEQ ID NO: 490116 - DNA, 906 bp, Shigella sonnei; identical to SEQ ID NO: 15886

SEQ ID NO: 490117 - DNA, 552 bp, Shigella sonnei
atggaagccaacaaaaagcagctggctgacattttcggtgcgagtatccgtaccattcagaactggcaggagcagggaatgcccgttctgcgaggcggtggcaagggtaatgaggtgctttatgactctgccgccgtcataaaatggtatgccgaaagggatgctgaaattgagaacgaaaagctgcgccgggaggttgaagaactgcggcaggccagcgaggcagatctcctgccagggactattgagtatgaacgccatcgacttacgcgtgcgcaggccgacgcacaggaactgaagaatgccagcgaaacaggtgaggtaattgacactgcatttgcgacttatgccttgtcgaaattaactggggaagttggagcaatcattgatagtcttccacttgcgatctgtcgacagtttcctggcatggaaaaacggtatcaggacttcattaagatggaggtcagtaaagcatttattcgagcttaccagatctcagataacattccagatatggctgaaaggtatatcaaggataatcagcgaagttaa

SEQ ID NO: 490118 - DNA, 138 bp, Shigella sonnei; identical to SEQ ID NO: 15884

SEQ ID NO: 490119 - DNA, 384 bp, Shigella sonnei
atgcagaatgattacaatgaccttaagccaattgccgaaatgatgtacccgaatccagctgtagaggaattaaaagctatcgctgacaaaatgtgtttaagcgagcgccttgttgatatgaatcaggtgatggaaattacaaccctgagtcgtcgtacactgctaaaccttgaggctagtggagagttcccggagcgtgtgcaggttacggaagggcgtaaggcctggtatttaagtgaagtgatcgactggataaataatattcctcgcgcttctgaatattgccgcgtacctgtcccaaaaaagccagatgcggcgctatgcctcaagattgagcgtgtacgccgcaatgcacgggatggtcgctataagctgattggttga

SEQ ID NO: 490120 - DNA, 342 bp, Shigella sonnei
atggctactcattacactgaactcatggctggcactgaagcactggtgactacgctggggatattttcagctaataaaggggtaattcctgcatttacgccactgatgcaggaagatgcaacaggtgcactggtggtatgggatggttcgagcgtaggtaaagcggtttatgtttccgctgtacaaatcgacaccgcgaaaaaaacacaggctcaggtctataagacaggtgtcttaaatgttgatgctctgaactggcctgagtctgttaaagaactgtcagtaaaggttgcagcgtttgttggctcaggtatttctgttcagccgctggctcgtgtgtaa

SEQ ID NO: 490121 - DNA, 1041 bp, Shigella sonnei
atggttgatttatattcgcctacccagcttgtacaggtggttaatgctgtagatgtacaaaaacaactaaatgcgttgtttaccagtttgttttttactcgctcggtaatgtttggatcgcgcgatattattcttgatacaatcgacgatccaaatatcccaattgcagcgttttgttctcctatggtgggtagtaaagtttcacgtgacgaagggtacgaatcaaaaacaattcgtccaggctatatgaagccgaaaagcagcattgatccaaataagttagctgtgcgccctgctggtgtatcacctgagcaatacaatgcttttggggcgcgtaatattaaagttaaacaggcgattgtaaatcaagctaaagctattcgtgcacgtattgaatggcttgccgttcaggcaatcacaacggggaaaaatatcattgagggcgatggtattgaacgttatgagctggactggaatattaaaccacaaaatatcatcactcagtctggcggtactgagtggtcaggtaaggataaagaaacttttgatccaaatgatgatattgagagctacgcagaatttagtgagggcgtcactaatatcatcattatgggcggtaatgtatggaagaaataccgttcattcagagcgataaaagaggctctggatacccgtcgtggttctaattccgaactggaaacggcccttaaagaccttggtgattcggtgagttttaaaggatatatgggcgatgttgcgattgttgtttacagcgggcgttataccgacgaggacggaactgaaaaacatttccttgatcctgatttgatggtgcttggcaatacggctcttcaggggattgtcgcctatggcggtattcaggatccggagctaatccgaatggggctgactaaagccgaacttgcaccgaaaaactatattgtgcctggtgatccggctattgaatatgtgcagacacattcagcaccacagccaataccggcccgcatcaatcgttttgttaccgttcgcattggctaa

SEQ ID NO: 490122 - DNA, 450 bp, Shigella sonnei
atgacggcgcaaatatcagtttacgggcggttggtggacgacccgcagacaaaacagaccagcaagggcacccccatgacgctggcgcgtatggcggtatcactgccttgcagtcagtcggatgacggtcaggcgacgatgtggttatctgtcctggcgtttggcagacaagccgacgcgctggcaaagcatcacaaatgcgaactcctgagcgtggcgggtaacatgcagatgagccagtggactggacagaacggcgaaacgcggcagggctggcaggttatcgcagacagcgtaatcagtgcgcgatcggtgcgaccgggcggcaaaaaaggccaacaggggcaggctactgacgcactgaacagagcaaaacaacaggcagatcagcaaggaagccagccaccagtgggagataatgagcaatggggagatgatatcccattttaa

SEQ ID NO: 490123 - DNA, 246 bp, Shigella sonnei
atgacagcgaagcacacaaaaaaatcacaatcgcacgcccttgatttgactgaacactggttaagggtgtcgataaaaatcatcgaccgcaacgccggggaaggatacgcgaaagcacatcccgaactgattagcgcattcatgacaacggcggctgcaaactttgccactctgaccgaacgggagattgctgaagcggaggaagtgacaacaatcaatattaagtccggagagcaggcagcatga

SEQ ID NO: 490124 - DNA, 288 bp, Shigella sonnei
atgaaaaataaattttctggctttattgccagcggtcaaactcattcaaaaatcagccttggggatattttcaaagacagctatggctatcgggtaaagattatttcggttgatgatcgtcgtgtctcttatttgcgtgatggttatgattttgaatgtgttatgccgcgtcagcagttcgaaagagatttcattctggtaaaaaattgcaagacagataatcagaggcgtgccgcaggctatatccgtaaaattcgggcaatgttagttgccggaggtaacaaatga

SEQ ID NO: 490125 - DNA, 225 bp, Shigella sonnei; identical to SEQ ID NO: 13830

SEQ ID NO: 490126 - DNA, 204 bp, Shigella sonnei
atgagaaatcataccacacacccgcaagggcgggacccgcacaacctgaataaatacatctggcgttttatcgccctgagtacggcacaaccgcgcgtgattaccatcgaggccaccagcgaacaggaagcccgccagcaatccccaactgactgcgtgatgatattcgccgcccgtattcgtcaggaggtgtgccatgaatga

SEQ ID NO: 490127 - DNA, 180 bp, Shigella sonnei
atggcgacaaaagcagtaaacgcaaaatcacaaaccgttgcggcaagggttccgcatgaggttatggacaatgttgaagcagtaaaaatgcctggcgaaagtacaggacaatttgtcactgcagcattaaaacgagaagttgagtaccgccagcgccgcaaggccaaagaactggaatag

SEQ ID NO: 490128 - DNA, 918 bp, Shigella sonnei
atgagtagaatgattaataccttgtgcccttatagccttatcccattaaatcaaatagaacataatggagaacatgttttattagctggattaggagctccggaaagttttactgtgaatgtttcaaaagaagaaaatacacgaattaacgatttgttggatgaaccattcttaggaatggaaataataaaattactctcgtctatttcgggtcttcaatcaaggagtggtgaagtgaagccattttttactggaattactgagggtggagatgcggtgcatgttaggatgtctcctggcgaagtgacattgaaagttaaaagtccagtagtgaaggataaaaataataatattgttgcagtaactggttacgaaaaggaggtacaagaaactttgttatcaatcacaaaaaaatatgaagccaaggggttttctgtaattacttccgctcctataaatcgagaggctgagatcaagcttaacttcaatttggatattgaattattaaattatcaatatttaaagatggcctatcttacaatggtctacgtatttggtgatcgcgggattaagtgtccggctgcgaatgaaattagaaaaataattctgaataaatcacccctgccttcaactttaaaaggtgttcgttctctttcatgggatgtcaatactttaccattactgccaaatgttgatacccacaaacacattgttgcaagttttaatattcatggggaagtagtatgtgcagtgtcactttttggtgtatttaataaagtatttctcattgaaaatgaattggtggataaggataatgtttttggtgagatatatgaagtcgactataaaacaagaaaaatcaatagaacggatattgttcagcgcattaatgaggttacaaaaaacgtacagttttaa

SEQ ID NO: 490129 - DNA, 231 bp, Shigella sonnei
atgaaaaaaatggcaattgttgataaaaagggtctggagtacattcctaacattgaccgaatgatccgtgagaaagaatgtcgggagctaaccactcttgcgaacagcacacgctggaagctggagaaggaaggaaaatttcctaagcggatcaagattggttccactgctgttgcatatcgtctttcagaagtgcaggcatggattcgaggtgagtggattgagaaataa

SEQ ID NO: 490130 - DNA, 1236 bp, Shigella sonnei
atggctggcgagaacaaactgagcgacaaagcgcttaaaggatatctggggaaacccagagaaaagcagatcaccattgctgatggaaaggggctttctattcgtgtgagtactaaaggggctgtgagctttgttttcttctacaggttagcaggtggccgggctgctccggtctggctaacgttgggtaaatatcctgatatgtcactcaaacaggcaagggaaaagcgcgacgagtgccgtggttggttggctgacaaacgtgatccgcgtatccagattaagattcaggctgaagaacgcttaaagccggtcacagtggaggatgcactaaattactggtatgaaaattactgtaaggtgcgtcgtaaaactcatgctgtaacgcttggcagatttcgaaagcatatctttccctatatcggtcatttgcccgtaaatgacactcacctatatgaatggctggactgttttgaccgaattaaacgtaatgcaccagttatggcggcgtatgttttttctgacactaaattagctcttcgtttttgtcgggtacgccagtatgcgacgtgtgatgctttaaaggatttgcgcatgagtgatgtggggcagattgcaggtaagcgggatcgggttctggatgaagccgaactcggccagctctggaaggcaatttttgtcgagcctgatttaaaactaatgtctgaatacacgcgaaaaatgtttgtgctttgtacagtatttggatgtcgaatgagtgaagcccgattatcagaatggagcgaatgggatctcgaaagttgggtttggactgtaccaaaagatcactcaaaaactggtgttgaaatcgtcagaccagtacctgaaattctacgacagtgggtaacggatgttcacgaagagacaaaacatactggttatgtgctgggaagtctgcgaattagagaaagcgtaagcaagattggggggaaaatcggtaaacgtttgggccatgaaaaacaatggtcactacacgaccttagaagaacgctatctactcatctaagtgatctcggtgttgaattttatgtagtagaacaactgttaggccatgcgctacctggcgtggcaggtgtttacaaccggagtaagtttatggctaaaaaactggatgctctggaactctggactacatatctcaatagcatcgcaggtgctgattcaaaagtgacaatcctcaaacaaaaggttggttaa

SEQ ID NO: 490131 - DNA, 276 bp, Shigella sonnei
atgtcgatgtacacaaccgcccagctgctggcggcaaatgagcagaaatttaagtttgatccgctgtttctgcgtctctttttccgtgagagctatcccttcactacggagaaagtctatctctcacaaattccgggactggtaaacatggcgctgtacgtttcgccgattgtttccggtgaggttatccgttcccgtggcggctccacctctgaatttacgccgggatatgtcaaacccaagcacttagcatggctttctgaggctttcgtgtag

SEQ ID NO: 490132 - DNA, 936 bp, Shigella sonnei
atgagcgccgcgcttcaatacttcgaagaaaatttacctcaccgtccctatcacacggatgagctcgctttcggtcttcgtatctccggcaaagggcgtgcgctgcttgctcgctacatccagcaaaatcagcctcatgcgcagttctggctggtttttgacgttgaccgcgtaggagctgcgattgactggagcgaccggaacgcccccgcgccgaacatcaccgtaaaaaatcccgagaacgggcacgctcacctgctctacgcgctcaatcttgccgtgagaaccgcgcctgatgcgtcggttaaggcgctgaaatacgccgctgcaattgaacgtgcgctgtgtgagaaacttgacgcagatgtgaactacagcggactgatttgcaaaaatccgttccacctggaatggcaggtgatggagtggcgcgaggaagcctacgccctcgatgaactggctgattatctcgatttgagagcctcagagcgtcgtagcgtcgataaacattacgggctggggcgaaactgccatctgttcgaaatgacgcgcaaatgggcttacagggcgattcggcagggctggccagcattctcacagtggcttgatgctgtgattcagcgtgtcgaaatgtacaacgcatcgcttcccgttccgctttctccgcctgaatgtcgggctattggcaagagcattgcgaaatacacgcacaggaacttcacgccggaaagtttcgcacagtatgtggctgatacgcacacaccagaaatacaggccaagagaggccggaaaggtggcatcgctaaaggcgaagcctacgatgacaagcgtttcatggcgctatgtatgctggagaatggatattctcagaaagctattgcggcgatgctgaatgtacatcgtaatacgatccgtaattgggcaatgcacaaatag

SEQ ID NO: 490133 - DNA, 381 bp, Shigella sonnei; identical to SEQ ID NO: 458903

SEQ ID NO: 490134 - DNA, 267 bp, Shigella sonnei; identical to SEQ ID NO: 487831

SEQ ID NO: 490135 - DNA, 522 bp, Shigella sonnei
atgccattctatttcaggaaggagtgtccgttaaactcaggctacctcactgaggtccaggaatgggattttaaagaaatgctctggaccgtgccgaaagaacacagcaaaacgaaggtagcaatattcaggccaataccggaagcgatcttgccgttcgtaacgaagctggtggagcagaacaggcacacgggattattgctcggagaactgaaagggcaatcatccgtatcagagtacggaagaacggcacacagacgcattaatcaagccccctggacgttgcacgacatccggcacacgtttacaacgatgctgaacgatttaggcgtggatcctcatgtagtggagcagctaaccgcgcaccagttgccaggagtgcaacgagtctataatcactcccgttatctcgatgcaaaacgtgacgctcttaatctatgggttgagcgtctcgagcttctccagaacaatgatgaaaaaatcgttgttatgaccccgcgaatttactcccaaaattcttga

SEQ ID NO: 490136 - DNA, 519 bp, Shigella sonnei
atgtcaggatttaaaaaaggttttttatggggtggcgcggtagccgcgcatcagttggaaggtggctggaatgaaggaggaaaaggcatcagtatcgctgatgtgatgactgctggcgctcacggggtgccgcgtgaagtgacagaaggcgttatcgacgggcttaattatcccaatcatgaagcaattgatttttatcatcgctataaaacagatattcagttatttgccgagatgggattcaaatgctttcgaacttccattgcctggacacgaatctttccgcaaggtgacgaacaggagccgaatgaagagggtttacaattttatgatgatctgttcgatgaatgcctgaagcaaggaatggaacctgtggtgacgctttcgcattttgagatgccttatcatctggtgacaaaatatggtggctggcgaaaccgtaagctgatcgacttttttatccgcttcgcatcaacggtggatttgcccctatatttccagacatctgttatcacttaa

SEQ ID NO: 490137 - DNA, 381 bp, Shigella sonnei; identical to SEQ ID NO: 458903

SEQ ID NO: 490138 - DNA, 744 bp, Shigella sonnei
atgacagagacagaatcagcgattctggcgcacgcccggcgatgtgctccagcggagtcgtgcggcttcgtggtaagaacgccggagggggaaagatatttcccctgcgtgaatatctccggtgagccggaggaacgtttccgtatgtcgccggaagactggctgcaggcagagatgcagggtgagattgtggcactggtccacagccaccccggtggtctgccctggctgagtgaggccgaccggcggctgcaggtgcagagtgatttgccgtggtggctggtctgccggggggcgattcacaagttccgctgtgtgccgcatctcaccgggcggcgctttgagcacggggtgacggactgttacacgctgttccgggatgcttaccatctggcggggattgagatgccggattttcatcgtgaggatgactggtggcgtcacggtcagaatctctatctggacaatatggaggtgacgggtttttaccgtgtcgcactgacagaggcgcagccgggcgatgtgctgctgtgctgttttggttcatcggtgccgaatcatgccgccatttactgtggtgacggcgagctgctgcaccatattcctgaacaactgagcaaacgagagaggtataccgacaaatggcagcgacgcacacactccctctggcgtcaccgggcatggcgcgcatctgcctttacggggatttacaacgatttggtcgccgcatcgaccttcgtgtga

SEQ ID NO: 490139 - DNA, 207 bp, Shigella sonnei; identical to SEQ ID NO: 485404

SEQ ID NO: 490140 - DNA, 324 bp, Shigella sonnei; identical to SEQ ID NO: 489868

SEQ ID NO: 490141 - DNA, 381 bp, Shigella sonnei
atgctgggagcggtggaacgccgcttcggcaacgatcttccgtcgtctccagtggagtggctgacggataatggttcatgctaccgggctaatgaaacacgccagttcgcccggatgttgggacttgaaccgaagaacacggcggtgcggagtccggagagtaacggaatagcagagagcttcgtgaaaacgataaagcgtgactacatcagtatcatgcccaaaccagacgggttaacggcagcaaagaaccttgcagaggcgttcgagcattataacgaatggcatccgcatagtgcgctgggttatcgctcgccacgggaatatctgcggcagcaagccagtaatgggttaagtgataacaggtgtctggaaatatag

SEQ ID NO: 490142 - DNA, 195 bp, Shigella sonnei; identical to SEQ ID NO: 489869

SEQ ID NO: 490143 - DNA, 195 bp, Shigella sonnei; identical to SEQ ID NO: 489869

SEQ ID NO: 490144 - DNA, 183 bp, Shigella sonnei
atgctggcagaaaaaatagaaggagagctggcggttgtgattcgccacctgcttactcgtttttctgaccaggacgaagctaaacgcctgctgtatgagcagcagaaatcagaagaagctctggtgataaaacgcgagggcgattcgctggtggacttctgcggctatctcatgttgaggtag

SEQ ID NO: 490145 - DNA, 207 bp, Shigella sonnei
gtgattgattataaaaaaaacttattatttattttagtttttatcagtgggtttattctcttcactgtctattcttacactgcagaaaaaatgatatataacgaaacatgcactgcaaattgggtaatttttaatgaccagggacgagcaaatcttaccatcgactttatgtataacaaaaaaataaaacaggaactgttgcgttga

SEQ ID NO: 490146 - DNA, 657 bp, Shigella sonnei; identical to SEQ ID NO: 463703

SEQ ID NO: 490147 - DNA, 1038 bp, Shigella sonnei; identical to SEQ ID NO: 489967

SEQ ID NO: 490148 - DNA, 657 bp, Shigella sonnei; identical to SEQ ID NO: 463703

SEQ ID NO: 490149 - DNA, 276 bp, Shigella sonnei; identical to SEQ ID NO: 484087

SEQ ID NO: 490150 - DNA, 387 bp, Shigella sonnei; identical to SEQ ID NO: 485857

SEQ ID NO: 490151 - DNA, 657 bp, Shigella sonnei
atgcctgcgatcaatgccaaacgtgtttaccggatcatgcgccagaatgcgctgttgcttgagcgaaaacctgctgtaccgccatcgaaacgggcacatacaggcagagtggctgtgaaagaaagtaatcagcgatggtgctctgacgggttcgagttccgctgtgataacggagaaaaactgcgagtcacgttcgcgctggactgctgtgaccgtgaggcactgcactgggcggtcactacgggcggcttcaacagtgaaacagtacaggacgtcatgctgggagcggtggaacgccgcttcggcaacgagcttccggcgtctccagtagagtggctgacggataatggttcatgctaccgggctaatgaaacacggcagtttgcccggatgttggggcttgaaccgaagagcacggcggtgcggagtccggagagtaacggaatagcagagagcttcgtgaaaacgataaagcgtgactacatcagtatcatgcccaaaccagacgggttaacggcagcaaagaaccttgcagaggcgttcgagcattataacgaatggcatccgcatagtgcgctgggttatcgctcgccacgggaatatctacggcagcaagccagtaatgggttaagtgataacaggtgtctggaaatatag

SEQ ID NO: 490152 - DNA, 657 bp, Shigella sonnei
atgcctgcgatcaatgccaaacgtgtttaccggatcatgcgccagaatgcgctgttgcttgagcgaaaacctgctgtaccgccatctaaacgggcacatacaggcagagtggctgtgaaagaaagtaatcagcgatggtgctctgacgggttcgagttccgctgtgataacggagaaaaactgcgagtcacgttcgcgctggactgctgtgatcgtgaggcactgcactgggcggtgactaccggcggcttcaacagtgaaacagtacaggacgtcatgctgggagcggtggaacgccgcttcggcaacgagcttccggcgtctccagtagagtggctgacggataatggttcatgctaccgggctaatgaaacacggcagtttgcccggatgttgggacttgaaccgaagaacacggcggtgcggagtccggagagtaacggaatagcagagagcttcgtgaaaacgataaagcgtgactacatcagtatcatgcccaaaccagacgggttaacggcagcaaagaaccttgcagaggcgttcgagcattataacgaatggcatccgcatagtgcgctgggttatcgctcgccacgggaatatctacggcagcaagccagtaatgggttaagtgataacaggtgtctggaaatatag

SEQ ID NO: 490153 - DNA, 657 bp, Shigella sonnei
atgcctgcgatcaatgccaaacgtgtttaccggatcatgcgccagaatgcgctgttgcttgagcgaaaacctgctgtaccgccatcgaaacgggcacatacaggcagagtggccgtgaaagaaagcaatcagcgatggtgctctgacgggttcgagttctgctgtgataacggagagagactgcgtgtcacgttcgcgctggactgctgtgatcgtgaggcactgcactgggcggtgactaccggcggcttcaacagtgaaacagtacaggacgtcatgctgggagcggtggaacgccgcttcggcaacgatcttccgtcgtctccagtggagtggctgacggataatggttcatgctaccgggctaatgaaacacggcagtttgcccggatgttggggcttgaaccgaagagcacggcggtgcggagtccggagagtaacggcatagcagagagcttcgtgaaaacgataaagcgtgactacatcagtgtcatgcccaaaccagacgggttaacggcagcaaagaaccttgcagaggcgttcgagcattataacgaatggcatccgcatagtgcactgggttatcgctcgccacgggaatatctacggcagcaagccagtaatgggttaagtgataacaggtgtctggaaatatag

SEQ ID NO: 490154 - DNA, 564 bp, Shigella sonnei
atgcaggaaatatcgcaaggcaatcgtgagccgcatgtgttgcaggcattccgggaactggaaggtgacctgggctacggcatgttgctctcccgctatgcgccggatatgaatcatgtcacagccgcacagtaccaggcggcgatgcgtggcgcgatacctcaggttgcgccggtattctggagtttccgcatcatggtgggctgtggttccctgccgctactggtgatgctgattgcgcttgtccagacgctgcgtggcaaaatcgaccagcatcgctgggtgctgaaaatggcgctctggagtttgccgttgccgtggattgcgattgaagccgggtggtttatgaccgagtttggtcgtcagccgtgggcgatacaggacatcttaccgacatactccgcgcactccgctttaaccacaggacaactggctttctcactgatcatgatcgtagggctttacaccctgttcttaatcgccgaagtctacctgatgcagaaatatgcccgtctggggccgagcgcgatgcagagtgaacaaccgacgcagcaacaggggtaa

SEQ ID NO: 490155 - DNA, 642 bp, Shigella sonnei
atggcagcgacgcacacactccctctggcgtcaccgggcatggcacgcatctgcctttacggggatttacaacgatttggccgccgcatcgatcttcatgtgaaaacgggggccgaagccatccgggcgctggccatgcagatcccagcgtttcgtcagaaactgagcgatggttggtatcaggtgcgtattgccgggcgtgatacaggcgaaaacgaattatcagcccgtcttaatgaaccgctggaaaatggtgccgtgatccacatcgtaccgcgtctggctggtgccaaaagtggcggcgtgtttcaggcggtgcttggtgcggcgctgattgctacggcaatctggatgccaggaatcagtatcgctttcagtgacattctcttttcaatgggggcggcgatgacacttggtggtgttgcacagatgctggcaccgaaagccagcacagcaacagccagcaccacggataacggtaagcagaacacctatttctcctctctggataacatggttgcccagggcaatgttgtgcctgttctgtacggtgaaatgcgcgtcgggtcgcgggtgatttcgcaagagatcagcacagcagatgaaggggatggcggccagattgtggtgattggtcgctga

SEQ ID NO: 490156 - DNA, 228 bp, Shigella sonnei; identical to SEQ ID NO: 488164

SEQ ID NO: 490157 - DNA, 369 bp, Shigella sonnei
atgctggaagcggccagagaggccagacgtcagggaattgaagcatggcgcacagaacaggaggcgaagccgttcacgtttgaatggaacggtcgcacgtggaacgctgacgcctcgtcagtggcccgcctgtccccggtggtcatgctggcaaaatctgtcgcggcacaaacacatatggcgtggagtgatgcggataatcagcaggtgcagctgacgacgcaggaacttgaggaactggccacagcgatgatacaggccattgttgagcgcaacgatgagatttatcgctgtcagcgggagatgaaagaacaactttctctgttgcccacactggacgaggtgagagcgttcagaccaggcgattaa

SEQ ID NO: 490158 - DNA, 618 bp, Shigella sonnei; identical to SEQ ID NO: 484991

SEQ ID NO: 490159 - DNA, 237 bp, Shigella sonnei
atgagcagaaaaacccaacgttactctaaagagttcaaagccgaagctgtcagaacggttcctgaaaatcaactttcgatcagtgaaggcgcttcccgattatctcttcctgaaggcactttaggacaatgggttaccgccgccagaaaagggctcggtactcctggttcccgcacggtggctgaactggaatctgaaattctgcaactgcgtaaggcgttaaatagctgcgcttaa

SEQ ID NO: 490160 - DNA, 222 bp, Shigella sonnei; identical to SEQ ID NO: 33934

SEQ ID NO: 490161 - DNA, 951 bp, Shigella sonnei
atggaaacagctgtagcgtactataaaaaagatggtgttccttatgatgataaggggcaggtaatcattactcttttgaatggtaatccagacgggagtggctctggcggtggtggtggaactggaggtagcaaaagtgaaagttctgcagccattcatgccacagctaaatggtctactgctcaattgaagaaaacgcaggcagaacaggctgcccgagcaaaagctgccgcagaagcacaggctaaagcaaaagcaaaccgggatgcgctgactcaacatctgaaggatattgtgaatgaggcgcttcgccataattccactcatccggaggttattgacctggctcatgccaataatgcagcgatgcaggcagaagcagagcggttgcgccttgcaaaagcagaagaaaaagcccgtaaagaagcggaagctgcggaaaaggcttttcaggaagcagaacaacgacgtaaagagatagagaaggagcaggctgaaacagaacgccaattgaaactggctgaggatgaagagaaacgcctggcagcattgagtgaagaggcccgggctgtggaggtggcacaaaaaaatcttgctgctgcacaatctgagctggcgaaagtggatgaagagattaatacgctcaatacccgtttaagctccagtattcatgcccgtgatgcagaaacgaatacgctgtccggaaaacgaaatgagttggatcaggcatctgctaaatataaagaactggatgaaagggttaaacttttatctcctagggcgaatgatccgcttcagagtcgtcctttttttgaggccaccagactacgggcgagagctggtgatgagatggaggaaaaacaaaagcaggtaacagcatcagaaacgcgtcttaaccagattagctctgagataaatggaatcggtgatgctgccaacttactgatttag

SEQ ID NO: 490162 - DNA, 546 bp, Shigella sonnei
gtgaatatcagcctgagttttactttggtaaccgcattcagtgacaaaacaaaggcgacctggggcggtcgccaatggatatacactaaacttgaacgcatcaccaacaatgccacatttgcggctggtgggcaatgtgatcagtgtgctggcttgctggttggctgtcagcctttgggctcgataccgcgctgttgtaattctttgcggagtattcgtttaatccaagtagctaatgaggtgtcgccgtctgccttggctgcctcctcaagttgcgctctaaattcttctggtagtcgcatttggtatggtggcgatcgtttctctaatggtgttgacatggtaattacccttgattactatagttacatggtaattaccattgtacttaccattacacaaaaaacaacgccccgcactgtaggagcagtaacggggcgtctaaccaaaccgttaacaggagtaacgattatggctggaacacagcatacccaaactcaccctgactattccagtatctccacattggaggcgtgtcatggctga

SEQ ID NO: 490163 - DNA, 462 bp, Shigella sonnei; identical to SEQ ID NO: 488384

SEQ ID NO: 490164 - DNA, 333 bp, Shigella sonnei
atgtcggaccgcgcacacgcactcagacattccccacctggtcagggcttcaccccgacacccgcatcagtgcgtaagtgctcaatgtggcttccggttctcttccgcttcctcgtcgattcgctcgctacgctcggtcatcgacttgcggcgagcggaatgatcactcgcatgttgtccggtagttctgtttttttttttgctctggagttgtctgtagttgcagtggcagaggaacgggacgatatgctggttggtgagcgtttggaggaaatcggcaaactccccccccaccccgcgaagagtgtacaggaggagagagagatgccgtga

SEQ ID NO: 490165 - DNA, 543 bp, Shigella sonnei
atgaaccggaaacggctcgccatccggcgggcctttttcgttctacgctttaagaaaacaaagcgcaagttaaaaacaacgaatttgcacgcttttacgcttcacaacgtaaaaaaacatgttttccctcatccgcaaccccaaaaacgcgtcacaaagcttgtgagtgcgttgcatagctatgcacggaacaggttcgcgatcgatttcgcgcgttccgtgcatcaaacaggtcaaaatggcacgtttccctctctggaaacggtgaacggggcgcgaaattttttcgcgtgccgtgaggcgttggcggggtgtcggggcgcagccctgaccaggtggcgtttgtctgagtgcgcgtgcgcggtccgacaaatgcacatcctgtcccgactttttctccgaaatgctcgcagaggggcggcagttttgtgccgttcagccctccgcaggagcgcgctgtttctcgacgaaggagagaaacatataagtgcgcttatctctaatttcacgaatttgagagatgaaagcagagtcccgcactga

SEQ ID NO: 490166 - DNA, 1167 bp, Shigella sonnei; identical to SEQ ID NO: 487978

SEQ ID NO: 490167 - DNA, 804 bp, Shigella sonnei; identical to SEQ ID NO: 485810

SEQ ID NO: 490168 - DNA, 672 bp, Shigella sonnei; identical to SEQ ID NO: 490007

SEQ ID NO: 490169 - DNA, 366 bp, Shigella sonnei
atgctggaagcggccagagaggccagacgtcaggaaattgaagcatggcgcacagaacaggaggcgaagccgttcacgtttgaatggaacggtcgtatctggaatgctggccccaactcactgggccgcctgtccccggtagtcatgctggcaaaatctgtcacagcacaaacgcatatggcgtggggtgatgccgataatcagcaggtgaaactgtcgatgccggaactggaagaactggcggcagcaatggtgcaggcgcaggtcgatcgcaatgacgagatttatcgccgtcagcgtgaaatgaaagaggagctgagcagtctggatgatttggcttcaattcgggcgtttgacgttaagtaa

SEQ ID NO: 490170 - DNA, 303 bp, Shigella sonnei; identical to SEQ ID NO: 487011

SEQ ID NO: 490171 - DNA, 303 bp, Shigella sonnei
atggcggggccgtctgtgcgcgtgaatgaatggttcagcgcgtatgcgatggcgggtgtggcttacagccgtgtgtcgactttctccggggattatctccgcgtaactgacaacaaggggaaaacgcacgacgtgctgaccggaagtgatgacggtcgccacagcaacacgtctctggcgtggggagctggcgtgcagtttaacccgaccgaatccgtggccattgatattgcttatgaaggctccggcagtggcgactggcgcactgacggtttcatcgtgggtgtcggttataagttctga

SEQ ID NO: 490172 - DNA, 198 bp, Shigella sonnei
atgcaggtaagccagtggacaggccagaacggcgaaacgcggcagggctggcaggttatcgcagacagcgtgatcagtgcgcgaacagcgcgaccgggcggcaaaaaaggccagcaggggcaggccactgacgcactgaacagggcaaaacaacagtcggggaatgatgatccgtacggggataacataccgttttaa

SEQ ID NO: 490173 - DNA, 1458 bp, Shigella sonnei; identical to SEQ ID NO: 481963

SEQ ID NO: 490174 - DNA, 252 bp, Shigella sonnei
atgaaccgtttcatcattgctgacgcgagtaaatgtattggttgccgtacctgtgaagtggcgtgcgtggtttctcatcaggaaaatcaggactgtgcatcgctgaccccggaaacatttttaccgcgtatccatgtcattaaaggtgtgaacatttccacggcgacagtttgccgtcagtgtgaagatgcaccgtgcgctaacgtctgccgaatggtgctatcagccgtgataaagggtttgttcatgtga

SEQ ID NO: 490175 - DNA, 540 bp, Shigella sonnei
atgccggttatccagctcaggaaaacgtcgctgcaccgacagaggaataccgtcgagaatactggatatttcccttgctatacgcgacagcacgaaagtacagaatgcggtttccaccacttcagccgattctttggcatttttcagttcctgcgccgtcgcctgagcacgagtcaggcgatggcgctcaaattcaagtgttcctgggtgaagatctgcctcgctggccagccgcagttcttcaacctcccggcgcagcttttcgttctcaatttcagcatccctttcggcataccattttatgacggcggcagagtcataaagcacctcattacccttgccaccgcctcgcagaacgggcattccctgctcttgccagttctgaatggtacggatactcgcaccgaaaatatcagccagctgctttttgttgacttccattgttcattccacggacaaaaacagagaaaggaaacgacagaggccaaaaagcccgttttcagcatctgtcgtttcctttcttttcagggggtgttttaa

SEQ ID NO: 490176 - DNA, 165 bp, Shigella sonnei; identical to SEQ ID NO: 14507

SEQ ID NO: 490177 - DNA, 165 bp, Shigella sonnei; identical to SEQ ID NO: 14505

SEQ ID NO: 490178 - DNA, 396 bp, Shigella sonnei; identical to SEQ ID NO: 14503

SEQ ID NO: 490179 - DNA, 597 bp, Shigella sonnei; identical to SEQ ID NO: 14500

SEQ ID NO: 490180 - DNA, 711 bp, Shigella sonnei; identical to SEQ ID NO: 14499

SEQ ID NO: 490181 - DNA, 600 bp, Shigella sonnei
gtgactaatcagattatttacgacaggaaacggtctgatgtaatgattgaccttgaaacaatgggtactaacacatgtgctccaattgtttctatcggggcagtgtttttttctccagaaagtgaggaattaggtcctactttttatgtgccagtgaatctcagaagctcgatgttgaatggtggtatcgccgatggtgataccattttatggtggttgaaacagagcaaggaagccagagccgctatttgtactaatgatgcccttgatattaaggatgcactttttgaattatcacactttattacttgccatgcatgtaatttaaaaaaattgaaagtatggggaaatggagcaacgttcgataatgtaattttacgcggtgcttatgagcgcgttggcttagcctgtccgtgggaatattttaatgatcaggatgttcgaacaatcgttaatcttggtcagtttattggttttaatcctaaaaaagatatgccatttgatggcgaacgacacaatgccctggctgatgctattcatcaggctaaatatgtatccgcaattttctcccgtcttgtaaaagggcaaggagaatcgtaa

SEQ ID NO: 490182 - DNA, 420 bp, Shigella sonnei
atggcaaaggcttttacaccagaacagagggaagaactgaataaacaaattgtggaactcgtgcgcctgaatggacgaggaacggttaggcaacttgcggatgaaactggtattagccggtgtgctgttagtcgtttatcaagagagcttgctgccagcggtgatttgtatatctctggctccgggatatttctgtctgcacaagcacgcaaggactggcaaaacgcccgtaaaaaactatcaagagtaaagccgaagaaatcggtagtggttgatccagaccttatctggtcattacctgacggagaaatacgtcgttacgacaggcgcttgaacatgatttgtcacgattgtcggaagagcgaagttatgcagcgtgtgttggcgttttatcagggaaattttcaggaggtggcgtag

SEQ ID NO: 490183 - DNA, 291 bp, Shigella sonnei; identical to SEQ ID NO: 14496

SEQ ID NO: 490184 - DNA, 222 bp, Shigella sonnei; identical to SEQ ID NO: 14519

SEQ ID NO: 490185 - DNA, 327 bp, Shigella sonnei; identical to SEQ ID NO: 14494

SEQ ID NO: 490186 - DNA, 243 bp, Shigella sonnei; identical to SEQ ID NO: 14493

SEQ ID NO: 490187 - DNA, 204 bp, Shigella sonnei; identical to SEQ ID NO: 14492

SEQ ID NO: 490188 - DNA, 222 bp, Shigella sonnei; identical to SEQ ID NO: 14489

SEQ ID NO: 490189 - DNA, 228 bp, Shigella sonnei; identical to SEQ ID NO: 14488

SEQ ID NO: 490190 - DNA, 1122 bp, Shigella sonnei
atgcgcatcgccgggttagcttacccaggcaaaaaaataatagctatgttcaaaaccactaatattcatggcgcacaactcgtttgcgcagattctctgcaatttatcaaaaccatccctgataactcggtcaatttgattgcaacagacccaccatacttcggcgtaaaggctaacgcatgggataaccagtgggatagcgatgctgactttttggggtggattgacgaatttttggcagaattttggcggatattggcccctaatggcagcctgtatatgtttaccggctctcgccttgcgtcaaaaattgaattattaactcgcgaccgtttcaatgttctgaaccatatcatttgggctaaacccagtggtatgtggcgcggttgtcataaagaaagtttaagggcttattttcctgctactgaaagaatattatttgcagagcattacggcgcgtcaggttatgctaaaggtcagtcaggttatgcttcaaaatgtgcagatttaagaaaaaatattttttctccactaattgatgctttttcgctggctcgccgtcagttagatatatcagccgcagacattaattcagcgacaggaaagcagatgtgttcacactggttttcttattcgcagtggcggcttccatcattaattgattttaataaactatgcgaattatttcgcaggaaggcagattcactcggtgtcccgtgtccatatccttttaattttgattattcagaacatgaaaagcgttatagcgatctgaaattgcattatgaggaagtaaagaagcagtatgatgatttgaaggctcagtatgaaaatttacgccgtccatttcatgttactgctgatgtaccttataccgatgtatgggagtttcctcctgtgcaatattatcctggcaagcacccatgtgaaaaacctgcagcgatgatggaacatattataaagagtagttcacgccccggagatatcgttgccgatttctttatgggatcaggctcaactattaaagctgcgctgaagttaggacgtcaggcaataggtattgagattgagggcgaacgttatcttcagacagttgatgaagtgaaaaagttatttgagtaa

SEQ ID NO: 490191 - DNA, 273 bp, Shigella sonnei; identical to SEQ ID NO: 14486

SEQ ID NO: 490192 - DNA, 438 bp, Shigella sonnei
atgagcagggtaaccgcgattatctccgctctggttatttgcatcatcgtctgcctgtcgtgggctgttaatcattaccgtgataacgccatcgcctacaaagagcagcgcgataaagccacatccacaatcgctgatatgcagaagcgtcaacgtgacgtagcggaactcgatgccagatatacaaaggagcttgctgatgctaacgcgactatcgaaagcctccgtgctgatgtttctgctgggcgtaagcgcctgcaagtcgccgccacctgtgcaaagtcaacgaccggagccagcggcatgggcaatggagaaagcccaagacttacagcagatgctgaactcaattattaccgtctccgaagtgggatcgacaggataactgcgcaggttaactacttgcaggaatacatcaagacgcaatgcctgaattaa

SEQ ID NO: 490193 - DNA, 312 bp, Shigella sonnei; identical to SEQ ID NO: 489811

SEQ ID NO: 490194 - DNA, 861 bp, Shigella sonnei
atgaaagagttgcaaaaaattaattcaataatggaaaggttaagtgctcttgagcgtaagctggacgattgtggaaagctgtgtgttgaaaagcaaaatgagctttaccgggaattttttacaatcgtaagtgagctgatgccaattgttaataactgcctgatgacatccagattttttaatgtcgatgctactacatccagaaaattttctgtgaaaattcaagaaagagtttctggtagtgtgacaagagagatggctgaacagttggtggcaatgagcaataaaacaaaaagaaaaaaggcattgcttgtaacagcaaatcagctttcagggcgcgttgactttcaggtcagacagggtgggcgtgtactggtaaatgatgcgttcgttggacgtagctttagtccttactcgatggaatatgatgttgatgcagatgatcaggatatcagcatttcctggaaatctgagacagcagggattgtattaacagcagagttgttgagtgatgataaaaatgatgtccagcatcatttggacgaaaagaatcatatttctgaaatttgtatgaagccatgcagcggaatgactttattgtcacgcactcttgctgctggcttttctgcaccggaaaaacgtgtgcttctggtagtgcctgaagatgcagatattcgaccactgaatggctgtgatgttattagtgcaaaaacattgcatacccgcgtcattcctgtaccggatgtggtcattattgatgatgttgagaaatgcaagtctgtttcctcaactgccacaatcaagcgaattttacgttgtagcacgtcggctgttgtattccggaagcagttacataactaa

SEQ ID NO: 490195 - DNA, 450 bp, Shigella sonnei; identical to SEQ ID NO: 14533

SEQ ID NO: 490196 - DNA, 540 bp, Shigella sonnei; identical to SEQ ID NO: 490175

SEQ ID NO: 490197 - DNA, 543 bp, Shigella sonnei
gtgagtattaaatatattgtgtttgtctctgctttattaatttccaatacgggaaaagggggggggcagcgagttgttttcaatgtggatattgtaggttctgcctgtcatgtggtggtggatgcggatggtttcggcaacagtggtcgactgatattcgggacttaccgtaaatccagtggcgtgcctgtattgccacgtgactttgttgtgcgcttgtatgagtccggcgctacggttcaaggttgttcagcctttcgagcggggcaggtcgcaactctggattttggtaacccgggccaactggacgcaaagggcgtggtcactcgcggtgctggtgatggtattcgcgtggatgtacgggcggtggatacacaggcggattatcgcggacgtctgactcaggacagtcattcggtgaattacccggtggagtttgctgttaagggacagttccgttttcgtgcacagccggtgttcccggcgaacgtgaaggcaggggaatacacaggggcgctgacctttgtggtcacgtatcagtaa

SEQ ID NO: 490198 - DNA, 1026 bp, Shigella sonnei
  misc_feature (1004)..(1013): n is a, c, g, or t
gtgtgtgcaggaaagaaggtggttgcagagctggtttcgtctttgttttcccgtcgggccgcgcttgctgtatcagctgctttcgccagtaccacaggtgttgcaggtgaaaaactggatatgtcctttatccggggggggggcggggttaatccggaagtctgggcagcgctgaacggcagctatgcgccgggacgttatctggttgacctgtccctgaacgggaaggaggccgggaaacagatactggatgtgacaccacaggacagtgatgaactgtgcctgacagaggcatggctggcgaaggccgggatttacgtcagtgcagattactttcgtgagggatatgacgccacacggcagtgttatgtgctgacaaaagcgccgtcagtgaaggtggattttgatgtttccacccagagtctggcgctgtccattccccaaaaggggctggtgaagatgccggagaacgtggactgggattacgggactggtgcatttcgcgtgaactataacgcgaacgccaacatcggccggaataacacctcgacctttggctcggcagacctgaaggccaatatcgggcactgggtggtgaattcttctgcctcagccagcggtggtgacagcggggataactccgccacgataaacgcgttcacggccacccgggccatccgcgcactgagtgcggacctgacggtcgggaaaacatccaccgggagcagtctgctgggtagtacgggaacgtacggagtgtcgctgagccggaacaacagcatgaagccgggcaatctggggtataccccggtgttcagcggcattgcgaacggggcgtcgagggtgacactgacacagaacgggcggttgctgcattcggagatggtgccggcaggtccgttctccatcacggatgtgccgctgtacaccagtggggatgtgaccatgaaaatcaccggcgaggacggtcgtgagcagactcagctcttcccgttgtcggtgannnnnnnnnngccgggcagttaa

SEQ ID NO: 490199 - DNA, 1398 bp, Shigella sonnei
gtggcagtcggtttgtctgacgatgacagtgacctgaaaggcggcgtgtttgcggcgtcatacggttacggtctggatggactgacgctgcgcaccgggggcgtgtttaaccgggactggcagggtattagcgccggggctgttctggggctgagttatctgggggcagtgtctgctgacggggcttatgccatggcggaataccgtgacggcagccgcagcggaaataaggtgcagttgtcctggagtaaacaactggagatgacgaacaccggactgcgggtgagctggtcacggcagagtgaggaatatgaggacatgtcctcctttgacccgacagagctgtggtcgcagtcaaatcatggtcgccggccgaaggatgaatggaatgccggtatcagtcagtcggtgggggggctgttcagtctgtcggtgtccggctggcagcggagttattacccggcacagatgactggccgttatcggtacagcgatgacaatggtctggacacagggattaccggtaccctgagcacacagattaagggcgtcagtctgaatctgggctggtccggctcacggaattcgcagggagagaataacaggtcggcgtcagcctctatctcggtgccattcacgctgtttgagcgtcgctacagcagcagtacatcggtgagtaccagtaaaggcggtggcacgggcttcagcactggcgtgtccggctcgctgaatgaccgtttcagctatagcctgggcggcggtcgtgacagcggtggtggtgtgagtagttatctaaacgcgtcgtacagtggtgaccgggcttatctgaatggtgccctgaaccactcacagtccggcggaaccagtggttctgtatcagtcagcggttcggtactggtcgtcccgatggcgaaagacattatgttcagccgcacgaccggggacaccgtggccgtggtgaacgtgaaggatacaccgggtgtgaaggtgacgtccggtgacggacagactgacagtgacggcaacctggtggtaccgctgaacagctatgactggaacacggtgacgattgatgcgggcacactgccgctgagcaccgaactgacgaacaccagtcagaaggtggtgccgacggacaaggcggtggtctggatgccgtttgatgccctgaaagttaagcgttacctgctgcaggtgaagcagcgtgacggtgagtttgtgccagggggaacctgggcacgtgacagtaagaacacaccgctgggctttgtagctaacaatggtgtgctgatgattaacacggtggatgcgccgggtgatatcaccctaggccagtgccggatacctgcggccagactgcaggatactgagaaactacaggagattacgtgtgagtaa

SEQ ID NO: 490200 - DNA, 783 bp, Shigella sonnei
gtgagtaagcgtaacgcagtaacgacgtttttcactaaccaggtgacaaaagcactgggaatgacgctggcgctgatgatgagctgtcagagtgcggtggcttccctggcggcagaccagacccgctatatctttcgcggggacaaggatgcgctgaccatcacggtcaccaacaatgacaaggaacgtacctttggtggtcaggcatgggtggacaatatcgtggagaaagacacccgtccgacttttgtggtgacgccgtccttcttcaaggtgaagccgaatggtcagcagacactgcgtatcatcatggcctcggaccatctgccgaaggataaagagtcggtgtactggctgaacctgcaggatattccgccggctctggagggcagcggtattgcagtggcgctgcgcacgaaactgaaactgttctatcgcccgaaggcactgcttgaaggtcgcaagggggcagaagaaggcatcagtctgcagagccgcccggatggcaggaccatgctggtgaacaccacgccatacatttttgcgattggcagcctgctggacggaaacggaaagaaaattgccgcggataacgagacggcgcagaaactgctgatgttcatgccgggtgatgaagtacaggtgaagggaaatgtggtgaaagtggactctctgaatgattacggtgaactgcagacatggacgattaaccagaagaaatcagcaatatcgtctgcacagaagtcatctgatacagagggtaattcatctgataaaaaataa

SEQ ID NO: 490201 - DNA, 492 bp, Shigella sonnei
atgaagaaaacaatgatggtagtcgccttggccctgagtgcactcagtattcagtcaacacttgccgctgaatacagcgagaaagcgcagtatctgggggtggtgaatggccaggtggtgggtaacagcgtggtgaaggtaacccgcataccgacagatccggtgctgtaccggagtggtgacacgacgcctcttcccgaccgcctgaccatccgtaatgcagaatccagagcagcatctggtggcttggcgtatatcacggtgaaacaggtgctgccggataacggggaagcccgcatcaccctgaagacggccctgatggttgacggaaagaaagtggcaatcagcgccagacagcagggtgaggatatggtgataactttgccggaagcacagaagcagattgaattaagaacggatgcaccggcagagctggaagtacctgtcagttaccggggaaatctgcagatagcgctgcaggtggaggactga

SEQ ID NO: 490202 - DNA, 801 bp, Shigella sonnei
atgaaaaagactctgattgcactgactgtggctgcttctgccgcagtatccggctctgctatggcgtggaatccctctggccttggtggcaacggtggcacctttagcatgggtggtactctgagcaaagctgcgaaaacagtaccgtgggcagtggaaataggtgctccggtaacagcgcttgatgtgaccgttaaacctgaccagaagaatgttttcattcttttagaaaaagacataccgatacttggcattcgtagcaacccgactggtttcatgggggaaaagggtattgccccacaaatcgattataataaagccgctgatgtggattatatggataaggggaatttacctacgcaagttaatgtcacatcatctgatggtaagaaaattggtactctggcgttcgtaatgcgagttgcctgtcaggccagcgaaaagaggggtgaaggcgacgacaagttagagagtaacatgctattcgccagttcaaaaggtaaagctttctttggtggagttgccaaagatgacaaaggtgtctggagtgacgccgctgcctatacttgggctacccacctttttagcagtattgctgactcgtgggatactaaaattccttacacggcgggcgatacagatgaaaccgacttcagtaatggagacaagctttaccgaggttactatgcatccggccttgccaaggatatccccatggaactagttcttgatcagactataacgtctgctaccccagttccgtggaaagcttctctgccaattgttatctcctacatgtaa

SEQ ID NO: 490203 - DNA, 798 bp, Shigella sonnei
atgaaaataacgcatcattataaattcttcctttctgctgttattttggtaacaatattttattcggcagtgccatatgcaaatattcttgatggcggcgaaattcagtttaatggctatgttactgatgaagcacccaaatgggcctggcagataagttctcccgaccagacctggtctgtggatactgccgatgcccgtacagagaacgggcaactggtttttaatttgcatgataaaggggctctgccatttctggagggacatctgcatgatgtggctgagcgcggtggtcccggattcacgccatttattactttcagcagtaacggacagccttttactgtgacggaaggaaatggtgcctcagcacagcactttcgcgcctctgtcccggtgcgtgacccggagacggggaacgtgtcgggacagcttttttttaccctgaatcagggaatggcggtcagtaccggcagacaggacgacggggcatccgtaccggctggcatgtcgctggtcagtggacagagtgtgacggatgtacagccgggaagtctgccacaggggctgaaagcccgactctcttccctgttactgatgaatcagaattttggcaatggcatgaatgcggtggataacggacaggttatcaaccaggggatactgactgacggtcgggtgatggatctggctgcggcatatgcctctgaggtgtcggattttgaactgcggttgccggcagagggtacacctgcagcatggcaggcggggctgaatgtgacggttatagtacagtga

SEQ ID NO: 490204 - DNA, 753 bp, Shigella sonnei; identical to SEQ ID NO: 477648

SEQ ID NO: 490205 - DNA, 1227 bp, Shigella sonnei
atgtcaggaaccataccgaaaatcaaaacaggtgaaaatgttctgtctgcagccattcagcgcattgaatggctatttggaacgtttccttctgtctgcttgtccttttctggtggtaaggattctaccgtgcttttccatcttgtgtccgaagtggcccgcaaaaagaggcgtcgtttttcggtattgttcattgactgggaagcacaatatcaatgcaccattacgcatattcagaagatgcagaagatgtacctggatgtgacggacaggttttactgggtggcccttcccctgactacggtaaacggtgtctctcagtttcagccggagtggatatgctgggagcctggtgtgacctgggttcgccatccaccggaatatgctattacggatatggcgtattttcccttttaccgatatgccatgacctttgaggaatttatcccggcgttttcctcctggtttgccagggataaatacctggtggctgttctgaccggagtccgggcagatgagtccctcaaccgctttatgggactggtatcccgtcgcaaacagagatatgccgatgataaaccctggactacggcatcacctgaagggttttattacaccatgtatccgttgtatgactggaaagcccgtgatatctggatatataacgccagaacccgagctatctacaatcccctgtatgacctgatgcaccgtgcctgtgtgccgttacgcaacatgcgtgtctgtgagccttttggtcctgaacagcgtaaggggctgtggctttatcatgttctggagccggaaacctgggccaggatgtgtgagcgggtgtcgggtgctgccagcggggcgctttatgccaatgagagcggtgcctattttgccctgcgtaagcgtatcacaaagcctcctcatcatacctggcgtagctatgcgatgttcctgctggatgtgatgccggaaagaacggcagaacattaccgtaataaaattgctgtctacctgcgctggtatcagacgcggggcttcccggatgacatcccggatgaacaggagaatgacctggggagccgggatatcccgtcctggcgacgtatctgtaagacactcataaagaatgatttctggtgccggactctctccttcagtccgaacaaaccccggcactatgaacgttacctgcagcgtatgaaggaaaggaggaaggaatgggggattctgtga

SEQ ID NO: 490206 - DNA, 639 bp, Shigella sonnei; identical to SEQ ID NO: 475208

SEQ ID NO: 490207 - DNA, 885 bp, Shigella sonnei
atgaaaaaacagatatttattaataataaacctcctgtagtcccttactcagggacgcacgcgaaaatatttaaatacattgaaatccctctgccgtttttctactttatctatacatcaggcgaaccattccacatatctgtccaaaatactgttatttatgtatcaaaatacaatggtatatttattaataaattagttcctttttctcttttatttgacagggatatatctgttcttcaaagaagagatatttgtgttgtgcgatttacgtcagaggaaataagtgaacataacgttttatttgatcatgacattgaacgattaaaaaaaatttccaaagctcagcttatatctcccgattatgttttgattgatttttctagtggggggggagatgaaccctatgcaatgtcctggttaatatctcagtgtgctcatcagtgcactgataataaaaagacggagacagatgccatttacgataaagttcggagttcttatttgctttcatgtattctgaaaaaaaacaaaaatgttgggcttattcttcatgcaccatcatttgtttctgtgtctgaaaaaatcgccagaattgtgatggcaaattactcccgtaactggagtaattccgagttggccagtgcggttttaatgagtgaatcttctttaaaaagaagaatgtacaaagaggtcggttctataagtacatttgtacataaaataaagcttacagaagctatcaggaaattacgaaggacaaatactcccatttctgtcatatcatctgagttaggttacagttcaccatcgtatttttctaaagttttctttaaatatttaaagacataccctcaaaacataaggaagaaaaatggtcggtaa

SEQ ID NO: 490208 - DNA, 1659 bp, Shigella sonnei
atgaataactgcgagtttaacggatttgttatgcctggtggctggactgacagggggcgttatgcttatggaatgttctggcaatatcaaaacaatgaacgagccatccactcaataatgatgagtaataagggcgatgatttgcgctctgtgttctatgttgatggcgctgctttccctgtttttgcgtttatcgaagatggcctgtcaatatccgcacctggtgctgatctcgttgttaatgatacgacctataagtttggggcaacaaatccggcgactgaatgtatcgcggcggacgttatccttgattttaagagtgggcgtggtttttatgagtctcattcgttaatcgttaacgataacttgtcgtgcaaaaaactttttgccacagacgaaattgtagcgcgtggtggtaatcagattcgaatgataggtggggagtatggtgcattatggcgtaatgatggcgctaaaacttacctgctgcttaccaatcaaggtgatgtttatggtggctggaatacattaagaccgtttgctattgataacgcaaccggcgaactggttattggaaccaaactgtccgcaagtctgaacggtaatgcattaacagcaacaaagctgcaaacgccaagactggtttctggtgttgagtttgatggttccaaagatattactttaaccgccgcgcatgtggctgcttttgccagaagggcaacggatacgtatgccgatgcggatggtggcgttccctggaatgccgaatcaggcgcttacaatgtcacccgctctggcaacagctatattctggttaacttctataccggagtcggaagttgccggaccctgcagatgaaggcgcattacagaaatggtggtctgttctaccgttcttcaagagacggttatggttttgaggaagactgggcagaagtttatacttcgaaaaatcttccaccagaaagctacccagtcggtgcaccaatcccgtggccatcagataccgttccgtctggttatgccctgatgcaggggcagacttttgacaaatctgcttacccgaaacttgcagccgcttatccgtcaggtgtgatccctgatatgcgtggctggatgattaagggcaagcccgccagtgatcgagccgtattgtctcaggaacaggacggcattaaatcacacacccacagcgccagcgtatccagtacggatttggggacgaaaaccacatcgtcgtttgattacggcactaaatccacgaataacactggtgcgcatacccatagtttaagtggcagcacgaatgcagctggtaatcacagccatagagatggccgtcgatttaaccccagtgtttttaaagatacttatcaatatggttatacaagctcaggtcaaaatacctggggtgtacaaggctcagtaggtatgtctacggggtggttagctaataccagtacagatggtaatcatagccactcactgtccggcacagcagcatctgcaggtgcacacgcgcatactgtcggtattggtgctcatacgcactccgttgcgattggttcacatggacacaccatcaccgttaacgctgctggtaacgcggaaaacaccgtcaaaaacatcgcatttaactatattgtgaggcttgcataa

SEQ ID NO: 490209 - DNA, 576 bp, Shigella sonnei
atggcattcagaatgagtgaacaaccacggaccataaaaatttataatctgctggccggaactaatgaatttattggtgaaggtgacgcatacattccgcctcatacaggtctgccagcaaacagtaccgatattgcaccgccagatattccggctggcttcgtggctgttttcaacagtgatgatgcatcgtggcatcttgttgaagaccatcggggtaaaacagtttatgacgtggcatcaggggacgcgttatttatttctgaactcggtccgttaccggaaaatgttacctggttatcgccggaaggggaatatcagaagtggaacggcacagcctgggtgaaagatgcagaagcagaaaaactattccggatccgggaggcggaagaaacaaaaaacagcctgatgcaggtagccagtgagcatattgcgccgcttcaggatgcggtagatcttgagatcgcaacggaggaagagaaatcgttactggccgcatggaagacatatcgggtgttgttgaatcgtgttgatacatcactatctccagatatcgagtggccaagtcaaccataa

SEQ ID NO: 490210 - DNA, 1167 bp, Shigella sonnei
atgtctttgaaaaagctattgcaagattgtgttacgagaggtcaagaaatgacccaagcaattgctatcgctcaattcggtgatgatagtcctgaagctcggcgtatcacccgccgatggggtattactgaagtagcagatttaattggtgtaactcctcaagcaattagagatgctgagaagagcgggcgtttacctgcacctgactttgaaatgagaggaagaattgaacgtcgtgctggttataccatagatcaaatcaacagtatgcgagcagtttttggcaacccaaaccaacgaccacaagataaaaaccctgttgttcttgccgttatgtcacacaaaggcggcgtttataaaacatcgtctgcggtacatcaagctcaatggttagcattacaaggtcatcgtgttcttttggttgaaggtaacgatcctcaaggtacagcctctatgtatcacggttatgttcctgatttacatatccatgccgaggatactttactgccattttacttaggagaacgcgataacgctgaatatgctataaagccaacatgttggcctgggctagacattatccctagctgcctagctttacatcgtatagaaacagatctcatgcaatatcatgctcagggtaaattgcctcatcctccacaccttatgctgcgcgcagctattgaatcagtttgggataactacgatgttatcgttatagatagtgctccgaacctcggtacaggaaccattaacgttgtttgtgccgctgacgttattgttgttgctacacctgcagaattatttgattacgcttctgttctacagtttttcacaatgcttctcgatctattggaaagcgttgacctaggtggatttgagccaaccgttcgcttacttctgactaaatatagtctcactacagggaatcaatcacgatggatggaagaacaaataagaaatacatggggatcaatggtattacgtcaggttgtacgcgttaccgatgaagtaggtaaaggccagataaaaatgagaacagtatttgaacaagcagcaaaccaacgttcaacattgaatgcatggagaaatgctgtttctatatgggaccctgtttgcagagaaatttttgatgatctaataaaacctcgctgggagaacgaataa

SEQ ID NO: 490211 - DNA, 174 bp, Shigella sonnei
atggacacctcacttgctcatgagaatgcccgcctgcgggcactgttgcagacgcaacaggacaccatccgccagatggctgaatacaaccgcctgctctcacagcggatggcggcttatgcttccgaaatcaaccgactgaaggcgctggttgcgaaactgcagcgtatgtag

SEQ ID NO: 490212 - DNA, 189 bp, Shigella sonnei; identical to SEQ ID NO: 463227

SEQ ID NO: 490213 - DNA, 189 bp, Shigella sonnei; identical to SEQ ID NO: 487197

SEQ ID NO: 490214 - DNA, 633 bp, Shigella sonnei; identical to SEQ ID NO: 489759

SEQ ID NO: 490215 - DNA, 1449 bp, Shigella sonnei
  misc_feature (1418)..(1427): n is a, c, g, or t
ttgggagctggtgaagatggaatggatgcgtggtatataacttcttccaacccctctcatgcatctagaactaagctacggattaactctgatattatgattagcgcaggtcatggtggtgctggtgataataatgatggtaatagttgtggcggtaatggtggtgactctattaccggatctgacttgtctataatcaatcaaggcatgattcttggtggtagcggcggtagcggtgctgaccataacggtgatggtggtgaggctgttacaggagacaatctgtttataataaatggagaaattatttcaggtggacatggtggcgatagttatagtgatagtgatggggggaatggaggtgatgccgtcacaggagtcaatctacccataatcaacaaagggactatttccggtggtaatggaggtaacaattatggtgagggtgatggcggtaatggaggtgatgccatcacaggaagcagcctctctgtaatcaataagggcacgttcgctggaggcaacggaggtgctgcttacggttatggttatgatggctacggtggtaatgctatcacaggagataacctgtctataatcaacaatggagctattttaggcggtaatggtggacattggggggatgctataaatggtagcaatatgaccattgctaatagcggatatataatttcaggtaaagaagatgatggaacacaaaatgtagtaggtaatgctatccacatcactggtggaaacaattcattaatactccatgaaggttctgtcattactggtgatgtacaggttaacaattcatccattctgaaaattatcaacaatgattacactgggaccacaccaactattgaaggtgatttatgtgctggtgattgtacaactgtttcactatcaggtaacaaattcactgtttcaggtgacgtttcttttggtgagaacagttctttaaatttagctggaatcagtagtctggaagcttctggaaatatgtcatttggcaacaatgtaaaagtggaagctattataaataactgggcgcagaaggactataaactgctaagtgcagataaagggataacaggtttcagtgtttctaatatatctatcatcaatccgttactcactactggtgctattgactatacaaaaagctatatcagtgaccagaataaattgatctacggtttgagctggaatgatacagatggcgacagtcatggagagttcaatctgaaagaaaacgctgaacttactgttagtactattctggcagataatctcagccatcataatataaatagctgggacggaaaatccctaacaaaatcaggggagggaactctcattttggaggaaaaaaatacctactctggtttcaccaacatcaatgcaggcannnnnnnnnnttctaaaaatggggacagttga

SEQ ID NO: 490216 - DNA, 1626 bp, Shigella sonnei
atgacacgtaccgctggtgttattgttaataaaggtgctaccttgaatttttcaggcatgaaccaaactgttaacactttattaaatagtgggactgtgctaatcaataatattaatgccccttttttgcctgaccccgtcattgtcacaggtaacatgactctggagaaaaacggtcatgttattctcaataatagttcgtcaaatgtcggtcagacctatgttcagaaaggtaattggcatggaaagggcggaatattatctttgggcgcggttctcggcaatgacaacagtaaaactgaccggctggaaattgcaggccatgcgtctggtattacctatgttgcagtgacaaatgagggaggctctggagataaaactcttgaaggtgttcaaattatttcgacagattcttctgataagaatgcttttattcagaaaggccgtattgttgctggtagttatgactatcgcctgaaacagggcactgtatctggactgaataccaataagtggtatctaactagtcagatggataatcaagaatcaaaacagatgagcaatcaagagtctactcaaatgagtagtcgccgagctagttcacagcttgtatcttcacttaatttgggtgaaggtagtattcacacatggcgccctgaagctggcagttatattgctaacctgatagcaatgaacacgatgtttagtccttctctctatgaccgacacggtagcactattgttgatcctactacaggtcagctcagcgaaaccaccatgtggattcgtactgttggtggacataatgagcataatttagctgatagacaattaaaaaccacagctaacaggatggtttatcagattggtggagatattttgaagacaaacttcactgatcatgatggcttgcatgtgggtattatgggagcttatggatatcaggatagcaaaactcataataagtatactagttatagttcacgaggaactgtgagcggttatactgccggtttgtacagttcttggtttcagaatgaaaaagaacgaacaggtctatatatggatgcttggttgcagtacggttggtttaataatacagtcaaaggagatgggttaactggtgagaaatattccagcaaaggaataacaggagctttggaagctggctatatctacccaaccatacgctggactgctcataataatattgacaacgcattgtatctcaatccacaagtccagataactaggcatggggtaaaagcaaacgactatattgaacacaatggcactatggtcacatcctctggggtcaataatattcaagcaaaattgggattgcgtacatccttaattagtcagagttgtatcgataaggagactcttcgtaagttcgaaccatttttggaagtgaattggaaatggagctcaaagcaatatggtgtaattatgaatggcatgtcaaatcaccagataggcaaccgtaatgtgattgaactcaaaactggtgtgggggggcgtcttgcagataacctaagcatctggggaaacgtatctcagcaattgggtaataacagttacagagacacccaaggtattttgggtgtgaaatataccttctga

SEQ ID NO: 490217 - DNA, 594 bp, Shigella sonnei
gtgtcccttaattacgtaagcgttgataaaagagtcggatgcagcccagtttcaccatcgccaggtaatttctcgccgttttgtcgtaacgcgtggcgatgcggcgatattctttcagccgcccaaagcaccgttcaacgacattacgattgcagtacgcatcacgatcaagctgtgcacgtccatccgatgccattttctcatttgactttcgggggattactgcctttataccgttatttttcagctcgttgcgcaatgcgcgccctgaatacgctttatcagccagtaccgcatgtccacggcgtttcatgctgccgttctgacgctgaacgccaatcccgtccagaagtcgttgcgcgaactggctttcatgagcttgtccggggcttagcacgatatttaacgggaggccacttccgtctgttgccagatggattttggtgccaaaaccgccgcgagagcgacccggcccattatctccgtcgatatcgggatgtttttttgagcaccggcggcacatttcagcgcccggatattactgccatccagcgcggtggcagaccagtcaataaagccgtttgcatcaagtag

SEQ ID NO: 490218 - DNA, 450 bp, Shigella sonnei
atggcttgctacgaccttcccgatgaggcatggaccatcatcaagcccctgttacctcctgaacccgccacaccacgggccggacgcccatgggctgagcaccgtaaaatcatcaatggcatgttctgggtgttatgttccggtgcaccatggcgcgatttacccgaacgatatgggtcatggaaaactgtttataaccgctttaaccgatggtcaaagtcaggcgtgattaatattattttcaacaggttgctttcgctacttgatgcaaacggctttattgactggtctgccaccgcgctggatggcagtaatatccgggcgctgaaatgtgccgccggtgctcaaaaaaacatcccgatatcgacggagataatgggccgggtcgctctcgcggcggttttggcaccaaaatccatctggcaacagacggaagtggcctcccgttaa

SEQ ID NO: 490219 - DNA, 411 bp, Shigella sonnei; identical to SEQ ID NO: 466743

SEQ ID NO: 490220 - DNA, 150 bp, Shigella sonnei; identical to SEQ ID NO: 485699

SEQ ID NO: 490221 - DNA, 189 bp, Shigella sonnei; identical to SEQ ID NO: 463227

SEQ ID NO: 490222 - DNA, 267 bp, Shigella sonnei
atgcttacacaaactatattcccttgccttccacaaaaacaagaaaatatcatccttgaagtatcaaatcctgtattattatcttctactgttactacagatggatatactgttttcaataaaaaagcagctatatacgaattacaaatacctgctgccaaccggacgaaaacgttgaaattcactgctacagaaatgcaatggttgacaaagataaatgaagtaggaattgttgaaaaacaaagccaacggcattctaatatctga

SEQ ID NO: 490223 - DNA, 288 bp, Shigella sonnei; identical to SEQ ID NO: 468183

SEQ ID NO: 490224 - DNA, 645 bp, Shigella sonnei
ttgaataaacgcgcattcttcggtgcttttttaatcttttggggatttaaattcctatcgatggacatgaatgcaggctatataagagcagcgcgcatccacttacccaatgcggttgagaaaatagccttcgatcgctttcatgtggcgaaacaaccgggtgaggtggtggataaaacccgccagaatgaacatccgcatcttcctgttgaaagtcgtcgtcaggcaaagggaactcgcttcctgtggcagcacagcaataaatggatgaccgaatccaggcaggaaaagctgatatggctgcgtgcgcagatgaagctgacgagcctgtgctgggcgctgaaagaactggcaaaggatatctggagcagaccatggagcgaggaaagacgcaacgactggcagagatggctgtcgctggcggccaacagtgacgtccccatgatgaagaatgtggctaaaacgatagggaaaaggttgtacggtatcctgaacgccatgcgccatggcgtatcaaacggaaatgcggaagcactgaacagcaagatcaggctgctgagaataaaagccaagggctaccgcaaccgggagcgctttaagctgggagtgatgttccactatgggaaactgaatatggcgttctaa

SEQ ID NO: 490225 - DNA, 201 bp, Shigella sonnei
atgactgccgcagcattgctggcggaaatgcctgaatcgagcagcctctcgagacgtgaaatcagcgcacttgtcggtgttgctcaggtaaaccgggactcgggaactctgcgcggtcgacgaaccattttcggtgattgtgctggggaagaacagctctgtacatggcggcgcttgaggcaccccggtttaatctggtga

SEQ ID NO: 490226 - DNA, 123 bp, Shigella sonnei; identical to SEQ ID NO: 474273

SEQ ID NO: 490227 - DNA, 192 bp, Shigella sonnei
atgaatatcagcacagaaacccgcgaaattctgcgcaattacaaagccgtgattaatgcgcggcgtcgtgagatggggcagaaaccgctcaccactgcgcagattgttgatgaaatctgcgattttgtggtgaatcagcaggcggttttcctcggtggtcactatatccttcagggcagcagaaacaggtga

SEQ ID NO: 490228 - DNA, 207 bp, Shigella sonnei
atgagtgtcggcattcgacgagataaacagccagccgtttttctgatcctcccggacaccacgcatccagtcacggatggtgaagggctcaccgttatgctcaatcccctgcaggtaacggatggctttcacatagttggtcagcacagcacggatggaaatcgccgttttctcaattttctcttccaccaggttggccgccggtga

SEQ ID NO: 490229 - DNA, 180 bp, Shigella sonnei
atgctaagattgtatctgaatgcccattttgtaaagctaaaagcaatcctgacaaaccatcgtcatttttggctgccaaaagtaattctaacgtattgtctgaaaggtcagatagttgtacgactcttgttactttttggattagctcagtcaatcccatacgcatcgcgtgataaataa

SEQ ID NO: 490230 - DNA, 297 bp, Shigella sonnei; identical to SEQ ID NO: 484519

SEQ ID NO: 490231 - DNA, 1254 bp, Shigella sonnei; identical to SEQ ID NO: 487979

SEQ ID NO: 490232 - DNA, 1167 bp, Shigella sonnei; identical to SEQ ID NO: 487978

SEQ ID NO: 490233 - DNA, 198 bp, Shigella sonnei; identical to SEQ ID NO: 462554

SEQ ID NO: 490234 - DNA, 276 bp, Shigella sonnei; identical to SEQ ID NO: 486783

SEQ ID NO: 490235 - DNA, 501 bp, Shigella sonnei; identical to SEQ ID NO: 381174

SEQ ID NO: 490236 - DNA, 255 bp, Shigella sonnei
gtgaatgacctgtttgcctggcttgaagagcaggagccgtgctgtccgcccgacgggccattaaataaggcgattaactatattctgaaccggcgcgatgaactgagctgcttcctgggtgacggagcggtgcccctggacaacaatatctgcgagcgtgccattcgcccggttgttatgggacggaaagcgtggctgttcgccggttcactgatggccggaaaccgggcggcacagataatgagccttctgtaa

SEQ ID NO: 490237 - DNA, 255 bp, Shigella sonnei
gtgacagacccgttcaatttcaagcgcgcggagcaggtggccccattcgctgactttcatggcggggatacgtacccgcttctgctcactgcagcgtctggcgatatgaccgcccatcgccaggacgtccgggttaatctcatccggtgccagttcctggcgtctgaagcgggtatggcggtgcaggggtttgttctcccgcaggcactcttctcgcagacgctttacatactcggcggttgcgaagataattga

SEQ ID NO: 490238 - DNA, 441 bp, Shigella sonnei
atggtcaccgggatggtggaagatctgcagagtctggtcggcggaacggtggtcaggcgtaaggtttacgcccgttttctggatgcggtgaatttcgtcaacggaaacagtgatgccgatccggagcaggaggtgatcagccgctggcgcgtcgagcagtgcagcgaactgagcgcggtcagtgcctcctttgtgttgtccacgccgacggaaacggatggtgctgtttttccggggcgcatcatgctggccaacacctgcacctggacctatcgcggtgatgagtgcggttatagcggtccggcggtcgcggatgaatatgaccagccgacgtccgatatcacgaaggataaatgcagcaaatgcctgagtggctgtaagttccgcaataacgtcggcaactttggcggcttcctttccattaacaaactttcgcagtaa

SEQ ID NO: 490239 - DNA, 186 bp, Shigella sonnei; identical to SEQ ID NO: 487770

SEQ ID NO: 490240 - DNA, 189 bp, Shigella sonnei; identical to SEQ ID NO: 463227

SEQ ID NO: 490241 - DNA, 303 bp, Shigella sonnei; identical to SEQ ID NO: 486153

SEQ ID NO: 490242 - DNA, 366 bp, Shigella sonnei; identical to SEQ ID NO: 488139

SEQ ID NO: 490243 - DNA, 138 bp, Shigella sonnei
atgccgaaagttattattttcagtaaaacgtcacaaaaactcaatttattccaacttacttctgtagttgatttgacagttgacatccatgatgagtcatttctttcatggttagttatgtttgatgtctgcatttga

SEQ ID NO: 490244 - DNA, 174 bp, Shigella sonnei
atgcagcgtgtggccgggaaaaaccgttaccccattgatgtggtgaaaatcccgatggcggtgccgctgaccacggcgtttaaacagaatattgagcagatacggcgtgaacgtcttccgaaagagctgggctatgcgctgcagcatcaactgaggatggtaataaagcgatga

SEQ ID NO: 490245 - DNA, 123 bp, Shigella sonnei
atgttgatcaagcgactggcatcatcgctgaaagcggtgaaacccgacagtagcgtggtgcgtgaagcgcaggactggctgtgcgacagaaaacttgtggatatcacagatattctccggtga

SEQ ID NO: 490246 - DNA, 255 bp, Shigella sonnei
gtggcagacccgctcaatttcaagcgcgcggagcaggtggccccattcgctgactttcatagcggggatacgcacccgcttctgctcactgcagcgtctggcgatatggccgctcatcgccaggacgtccgggttaatctcatcctgtgccagctcctgacgtctgaagcgggtatggcggtgcaggggtttattctcccgcaggcactcttcacgcagacgctttacatactcggcggttgcgaagataattga

SEQ ID NO: 490247 - DNA, 261 bp, Shigella sonnei
gtggggaatctctaccggctgatgcgcggctatgcggaaggtggttatgtgggcggtgccggaagtccggcgcagatgcggcgggctgaaggcattaattttaatcagaacaatcacgtggtgattcagaacgacggtacgaatggtctgccaggtccacagatgatgaaggccgtgtatgacatggcccgcaagggtgcccgtgatgaaattcagacacagatgcgtgatggtggcctgttctccggaggtggacgatga

SEQ ID NO: 490248 - DNA, 261 bp, Shigella sonnei
gtggggaatctctaccggctgatgcgcggctatgccaccggcggttatgtcggtacaccgggcagcatggcagacagccggtcgcaggcgtccgggacgtttgagcagaataaccatgtggtgattaacaacgacggcacgaacggtcagatagggccacaggcactgaaggctgtttatgacgtagcccgtaaggcggcaatggatgttgtgaccgggcagatgcgcgatggtggtctgttctccggaggtggacgatga

SEQ ID NO: 490249 - DNA, 525 bp, Shigella sonnei; identical to SEQ ID NO: 488160

SEQ ID NO: 490250 - DNA, 228 bp, Shigella sonnei; identical to SEQ ID NO: 488164

SEQ ID NO: 490251 - DNA, 618 bp, Shigella sonnei; identical to SEQ ID NO: 484991

SEQ ID NO: 490252 - DNA, 414 bp, Shigella sonnei; identical to SEQ ID NO: 488202

SEQ ID NO: 490253 - DNA, 465 bp, Shigella sonnei; identical to SEQ ID NO: 483873

SEQ ID NO: 490254 - DNA, 588 bp, Shigella sonnei
atggcggtctttcagggcgctgaaactgtagcggaacggcgcaccatcatccggcatcaccacattactgcggttataggtccacaccttatccgacggtcggtcctgcacgaacgtcagcgtctgcccgttccataccggcatacagcgcatcgcagagcagaaatcactgagcacatcccacgccttgcgctgtgtggtcaggtacgcattacaggtgatgcgcggctccgtgccgccaaaaccgtccggcaccgactgatcgcaatgctggccgatgacatacagcgcccatttgtccacatccgccgcaccaagacgtttccccatgccgtagcgcggatgggtcagcatatcccacagacaccaggccatgttgttgctgtatgctggcttaaacgttccgtcccagataccgctgtattgccgcgtctgcgggttatagttcgacggcacctgcagaatgcgcccgcgaagatgataattacggctcacctgctggctgccgaactgctccgaatccacctgtacgccgaccagtgccgtattcgggtagcactgtttcacatcgatgatttcggtgtatga

SEQ ID NO: 490255 - DNA, 549 bp, Shigella sonnei; identical to SEQ ID NO: 488236

SEQ ID NO: 490256 - DNA, 435 bp, Shigella sonnei
atggacgcctcacgggccgatgatgcagctgctgtctcagagtctgccgcagctgaggcgctctgttccgctgccgtttcagaagacctggcattcgtctcggacgtttttgccgccttcacggaatttcctgccgccgttgccgaggaggctgcactgctggcgcttgtggaggcgttcgtttctgatgattttgccgcctctttggaggccgccgcatctctggctgaagtggcggcttctgacgctttcgtcgtcgcagtggatgcagaagtggctgctgatttttgtgacgctgcagcattcgtttctgacgttttcgccgcaccggcactggtggccgccgcgctttttgaggactctgcagcggcagcactttttgatgcttcagtggcctttgttgatgccgttcctgcgctggaagacgcctcctga

SEQ ID NO: 490257 - DNA, 276 bp, Shigella sonnei; identical to SEQ ID NO: 484087

SEQ ID NO: 490258 - DNA, 543 bp, Shigella sonnei
gtgaaagaaagcaatcagcgatggtgctctgacgggttcgagttctgctgtgataacggagagagactgcgtgtcacgttcgcgctggactgctgtgatcgtgaggcactgcactgggcggtgactaccggcggcttcaacagtgaaacagtacaggacgtcatgctgggagcggtggaacgccgcttcggcaacgatcttccgtcgtctccagtggagtggctgacggataatggttcatgctaccgggctaatgaaacacgccagttcgcccggatgttgggacttgaaccgaagaacacggcggtgcggagtccggagagtaacggaatagcagagagcttcgtgaaaacgataaagcgtgactacatcagtatcatgcccaaaccagacgggttaacggcagcaaagaaccttgcagaggcgttcgagcattataacgaatggcatccgcatagtgcgctgggttatcgctcgccacgggaatatctgcggcagcaagccagtaatgggttaagtgataacaggtgtctggaaatatag

SEQ ID NO: 490259 - DNA, 381 bp, Shigella sonnei
atgctgggagcggtggaacgccgcttcggcaacgatcttccgtcgtctccagtggagtggctgacggataatggttcatgctaccgggctaatgaaacacggcagtttgcccggatgttggggcttgaaccgaagagcacggcggtgcggagtccggagagtaacggcatagcagagagcttcgtgaaaacgataaagcgtgactacatcagtgtcatgcccaaaccagacgggttaacggcagcaaagaaccttgcagaggcgttcgagcattataacgaatggcatccgcatagtgcactgggttatcgctcgccacgggaatatctacggcagcaagccagtaatgggttaagtgataacaggtgtctggaaatatag

SEQ ID NO: 490260 - DNA, 327 bp, Shigella sonnei; identical to SEQ ID NO: 485848

SEQ ID NO: 490261 - DNA, 165 bp, Shigella sonnei; identical to SEQ ID NO: 14507

SEQ ID NO: 490262 - DNA, 234 bp, Shigella sonnei; identical to SEQ ID NO: 27149

SEQ ID NO: 490263 - DNA, 165 bp, Shigella sonnei; identical to SEQ ID NO: 14505

SEQ ID NO: 490264 - DNA, 396 bp, Shigella sonnei; identical to SEQ ID NO: 14503

SEQ ID NO: 490265 - DNA, 327 bp, Shigella sonnei; identical to SEQ ID NO: 14502

SEQ ID NO: 490266 - DNA, 3996 bp, Shigella sonnei
atgacattaaacgatttctatgcggatcgctttggcagcgatccgttctcgctaattgaagcagcacgggatgaactaaccgagctggcacagatggctggtatcaactggcctgcctgttccgacaacatccaactcaaccctcgcgggggggttgagcgttactcttcatacaataaaacatctccagaagctctcgaaaagagcctgaaaggacgcgtagaaatttactccaggctggaacacagcaaagggattgattacccgttcattaacttcgtccataaaggcagcgatgctggctcatggagcggtttctccttcctgttttctgaatatcgccgtgagcaacaacggaataatgcgaccgtggtcgcacaaccggaagaagaacgggaaagaatagaacgtcaggccgaagcacgtcgtcgccgtgaagaacaaaaacgaattaatgacctgaaaaacaaccaaatggaccatgaacgtttgctgggatggctggcattccacagcgcgtgggaacatgctccggctgaagacggctcatggccatatgcgattaaaaaaggtattcgtgacgtttttagttcatgtgatgtgcgtcgcgtgaccagtcacgacagtgcgaaatggagccgggggccaaccacatatatggctatccctctggctcacctggacagtcgttatgatggtcgtattgtgggttggcagcgaatcgacaaacaaggtgggaaataccagaccagcgcagtaaccagcggcgatttcgtcggtgcctgctttgttatcggtgagctgaaaggggcgcaaaacatcgctgttacagaaggttttgctactggtgcatccatctggcttgccacgaaaaaagataaacgctttgacgctgtggttgtcgctgtatccgctaacaacatggttcatgttgtggaacaactggtaaacatgtacccggcggcaaaaatcacctgcgcactggataatgaccggaaatctgccacagaaggaaaagggaataccggcctgcggactggctatgaaatcttatcgaaattcaacgatgtccgctgcgtctatccaacttttgaagacgatccgcaaatggagtgcagtgacttcaacgacctgcacaaactacgtggacttcgtgaaacagcacgtcaactatttgcaacagcaaaccgcctgaaaaccggtactgatttgctatctctgacgctcaaccgcctgaagacaattaagcgggataaccgtcgtacttttgccaaagagctgctgagagcggtggatattggcatgctaacctgtccggttcctaacagtccgtcagatttatttaacatgttctgcatcgttctgcgtgaaatgggactggaaaatatctatcgtgctacggtaaaagaccacattgcccgtcgcctgaataaaaagtgccgtattgcccaggctccgcgctctttcagcgaacgcataactgatcccaataaacgacctcaacatatcacctataagcgttttgaaacttcggtaatgaccgatgatgtcctgaagtacgtgcaatcactacaggggatagtcatcgtccgtgctggtatgggttccggcaaatctactggattgttacgaccgttaatgcatagctcagaacgtggtatctctgttgctcaccgtgtctcccttattggtggcctgtgggaaatgatgacagaaggaaaaggtgtaaaagccgatatcctgcactatcaggatcctggctatcaggaaatggctccatacgccagtaaactgaccatctgcataaactcgattgttaaaaactgctggcaaccgttgatgcgccagcacgactattttggctttgacgaggccacacaagggctacgtgccgttctttccggtcgggctatggaaaacccggtggctgtattcaatacgctaattgacgcgctggccagaacggaacaacacccaatcatggtggatgctgatgcgaacgatctgctggttgacctggctgaactagctatgaaacgccgtgaagaactaggtttaccggcatggctgcagatccacgtaattgaattacctgttgatgttcgcaaccgcgaaacaggtgagccaatccgggttttttatacagaaaaagatcgcatcatgaccgaggtggtgaaagctgtatcggatggcgaaaaaatcatgttggccaccgacagctccacctttgcagaagatgtgacagccaccctgagaatgcattttcctggtaagaaatttctgtgtgtaaaccagaaaaacaaaccagagccagaagttgaagcatttaccaatcaaccgaaaaagatggtcaaaaaatacgacggcctgatttatagcccgtctatttcatccggcgtgtcgattgagcaaaaacattttgaccgtcatttcggcatgttctgtggtgaagttgtacccagcgacgcagtgcaaatgctacgccgcgaccgtacagcaaaagaatttattatcggctttgataaagctcgtgcaaaacgtgaaactgacccgcaaaaaatagaacgagcattcgcccaggcattgcttgctactgcaggtatgaacggtgaactgacggatgtcgttttcgatggcgaccgtatatcaatgggggtggccaataccgactttaccaggatgaaaattaaagcagccgcaattgaagcgtctgcacgtaacgactacgccagcaacatgatctgcatcatgcacagcgacggttataagatatcgccgctggccaccgattatgctgcaaatgatatcggtaaagatctgcgtaaagaagcgcgggatattgtgtgggaacagacactggatctgcatctcaatacagaaactccacaagaatcagagcgtgaagaactgctaaaaaaacgcgcgctaacgcttgaagaacaggcaaaacttgtccgctgggatattgagaacgaactgaaactaccggttgaagaaggcacgctgaaattctatttcgatggtgctcgagacaaagttcgccgctatgaaacaatgcttttagatgaggtaacagctcgtcgttacgaccgggaagaagcagccatcaattttacctacgcataccgtcaggcgggacagtggcaatattttgtagtgaccgcaatgactcgcgagcaggctgatgatgtctttaaaactaaattccctggaataatcgactacaaggtaaaagctactcctactgttgaagtcggggcgcgcggtttctatgcgcttaaatcagcaactctccggcagtactttatcgactgcggtatcaaccctgagactatgaccggcgaggcgactcaggagcgtctcaaatttgctcgagataacctcatgacagccgaacgccgtgacctgttgaataacgttctgcacattggtggttttatgacgccaaaagggaagcctaaagtgccggaagcgttgtttaaaaacatttgcgactctcttggccttaaaacaggtaaacgtcgcggcagagacggcgataagcgtccaaccttgcgttttgttgagcctgaatcagcggcatttatgctggatattcttgctcagcgtcagaaagatggcctaaccctgaaaacgcgtaaagccgagaagaccgccatcgaaatggatcgcgatttggatctcaatatatatatggatgataaaacgcgatccacaaacgagcaggttcaaaacgcccctcattcagtaatttctgaggctttggccgtgttgccagtggctgtacctgagtcctgggcgatgagtgcgctttccagtgaggagttggccaccatgtcatcatggtcatcagccagcatagctatgacgtttgcatccctgtacctcacagagttcatggatcacctttccagcaatgagctgcggcggttacgtgaatacattacggggaatagctcatgcagctacgaagagcagggcgctttctatgggtaa

SEQ ID NO: 490267 - DNA, 597 bp, Shigella sonnei; identical to SEQ ID NO: 14500

SEQ ID NO: 490268 - DNA, 600 bp, Shigella sonnei; identical to SEQ ID NO: 490181

SEQ ID NO: 490269 - DNA, 222 bp, Shigella sonnei; identical to SEQ ID NO: 14519

SEQ ID NO: 490270 - DNA, 327 bp, Shigella sonnei; identical to SEQ ID NO: 14494

SEQ ID NO: 490271 - DNA, 243 bp, Shigella sonnei; identical to SEQ ID NO: 14493

SEQ ID NO: 490272 - DNA, 204 bp, Shigella sonnei; identical to SEQ ID NO: 14492

SEQ ID NO: 490273 - DNA, 288 bp, Shigella sonnei; identical to SEQ ID NO: 14491

SEQ ID NO: 490274 - DNA, 222 bp, Shigella sonnei; identical to SEQ ID NO: 14489

SEQ ID NO: 490275 - DNA, 228 bp, Shigella sonnei; identical to SEQ ID NO: 14488

SEQ ID NO: 490276 - DNA, 273 bp, Shigella sonnei; identical to SEQ ID NO: 14486

SEQ ID NO: 490277 - DNA, 498 bp, Shigella sonnei
atgcagtcatcattacgcaaagctgtcacagctgctattggtggcggggctattgccatagcgtctatgctcatcactggcccaagtggtaacgatggtctggaaggtgtcagttacataccatacaaagatattgttggcgtatggactgtatgttatggacacactggaaaagacatcatgctaggtaaaacgtataccgaagcagaatgcaaagctctcctgaataaagaccttgccactgtcgccagacaaattaacccgtacatcaaagtcgatataccggaaacaacgcgcggcgctctttactcgttcgtttacaacgtgggcgctggcaatttcagaacatcgacgcttcttcgcaaaataaaccagggcgatatcaaaggcgcatgtgatcagctacgtcgctggatatctgctggcggtaagcaatggaaaggcctgatgactcgtcgtgagattgagcgtgaagtctgtttgtggggtcaacaatga

SEQ ID NO: 490278 - DNA, 438 bp, Shigella sonnei; identical to SEQ ID NO: 490192

SEQ ID NO: 490279 - DNA, 312 bp, Shigella sonnei; identical to SEQ ID NO: 489811

SEQ ID NO: 490280 - DNA, 861 bp, Shigella sonnei; identical to SEQ ID NO: 490194

SEQ ID NO: 490281 - DNA, 450 bp, Shigella sonnei; identical to SEQ ID NO: 14533

SEQ ID NO: 490282 - DNA, 177 bp, Shigella sonnei
atgagggacaaaaccgcgcaccataaacgcggtaaaaacccggtgtgcatcgtttttgattattcccgcacactcgcgcagaaggagttccccgtcgggctacggtcatggttaatgcgggaatacagcgacgatacagcgcatgatgtgtcaggcttgaatacatttatccgttaa

SEQ ID NO: 490283 - DNA, 540 bp, Shigella sonnei; identical to SEQ ID NO: 490175

SEQ ID NO: 490284 - DNA, 1167 bp, Shigella sonnei; identical to SEQ ID NO: 490210

SEQ ID NO: 490285 - DNA, 966 bp, Shigella sonnei
atgaaacagcgctctcttctaaaaaatgctccagatattaatcgcattatgagtaataatcatcatgcccctgaacatcagcccgtatcacctatggttggtgatttaaaacgtcaactgagttcattaaccggtaacagcataactttgccagtatgcggacgtaatgttaactttaagttagagacaattcccgcagataaagttgaaatggcaacaatggtatggctaggtaatgaacgcgatcaagatttattaaatgaatcctctctagccgatttaatcccatcttttctaacgtctggacaacaaaatccagctttcgccagaaaagtatctggaatcgttgaagtcgctgacggctcacgtagaagaaaagcagcgatattaacaggatgtgactatcgcgtcttaattggtgatctcgacgatgaacagatgcattggttatcccaaattggtaacgattataggcctattagtgcatacgaaagaggaaagagatacttacgcaagctaaatgactttgatggtaacgttaaagcattggccgaggctgaaaatatagatagaaatattatcactcgctgtattaatacagctggtctaccaaaagatatattagctatcttcaatcatccaggagaactgtcagctcgtgctggagattctttgtttaagatttacaaaaaaaacatggctgccatgagcaatgctgctcatcatcttctgacaataaaaaaaaacggcgaggatttagaagcttcacggattatacaaatattatctgactctgttctggttggcgacgaggaaaaaacaaaagacgagaaaaaatatggggaagggatcacggctagatataaagggaattttgtaactataaaaattgatagccgcaaaatatctaaagaaatactaagcaaaattgagttgttactagaggaacaatctactgataattaa

SEQ ID NO: 490286 - DNA, 456 bp, Shigella sonnei; identical to SEQ ID NO: 488050

SEQ ID NO: 490287 - DNA, 126 bp, Shigella sonnei; identical to SEQ ID NO: 487739

SEQ ID NO: 490288 - DNA, 435 bp, Shigella sonnei
atgtacggaacatgcgaaatactctgccgggagctggcagcaaagtatccggcagacacgccactgatgctggttgtctggtcccctgaagagattcaggccctcgctgacggaatggatatttccctgtccgatcatgaaatcaggaccgtcctggcgcgcctggaggacatcccggaagaccagcggattgagtccggtatttcttccggcgtggcgatggagattatcagcaacgtgagagaaaaccgccaggtgaccgtccctgctgaactgctggcgtccctgattcagaccgctgaacaggcactgtggaaacgtgaatgggccgcccgtgataacggccttgccgtcccggaatgtgttacccgccgtcaggcagtgattaatcaggcccgcaccctgctgaaaaacaacacacacgaaaacaactga

SEQ ID NO: 490289 - DNA, 207 bp, Shigella sonnei; identical to SEQ ID NO: 31544

SEQ ID NO: 490290 - DNA, 309 bp, Shigella sonnei; identical to SEQ ID NO: 486565

SEQ ID NO: 490291 - DNA, 297 bp, Shigella sonnei; identical to SEQ ID NO: 488049

SEQ ID NO: 490292 - DNA, 234 bp, Shigella sonnei; identical to SEQ ID NO: 381169

SEQ ID NO: 490293 - DNA, 771 bp, Shigella sonnei; identical to SEQ ID NO: 474584

SEQ ID NO: 490294 - DNA, 366 bp, Shigella sonnei
atgctggaagcggccagagaggccagacgtcaggaaattgaagcatggcgcacagaacaggaggcgaagccgttcacgtttgaatggaacggtcgtatctggaatgctggccccaactcactgggccgcctgtccccggtagtcatgctggcaaaatctgtcacagcacaaacgcatatggcgtggggtgatgccgataatcagcaggtgaaactgtcgatgccggaactggaagaactggcggcagcaatggtgcaggcgcaggttgaacgcaatgacgagatttatcgccgtcagcgtgaaatgaaagaggagctgagcagtctggatgatttggcttcaattcgggcgtttgacgttaagtaa

SEQ ID NO: 490295 - DNA, 330 bp, Shigella sonnei
gtgcgcagccatatcagcaaggcgttgtcgggtgagcgaatggcagcccgtgacagaaatgccgatctgacctggattcgccagcaactggtcgatgccgcctggtttgtccgtgccacactggaagcgcatgggatgggcgtcggaaatgagagtccctctgctccgccggagacaatgccggacatacagacacgggaactggttatgttgatcaagcgactggcatcatcgctgaaagcggtgaaacccgacagtagcgtggtgcgtgaagcgcaggactggctgtgcgacagaaaacttgtggatatcacagatattctccggtga

SEQ ID NO: 490296 - DNA, 426 bp, Shigella sonnei
atgcaatatgcgaaacctgtcactctgaacgttgaagagtgcgaccgtctgtcttttctgccttacctgtttggcctggattttctgtatgccgaagcgtctgtatacgcgctggcgaaaaaaatgatgccggaatatcagggaggcttctggcacttcatccgcctgccggacggtggcggttacatgatgccggatggcgaccgtttccacatggtgaacggtgcaaactggtttgaccgtaccgtgagtgctgatgccgcaggcatcatccttacctcccttgtgattaaccgccagttgtggctgtaccacgacagcggggatgcagggttgacacacctgtacaggatgcgtgatgcgcagttgtggagccacatcgaatttcaccccgaatgcaacgcgatttacgcggcacttgactga

SEQ ID NO: 490297 - DNA, 462 bp, Shigella sonnei
atggtttctaacctgtacggtatggtcaccgggatggcggaagatctacagagtctggtcggcggaacggtggtccggcgtaaggtttacgcccgttttctggatgcggtgaacttcgtcaacggaaacagtgacgccgatccggagcaggaggtgatcagccgctggcgcattgagcagtgcagcgaactgagcgcggtgagtgcctcttttgtactgtccacgccgacggaaacagatggcgctgtttttccgggacgtatcatgctggccaacacctgcacctggacctatcgcggcgatgagtgcggttatcacggtccggcggtcgcggatgaatatgaccagccaacgtccgacatcacgaaggataaatgcagcaaatgcctgagtggctgtaagtttcgcaataacgtcggcaactttggcggcttcctttccattaacaaactttcgcagtaa

SEQ ID NO: 490298 - DNA, 252 bp, Shigella sonnei
atgaccggctgggaactgcgaatctggcgaaaaagcatgctctggtcacgcgaaaaagcggccagagaatttggcgtgacacagagaacatggcacgcctgggaaaatgcggagcaggtggatgtcaccgtctggaggaccacccaggcactttcagtccgtgacctgctgcctcacatgcaggggatgcgcaaggcagatatcatcaggcgactggaaaatgaactgggggaaacggcagaggatgtgtga

SEQ ID NO: 490299 - DNA, 405 bp, Shigella sonnei; identical to SEQ ID NO: 80401

SEQ ID NO: 490300 - DNA, 249 bp, Shigella sonnei; identical to SEQ ID NO: 31804

SEQ ID NO: 490301 - DNA, 588 bp, Shigella sonnei
atgtatatacatattgttcctaaactttatcatctcatggctaataaatgtagccttaaatctatttccatacctgagcttgattttataattgatagtgaatcattgtctgtaggcagaccgtggcctaataaatgtttatgggttggaatgcgaaaaggaaggaagtcagttaatggcctcgttttgcaaacagataaaaaattaagatggtttactactatatacacctgggatattgaagatatggggttaatttaccatcaagtcaatacctatatagaagatgatgattttgatatggtttcacaggaaattcttttaaatggttcttttgataagtggagtaacagggttcattcagcttatgaaaataagcctccagccagaatccagcccaaaatggagtccttattaaataagcctggtgaaaacagtcatgatgtgtggaaagagttcgaatggggtgatttccttctgtccagagaagaaagccttttacttcatactattcagtctgaacgattgaatacagattgttctttattaaaaagacaaccgtctattgaaagcgtattagttatttaa

SEQ ID NO: 490302 - DNA, 453 bp, Shigella sonnei
atgaccacttttaccagagaaaacgcggaaattaaatcattcatcactggtttcctgagcgacccggcgcacgataaccaatcttcaagcagtctgcttgccaatgtgtttcgtatcgcactggcatcgttggaagcagagccagtcgcgtggcgatatcgctacgtgaaaaaaggcgttacggactctcagggggagccgtgggttggtgactggaaatatgtaccgacaaaagaagactgcaacgacaggccgaactatgaaattcaggaactctacaacttaccacctgcgatagcagcaccaacaagaggactggtaaacgcagtacgcttctacgaccaggtaaagcacacgaatcctcccgtcgaaacaggggcatggaaagacgctattgactgggtgctcaaagaggcttgcctggctgtaaatataggcatcaaaggagggtga

SEQ ID NO: 490303 - DNA, 288 bp, Shigella sonnei
atggcaactttgcaggaattaatcgacctgacgccagaacaggaaaaagcgtggaatcgccttgtaaaggctgtaaaggatttcagggcagccggaggaaagttttatagcgtcctggacacgctgagcgcatacaacggcgagcacgttgccagcattgataacgataagggctaccacactgcaagcgtctatatgcctagcattgatgcgccagggctaaccagttgggctgatgattggcacggcatcacgctgaaagatgggattgaagtggatgaggactaa

SEQ ID NO: 490304 - DNA, 2304 bp, Shigella sonnei; identical to SEQ ID NO: 483738

SEQ ID NO: 490305 - DNA, 1164 bp, Shigella sonnei
atgtcactcttccgcagaggtgaaatatggtacgccagtttcacattgccgaacggtaaaagatttaaacagtctcttggaacaaaggacaaaaggcaggcgacagaactccatgacaagctaaaggctgaagcatggcgggtcagcaaacttggtgaaatacctgatataacgttcgaggaagcttgtgtcaggtggcttgaagagaaagcacataaaaaatcactggacgatgacaaaagccggatcggattctggcttcaacatttcgcaggaatgcaactaagagacattactgaatcaaaaatttattcagcaatgcagaaaatgacgaaccggcgtcatgaggaaaactggaaactcagggcagaagcatgcagaaaaaaagggaaacctgttccagaatacacgccaaaaccagcgtccgttgcaacgaaggctacgcatctttcatttataaaggccctactaagagccgcagagcgtgaatggaaaatgctggataaggcaccaattattaaagtgcctcaaccaaagaataaacggatccgctggctggagccccatgaagcacaaaggctgattgatgaatgtccggagccattaaagtctgttgttgaatttgcactggcaacaggcttaagacgctcgaacatcatcaaccttgaatggcaacaaatagatatgcagcgccgggtggcatggataaacccggaagagagtaaatcaaaccgcgcaattggcgttgcgctgaatgatactgcatgtcgcgtattgaaaaaacaaatcgggaatcatcaccgttgggtatttgtgtacaaggaaagctgtaccaaaccagacggaacgaaagcgccaacagtaaggaagatgcggtatgacgcaaacacagcctggaaagcggcgctgagacgggctggtattgatgatttcagatttcacgacttgagacacacctgggcaagttggctggttcaagccggagtcccgttgtcagtgttacaggaaatgggaggctgggagtctatcgaaatggttcgtcgatatgctcaccttgcacctaatcaccttaccgaacacgcacggcaaatagactcgatcctgaacccatcggtcccaaattcgtcccagtcaaaaaataaggaaggtactaatgatgtgtaa

SEQ ID NO: 490306 - DNA, 306 bp, Shigella sonnei
atgaccacttttaccgacaaagaactgattaaagaaattaaagagcgtatcagcagccttgacgtgcgagacgatattgagcgccgtgcttatgaaatcgcactcctatctctggaagtagaaccagatgaacgcgaagcttatgaattattcatggaaaagcgtttcggtgacttagtagatcgtcggagagcaaaaaacggcgataacgaatacatggcatgggatatgactctcggttggatcgtctggcagcaacgagctggtatccatttttcaacaatgtcacaacaagaggtgaaataa

SEQ ID NO: 490307 - DNA, 342 bp, Shigella sonnei
atgcgtgatatgtatgaagtattggaccgctggggtgcatgggctgcagcagataacagtggtgtggactggcagcctgttgctgcagggtttaaaggtttactacctcatggaaagaaaacacgccaacaatgcgatgatgatgaaggaatcatgattgacagctgtgttgcgcgattgcggaaatataagcccgaagagtatgagttggttattgctcattttgttatcggcatctcactaagaactattgcaaagaagcagaagtgttctgatgggacaataagaaaagagttgcaaacagctcttggttttctggatggtgtgctttcaatgttgtaa

SEQ ID NO: 490308 - DNA, 549 bp, Shigella sonnei
atgcctttatatgaatggctaataaataaaagattgaggtatcagtaccttacactgcttgcattctcgatcctggcattgcttgcactttacctattgtacagaaacacacctaaagtaagtgttaacttttttgatttttatcataaaaacttacgaggctatctcttctccggttttatttccgtgggctcatttttattgagcctgcatacctttgtcataataaatttacgcgataaggtttttgcaactcaggaatataaggaaatttatagcattgccactggtatacctattgacaaaatcaatgatagtgtactttataaacctttagacaatttatcctcatttattaatacatcaatattatgttctatcacaacagcaattgcacaattcactattggactttcaactaatttatatgcatgcttattttgcgtatggcttgcaatactaacggtatttcttttattacattgcctcatcataatcagacaaaatattaaaattttattaaagcaacagagaaaaaaaggggggtaa

SEQ ID NO: 490309 - DNA, 927 bp, Shigella sonnei
atgaaagttagaagcataggatttacaataaataacaataacaaaaatattaataccgttgacgtaatgaatgcttttatcaacgcatcaaacagagaacacagtcgcacagactatactcgtaaaattctcatttcggatgtgaatgatttctattatggattagttgtcacattcagaaaccaaaaaaagaactgtaagtcgcaatttgttgatggtaaattccagcttaaaattgaagatcttcaaggaagtgacaaacttgctaatttcaactttttcttaattaaaaaatctaatctttctggtctctatatgtatcaccacgggtcatgcagtctgaacactctcttttctcatttagaaacaataagtaatgaatttatcagaaatcaaaataaagaagaaataaaaaaacttggtgataaaccaaaacaaaaagaagtaactgcaataaataaaaaatacaaagaaagactgactttcagccttatgacaaataaaaacaacattcagagtgttttatgtcaattcaaagagattaaaagcacaagctttaaatttaattatatagattttaaaggtggaccaatgactgcgcttgaacaatttgttaacactaccacaatagatatgaattttaattctagcgacagaacaaaagtgcaacaactatctcagaatctttcaaatatttataattctatgagtggagttgctaaagcacaggttattgcagtaaaccatgcaggaatagaaaaaaccattgattttatgaactgccctgttttttttgaaacatacgatttcgatataattgccgataaagtcaatggattgacaaacgataattatacaacaaaccctgtttttgatatgataaaagaagaaatgctgaacgggacgaataaaaatgcctttatatga

SEQ ID NO: 490310 - DNA, 462 bp, Shigella sonnei; identical to SEQ ID NO: 22684

SEQ ID NO: 490311 - DNA, 240 bp, Shigella sonnei; identical to SEQ ID NO: 22683

SEQ ID NO: 490312 - DNA, 1404 bp, Shigella sonnei
atgctggcggcaacgccaaagtcggtaaaggcagcctatgaccttgctaacgggaaatatactgctcaggacgctacgacagcacaaaaaggaattgtccagctcagtagtgcaaccaacagcgcatctgaaacgcttgccgcgacaccgaaagcagtgaaagcagctaatgataatgcgaatggtcgggtaccttctgcccgtaaggtgaatggtaaggcgctttcagcggatataacactgacgccgaaagatattggtacgcttaactcaacaacaatgtcattcagcggtggtgctggttggttcaaattagcaacggtaaccatgccacaggcgagttctgttgtttcaattacgttgattggtggcgcgggatttaacgtggggtcacctcaacaggcaggtatatctgaacttgttttgcgtgcaggtaatggtaatccgaaggggattactggtgctttatggcagcgcacatcgacagggtttacaaattttgcctgggtcaatacatctggtgatacttacgatatttacgttgcaatcggaaattatgcgactggtgtaaatattcaatgggattataccagtaatgccagcgtgacgattcatacgtcaccagcatattctgctaataagccggaagggttaacggacggtacagtttattcactctatacgccatcagagcagttttatccgcctggcgcaccaatcccgtggccatcagataccgttccgtctggctatgccctgatgcaggggcagacttttgacaaatctgcatacccgaaacttgcagccgcttatccgtcagccgtgatccctgatatgcgtggctggacgattaagggcaaacctgccagtggtcgtgccgtattgtctcaggaacaggacggcattaaatcgcacacccacagcgccagcgcatccagtacggatttggggacgaaaaccacatcgtcgtttgattacggcactaaatccacgaataacaccggggcgcatacgcacagtctgagtggctctacggggtctgccggtgctcatactcatggtaatggtattcgttggccaggaggcggcggttctgcgttagcattttatgatggcggtgggttcacttatgtcaaggattcacagtatcaagtaagcccggggacttcttccagtagatcgtattatcaacgtattcagacacagtcagcaggtgctcatacccactcgctgtctggtactgcagcaagttctggcgcacatgcacatactgtaggtattggtgcgcatacgcactcggttgcgattggctcacatggacacaccatcaccgttaacgctgctggtaacgcggaaaacaccgtcaaaaacatcgcatttaactatattgtgaggcttgcataa

SEQ ID NO: 490313 - DNA, 585 bp, Shigella sonnei
atggcattcagaatgagtgaacaagcacggaccataaaaatttataatctgctggccggaactaatgaatttattggtgaaggtgatgcatatattccgcctcatacaggtctgccagcaaacagtaccgatattgcaccaccagatattcctgctggctttgtggctgttttcaacagtgatgaggcatcgtggcatctcgttgaagaccatcggggtaaaacggtttatgacgtagcgtcaggggacgagttatttatttctgaactcggtccgttaccggaaaatgttacctggttatcgccggaaggggagtttcagaagtggaacggcacagcctgggtgaaagatgcagaagcagaaaaactgttccggatccgggaggcggaagaaacaaaaaacagcctgatgcaggtagccagcgagcatattgcgccgcttcaggatgctgcagatctggaaattgcaacggaggaagaaacctcattgctggaagcctggaaaaagtatcgggtgttgctgaaccgtgttgatacatcaactgcaccggatattgagtggccagaagaaccagacaccgtgtaa

SEQ ID NO: 490314 - DNA, 129 bp, Shigella sonnei; identical to SEQ ID NO: 466863

SEQ ID NO: 490315 - DNA, 234 bp, Shigella sonnei; identical to SEQ ID NO: 488405

SEQ ID NO: 490316 - DNA, 339 bp, Shigella sonnei
atgcctcctccttttttccacacaccggattggcacggaggccagtgccaatccggtacgtggagaagggcatcaggtagcactgttctgacaggaaaaatagcaaatggacaacagatcccattgccatctggtttttctgccagccagtgtacctggagtgtcagtaatgcagaaaatccgcacgggtggaagccgaattattttgcggggtcagttgcaacctatgatgccaatcgaattgtgaaatgcggcttctatgacgaatacaacttttatggcggtactcaccgaactgacctgtcggggaaatgtagttacatcgtggtttgccagtga

SEQ ID NO: 490317 - DNA, 954 bp, Shigella sonnei; identical to SEQ ID NO: 485725

SEQ ID NO: 490318 - DNA, 402 bp, Shigella sonnei
atgcttgctgataaagccgtcgtttcccgtttaacctatatggatcaagatatacttaatcttatcctgtcagggaaagttaaattcattgatgctaaatacaatactcaatttagtttaaattatgaattaaaaaaatcatttgtttgtccaattaatgatgaaaccgtattaattcattatgtcggcccgacaaaaccctggcattactgggccggttatccaagtgcgcaaccttttatcaacgccaaagaagcatcgccctggaaaaatgaaccgtttatgcggccaattaattcaaactatgctcgttattgcgccaagcataattttaaacaaaatgaaccaattaacgggataatgaattatatttattatttttatttaaagataataaaatga

SEQ ID NO: 490319 - DNA, 738 bp, Shigella sonnei
gtggcgctgcccttcgctgctgacgcctgtctggtcgcctcatcttttgaagcagacgccgatgatgccgatgacgccgccgaactggcggacgatgcggcagccgtttttgaggattctgcacgggtttccgacgctttcgcgttcgtttcggatgtcttcgctgcggaagctgacctcgctgctgccgtggcctgctcagtggcttcgccagccttcgttgtggctgttgaagcggatgatgcggcgctttctgccgattttccggcggcggtggcactggctgaggcctgcccggcacttgttgacgcggcgctggcagacgacgcagccgctgtttttgagcctgccgcagctgaggcactctgtcccgctgccgtttcagaagacctggcgttcgtctcggacgttttggccgccttcgcagaatttgcagccgccgtcgccgaggaagctgcgctactggcgctcgaggatgcgttcgtttctgatgattttgccgcctcttttgaagccgacgcatcccgggctgaggtggcagcttctgacgctttcgtggtcgcggtggatgcagaagtggctgctgattgttgtgacgctgccgcattcgtttctgacgttttcgcggcactggcactggtagctgccgcgctttttgaggactctgcagcggcagcactttttgatgcttcagtggcctttgttgatgccgttcctgcgctggaagtcgctgactga

SEQ ID NO: 490320 - DNA, 819 bp, Shigella sonnei
atgtgtcaggtatttggtgtatccaggagcggttattacaactgggtacagcatgaaccctcagacagaaaacaaagtgatgagcggctaaaactggagattaaggtggcacatatccgcactcgcgaaacatatggaacccggcggctccagacggagctggcagagaatggcatcatcgttggtcgtgaccgactggcacgtcttcgtaaggagctaaggctacgctgtaagcagaaacgcaagttcagagcgactacgaactcgaaccacaatctgccagttgcgccaaatctgctgaaccagacgttcgctcctacagcaccaaatcaggtctgggtggcggacctgacgtatgttgccacacaggagggatggttgtacctcgctggcatcaaagatgtttatacgtgcgaaattgtcggctacgccatgggagagcgcatgacaaaagagctgacaggtaaagccctgtttatggcgctcaggagccagcgcccacctgccgggctaatccaccactctgatcgaggttcacagtactgcgcatacgattaccgggtcatacaggagcagtctggtctgaaaacatcaatgtcgcgtaaaggtaactgttacgacaacgctccgatggaaagcttctggggaacgctgaaaaatgagagcctgagccactatcgttttaataaccgggatgaagccatctcagtaatacgggaatacattgagattttctacaatcgtcagcgtcgtcactctcgtctggggaatatctccccggcagccttcagggaaaaatatcatcagatggctgcttaa

SEQ ID NO: 490321 - DNA, 315 bp, Shigella sonnei; identical to SEQ ID NO: 22722

SEQ ID NO: 490322 - DNA, 522 bp, Shigella sonnei
atggcagttcgtggcattaacaaggtcattcttgtcggtcgtctgggaaaagatccggaagtccgttacatcccaaacgggggcgcagtggcaaacctgcaggtggccacgtcagaaagctggcgtgacaaacagacgggggagatgcgggagcagacagaatggcatcgcgtggtgctgttcggcaagctcgcggaagtggctggtgaatatctgcgcaagggcgcgcaggtctacatcgaggggcaactccgtacccgtagctgggaagataacggtatcacccgttacgtcactgaaattcttgttaagaccacgggcaccatgcagatgctgggaagtgcaccacagcagaacgctcaggcgcaaccgaagcctcagcagaatgggcagccacagagtgctgacgcgacgaaaaaaggtggcgcgaaaacgaaaggccgtggacgtaaggccgcgcagccggagcctcagcagccgtctgaacccgcgtatgacttcgatgacgacattccgttctaa

SEQ ID NO: 490323 - DNA, 234 bp, Shigella sonnei; identical to SEQ ID NO: 466988

SEQ ID NO: 490324 - DNA, 600 bp, Shigella sonnei
atgcgtaaagtttgtgcagccattttgtccgcagccatctgtctgtccgtatccggtgcgcctgcatgggcgtctgagcatcagtccacgctgagcgcggggtatcttcatgcccggacgaacgttcccggcagtgatgatctgaacgggattaacgtgaaataccgttatgagtttacggacacactggggatggtgacgtcgttcagctatgcaggagacaagaatcgccagattacccgttacagcgatacccgctggcatgaagattccgttcgtaaccgctggttcagcgtaatggcggggccgtctgtgcgcgtgaatgaatggttcagcgcgtatgcgatggcgggtgtggcttacagccgtgtgtcgactttctccggggattatctccgcgtaactgacaacaaggggaaaaagcacgatgtgctgaccggaagtgatgacggtcgccacagcaacacgtctctggcgtggggagctggcgtgcagtttaacccgaccgaatccgtggccattgatgtcgcttatgaaggctccggcagtggtgactggcgcactgacgggttcatcgtgggtgttggttataaattctga

SEQ ID NO: 490325 - DNA, 381 bp, Shigella sonnei; identical to SEQ ID NO: 458903

SEQ ID NO: 490326 - DNA, 642 bp, Shigella sonnei; identical to SEQ ID NO: 486871

SEQ ID NO: 490327 - DNA, 303 bp, Shigella sonnei; identical to SEQ ID NO: 484410

SEQ ID NO: 490328 - DNA, 303 bp, Shigella sonnei; identical to SEQ ID NO: 21213

SEQ ID NO: 490329 - DNA, 303 bp, Shigella sonnei; identical to SEQ ID NO: 485854

SEQ ID NO: 490330 - DNA, 315 bp, Shigella sonnei
atgatgtcgggagacgagaataaacttaagaaatatcgtttcccggaaacactgaccaaccagagccgctggtttggcctgccactggatgaactgatccccgcagcaatctgtgttggctggggtatcacaacatcgaaatatctgttcggtattggtgcagcggttctggtttatttcgggattaaaaaactgaaaaaagggcggggcagttcctggttacgtgacctgatttactggtatatgccaacagccctgctgcgcggtatttttcataatgttcccgattcgtgtttccggcagtggattaaatag

SEQ ID NO: 490331 - DNA, 480 bp, Shigella sonnei; identical to SEQ ID NO: 464934

SEQ ID NO: 490332 - DNA, 315 bp, Shigella sonnei; identical to SEQ ID NO: 22722

SEQ ID NO: 490333 - DNA, 315 bp, Shigella sonnei; identical to SEQ ID NO: 22722

SEQ ID NO: 490334 - DNA, 315 bp, Shigella sonnei; identical to SEQ ID NO: 22722

SEQ ID NO: 490335 - DNA, 207 bp, Shigella sonnei; identical to SEQ ID NO: 485753

SEQ ID NO: 490336 - DNA, 153 bp, Shigella sonnei; identical to SEQ ID NO: 38791

SEQ ID NO: 490337 - DNA, 315 bp, Shigella sonnei; identical to SEQ ID NO: 22722

SEQ ID NO: 490338 - DNA, 303 bp, Shigella sonnei; identical to SEQ ID NO: 487011

SEQ ID NO: 490339 - DNA, 381 bp, Shigella sonnei
atgctgggagcggtggaacgccgcttcggcaacgatcttccgtcgtctccagtggagtggctgacggataatggttcatgctaccgggctaatgaaacacgccagttcgcccggatgttgggacttgaaccgaagaacacggcggtgcggagtccggagagtaacggaatagcagagagcttcgtgaaaacgataaagcgtgactacatcagtatcatgcccaaaccagacgggttaacggcagcaaagaaccttgcagaggcgttcgagcattataacgaatggcatccgcatagtgcactgggttatcgctcgccacgggaatatctacggcagcaagccagtaatgggttaagtgataacaggtgtctggaaatatag

SEQ ID NO: 490340 - DNA, 426 bp, Shigella sonnei
atgcaatatgcgaaacctgtcactctgaatgttgaagagtgcgaccgtctgttttttctgccttacctgtttggccaggattttctgtatgtcgaagcgtctgtgtgcgcgctggcgaaaaaaatgatgccggaatatgaaggcggattctggcacttcatccgcctgccggacggtggcggttacatgatgccggatggcgaccgttttcatctggtcaacggtgaaaactggtttgaccgtaccgtgagtgctgatgccgcaggcatcattttgacttcccttgtgattaaccgccagttgtggctgtaccacgacagcggggatgcaggactgacccatctttaccggatgcgcgatgcgcagttgtggcgtcacatcgaatttcaccccgaatgcaacgcgatttacgcagctctggactga

SEQ ID NO: 490341 - DNA, 423 bp, Shigella sonnei
atgtactgtactgttaaagaaatcatccgcgatgtactggatacagacgtgccggacagtgaatgcgtttttgccgtggtgctgacccgtggggatgtgcgtcacatagcccaggactggaacctgccagacgatgagctggaaaccgtcatgcagcggctggacgatgcttttgtatatggcgcatgtgacagagttgtttccgatattgtcaatgaactgatggaggaaaagcacgccagccgtcaggtgacagtcccggcggtgatgctggaaaaagtgatggcgctggcaggcagtgaaatgaagcgcctgtatgccgtcgggagtgagaacgggggcgacggtgacgcattcgtcagggaggaactcgaagcaatggacgttgtgttacaggcgctggacggggagcacatgtcatga

SEQ ID NO: 490342 - DNA, 192 bp, Shigella sonnei
atgaatatcagcacagaaacccgcgaaattctgcgcaattacaaagccgtgattaatgcgcggcgtcgtgaaatggggcagaaaccgctcaccaccgcgcagattgttgatgaaatctgcgattttgtggcgaatcagcaggcggttttcctgggcggtcactacatccttcagggcagcagaaacaggtga

SEQ ID NO: 490343 - DNA, 504 bp, Shigella sonnei
atgccgggcaactgcacgcattatgggcgttggcctcaacacgattttacgtcacttaaaaaactcaggccgcagtcggtaacctcgcgcatacagccgggcagtgacgtcatcgtctgcgcggaaatggacgaacagtggggctatgtcggggctaaatcgcgccagcgctcgctgttttacgcgtatgacagtctccggaagacggttgttgcgcacgtattcggtgaacgcactatggcgacgctggggcgtcttatgagcctgctgtcaccctttgacgtggtgatatggatgacggatggctggccgctgtatgaatcccgcctgaagggaaagctgcacgtaatcagcaagcgatatacgcagcgaattgagcggcataacctgaatctgaggcagcacctggcacggctgggacggaagtcgctgtcgttctcaaaatcggtggagctgcatgacaaagtcatcgggcattatctgaacataaaacactatcaataa

SEQ ID NO: 490344 - DNA, 525 bp, Shigella sonnei; identical to SEQ ID NO: 488160

SEQ ID NO: 490345 - DNA, 417 bp, Shigella sonnei
atgtccggttttcaacaaaccatgcaaatgctgaatgagggcatcgttcccactgcgatgctggttgccaacgatcagatggcgctgggcgcaatgcgcgccattaccgagtccgggctgcgcgttggtgcggatatctcggtagtgggatacgacgataccgaagacagctcatgttatatcccgccgttaaccaccatcaaacaggattttcgcctgctggggcaaaccagcgtggaccgcttgctgcaactctctcagggccaggcggtgaagggcaatcagctgttgcccgtctcactggtgaaaagaaaaaccaccctggcgcccaatacgcaaaccgcctctccccgcgcgttggccgattcattaatgcagctggcacgacaggtttcccgactggaaagcgggcagtga

SEQ ID NO: 490346 - DNA, 480 bp, Shigella sonnei; identical to SEQ ID NO: 464934

SEQ ID NO: 490347 - DNA, 504 bp, Shigella sonnei
atgccgggcaactgcacgcattatgggcgttggcctcaacacgattttacgtcacttaaaaaactcaggccgcagtcggtaacctcgcgcatacagccgggcagtgacgtcatcgtctgcgcggaaatggatgaacagtggggctatgtcggggctaaatcgcgccagcgctggctgttttacgcgtatgacagtctccggaagacggttgttgcgcacgtattcggtgaacgcactatggcgacgctggggcgtcttatgagcctgctgtcaccctttgacgtggtgatatggatgacggatggctggccgctgtatgaatcccgcctgaagggaaagctgcacgtaatcagcaagcgatatacgcagcgaattgagcggcataacctgaatctgaggcagcacctggcacggctgggacggaagtcgctgtcgttctcaaaatcggtggagctgcatgacaaagtcatcgggcattatctgaacataaaacactatcaataa

SEQ ID NO: 490348 - DNA, 480 bp, Shigella sonnei; identical to SEQ ID NO: 464934

SEQ ID NO: 490349 - DNA, 1428 bp, Shigella sonnei
gtgaaattattcagattctctaaagtaaaaattgcagaactgccaacgccggaacatggacaggtcgaatatggtgatacggaggttaacgggctgcgtgtccgtgtaggttcgtctggtgtgaaaagtttctgcatttcccgtaagcgtaacggaaaatttattcgtgcaacgctggggcgttttcctgatctgagcgtggataatgccagggctaaagctatggaactccttggcgaagtcgccacaacggggataaatccgaacatagcaaagcgcactaacaacaaggccatgataacgctgagtgaggcgattgacgcctacgtaaaaaatcgtggccaccgcctgaaacccgccacagaaaaacagtaccgcagcatattacagaattattccggtgactggatggcccataccctcgccagtatttcccgcgaacgggtggaacaacggcataaggccatcactgatggggctgtatggttcggtgctgataaaaccacgttacgggctggggttggtacaggaagcaaggcacaggccgatttatgggcgcgtgcgctacgtgctgtgtgtcggtttgcgcatgatcattaccgtgatgatgcgggtaatactcttttaccggatccgccgactctggtactgagcaccaagcgccagtggcacggaacggtaagaaaaacggaacgtatccgcctgcatgattttccccgctggtttgctgctgtagctgctgtgcgcgaccagggcgaacaggaaagggatgatatagcggtgacggtatgcgatgccgtggaaatggcgctttttaccggactgaggaaatcagaaatttttggccttacgtgggatcgcgtgaatatgggcggtcgttttttctggatagacaccacgaaaaacggggatccgctcgaattaccgattactgatacgttgcgggaaatgttccaccgccgactgaaaataaaaaacgctgatgatgttctggtgtttcctggtgtgaagggagtgattcaggaaacacggcacatcatagaccggataagcgcggctactgttccagagtcgaacgatgaaatgctctcccctgtaccattcaaatggcacgatgcacgccggacgttcggaacggttgccgaactggtgggcgtgggaaattacatcctcaagcgcctgatgaatcaccgtactatgcgaagtgctgacgtaacgcaggggtatttacattttggtgctgatgaactgctggagccagcgtcacggatagaacgggcaattctggaacatgccgggctggtggagagtaaaaaatctatcgatgcgcaattgctttccgcactggagagtatgagtgacagtgagaaacgcgcattactatttagtatcgttaattcaaatggtggtttgaatgtcagaaaataa

SEQ ID NO: 490350 - DNA, 687 bp, Shigella sonnei
atgtcagaaaataaaatcattgctgcaatagaatttgaccataatgatgcgaaggatatgaatactattgcagattatattagagatgaactggcgtcttcttttgtaaaaaaaacgatatgcgatatggcaaatatcacaccatctaaaatgtctctggaggagagattatcattatcgtcagagatagaaaataaggatttaaaggttaatatttctgtatgtgccgggtatggagatgattttgataaaaaatttaatagtgcatattcagaattcaatgatattttgaaagctgccattatatttgaagttcttggtttcaacagacttgcagatcagttacgtgaaagatatgcgattttagtgtcggagaatttattaaaatcagtacgtgatatagctaatgtaaagaaaattatcagtgaagaccgtagtaaagcaaagaaaggaaaaacaaacaggcataaatcaacagcgttatctatagcttgtaacacttggaaaaaataccctaatgccagtttacccgggctatccgcagagatatacgcgcacttacgcaataaatggaatgatgtccctgtagttgggactatagagagatggcttaaggagtcggggatgaatccaaaatccccgcaaaaaaacagggattttaagttagttattggagacaaagaataa

SEQ ID NO: 490351 - DNA, 189 bp, Shigella sonnei; identical to SEQ ID NO: 25938

SEQ ID NO: 490352 - DNA, 759 bp, Shigella sonnei
gtggaacagattaattcaaataaaaaacagtctaacagaaaaaaatacttttctttattggtgatagttttatttattgcgttttcaggtgcctatgcctattggtcaatggaattagaagacatgattagtacagatgacgcctatgtcacggggaatgcagatccaatttctgcacaagtctcaggtagtgtcactgtagttaatcataaagatacgaactacgttcgacagggtgacattttagtttcactggataaaactgatgccactatcgcactcaataaagctaaaaataatctggcaaatattgttcggcaaacgaataaactgtacttacaggataaacaatacagtgccgaagtcgcttcagcacgtattcagtatcaacaatccttagaagattataaccgtcgtgtgcctttagcgaagcagggggttatttcaaaagaaacgctggagcataccaaagatacgttaataagtagcaaagcggcactgaatgccgctatccaggcttataaagcgaataaagctttagtaatgaacacaccattaaaccgtcagccacaagtagttgaagcggcggatgcaaccaaagaagcctggttggcgcttaaacgtacggatataaggagtccggttactggctatattgcccagcgaagtgttcaggtcggcgaaacagtgagtcccggacaatcgttaatggctgtcgtaccggcacttcccatattgatccctgtcacccgaccatga

SEQ ID NO: 490353 - DNA, 498 bp, Shigella sonnei; identical to SEQ ID NO: 487526

SEQ ID NO: 490354 - DNA, 1071 bp, Shigella sonnei
atgatttttacccataaggtgggtaaacgtattcgtccgcttaatgtggaaaaacaacgtagcgaagcgacatttcgaactaatcttgtgcagcataataagcagacagaactgattgcgctaagcaatgctgagtctctacaacgccaggagttgcgcgacaattttcataccattaaagagaactggcatcgtttaatgaatcgtcagcggtggcttgattactggcaaaatatttattcgcgctcgcttagcgttcttccctactttctgttattgccgcagtttattagcgggcagatcaatctgggcggactgatgaaatcgcgccaggcatttatgctagtatcgaacaatttaagctggtttatttataaatatgacgaacttgctgaactggctgcggttatcgatcgcttgtatgagttccatcaactcactgaacagcgccctacgaataagcctaaaaattgccaacatgcggtacaagtggctaatgcgagtattcgtacgcctgataataagatcatattagagaacttgaactttcatgtttcgccaggcaaatggctattactgaaaggctactctggtgcgggaaaaaccacactgcttaaaacattatcccactgctggccgtggtttaaaggtgatatttcttctcctgctgacagttggtatgtgtcacaaacaccgttaatcaaaagcggcttactgaaagagattatttgtaaagcacttcccctgcccgtagacgataaatcgttgagcgaagtactgcatcaggttggtctggggaaattggctgcgcgtattcatgaccacgatcgctggggagatattctttccagcggcgaaaaacaacgtatcgccctggcacgattaattttacgacgtccgaaatggatatttcttgacgaaactacctctcatcttgaggaacaagaggctatacgcttactgcgtttagtgcgtgaaaaactacccacaagcggcgtcattatggttacacatcaacccggtgtctggaacctggctgatgatatttgtgacattagcacggttttataa

SEQ ID NO: 490355 - DNA, 1401 bp, Shigella sonnei
ttgctgggtggctttgatacttcttataccggaggtattgatgctcctgctgcctcagccagcatgtataacaccttatggagagtaaacggacagtcagccctgcaatcattaaaaacccgcgacagtcttttgttgtttagtaacatagagaattcgggtttccatactgtgacagtaaacacactggatgccactaatactgctgtgattatgcgggctgatctgagccagtctgtaaatcaatcggataaactcattgttaaaaatcagttaaccggaagcaataacagtctgtcggtcgatatacagaaagtgggaaataataactcaggattaaacgttgacctgataacagccccaaaaggaagcaataaagagatatttaaagccagtactcaggccataggtttcagcaacatatctcctgtgatcagcacgaaagaggatcaggaacataccacgtggaccctgaccggatataaggtggctgaaaatacagcatcttccggtgcagcaaaatcgtatatgtccggtaattacaaagccttcctgacagaagtcaacaacctgaataaacgaatgggggatctgcgtgacaccaatggcgaggccggtgcatgggcccgcatcatgagcggagcaggttcagcttctagtggatacagtgacaactacacccatgtgcagattggtgtggataaaaaacatgagctggatggacttgaccttttcactggtctgactatgacgtataccgacagtcatgccagcagtaatgcattcagtggcaagacgaagtccgtcggggcaggtctgtatgcttccgctatatttgactctggtgcctatatcgacctgattagtaagtatgttcaccatgataatgagtactcggcgacctttgctggactcggaacaaaagactacagttctcattccttgtatgtgggtgctgaagcaggctaccgctatcatgtaacagaagactcctggattgagccgcaggcagaactggtttatggggccgtatcaggtaaacggttcgactggcaggatcgcggaatgagcgtgaccatgaaggataaggactttaatccgctgattgggcgtaccggtgttgatgtgggtaaatccttctccggtaaggactggaaagtcacagcccgcgccggccttggctaccagtttgacctgtttgccaacggtgaaaccgtactgcgtgatgcgtccggtgagaaacgtatcaaaggtgaaaaagacggtcgtattctcatgaatgttggtctcaacgccgaaattcgcgataatcttcgcttcggtcttgagtttgagaaatcggcatttggtaaatacaacgtggataacgcgatcaacgccaacttccgttactctttctga

SEQ ID NO: 490356 - DNA, 498 bp, Shigella sonnei
atgtcgccatcattacgcaaggctgttgcagttgctattggtggcggggctgttgctatagcatctgtgttaatcactggcccaggtggtaacgatggtctggaaggtgtcagctacataccatacaaagatatcattggtgtatggactgtatgtcacggacacaccggaaaagacatcatgcctggtaaaacgtataccgaagcagaatgcaaagccctcctgaataaagaccttgccactgtcgccagacaaattaacccgtacatcaaagtcgatataccggaaacaacgcgcggcgctctttactcgttcgtctacaacgtgggtgctggcaatttcagaacatcgacgcttcttcgcaaaataaaccagggcgatatcaaaggcgcatgtgaccagctacgtcgctggacatatgctggcggtaagcaatggaaagggctgatgacccgtcgtgagattgagcgtgaagtctgtttgtgggggcagcaatga

SEQ ID NO: 490357 - DNA, 780 bp, Shigella sonnei; identical to SEQ ID NO: 56175

SEQ ID NO: 490358 - DNA, 480 bp, Shigella sonnei; identical to SEQ ID NO: 464934

SEQ ID NO: 490359 - DNA, 642 bp, Shigella sonnei
atggcagcgacgcacacactccctctggcgtcaccgggcatggcacgcatctgcctttacggggatttacaacgatttggccgccgcatcgatcttcatgtgaaaacgggggccgaagccatccgggcgctggccatgcagatcccagcgtttcgtcagaaactgagcgatggttggtatcaggtgcgtattgccgggcgtgatacaggcgaaaacgaattatcagcccgtcttaatgaaccgctggaaaatggtgccgtgatccacatcgtaccgcgtctggctggtgccaaaagtggcggcgtgtttcaggcggtgcttggtgcggcgctgattgctacggcaatctggatgccaggaatcagtatcgctttcagtgacattctcttttcaatgggggcggcgatgacacttggtggtgttgcacagatgctggcaccgaaagccagcacagcaacagccagcaccacggataacggtaagcagaacacctatttctcctctctggataacatggttgcccagggcaatgttgtgcctgttctgtacggtgaaatgcgcgtcgggtcgcgggtgatttcgcaagagatcagcacggcagatgaaggggatggcggccagattgtggtgattggtcgctga

SEQ ID NO: 490360 - DNA, 162 bp, Shigella sonnei; identical to SEQ ID NO: 20118

SEQ ID NO: 490361 - DNA, 366 bp, Shigella sonnei; identical to SEQ ID NO: 10065

SEQ ID NO: 490362 - DNA, 504 bp, Shigella sonnei; identical to SEQ ID NO: 485763

SEQ ID NO: 490363 - DNA, 1167 bp, Shigella sonnei; identical to SEQ ID NO: 487978

SEQ ID NO: 490364 - DNA, 468 bp, Shigella sonnei
atgagcagagtcaccgcgattatctccgctctggttatctgcatcatcgtccgcctgtcatgggctgttaatcattaccgtgataacgccattacctacaaagagcagcgcgacaaaaacgcaagagaactgaagctggcgaacgcaaccattactgacatgcagcagcgccagcgtgatgctgatgcactcgatgctaaatacacgaaggagttagctgatgcgaaagctgaaaatgatgctcttcggcgcaagcttgataatggtggtcgggtgctcgtcaaaggaaaatgccctgtgccatcctcagccgaaacctccagcgcctccggcatgggcaatgatgccaccgtcgaactctctccagttgctggacgaaacgttctcggtatccgggacggaattatccgcgaccaaacagcactgagaacgcttcaggaatacatcaggacgcaatgccttcgatga

SEQ ID NO: 490365 - DNA, 1404 bp, Shigella sonnei
atgccgcagcttaaaggtgtgattaaaacgcccacgggagaaccgctggacggcgcaaccattacactaacctccatacacaaccgtgcagggattctgaaaagtgttttcagccatgtcaccacacagaacggggaatatgacttccccgttctgccgggtgtgtacagcgttcgcctgacacaaagcacacggcgcctttcagaaatcggtgtcatccgcgtttatgaagattcaacggacggttcgctgaatgattttctgggcgcaactaatattgacctgcgtccggaatccctgaagaaattcgaagagctggcgcaacaggcgcagcagagtgccgggagcgcagccggaaacgcacggcagacggcgcaggatgtgacggcagccgcaacggcccgtgatgatgcacaacgttttgcggagaaagcccgacaggatgcaaccgtcacagctgagaacagaaaggccacagcggaagacgtgaaaagcacggggaaaaacgccgtcttatccggtcagcgtgcacaggcagccgcaggttatgcccgcgcagcagaacaggccaaaaatgacattgatgctgcgctgaccggcactctgaaaacggctaaccatctgtctgaaatcgcagcagcaggcgaaaaggcacaacagaagtcccgggataatctggggctgaaaagtgcagccacgatggaagcacagagcgacatttacgaccggacaaaaggccgtctggcgatacccggcgcattcggctttgggtgtgcttttctgcctgaagatgttatccgttttgacactaagagtgatttcctggcctgggtaaggaatgcgctgccaggtgagtattccgttgctggccgcctgggcatcatacccgacacacggtttgaaggggtgctcagcatccggtggactgatgcacgccctgagacaacagaaccgcggtacagagccaaatcccttactttttacggcattaacggccccatttatcacacccgctactgctactggcccatatccagactgactggctgggtgaaaataaatataaccacagaagatattatttacagaatcgtggcgagctctgtctgcaacagatggggagaccctgacattggcgggctgattattgctgcgtaccagggagaagctgacggtgataaagtcatcagacttgtcagggggcagtcatacagaggctcacgactgggaccggtggggatttcagtgcccagtactcccaccggaacgtatatagcatccccacaatttttcattacgggatgttcagagcattcattaccggggtcatatagcgccctgtccggggtgccggatgctcatgtctctggcgcaatgcccgggctttttattcgcacatcgtga

SEQ ID NO: 490366 - DNA, 366 bp, Shigella sonnei; identical to SEQ ID NO: 10065

SEQ ID NO: 490367 - DNA, 480 bp, Shigella sonnei; identical to SEQ ID NO: 464934

SEQ ID NO: 490368 - DNA, 435 bp, Shigella sonnei
atgtacggaacatgcgaaacgctctgccgggcgctggcagcaaagtatccgggagacatgccgctgatgctggttatctggtccccggaagagattcaggccctcgctgacggaatggatatttccctgtccgatcatgaaatcagaaccgtcctggcgcgcctggaggacatcccggaagaccagcggactgaatccggtatttcttccggcgtggcgatggagatcatcaataacgtgagcgaaaaccgccaggtgaccgtccctgctgaactgctggcgtccctgattcagaccgccgaacaggcactgtggaaacgtgagtgggccgcccgtgataacggcctcgccgtcccggaatgcgtcacccgccgacaggcggtggttaatcaggcccgcgccctgctgaaaaacaacacacgcgaaaacgactga

SEQ ID NO: 490369 - DNA, 648 bp, Shigella sonnei
atggcccgtattcctgataacgccattgatttcatactgactgacccgccgtacctcgtcggttttcgtgaccgttccgggcgcaccatcgctggcgataaaaccgatgaatggctgcaaccggcctgtaatgaaatgtaccgcgtactcaaaaaagacgcgctgatggtcagcttctacggctggcaccgtattgaccgctttatggcggcctggaaacgcgccggattcagcgtggcagggcacctcgtgttcaccaaaaactacacatccaaatctgcgtatgtcgcgtaccgccacgaatgcgcttacatcctggcaaagggcagtccggcccggccccgtaaccctctgccggatgtgctgggctggaaatattcaggcaatcgtcatcacccgacggaaaagcccgttaccagcctgcaaccgctgattgagagcttcacacacccgaacgcaattgtgctggacccgtttgcaggcagcggctcaacctgcgtcgccgccctccagtccggacgccggtatatcggtatcgagctgcttgagcagtatcaccgtgccgggcagcaacgccttgccgccgtgcaacgggccatgcagcagggggccgcgaatgatgactggtttatgccggaggctgcgtaa

SEQ ID NO: 490370 - DNA, 480 bp, Shigella sonnei; identical to SEQ ID NO: 464934

SEQ ID NO: 490371 - DNA, 672 bp, Shigella sonnei
atgtttgttggtcagggcgatcagatattcatgaatgaagtgttcctgaaacgcctgacggcccccaccattaccagcggcggtaatcctccggcattttccctgacatcagacgggagactgacggcgaaaaatgcggatatcagtggcagtgtgaatgcgaactcaggaacgctcaacaatgtcacgattaaccagaactgtacgattaagggcatgctggaggcgacccaggtcagaggagatttcgttaaagctgtatcaaaagccttcccgaaaaaagtcggtacgtggggtaacacggaaacaccaaacggtacggttacagtcaccatcagcgatgatcataactttgaccgccagattattattccgcccattatttttaacggtatagcgtatgacgatccggggagcggaaataacccaggaggcacgcgatacacgggttatggttttgaagttcgcaaaaacggcgtattaatcgcatccagagaaactaaaggtgccattcccggtagttacagtgcagttattgatatgcctagtggtggtggtagcgtcactctggagtttaagattttccagaaaggcaatcagggggcaggcaatatcaccgactgtacggtgattgtgaccaaaaaagcggcttccggcatcagtattcgttga

SEQ ID NO: 490372 - DNA, 483 bp, Shigella sonnei
atgcgtaaagtttgtgccgccattttgtccgcagccatttgtctggccgtatccggtgcgcctgcatgggcgtctgaacatcagtccacgctgagcgcggggtatcttcatgcccggaccaacgttcccggcagtgatgatctgaacgggattaacgtgaaataccgttatgagtttacggatacgctggggctggtgacgtcattcagctatgcaggagacaagaatcgccagctgacccattacagcgatacccgctggcatgaagattccgtgcgtaaccgctggttcagcgtgatggcggggccgtctgtgcgcgtgaatgaatggttcagcgcgtatgcgatggcgggtgtggcttacagccgtgtgtcgactttctccggggattatctccgcgtaactgacaacaaggggaaaacgcacgatgtgctgaccggaagtgatgacggtcgccacagcaacacgtctctggcgcactga

SEQ ID NO: 490373 - DNA, 642 bp, Shigella sonnei; identical to SEQ ID NO: 486871

SEQ ID NO: 490374 - DNA, 483 bp, Shigella sonnei
atgcgtaaagtttgtgcagccattttgtccgcagccatttgtctggccgtatccggtgcgcctgcatgggcgtctgaacatcagtccacgctgagcgcggggtatcttcatgcccggaccaacgttcccggcagtgatgatctgaacgggattaacgtgaaataccgttatgagtttacggatacgctggggctggtgacgtcattcagctatgcaggagacaagaatcgccagctgacccattacagcgatacccgctggcatgaagattccgtgcgtaaccgctggttcagcgtgatggcggggccgtctgtgcgcgtgaatgaatggttcagcgcgtatgcgatggcgggtgtggcttacagccgtgtgtcgactttctccggggattatctccgcgtaactgacaacaaggggaaaacgcacgatgtgctgaccggaagtgatgacggtcgccacagcaacacgtctctggcgcactga

SEQ ID NO: 490375 - DNA, 393 bp, Shigella sonnei
gtggtccggcgtaaggtttacgcccgttttctggatgcggtgaacttcgtcaacggaaacagtgacgccgatccggagcaggaggtgatcagccgctggcgcattgagcagtgcagcgaactgagcgcggtgagtgcctcttttgtactgtccacgccgacggaaacagatggcgctgtttttccgggacgtatcatgctggccaacacctgcacctggacctatcgcggcgatgagtgcggttataacggtccggcggtcgcggatgaatatgaccagccaacgtccgacatcacgaaggataaatgcagcaaatgcctgagtggctgtaagtttcgcaataacgtcggcaactttggcggcttcctttccattaacaaactttcgcagtaa

SEQ ID NO: 490376 - DNA, 744 bp, Shigella sonnei
atgacagagacagaatcagcgattctggcgcacgcccggcgatgtgctccagcggagtcgtgcggcttcgtggtaagaacgccggagggggaaagatatttcccctgcgtgaatatctccggtgagccggaggcgtatttccgtatgtcgccggaagactggctgcaggcagagatgcagggtgagattgtggcactggtccacagccaccccggtggtctgccctggctgagtgaggccgaccggcggctgcaggtgcagagtgatttgccgtggtggctggtctgccgcggggcgattcacaagttccgctgtgtgccacatcttaccgggcggcgctttgagcacggggtgacggactgttacacgctgttccgggatgcttaccatctggcgggaattgagatgccggattttcatcgcggagatgactggtggcgtaacggccagaatctctatctggataatctggaggccacagggctgtatcaggtgccgttgtcagcggcgcagccgggcgatgtgctgctgtgctgttttggttcatcggtgccgaatcatgccgccatttactgtggtgacggcgagctgctgcaccatattcctgaacaactgagcaaacgagagaggtataccgacaaatggcagcgacgcacacactccctctggcgtcaccgggcatggcgcgcatctgcctttacggggatttgcaacgatttggccgccgcatcgaccttcgtgtga

SEQ ID NO: 490377 - DNA, 177 bp, Shigella sonnei; identical to SEQ ID NO: 485877

SEQ ID NO: 490378 - DNA, 276 bp, Shigella sonnei; identical to SEQ ID NO: 487394

SEQ ID NO: 490379 - DNA, 480 bp, Shigella sonnei; identical to SEQ ID NO: 464934

SEQ ID NO: 490380 - DNA, 888 bp, Shigella sonnei
atgcataatccggaccttgcggttaagtttcatctctttaccgactacattgatgaagattatctacaacgtgttaatgcttttaccagcaaaaatgctaacgttgaagtaagaatttataaagtctccagtgcctttattgatatcttccccagcctgaaacagtggtcttatgcaacattcttccgtttagttgcgttccagtatctgagtgaaactattgaaaatctgttatatatcgatgctgatgtcatctgtaaaggctcattagctggattgcttgatattaattttgatggggataagtttgcagctgttattaaagatgtgccttttatgcaggaaaaaccagcgaagcgtctggctatagagggacttccagggaattatttcaacgccggtgtagtatatctgcagcttgaagcatgggcgaaaaatgattttatgaataaagccattgctatgctggcaagtgacccgcagcacacgaagtataaatgccttgatcaggatattttaaatattctgttctttggtcattgtatttttattagcggcgattatgattgcttttatggcatcgattatgagttaaaaaataaaagcgatgaagattataaaaagaccattaccgatgatactaagctgattcattatgttggcgtaacgaagccctggaacgactggacgaattatccctgccagaagtattttaatgaggcttatcaggcttcttgctggaatgatgtggcgtttattccagccacgaatgaaaagcagtatcaagtgaaatatcaacatgcaaagaaaaatggtgatacgtttaacgcttttatttactttattaaatttaaattaaataagtataaaagaaaactatttggataa

SEQ ID NO: 490381 - DNA, 366 bp, Shigella sonnei; identical to SEQ ID NO: 10065

SEQ ID NO: 490382 - DNA, 186 bp, Shigella sonnei; identical to SEQ ID NO: 487770

SEQ ID NO: 490383 - DNA, 582 bp, Shigella sonnei
ttgcaacgatttggccgccgcatcgaccttcgtgtgaaaacgggggctgaagccatccgggcgctggccacacagcttccgtcgtttcgccagaaactgaatgagggctggtatcaggtgcgcattgccgggcgtgatgcaggcgaaaatgaattatctgcccgtcttaatgagccgctggaaaatggtgccgtgattcacatcgtgccgcgtatggcgggagctaaaagtggcggtgtgtttcaggtggtgctgggggcggcgctgattgcggtggcatggtggaaccctgtgggctggctgggtgctgcggctgtatcgggcatgtatgcggcaggggccagtatgatcctgggtggtgtggcccagatgctggcaccgaaagccaggacgcccacggcagccagtacagataacggcaaacagaacacctatttctcctcactggataacatggttgctcagggcaatgttctgcctgttctgtacggtgaaatgcgtgtggggtcgcgggtggtttctcaggagatcagcacggcagacgaaggtgacggtggtcaggttgtggtgattggtcgctga

SEQ ID NO: 490384 - DNA, 192 bp, Shigella sonnei
atgcgactgatgctgcagattcagcacgtgcagccagcacgtcagccggacaggccgcttcgtcggctcagtcagcgtcttccagcgcaggaacggcatcaacaaaggccactgaagcctcaaaaagtgctgccgctgcagagtcctcaaaaagcgcggcggctaccagtgccggtgcggcgaaaacgttag

SEQ ID NO: 490385 - DNA, 201 bp, Shigella sonnei; identical to SEQ ID NO: 488102

SEQ ID NO: 490386 - DNA, 984 bp, Shigella sonnei
atggcgtcaggagctcggctgtcaatagcgctgacggaagcgggattaagtgaacggacgtggcgacgctggcaaacgtcgtgggaagacaagcgtgtcagcacggtcaggccctccccggtgaaccagttaagtgagcaagaagagcaacagatactggcagtgtgccatcagccagactacgccagcctccccccgtcacaaatcgtaccggcgttggcggataaggggatttatctggcaagcgagtcaaccttttaccgggtactgcgtcgtcatggagaggtgcatcgtcggggacggcaacgggcagcgcagaaagtcaccccggctacgagttggcaggccagcgggccgaatgaggtgtggacatgggacattacatgggttccgtcaaccgtaaaggggcgctggttttacctgtatctggtggaagacctctacagccgaaaaatcgtgggatatgaagtgcatgaaactgaaagtggtgagcaggcggcagccctgatacaacgcacggtccttcgggaaggatgctggcaaaacccgccggtactgcatgcggacaacggcgcggcgatgaagtcacagacgttgcaaatgaagctacacgagctggcgataaccccctctcacagccggccgggagtgagtaacgataatgcgtatgtggagtcgctgttccggacactgaaatatgtcccgcagtggccgtcatcagggttcggcaagctggaggaggcgcgtgaatggatagaggtttttgctcagtggtataacgaaatgcacagacatagcggcatcaggtatgtgacgccgggtcagcgacatcgtggagaagacggtgtgttgctgaaaaatcgggatgaggtgtacaaaaaggcaaaagcggaacggcctgaacgctggtctggcagaacacgaaactggcatccggtaggcaaggtaatgctgaatccagaacgggaaaaacaggcagcctaa

SEQ ID NO: 490387 - DNA, 504 bp, Shigella sonnei; identical to SEQ ID NO: 31057

SEQ ID NO: 490388 - DNA, 381 bp, Shigella sonnei; identical to SEQ ID NO: 458903

SEQ ID NO: 490389 - DNA, 381 bp, Shigella sonnei; identical to SEQ ID NO: 458903

SEQ ID NO: 490390 - DNA, 1854 bp, Shigella sonnei; identical to SEQ ID NO: 485602

SEQ ID NO: 490391 - DNA, 378 bp, Shigella sonnei; identical to SEQ ID NO: 476066

SEQ ID NO: 490392 - DNA, 381 bp, Shigella sonnei; identical to SEQ ID NO: 458903

SEQ ID NO: 490393 - DNA, 480 bp, Shigella sonnei; identical to SEQ ID NO: 464934

SEQ ID NO: 490394 - DNA, 1323 bp, Shigella sonnei
atgtctgcaacaaaactgacccgccgcgaacaacgcgcccgggcccaacattttatcgacaccctggaaggcaccgcctttcccaactcaaaacgcatttatatcactggcacacaccccggcgtgcgcgtgccgatgcgtgagatccagcttagcccgacgctaattggcggtagcaaagaacagccgcagtacgaagaaaacgaagcgattccggtctacgacacctccggcccgtatggtgatccgcagatcgccattaacgtgcagcaagggctggcaaaactacgccagccgtggatcgatgcgcgcggcgataccgaagaacttaccgtgcgcagttccgattacaccagaacgcggctggcagatgatggtctcgacgagctacgttttagcggcttattaacgccaaaacgcgccaaaacaggacgccgtgtcacccaactgcactacgcccgccagggcatcatcacgccggaaatggaattcatcgccatccgcgagaatatgggccgcgagcgcatccgtagcgaggttttacgccaccagcatccgggaatgagctttggcgcacatctgccggaaaatatcactgcggaatttgtccgtgatgaagttgctgccggacgtgcgattatcccggccaacattaatcatccggaatcggagccgatgattattggtcgcaatttcctggtaaaagttaacgccaatatcggcaactcggcggtcacctcttccatcgaagaagaagtggaaaagctggtatggtccacgcgctggggagcggatacggtgatggatctctccaccggtcgctatattcacgaaacccgcgagtggattttgcgtaacagcccggtgccgatcggtacagtgccgatctaccaggcgctggagaaggttaacgggatcgccgaagatcttacctgggaagcgttccgcgacacgctgctggaacaggccgagcaaggtgtggattacttcactatccatgcgggcgtactgctgcgctatgtgccgatgaccgcgaaacgcctgaccggtatcgtctctcgcggcggttcgattatggcgaaatggtgcctctcccatcatcaggaaaatttcctctatcaacacttccgcgaaatttgtgaaatctgtgccgcttatgacgtttcgctgtcgctgggcgacggtctgcgccccggttctattcaggacgccaacgatgaagcgcagtttgccgagctgcatacgctgggcgaactgaccaaaattgcctgggaatatgacggagtgacatcaacgggctggcgcagcagcgcccgcagataa

SEQ ID NO: 490395 - DNA, 774 bp, Shigella sonnei
atggatcgtataattgaaaaattagatcacggctggtgggtcgtcagccatgaacaaaaattatggttgccgaagggagaattgccatatggcgaagcggcaaatttcgatcttgtgggtcagcgcgcactacaaatcggcgaatggcagggggaacctgtttggttagtacaacagcagcggcgtcacgatatggggtcggtacgtcaggtcattgatctcgatgttgggctgtttcaactggccggacgaggcgtacaactggcggagttttaccgatcgcataaatactgtggttactgcggtcatgaaatgtatccgagcaaaaccgaatgggcgatgctgtgcagccattgccgtgagcgttactacccgcaaatcgccccctgcattattgttgccatccgtcgcgatgattcgatcctcctcgcccagcatacccgccatcgtaacggtgtccatacagtacttgccggattcgtcgaagtgggcgaaaccctcgagcaggcagtcgcgcgggaagtgatggaagagagcggaattaaagttaaaaacttgcgttacgtgacttctcagccgtggccgtttcctcagtctttaatgaccgcgtttatggcggaatatgacagcggcgacatcgtgatcgacccgaaagaattgctcgaggcgaactggtatcgctatgacgatttgccgttactcccgccgcccggcaccgtagcgcgccgtctgatagaagatactgtggcgatgtgtcgggcagagtatgagtga

SEQ ID NO: 490396 - DNA, 477 bp, Shigella sonnei; identical to SEQ ID NO: 459483

SEQ ID NO: 490397 - DNA, 543 bp, Shigella sonnei; identical to SEQ ID NO: 464540

SEQ ID NO: 490398 - DNA, 156 bp, Shigella sonnei; identical to SEQ ID NO: 489386

SEQ ID NO: 490399 - DNA, 1554 bp, Shigella sonnei
atgacagaatcagctaaaaccgccagtggtaattacactgtcacggtatccaatggcagcggtatctgtggtacagccagcctgtcagtagaaggaaacggaacaacagatcaatcgacgattggaaaattctttaatcccttcagtaaaaacgaatacagcggtgttatctcagcacaacgtgcagccatggataatatgattagcgacatggacaacgctgccagtgagtttgtgacaacatttctggaaaaaagaaattctggcaacggaacattgccggatatcgagacacggattcagagagcagccgacgagtatgagcgtgctgtacaaaaatcgctacctattgataacggagaacaatccaggaaagaagctctcaagtcttatctcacaacctatggatgggtaacgcttggcgcgtggtatcagacctttgccactgctaaccagcgtctggcagagctggctgacagagctccagctgtaacttcaatgtcatcacttggggaagttggcgatactgatttatttagtgctgttatgggggcatacaagactcaattgcagaattcaacttataccccacctttaggtactataacttcagcagacgaacaactactttcaaaaacaagcacgccacaagatgctttaatcaagcccacagagaagtttgggcaatggcttacgaacaatattgccaccgagtggactgattcgggtacaagtagcaatcaagttaatccactgataaaaatgaaaaatattggtgataaaactatggtcgctgcagagggtatttggattacttatacatctgctagagttattacttcaggaactgggagttctatatttggtaaattcatagatttgacgacaagtgctatttcaacactaaatgccttacttgaggccttagcgccccccgtatactttctgttactactgctgttttgtgcaggattctctttatctatttatttaccatttattccgtttattttctggatgactgggattggtaactgggtcattagtgtattaatcggatgtacagctggacctctgtggggggcaactcatctaggcacatcacaggacagagggagtcgtgctgcctacggttatatatatttaatagacagcatgataagaccacctatcatggttttcggattcttttttgcctctgtagccattatagcaataggtactatattaaactttttattcggtgctgcactgaccaatgtacaaataagttcatttacaggtatatttagcctcgcaggtttcttacttctttatgctagaagttgcacaaccattgtagccgcagcatttgccttacaagcatacctcccagaccatgtaattaatttcctaggaggacgtgatggtgtaaacacgcttggcaatatggctggttcaataaaagagatttttgctggcagcaatagaaacataagacacgcacctaatataagagaggagcaaattaaaaggatgaataacgacaacaataaggatggaataaagggataa

SEQ ID NO: 490400 - DNA, 378 bp, Shigella sonnei; identical to SEQ ID NO: 476066

SEQ ID NO: 490401 - DNA, 543 bp, Shigella sonnei; identical to SEQ ID NO: 464540

SEQ ID NO: 490402 - DNA, 186 bp, Shigella sonnei
atgataaccattcccattacgttttatatgttgatagcaaagtatctctgtctgctgaagcccttttggctgcgtaagaataataaaacttcagtgttgttaatcattattatcctcgcaatgatccttggcgtggttaaaattcaggtctggttaaacgactggaataatgatttttacccataa

SEQ ID NO: 490403 - DNA, 525 bp, Shigella sonnei; identical to SEQ ID NO: 487961

SEQ ID NO: 490404 - DNA, 609 bp, Shigella sonnei; identical to SEQ ID NO: 486524

SEQ ID NO: 490405 - DNA, 201 bp, Shigella sonnei
atgctgtatccgcgtgtggaacaccaggcggtgctggctgtcgtagtggtgggtccgctcgtcgtccgtccgtatcacacccgtcgggatgcggtccgtcttctccgtcagtctgccgtattcatcatagtggtaaacatagtgcgcatcctctgcgatgcggttatccggccacgccgtgagcgtgctgtccgggtgtag

SEQ ID NO: 490406 - DNA, 1404 bp, Shigella sonnei
atgggcttcctggaacttctgtcgggttctggtcttagcaaggagcaacgggtggaggcgatttcacttgcctactccaccggacaatcactcctcggcttaattggtgaaatccttgatgtcgacaaaattgaatcgggtaactatcaacttcaaccacaatgggtcgatatccctactttagtccagaacacttgtcactctttcggtgcgattgctgcaagcaaatcgatcgcattaatttgcagcagtacatttcctgatcattacctggttaagatcgaccctcaggcgtttaagcaggtcttatcaaatttactgagcaatgctctcaaatttaccaccgagggggcagtaaaaattacgacctccctggttcacattgatgacaaccacgctgttatcaaaatgacgattatggattctggaagtggattatcgcaggaagaacaacaacaactctttaaacgctacagccaaacaagtgcaggtcgccagcaaacaggatctggcttaggcttaatgatctgcaaagaattaattaaaaatatgcagggcgatttgtcattagaaagtcatccaggcataggaacaacatttacgatcacaatcccggtagaaattagccagcaagtggcgactgtcgaggcaaaagcagaacaccccatcacactacctgaaaagttgagcatattaatcgcggatgatcatccgaccaacaggctattactcaaacgccagctaaatctattaggatatgatgttgatgaagccactgatggtgtgcaagcgctacacaaagtcagtatgcaacattatgatctgcttattactgacgttaatatgccgaatatggatggttttgagttgactcgcaaactccgtgagcaaaattcttccttacccatctgggggcttacagccaacgcacaggctaacgaacgtgaaaaagggttaagttgcggcatgaacttatgtttgttcaaaccgttgaccctggatgtactgaaaacacatttaagtcagttacaccaggttgcgcatattgcacctcagtatcgccaccttgatatcgaagccctgaaaaataatacggcgaacgatctacaactgatgcaggagattctcatgactttccagcatgaaacgcataaagatctacccgctgcgtttcaagcactagaagctggcgataacagaactttccatcagtgtattcatcgcatccacggtgcggctaacatcctgaatttgcaaaagttgattaatattagccatcagttagaaataacacctgtttcagatgacagtaagcctgaaattcttcagttgctgaactctgtaaaagaacacattgcagagctggaccaggagattgctgttttctgtcagaaaaatgactaa

SEQ ID NO: 490407 - DNA, 498 bp, Shigella sonnei
atgaaatcattaaccctcttcaatcaaccaattcgtatcggtgaagatggcatgatctgcctcactgatatgtggaaagccagtggtaaaagtgaatctgaatcgccttaccactacctgcgaaacaagcagaccaaagagttcttagccgagctggagaaaaaccacgaatctgtggtttttactgagcgcggtgtacacggtggaacatatggcgggaagtttgttgcttacgattatgcggcttggttaaaccccgggttcaagtacgcggcctataaagtcctcgatgactacttcaccggagaacttcagcatcgcaacagcttaagtgcgcagctcaacatgaaatgtcatgaatttgaccagaagaaagacatggcgagcttctgcggacaagggctggcagcatggcgctatacgaagccagtgttggtcgctgagattaactccctggctaaccagctgcagattacgatccccgggcttccgggatga

SEQ ID NO: 490408 - DNA, 528 bp, Shigella sonnei; identical to SEQ ID NO: 469185

SEQ ID NO: 490409 - DNA, 987 bp, Shigella sonnei; identical to SEQ ID NO: 488079

SEQ ID NO: 490410 - DNA, 378 bp, Shigella sonnei
atggacgaacagtggggctatgtcggggctaaatcgcgccagcgctggctgttttacgcgtatgacagtctccggaagacggttgttgcgcacgtattcggtgaacgcactatggcgacgctggggcgtcttatgagcctgctgtcaccctttgacgtggtgatatggatgacggatggctggccgctgtatgaatcccgcctgaagggaaagctgcacgtaatcagcaagcgatatacgcagcgaattgagcggcataacctgaatctgaggcagcacctggcacggctgggacggaagtcgctgtcgttctcaaaatcggtggagctgcatgacaaagtcatcgggcattatttgaacataaaacactatcaataa

SEQ ID NO: 490411 - DNA, 414 bp, Shigella sonnei; identical to SEQ ID NO: 488202

SEQ ID NO: 490412 - DNA, 738 bp, Shigella sonnei; identical to SEQ ID NO: 487141

SEQ ID NO: 490413 - DNA, 153 bp, Shigella sonnei; identical to SEQ ID NO: 38791

SEQ ID NO: 490414 - DNA, 177 bp, Shigella sonnei; identical to SEQ ID NO: 487752

SEQ ID NO: 490415 - DNA, 177 bp, Shigella sonnei; identical to SEQ ID NO: 485877

SEQ ID NO: 490416 - DNA, 483 bp, Shigella sonnei
atgcgtaaagtttgtgcagccattttgtccgcagccatttgtctggccgtatccggtgcgcctgcatgggcgtctgaacatcagtccacgctgagcgcggggtatcttcatgcccggaccaacgttcccggcagtgatgatctgaacgggattaacgtgaaataccgttatgagtttacggatacgctggggctggtgacgtcattcagctatgcaggagacaagaatcgccagctgacccattacagcgatactcgctggcatgaagattccgttcgtaaccgctggttcagcgtaatggcggggccgtctgtgcgcgtgaatgaatggttcagcgcgtatgcgatggcgggtgtggcttacagccgtgtgtcgactttttccggggattatatccgcgtaactgacaataaggggaaaacgcacgacgtgctgaccggaagtgatgacggtcgccacagcaacacgtctctggcgcactga

SEQ ID NO: 490417 - DNA, 147 bp, Shigella sonnei; identical to SEQ ID NO: 465857

SEQ ID NO: 490418 - DNA, 180 bp, Shigella sonnei; identical to SEQ ID NO: 461173

SEQ ID NO: 490419 - DNA, 195 bp, Shigella sonnei; identical to SEQ ID NO: 464447

SEQ ID NO: 490420 - DNA, 147 bp, Shigella sonnei; identical to SEQ ID NO: 488958

SEQ ID NO: 490421 - DNA, 180 bp, Shigella sonnei; identical to SEQ ID NO: 476577

SEQ ID NO: 490422 - DNA, 276 bp, Shigella sonnei; identical to SEQ ID NO: 484087

SEQ ID NO: 490423 - DNA, 291 bp, Shigella sonnei; identical to SEQ ID NO: 467055

SEQ ID NO: 490424 - DNA, 177 bp, Shigella sonnei
atgaatctggtagacgcctttgtcaaaaaagtaatatccgggccatatgaagaatatggaaaatggtggatagatgtcgaatacatttcatggggtgttcccgggaaaacaagactgatgtttgactcaaaggagcaggcactggaagttaaggaagggtacaaatttttaacatga

SEQ ID NO: 490425 - DNA, 378 bp, Shigella sonnei; identical to SEQ ID NO: 476066

SEQ ID NO: 490426 - DNA, 213 bp, Shigella sonnei; identical to SEQ ID NO: 486092

SEQ ID NO: 490427 - DNA, 1779 bp, Shigella sonnei
gtgagtatccgtgagaacgacgacggcacgtatgccatcaccgccgtgcagcatgtaccggaaaaagaggccatcgtggataacggggcgcactttgacggcgaccagagcggcacggtaaatggtgtcacgccgccagcggtgcagcacctgactgccgaagtcaccgcagacagcggggaatatcaggtgctggcgcgctgggacacgccgaaggtggtgaagggcgtgagcttcctgctccgtctgaccgtaacagcggatgacggccgtgagcggctggtcagcacggcccggacgacggaaaccacttaccgcttcacacaactggctctggggaactacaggctgacagtccgggcagtaaatgcgtgggggcagcagggcgatccggcgtcggtatcgttccggattgccgcaccggcagcgctgtcgcggattgagctgacgccgggctattttcagataaccgccacgccgcatcttgcggtttatgacccgacggtacagtttgagttctggttctcggaaaagcggattgcggatatcaggcaggttgaaaccacagcacgctatcttggcacggcactgtactggatagccgccagtatcaatatcaaaccgggccatgattattatttttacgttcgcagtgtgaacaccgttggcaaatcggcattcgtggaggctgtcggtcagccgagtgatgatgcatcaggctatctggattttttcaaaggcgagatagggaaaacccatctggctcaggagctgtggacgcagattgataacggtcagcttgcgcctgacctgactgaaatcaggacgtccataacggatgtcagcaatgaaataacacagaccgtcaataagaaactggaagaccagagtgcagcgatccagcagatacagaaggttcaggttgatacaaataataacctgaacagcatgtgggcagtgaagctgcagcagatgcaggacggacgcctttatattgcgggtatcggtgccggtattgagaacacccctgacggcatgcagagtcaggtgctgctggcagcagacaggattgcgatgattaatcctgcgaatggcaacacaaagccgatgtttgttggtcagggcgatcagatattcatgaatgaagtgttcctgaaacgcctgacggcccccaccattaccagcggcggtaatcctccggcattttccctgacatcagacgggagactgacggcgaaaaatgcggatatcagtggcagtgtgaatgcgaactcaggaacgctcaacaatgtcacgattaaccagaactgtacgattaagggcatgctggaggcgacccaggtcagaggagatttcgttaaagctgtatcaaaagccttcccgaaaaaagtcggtacgtggggtaacacggaaacaccaaacggtacggttacagtcaccatcagcgatgatcataactttgaccgccagattattattccgcccattatttttaacggtatagcgtatgacgatccggggagcggaaataacccgggaggcacgcgatacacgggttatggttttgaagttcgcaaaaacggcgtattaatcgcatccagagaaactaaaggggccattcccggtagttacagtgcagttattgatatgcctagtggtggtggtagcgtcactctggagtttaagattttccagaaaggcaatcagggggcaggcaatatcaccgactgtacggtgattgtgaccaaaaaagcggcttccggcatcagtattcgttga

SEQ ID NO: 490428 - DNA, 672 bp, Shigella sonnei
atggcagcgacgcacacactccctctggcgtcaccgggcatggcgcgcatctgcctttacggggatttgcaacgatttggccgccgcatcgaccttcgtgtgaaaacgggggctgaagccatccgggcgctggccacacagctccctgcgtttcgtcagaagctgagcgacggctggtatcaggtgcgtattgccgggcaggatgttagcacgtccggattaacggcgcagttacatgaggctctgcctgacggcgctgtgattcatattgttcccagagtcgccggggccaagtcaggtggtgtattccagattgtcctgggagcagccgccattgccggatcattctttaccgccggagccacccttgcagcatggggggctgccattggtgccggtggtatgaccggcattctgttttctctcggtgccagtatggtgctcggcggtgtggctcagatgctggcaccgaaagccagaactccccgcacacagacaacggataacggtaagcagaacatctatttctcctcactggataacatggttgcccagggcaatgttatgcctgttctgtatggtgaaatgcgcgtggggtcacgtgtggtatctcaggagatcagcacggcagacgaaggggacggtggtcaggttgtggtgattggtcgctga

SEQ ID NO: 490429 - DNA, 516 bp, Shigella sonnei
gtggctgttgaagcggatgatgcggcgctttctgccgattttccggcggcggtggcactggctgaggcctgcccggcacttgttgacgcggcgctggcagacgacgcagccgctgtttttgagcctgccgcagctgaggcactctgtcccgctgccgtttcagaagacctggcgttcgtctcggacgttttggccgccttcgcagaatttgcagccgccgtcgccgaggaagctgcgctactggcgcttgatgatgcgttcgtttctgatgattttgccgcctcttttgaagccgacgcatcccgggctgaggtggcagcttctgacgctttcgtggtcgcggtggatgcagaagtggctgctgattgttgtgacgctgccgcattcgtttctaacgttttcgccgcaccggcactggtagccgccgcgctttttgaggactctgcagcggcagcactttttgaggcttcagtggcctttgttgatgccgttcctgcgctggaagacgctgactga

SEQ ID NO: 490430 - DNA, 303 bp, Shigella sonnei; identical to SEQ ID NO: 21213

SEQ ID NO: 490431 - DNA, 303 bp, Shigella sonnei; identical to SEQ ID NO: 21213

SEQ ID NO: 490432 - DNA, 123 bp, Shigella sonnei
atgggcgctaaacatgaaaaaagattcgtatccttatttgatttgcatgacagtttcagggctgatctttattttccttttcttctggtggcgggcagatatctacagggtcacgtttcttaa

SEQ ID NO: 490433 - DNA, 483 bp, Shigella sonnei; identical to SEQ ID NO: 485695

SEQ ID NO: 490434 - DNA, 378 bp, Shigella sonnei; identical to SEQ ID NO: 476066

SEQ ID NO: 490435 - DNA, 246 bp, Shigella sonnei
gtgatttgttttgatttggcgattgatcagatcgcacaatccgggctaagttccctcaaagtgatctactattccgcgcagctatttagcggtaaacgctatccgattgatgtgaaaatgattgcaccatttagtgatgaggtcatgaaagtcactggccttaatggcaaagcaagttctgcaaaagtacatttttacgccattaatgattttggtggcgccattgaaggtaatgccagtctgtaa

SEQ ID NO: 490436 - DNA, 378 bp, Shigella sonnei; identical to SEQ ID NO: 476066

SEQ ID NO: 490437 - DNA, 378 bp, Shigella sonnei; identical to SEQ ID NO: 476066

SEQ ID NO: 490438 - DNA, 2784 bp, Shigella sonnei; identical to SEQ ID NO: 485287

SEQ ID NO: 490439 - DNA, 186 bp, Shigella sonnei; identical to SEQ ID NO: 490402

SEQ ID NO: 490440 - DNA, 282 bp, Shigella sonnei; identical to SEQ ID NO: 487352

SEQ ID NO: 490441 - DNA, 171 bp, Shigella sonnei
gtgctgaccggaagtgatgacggtcgccacagcaacacgtctctggcgtggggagctggcgtgcagtttaacccgaccgaatccgtggccattgatattgcttatgaaggctccggcagtggcgactggcgcactgacggtttcatcgtgggtgtcggttataagttctga

SEQ ID NO: 490442 - DNA, 573 bp, Shigella sonnei
gtgaaaacgggggctgaagccatccgggcgctggccacacagctccctgcgtttcgtcagaagctgagcgacggctggtatcaggtgcgtattgccgggcaggatgttagcacgtccggattaacggcgcagttacatgaggctctgcctgacggcgctgtgattcatattgttcccagagtcgccggggccaagtcaggtggtgtattccagattgtcctgggagcagccgccattgccggatcattctttaccgccggagccacccttgcagcatggggggctgccattggtgccggtggtatgaccggcattctgttttctctcggtgccagtatggtgctcggcggtgtggctcagatgctggcaccgaaagccagaactccccgcacacagacaacggataacggtaagcagaacatctatttctcctcactggataacatggttgcccagggcaatgttatgcctgttctgtatggtgaaatgcgcgtggggtcacgtgtggtatctcaggagatcagcacggcagacgaaggggacggtggtcaggttgtggtgattggtcgctga

SEQ ID NO: 490443 - DNA, 189 bp, Shigella sonnei; identical to SEQ ID NO: 463227

SEQ ID NO: 490444 - DNA, 189 bp, Shigella sonnei; identical to SEQ ID NO: 463227

SEQ ID NO: 490445 - DNA, 180 bp, Shigella sonnei; identical to SEQ ID NO: 476577

SEQ ID NO: 490446 - DNA, 366 bp, Shigella sonnei
atgctggaagcggccagagaggccagacgtcaggaaattgaagcatggcgcacagaacaggaggcgaagccgttcacgtttgaatggaacggtcgtatctggaatgctggccccgactcactgggccgcctgtccccggtagtcatgctggcaaaatctgtcacagcacaaacacatatggcgtggggtgatgccgataatcagcaggtgaaactgtcgatgccggaactggaagaactggcggcagcaatggtgcaggcgcaggtcgatcgcaacgatgagatttatcgccgtcagcgtgaaatgaaagaggagctgagcggtctggatgatttggcttcaattcgggcgtttgacgttgagtaa

SEQ ID NO: 490447 - DNA, 180 bp, Shigella sonnei; identical to SEQ ID NO: 461173

SEQ ID NO: 490448 - DNA, 534 bp, Shigella sonnei; identical to SEQ ID NO: 403765

SEQ ID NO: 490449 - DNA, 513 bp, Shigella sonnei; identical to SEQ ID NO: 19198

SEQ ID NO: 490450 - DNA, 804 bp, Shigella sonnei; identical to SEQ ID NO: 6089

SEQ ID NO: 490451 - DNA, 1467 bp, Shigella sonnei
atgaagacaattgcctccgttacgctcccgcatcatgtacacgctccacgctacgatcgccagcagttgcaatcacgtatcgttcattttggctttggcgcctttcaccgcgctcatcaggcgttactgaccgatcgtgtgctgaatgcccagggcggcgactgggggatctgtgaaatcagcttgttcagcggtgatcaactgatgagccagctccgcgcacagaaccatttatataccgtgctggagaaaggtgcggacggcaatcaggtgataattgtcggtgccgttcacgaatgccttaatgcaaaactggattccttagcggcaattattgagaaattttgcgagccacaggtggcaattgtttccctgacgattaccgaaaaaggctattgtattgacccggccaccggtgcactcgacaccagtaatccgcggattattcacgatctacaaacccctgaagaacctcactccgcaccgggtattctcgtcgaagcactgaaacgccgccgtgagcgcggccttacaccgtttaccgtgctctcctgcgacaatattcccgacaatggccatgtggtgaaaaacgcggtgctgggaatggcagaaaaatgttcgccagaactcgccgggtggataaaagaacacgtcagttttccgggaaccatggtcgaccgcattgttccggctgcaaccgacgaatcactggcagaaatcagccagcatctgggggtaaatgatccctgcgcgattagctgcgaaccgtttatccagtgggtggttgaagataacttcatcgctgggcgtcctgcctgggaagtcgcaggtgtacaaatggtgaatgatgtcctgccatgggaagagatgaaactgcgtatgcttaatggcagccactcttttctcgcttatctgggttacctctcaggattcgtccatatcagtgattgcatgcaggatcgcgtatttcgccatgctgccagaacattaatgctggatgagcaagcgccgacactgcaaattaaagatgtcgatttaacacaatatgcggataagttaattgcacgttttgctaatccgtcgctgaaacataagacctggcaaatcgcgatggatggcagccagaaattaccgcaacgtatgctggcaggtattcgcatacatctggggcgtgaaacggactggtcgttgctggcattaggcgttgctggctggatgcgttacgtcagcggcgttgatgatgccggaaatgccattgatgttcgcgatccgcttagcgataaaattcgcgaacttgttgcgggcagcagcagtgaacaacgcgtaaccgccctgctttccctgcgtgaagttttcggtgatgatctgccagataacccgcattttgtgcaggccatcgaacaagcctggcaacaaatcgtacaattcggcgcacatcaggcgctattaaacaccctcaaaatttaa

SEQ ID NO: 490452 - DNA, 2034 bp, Shigella sonnei
gtggcgcttgaggatgcgagcacgacgaaaaaggggatagtacagctcagcagtgcgaccaacagtacgtctgaaacgctggcggcaacgccaaaggcagtaaaatcagcctatgacaatgcagagaaacgtctgcagaaagaccagaacggcgctgatatacccgataagggacgcttcctgaacaacattaacgcggtcagtaaaacagactttgctgataagcgtggtatgcgttatgtgcgggttaacgctcctgcaggtgcaacatctggaaaatattaccctgttgttgttatgcgttctgctggctcagtaagcgaactggcatcaagggtcattatcaccacggcaacgcgaagcgcaggcgatccgatgaataactgcgagtttaacggatttgttatgcctgctggctggagtgacagggggcgttatgcttatggaatgttctggcaatatcaaaacaatgaacgagccatccactcaataatgatgagtaataagggcgatgatttgcgctctgtgttctatgttgatggcgctgctttccctgtttttgcgtttatcgaagatggcctgtcaatatccgcacctggtgctgatctcgttgttaatgatacgacctataagtttggtgcaacaaatccagcgactgaatgtatcgcggcggacgttatccttgattttaagagtgggcgtggtttttatgagtctcattcgttaatcgttaacgataacttgtcgtgcaaaaaactttttgccacagacgaaattgtagcgcgtggtggtaatcagattcgaatgataggtggggagtatggtgcattatggcgtaatgatggcgctaaaacttacctgctgcttaccaatcaaggtgatgtttatggtggctggaatacattaagaccgtttgctattgataacgcaaccggcgagctggttattggaaccaaactgtccgcaagtctgaacggtaatgcattaacagcaacaaagctgcaaacaccaagactggtttctggggttgagtttgatggttccagagatattactttaaccgccgcgcatgtggctgcttttgccagaagggcaacggatacatatgccgatgcggatggtggcgttccctggaatgccgaatcaggcgcttacaatgtcacccgctctggcgacagctatattctggttaacttctataccggagtcggaagttgccggaccttgcagatgaaggcgcattacagaaatggtggtctgttctaccgttcttcaagagacggttatggttttgaggaagactgggcagaagtttatacctcgaaaaatcttccaccagaaagctacccagtcggcgcaccaatcccgtggccatcagataccgttccgtctggttatgccctgatgcaggggcagacttttgacaaatctgcttacccgaaacttgcagccgcttatccgtcaggcgtgatccctgatatgcgtggctggacgattaagggcaaacctgccagtggtcgggccgtattgtctcaggaacaggacggcattaaatcgcacacccacagcgccagcgcatccagtacggatttggggacgaaaaccacatcatcgtttgattacggcactaaatccacgaataacactggtgcgcatacccatagtttaagtggcagcacgaatgcagctggtaatcacagccatagagatggccgtcgatttaaccccagtgtttttaaagatacttatcaatatggttatacaagctcaggtcaaaatacctggggtgtacaaggctcagtaggtatgtctacgggggcgttagctaataccagtacagatggtaatcatagccactcactgtccggcacagcagcatctgcaggtgcacacgcgcatactgtcggtattggtgctcatacgcactctgttgcgattggctcacatggacacaccatcaccgttaacgctgctggtaacgcggaaaacaccgtcaaaaacatcgcatttaactatattgtgaggcttgcataa

SEQ ID NO: 490453 - DNA, 216 bp, Shigella sonnei; identical to SEQ ID NO: 23100

SEQ ID NO: 490454 - DNA, 711 bp, Shigella sonnei
atgaccaacgatatttacattaacggtaaaaagattgatagcttcggtgactggtcaccaacgactgaacatccagctatcgctattcagcgtaaagaacacgatgcgagaattgcacttgagcaagaaatccgaaggtcaccaaagcaaattacctttgtgtctcctgagcctcaagaaatgcctgatgtttgcaagggtgaagcattacttgagcttgaaaagaaatattacccactgctgaaagcacagcgtattaaacttgatgacgcttacagcaaagttaccttgatgcaatcagctattgagccatcagaatttgagattcaggatgaattgtcacagaaaccatttgtctattaccaatacgaagacaatgacggttttggtatttatccagaaaacgtcacagccgcgattagtagtcttcctgatgaatatcgaattgtgaagatggttaaagcatcaagaggtgctggtcagtttatttatatgaccaataagagcgatgaggaactccgtgaaattgccagacagaacatcttagcatcacgtaacaagcaacttgatagtgctaagttgtatctctcaagagagcttcaggctatgaaagaccttatttctgcatatgaaacgcagaagaaggttgctatgcaggctgatattgagcagttagtgaagatttctagcaaatatgcaaaggctatttaa

SEQ ID NO: 490455 - DNA, 141 bp, Shigella sonnei
atgcttttcgtcatggcctttcagtttagtctgagaggctatctcaaaaagtgcttaatcattcattcattgaatcctttacagctttgccctaatcatgagttagggcgtttctttaagagttttaagcagagcttttaa

SEQ ID NO: 490456 - DNA, 210 bp, Shigella sonnei; identical to SEQ ID NO: 16246

SEQ ID NO: 490457 - DNA, 390 bp, Shigella sonnei
atgttggtggcttcttcattggagtacatatgcccccacgaaccccaaaaacctgccgtgttcgcggctaccgcaataccaccacagatccgtcaggctattgcaaaagccacaaaagcgaaggctggaagcaatacaagccgggccagtcctgtcatcagcgcggttatggttcgcggggttgtccctcatgctcgccagtcctgtgcgggggggggaagaaacaggacactcacacagatttttgtgggtcgatgctattcctttctggattatcccgatgccattcatgcaagggctgtatcagacgttcgtcatggctgtcaggctgacgggtcctcccggtgggggggcctgccacggggcgggagcgtcgcggaaaaaggctag

SEQ ID NO: 490458 - DNA, 462 bp, Shigella sonnei
gtggcgttgacaagaacgctggcacaggagctgcgcccggttatttctgccgtcacggaaaccattgaggccggcacgctgcgcctggagatccgcgttgacggccagcaccccggagaacgcccgggggcctggtacaccacaccccgtctgcacctgctgatcaccggccaggacttcgtggtgccgtacggctgggaagcgttatccgaactgctgggcctgttcacgctgtatgcccggcatccggaagccctgacgcacggtcaccagggggagcgagtgatgttctccccgcccggaaacgtcacgccggagggcttcttcgggatagacggcctgcggatttttatgccggcggaggcctttgagacgctggtccgggagctcgccacgcggtgtcaagaaggcccgctggcggaggccctgaccgggctgcgctgcctgtacggagatctgtaa

SEQ ID NO: 490459 - DNA, 1746 bp, Shigella sonnei
atgagcggtggcgatggacgcggccataacacgggcgcgcatagcacaagtggtaacattaatggtggcccgaccgggcttggtgtaggtggtggtgcttctgatggttccgggtggagttcggaaaataacccgtggggtggtggttccggtagcggcattcactggggtggtggttccggtcatggtaatggcggggggaatggtaattccggtggtggctcgggaacaggcggtaatctgtcagcagtagctgcgccagtggcatttggttttccggcactttccactccaggagctggcggtctggcggtcagtatttcagcgggagcattatcggcagctattgctgatattatggctgccctgaaaggaccgtttaaatttggtctttggggggtggctttatatggtgtattgccatcacaaatagcgaaagatgaccccaatatgatgtcaaagattgtgacgtcattacccgcagatgatattactgaatcacctgtcagttcattacctctcgataaggcaacagtaaacgtaaatgttcgtgttgttgatgatgtaaaagacgaacgacagaatatttcggttgtttcaggtgttccgatgagtgttccggtggttgatgcaaaacctaccgaacgtctaggtgtttttacggcatcaattccaggtgcacctgttctgaatatttcagttaataacagtacgccagcagtacagacattaagcccaggtgttacaaataatactgataaggatgttcgcccggcaggatttactcaggggggtaataccagggatgcagttattcgattcccgaaggacagcggtcataatgccgtatatgtttcagtgagtgatgttcttagccctgaccaggtaaaacaacgtcaggatgaagaaaatcgccgtcagcaggaatgggatgctacgcatccggttgaagcggctgagcgaaattatgaacgcgcgcgtgcagagctgaatcaggcaaatgaagatgttgccagaaatcaggagcgacaggctaaagctgttcaggtttataattcgcgtaaaagcgaacttgatgcagcgaataaaactcttgctgatgcaatagctgaaataaaacaatttgaacgatttgcacatgacccaatggctggcggtcacagaatgtggcaaatggccgggcttaaagctcagcgggcgcagacggatgtaaataataagcaggctgcatttgatgctgctgcaaaagagaagtcagatgctgatgctgcattaagtgccgcgcaggagcgccgcaaacagaaggaaaataaagaaaaggacgctaaggataaattagataaggagagtaaacggaataagccagggaaggcgacaggtaaaggtaaaccagttggtgataaatggctggatgatgcaggtaaagattcaggagcgccaattccagatcgcattgctgataagttgcgtgataaagaatttaaaaacttcgacgattttcggagaaaattctgggaagaagtgtcgaaagatcctgagttaagtaagcaatttaatccaggtaataaaaaacgcttaagccaaggattagctccacgggctaggaataaagatactgtcggtgggcgtcgctcatttgagcttcatcacgacaagccaatcagtcaggatggtggtgtttatgatatggacaacctccgtatcactacgccgaaacgccatattgatattcacagaggtcagtaa

SEQ ID NO: 490460 - DNA, 258 bp, Shigella sonnei
atggaactgaaaaacagcattagtgattacactgaaactgaattcaaaaaaattattgaagacatcatcaattgtgaaggtgatgaaaaaaaacaggatgataacctcgagcattttataagtgttactgagcatcctagtggttctgatctgatttattacccagaaggtaataatgatggtagccctgaagctgttattaaagagattaaagaatggcgagctgctaacggtaagtcaggatttaaacagggctga

SEQ ID NO: 490461 - DNA, 246 bp, Shigella sonnei
gtgctcaacaaactctccttactgctgaaagacgcaggtatttcgcttaccgatcaccagaaaaaccagcttattgcctacgtgaatatgctgcataaatggaacaaagcgtacaacctgacttcggtccgcgatcctaatgagatgctggtacgccatattctcgatagcattgtggtggcaccgtatctgcaaggtgaaccacggcagcctggcggctgcaaatcgtggtgtggcagaatatga

SEQ ID NO: 490462 - DNA, 777 bp, Shigella sonnei
atgaacgaaaacacaacgctgaacgcactgatttgtcgccacgcccgtaacctgctgctggcgcagggctggccggaagagacggatgttgaccagcgaaatccgaaccatccgggctggatcagcatttacgtgcggctggatgcgccccggctggcgacgttacttatcaaccgtcacggcggcgtactgccgccgcacctggcctctgccattcagaaactgaccggaaccggggcggaacttgttctgtccggcagtcagtggcagtcgctgccggtacttccggcagacggaacgcaggtgtctttcccgtatgccggtgagtggctggcagaagacgaaatcagggctgtacttgcggcggtgcgcgatgcaatacgaagcatctgttaccaggtggcagacgatgcgcggcgtatccgggcggcgctgaccaccaccggtcagacgttgctgacccgccagacgcgccgctttcgtctggttgtgaaggaaagcgatcacccctgctggctcgatgaagatgacgaaaacctgcccgtggtgctcgatgccatcgtgaaccggggagcacgtttttcgtcggtggaaatttacctggtcagcgattgtattgagcatatcctgtccagtgggctggcctgcgatgtgctgcgtataccggatgaaccgccccgccgctggtttgaccgtgatgttctgcgggaggtggtccgggaagcccgggccgaaatccgcagcatggcggatgccctggcaaaaatccggaaatga

SEQ ID NO: 490463 - DNA, 543 bp, Shigella sonnei
gtgaaagaaagcaatcagcgatggtgctctgacgggttcgagttctgctgtgataacggagagagactgcgtgtcacgttcgcgctggactgctgtgatcgtgaggcactgcactgggcggtcactacgggcggcttcaacagtgaaacagtacaggacgtcatgctgggagcggtggaacgccgcttcggcaacgagcttccggcgtctccagtagagtggctgacggataatggttcatgctaccgggctaatgaaacacggcagtttgcccggatgttggggcttgaaccgaagagcacggcggtgcggagtccggagagtaacggcatagcagagagcttcgtgaaaacgataaagcgtgactacatcagtgtcatgcccaaaccagacgggttaacggcagcaaagaaccttgcagaggcgttcgagcattataacgaatggcatccgcatagtgcactgggttatcgctcgccacgggaatatctacggcagcaagccagtaatgggttaagtgataacaggtgtctggaaatatag

SEQ ID NO: 490464 - DNA, 432 bp, Shigella sonnei
atgcaacccagccccgccatgcaggcattaattgagcagatttatcacacctttcgtcgttatcgggtgccgcagaaatttgtggtttgttgtgaatattgcctgagtcagcaggaacaaaaggcattacggagtacatcgttacgagcgatcccgtattccttaatcaatgcctggaatagtagcccagggcctgatccgcaaaatagcgatgaggtccgctattttctgccgcgtttactggaatttgttgcacaggggcattttgacaatattcacgtagttttttctctgcgccgtatcaaccttgccaacaaagaaaactggcgtgcggatgaacgggcaattttaggtaatgactccaacttattgatagtgttttatgttcagataatgcccgatgactttgtcatgcagctccaccgattttga

SEQ ID NO: 490465 - DNA, 303 bp, Shigella sonnei; identical to SEQ ID NO: 21213

SEQ ID NO: 490466 - DNA, 1209 bp, Shigella sonnei
atggctcaccctcatttattagcggaaagaatttcccgcctgagcagttcgttggaaaaggggctttatgaacgtagccacgccatccgcttgtgtttattagcggcattaagtggtgaaagtgtgttcctccttggcccgccaggtattgccaaaagtttgatcgcccggcgcttaaaattcgcctttcagaatgcccgcgcgtttgaatatctgatgacccgcttctccacgccggaagaagtttttggtcccctttctattcaggcgctaaaagatgaagggcgctatgaacgtttaaccagcggttacctgccggaagcagaaattgtctttctggatgagatctggaaagcgggcccggcaattcttaataccttgctcaccgccattaacgagcgccagttccgcaacggtgcacacgtagaaaaaatcccgatgcgtctgctggtggcggcctccaacgagctgccggaagcagacagcagtctggaagcgttatatgaccgcatgctgattcgtctgtggttagataaagtgcaggataaagcgaatttccgctccatgctgaccagtcaacaggatgaaaacgacaatccggttcctgatgccttgcaggtcacagatgaagaatatgaacgctggcagaaagagattggtgaaattacgctgcccgatcatgtatttgagctgatttttatgctgcgccagcaactggataaattaccggatgcgccttatgtctcggatcgtcgctggaaaaaagcgatccgattattgcaggccagcgccttttttagcggtcgcagtgctgttgccccggtagatctcattttgctgaaagattgcctgtggtatgacgcgcaaagcctgaatttgatacaacaacaaattgatgtattgatgaccggtcatgcctggcaacagcaagggatgttgactcgccttggcgcgattgtgcaacgtcacctgcaactccagcagcaacaaagcgataaaacagccttaacggtaattcgtctgggcggcattttcagccgtcgtcagcagtatcaacttcctgttaacgttactgcttccactctgactctactgctgcaaaaaccgttaaaactgcatgatatggaagtggttcatatctcctttgagcgtagcgcgctggaaccacggcagcctggcggctgcaaatcgtggtgtggcagaatatga

SEQ ID NO: 490467 - DNA, 135 bp, Shigella sonnei; identical to SEQ ID NO: 21373

SEQ ID NO: 490468 - DNA, 2037 bp, Shigella sonnei; identical to SEQ ID NO: 488156

SEQ ID NO: 490469 - DNA, 225 bp, Shigella sonnei; identical to SEQ ID NO: 133446

SEQ ID NO: 490470 - DNA, 225 bp, Shigella sonnei; identical to SEQ ID NO: 133446

SEQ ID NO: 490471 - DNA, 990 bp, Shigella sonnei
ttgctgttccagcttgcgcgctttggcacgggcaatagcggcttcgacggcggctttgcgcggatcgacctgttcttctggttccgcattagcctgttgctgttccagtttgcgcgctttggctcgggcaatagcggcttcgacggcggctttgcgcggatcgacctgttcttctggttccgcattagcctgttgctgttccagcttgcgcgctttggcacgggcaatagcggcttcgacggcggctttgcgcggatcgacctgttcttctggttccgcattagcctgttgctgttccagcttgcgcgctttggcgcgggcgatagctgcttcaacggcagttttacgtggatcagcaacggttgctgcgtcgttagtttgctgcagttctgcctgtttcgctctggcttgcgctttacgggcttcccgtgctgcaataattgcactgttatccgggcgttcgcccgctttaatcacaataggctgtgtagcctgggcctgtttctctttcacccgcgccagagcggcagcaatcgcatctttatctttggctgcaggttgaacggctgcgctcttatgtcgttcaaggcgagccgctttttcgcgctccagacgagcctggcgcgcttcgaaacgcgctttggcttctgcggcgcgcttttcttcctgacgaatagccgcaatttcagctttttcctgacggaaatattgcaccaggggaatattgctcgggcaaacccacgcgcaagccccacattcaatgcaatcagcaatgttatgcgtggtagctttatcgtgttgctgacctttgctgaaccagtacaactgttgcggcaaaagatccgcagggcaggcgtcagcacaggcgctacaccggatgcagctttgttcttcctgtggttcgccaagttcattggcagagggagccaacagacagttggtaatctttacgaccgggacatccagccatggcaaggtaaagcccattag

SEQ ID NO: 490472 - DNA, 225 bp, Shigella sonnei; identical to SEQ ID NO: 133446

SEQ ID NO: 490473 - DNA, 225 bp, Shigella sonnei; identical to SEQ ID NO: 133446

SEQ ID NO: 490474 - DNA, 159 bp, Shigella sonnei
atggaattacaggactggcgaaaagaacctcgtaaaaagtatttggtgcaaatcgttggttcctttgctgaatttgaacgcgccatgcttcgtgaacggacaaagagtggacttgcagcggcacgccaggacgggttggtggatggcgaccaaagttaa

SEQ ID NO: 490475 - DNA, 354 bp, Shigella sonnei; identical to SEQ ID NO: 489199

SEQ ID NO: 490476 - DNA, 219 bp, Shigella sonnei; identical to SEQ ID NO: 489200

SEQ ID NO: 490477 - DNA, 378 bp, Shigella sonnei
atgcttaaaggtgatgacgtatatattaatggcgatggtgaaacgagtcgtgatttttgttatatagataatgttatacaaatgaatatattatctgcattagcgaaggacagtgctaaagataatatatataatgttgcagttggtgatagaacaacgttaaatgaattatctggttacatttatgatgagcttaatttaattcaccatatcgataaattgagcattaagtatagagagtttagatctggagatgttaggcattctcaggctgatgttactaaggctatagatttactaaagtatagaccaaatataaaaatcagagagggattacgactttcaatgccgtggtatgtgagatttttaaaaggctaa

SEQ ID NO: 490478 - DNA, 273 bp, Shigella sonnei; identical to SEQ ID NO: 80730

SEQ ID NO: 490479 - DNA, 123 bp, Shigella sonnei; identical to SEQ ID NO: 461109

SEQ ID NO: 490480 - DNA, 1698 bp, Shigella sonnei
atgccatcagtaaatttaattccatcaaggaaaatatgtttgcaaaatatgataaataaagacaacgtctctgttgagacaatccagtctctattgcactcaaaacaattgccatatttttctgacaagaggagttttttattaaatctaaattgccaagttaccgatcactctggaagacttattgtctgtcgacatttagcttcctactggatagcacagtttaacaaaagtagtggtcacgtggattatcatcactttgcttttccggatgaaattaaaaattatgtttcagtgagtgaagaagaaaaggctattaatgtgcctgctattatttattttgttgaaaacggttcatggggagatattattttttatattttcaatgaaatgatttttcattccgaaaaaagcagagcactagaaataagtacatcaaatcacaatatggcattaggcttgaagattaaagaaactaaaaatgggggggattttgtcattcagctttatgatcccaaccatacagcaactcatttacgagcagagtttaacaaatttaacttagctaaaataaaaaaactgactgtagataattttcttgatgaaaaacatcagaaatgttatggtcttatatccgacggtatgtctatatttgtggacagacatactccaacaagcatgtcctccataatcagatggcctaataatttacttcaccccaaagttatttatcacgcgatgcgtatgggattgactgagctaatccaaaaagtaacaagagtcgtacaactatctgacctttcagacaatacgttagaattgcttttggcagccaaaaatgacgatggtttgtcaggattgcttttagctttacaaaatgggcattcagatacaatcttagcatacggagaactcctggaaacttctggacttaaccttgataaaacggtagaactactaactgcggaaggaatgggaggacgaatatcgggtttatcccaagcacttcaaaatgggcatgcagaaactatcaaaacatacggaaggcttctcaagaagagagcaataaatatcgaatacaataagctgaaaaatttgctgaccgcttattattatgatgaagtacacagacagatacccggactaatgtttgctcttcaaaatggacatgcagatgctatacgcgcatacggtgagctcattcttagcccccctctcctcaactcagaggatattgtaaatttgctggcctcaaggagatatgacaatgttcccggacttctgttagcattgaataatggacaggctgatgcaatcttagcttatggtgatatcttgaatgaggcaaaacttaacttggataaaaaagcagagctgttagaagcgaaagattctaatggtttatctggattgtttgtagccttgcataatggatgtgtagaaacaattattgcttatgggaaaatacttcacactgcagaccttactccacatcaggcatcaaaattactggcagcagaaggcccaaatggggtatctggattaattatagcttttcaaaataggaattttgaggcaataaaaacttatatggaaataataaaaaatgaaaatattacacctgaagaaatagcagaacacttggacaaaaaaaatggaagtgattttctagaaattatgaagaatataaaaagctga

SEQ ID NO: 490481 - DNA, 189 bp, Shigella sonnei
atggcaaagattgatgtggtttgtccccgttactctgaaactcaggggggtatccggaacggccattccagttcaggggggctgctctatcgctgtaagcagtgcctgaagaccttccagctcgactaccgctacaacggggcgaaacccatcaaactttccaactattatcacattgagccatactga

SEQ ID NO: 490482 - DNA, 1413 bp, Shigella sonnei
atgaatatatcagaaacactgaactcagcaaatacccaatgcaatatagattctatggataacagattacatacattgtttccaaaagtgacatcagtgcgaaacgctgcacaacaaactatgccagatgaaaaaaatttaaaagatagtgcaaatattattaaagatttctttaggaaaactatagcagcacagagttatagtagaatgttctctcaaggctctaactttaaatctttaaatatagcaattgatgcaccatcagacgctaaagcctcatttaaggctattgagcaccttgacagattatcgaagcattatatatctgaaataagggaaaaacttcatcctctttctgcagaggaactcaatttgctttcgctaattattaattctgatttaatcttcagacatcaaagtaattctgatttgtctgataaaattttaaacattaagtcattcaataaaattcagtctgaaggaatatgcacaaaacgaaacacatacgctgatgatataaaaaaaatagctaatcatgactttgtgttttttggcgttgaaatctctagccatcagaaaaaacaccccctgaatacaaaacatcacactgttgattttggtgcaaatgcgtatatcattgatcatgactctccatatggatatatgacattaaccgatcactttgataatgctattccacctgttttttaccatgagcaccaatcatttttagataaattttcagaggttaataaagaagttagtcgatacgtacatggaagtaaaggaattatagatgtaccaatattcaatactaaagatatgaagttagggctcggattatacctgattgactttattagaaaaagtgaagaccaaagcttcaaggagttttgctatggaaaaaatcttgcccctgtggatctggatagaatcataaactttgtttttcagccagagtaccatatacctaggatggtaagtacagaaaacttcaaaaaagttaagattagagaaatatccttagaggaggctgttacagcatctaattacgaagaaattaacaagcaggtcactaacaaaaaaattgctctccaggctctttttctttcgattgctaatcaaaaagaggatgtcgccttatatatattatctaattttgagataactagacaagatgttatttccataaagcatgagttgtatgatattgagtatctacttagcgctcataattcaagctgtaaagtacttgagtattttatcaataagggattggttgatgtaaacacaaagttcaaaaaaactaatagtggggattgtatgttggataacgcaataaaatatgagaatgcagaaatgataaaactattattgaaatatggtgcaacatctgacaataaatatatttaa

SEQ ID NO: 490483 - DNA, 717 bp, Shigella sonnei
atgaatgacaattcattgcttagaaattcttcattattcatcgcctatatgggatgtgtagggtgggtcagtgcttattcttatggctggggaacctctttttactatggatttccatggtgggttgttggtgcaggtttggatgatgttgccagaagtttactctatgctatcatagtaatgggtatactttttaccggttgggggattggtattttattttttcttcttataaagaaaagaagtaaaatacaagacttgagtttttttagactattttttgctattaccctactgtttttccctgtaatattcgaacttttaattctcaaacaatatttcatacttccattatcactttcatgcattattagttcattggttatttcaataataattcgtatatatggacggatcttttctgtatcatgtttttcagatatcccttttgttagagaacaccgcattaagttaattatggctggttttttggtttatttttggcttttttcctttcttgttggctggtataaacctcaattaaaaaaagaatatcagatgctttgttataataatagttggtattatattcttgctcgttatgattcacggctcgttttgtctagttcatttaaagatgacagtaacagattcttaatatttaatacagaacagtcgggattttatgaaatcaatgatgtttatgtcagaaagtaa

SEQ ID NO: 490484 - DNA, 309 bp, Shigella sonnei
gtgaatgataataatgaggcaaaaattaatctgtcagaaagtaatggtgagtcagaacacacagaagtttctttggcattattcaattatgatgatatcaatgtaaaagtggactttattcttttagaaaaaaatatgacaatcaatgaactaaaaatgtatgtagaaaacgaattattcaagtttcccgatgacatagttaaacatgtaaatattaaagtaaatggttctttggttgggcatggggaacttgtttctattgaggatggttatggtatcgagattagttcttggatggtaaaggagtaa

SEQ ID NO: 490485 - DNA, 543 bp, Shigella sonnei
atgctgagtgacatgtccctcatcgctacactttctttttttacgctattaccatttttagttgctgctggtacctgttatataaagttttctattgtttttgtaatggtacgaaatgcacttggtttgcagcaggttccatcaaatatgactctcaatggtattgcattgattatggctttgttcgtgatgaaacccattattgaagctggttatgaaaattatctaaatggccctcaaaaatttgatacaatatctgatattgtccgtttttctgattctggcttgatggaatataagcaatacttgaaaaagcatacagatcttgagttagcacgttttttccaaaggtctgaagaagaaaatgctgatttaaagagtgcagagaataatgattattcattgttttccctcttgcctgcatatgcgctaagtgaaatcaaagatgcgttcaaaataggtttttatttatatttgccatttgttgggtggggtatcctgtctaaggccttgattgaacaatatatcaatgttcctgcttag

SEQ ID NO: 490486 - DNA, 261 bp, Shigella sonnei; identical to SEQ ID NO: 474229

SEQ ID NO: 490487 - DNA, 771 bp, Shigella sonnei; identical to SEQ ID NO: 474230

SEQ ID NO: 490488 - DNA, 1029 bp, Shigella sonnei
atggcaaataaaacagaaaagccgacacctaaaaaactaaaggatgccgcaaaaaaaggacagtcatttaaatttaaggatttaacgactgttgttattattctggtagggacatttactataatatcattcttttccttaagtgatgtaatgctcttatacagatatgtaataattaatgacttcgaaattaatgagggtaaatacttttttgcagtggttattgtcttttttaagataattggcttcccactttttttctgtgttctttcggctgtgttgccaacattggttcaaacaaagtttgttcttgcgactaaagctatcaagattgatttttcagtattaaaccctgttaaagggttaaaaaaaatatttagtataaagacaataaaagaatttttcaaaagcattctgcttcttattattctagcattaacaacctatttcttttggattaatgaccgaaaaataattttttctcaggtgttttctagtgttgatggcttatatcttatttggggggggctgtttaaggatataatattatttttcttggcattttctatttttgttattattcttgactttgtgattgagttcattttatacatgaaagatatgatgatggataaacaggagataaaaagagaatatatagagcaagagggacactttgagacaaagtcgagaaggcgtgagttgcatatcgagattctttcagagcagactaaatctgatatacgtaattcaaaattagtggtaatgaacccgactcatattgcaattggtatttattttaatccagaaatagcgcctgcaccttttatttctctcattgaaactaaccagtgtgccttggctgtcagaaaatatgcaaatgaagttggtataccaactgtgcgtgatgtgaaattagctagaaaactatataaaacacatacaaaatatagttttgttgattttgaacacttggatgaagtcctacgtcttattgtttggcttgagcaggttgaaaacactcattaa

SEQ ID NO: 490489 - DNA, 234 bp, Shigella sonnei; identical to SEQ ID NO: 474232

SEQ ID NO: 490490 - DNA, 1902 bp, Shigella sonnei
atgcataatgtaaataatactcaagcgccaacattcttatataaggcaacttcaccatcatcaacagaatacagcgagttaaaaagcaaaatatccgatatccatagttcgcaaacttctctaaaaacaccagcatcagtgtctgaaaaagaaagctttgcaacgtcttttaatcagaaatgtcttgattttttattttcttcctcagggaaagaagatgtgttaagaagcatttattccaactcaatgaatgcgtatgccaaaagcgagattctcgaattttcaaatgttttgtactccttagtacatcaaaatggtcttaattttgaaaacgaaaagggacttcaaaaaattgtcgcacagtattcggaactaattataaaagataaattatcccaagattctgcctttggaccatggtcggcaaagaataagaaactccatcaattacgacaaaacattgagcacagacttgcactattagcacaacaacacacatctggtgaagctttatcattgggacaaaaactcctcaatactgaagtatcatcatttatcaagaataatattcttgctgaattaaagttaagtaatgaaactgtttcatctctcaaactagatgatttagttgacgcacaggcaaaacttgcctttgatagtttgcgcaatcaacgtaaaaatactattgatagtaaaggatttggtataggtaaactgtcaagagacttaaatacagtagccgtgtttcctgagctgttgagaaaagtccttaatgatattttagaagatataaaagattcgcatcctatccaagatggcctccctacacctcccgaagatatgccagatggcggaccaacccccggagccaatgagaaaacatcccaacctgtaattcactatcatataaataatgataatagaacttacgataatagagtttttgacaacagagtatatgacaatagctatcacgagaacccagaaaatgatgcacagtctcctacttctcagacaaacgatctattatcccgtaacggaaactcattactaaatccacaaagagcactagttcaaaaagtaacttccgttctaccacactctatatcagatactgtccagacatttgcaaataattcagctttagaaaaggttttcaaccatactccagataattcggatggaataggttcagacctgttaactacgagtagtcaagaaagatctgcaaataactctctttctcggggacacaggcctctgaacatacagaactcttcaaccaccccccctctccacccggaaggagtgacaagcagtaatgataactcatcagatacaactaaaagtagcgcttctctttctcatagagtagcttcgcaaatcaataaattcaactcaaacactgattcaaaagtacttcagactgattttttctcaagaaatggagacacatatttaacacgggaaacgatatttgaagcgtcaaaaaaagtaacaaactccctaagtaatcttatatctctcattggaactaaatcaggaacacaagaacgagagttacaggaaaaatcaaaggacattacaaaatccacaacagaacacagaataaacaacaaattaaaagttacagatgcaaatacaataaactacgtaacagaaaccaacgcagatacaattgataaaaatcatgcgatctatgaaaaggcaaaagaagtatctagcgccctcagcaaggtattgtcaaaaattgacgatacctctgcagaattacttacagatgatatatctgatttaaaaaataacaatgatattacagctgaaaacaataatatatataaagcagcaaaagatgtaaccacttccctatcaaaagtattaaagaatatcaataaggattaa

SEQ ID NO: 490491 - DNA, 237 bp, Shigella sonnei; identical to SEQ ID NO: 462830

SEQ ID NO: 490492 - DNA, 582 bp, Shigella sonnei
atggcattcagaatgagtgaacaagcacggaccataaaaatttataacctgctggccggaactaatgaatttattggtgaaggtgacgcatatattccgcctcatacaggtctgcctgcaaacagtaccgatattgcaccgccagatattccggctggtttcgtggctgttttcaacagtgatgagtcatcgtggcatctcgttgaagatcatcggggtaaaacggtttatgacgtggcttccggcgacgcgttatttatttctgaactcggctcattaccggaaaatgtcacctggttatccccggaaggggagtttcagaagtggaacggcacagcctgggtgaaggatacggaagcagaaaaactgttccggatccgggaggcggaagaaacaaaaaacagcctgatgcaggtagccagtgagcatatagcgccgcttcaggatgctgtggatctggagatcgcaacggagaaagaaaccttgttgctggaagcctggaaaaagtatcgggtgttgctgaaccgtgttgatacatcaactgcaccggatattgaatggccagtagcacctatagggtaa

SEQ ID NO: 490493 - DNA, 684 bp, Shigella sonnei; identical to SEQ ID NO: 462552

SEQ ID NO: 490494 - DNA, 588 bp, Shigella sonnei
atgaattcccagacaacaaaagatattccctgcttccgttcttatttgcctgatgccctgcgtttaagatttgaagataaactgaccatccgggccatcgctcagcgtctgggtctcagtcattccacaatacatacgctttttcagcgatttcttgcatccggtatcgcatggccattgcccgattcagtttcattcgctcaacttgacgccatcctttatgccaacagaaagaaggaattaacagagcctcaaatcagagaaggctcatggcgaaaagaacggcgaaccagctatagccgtgaatttaaggtccgtctggctaagcaggcattacagcctggtgctgttgttgcccggatcgccagagaacacgatatcaatgataacctgctgtttaaatggaaaagccagtacgaggacggcttactgagcgatgatgacatacaggaatgcatgcctgtcccggtggcactgactgatacgccggagccgaccagaccagttacaaatcccttctggcgtaagaaccacggcagcctggcggctgcaaatcggggtgtggcagaatatgagctttcagagtaa

SEQ ID NO: 490495 - DNA, 660 bp, Shigella sonnei
atggaaattcaaaacacaaaatcaacccagattttatatacagatatatccacaaaacaaactcaaagttcttccgaaacacaaaaatcacaaaattatcagcagattgcagcgcatattccacttaatgtcggtaaaaatcccgtattaacaaccacattaaatgatgatcaacttttaaagttatcagagcaggttcagcatgattcagaaatcattgctcgccttactgacaaaaagatgaaagatctttcagagatgagtcacacccttactccagagaacactctggatatttccagtctttcttctaatgctgtttctttaattattagtgtagccgttctactttctgctctccgcactgcagaaactaaattgggctctcaattgtcattgattgcgttcgatgctacaaaatcagctgcagagaacattgttcggcaaggcctggcagccctatcatcaagcattactggagcagtcacacaagtaggtataacgggtatcggtgccaaaaaaacgcattcagggattagcgaccaaaaaggagccttaagaaagaaccttgccgctacactaataattaaagaaacagcattagaagaaagactggaaatatcacctcaccacaaactaactctagcacaaaatttttag

SEQ ID NO: 490496 - DNA, 705 bp, Shigella sonnei; identical to SEQ ID NO: 474454

SEQ ID NO: 490497 - DNA, 225 bp, Shigella sonnei; identical to SEQ ID NO: 133446

SEQ ID NO: 490498 - DNA, 225 bp, Shigella sonnei; identical to SEQ ID NO: 133446

SEQ ID NO: 490499 - DNA, 489 bp, Shigella sonnei
atgcaaagaacgctgctaactgagggagtcgatatcacgtatctgaagcaagatgaatggcaccggacatccacggtgcttgtcgatctgaacgatcaaggggaacgttcatttacgtttatggtccgccccagtgccgatctttttttagagacgacagacttgccctgctggcgacatggcgaatggttacatctctgttcaattgcgttgtctgccgagccttcgcgtaccagcgcatttactgcgatgacggcgatccggcatgccggaggttttgtcagcttcgatcctaatattcgtgaagatctatggcaagacgagcatttgctccgcttgtgtttgcggcaggcgctacaactggcggatgtcgtcaagctctcggaagaagaatggctgaagtggcacactgaatttggccacctgaacagaggtgatatgctcacctcagaacaacacaggtgctccaatgaaaaaaagaaattttag

SEQ ID NO: 490500 - DNA, 1005 bp, Shigella sonnei
atggtcacttttgagacagttatggaaattaaaatcctgcacaagcagggaatgagtagccgggcgattgccagagaactggggctctcccgcaataccgttaaacgttatttgcaggcaaaatctgagccgccaaaatatacgccgcgacctgctgttgcttcactcctggatgaataccgggattatattcgtcaacgcatcgccgatgctcatccttacaaaatcccggcaacggtaatcgctcgcgagatcagagaccagggatatcgtggcggaatgaccattctcagggcattcattcgttctctctcggttcctcaggagcaggagcctgccgttcggttcgaaactgaacccggacgacagatgcaggttgactggggcactatgcgtaatggtcgctcaccgcttcacgtgttcgttgctgttcccggatacagccgaatgttgtacatcgaattcactgacaatatgcgttatgacacgctggagacctgccatcgtaatgcgttccgcttctttggtggtgtgccgcgcgaagtgttgtatgacaatatgaaaactgtggttctgcaacgtgacgcatatcagaccggtcagcaccggttccatccttcgctgtggcagttcggcaaggagatgggcttctctccccgactgtgtcgccccttcagggcacagactaaaggtaaggtggaacggatggtgcagtacacccgtaacagtttttacatcccactaatgactcgcctgcgcccgatggggagcactgtcgatgttgaaacagccaaccgccacggtctgcgctggctgcacgatgtcgctaaccaacgaaagcatgaaacaatccaggcccgtccctgtgatcgctggctcgaagagcagcagtccatgctggcactgcctccggagaaaaaagagtatgacgtgcatcctggtgaaaatctggtgagcttcgacaaccccgttactttattcgtaccccttataatggggtgttag

SEQ ID NO: 490501 - DNA, 225 bp, Shigella sonnei; identical to SEQ ID NO: 133446

SEQ ID NO: 490502 - DNA, 189 bp, Shigella sonnei; identical to SEQ ID NO: 469030

SEQ ID NO: 490503 - DNA, 597 bp, Shigella sonnei; identical to SEQ ID NO: 17091

SEQ ID NO: 490504 - DNA, 189 bp, Shigella sonnei; identical to SEQ ID NO: 469030

SEQ ID NO: 490505 - DNA, 516 bp, Shigella sonnei; identical to SEQ ID NO: 474713

SEQ ID NO: 490506 - DNA, 189 bp, Shigella sonnei; identical to SEQ ID NO: 469030

SEQ ID NO: 490507 - DNA, 312 bp, Shigella sonnei; identical to SEQ ID NO: 481488

SEQ ID NO: 490508 - DNA, 363 bp, Shigella sonnei
atgtgccgccggtgctcaaaaaaacatcccgatatcgacggagataatgggccgggtcgctctcgcggcggttttggcaccaaaatccatctggcaacagacggaagtggcctcccgttaaatatcgtgctaagccccggacaagctcatgaaagccagttcgcgcaacgacttctggacgggattggcgttcagcgtcagaacggcagcatgaaacgccgtggacatgcggtactggctgataaagcgtattcagggcgcgcattgcgcaatgagctgaaaaataacggtataaaggcagtaatcccccgaaagtcaaatgagaaaatggcatcggatggacgtgcacagcttgacgtatag

SEQ ID NO: 490509 - DNA, 477 bp, Shigella sonnei
atgtctttaaatatcactgaaaatgaaagcatctctactgcagtaattgatgcaattaactctggcgctacactgaaagatattaatgcaattcctgatgatatgatggatgacatttattcatatgcttatgacttttacaacaaaggaagaatagaggaagctgaagttttcttcagatttttatgtatatacgacttttacaatgtagactacattatgggactcgcagctatttatcagataaaagaacagttccaacaagcagcagacctttatgctgtcgcttttgcattaggaaaaaatgactatacaccggtattccatactggacaatgccagcttcggttgaaagcccccttgaaagccaaagagtgcttcgaactcgtaattcaacacagcaatgatgaaaaattaaaaataaaagcacaatcatacttggacgcaattcaggatatcaaggagttcatcaggtga

SEQ ID NO: 490510 - DNA, 348 bp, Shigella sonnei
atgcaatatgcgaaacctgtcactctgaatgttgaagagtgcgaccgtctctcctttctgccttacctgtttggcaacgattttctgtatgccgaggcgtatgtgtacgcgctggcgcaaaaaatgatgccggaatatcagggcggcttctggcacttcatccgcctgccggacggtggcggttacatgatgccggatggcgaccgtttccacatggtgaacggtgcaaactggtttgaccgtaccgtgagtgctgatgccgcaggcatcattctgacttctcttgtgattaaccgccaattgtggctgtaccacgacagcggggatgcaggactgaccctgaggtag

SEQ ID NO: 490511 - DNA, 165 bp, Shigella sonnei
atgtttttcgataaaagcaccgataactttttcatgaaattttacagagcgagagaaacagatggttctgcgagccaagcgtttgattcgggttctcaggggcagattgttgcgctcaatgcgctgagtaaaaatcttaccagtcagatacttctccttcggtaa

SEQ ID NO: 490512 - DNA, 225 bp, Shigella sonnei; identical to SEQ ID NO: 133446

SEQ ID NO: 490513 - DNA, 225 bp, Shigella sonnei; identical to SEQ ID NO: 133446

SEQ ID NO: 490514 - DNA, 378 bp, Shigella sonnei; identical to SEQ ID NO: 462723

SEQ ID NO: 490515 - DNA, 225 bp, Shigella sonnei; identical to SEQ ID NO: 133446

SEQ ID NO: 490516 - DNA, 339 bp, Shigella sonnei
gtggaggcattagataaaaggattatatacttcctgcaactggagaatgacttagaacctgtaggcgctcagagtgttagtcagcttttcaatacaagacgtaagatcgctatagtaaaaaagcatattatccaatatcagtctgaacgaattcttctaaagggaagaattgaagaaattcaaaaagatattgatgaggcaaatgcttctaaaagaaaactgcttcataaagagagtaaaatatgtaaacggattggcttgattaaaagaaataactttgccaaacagttgatacttgatgagttatcacaagaggatatgaagtatggcattagataa

SEQ ID NO: 490517 - DNA, 225 bp, Shigella sonnei; identical to SEQ ID NO: 133446

SEQ ID NO: 490518 - DNA, 225 bp, Shigella sonnei; identical to SEQ ID NO: 133446

SEQ ID NO: 490519 - DNA, 225 bp, Shigella sonnei; identical to SEQ ID NO: 133446

SEQ ID NO: 490520 - DNA, 189 bp, Shigella sonnei
atggaaagcttctggggaacgctgaaaaatgaaagcctgagccactatcgttttaagagccgggatgaggccatctcagtaatacgggaatacattgagattttctacaatcgtcagcgtcgtcactctcgtctggggaatatctccccggcagccttcaggataaaatattatcagatgactgcttag

SEQ ID NO: 490521 - DNA, 246 bp, Shigella sonnei
atgttatgggctaattttgatgcaccaagtgatgtaaaacttcagtcatctgcttataacatattaaatttaatgttaatgaactttagttatagcattaatgagctggtagagcttcatcgttctgatgagtacttacagttaagagttgttattaaagatgactacgttcacgatgggattgtttttgcagagattctgcatgagttttatcagaggatggaaatcttaaatgaggtcttataa

SEQ ID NO: 490522 - DNA, 774 bp, Shigella sonnei
atgaagtctgcattaaagaaaagtgtcgtaagtacctcgatatctttgatactggcatctggtatggctgcatttgctgctcatgcggcagatgatgtaaagctgaaagcaaccaaaacaaacgttgctttctcagattttacgccgactgaatacagtaccaaaggaaagccaaatattatcgtactaaccatggatgatcttggttatggacaacttccttttgataagggatcttttgacccaaaaacaatggaaaatcgtgaagttgtcgatacctacaaaatagggatagataaagccattgaagctgcacaaaaatcaacgccgacgctcctttcattaatggatgaaggcgtacgttttactaacggctatgtggcacacggtgtttccggcccctcccgtgccgcaataatgaccggtcgagctcccgcccgctttggtgtctattccaataccgatgctcaggatggtattccgctaacagaaactttcttgcctgaattattccagaatcatggttattacactgcagcagtaggtaaatggcacttgtcaaaaatcagtaatgtgccggtaccggaagataaacaaacgcgtgactatcatgacaacttcaccacattttctgcggaagaatggcaacctcaaaaccgtggctttgattactttatgggattccacgctgcaggaacggcatattacaactccccttcactgttcaaaatcgtgaacgtgtccccgcaaaaggttatatcagcgatcagttaa

SEQ ID NO: 490523 - DNA, 771 bp, Shigella sonnei; identical to SEQ ID NO: 474584

SEQ ID NO: 490524 - DNA, 435 bp, Shigella sonnei; identical to SEQ ID NO: 21500

SEQ ID NO: 490525 - DNA, 528 bp, Shigella sonnei
atgagtgcacgtggtatcaacaaggtcatcctcgtcgggcgtctgggcaatgatccggaagtccgttacatccccaacgggggcgcagtggcaaacctgcaggtggccacatcagaaagctggcgtgacaaacagacgggggagatgcgggagcagacggaatggcaccgcgtggtgctgttcggcaaggtcgcggaagtggctggtgaatatctgcgcaagggcgcgcaggtctacatcgaggggcaactccgtacccgtagctgggaagataacggtatcacccgttacgtcactgaaattcttgttaagaccacgggcaccatgcagatgctggggagtgcaccacagcagaacgcacaggcgcaaccgaagcctcagcagaatgggcagccacagagtgctgacgcgacgaaaaaaggtggcgcgaaaacgaaaggccgtggacgtaaggccgcgcagccagagcctcagccgcaaccgccggagggggaggattacgggttttcagacgacatcccgttctga

SEQ ID NO: 490526 - DNA, 153 bp, Shigella sonnei
atgagcgaatatttcagaatacttcaggggctgcctgacggctcctttacccgcgaacaggcggaagccgttgccgcacagtaccggaacgtctttatcgaggatgaccagggaagcattttcgcctggttgtccgtcaggatggcacgttga

SEQ ID NO: 490527 - DNA, 366 bp, Shigella sonnei; identical to SEQ ID NO: 32776

SEQ ID NO: 490528 - DNA, 303 bp, Shigella sonnei; identical to SEQ ID NO: 21213

SEQ ID NO: 490529 - DNA, 939 bp, Shigella sonnei
atgacgcgttacgacgcgctggaaaaccagtgtgaggaatccgacctgctggaagcagaaatgaagctgatgcgctgcatggcgaaggtcagagcgtggacgccggagatgcgtaccggaagcggtgtggtggtgtcctggcgttacggtaatgtgtgtgtccagcgtggtgtgcagttgcgcagtgaagatgacgcggctgacgacgctgaccgcacggaacaggtgcaggagaaagcatcagtggaggaaatcagtctgccactgctgacgaaaatgtcttccgaacgcacgctggcagtccaggcggcactcatgcagcaaccggacaaatctctggcactgctggcatggacgctctgcctgaatgtgtttggcagcggagcgtacagtaaaccagcacaaatcagcctggaatgtaaacattattcgctgaccagcgatgcgccgtcagggaaggaaggtgccgcgttcatggcgctgatggcagaaaaagcccgtcttgcggccctgttaccggagggatggtcacgggacatgacgacgttcctgtcgctcagccaggaggtgctgttatccctgctcagtttctgcaccgcgtgcagcatccacggcgttcagacccgcgagtgtggtcacacgtcacgcagcccgctggatacgctggagagcgccatcggttttcacatgcgcgactggtggcagccgacaaaagcaaacttcttcggacacctgaaaaagccacaaattatcgcagccctgaatgaggccggactgtccggtgccgcacgggacgcggagaagatgaagaaaggtgatgcggctgaacatgcagagcaccatatgaaagacaaccgctgggttccaggctggatgtgtgctccacatccacagacagatgccactgaacgcaccgataacctggctgatgccgcctga

SEQ ID NO: 490530 - DNA, 279 bp, Shigella sonnei
atgaataaacacactctaacccgtatttcagaggaagcttttaacgagcttaccagaattaaacgagcgactaacttgcctcatcaaactgttatgcaacttgcaatcgctaaagaagtcactgagtcggatttactgaaatatccagtctctaaaggtcgtaaacacatccgaattactcaggacgctttagatactttgaaggcacttaacagctttaaaattgatattgcccgtctaatgagtattaagattcacaaactgtctctggaggtctga

SEQ ID NO: 490531 - DNA, 624 bp, Shigella sonnei
atgaacgacgtgttcctgaaacgcctgacggctccgaccattaccagcggcggtaatcctccggcattttccctgacaccggacgggcggctgacggcgaaaaatgccgatatcagcggtaacgtgaatgcgaactccgggacgctcaacaacgtcacgattaacgagaactgtcgggttctgggaaaattgtccgccaaccagattgaaggcgatctcgttaaaacagtgggcaaagctttcccccgggactcccgtgcaccggaacggtggccatcagggaccatcaccgtcagggtttatgacgatcagccgtttgaccggcagattgttattccggcggtggcattcagcggcgctaaacatgagcgggagaataacgatatttattcgtcatgccgcctgatagtacggaaaaacggtgctgaaatttataaccgtaccgcgctggataatacgctgatttacagtggtgttattgatatgccagctggtcgcggccacatgacgctggagttttcggtgtcatcatggctggtaaatgactggtatcccacagcaagtatcagcgatttgctggttgtggtgatgaagaaagccaccgcaggcatcagtatcagctga

SEQ ID NO: 490532 - DNA, 339 bp, Shigella sonnei
atgccggattttcatcgtgaggatgactggtggcgtcacggtcagaatctctatctggataatctggaggccacagggctgtatcaggtgccgttgtcagcggcgcagccgggcgatgtgctgctgtgctgttttggttcatcggtgccgaatcatgccgccatttactgtggtgacggcgagctgctgcaccatattcctgaacaactgagcaaacgagagaggtataccgacaaatggcagcgacgcacacactccctctggcgtcaccgggcatggcacgcatctgcctttacggggatttgcaacgatttggccgccgcatcgaccttcgtgtga

SEQ ID NO: 490533 - DNA, 273 bp, Shigella sonnei
atgcagcgactggacgatgcctttgagcatggtgcggatgtcagcgttgttcacggcgttgtttgtgaactgatggaagaaaagcgcgccagccgtcaggtgacagtcccggcggtgatgctggaaaaagtgatggcgctggcaggcagtgaaatgaagcgcctgtatgccgtcgggagtgagaatgggggcgacggtgacgcattcgtcagggaggaacgcgaagcaatggacgttgtgttacaggcgctggacggggagcacatgtcatga

SEQ ID NO: 490534 - DNA, 273 bp, Shigella sonnei
atgcagcggctggacgatgcttttgtatatggcgcatgtgacagagttgtttccgatattgtcaatgaactgatggaagaaaagcgcgccagccgtcatgtgacagtcccggcggtgatgctggaaaaagtgatggcgctggcaggtagtgaaatgaagcgcctgtatgccgtcgggagtgagaacgggggcgacggtgacgcattcgtcagggaggaactcgaagcaatggacgttgtgttgcaggcgctggacggggagacgatgtcatga

SEQ ID NO: 490535 - DNA, 171 bp, Shigella sonnei; identical to SEQ ID NO: 490441

SEQ ID NO: 490536 - DNA, 390 bp, Shigella sonnei; identical to SEQ ID NO: 477245

SEQ ID NO: 490537 - DNA, 267 bp, Shigella sonnei; identical to SEQ ID NO: 11114

SEQ ID NO: 490538 - DNA, 267 bp, Shigella sonnei; identical to SEQ ID NO: 11114

SEQ ID NO: 490539 - DNA, 267 bp, Shigella sonnei; identical to SEQ ID NO: 11114

SEQ ID NO: 490540 - DNA, 267 bp, Shigella sonnei; identical to SEQ ID NO: 489479

SEQ ID NO: 490541 - DNA, 267 bp, Shigella sonnei; identical to SEQ ID NO: 11114

SEQ ID NO: 490542 - DNA, 267 bp, Shigella sonnei; identical to SEQ ID NO: 489460

SEQ ID NO: 490543 - DNA, 267 bp, Shigella sonnei; identical to SEQ ID NO: 11114

SEQ ID NO: 490544 - DNA, 267 bp, Shigella sonnei; identical to SEQ ID NO: 11114

SEQ ID NO: 490545 - DNA, 267 bp, Shigella sonnei; identical to SEQ ID NO: 11114

SEQ ID NO: 490546 - DNA, 147 bp, Shigella sonnei; identical to SEQ ID NO: 488958

SEQ ID NO: 490547 - DNA, 615 bp, Shigella sonnei
ttgccggggcagcagtatgatgaggagtccggcctgtattataaccgccaccgctattatgacccgctgcaggggcggtatatcactcaggatccgattgggctgaaggggggatggaacctgtatacatatccgctgagcccggtgaatagcatggatccattaggattatatgaatttaaatcaaaaaatattgatgatattggaatatttgcattggcaatgtgtaatggagaatcaattaacgagaataaagaatatggtggactaatatgtaagaagcaaggtgaatatttccccatgaatccgataagttcaaatgataatgatagtgtagacttgcgaaatataaaatgccctgaaggttcagagagagtaggcgattatcacactcacggtttttactctgacgataaaggaaataaagtaacaaaagaaaatgatgtttatgatagtctaaatttttcaagcaaagatttaacgaattcttatatgaatggaatgggaaaaaaagaatacagtagttacttgggaacaccaaataacacctatctaaaatataatcccaaagctaaagggaatggagttacaattatcaggcaagggagtaattaa

SEQ ID NO: 490548 - DNA, 210 bp, Shigella sonnei
atgacggatggctggccgctgtatgaatcacgcctgaagggaaagctgcacgttatcagcaagcgttacactcagcgcattgagcgacataatctgaatctgagacaacatctggcaaggctgggacggaagtcactgtcgttctcaaaatcggtggagctgcatgacaaagtcatcgggcattatctgaacataaaacactatcagtaa

SEQ ID NO: 490549 - DNA, 282 bp, Shigella sonnei; identical to SEQ ID NO: 487352

SEQ ID NO: 490550 - DNA, 915 bp, Shigella sonnei
atgccaaatacaattcattaccctcatgtaataccatttatatcccaaggaaaaataaatgctataaaaagcacgtttggtaataacctgtctgatagggagtgctacgggatatatatatggagccagaaagcctcatctgccatatatccattactgcaacaactcgaagttactttgagaaactcgattgataaagaagcgacaaaactaataggccaaaaatggtgggataatgtatacaccgacacatcaaaaagcaaacacggtgacttcatacataatataaacaaagcaataagaagatatgagaatgaattcaagaaaaaaaacccatcaatggcaaataccaaaataattgcacctcatgatgacatcattgcacacacagatttttacacatggcaagcggttttgagcgatgcttttcatacacaatcaagatctgaagcatcaagagccttatggcccaggctcacctacagagtactgaagggattagatagaagcaaagatgaaggcacagccagaattgatttcttaaacgagctgaatgagatcagaaactacagaaataggttatcgcataatgattgcatatggataaaaatacactctaaaaatttgcaatctgcagtagaaacaataagagaaaaaataaacaaaatagaaggactgataaaaacgataaacccacaggtacacctatcattaacgaagtggggttccttttatcacgccaaaagaatatgttctcaaaaagaggccgaattgcatctaggcaaaggaataatcaatagcacaacagatgagatgaacacaattctagatcaactatacgcactaactgctgacggaaagctaacgggtgttgtaaaacgaaataccaacaatatcgcatttcacaagttttag

SEQ ID NO: 490551 - DNA, 594 bp, Shigella sonnei; identical to SEQ ID NO: 5283

SEQ ID NO: 490552 - DNA, 195 bp, Shigella sonnei
gtgaacaaacaacaacaaactgcgctgaatatggcgcgatttatcaaaagccagagcctgacactgcttgaaaaactggatgctctggatgccgacgaacaggcagccatgtgcgaacgactgcacgaactcgcggaagaactccagaacagcatccaggttcgctttgagaccgaaagtgaaacaggaacataa

SEQ ID NO: 490553 - DNA, 201 bp, Shigella sonnei; identical to SEQ ID NO: 488102

SEQ ID NO: 490554 - DNA, 303 bp, Shigella sonnei
atgagcagaaaaacccaacgttactctaaagagttcaaagccgaagctgtcagaacggttcctgaaaatcaactttcgatcagtgaaggcgcttcccgattatctcttcctgaaggcactttaggacaatgggttaccgccgccagaaaagggctcggtactcctggttcccgcacggtggctgaactggaatctgaaattctgcaactgcgtaaggcgttaaatgaagctcgccttgagcgagatatattaaaaaaagcaacagcgtattttacacaggagtcgctgaaaaatacgcgttaa

SEQ ID NO: 490555 - DNA, 225 bp, Shigella sonnei
atggacgcgaccacaacagtggcgcacataacacaggtggtaacattaatggcggccctacggggcttggtggaaatggtggggcttctgacggttcaggatggagttcggaaaataatccatggggtggcggttccggtagtggtgttcactggggaggtggctccggcaatggtaatggcggggggaatggtaattccggtggtggcagcaattcatccgtag

SEQ ID NO: 490556 - DNA, 534 bp, Shigella sonnei; identical to SEQ ID NO: 488169

SEQ ID NO: 490557 - DNA, 927 bp, Shigella sonnei
gtggcaacctatcacctcagcgttaaatttggtggcaaggggcaggctgcaaaccacgccgattacatcgagcgcaaagagaaataccgcgaccgtcaggatttggaatattccgcacacggaaacatgccggaatgggcgcgagataatccctcacatttctggcaggcggctgaccagtttgaacgtgcaaacggttcgacttatcgggaactggagatagcgctgccccgtgaactgacaccggaacagcgccttgaactggtgcaggattttgtacgtcaggaagctggcgaacggcatgcatggagttttgccattcacaatccgaaagcgagcattgagggaggcgaacagcctcatgcgcatatcatgatgagtcagcgtgtgaatgatggcattgaacgtacaccggaacagtatttccggcgctataacgccaggtatcccgagcggggaggtgcgaaaaaggattcaggaagcctgactcccactcagcaaaaagagcagttgcgggaattgcgaaaacgctgggaggtgaagcacaacgaacatatgagaaagcatggctttgaaaggggcttcattgactgccggacgctgaaagaacagggcattgaacgacgtcctgaagtgcatctgggttttgaaactgccggacggcttgatgatgcccagcgtcatgacatcatgcaaaaacggtctgaaccggactattcccgccatcttgaacaggcgcgaacggtcgggcatgacatcagggaatggctggacactccggttaagcaacatgaactggtcagaaggctgcaacatgatgttgcgcgggagtatggctttgacatgagagacggagtgagcagacaggagcgaactgaacctgaacgggttaaatcaccgtcacgtggattttctatgggattctga

SEQ ID NO: 490558 - DNA, 399 bp, Shigella sonnei; identical to SEQ ID NO: 488174

SEQ ID NO: 490559 - DNA, 1071 bp, Shigella sonnei; identical to SEQ ID NO: 490354

SEQ ID NO: 490560 - DNA, 549 bp, Shigella sonnei
gtgaaaacgggggctgaagccatccgggcgctggccacacagcttccgtcgtttcgccagaaactgaatgagggctggtatcaggtgcgcattgccgggcgtgatgcaggcgaaaatgaattatctgcccgtcttaatgagccgctggaaaatggtgccgtgattcacatcgtgccgcgtatggcgggagctaaaagtggcggtgtgtttcaggtggtgctgggggcggcgctgattgcggtggcatggtggaaccctgtgggctggctgggtgctgcggctgtatcgggcatgtatgcggcaggggccagtatgatcctgggtggtgtggcccagatgctggcaccgaaagccaggacgcccacggcagccagtacagataacggcaaacagaacacctatttctcctcactggataacatggttgcccagggcaatgttatgcctgttctgtacggtgaaatgcgtgtggggtcgcgggtggtttctcaggagatcagcacggcagacgaaggtgacggtggtcaggttgtggtgattggtcgctga

SEQ ID NO: 490561 - DNA, 303 bp, Shigella sonnei; identical to SEQ ID NO: 21213

SEQ ID NO: 490562 - DNA, 783 bp, Shigella sonnei
gtgaacggacacgctcacctgctctacgcactcaacatcgccgtgagaaccgcgcctgatgcctcggttaaggcgctgaaatatgccgcagcggttgaacgttcgctgtgtgagaaactttgtgctgatgtgaactacagcggcctgatttgcaaaaatccgttccacctggaatggcaggtgatggagtggcgcgaggacgcctataccctcgatgaactggcagattatctcgatttgagcgcctcagagcgtcgtagcatcgataaacattacgggatggggcgaaactgccacctgttcgaaatgacgcgcaaatgggcttacagggcgattcgtcagggctggccagcgttctcacagtggcttgaagcggtgatccagcgtgtcgaaatgtacaatgcatcgcttcccgttccgctttcactggctgaatgtcgggctattggcaagagcattgcgaaatacacgcacaggaacttcacgccggaaactttcgcacagtatgtggctgatacgcacacgccagaaattcaggcagcacgcggtcgcaagggcgggaaggccaattcgtcagaaaatcagtcggacaaagggaaaaaaagcgccgctgttcggtggactgctaacgacgacaaacgtcgtagggcgcttgatatgtatatcttgggagcgtcaacggaagatattgcagtggcggttggtgttagcagccggactattcgacgctggatggataattctggagaatggctaaccaagaaacaaataattaaatgttag

SEQ ID NO: 490563 - DNA, 699 bp, Shigella sonnei
gtgaacggtcacgcccacctgctctacgcactcaatatcgccgtgagaaccgcgcctgatgcttcggttaaggcgctgaaatacgccgccgcgattgaacgtgcgttgtgtgaaaaactgggcgcagatgtaaactacagcggactgatttgcaaaaatccgttccatctggaatggcaggtgatggagtggcgtgaggaagcctataccctcgatgaactggctgattatctcgatttgagcacttcagcgcgccgtagcatcgataaacattacgggatggggcgaaactgccatctgttcgaaatgacgcgcaaatgggcttacagggcgattcgtcagggctggccagcattctcacagtggcttgatgccgtgattcagcgtgtcgaaatgtacaacgcatcgcttcccgttccgctttcacctcctgaatgtcgggctattggcaagagtattgcgaaatacacgcacaggaacttcacggcggaaactttcgcacagtatgtggctgatacgcacacgccagaaatacaggccaagagaggcaggaaaggtggcatcgctaaaggcgaagcctacgatgacaagcgtttcatggcgctatgtatgctggagaatggatattctcagaaagctattgcggcgatgttggaggtttctactcgaaccattcgaaactggaaaagcggaaaatag

SEQ ID NO: 490564 - DNA, 378 bp, Shigella sonnei
atggacgaacagtggggctatgtcggggctaaatcgcgccagcgctggctgttttacgcgtatgacagtctccggaagacggttgttgcgcacgtattcggtgaacgcactatggcgacgctggggcgtcttatgagcctgctgtcaccctttgacgtggtgatatggatgacggatggctggccgctgtatgaatcccgcctgaagggaaagctgcacgtaatcagcaagcgatatacgcagcgaattgagcggcataacctgaatctgaggcagcacctggcacggctgggacggaagtcgctgtcgttctcaaaatcggtggagctgcatgacaaagtcatcaggcattatctgaacataaaacactatcaataa

SEQ ID NO: 490565 - DNA, 255 bp, Shigella sonnei; identical to SEQ ID NO: 482918

SEQ ID NO: 490566 - DNA, 276 bp, Shigella sonnei
gtggcttctgtttctatcagctgtccctcctgttcagctactgacggggtggtgcgtaacggcaaaagcactgccggacatcagcgctatctctgctctcactgccgtaaaacatggcaactgcagttcacttacaccgcttctcaacccggtacgcaccagaaaatcattgatatggccatgaatggcgttggatgccgggcaactgcacgcattatgggcgttggcctcaacacgattttacgtcacttaaaaaactcaggtcgcagtcggtaa

SEQ ID NO: 490567 - DNA, 309 bp, Shigella sonnei; identical to SEQ ID NO: 487355

SEQ ID NO: 490568 - DNA, 309 bp, Shigella sonnei; identical to SEQ ID NO: 486565

SEQ ID NO: 490569 - DNA, 297 bp, Shigella sonnei; identical to SEQ ID NO: 488049

SEQ ID NO: 490570 - DNA, 930 bp, Shigella sonnei
ttggtcgcactgctgagctgtactatcccctttttcgtcgtgctcgcatcctccagcgccacggcggatgcaatatcctctgcccgttttgctgctgtctcggcgcgcgttgccgcggattccgccgtacttttgctctgtgctgccgctgccgcactgccagcagcctctgtcgccttcgtggatgccgtcgtggcgctgcccctcgctgctgacgcctgtctggtcgcctcatcttttgaagcagacgcagatgatgccgatgacgccgccgaactggcggacgatgcggcagccgtttttgaggattctgcacgggtttccgacgctttcgcgttcgtttcggatgtcttcgctgcggaagctgacctcgctgctgccgtggcctgctcagtggcttcgccagccttcgttgtggctgttgaagcggatgatgcggcgctttctgccgattttccggcggcggtggcactggctgaggcctgcccggcacttgttgacgcggcactggcagacgacgcagccgctgtttttgagcctgccgcagctgaggcgctctgtcccgctgccgtttcagaagacctggcgttcgtctcggacgttttggccgccttcgcagaatttgcagccgccgtcgccgaggaagctgcgctactggcgcttgatgatgcgttcgtttctgatgattttgccgcctcttttgaagccgacgcatcccgggctgaggtggcggcttctgacgctttcgtggtcgcggtggatgcagaagtggctgctgattgttgtgacgctgccgcattcgtttctaacgttttcgccgcaccggcactggtagccgccgcgctttttgaggactctgcagcggcagcactttttgaggcttcagtggcctttgttgatgccgttcctgcgctggaagacgctgactga

SEQ ID NO: 490571 - DNA, 543 bp, Shigella sonnei
atggccacacagctccctgcgtttcgtcagaagctgagcgacggctggtatcaggtgcgtattgccgggcaggatgttagcacgtccggattaacggcgcagttacatgaggctctgcctgacggcgctgtgattcatattgttcccagagtcgccggggccaagtcaggtggtgtattccagattgtcctgggagcagccgccattgccggatcattctttaccgccggagccacccttgcagcatggggggctgccattggtgccggtggtatgaccggcattctgttttctctcggtgccagtatggtgctcggcggtgtggctcagatgctggcaccgaaagccagaactccccgcacacagacaacggataacggtaagcagaacatctatttctcctcactggataacatggttgcccagggcaatgttatgcctgttctgtatggtgaaatgcgcgtggggtcacgtgtggtatctcaggagatcagcacggcagacgaaggggacggtggtcaggttgtggtgattggtcgctga

SEQ ID NO: 490572 - DNA, 717 bp, Shigella sonnei
atgctgtttgtgcttattctaagcaaccgggcagcatcatacggggcaattatggccgcattaccatacatgcaactgtacatagctgattacctggctgacaccatgcatttgtcagcagaggagcacggcgcgtatttgttgctgatgttcaattactggcaaacaggaaagccaatacccaaaaacaggttggcaaaaattgcccgtctgactaacgagcgatgggttgatgttgaaccatccttgcgggagtttttttgtgataacggcgacgaatggatgcatcttcggattgaggaagatctggcatctgtcagagaaaaattaaccaaaaaatcagccgcaggaaaagcatctgttcaggccagaagaagcagaaaggaagcagatgttcaaacaaaacaagagagaaatttaacaggtgttcaaacagatgttggagtgatgttcgaacatgatgccaacacaaaggcaactaataaagatacagataaagatctaaaaacagatctaacccatcccaaacccttcccttccggaagggagtttcgggattttgtggctggagtgcttgaggggagattatctggcggtactgcagcggaattttgtaattctgcggtggttgcgttgcaggctgctggcctggatgtctgtcgtgagtatccggtgccagagcgtggtgacggttgcggagggcggattgatatctga

SEQ ID NO: 490573 - DNA, 267 bp, Shigella sonnei
atgaacgctaagataattgcctcgctggccttcaccagcatgttcagcctcagcaccctgttaagcccggcacacgccgaagagcaggaaaaggcgctgaatttcggcattatttcaacggaatcacagcaaaacctgaaaccgcaatggacgccattcttacaggatatggagaagaagctgggcgtgaaggtgaacgccttctttgccccagactacgcaggcattatccagggaatgcgcttcaataaagtggatatcgcctag

SEQ ID NO: 490574 - DNA, 1272 bp, Shigella sonnei
atgtttgcactggctgatatcaacagtttctacgcctcatgtgaaaaagttttccgcccggaccttcgcaacgaaccggtcatcgtactcagcaataacgatggctgtgtgatcgcgcgcagcccggaggcaaaagcccttggcatcagaatggggcagccctggtttcaggtgagacagatgcgcctggagaagaaaatacatgtattttccagcaattatgcgctgtaccacagcatgagccaacgggtcatggctgttctggagtcgctttctcccgcagttgagccctactcaattgatgaaatgttcattgatttgcgggggataaatcattgcatctctccggaggtttttggtcatcagctcagggaacaggtaaagagctggacaggactcaccatgggggtgggcattgcgcctacaaaaacgctggctaaaagtgcacagtgggcaacaaagcaatggccacagttttccggtgtggtcgcgctggaggcagaaaaccgtaatcggatcttgaagctactggggctgcagccagttggtgaggtctggggagtaggacgcagactgacggaaaagctgaatgcgctgggtattaacacagcactgcagctggcgcaggctaacacggcattcatccggaaaaacttcagcgtcattcttgagcgtacggtacgcgaactcaacggcgagtcctgcatatccctggaagaagcaccaccggcaaaacagcagattgtctgtagtcgcagttttggtgaacgaatcacagacaaagatgccatgcaccaggctgttgttcagtatgcagagcgggccgcagagaaactacgtggggagcgtcagtattgccggcaggtgacgacatttgtacggacatccccctttgcagtaaaagaaccctgttacagcaatgccgctgtggaaaagcttccattacccacacaggacagccgggacattattgccgcagcatgcagagcgttaaaccatgtctggcgtgaagggtaccgctatatgaaggcaggagtcatgctggctgatttcacaccatcgggtatagcgcagccgggattatttgatgaaatccagccccgtaaaaacagtgaaaagttaatgaaaacactcgatgaactgaaccagtcgggaaaagggaaagtgtggtttgcggggcgaggaaccgcccctgaatggcaaatgaaacgggaaatgctttctcctgcgtataccaccagatggacagatttgccagtagcccagttatga

SEQ ID NO: 490575 - DNA, 150 bp, Shigella sonnei
atgtcagttggtaatgactccaacttattgatggtgttttatgttcagataatgcccgatgactttgtcggtaatgactccaacttattgatggtgttttatgttcagataatgcccgatgactttgtcatgcagctccaccgattttga

SEQ ID NO: 490576 - DNA, 411 bp, Shigella sonnei
atggcgcagggtgcgcgtttgttactgggcggggaaaagatggctggggcaggtaactactatccgccaacggttctggcgaatgttaccccagaaatgaccgcgtttcgggaagaaatgtttggccccgttgcggcaatcaccgttgcgaaagatgcagaacatgcgctggaactggctaatgatagtgagttcggcctttcagcgaccatttttaccaccgacgaaacacaggccagacagatggcggcacgtctggaatgcggtggggtgtttatcaatggttattgtgccagcgacgcgcgagtggcctttggtggcgtgaaaaagagtggctttggtcgtgagctttcccatttcggcttacacgaattctgtaatatccagacggtgtggaaagaccggatctga

SEQ ID NO: 490577 - DNA, 1356 bp, Shigella sonnei
atggctatatatagttttcaatgtaagattgtagcaagaacaaaacgtttaaataatgctgttgctcatgcagcatatattaaccgtattgatcttgataatagccgcgatggttcaaagtggcgttatagccatagtcatgaagatgtatataaatctgctgttttgcttccagataatgccaacgagaagttttctgatccagcttatctatggaacgaagtagagaagaaagaaaatcgttccaatagccgtttagctcgcagttttattatttctttaccaaatgagctaacaccagaacaaaacaagaacttgattgaagattatattaaaaatcacatgaccaacaaaggcatgattgtaaactatgctattcatatagatgatacaaataactttcatgctcatttgatgagcacaacaagagaacttgataaatcgggcttagagttcgcaaaaaagaatgttatcggcagaacatggaatgatgacgagtttttggaaggtctacgcaaaggctgggcagataccgccaatactcatttagcaaggcttgatcatcaagttaggattgaccatagaacgctatcagctcaacgtgatgaagcccttgaacagtttgaaatggctaccactgcagaggctaaagctgaagctctggctaaggctgtaagccttgataggccagcaatcaaaaggatttggcgtagtaagctgaacactgaagagggtagggctttacgtgaagcacagcaagacagaagagatctgcagctcgttgttgctgaagagactaaaaagagcgttttatctttaccacaagagatagttttaaataactttgctcctaaaaaaataaaatcaaaatccaaaacaaaaactactattgaaaaaacacgccccgccccagaagcagttttaaaaactgctgatacagggggagagataaaagatctcaaatatagttcttttagtaagttaatgttaaacattcaaataatgtataatgagcataagaaaaaatctattggtaaaaaactaaacaaaagaataaagaaaatagagaaggcggataaaataggcggtggtaaaggtggctattttgctagacatttagataatgattattcagttgaagataatattaaacctataccagaagaacgcaaagaagatgaatatacgaagctacagaagttttttgatgatgtaaataaaagaggcatagagctaaaaaacaaaaaagaagccatgcttaaagctgagcaagaaaataaaaagatgctatcacaacaacctaaacataacccaaaaaatgaagatcagaacgatagacacattaaatacaaataa

SEQ ID NO: 490578 - DNA, 189 bp, Shigella sonnei; identical to SEQ ID NO: 463227

SEQ ID NO: 490579 - DNA, 624 bp, Shigella sonnei; identical to SEQ ID NO: 486859

SEQ ID NO: 490580 - DNA, 624 bp, Shigella sonnei
atgaacgacgtgttcctgaaacgcctgacggctccgaccattaccagcggcggtaatcctccggcattttccctgacaccggacgggcggctgacggcgaaaaatgccgatatcagcggtaacgtgaatgcgaactccgggacgctcaacaacgtcacgattaacgagaactgtcgggttctgggaaaattgtccgccaaccagattgaaggcgatctcgttaaaacagtgggcaaagctttcccccgggactcccgtgcaccggaacggtggccatcagggaccatcaccgtcagggtttatgacgatcagccgtttgaccggcagattgttattccggcggtggcattcagcggcgctaaacatgagcgggagaataacgatatttattcgtcatgccgcctgatagtacggaaaaacggtgctgaaatttataaccgtaccgcgctggataatacgctgatttacagtggtgttattgatatgccagctggtcgcggccacatgacgcaggagttttcggtgtcatcatggctggtaaatgactggtatcccacagcaagtatcagcgatttgctggttgtggtgatgaagaaagccaccgcaggcatcagtatcagctga

SEQ ID NO: 490581 - DNA, 444 bp, Shigella sonnei
gtgaaataccgttatgagtttacggacacgctggggctgattacgtcattcagttatgccaacgctgaagatgagcaaaaaacgcattacagcgatacccgctggcatgaggattccgtgcgtaatcgctggttcagcgtgatggcggggccgtctgtgcgcgtgaatgaatggttcagcgcgtatgcgatggcgggtatggcttacagccgtgtttcgactttctccggggattatctccgcgtaactgacaacaaggggaaaacgcacgatgtgctgaccggaagtgatgacggtcgccacagcaacacgtctctggcgtggggggctggcgtgcagtttaacccgaccgaatccgtggccattgatattgcttatgaaggctccggcagtggcgactggcgcactgacggtttcatcgtgggtgtcggttataagttctga

SEQ ID NO: 490582 - DNA, 465 bp, Shigella sonnei
gtggcactggctgaggcctgcccggcacttgttgacgcggcactggcagatgatgcagccgctgtttttgagcctgccgcagctgaggcactctgttccgctgccgtctcagaagacttagcgttcgtctcggacgtttttgccgctttcgcggaattgcctgccgccgttgccgaggaagcggaactactggcgctcgaggctgcgctcgtttctgatgatttcgctgcctcttttgaggccgccgcatcccgggctgaggtggcagcttctgacgccttcgtggtcgcggcggatgcagaaatggctgcagatttttgtgacgctgccgcattcgtttctgacgttttcgcggcactggcactggtagctgccgcgctttttgaggactctgtagcagcagcacttttcgatgcttcactggcctttgttgatgccattcctgcgctggaagatgctgactga

SEQ ID NO: 490583 - DNA, 189 bp, Shigella sonnei; identical to SEQ ID NO: 463227

SEQ ID NO: 490584 - DNA, 282 bp, Shigella sonnei; identical to SEQ ID NO: 489556

SEQ ID NO: 490585 - DNA, 189 bp, Shigella sonnei; identical to SEQ ID NO: 463227

SEQ ID NO: 490586 - DNA, 189 bp, Shigella sonnei; identical to SEQ ID NO: 463227

SEQ ID NO: 490587 - DNA, 198 bp, Shigella sonnei
atgttaaaaaagatacttttactggctctgcttcctgcaatcgccttcgcagaggaacttccttccccagtaaaagcgattgaaaaacagggcattacaatcatcaaaacgttcgatgcccccggaggaatgaaaggttatctcggaaagtatcaggatatgggcgtcaccatctacctacctgactcccgatggtaa

SEQ ID NO: 490588 - DNA, 348 bp, Shigella sonnei; identical to SEQ ID NO: 485869

SEQ ID NO: 490589 - DNA, 1287 bp, Shigella sonnei; identical to SEQ ID NO: 486968

SEQ ID NO: 490590 - DNA, 1167 bp, Shigella sonnei; identical to SEQ ID NO: 487978

SEQ ID NO: 490591 - DNA, 465 bp, Shigella sonnei; identical to SEQ ID NO: 490582

SEQ ID NO: 490592 - DNA, 225 bp, Shigella sonnei; identical to SEQ ID NO: 133446

SEQ ID NO: 490593 - DNA, 378 bp, Shigella sonnei; identical to SEQ ID NO: 476066

SEQ ID NO: 490594 - DNA, 225 bp, Shigella sonnei; identical to SEQ ID NO: 133446

SEQ ID NO: 490595 - DNA, 783 bp, Shigella sonnei; identical to SEQ ID NO: 482384

SEQ ID NO: 490596 - DNA, 1074 bp, Shigella sonnei; identical to SEQ ID NO: 482383

SEQ ID NO: 490597 - DNA, 162 bp, Shigella sonnei; identical to SEQ ID NO: 261922

SEQ ID NO: 490598 - DNA, 606 bp, Shigella sonnei; identical to SEQ ID NO: 482381

SEQ ID NO: 490599 - DNA, 1587 bp, Shigella sonnei
atgacaagccttttggccgcagaggtagcgaaaagaagaacctttgcaattatttctcacccggatgccggtaagactaccatcaccgagaaggtgctgctgttcggacaggccattcagaccgccggtacagtaaaaggccgtggttccaaccagcacgctaagtcggactggatggagatggaaaagcagcgtgggatctccattactacgtctgtgatgcagtttccgtatcacgattgcctggttaacctgctcgacaccccggggcacgaagacttctcggaagatacctatcgtaccctgacggcggtggactgctgcctgatggttatcgacgctgcaaaaggtgttgaagatcgtacccgtaagctgatggaagttacccgtctgcgcgacacgccgatcctcacctttatgaacaaacttgaccgtgatatccgcgacccgatggaactgctcgatgaagttgagaacgagctgaaaatcggctgcgcaccgatcacctggccgattggctgcggcaagctgtttaaaggcgtttaccacctttataaagacgaaacctatctctatcagagcggtaaaggccacacgattcaggaagtccgtattgttaaagggctgaataacccggatctcgacgctgcggttggtgaagatctggcacagcagctacgtgacgaactggaactggtgaaaggcgcgtctaacgagttcgacaaagaattgttccttgcgggcgaaatcactccggtattcttcggtactgcgctgggtaacttcggcgttgatcatatgctggatggcctggtggagtgggctcctgcgccgatgccgcgtcagactgatacccgtaccgtagaggcgagcgaagacaaatttaccggcttcgtatttaaaattcaggccaacatggacccgaaacaccgcgaccgcgtggcgtttatgcgcgtagtatccggtaaatatgaaaaaggcatgaagctgcgccaggtgcgtactgcgaaagatgtggttatctccgacgcgctgacctttatggcgggcgaccgttcgcacgttgaagaagcgtatccgggcgatatcctcggcctgcacaaccacggcactattcagatcggcgacacctttacccagggtgagatgatgaagttcaccggtattccgaacttcgcaccagaactgttccgtcgtatccgcctgaaagatccgctgaagcaaaaacagctgctcaaagggctggtacagctttccgaagagggcgcggtgcaggtgttccgtccgatctccaacaacgatttgatcgttggtgctgttggtgtgctgcagtttgatgtggtggtatcgcgcctgaagagcgaatacagcgttgaagcagtatatgaatcagtcaacgttgccactgcccgctgggtagaatgtgcggacgcgaagaaattcgaagagttcaagcgtaagaacgaaagccaactggcgcttgatggcggcgataacctcgcttacatcgctaccagcatggtcaacctgcgcctggcgcaggaacgttatcccgacgttcagttccaccagacccgcgagcattaa

SEQ ID NO: 490600 - DNA, 249 bp, Shigella sonnei; identical to SEQ ID NO: 487901

SEQ ID NO: 490601 - DNA, 480 bp, Shigella sonnei; identical to SEQ ID NO: 464934

SEQ ID NO: 490602 - DNA, 480 bp, Shigella sonnei; identical to SEQ ID NO: 464934

SEQ ID NO: 490603 - DNA, 1167 bp, Shigella sonnei; identical to SEQ ID NO: 487978

SEQ ID NO: 490604 - DNA, 180 bp, Shigella sonnei
atgaataagccgcaactggcggaatcacagaagaccgctttgcttaccgaggcggagtctgtcatccggccgccggggtgtgctgtcaggctgaacagagaaacggatgaatccggggaggcccgggggcgggcctctgtttttccggagtcagtccggtctgtggtttatgcgatgtga

SEQ ID NO: 490605 - DNA, 288 bp, Shigella sonnei; identical to SEQ ID NO: 468183

SEQ ID NO: 490606 - DNA, 480 bp, Shigella sonnei; identical to SEQ ID NO: 464934

SEQ ID NO: 490607 - DNA, 654 bp, Shigella sonnei; identical to SEQ ID NO: 476867

SEQ ID NO: 490608 - DNA, 480 bp, Shigella sonnei; identical to SEQ ID NO: 464934

SEQ ID NO: 490609 - DNA, 225 bp, Shigella sonnei; identical to SEQ ID NO: 133446

SEQ ID NO: 490610 - DNA, 225 bp, Shigella sonnei; identical to SEQ ID NO: 133446

SEQ ID NO: 490611 - DNA, 303 bp, Shigella sonnei
atgaaaaaaagaaattttagcgcagagtttaaacgcgaatccgctcaactggttgttgaccagaaatacacggtggcagatgccgccaaagctatggatgttggcctttccacaatgacaagatgggtcaaacaactgcgtgatgagcgtcagggcaaaacaccaaaagcctctccgataacaccagtacaaatcgaaatacgtaagctgaggaaaaagctacaacgcattgaaatggagaatgaaatattaaaaaaggctaccgcgctcttgatgtcagactccctgaacagttctcgataa

SEQ ID NO: 490612 - DNA, 291 bp, Shigella sonnei; identical to SEQ ID NO: 467055

SEQ ID NO: 490613 - DNA, 492 bp, Shigella sonnei; identical to SEQ ID NO: 12545

SEQ ID NO: 490614 - DNA, 258 bp, Shigella sonnei; identical to SEQ ID NO: 25981

SEQ ID NO: 490615 - DNA, 810 bp, Shigella sonnei
gtgcgcatcggtgcccccaccggtgtggcctgttcggtgtgccccggcggagtgacgtccggccatccggtcaatcccctgctcggtgcaaaggtccttcccggtgaaaccgacatcgccctgcccgccccgctgccgttcatcctctcccgcacctacagcagttaccggacaaaaacgcccgcgccggtggggagcctcggccccggctggaaaatgcctgcggatatccgcttacagctgcgcgataacacactgatactcagtgataacggcggcagaagcctgtattttgagcacctgtttcccggtgaggacggttacagccgcagcgaatcactctggctggtgcgcggcggcgtggcgaaactggatgaaggtcaccggctggccgcactctggcaggcgctgccggaagaactccgcttaagtccgcatcgttatctggcgacaaacagtccgcaggggccgtggtggctgctcggctggtgtgagcgggtgccggaagcggatgaggtgctgcctgcgccgctgccgccgtaccgggtactgaccgggctggtggaccgcttcgggcgcacacagacgttccaccgcgaagccgccggtgaattcagcggcgaaatcaccggcgtgacggatggtgccgggcgtcacttccggctggtactgaccacgcaggcgcagcgggcagaagaagcccggcagcaggccatttccggcgggacggaaccgtccgcttttcctgataccctgccgggttacaccgaatatggccgggacaacggcatctgtctgccgtgtggctga

SEQ ID NO: 490616 - DNA, 267 bp, Shigella sonnei; identical to SEQ ID NO: 381271

SEQ ID NO: 490617 - DNA, 1287 bp, Shigella sonnei; identical to SEQ ID NO: 486968

SEQ ID NO: 490618 - DNA, 417 bp, Shigella sonnei; identical to SEQ ID NO: 487975

SEQ ID NO: 490619 - DNA, 315 bp, Shigella sonnei
atgcagatcaaataccggatttatatggctcacgcgttccatgccttcaggcaacaatgcatggactgccagttgcgacacgaccgaagatcaaaatggttcaattacagtttacgccatttgccagcgacgatacttatcactggcaaaccacgatgtaactacatttccccgacaggtcagttcggtgagtaccgccataaaagttgtattcgtcatagaagccgcatttcacaattcgattggcatcataggttgcaactgaccccgcaaaataattcggcttccacccgtgcggattttctgcattactga

SEQ ID NO: 490620 - DNA, 240 bp, Shigella sonnei; identical to SEQ ID NO: 489376

SEQ ID NO: 490621 - DNA, 240 bp, Shigella sonnei
atgatgccggatggcgaccgtttccacatggtgaacggtgcaaactggtttgaccgtaccgtgagtgctgatgccgcaggcatcatcctgacctcccttgtgattaaccgccagttgtggctgtaccacgacagcggggatgcagggttgacacacctgtacaggatgcgcgatgcgcagttgtggagccacatcgaatttcaccccgaatgcaacgcgatttacgcggcacttgactga

SEQ ID NO: 490622 - DNA, 249 bp, Shigella sonnei
atgcgtattgagatctgcatagccaaagaaaaaatgactaaaatgccaaacggtgctgtggatgcgttaaaggaagaattaacccgacgcatcagtaaacgttatgacgatgtagaggtgatcgtaaaagccaccagcaacgatgggctttctgttacacgcaccgcagataaagattctgcaaaaacatttgttcaggagactctgaaagatacctgggagtctgctgacgagtggtttgttcggtaa

SEQ ID NO: 490623 - DNA, 261 bp, Shigella sonnei
ttgtaccgtggcagtgtgctgaaggtgggtaaatatcttttccgggatgcgtttattcaacaactggtgaatggtcgctggcatgtgatgcggcgtattgatggcaaaaatcgttaccccattgatgtggtgaaaatcccgctgtccggaccgctgacacaggcatttgaagatgcccgcgatcgcatcattgctgcggaaatgccgaaacagctggggtatgcactgaaacaacaactgaggttatggctgacccgatga

SEQ ID NO: 490624 - DNA, 402 bp, Shigella sonnei; identical to SEQ ID NO: 488180

SEQ ID NO: 490625 - DNA, 387 bp, Shigella sonnei; identical to SEQ ID NO: 488182

SEQ ID NO: 490626 - DNA, 318 bp, Shigella sonnei; identical to SEQ ID NO: 402007

SEQ ID NO: 490627 - DNA, 330 bp, Shigella sonnei; identical to SEQ ID NO: 488184

SEQ ID NO: 490628 - DNA, 333 bp, Shigella sonnei
atgaaagactttggctgcgaatttctgcgcatccttcgccgatccttcatgaataagcagatcgcccaattttacgtcagcgttacacatatcggcgcgaaagacgttctcaccaaagaaatcgtaaaaatggcgtccggcaggatgctttttaaaaaacgcaccatgttgatgtccagggcaagcaaaggtgctgttgcccatctcaacgtactgcgtcagcgtgtcataaaacggtggcagcaaattctcttcatactgacaggctgcggattccagctccagccactgctgctcgttgccgttgattaccgccgtaacgcccgcaggtaa

SEQ ID NO: 490629 - DNA, 282 bp, Shigella sonnei
  misc_feature (128)..(137): n is a, c, g, or t
atgttactcagtagcatcggcaatttacataacttacacgttgttttttatatctcgaaaaaacagatagatagtgtgcgcactcgaaatgatattggtaacataaatagctttattcgtgataaacnnnnnnnnnnaaacatctcaaaagatttcctttattatattcgaaattcatttgatcaaggttatcaccttatggagacgttacgtagaatgactatatttgttatcggcacattaggggtattaattttagtattgatggaaggtgattattga

SEQ ID NO: 490630 - DNA, 246 bp, Shigella sonnei; identical to SEQ ID NO: 486098

SEQ ID NO: 490631 - DNA, 699 bp, Shigella sonnei
atgcaggatattccacaggaaacacatcatgagacgacacgcctcactcagtcagcccaggtggtgctctgggaaatcgatctgacagaggtcggtggtgaacgttattttttctgtaatgagcagaacgaaaaaggtgagccggtcacctggcaggggcggcagtatcaggcataccccattcaggggacaggatttgaactgaacggcaagggcagtgctgcccgtccgacactgacggtttctaacctgcacggtatggtcaccggtatggcggaagatctgcagagtctggtcggcggaacggtggtccggcgtaaggtttacgcccgttttctggatgcggtgaacttcgtcaacggaaacagtgatgccgacccggagcaggaggtgatcagccgctggcgcatcgagcagtgcagtgaactgagtgcggtcagtgcttcttttgtactgtccacgccgacggaaacggacggtgctgtttttccggggcgtatcatgctggccaacacctgcacctggacctatcgcggtgatgagtgcggttataacggtccggctgtcgcggatgaatatgaccagccgacgtccgatatcacgaaggataaatgcagcaaatgcctgagcggctgtaagtttcgcaataacgtcggcaactttggcggttacctttccattaacaaactttcgcagtaa

SEQ ID NO: 490632 - DNA, 624 bp, Shigella sonnei; identical to SEQ ID NO: 488210

SEQ ID NO: 490633 - DNA, 903 bp, Shigella sonnei; identical to SEQ ID NO: 488162

SEQ ID NO: 490634 - DNA, 189 bp, Shigella sonnei; identical to SEQ ID NO: 463227

SEQ ID NO: 490635 - DNA, 189 bp, Shigella sonnei; identical to SEQ ID NO: 463227

SEQ ID NO: 490636 - DNA, 177 bp, Shigella sonnei; identical to SEQ ID NO: 402013

SEQ ID NO: 490637 - DNA, 153 bp, Shigella sonnei
atgccttcgatgatagcgataattttactcatcatccttcacatctggctctgtagacaggatggtgatcacttctggagtgaatccagattaaacatctcattgctgatgcttgatattgagcatcttgcgcgcggtaaggggctgcgttga

SEQ ID NO: 490638 - DNA, 153 bp, Shigella sonnei; identical to SEQ ID NO: 490637

SEQ ID NO: 490639 - DNA, 177 bp, Shigella sonnei; identical to SEQ ID NO: 402013

SEQ ID NO: 490640 - DNA, 225 bp, Shigella sonnei
atgatccggaatattttcaaacggtttaccaatcagactttccgttgtcctcgtccgggtcagtggtacaccacacctgcagggcatgttctacgtgttagcctggttgaccgtgaatgtcagaaggtgatttgtgaaccgctgggccgtagttaccgcgtcagtatgccgcttatagcgtttcgctccggaaaaaacatgaagcatctcggaggtgcagcatga

SEQ ID NO: 490641 - DNA, 408 bp, Shigella sonnei; identical to SEQ ID NO: 489373

SEQ ID NO: 490642 - DNA, 186 bp, Shigella sonnei; identical to SEQ ID NO: 462789

SEQ ID NO: 490643 - DNA, 174 bp, Shigella sonnei
atgctggcaaccgaacgccgcgatctcgggcttgatgatggctctttctggcctgtactggaaggcatcccggcaacagagatgttcaacgtgattccactggcaccgggccatgcctacgggatgtttatggaacgttttaacgagttatcggagttacgcaaatgcgcatga

SEQ ID NO: 490644 - DNA, 201 bp, Shigella sonnei; identical to SEQ ID NO: 488102

SEQ ID NO: 490645 - DNA, 171 bp, Shigella sonnei; identical to SEQ ID NO: 490441

SEQ ID NO: 490646 - DNA, 255 bp, Shigella sonnei
atgtttgatgttaacgttgaggttgagaataaagagtttaaggcattacctttttccccatcaaatcttaaattaattaaagataaaaaggggaaaagtttcgtttttcagcttgaatgcattgtagctatagaacctttttttgatataacaaagaaagagtgtgatgtcatcacatctatgggagaaagaataagggtgtgtatggctgttgatgaattgtataccgcattagatatacaaaagcaggaatga

SEQ ID NO: 490647 - DNA, 363 bp, Shigella sonnei
atgatcactctttttctgttcttaacactattgatactcctgataaggatattctccgccagactaataattccggctgtgggcgtgtttctgccagtgtcatcactctggatgggatttcatatgctcacacaaaatgaatcctgtctggataatatcgcctgtgttgctcccccatttggtcagttcagtacccttataggatggtttttgattgcggaatcaatattaaccgcatgtgctggcgtatattttctccgtaaaaataaaaaacgctggtcacgtcatgatacagtcatgtttctttttgcaagtggcctggcaattttcagtacgtggatgctggaacaccaatgggtttga

SEQ ID NO: 490648 - DNA, 987 bp, Shigella sonnei; identical to SEQ ID NO: 469819

SEQ ID NO: 490649 - DNA, 237 bp, Shigella sonnei; identical to SEQ ID NO: 469821

SEQ ID NO: 490650 - DNA, 792 bp, Shigella sonnei; identical to SEQ ID NO: 469822

SEQ ID NO: 490651 - DNA, 279 bp, Shigella sonnei; identical to SEQ ID NO: 488964

SEQ ID NO: 490652 - DNA, 381 bp, Shigella sonnei; identical to SEQ ID NO: 458903

SEQ ID NO: 490653 - DNA, 147 bp, Shigella sonnei; identical to SEQ ID NO: 468154

SEQ ID NO: 490654 - DNA, 264 bp, Shigella sonnei; identical to SEQ ID NO: 37743

SEQ ID NO: 490655 - DNA, 246 bp, Shigella sonnei; identical to SEQ ID NO: 37739

SEQ ID NO: 490656 - DNA, 951 bp, Shigella sonnei; identical to SEQ ID NO: 485807

SEQ ID NO: 490657 - DNA, 168 bp, Shigella sonnei; identical to SEQ ID NO: 7684

SEQ ID NO: 490658 - DNA, 210 bp, Shigella sonnei; identical to SEQ ID NO: 7683

SEQ ID NO: 490659 - DNA, 1035 bp, Shigella sonnei; identical to SEQ ID NO: 486086

SEQ ID NO: 490660 - DNA, 468 bp, Shigella sonnei; identical to SEQ ID NO: 490364

SEQ ID NO: 490661 - DNA, 288 bp, Shigella sonnei
atgagaattaaatatgaatcacgttggaaattagaagaactaaaattagaaatatgtagatcaatagattcgttaattgatgaatatcatatcgaatatgcaatgggaataaatctatatatgaattgtgaagataaggagtttaatcccgttgatattgtcaatgaagatggaaagaatattatgtttgttgttagcaacaatgaaaaaatacaaaaaccaaaaaaaagtgcgaagaaaaaaattcctgcacctgtaattgagttagataaatatcggaaaaagtga

SEQ ID NO: 490662 - DNA, 534 bp, Shigella sonnei
atgctggaacagcaatttgaagatttcgaacagcaaaaacggcgagatcatcaggcacaagatcaatccaaaagtgctaagcaaaaacgagatcggttgaatccacctgactggtcgcaggttactaaggcgggctggaatatgttggactctatatctgagaaggttcccagagcatttaggctatattctttttttgctcaaaatatagataaatcgtgtggggctgttgtatgtgaccaaaaattcttagctgattatttcggtgttagtttaaggacgatccaatattggattggagatttagaaagtattggtgccatcgtgaaaataccagtaggtatctattatgcttatgcgttagatccgtatcaggtatggcgcggatataataaatctaaaaaatatgcagcgtttaacgcaaaaacattaactcaaaaagatggcgttattgatcgcaagttgcggctcatgctctctaggagagaagagtttgaaggctcgcttaagacatctaatcatgacttggactag

SEQ ID NO: 490663 - DNA, 1149 bp, Shigella sonnei
atgtcgctgtcgcgtaaaccggaggagacatggtacggctgggacggcgacaggctgacgacggtacagaccgacaccacacgtatccagacggtatacgagccgggaagcttcacgccgctcatccgggtcgagacagagaacggcgagcgggagaaagcgcagcgccgcagcctggcggagaagctgcagcaggaagggagcgaggacgggcacggcgtggtatttccggctgaactggtgcggctgctggacagactggaggaagaaatccgggcagaccgcgtgagcagtgaaagccgggtgtggcttgcgcagtgcgggctgacggtggagcaactggccagacaggtggagccggaatacacaccagtgcgaaacgttcatctttaccactgcgaccatcggggccagccgctggcgctcatcagcgaagacggcgatacggtgtggagcggggcgtatgatgagtggggcaaccagctaaatgaggagaacccgcatcatgtgtatcagccataccgtctgccggggcagcagtatgatgaggagtcggggctgtactacaatcgtcaccggtactatgatccgttgcagagacggtacatcacccaggaccccattgggctgaaaggtgggtggaatctgtatcagtatccgctgaatccggtgagcaggatagatccgttggggttattctcatgtgagagttgtagtcattttatagatgatataaataataaactggataaccttccgtttaacccgacaaaaatgtttacagctagtttaaatactgctaattcagcaaggctgtatgcaagtggcatgacaaaattcggtataagtgttgctgccgatggaacgatcattgctgccccagtcggtgcagcttctatggctttaggggcgtggaatataaaatctgcgacagctgcatataacagagcaaatttacaattatcagaatcacttcaggaaaatggtagagataggtgttggagaaatttattgggtattttaccttatggtgagcagtttgatgaccctggtgaaccatcaatattagacgtttatggtgaaaagattgagaatatcaaagattctccaatgaagttttttgaagagcttgggacgctggggttgtaa

SEQ ID NO: 490664 - DNA, 360 bp, Shigella sonnei; identical to SEQ ID NO: 372517

SEQ ID NO: 490665 - DNA, 1260 bp, Shigella sonnei
atgctttacaaaggcgacaccctgtaccttgactggctggaagatggcattgccgaactggtatttgatgccccaggttcagttaataaactcgacactgcgaccgtcgccagcctcggcgaggccatcggcgtgctggaacagcaatcagatctaaaagggctgctgctgcgttcgaacaaagcagcctttatcgtcggtgctgatatcaccgaatttttgtccctgttcctcgttcctgaagaacagttaagtcagtggctgcactttgccaatagcgtgtttaatcgcctggaagatctgccggtgccgaccattgctgccgtcaacggctatgcgctgggtggtggctgcgaatgcgtgctggcgaccgattatcgtctggcgacgccggatctgcgcatcggtctgccggaaaccaaactgggcatcatgccgggctttggcggttctgtacgtatgccacgtatgctgggcgctgacagtgcgctggaaatcattgccgccggtaaagatgtcggcgcggatcaggcgctgaaaatcggtctggtggatggggtagtcaaagcagaaaaactggttgaaggcgcaaaggcggttttacgccaggccattaacggcgacctcgactggaaagcgaaacgccagccgaagctggaaccgctaaaactgagcaagattgaagccaccatgagcttcaccatcgctaaaggaatggtcgcgcaaacggcggggaaacattatccggcccccatcaccgcagtaaaaaccattgaagctgcggcccgttttggtcgtgaagaagccttaaatctggaaaacaaaagttttgtcccgctggcgcataccaacgaagctcgcgcactggtcggcattttccttaacgatcaatatgtaaaaggcaaagcgaagaaactcaccaaagacgttgaaaccccgaaacaggctgctgtgctgggcgcaggcatcatgggtggcggtatcgcttaccagtccgcgtggaaaggcgtgccggttgtcatgaaagatatcaacgacaagtcgttaaccctcggcatgaccgaagccgcgaaactgctgaacaagcagcttgagcgcggcaagatcgatggtctgaaactggctggcgtgatctccacgatccacccaacgctcgactacgccggatttgaccgcgtggatattgtggtagaagcggttgttgaaaacccgaaagtgaaaaaagccgtactggcagaaaccgaacaaaaagtacgctag

SEQ ID NO: 490666 - DNA, 456 bp, Shigella sonnei
gtgaatctcccacaagatggcatcaaattacatcgcggtaacttcaccgctatcggtcggcagatccagccttatctggaggagggcaaatgctttcgcatggtgcttaaaccgtggcgtgagaaacgcagtctttcccagaatgcactcagccacatgtggtacagcgaaatcagtgaatacctcatcaacaggggtaaaacgttcgccactccagcttgggtaaaagatgctctcaaacacacatatctcggttatgaaaccaaagacctggttgatgtcgtaaccggtgatatcaccactatccagtcgttacgccatacctccgatcttgataccggagagatgtatgtcttcctgtgtaaggttgaagcctgggcggtgaatattggctgccacctgactattccgcagagctgcgagttccagctgctccgtgacaagcaggaggcgtaa

SEQ ID NO: 490667 - DNA, 930 bp, Shigella sonnei
atggcacaacagagaactacctccctcagatccatacctttagacttagatgttaagcaagaggctgtcattaacggtatagaaatgggggtactcgataacggaattccgtaccttactcagaatgggttggcaaatgtttgtggtgttcagcgtttgcgaatcaaggaaattaccgatgagtgggctcaatccgttgagaacggtattttcaaaaaaggaagaatgacttttattggtacatatcttcttaatgaaggttttacagatgaaaaactttatataccaataattcgaaatggtgttgagtaccatgcttatccagatgttgtatgcatggctatacttgaatactatgcctttgaagcaaaacaagcagaaagtgagactgcaattagatcttacagagagcttgctaaaaaaggcctcaagacatttatatacgaggcgctaaaatatcaaccggaggacccgtggaggcattaccatgacagagtatctttattaaaagataagggaaccatacctgatgggtatttcattatatttaatgaaattgcaggtatgatggtagatctcatcaatgctggattagcgattaatcagcataccgtacctgatggcagtgttggttcttgctgggcgcgtcactggaaagcaaaggggttagcaacagaatttggagaaagagtagactgtgagcattattaccctgaagattttcttcaggcaagttccaatcctcagatcattaatgcctatcctgattctgcattgtcagagtttcgtagatggtttaagcatgaatatttaaccacaaagttcccaccgtatattcttaaaaaatcaaacgtgcttcctggtggtacagaagatgctaatcgtctgatagaagctttcaaaaaatcagagctagaaaataaaccataa

SEQ ID NO: 490668 - DNA, 213 bp, Shigella sonnei
gtgatgttaattgcctaccagaacgttactcatcttcttcaggatgcggagcatggtgaagctggtcacttcacttccatcgagcaagaatatccccagatactcaacagagcgcgagcaatcctcgtccgagaaacggcacatgtaaaacttcagccgtggcaggatgataagtggagtcgagtattgccgtatttgcgtcaaatctgttag

SEQ ID NO: 490669 - DNA, 1527 bp, Shigella sonnei
atgaaaaaagccatagcatatatgcgattttcatcaccaggtcagatgtctggcgactcattaaaccgacagagaagacttattgctgaatggttaaaggtaaatagtgattattatcttgataccataacatatgaagatttaggattaagtgcattcaaaggaaagcatgcacaatcaggagctttttcggaatttttagatgctatagagcatggttatatattgccaggaactacattgttagttgaaagtctggacagactttcaagagaaaaagtcggtgaagcgattgagcgtctgaaattgattttgaatcacggtattgatgttataactctttgcgataatacagtctataatattgactctttgaatgatccatattcattaataaaagccatacttatagcacaaagggcaaatgaagaaagcgagataaagtcaagtcgggttaaattatcatggaagaaaaaacggcaggatgcactggagtcaggcacgattatgacggcgtcttgtccgagatggctctccttagatgacaaaagaacggcttttgttccagaccccgacagggtgaaaactattgagctaatttttaaactcaggatggaaaggcgctcattgaatgcaatagccaagtatttaaatgatcatgctgtaaagaatttctcaggaaaagaaagtgcatggggaccttctgtaattgaaaaattattagcgaataaagctctgataggtatatgcgtaccttcatatcgtgcaagaggtaaaggaataagtgaaatcgctggctattatcccagagtcatatcagatgatttgttttacgctgtgcaggaaattcggttggcaccttttggtattagcaatagtagcaaaaaccctatgttgataaatctacttcgaacagttatgaagtgcgaggcttgtggtaataccatgattgttcatgcggtatctggaagtttgcatggctattatgtttgtccgatgagaagactgcatcgatgtgacaggccatcaataaagagagatttggttgattataatatcattaatgagttgctttttaattgtagtaaaatccaaccagttgaaaacaagaaagatgctaatgaaactttagagttgaaaattattgagctccagatgaaaattaataatttaattgctgcattatctgttgcgcctgaagttaccgctatagcagaaaaaatcagagtattagataaggaattacgaagggcttctgtatcattaaaaactttgaagagtaaagcggtgagctcacttggtgattttcatgctattgacttaaccagtaaaaatgggcgagagctatgtcgtacacttgcctataaaacattcgaaaaaatcataatcaatacagataataaaacctgtgatatctattttatgaatggcattgtttttaaacactatcctttaatgaaaacaatatccgcccagcaggcgataagtactctcaaatatatggttgatggtgaggtttatttttga

SEQ ID NO: 490670 - DNA, 333 bp, Shigella sonnei
atgaacccttatatttatcttggtggtgcaatacttgcagaggtcattggtacaaccttaatgaagttttcagaaggttttacacggttatggccatctgttggtacaattatttgttattgtgcatcattctggttattagctcagacgctggcttatattcctacagggattgcttatgctatctggtcaggagtcggtattgtcctgattagcttactgtcatggggatttttcggccaacggctggacctgccagccattataggcatgatgttgatttgtgccggtgtgttggttattaatttattgtcacgaagcacaccacattaa

SEQ ID NO: 490671 - DNA, 303 bp, Shigella sonnei
atgacgggcaaagaggcaattattcattacctggggacgcataagagcttctgtgcacaggacgttgccgcggtaacaggcgcaaccgtaaccagcataaatcaggctgcggctaaaatggcgcgggcaggaatcctggtcgttgatggtaaggtctggcgaacggtgtattaccggttcgctaccagagaagaacgggaaggaaaggtgagcacgaatctgatttttaaggagtgtcgccagagtgccgcgatgaaacgcgtattgagggtatataaaagaacatcaatgggtacacaatga

SEQ ID NO: 490672 - DNA, 702 bp, Shigella sonnei
atgaaaaacatcgccgcacagatgattaactttgaccgtgagcagatgcgtcggatcgccaacaacatgccggaacagtacgacgaaaagcctcaggtacagcaggtagcgcagatcatcaatggtgtgttcagccagttactggcaactttcccggcgagcctggctaaccgtgaccagaatgaactgaacgaaatccgccgccagtgggttctggctttccgggaaaacgggatcaccacaatggaacaggttaacgctggaatgcgcgtagcccgtcggcagaatcgaccatttctgccatcacccgggcagtttgttgcatggtgccgggaagaagcatccgttatcgccggactgccaaacgtcagcgagctggttgatatggtttacgagtattgccggaagcgaggcctgtatccggatgcggagtcttatccgtggaaatcaaacgcgcactactggctggttaccaacctgtatcagaacatgcgggccaatgcgcttactgatgcggaattacgccgtaaggccgcagatgagcttgtccatatgactgcgagaattaaccgtggtgaggcgatccctgaaccagtaaaacaacttcctgttatgggcggtagacctctaaatcgtgcacaggctctggcgaagatcgcagaaattaaagctaagttcggactgaaaggagcaagtgtatga

SEQ ID NO: 490673 - DNA, 1005 bp, Shigella sonnei
atggcgaaagccggtctgctggaacagaaccgactttcaggtgcaaatcgtaacacactcattgcgggaggaattatggcaaacactgctgagatattcaattttccagtgccggatgcggcacaaaaggagctgcgcgtggcagatctcgatgatggttatacgcgcattgcaaatgagttgctggaagctgtgatgctggccggattaacacagcaccagcttctggtcttcctagctgtcatgcgcaaaacatatggctttaataaaaaactggattgggtgagcaacgagcaactgtccgaattgaccgggatattgccgcacaagtgttctgctgcaaaaagtgttctggtaaagcgtgggattttgattcagagcgggcggaatatcggtattaataatgtggtcagtgaatggtcaacattacccgaatcaggtaagaaaaataaagtttacctgaaagaggtaaatttacctgaatcaggtaagaaaagtttacccaaatcaggtaaaggcgtttacccgaatcaggtaaacacaaaagacaaactaacaaaagacaatataaaacctttttcgtccgagaattctggcgaatcctctgaccaaccagaaaacgatcttcctgtggtgaaaccagatgctgcaattcagagcggcagcaagtgggggacagcagaagacctgaccgccgcagagtggatgtttgacatggtgaagaccatcgcgccatcagccagaaaaccgaattttgcagggtgggctaacgatatccgcctgatgcgtgaacgtgacggacgtaaccaccgcgacatgtgtgtgctgttccgctgggcatgccaggacaacttctggtccggtaacgtgctaagtccggccaaactccgcgacaagtggacccaactcgaaatcaaccgtaacaagcaacaggcaggcgtgacagctagcaaaccaaaactcgacctgacaaacacagactggatttacggggtggatctatga

SEQ ID NO: 490674 - DNA, 540 bp, Shigella sonnei
atgcaaccacttacataccaacagactagcggatttagcccgactgcggtgataaatcgttctcaaacaaaacaggtgccaggccacgaaaaaatccgtgatgccgtccgcgcctggtcggctgaagataatcaggatgtcgttgccgcactcattgtgaatgagtatcgagcacagggcggcggcactatcgatttttctgatgatgtcagtcgtgcacgccagaagctgttccgctttctcgataacaaattcgattctgaaaaataccgaaataacgtgcgtgaactgactccagcaattctggcagtactaccgctgaaatatcgcggccacctggttgagcaggatagcttcatggctcggctggctgaaatggaaaaggaactcagtgaggcaaaacaggctgtcattctcaacgcaccacgccaccagaaactgaaggaaattagtgaaggtattgtgtcgatgtttcgtgtggacccagatctggctggtccattgatggcgatggttactaccatgctgggggcgatatga

SEQ ID NO: 490675 - DNA, 231 bp, Shigella sonnei; identical to SEQ ID NO: 7374

SEQ ID NO: 490676 - DNA, 756 bp, Shigella sonnei
atggttgtttttagtcaacaaccattttcgtttgatgaaataaaaccttggttgtacatttggactatgaaaacaacactctcagaaagacttaaagaagccagattagcgcgaggccttacacaaaaggcgcttggggatttggtcggggttagccaagctgctattcagaaaatcgaaacagggaaagctaatcaaacaactaaaatcgtggagatcgcgaacgctttgggtgtgcgcgcagaatggttatcttctggcgttggaaatatgtcagacagtacagtgcaaccaatacaatcaactgtcagccattccaaatacttcaagattgacgttcttgatatagaagtcagtgctgggccgggagtcatcaaccgtgagtttgtagaagttctacgctcggttgagtactcgtttgacgatgctcgtcatatgttcgatggtaggaaggcggaaaatatccgcatcattaacgtgcgtggtgacagcatgtcaggaacgatcgaaccaggtgatctgctgttcgttgatatcacagttaaatctttcgacggtgatggtatctatgcgtttctgtacgacgacacagcccatgtaaagcgcctgcaaatgatgaaggataagctgctggtcatctctgataacaaaagctactcaccgtgggacccgatcgagaaagacgagatgaaccgggtgttcatcttcggtaaggttattgggagcatgccgcagacatataggaagcatgggtag

SEQ ID NO: 490677 - DNA, 207 bp, Shigella sonnei
atggttcatcaacattacagaacgcagaccgttaatcgcggcgcggtcatgccaggaatgctggtcaaacacaaagatggtacctggactgcatcagctaatttacgcggacggctttatctgcatcgcggcatcgagcgcacttatacccgtgatttgctcgtggaagtttttctcgacggacgcggtaacggcctgaatcgctaa

SEQ ID NO: 490678 - DNA, 297 bp, Shigella sonnei
atgaacgcttattacattcaggatcgtcttgaggctcagagctgggcgcgttactaccagcagatcgcccgtgaagagaaagaggcagaactggcagacgacattgaaaaaggcctgccccagcacctgtttgaatcgctatgcatcgatcatttgcaacgccacggggccagcaaaaaagccattacccgtgcgtttgatgacgatgttgagtttcaggagcgcatggcagaacacatccggtacatggttgaaaccattgctcaccaccaggttgatattgattcagaggtataa

SEQ ID NO: 490679 - DNA, 786 bp, Shigella sonnei
atgagtacagcactcgcaacgctggcagggaagctggctgaacgtgtcggcatggattctgtcgacccacaggaactgatcaccactcttcgccagacggcatttaaaggtgatgccagcgatgcgcagttcatcgcattgctgatcgtcgccaaccagtacggccttaatccgtggacgaaagaaatttacgccttccctgataagcagaacggcattgttccggtggtgggcgttgatggctggtcccgcatcatcaatgaaaaccagcagtttgatggcatggactttgagcaggacaatgaatcctgtacatgccggatttaccgcaaggaccgtaatcatccgatctgcgttaccgaatggatggatgaatgccgccgcgaaccattcaaaacccgcgaaggcagagaaatcacggggccgtggcagtcgcatcccaaacggatgttacggcataaagccatgattcagtgtgcccgtctggccttcggatttgctggtatctatgacaaggatgaagccgagcgcattgtcgaaaatactgcatacactgcagaacgtcagccagaacgcgacatcactccggttaacgatgaaaccatgcaggagattaacactctgctgatcgccctggataaaacatgggatgacgacttattgccgctctgttcccagatatttcgccgcgacattcgcgcatcgtcagaactgacacaggccgaagcagtgaaagctcttggattcctgaaacagaaagccactgagcagaaggtggcagcatga

SEQ ID NO: 490680 - DNA, 681 bp, Shigella sonnei
atgataccggacattatcctgcagcgtaccgggatcgacgtgagagctgtcgaacagggggatgatgcatggcacaaattacggctcggcgtcatcaccgcttcagaagttcacaacgtgatagcaaagccccgctcaggaaagaagtggcctgacatgaaaatgtcctacttccacaccctgctggctgaggtttgcaccggtgtggctccggaagttaatgctaaggcgctggcctggggaaaacagtacgagaacgacgccagaaccctgtttgaattcacttccggcgtgaatattactgaatccccgatcatctatcgcgacgaaagtatgcgcaccgcctgctctcccgatggtttatgcagtgacggcaacggccttgaactgaaatgcccgtttacctcccgggatttcatgaaattccggctcggtggtttcgaggcaataaaatcggcttacatggcccaggtgcagtacagcatgtgggtgacgcgaaaagatgcctggtactttgccaactatgacccgcgcatgaagcgtgaaggcctgcattatgtcgtgattgagcggaatgaaaagtacatggcgagttttgacgagatggtgccggagttcatcgaaaaaatggacgaggcactggctgaaattggttttgtatttggggagcaatggcgatga

SEQ ID NO: 490681 - DNA, 183 bp, Shigella sonnei
atgacgcatcctcacgataatatccgggtaggcgcgatcactttcgtctactccgttacaaagcgaggctgggtatttcccggcctttctgttatcagaaatcccctgaaagcacagcggctggctgagaagataaataataaacgggaggcggtatgcacaaagcatctcctgttgagttaa

SEQ ID NO: 490682 - DNA, 192 bp, Shigella sonnei; identical to SEQ ID NO: 4131

SEQ ID NO: 490683 - DNA, 216 bp, Shigella sonnei
atgacacctcagcaagaaaacgcccttcgcagcattgcccgtcaggctaattctgaaatcaaaaaagccagacagcattttccggataaaaacgtcgatgacatttgccgtagcgtactaaagaagcaccgcgaaacggtaacgctgatgggattcacaccgactcatttaagcctggcgatcggcatgttgaacggcgtctttaaggaacggtga

SEQ ID NO: 490684 - DNA, 219 bp, Shigella sonnei
atggcagacatcattgattcagcatcagaaatcgaagaattacagcgcaatacagcaataaaaatgcgtcgtctgaactaccagactgtatccgcaactcattgttgtgagtgtggcgatccgatagatgagcgaagacgcctggctgttcagggttgtcgaacttgtgcgagttgccaggaggagatcgaacttaagaacaaacaatggggactgtga

SEQ ID NO: 490685 - DNA, 279 bp, Shigella sonnei
atgttcagaatcatttttcctaacacctggtacgtcgaccaccacggcactccctgcaaaatcctgcgttctacccacaacaaagttcactacatccgaaaaggcagaacatgtatcgccagcatgttccgctttaatcatgactttgaacctgtgaataaagctgatgcagatcggatagcagaagagatcgaaacggcagaacacattaagaagttacgtgacatgcgttcaaaaagcagaggtaaccatggaatcatacagcctcacactcgatga

SEQ ID NO: 490686 - DNA, 1164 bp, Shigella sonnei
atgtcactcttccgcagaaatgaaatatggtatgcctcgtattcgctcccgggcgggaaacgaattaaggaatctcttggcacaaaggacaagcggcaagctcaggagttgcacgacaagcgaaaagcagaactctggcgagtagaaaagctaggggatttacctgatgtcacttttgaagaggcctgcctaagatggcttgaggaaaaagctgataaaaaatctctcgattcagataaaagccggattgagttctggcttgaacattttgagggtataaggcttaaagatatctcggaggcaaagatttactctgctgtaagcagaatgcataacagaaagacgaaagaaatatggaaacagaaagttcaggccgccatcaggaaaggtaaagaaccgcctgtttatgaaccaaagccagtatcaactcagacaaaggcaaagcatcttgccatgataaaggccattctccgtgctgcagaacgcgactggaagtggctggaaaaagcgcctgtcatcaagataccagcggtcagaaacaagcgagtcagatggctggaaaaggaggaagcaaaacgccttattgatgagtgccccgaaccactgaaatctgtcgtcaagtttgcgctggcaactggtctgagaaagtcgaacatcataaatctggaatggcaacaaatcgacatgcagcgacgagttgcctgggtgaatccagaagagagcaaatcaaaccgcgccattggtgtggcgctgaacgataccgcctgtaaagtgttgcgtgatcaaataggcaagcatcacaaatgggtgtttgtacataccaaggcggctaagcgagcagatggaacatcaacgcctgcggtcaggaagatgcgcatcgacagcaagacatcatggctatcagcttgtcgtcgtgcaggaattgaagatttccgtttccatgacctcagacacacctgggcaagctggctgattcagtcaggcgtcccattatcagtgcttcaggaaatgggcggatgggagtccatagaaatggttcgtaggtatgctcaccttgcgcctaatcatttgacagagcatgcgaggaaaatagacgacatttttggtgataatgtcccaaatatgtcccactctggaattatggaggatataaagaaggcgtaa

SEQ ID NO: 490687 - DNA, 948 bp, Shigella sonnei
atgtctggaaatataggggcaaatccaacccctattgcgatcagctcttttgcttctaccgagactatatcgtttactcctgacaacataaatgcggacattagtcttggaactctgagcggaaaaacaaaagagcgcgtttatctagctgaagaaggaggccgaaaagtcagtcaactcgactggaaattcaataacgctgcaattattaaaggtgcaattaattgggatttgatgccccagatatctattggggctgcgggctggactactctcggcagccgaggtggcaatatggtcgatcaggactggatggattccagtaaccccggaacctggacagatgaaagtaggcaccctgatacacaactcaattatgccaacgaatttgatctgaatatcaaaggctggctcctcaacgaacccaattaccgcctgggactcatggccggatatcaggaaagccgttatagctttacagccagaggtggttcctatatctacagttctgaggagggattcagagatgatatcggctccttcccgaatggagaaagagcaatcggctacaaacaacgttttaaaatgccctacattggcttgactggaagttatcgttatgaagattttgagctaggtggcacatttaaatacagcggctgggtggaagcatctgataacgatgagcactatgacccaggaaaaagaatcacttatcgcagtaaagtcaaagaccaaaattactattctgttgcagtcaatgcaggttattacgtaacacctaacgcaaaagtttatgttgaaggcgcatggaatcgggttacgaataaaaaaggtaatacttcactttatgatcacaatgataacacttcagactacagcaaaaatggtgcaggcatagaaaactataacttcatcactactgctggtcttaagtacaccttttaa

SEQ ID NO: 490688 - DNA, 1485 bp, Shigella sonnei
atgcgaaaaataatcactcatttcaaagttgttttaacgttacttctaccagtaaccgtatctgcccagcagatacagtggcaatcctgtatggccagtcaattcaaccactggtttggtgaggaaaaaccgtctcctgacttactatgtggttatttgtctgttccattaaaatatacagacacaggcggagatgcttcttatgaaaaaaaatcacaagtcaaactagcgttgacaaaattgccggcaaaaagcaagcataaaggaagtatcctgataataagtggtggtcccgggttaccaggcataaatccttatattaactttgactggccagtcacaaatcttcgtgagtcatgggatattattggatttgatcctcgaggcgtcggacagtccactccgacaataaactgccggcaatcagatacagagactcaggaaaacataaccgaaaagcaacaagtattaaataaaattaatgcctgtatccataataccggagccgaagtcattcgccatatcggctctaacgaggctgtatacgatattgatcgtattaggcaagccttgggggataaacaactgacagccgtggcgtattcgtatggaactcaaattgcagccttatatgcagaacgttttccctacaacgtaagatctatcgttcttgatggagtcgtcgatatcgatgacctggaggacaacttcacatggcaactcaaacaggcacagagttatcaggaaacgtttgatcgctttgcatcctggtgtgcgcgtacaaaaagttgcccgctttcttcagacagagataaggcaataactcagttccatgagctattatcaaaattacatcacaaacctttattagacagtaagggagaaaatatatcttcagatgaactcatatcattaacaacagaccttctgctatggcgttcatcatggccaacccttgcaactgccatacgccagttctctcaggggattgtcagtaatgaaattgaaactgcgctcagtgctccgatagcctcagaagagtcaagcgatgcttcgggggtaatcctctgtgtagatcagggggatgagcaattaacaccagaagagcgaaaatcccgaaaagacgctcttgcgaatgccttcccggctattaactttgacaatggacgttccgattcacctgatttttgtgaattatggccaatacatagcgacctgaacaaaactcgcctgaaaaatactgttctgccctctggtttactgtttgtagcacacaaatacgacccaacaacgccctggattaatgcccgtaagatggcagagaaattttccagcccgttactaacaataaatggtgatgggcatacattagctctcaccggagttaatttatgtgtagataaagcagttgtacattacctgatcactccacaaaaaatagaaaatatatactgcccaggaaattctgaagcagaaatacaataa

SEQ ID NO: 490689 - DNA, 234 bp, Shigella sonnei; identical to SEQ ID NO: 159074

SEQ ID NO: 490690 - DNA, 591 bp, Shigella sonnei
atgtctcgaatttttgcttactgtcggatatcaacgctggatcagaccatcgaaaatcaacgccgggaaatcgaaagtgcaggttttaaaatcaaacctcagcaaataatcgaagaacacattagcggctcagcagcaaccagtgagcgtcctggttttaaccggttgcttgctcgcctgaaatgtggtgatcaattgattgtgacaaaactggatcgccttggttgtaatgcaatggatatcaggaaaacagtggaacaactgaccgaaacaggtatcagagtgcattgcttagcattggggggcattgacctgaccagtccaacaggaaaaatgatgatgcacgtaatttcagcagtcgctgaatttgaacgagaccttttacttgaacgcactcattccgggatagtaagagcccgcggcgcagggaaacgttttggtcgaccacctgtgttaaatgaagaacagaaacaggtggtattcgaacgaattaagtcaggtgtaagtataagtgccattgcccgggaattcaaaacctcgcggcaaaccattttaagagccaaagcaaaacttcagacacctgacatataa

SEQ ID NO: 490691 - DNA, 621 bp, Shigella sonnei; identical to SEQ ID NO: 479960

SEQ ID NO: 490692 - DNA, 216 bp, Shigella sonnei; identical to SEQ ID NO: 485679

SEQ ID NO: 490693 - DNA, 498 bp, Shigella sonnei
atgcctccatcattacgaaaagctgttgctgctgctattggtggcggggctattgctatagcatctgtgttaatcactggcccaggtggtaacgatggtctggaaggtgtgagacataatccttacaaagacatagttggtgtatggactgtatgttacgggcatacaggaaaagacatcattcccggtaaaacgtataccgaagcagagtgcaaagccctcctgaataaagaccttgccactgtcgccagacaaattaacccgtacatcaaagtcgatataccggaaacaacgcgctgcgctctttactcgttcgtctacaacgtgggtgctggcaatttcagaacatcgacgcttcttcgcaaaataaaccagggcgatatcaaaggcgcatgtgaccagctacgtcgctggacatatgctggcggtaagcaatggaaagggctgatgacccgtcgtgagattgagcgtgaagtctgtttgtgggggcagcaatga

SEQ ID NO: 490694 - DNA, 330 bp, Shigella sonnei
atgaaaaccttccgctggaaagtgaaacccggtatggatgtggcttcggccccttctgtaagaaaggtgcgctttggtgatggctattctcagcgagcgcctgccgggctgaatgccaacctgaaaacgtacagcgtgacgctttctgtcccccgtgaggaggccatggtactggagtcgtttctggaagagcacgggggctggaaatcctttctgtggacgccgccttatgagtggcggcagataaaggtgacctgcgcaaaatggtcgtcgcgggtcagtatgctgcgtgttgagttcagcgcagagtttgaacaggtggtgaactga

SEQ ID NO: 490695 - DNA, 675 bp, Shigella sonnei
gtggtaagcacgccggagggggaaagatattttccctgcgtgaatatctccggtgagccggaggcgtatttccgtatgtcgccggaagactggctgcaggcagaaatgcagggtgagattgtggcgctggtccacagccaccccggtggtctgccctggctgagtgaggccgaccggcggctgcaggtgcagagtgatttgccgtggtggctggtctgccgggggacgattcataagttccgctgtgtgccgcatctcaccgggcggcgctttgagcacggtgtgacggactgttacacactgttccgggatgcttatcatctggcggggattgagatgccggacttttatcgtgaggatgactggtggcgtaacggccagaatctctatctggataatctggaggcgacggggctgtatcaggtgccgttgtcagcggcacagccgggcgatgtgctgctgtgctgttttggttcatcagtgccgaatcacgccgcaatttactgcggcgacggcgagctgctgcaccatattcctgaacaactgagcaaacgagagaggtacaccgacaaatggcagcgacgcacacactccctctggcgtcaccgggcatggcgcgcatctgcctttacggggatttacaacgatttggtcgccgcatcgaccttcgtgtga

SEQ ID NO: 490696 - DNA, 225 bp, Shigella sonnei
gtggtggaaaccgcattctgtactttcgtgctgtcgcggatcgcaggtgaaattgccagtattctcgacgggatccccctgtcggtgcagcggcgttttccggaactggaaaaccgacatgttgatttcctgaaacgggatatcatcaaagccatgaacaaagcagccgcgctggatgaactgataccggggttgctgagtgaatatatcgaacagtcaggttaa

SEQ ID NO: 490697 - DNA, 309 bp, Shigella sonnei
atgactgtttttggtaataaccatattgccaacaaagcacaaaacttcgaagtagttgcacaatatcagttcgacttcggtctgcgtccgtccgttgcttacctgcaatctaaaggaaaagacttgggtgcgtggggtgatcaggacctggttgaatatattgatgtaggtgcaacctattacttcaacaaaaatatgtccacttttgttgattacaaaatcaacctgattgataagagcgatttcacgaaagcatctggcgttgctaccgatgatatcgttgctgtaggtatggtttaccagttctaa

SEQ ID NO: 490698 - DNA, 471 bp, Shigella sonnei
atgagcccgtcgtccggtgatgctcttctctgttttgtaaaaagagcggtaccagccggaagcaagtgtacaaactggtaccgccaaagcagtggctgttgtggtggggttgtcactcaggcgtatggtcaacctgacaatccggtgtcctcaacggggaaagagtacccccgccatacttaccgccgcgccatttcgcggattaccacaacgctgagagcacttagccagttacggcaccacactttgtcgcggctctataaatgccctcatcgttgcaccctggtctcttcccaggcgtcaaaccgaatcgccacgctggttaggcgtcttatctgcatcatcattgacttgcacattccggctacctggtttgtttgcccgagcaagaagtggattgtcccctttaacgtccccagaccgctaacgacgcatgtgccatacgccgtgttacaaccaaattttgtttga

SEQ ID NO: 490699 - DNA, 381 bp, Shigella sonnei; identical to SEQ ID NO: 458903

SEQ ID NO: 490700 - DNA, 783 bp, Shigella sonnei; identical to SEQ ID NO: 490562

SEQ ID NO: 490701 - DNA, 189 bp, Shigella sonnei; identical to SEQ ID NO: 463227

SEQ ID NO: 490702 - DNA, 300 bp, Shigella sonnei
atggctgcggacaaaatggctgcacaaactttacgcataattacctctcgcttttctgcaataaaaaaggcgtcattcctgacgccatttattggggttataaatatttcaacgaatactgatgccggaagccgcttttttggtcacaatcaccgtacagtcggtgatattgcctgccccctgattgcctttctggaaaatcttaaactccagagtgacgctaccaccaccactaggcatatcaataactgcactgtaactaccgggaatggcccctttagtttctctggatgcgattaa

SEQ ID NO: 490703 - DNA, 303 bp, Shigella sonnei; identical to SEQ ID NO: 21213

SEQ ID NO: 490704 - DNA, 189 bp, Shigella sonnei; identical to SEQ ID NO: 463227

SEQ ID NO: 490705 - DNA, 282 bp, Shigella sonnei
gtggcacatatccgcactcgcgaaacatatggaacccggcggctccagacggagctggcagagaatggcatcatcgttggtcgtgaccgactggcacgtcttcgtaaggagctaaggctacgctgtaagcagaaacgcaagttcagagcgactacgaactcgaaccacaatctgccagttgcgccaaatctgctgaaccagacgttcgctcctacagcaccaaatcaggtctgggtggcggacctgacgtatgttgccacacaggagggatggttgaggtag

SEQ ID NO: 490706 - DNA, 225 bp, Shigella sonnei; identical to SEQ ID NO: 490555

SEQ ID NO: 490707 - DNA, 225 bp, Shigella sonnei; identical to SEQ ID NO: 490555

SEQ ID NO: 490708 - DNA, 468 bp, Shigella sonnei; identical to SEQ ID NO: 488205

SEQ ID NO: 490709 - DNA, 462 bp, Shigella sonnei; identical to SEQ ID NO: 488384

SEQ ID NO: 490710 - DNA, 1032 bp, Shigella sonnei; identical to SEQ ID NO: 485822

SEQ ID NO: 490711 - DNA, 783 bp, Shigella sonnei; identical to SEQ ID NO: 490562

SEQ ID NO: 490712 - DNA, 435 bp, Shigella sonnei; identical to SEQ ID NO: 490256

SEQ ID NO: 490713 - DNA, 465 bp, Shigella sonnei; identical to SEQ ID NO: 483873

SEQ ID NO: 490714 - DNA, 393 bp, Shigella sonnei
atgacgcgcaaatgggcttacagggcgattcgtcagggctggccagcattctcacagtggcttgatgccgtgattcagcgtgtcgaaatgtacaacgcatcgcttcccgttccgctttcacctcctgaatgtcgggctattggcaagagtattgcgaaatacacgcacaggaacttcacggcggaaactttcgcacagtatgtggctgatacgcacacgccagaaatacaggccaagagaggcaggaaaggtggcatcgctaaaggcgaagcctacgatgacaagcgtttcatggcgctatgtatgctggagaatggatattctcagaaagctattgcggcgatgttggaggtttctactcgaaccattcgaaactggaaaagcggaaaatag

SEQ ID NO: 490715 - DNA, 393 bp, Shigella sonnei; identical to SEQ ID NO: 490714

SEQ ID NO: 490716 - DNA, 252 bp, Shigella sonnei
atggaaggcaagattgatcgcccggaagagtatgccgatattgccactaagtgtgtgaccaacttccgcgagaagaatcgcgatcgttgcctggtgattttgtcgcgtaatgatgaagcgcttaacagccagcggacatctgaagagttgcatcattattacgagattgtctgggacgaagagcagacgcacaaattcaagaatatctccccgcatttgcagcgcattaaggcgttcaaaaccctcgggtaa

SEQ ID NO: 490717 - DNA, 690 bp, Shigella sonnei
atggctcaccctcatttattagcggaaagaatttcccgcctgagcagttcgttggaaaaggggctttatgaacgtagccacgccatccgcttgtgtttattagcggcattaagtggtgaaagtgtgttcctccttggcccgccaggtattgccaaaagtttgatcgcccggcgcttaaaattcgcctttcagaatgcccgcgcgtttgaatatctgatgacccgcttctccacgccggaagaagtttttggtcccctttctattcaggcgctaaaagatgaagggcgctatgaacgtttaaccagcggttacctgccggaagcagaaattgtctttctggatgagatctggaaagcgggcccggcaattcttaataccttgctcaccgccattaacgagcgccagttccgcaacggtgcacacgtagaaaaaatcccgatgcgtctgctggtggcggcctccaacgagctgccggaagcagacagcagtctggaagcgttatatgaccgcatgctgattcgtctgtggttagataaagtgcaggataaagcgaatttccgctccatgctgaccagtcaacaggatgaaaacgacaatccggttcctgatgccttgcaggtcacagatgaagaatatgaacgctggcagaaagagattggtgaaattacgctgctcatgtatttgagctga

SEQ ID NO: 490718 - DNA, 267 bp, Shigella sonnei; identical to SEQ ID NO: 487831

SEQ ID NO: 490719 - DNA, 267 bp, Shigella sonnei; identical to SEQ ID NO: 11114

SEQ ID NO: 490720 - DNA, 462 bp, Shigella sonnei; identical to SEQ ID NO: 484669

SEQ ID NO: 490721 - DNA, 393 bp, Shigella sonnei
atggcgacgctggggcgtcttatgagcctgctgtcaccctttgacgtggtgatatggatgacggatggctggccgctgtatgaatcccgcctgaagggaaagctgcacgtaatcagcaagcgatatacgcagcgaattgagcggcataacctgaatctgaggcagcacctggcacggctgggacggaagtcgctgtcgttctcaaaatcggtggagctgcatgacaaagtcatcgggcattatcttgccagtcgacgcatcgcactgtttttttgggcgctgatagttttattacttttcttaagcaacgaagctatctggttgatgccccatcctttacctaatagccgcagtaccttgcgctctgaaagagtgagaatgacggagcgatag

SEQ ID NO: 490722 - DNA, 504 bp, Shigella sonnei
atgtcgcgccagtgcacgcattatgggcgttggcctcaacacggttttacgtcacttaaaaaactcaggccgcagtcggtaacctcgcgcatacaaccgggcagtgatgtgattgtctgcgctgaaatggacgaacagtggggctacgtcggtgctaaatcacgtcagcgctggctgttttacgcgtatgacaggatacggaggacggttgtggcgcacgtcttcggtgaacgcactctggccacactggagcgtcttctaagcctgctgtcggcctttgaggtcgtggtatggatgacggatggctggccgctgtatgaatcacgcctgaagggaaagctgcacgttatcagcaagcgttacactcagcgcattgagcgacataatctgaatctgagacaacatctggcaaggctgggacggaagtcactgtcgttctcaaaatcggtggagctgcatgacaaggtcatcgggcattatctgaacataaaacactatcagtaa

SEQ ID NO: 490723 - DNA, 327 bp, Shigella sonnei; identical to SEQ ID NO: 486130

SEQ ID NO: 490724 - DNA, 480 bp, Shigella sonnei; identical to SEQ ID NO: 464934

SEQ ID NO: 490725 - DNA, 948 bp, Shigella sonnei
atgataactgacattccaacaaagactgatttttatacaatggctgaccacatggtaaatgaggcttgggaaaaaattgccgatttagcttatgattacagagatataaacctctggaatagttattgtaaaacgtctgaattctatacagaatcagatattaaaaatttagagcattattgggtatttgctagaccaaaattgattacatcttttaatttgatacttcaatccattgaattcagactaaaaggacttatcgtcgaaatatcaccttatctacttatcacgaatgcaactcgcaatacacctaaacctgatagtgaaggtaacatttcattttcagaattccacacattagacgcccaagatttaattaaagtatataatactttcgcctctaaatcactgcctgatgactttattacttggtttaatagtatgcgcattctaagaaatcgttttatgcatacggttgataaaaaaacagatataatgccagagctaatttttacatcagttgtacgtgctcacaactatctaaatactgaaccagcacactggatatggcataggtataaatataaagcaatacattcctctggtggcattaatataggattagatgaagacgaggatgaagaattttcaggtattgtatgggctatgcttcaaactcattatgagttcactgcagccatttccgcatgttcaaaggaatcagcaaaaaaattctttggctacactaaaagtgattcaggagatactaactcaaaagaaagtttctattgcagaaaatgtgtttctgttatggaaaaaagctggaactttgatagtaaacatcttgactctgctttagaaacagttcagtacaaccgaagtaagggagcttacatctgtgcattttgtttagatgaacagaaaacaaaacccatagatatatggtaa

SEQ ID NO: 490726 - DNA, 195 bp, Shigella sonnei
atgccaaacggcgctgtggacgcgttaaaggaagaattaacccaacacattggcgagcgttatgacgatgtggagatgatcgtaaaagccaccagcaacgatggtttttctgttacgcgcaccgccgataaagattcagctaaaacttttgttcaggaaactctgaaagatacttgggagtcagctgacgagtga

SEQ ID NO: 490727 - DNA, 1629 bp, Shigella sonnei
ttgtcgctacatgataaattattaatgcataacttcgcattagccaataaaaaaagccctgacttcatatctgaacttcctcaaattgaacctaaaccatacagcaatggacataaaattaaatggataaaccacacacttactagcactgaagttactccccctgataacctgattaaaatatgtatattgattgagtcaggggaaattgctataacatcagtaagtgatattgccaatttacttggagttcctgctggccaattactttatatactatatcgtaaaaaagataattatcgtacttttgaaatagaaaagaagaatggtaaaaaaagagtcattaatgctccttgtggcggtctatcgatactccaaacgagactaaagcccgttcttgaatatttctacaggccaaagaaatctgctcatggttttataaaaggaaagagcatcattactaatgctgggatgcatattaaaaaaaattttgtcgtaaacattgacctagaaaactatttcgaatcaataagttttgccagggtttatggaatatttaaaagtaaaccttttaattttgctcatccagcagctactgttttagctcagttatgtactcacaatggaaaattacctcaaggtgcgtgtacatcgccaatattagcaaatattgcatcagcttctctagacaaacagctcacccaatttgcaggaagaaaaaaaatatcttattctaggtatgctgacgacataactttttctttcaatcagagaaatattgatataatcaaaaaaaacgatgacggaagttatagtcttagtgaaactatagacaatattatttcaaaaaatggctttaaaataaattatgataagtttagagttcaaaccagaaatacaagacaaagtgttactggcttagtggttaatgataaagttaacattaacagaagatatataagaattacacgttcaatgattcatagatggacagatgataagctaaagtatgcacttctctttgctacagaaaaaggatatcaggcaaaggataataaccacgcaattcaaattttccgaaatcatatttatggaaggcttagctttataaaaatggttagagggaaagactatccaggatatttaaaactgatgtcatacatgagtcataacgatccattaaaaacccaagaaggattgcgagcaatgaaagaaacagaaaactttgatgtttttatatgccatgcaagcgaagacaaaaaagacattgcaattccaatatatgacgagttaactaaacttaaaatttcagccttcatagatcatgttgagataaaatggggcgactccttaattgagaaaataaatgcagcactagttaaatcaaaatatgtcatcgctattttatctgctaattcagtcaataaggaatggcctcaaaaagaattaagagcagttttagccagcgaaatatcgagtggcgacgtaaaacttttgaccttattaaaaaaagaagacgaggaggtcgtaaacctatcattacctttacttagtgataagctttatatggtctatgataataatcctgaagtagtcgccaacaatattaaatcactcttacaacgataa

SEQ ID NO: 490728 - DNA, 270 bp, Shigella sonnei
gtgcgtcaggagctggcgaactatgttgattttgccccgctgaatctactggcgaaacagtacaccgtgccggggccgtttgatgcgatcttctgtcgtaacgtcatgatctacttcgatcaaaatacccagcaggagattttgcgccgctttgttccgctccttaaacccgacggattgctgtttgcgggtcactctgaaaactttagccaccttgagcgccgcttcacgctgcgtggtcagacggtgtatgcgctaagtaaggattaa

SEQ ID NO: 490729 - DNA, 456 bp, Shigella sonnei; identical to SEQ ID NO: 488050

SEQ ID NO: 490730 - DNA, 186 bp, Shigella sonnei; identical to SEQ ID NO: 490402

SEQ ID NO: 490731 - DNA, 315 bp, Shigella sonnei
  misc_feature (302)..(311): n is a, c, g, or t
ttgaataatgaatggtgtgcctttctcaaagaacatgaatttctggttggtatctcgatcgatggcccccaggagttacatgaccgttacagacgcagtaattcaggtaacggtacttttgcaaaagtgatagcagccatcgagcgtctgaaatcatatcaagtagagtttaatacgttaaccgtcattaataacgttaatgtccattaccctcttgaggtttatcattttttaaaatctatcggcagtaaacatatgcaatttatcgaattgctagaaaccgggacgccgaatattgattnnnnnnnnnngtga

SEQ ID NO: 490732 - DNA, 222 bp, Shigella sonnei; identical to SEQ ID NO: 464316

SEQ ID NO: 490733 - DNA, 699 bp, Shigella sonnei; identical to SEQ ID NO: 483868

SEQ ID NO: 490734 - DNA, 330 bp, Shigella sonnei
atgaaaaccttccgctggaaagtgaaacccggtatggatgtggcttcggccccttccgtaataaaggtgcgctttggtgatggctattcccagcgagcgcctgccgggctgaatgccaacctgaaaacgtacagcgtgacgctttctgttccccgcgaggaggccacggcactggaatcgtttctggctgagcacgggggctggaaggcctttctgtggacgccgccttatgagtggcggcagataaaggtgacctgcgcaaaatggtcgtcgcgggtcagtatgctgcgtgttgagttcagcgcagagtttgaacaggtggtgaactga

SEQ ID NO: 490735 - DNA, 1683 bp, Shigella sonnei; identical to SEQ ID NO: 484981

SEQ ID NO: 490736 - DNA, 348 bp, Shigella sonnei
atgacgatggcgagtatggcggtcccacttccgtgcagccaggcagatgacggaacggcgacgatgtggttatccgtcctggcgtttggcagacaggccgaagcactggcaaagcaccgcaagggtgaactcctgagcgtggcgggtaacattcaggtgagccagtggaccggacagaacggggagacgcggcagggctggcaggttatcgcagacagcgtaatcagtgcgagaacggcgcgaccgggcggcaaaaaaggccaacagggacaggctactgatgcactgagcagagcaaaacaacaggcgggaaatgatgatccgtacggggataacataccgttttaa

SEQ ID NO: 490737 - DNA, 144 bp, Shigella sonnei
atggatactttaagaaagggctcagacctgctgtctgcacgtgtgattgccgttacaggtttaatcgcagcacttggcaatttaggtctatgcccaatagccgtagtgctagtatgtatagctttagttatcatgctgaagtaa

SEQ ID NO: 490738 - DNA, 768 bp, Shigella sonnei; identical to SEQ ID NO: 28833

SEQ ID NO: 490739 - DNA, 384 bp, Shigella sonnei
gtgccagttaatagttccgattttatcgctttcgcaaaagattgtgaaaagcgtaacgacgaaattggttacagaaacgctgtcgcacgtgcgtattatggtgcttatcaccacgtacttccgtgtttgaccatggggccgaaagaaagtcaccaaggcctcattgactatcttgttaacgatgcttggaagggtaacgaaccttttgaaaaaagagacttaattggtttggggtatgctcttcaatcgcttaaggatcagagaatagtttgtgattacagacttaacgacactattacgtcaacccaatcaagcaccgcgattaagactgcagagaaattaatccagcgttgcgctaatatgaccaagtctaaagcgtcctaa

SEQ ID NO: 490740 - DNA, 264 bp, Shigella sonnei
atggggcttaacgcatccaaaggcaaaaaaacggcaatcgataaaatttatccgcgacattttttggcgacagcaaaggtgctgagattcccggaagtgcagatgcatgaaatcctaagtgactttgccagaatgattccggcagcactggataacgtgaagacttcattaccgacagattttccggagaacgtggtgacggcagttgaaaccaatgtgttgaggttgcatggacggttaagccgagaatacggtagtaagtga

SEQ ID NO: 490741 - DNA, 426 bp, Shigella sonnei
atggaacagaaaatattatccgcagaaccccgcagatcattttcaaatgaatttaaacttcaaatggttaaactggcttcacaaccaggagcctctgttgcccgtattgcccgggaacacgatatcaatgataacctcctgttcaaatggctcaggctctggcagaacgaagggcgtatatcgcggcgtcttccggtaacaacctcttctggctctggcgttgaattattacctgtggagataacgtctgatgagtcgaaagaaccggtggcggctcttactccacttttatccactccttcacaaagcccagtcagtgccagctcctgcaaggtggagttccgtcacggcaacatgacgctggaaaatccttcaccagagctgctcacggtgttgatccgtgaactgagcgggaggggaagatga

SEQ ID NO: 490742 - DNA, 597 bp, Shigella sonnei
atgatgaaatcagacgaacaatatcaggttcccgtgtggatgcgacctctgttgccgttgctctgcaataccggtggtaatgatccggaggaactgctgaatgatacagaaaccaccgccagtgcgaatattgtccgttatgtactgatagttgcagtgcggtcgcagattgatctgctgcagctactgtacaggaaaggactgttgcgcacagagataccaggtggcttttcaccggaagaagcgcaggcactcctggataatctggtgcgcagccatatcagcaaggcgttgtcgggtgagcgaatggcagcccgtgacagaaatgccgatctgacctggattcgccagcaactggtcgatgccgcctggtttgtccgtgccacactggaagcgcatgggatgggcgtcggaaatgagagtccctctgctccgccggagacaatgccggacatacagacacgggaactggttatgttgatcaagcgactggcatcatcgctgaaagcggtgaaacccgacagtagcgtggtgcgtgaagcgcaggactggctgtgcgacagaaaacttgtggatatcacagatattctccggtga

SEQ ID NO: 490743 - DNA, 501 bp, Shigella sonnei; identical to SEQ ID NO: 381174

SEQ ID NO: 490744 - DNA, 426 bp, Shigella sonnei
ttgctggcaagtgacccgcagcacacgaagtataaatgccttgatcaggatattttaaatattctgttctttggtcattgtatttttattagcggcgattatgattgcttttatggcatcgattatgagttaaaaaataaaagcgatgaagattataaaaagaccattaccgatgatactaagctgattcattatgttggcgtaacgaagccctggaacgactggacgaattatccctgccagaagtattttaatgaggcttatcaggcttcttgctggaatgatgtggcgtttattccagccacgaatgaaaagcagtatcaagtgaaatatcaacatgcaaagaaaaatggtgatacgtttaacgcttttatttactttattaaatttaaattaaataagtataaaagaaaactatttggataa

SEQ ID NO: 490745 - DNA, 192 bp, Shigella sonnei; identical to SEQ ID NO: 490227

SEQ ID NO: 490746 - DNA, 699 bp, Shigella sonnei; identical to SEQ ID NO: 402005

SEQ ID NO: 490747 - DNA, 366 bp, Shigella sonnei; identical to SEQ ID NO: 10065

SEQ ID NO: 490748 - DNA, 381 bp, Shigella sonnei; identical to SEQ ID NO: 458903

SEQ ID NO: 490749 - DNA, 207 bp, Shigella sonnei; identical to SEQ ID NO: 113274

SEQ ID NO: 490750 - DNA, 684 bp, Shigella sonnei
atgcaggataacccggccatcagaaaaaaaatgcgtaggactgatgagaagaaaagacggcgcctgtcactcgagcattttatagctatcaggcaggccgctgcaccatggttaagaacagcaatggacctagcattgcagactacacatgcacgactcgaagtatcgcgaatccgttactcaattcgcgaacctaaagacggtttatgtggatgtgtttggttcgaacaaccacaaaatggcatatatggtacactatacatccataggcaaaaagtacaaaaaaaggaggcatcacatgttgcaataccaattggtgaagaattgaaacggataattgacaatagccgtgacaatgtggccagtccctttgtcgttcatagaatcccagaacggcatgttaaacgcagtaaagaggtttcgcacccaactcaagttgcaccagattatttgagtcggtcattctcttccgtgcgagacaaactcggactatgcaatcatctagcaatggaacaaagacctacattccatgaaataagagctttggcagctcacctatttgataaacaagggattgatccgcagggacgaatggcacatagcgatgcgaaatctactaaaatttatactaaaaatcatatagattggattgttgtccctcatggagaaattaaaaccggttag

SEQ ID NO: 490751 - DNA, 279 bp, Shigella sonnei; identical to SEQ ID NO: 11573

SEQ ID NO: 490752 - DNA, 318 bp, Shigella sonnei
atgcagcatgaacggtataaagatgaattgcgacagaaaatgggaaaacccgacgttacagattcaaatttgaaaaatattatagacgatctttatcggccaaatgcaaaagtaggaagtggaagcacagcagatgctgttcgttatgaattggccacaggtgaaaaagttggtggtagaggacatgtattgaaagcacaggattatacaagggctttacaagattggttggataagaatccaacagcatctccaggggatcgagcagcagcagaaaacgttcttcaggatttacagaatgctttgggaggcaagtaa

SEQ ID NO: 490753 - DNA, 1254 bp, Shigella sonnei; identical to SEQ ID NO: 487979

SEQ ID NO: 490754 - DNA, 699 bp, Shigella sonnei
atgcaggatattccacaggaaacacatcatgagacgacacgccttactcagtcagcccaggtggtgctctgggaaatcgatctgacagaggtcggtggtgaacgttattttttctgtaatgagcagaacgaaaaaggtgagccggtcacctggcaggggcggcagtatcaggtataccctattcaggggacgggatttgaactgaacggtaagggtagtgctgcccgtccgacactgacggtctctaacctgcacggcatggtcaccgggatggtggaagacctgcagagtctggtcggcggaacggtggtcaggcgtaaggtttacgcccgttttctggatgcggtgaacttcgtcaacggaaacagcgacgccgatccggagcaggaggtgatcagccgctggcgcatcgagcagtgcagcgaactgagtgcggtcagtgcctcctttgtactgtccacaccgacggaaacggatggtgccgtttttccggggcgcatcatgctggctaatacctgcacctggacctatcgcggtgatgagtgcggttatcacggtccggctgtcgcggatgaatatgatcagccgacgtccgatatcacgaaggataaatgcagcaaatgcctgaatggctgtaagtttcgcaataacgtcggcaactttggcggcttcctttccattaacaaactttcgcagtaa

SEQ ID NO: 490755 - DNA, 330 bp, Shigella sonnei
atggagacgtttcactggaaagtgcgcccggatatgaatgtggtatcagagccgaaagtggtgacagtgaagctgggcgatggttatgaacagcgtcgtgcggcgggactgaataaccagttgtcgacttacagcgtgacgatacgtgttcgtaaatgtgaacacccatctttaaaagcctttctggaacggcacggtggcgtccgtgcatttcagtggacgccaccttatgactggaaaccgatcagggtggtttgtcgtaaatggtcggcaagcgtgggggcgctgtgggtaaccataacggcagattttgaacaggtcgtggcatag

SEQ ID NO: 490756 - DNA, 390 bp, Shigella sonnei
atgaagctaatactgccttttccgcccagcgtgaacacgtactggcgacaccccaacaaaggggcatttgctggtaagagcctgataagcgaggcggggcgaaaatttcagagcgcggcgtgcgcagcaatagttgagcagttacgtcgtctgccgaaaccaacgtcggcacctgcttcagtggagatcgtgttgtttcctccggataaccggatccgcgatctggacaactataacaaggcgctgtttgacgccctgacccacgcgggtgtgtgggaagacgacagacaggtgaaaagaatgctggtggagtggggaccggttatcccgaaagggaaggtcgagatcactatcagtaagtatgagaaaccggcgggtgcagccgcctga

SEQ ID NO: 490757 - DNA, 213 bp, Shigella sonnei
atgcggctgcgtctcgcgcggattggcgggactggtgatgttcttgccgaacatgcagcctttcgctgtcagcgaccagaattttttgatgttgttaatcgcggtacggctgtatcgttcgcgctgctcgacgatccccagcttcaccatctggtgatatgcctgattagctgtcaggcggataccatactgcttcagcagtgcactcagtga

SEQ ID NO: 490758 - DNA, 321 bp, Shigella sonnei
atggatatttccctgtccgatcatgaaatcaggactgtcctggcgcgcctggaggacatcccggaagaccagcggactgaatccggtatttcttccggtgcggcgatggagatcatcaataacgtgagagaaaaccgccaggtgaccgtccctgctgaactgctggcgtccctgattcagaccgccgaacaggcactgtggaaacgtgagtgggccgcccgtgataacggcctcgccgtcccggaatgcgtcacccgccgacaggcggtggttaatcaggcccgcgccctgctgaaaaacaacacacgcgaaaacgactga

SEQ ID NO: 490759 - DNA, 261 bp, Shigella sonnei
atggaagaaaaaatagatgcagtaatccgtgagaaatacgagttgcccccggttatgagcacgcctgtgaaatatgccgatctaatcatgctggcaaccgaacgccgtgatctcgggcttgatgatggctctttatggcctgtactggaaggtatcccggcaacagagatgttcaaagttattccactggcaccgggccatgcctacgggatgtttatggaacgcttcaacgagttatcggaattacgcaaatgtgcataa

SEQ ID NO: 490760 - DNA, 366 bp, Shigella sonnei; identical to SEQ ID NO: 10065

SEQ ID NO: 490761 - DNA, 348 bp, Shigella sonnei
atgacaaccgaaattaactaccatgcactgcttgagcgcgcacggaataaagtgcagagcattgagttcgccttaacacagagtgcattcgctgagattcgcgctgagcttgaagatgatttagaactggcacggattgcactggcatctctggaagttgagccagatgaacgcgcagcctatgaattatttatggaaaagcgtttcggtaaaacagtcgatcgtcggagagcaaaaaacggtgataacgagtacatggcgtgggatatggctctcggctgggtcgtctggaaacaacgcgctggcatgagtctttcaactgcacaaccacaggagggtcaacaatga

SEQ ID NO: 490762 - DNA, 231 bp, Shigella sonnei; identical to SEQ ID NO: 121864

SEQ ID NO: 490763 - DNA, 231 bp, Shigella sonnei; identical to SEQ ID NO: 20732

SEQ ID NO: 490764 - DNA, 195 bp, Shigella sonnei
atgagcgtcggaaatgagagtccccctgctccgccggagacaatgccggacatacagacacgggaactggtgatgttgatcaagcgactggcatcatcgctgaaagcggtgaaaccggacagttgtgtggtgcgtgaagcgcaggactggctgcgcgacagaaaacttgtggatatcacagatattctccggtga

SEQ ID NO: 490765 - DNA, 198 bp, Shigella sonnei
ttgtttcctccggataaccggatccgcgatctggacaactataacaaggcgctgtttgacgccctgacccacgcgggtgtgtgggaagacgacagacaggtgaaaagaatgctggtggagtggggaccggttatcccgaaagggaaggtcgagatcactatcagtaagtatgagaaaccggcgggtgcagccgcctga

SEQ ID NO: 490766 - DNA, 231 bp, Shigella sonnei
atgcggctgcgtctcgcgcggatttgcgggactggtgatgttcttgccgaacatgcaacctttcgctgtcagcgaccagaattttttgatgttgttaatcgcagtacgactgtatcgttcgcgctgctcgacgatccccagtttcaccatctggtgatatgcctgattagccgtcaggcggataccatactgtttcagcagtgcactcagcgacagcgtagggcgacttga

SEQ ID NO: 490767 - DNA, 234 bp, Shigella sonnei; identical to SEQ ID NO: 27149

SEQ ID NO: 490768 - DNA, 165 bp, Shigella sonnei; identical to SEQ ID NO: 14505

SEQ ID NO: 490769 - DNA, 288 bp, Shigella sonnei; identical to SEQ ID NO: 27151

SEQ ID NO: 490770 - DNA, 396 bp, Shigella sonnei; identical to SEQ ID NO: 27152

SEQ ID NO: 490771 - DNA, 327 bp, Shigella sonnei; identical to SEQ ID NO: 27153

SEQ ID NO: 490772 - DNA, 192 bp, Shigella sonnei; identical to SEQ ID NO: 27148

SEQ ID NO: 490773 - DNA, 3996 bp, Shigella sonnei; identical to SEQ ID NO: 488305

SEQ ID NO: 490774 - DNA, 597 bp, Shigella sonnei; identical to SEQ ID NO: 14500

SEQ ID NO: 490775 - DNA, 711 bp, Shigella sonnei; identical to SEQ ID NO: 33874

SEQ ID NO: 490776 - DNA, 600 bp, Shigella sonnei; identical to SEQ ID NO: 488302

SEQ ID NO: 490777 - DNA, 420 bp, Shigella sonnei; identical to SEQ ID NO: 488301

SEQ ID NO: 490778 - DNA, 291 bp, Shigella sonnei; identical to SEQ ID NO: 14496

SEQ ID NO: 490779 - DNA, 675 bp, Shigella sonnei; identical to SEQ ID NO: 488299

SEQ ID NO: 490780 - DNA, 312 bp, Shigella sonnei; identical to SEQ ID NO: 488295

SEQ ID NO: 490781 - DNA, 468 bp, Shigella sonnei; identical to SEQ ID NO: 488289

SEQ ID NO: 490782 - DNA, 450 bp, Shigella sonnei; identical to SEQ ID NO: 27160

SEQ ID NO: 490783 - DNA, 225 bp, Shigella sonnei; identical to SEQ ID NO: 488285

SEQ ID NO: 490784 - DNA, 546 bp, Shigella sonnei; identical to SEQ ID NO: 488284

SEQ ID NO: 490785 - DNA, 153 bp, Shigella sonnei; identical to SEQ ID NO: 488101

SEQ ID NO: 490786 - DNA, 966 bp, Shigella sonnei; identical to SEQ ID NO: 27174

SEQ ID NO: 490787 - DNA, 891 bp, Shigella sonnei; identical to SEQ ID NO: 27176

SEQ ID NO: 490788 - DNA, 1116 bp, Shigella sonnei
atgatagttaagtttcatgcccggggaaaaggtggtggcagtggtccggttgattacctgctgggaagggagcgtaaccgggaaggggcaacggtgcttcagggtaatccggaagaagtacgggaactcatcgatgccacgccatttgcgaagaaatacacgtccggtgtgctgtcgttcgcggagaaggagctgccaccgggaggacgtgaaaaggtgatggcgagctttgagcgtgtactgatgcccggtctcgaaaaaaatcagtacagcatcctgtgggtggagcaccaggacaagggacggcttgagctgaattttgtcattccgaacatggagctacagaccggaaaacgcctccagccgtactacgaccgggcagacaggccgagaattgatgcctggcagacgctggtgaatcaccattacgggctgcatgaccccaacgccccggagaaccgccggatactgactctctctgataacctgccggaaacgaaacaggcgcttgcagagagcgtcacacgcgggatagacgctctttatcatgtcggggagataaaaggccgtcaggatgtgattcaggcgctcacagaggcagggcttgaagtggtcagggtgacgcgaagcagtatcagcattgcagacccgaacggtgggaagaatatcaggctgaaaggagcattttatgagcaatcttttacagacgggcgcggagttcgagaaaaagctgaaagagagagccgaatctacagagacaatactgaacgacgagttcaggaagctcgaaaaatctgtaagcaaggctgtgacatcaaacgagacgaaaatcaaagacgctatagccctgttcacagcttcgacagaggaatcactgaaaaagcaccgggaaggggtgaaagaggcgatgatgcagcacaggaaggacgtgttaaagctggcagggaatacgggcatgatgttactggggatggtcattttcctgtttaccgtgagttgcgggacgctctggtatcttggcgggatgatacaggcgaacctggaagatatcaggaagcaggaagagacattgcagaaactgaacgcgaagacatggggcgtggagttcatcgatag

SEQ ID NO: 490789 - DNA, 177 bp, Shigella sonnei; identical to SEQ ID NO: 487752

SEQ ID NO: 490790 - DNA, 498 bp, Shigella sonnei; identical to SEQ ID NO: 487526

SEQ ID NO: 490791 - DNA, 234 bp, Shigella sonnei; identical to SEQ ID NO: 381169

SEQ ID NO: 490792 - DNA, 456 bp, Shigella sonnei
atgatgacactggcgggggaaatccccgcctttttcctgccggtccccggacagagcacaaaggaagtcgccgccggctccgctttacccggccatgcggggcatggccttgtgggttttcagttatgtggccaccgtgtcgtgtgcgggctgtgccgtgcctccatcttagccgggctggcagggatgcaagggtacgcttcgccgctgcggtcacccggtccctccttcccgtctgccgtgattttccggtcgttcacccgctcaggtttcgcggtctcaccctccaactcccgccagccgtgtgcgtcaggctgcggcttcccttgcgccctgtgcatccccgccttatcgcccggcttttatggaggcacggcaccgcccggtgtcgcggaatatgtgaacaacggaggaatacatcatgcaatatgcgaaacctgtcactctgaatgttga

SEQ ID NO: 490793 - DNA, 426 bp, Shigella sonnei; identical to SEQ ID NO: 20455

SEQ ID NO: 490794 - DNA, 324 bp, Shigella sonnei
atgaatctgctggtcggcaggcagtttcttcaggcgtctggcgcgcttactggctgccgcttttgcacgacggtgtttcagtgcatcctggctgcgctgcagataccagcgttttctggccgcatgtacggagatatcttcatcctcacgcagaacaccttcccgaatgagctgctggcggatttcactttcacgcagtcgtttctgctgctgttcgtgaagttttaccatgtcgacgcccagcatctgccagcctgccggtgttatccagacgtaacgtggcagacgctggcgggtttcacggtcccacagggtttcctctga

SEQ ID NO: 490795 - DNA, 213 bp, Shigella sonnei
atggtgaacggtgcaaactggtttgaccgtaccgtgagcgctgatgccgcaggcatcatccttacctcccttgtgattaaccgccagttgtggctgtaccacgacagcggggatgcagggttgacacacctgtacaggatgcgtgatgcgcagttgtggagccacatcgaatttcaccccgaatgcaacgcgatttacgcggcacttgactga

SEQ ID NO: 490796 - DNA, 267 bp, Shigella sonnei; identical to SEQ ID NO: 489479

SEQ ID NO: 490797 - DNA, 612 bp, Shigella sonnei; identical to SEQ ID NO: 488262

SEQ ID NO: 490798 - DNA, 783 bp, Shigella sonnei; identical to SEQ ID NO: 486531

SEQ ID NO: 490799 - DNA, 267 bp, Shigella sonnei; identical to SEQ ID NO: 11114

SEQ ID NO: 490800 - DNA, 360 bp, Shigella sonnei; identical to SEQ ID NO: 486447

SEQ ID NO: 490801 - DNA, 360 bp, Shigella sonnei; identical to SEQ ID NO: 372517

SEQ ID NO: 490802 - DNA, 267 bp, Shigella sonnei; identical to SEQ ID NO: 11114

SEQ ID NO: 490803 - DNA, 207 bp, Shigella sonnei; identical to SEQ ID NO: 486410

SEQ ID NO: 490804 - DNA, 246 bp, Shigella sonnei; identical to SEQ ID NO: 486098

SEQ ID NO: 490805 - DNA, 150 bp, Shigella sonnei
atgccactgctggataagctgcgtgagcagtacggggtcggaccggtatgcagtgaactgcatattgccccgtcaacgtattaccactgtcagcaacaggacatcatcctgataaacgcagtgcccgtgcgcagcacgatgactggctga

SEQ ID NO: 490806 - DNA, 267 bp, Shigella sonnei; identical to SEQ ID NO: 11114

SEQ ID NO: 490807 - DNA, 489 bp, Shigella sonnei
atgaaaaagacccgtacagccaatttgcaccatctttatcatgaacccttacccgaaaacctgaagctcacgccgaaggtcgaagtggataatgttcatcaacgacagacaacggatgtctatgaacatgctttgacgattaccgcctggcagcagatttacgatcagctgcatccgggcaagtttcatggtgaatttacggaaattctgctcgatgatattcaggtttttcgtgaatacaccggtctggcgctgcgtcagtcgtgcctggtctggccgaactcgttctggtttggcattccggcgacgcgcggtgagcagggatttatcggttcgcaatgtctgggaagcgcagaaatagcgacgcgccccggtggaaccgagtttgaattaagtacgccggacgattatacgatcctgggcgtagtgctgtctgaagatgtcatcacccgtcaggctaactttttgcacaatccggatcgggtatga

SEQ ID NO: 490808 - DNA, 234 bp, Shigella sonnei; identical to SEQ ID NO: 27149

SEQ ID NO: 490809 - DNA, 288 bp, Shigella sonnei; identical to SEQ ID NO: 27151

SEQ ID NO: 490810 - DNA, 711 bp, Shigella sonnei; identical to SEQ ID NO: 33874

SEQ ID NO: 490811 - DNA, 291 bp, Shigella sonnei; identical to SEQ ID NO: 14496

SEQ ID NO: 490812 - DNA, 675 bp, Shigella sonnei; identical to SEQ ID NO: 488299

SEQ ID NO: 490813 - DNA, 327 bp, Shigella sonnei; identical to SEQ ID NO: 27158

SEQ ID NO: 490814 - DNA, 288 bp, Shigella sonnei; identical to SEQ ID NO: 488296

SEQ ID NO: 490815 - DNA, 312 bp, Shigella sonnei; identical to SEQ ID NO: 488295

SEQ ID NO: 490816 - DNA, 966 bp, Shigella sonnei; identical to SEQ ID NO: 27174

SEQ ID NO: 490817 - DNA, 576 bp, Shigella sonnei; identical to SEQ ID NO: 27173

SEQ ID NO: 490818 - DNA, 891 bp, Shigella sonnei; identical to SEQ ID NO: 27176

SEQ ID NO: 490819 - DNA, 978 bp, Shigella sonnei; identical to SEQ ID NO: 488368

SEQ ID NO: 490820 - DNA, 618 bp, Shigella sonnei
atgtctctggcgcaatgcccgggctttttattcgcacatcgtgaggaatgcaccgtggaaattaaaaaaatcattaatccccgttataccgaaagtggcgcagtagactgtgacgttttttttgacgacagggaccaggcagtcccctacacagccaccgctgatgatgtcgcaccgacgggtcagcaaatctggcaggaactgcaaagtggcaaatggggtgagatagccccattcactgtgacaccagaaatgctggaagcggccagagaggccaggcgtcaggaaattgaagcatggcgcgcagaacaggaggcgaagccgttcacgtttgaatggaacggtcgtatctggaatgctggccccgactcactgggccgcctgtccccggtagtcatgctggcaaaatctgtcacagcacaaacacatatggcgtggagcgatgccgataatcagcaggtgaaactgtcgatgccggaactggaagaactggcggcagcaatggtgcaggcgcaggtcgatcgcaacgatgagatttatcgccgtcagcgtgaaatgaaagaggagctgagcggtctggatgatttggcttcaattcgggcgtttgacgttgagtaa

SEQ ID NO: 490821 - DNA, 618 bp, Shigella sonnei
atgtctctggcgcaatgcccgggctttttattcgcacatcgtgaggaatgcaccgtggaaattaaaaaaatcattaatccccgttataccgaaagtggcgcagtagactgtgacgttttttttgacgacagggaccaggcagtcccctacacagccaccgctgatgatgtcgcaccgacgggtcagcgaatctggcaggaactgcaaagtggcaaatggggtgagatagccccattcactgtgacaccagaaatgctggaagcggccagagaggccagacgtcaggaaattgaagcatggcgcacagaacaggaggcgaagccgttcacgtttgaatggaacggtcgtatctggaatgctggccccaactcactgggccgcctgtccccggtagtcatgctggcaaaatctgtcacagcacaaacgcatatggcgtggggtgatgccgataatcagcaggtgaaactgtcgatgccggaactggaagaactggcggcagcaatggtgcaggcgcaggtcgatcgcaacgatgagatttatcgccgtcagcgtgaaatgaaagaggagctgagcagtctggatgatttggcttcaattcgggcgtttgacgttaagtaa

SEQ ID NO: 490822 - DNA, 501 bp, Shigella sonnei; identical to SEQ ID NO: 236350

SEQ ID NO: 490823 - DNA, 426 bp, Shigella sonnei
atgcaatatgcgaaacctgtcactctgaacgttgaagagtgcgaccgtctgttttttctgccttacctgtttggccaggattttctgtatgtcgaagcgtctgtgtacgcgctggcgaaaaaaatgatgccggaatatgaaggcggattctggcacttcatccgcctgccggacggtggcggctacatgatgccggatggcgaccgtttccacatagtgaacggtgcaaactggtttgaccgtaccgtgagcgctgatgccgcaggcatcatccttacctcccttgtgattaaccgccagttgtggctgtaccacgacagcggggatgcagggttgacacacctgtacaggatgcgtgatgcgcagttgtggagccacatcgaatttcaccccgaatgcaacgcgatttacgcggcacttgactga

SEQ ID NO: 490824 - DNA, 123 bp, Shigella sonnei
atgacggctggcgcgcttttcttccatcagttcacgaacaacgtcgtgaacaacgctgacatccgcaccatgctcaaaggcatcgtccagccgctgcatgacggtttccagctcatcgtctga

SEQ ID NO: 490825 - DNA, 285 bp, Shigella sonnei
atgaaaaccagacacacactaacccgcatttcagaggaagcttttaacgagcttaacagaattaaacaaacgaccaacttacctcatcaaactgttatgcagcttgcaattgctaaagaggttactgagtcggatttactgaaatatccagtctctaaaggtcgtaaacacatccgaattactcaggacgctttagatactttgaagggacttaacaactttaaaattgatattgcccgtctaatgagtattaagattcacaagttagcgattgagagcgtctga

SEQ ID NO: 490826 - DNA, 483 bp, Shigella sonnei; identical to SEQ ID NO: 486898

SEQ ID NO: 490827 - DNA, 720 bp, Shigella sonnei
atgagcgcacgttcacgggcactgatccccctcagcgcagagcaacaggccgccatgcaggctgtggctgtcaccgaacaacgtcgtcgtcagggacgcacactttcagcatggccttatgccagcgctttctttcgctgcctgaatggcagtcgccggatttcgctgaccgatctccgcttttttgctcctgcgctgacgaaggaggaatttcatggcaaccgtctcctgtggctggctgccgtggataaactgattgaaagttttggggaagtctgtgttcttcccctgccatccgatgcggggcaccgtctgtttccgtccgtgccttttcgtgaaggtgagcgtcgtcgtcagaaaaccacgctgacagagcagaaatacagccgccagcgggaacgtgaggcagaacgacgggaactggaataccagacatgttttgctcaggcgcagattgaccttgcgtttcatactcccgccacggtcggaagctggttgtcccgctggtctggtgttgttgaggagcatgatctggaaacgattttctgggggtggtgcgggcgttttccatcactgtcatcatttgaccggtttttctggcaggaggaaccactctggcggctgatttttgaagccggtgaggccggtcgtggtgcaccggtacaggtacgtgcacttgagcagtggatgatcccgaacaagctggagaacgtaatatga

SEQ ID NO: 490828 - DNA, 501 bp, Shigella sonnei; identical to SEQ ID NO: 236350

SEQ ID NO: 490829 - DNA, 366 bp, Shigella sonnei; identical to SEQ ID NO: 489419

SEQ ID NO: 490830 - DNA, 366 bp, Shigella sonnei; identical to SEQ ID NO: 488141

SEQ ID NO: 490831 - DNA, 501 bp, Shigella sonnei
atgtctgttgttgcacctgctgtatacgttggaacctggcacaaatacaactgtggaagcatcgctggccgctggtttgacctggccacgtttgatgatgaacgcgactttttcgccgcctgccgtgcccttcaccaggatgaaaccgacccggaactgatgtttcaggattatgagggattcccggggaatatggcctctgaatgccatatcaactgggcctgggttgaaggcttccgccaggcgcgggatgaaggctgcgaagaggcttatcgtctctgggtggatgataccggtgagacggattttgacagcttccgcgatgcctggtggggcgaggctgacagtgaggaggcttttgcggttgagttcgccagtgataccggcctgctggctgacgtgccggagacggtggcgctctattttgactatgaggcgtatgcgcgggatttattcctggactccttcacctttattgacggtcatgtgttccgtcggtga

SEQ ID NO: 490832 - DNA, 399 bp, Shigella sonnei; identical to SEQ ID NO: 483859

SEQ ID NO: 490833 - DNA, 192 bp, Shigella sonnei; identical to SEQ ID NO: 490227

SEQ ID NO: 490834 - DNA, 204 bp, Shigella sonnei; identical to SEQ ID NO: 486608

SEQ ID NO: 490835 - DNA, 1701 bp, Shigella sonnei
gtgatctactattccgcgcagctatttagcctgtggcgtcagtcgcagttaaacggtatttccggcctgtttaaagtcaccgacagaatgtaccaggttcgcggtcaggatatctccaacatcacctttatcgaaggtgataccgggattattgtcatcgacccgctggtgacgccaccgagcgcaaaagccgcccttgacctttacttccaaaatcgcccgcaaaaaccgattgttgcggttatttatacccacagccataccgaccactatggcggcgtgaaaggcattatctctgaagctgatgtgaaatccggtaaagtgcaggttatcgcccctgctggctttatggacgaagccatcagcgaaaacgtactggcgggtaatattatgagccgccgtgcactttactcctacggcctgctgctggcgcataaccctcagggtaacatcggcaatggtcttggcgtaacgctggcatcgggctacccgagcatcatcgcaccgaacaaaaccatcaccaaaaccggtgagaagatgattatcgacggcctggagtttgacttcctgatgaccccaggtagcgaagcaccagccgaaatgcacttctatattccggccctgaaagcgctgtgtaccgccgagaacgccacgcataccctgcacaacttctacactctgcgcggcgcgaaaacccgcgacaccagcaagtggaccgagtatctgaacgaaacgctggatatgtggggtaacgacgcggaagtcctgtttatgccgcacacctggccggtctggggcaataagcatatcaatgattatattggtaaatatcgcgatactatcaagtacattcacgaccagaccctgcacctggcgaaccagggctacaccatgaatgaaatcggcgacatgattaaactgccgcctgcacttgccaataactgggccagccgtggctattacggttctgtcagccacaacgcccgcgcggtgtataacttctatcttggctattacgacggtaacccggctaacctgcatccgtatggtcaggtggagatgggtaaacgttacgtgcaggcgctgggcggttctgcccgtgtcatcaacctggcgcaagaagcgaacaagcaaggtgattaccgctggtcggcagaactgctgaaacaggtgattgccgccaacccgggtgaccaggtcgcgaagaatctgcaagcgaataactttgaacagctgggctatcaggccgagtccgccacctggcgcggtttctacctgaccggcgcgaaagagctgcgcgaaggggtgcataagttcagccacggcaccatcggttccccggacaccattcgcgggatgtcggtcgaaatgctgttcgactttatgtccgttcgcctcgatagcgcgaaagccgcgggtaaaaatatcagcctgaacttcaatatgagcaatggcgataacctcaacctgacgctgaacgatagcgtgcttaactaccgtaaaacactgcaatcccaagctgacgcctctttctacatcagccgtgaagatctgcacgccgtgctgaccgggcaagccaaaatggcggatctggtaaaagcgaagaaagccaaaattattggcaatggcgcgaaactggaagaaattatcgcctgtctggataatttcgatttgtgggtgaatatcgtaaccccaaattaa

SEQ ID NO: 490836 - DNA, 327 bp, Shigella sonnei
atgaatattcctgatgagtttggtctttttccgtttcagcgtttcactgcagatgaactacggcatttctttgtctggtgtgccgcacataaagtcagtgatgtggatctgaccggtgggtcacctgtatctgtcagtcgctttggccgacgggtgcgttgttccagtgcaacgttaccaaccacactcatgtcctccctgattgatgaactgttcggtcgggaagtcattccccgcgttctggcaggcaatccggttgacaggacgatacagattaacggggatgtggatttgcccctatatttccagacatctgttatcacttaa

SEQ ID NO: 490837 - DNA, 189 bp, Shigella sonnei; identical to SEQ ID NO: 463227

SEQ ID NO: 490838 - DNA, 387 bp, Shigella sonnei; identical to SEQ ID NO: 485857

SEQ ID NO: 490839 - DNA, 201 bp, Shigella sonnei; identical to SEQ ID NO: 488102

SEQ ID NO: 490840 - DNA, 189 bp, Shigella sonnei; identical to SEQ ID NO: 463227

SEQ ID NO: 490841 - DNA, 189 bp, Shigella sonnei; identical to SEQ ID NO: 463227

SEQ ID NO: 490842 - DNA, 243 bp, Shigella sonnei; identical to SEQ ID NO: 39227

SEQ ID NO: 490843 - DNA, 291 bp, Shigella sonnei; identical to SEQ ID NO: 39237

SEQ ID NO: 490844 - DNA, 396 bp, Shigella sonnei; identical to SEQ ID NO: 39233

SEQ ID NO: 490845 - DNA, 1908 bp, Shigella sonnei
atgagcaaagtaaaaatcggtgaattaataaactcacttgttagcgatgttgagtcaatagataactctgaccgtcctcaaggggaaaaaacaaaaaaaataaaggctgttgcattaaaatttaaaaatgcattatttaatgacaagcgaaagtttagggggaaaggattagaaaaaagaattacagccaacacattcaatgcctatatgagcagggccagaaaacggtttgatgataaacttcatcatagctttgaaaaaaatatacatcgcctatctgaaaagtatcctttatataatgaggagctattgtcatggctttctctacctgctgccgatattcgccagagaatgtcaactttacaggcaaaattaaaattaattctccctttatcagaagatttatctaatatcagaattggtgataacaaaaatcataataagttattaaaattatcaaataaatataaagagtggcaattcgcaatttctgatttaactagcgataactggaaagataagcgcgattatttatataaattactacagcaaggatctgccttgcttgaggagttgaatcagctaaaagttaaccatgagattctctatcatcttcaactaagccctgccgaacgcgcatctatccagcaacgatgggcggacgttctgcacaataagaaacgtaacgtggtggtcattgattaccctaaatatatgcaagctatttacgatattataaatagccctgctacattaaataatctaaacactcgttcaggtatggctcctttggcatttgcacttgctgcattgtcaggaagacgaatgattgagattatgtatcaaggtacatttactgtttctggtaagtataccgttgattttttaggccaagctaaaaaaagaacttctgatgatataaccagaaaaatatatacattatgcgaagcaaaaacatttgtttatttaataaatgtacttcgctcatgcccagcagcatctgattttgatgatgtcgttaaaggttatggagataacgacacacgctctgaaaacggacgtattaatgccatattagcaaaggcttttaacccgtgggttaaatcatttttcaaagatgaccgccgtgtttataaagatagtcgtgctatttatgcccgtattgcgtatgaaatgtttttccgcgtagatcctcgttggaaaaacgtagatgaggatgttttctttatggaaattttaggccatgacgatgaaaacactcaattacactataagcaattcaagctggccaacttctcaaagacatggaggccaaatactggaaacgaaaataccaggctggaagcattgcagcagcttgatgacgaaatgcctggattcgccagaggagatgccggggttcgtctgcataacacagttaagcagctggtagagcaggacccctctataaaaatcacgaacagcactctaagagcattcaaatttagcccaacaatgattagccgatacctggaatttgctgctgatgctctggggcaatttgttggcgaaaatggacaatggcagctgaaaatagatactccagaaatcgttatgcctgacgaagaagagctggaagcaatacctgaacagacggatgaattatcagatgatgacgatctggatgacgacgaaattgagatagaggaagaggaagaggaagaggaagaggaagagagcgtagaagaacagcaaccgcccgcgccttcttcacctgtatctaagccggtatttaagcctgtgagaaatattggtgatggttcatacgttgttgagtttcattataatggccagaattatgcttggtccggcagtgcaaacagccctatgtcagcaatgcagttagcatggctgacatatttcggataa

SEQ ID NO: 490846 - DNA, 165 bp, Shigella sonnei; identical to SEQ ID NO: 39229

SEQ ID NO: 490847 - DNA, 396 bp, Shigella sonnei; identical to SEQ ID NO: 39233

SEQ ID NO: 490848 - DNA, 327 bp, Shigella sonnei; identical to SEQ ID NO: 39234

SEQ ID NO: 490849 - DNA, 192 bp, Shigella sonnei; identical to SEQ ID NO: 34317

SEQ ID NO: 490850 - DNA, 420 bp, Shigella sonnei; identical to SEQ ID NO: 39236

SEQ ID NO: 490851 - DNA, 291 bp, Shigella sonnei; identical to SEQ ID NO: 39237

SEQ ID NO: 490852 - DNA, 222 bp, Shigella sonnei; identical to SEQ ID NO: 27559

SEQ ID NO: 490853 - DNA, 243 bp, Shigella sonnei; identical to SEQ ID NO: 39227

SEQ ID NO: 490854 - DNA, 222 bp, Shigella sonnei
atgaattatcaaggtaacgaaaaaatgcgcgacgacgttgcggagatagctaacgaactgtatgagttgtggcagaaggttgaacgtttcgaaaaggaatatggtttcaacagtaccaacctagcagaccgactggctggtcgcttagttgggactatggggccaaaactggctgagttgaaccgctttatggctgatgttgatttccagtttcaagattga

SEQ ID NO: 490855 - DNA, 450 bp, Shigella sonnei
atgcaagaagaagcaaataaaattcttgttgatttattgaagaaggccagcgatggaattgattccgccattgtattcagtcaggctcaaattccggatgttgttcatcagttgctggtatggaatatggttgatagcctgattaaaacattaatagccatttcaacaattccgctggttatttggtttatgaagaaacagtgcaaaaaagttgaaattggtaagttcgataatgaaggacgctcatgcgataatggacagcctaaatacaaaccaactatgctttgggaaagtgacggtaggttaagtggttttgtcttaccattagtagcagtttttattctatggttcagttttattatttctgtagtagccaatatgacatggttaaaaatttggctggcacctaagttatatctaatcgaatacgcagcatcactaattaaatag

SEQ ID NO: 490856 - DNA, 189 bp, Shigella sonnei; identical to SEQ ID NO: 463227

SEQ ID NO: 490857 - DNA, 1167 bp, Shigella sonnei; identical to SEQ ID NO: 39241

SEQ ID NO: 490858 - DNA, 1869 bp, Shigella sonnei
atgattttttttaacgatataaagcccactggttggttaaagaataagatggaatggtatatgaacggtcatataggagaactggataaattagttccccatcttattacggagcataaaatatatggaagagatcgtataactccacgcactgtatctgctgaagatggcgttattaaaaaacagaataatcccgatgataacatgatgcaatattattggtgggatagtgaaactcaatcgaattggaaggatggatattgccgcagtgcctacttgttagataataaagaatggcaggaaaaagcgagcgatttatgtttggaacttatcgatacgcaagatgatgatggctacattggaatttatgattcatcattaaaatttaactgtaaagcagaaaacggagagttctgggcacaagctactgccttgcgttttgtgcttggatgttatgagtccacccgtaatgagagtttattaacttctcttacccaagccgcacaatgcattatggctggctaccctaaagaaacgtcacatcctttcgttgtggaacagggttttgctggacatagccacggattaacaataacagatgttttctaccgcctttatgaaataaccaataacattgaatatctctcatattgcttgtggctgtatgaagattattccgcagaatgcgtgtcggagcaagatctgcaatataaaaatgtcatagaccctggttaccttcttaaaggtcatggcgtacatacgtatgagcatattagggcattagccatcgcagcgagccaacggccgcagtatcaaactgcattagatatttttttatcccagttgaaatattatcttacaccatctggcgctcccattggtgatgagtggattacaggacgcacagctaatgccacttatacaggctatgaatattgttctgttcatgaactatttagcacttatgttatgttaataaaactgaccactaatattggtctggccgatgatgctgagtggctattctataatgctagttttggcatgcagcatcccatacttcacgcgataatgtactgtaagactgataattgttatgaagcaaatgaaaggaaacatcctgacagtaatcagtttaataccagatataaatactcccctactcatgaggaggctgctgtctgctgcgtaccgaatacagcaagaaccataccggcttttgtcgaaaatatgtttcaagaaaataacaatggttttactgcattattttatggcccgtgtgagttttatggcacatttaataatgttgcaattaaaattacacaattaactgaataccctcatgatttaagcgtaaaatgtctcattgagcctgagtcatctgttcgttttgctctcagtttccgttaccccggctgggcaaaaatgatgattattaatggtgttacttttactaaaaatgatactcaaaactcacttattattttagatagaacatggcaacatcatgatgtgattgacattaaatttatagctgatatacagtttaatactgacttatgtggtgacacttatatttccagaggtcccgttttatatgcaattgagcttgagagcgatattttaatcaaaaaaaacctgctgaacgggaaatattttgactcaggatacataccctgtagtagagctgatgaatctatccagttctcttatgctgatatggaatctttttcatattcaacctcaccagagggcaaacaatacattgaaggctgtttttatttaaacaagactaaaatagtcagaaaacttataccatttggtcaaaccattcttcgcaaagtaactttctccaatatagagagttaa

SEQ ID NO: 490859 - DNA, 882 bp, Shigella sonnei
atgctcgcagagataaaacacgctggaggggtcatccggcgtccatttgaggccaaacggcgtctctttgtcgccaaatttaagatactgctcctccccgcagtgcgggcaggcaacatgaaaacgcataaaatgcggggattcactggctgcacgctcaatctggcaagtgcctctcactttgggcgtggagccacggatggactttggccagaccgagccttcaatacgcttatcgcccaggaacgtcggagagccttcctgttcaatatcatcatcaaaggcagcaagttcatcataacccgccacatccaccgacttttcacggtagttttttgccgctttaccgcccaggcaccagaagccacgaccattggaaaaacgcttcatagtgagcgtgttatcccggtgctttttgccataccacggagccagcgccagcagcgacggaatatcgcggatggtcggctcaacgtgggttttcataaagttctcggcatcaccatccgtcggcaaccagataagggtgttgcgctgcttatgctctataaagtaggcataaacacccagcagcattttggaataaccgacacgggcagacttcaccacattcacctcacggatgtagtcgctgcccatcgcattcatgatggcccgctgaaagggcagtgtttcccagcgcccttcctggtatgcggattctttcgggagatagtaattagcatccgcccattcaacggcggtctgtggctccggcctgaacagggcacgaagcccggcgcggacaaaatgccgcagcctgtcaacctgactgttcgatatattcactcagcaaccccggtatcagttcatccagcgcggctgctttgttcatggctttga

SEQ ID NO: 490860 - DNA, 219 bp, Shigella sonnei
gtggatggcaggaaaaaaatactgtgggacagcaaaaagcgacgcaatgaggcgctcgactgcttcgtttatgcgctggcggcgctgcgcatcagtatttcccgctggcagctggatctcagtgcactgctggcgagcctgcaggaagaggatggtgcagcaaccaacaagaaaacactggcagattacgcccgtgccttatccggagaggatgaatga

SEQ ID NO: 490861 - DNA, 207 bp, Shigella sonnei; identical to SEQ ID NO: 7021

SEQ ID NO: 490862 - DNA, 699 bp, Shigella sonnei
atgcaggatatccggcaggaaacactgaatgaatgcacccgtgcggagcagtcggccagcgtggtgctctgggaaatcgatctgacagaggtcggtggagaacgttattttttctgtaatgagcagaacgaaaaaggtgagccggtcacctggcaggggcgacagtatcagccgtatcccattcaggggagtggttttgaactgaatggcaaaggcaccagtacgcgccccacgctgacggtttctaacctgtacggtatggtcaccgggatggcggaagatctgcagagtctggtcggcggaacggtggtccggcgtaaggtttacgcccgttttctggatgcggtgaacttcgtcaacggaaacagtgacgccgatccggaacaggaggtgatcagccgctggcgcatcgagcagtgcagcgaactgagcgcggtgagtgcctcctttgtactgtccacgccgacggaaacggatggcgctgtttttccgggacgtatcatgctggccaacacctgcacctggacctatcgcggtgacgagtgcggttatagcggtccggctgtcgcggatgaatatgaccagccgacgtccgatatcacgaaagataaatgcagcaaatgcctgagtggctgtaagtttcgcaataacgtcggcaactttggcggcttcctttccattaacaaactttcgcagtaa

SEQ ID NO: 490863 - DNA, 330 bp, Shigella sonnei; identical to SEQ ID NO: 483867

SEQ ID NO: 490864 - DNA, 675 bp, Shigella sonnei
atggcaggcctgaagtccggctggagtgagtgggaagagagcgccacggacagtatgtcacaggttaaaagtgcagccacgcagacctttgatggtattgcacagaatatggcggcgatgctgaccggcagtgaacagaactggcgcagcttcacccgctccgtgctgtccatgatgacagaaattctgcttaagcaggcaatggtggggattgtcgggagtatcggcagcgccattggcggggctgttggtggcggcgcatccgcgtcaggtggtacagccattcaggccgctgcggcgaaattccattttgcaaccgggggatttacgggaaccggcggcaaatatgagccagcggggattgttcaccgtggtgaatttgtcttcacgaaggaggcaaccagccggattggcgtggggaatctctaccggctgatgcgcggctatgcggaaggtggttatgtgggcggtgccggaagtccggcgcagatgcggcgggctgaaggcattaattttaatcagaacaatcacgtggtgattcagaacgacggtacgaatggtctgccaggtccacagatgatgaaggccgtgtatgacatggcccgcaagggtgcccgtgatgaaattcagacacagatgcgtgatggtggcctgttctccggaggtggacgatga

SEQ ID NO: 490865 - DNA, 330 bp, Shigella sonnei
atgaaaaccttccgctggaaagtgaaacccggtatggatgtggcttcggccccttctgtaagaaaggtgcgctttggtgatggctattcccagcgagcgcctgccgggctgaatgccaacctgaaaacgtacagcgtgacgctttctgtcccccgtgaggaggccacggtactggagtcgtttctggaagagcacggtggctggaaatcctttctgtggacgccgccttatgagtggcggcagataaaggtgacctgcgcaaaatggtcgtcgcgggtcagtatgctgcgtgttgagttcagcgcagagtttgaacaggtggtgaactga

SEQ ID NO: 490866 - DNA, 699 bp, Shigella sonnei
atgcaggatatccggcaggaaacattgaatgaatgcacccgtgcggagcagtcggccagcgtggtgctctgggaaatcgatctgacagaggtcggtggagaacgttattttttctgtaatgagcagaacgaaaaaggtgagccggtcacctggcaggggcgacagtatcagccgtatcccattcaggggagtggttttgaactgaatggcaaaggcaccagtacgcgccccacgctgatggtttctaacctgtacggtatggtcaccgggatggcggaagatctacagagtctggtcggcggaacggtggtccggcgtaaggtttacgcccgttttctggatgcggtgaacttcgtcaacggaaacagtgacgccgatccggagcaggaggtgatcagccgctggcgcatcgagcagtgcagtgaactgagcgcggtgagtgcctcttttgtactgtccacgccgacggaaacagatggcgctgtttttccgggacgtatcatgctggccaacacctgcacctggacctatcgcggcgatgagtgcggttatcacggtccggcggtcgcggatgaatatgaccagccaacgtccgacatcacgaaggataaatgcagcaaatgcctgagtggctgtaagtttcgcaataacgtcggcaactttggcggcttcctttccattaacaaactttcgcagtaa

SEQ ID NO: 490867 - DNA, 330 bp, Shigella sonnei; identical to SEQ ID NO: 490865

SEQ ID NO: 490868 - DNA, 366 bp, Shigella sonnei
atgctggaagcggccagagaggccagacgtcaggaaattgaagcatggcgcacagaacaggaggcgaagccgttcacgtttgaatggaacggtcgtatctggaatgctggtcccgactcactgggccgcctgtccccggtagtcatgctggcaaaatctgtcacagcacaaacacatatggcgtggagcgatgccgataatcagcaggtgaaactgtcgatgccggaactggaagaactggcggcagcaatggtgcaggctgttgttgaacgcaatgacgagatttatcgccgtcagcgtgaaatgaaagaggagctgagcagtctggatgatttggcttcaattcgggcgtttgacgttaagtaa

SEQ ID NO: 490869 - DNA, 189 bp, Shigella sonnei; identical to SEQ ID NO: 463227

SEQ ID NO: 490870 - DNA, 189 bp, Shigella sonnei; identical to SEQ ID NO: 463227

SEQ ID NO: 490871 - DNA, 189 bp, Shigella sonnei; identical to SEQ ID NO: 463227

SEQ ID NO: 490872 - DNA, 210 bp, Shigella sonnei
atggctgttgcgtcaattggtagcctgatgtggcatgcgtcagaaaatgaggactatgacgaaaaggccatgcgcattgatatgggtaatatcggtttgttactggcaatgcttggacattttgatatttcgttacggtgcaccattgaaaatgccacagatgcattaaatgctataaagaaagcgaatactgattcaaatcggggataa

SEQ ID NO: 490873 - DNA, 636 bp, Shigella sonnei
atggaagttcgccgccgcagcctgaatggccgtccccgtggaggcagacgcaccaccaccgaaagcaccgccaatggcgctgccgatactcccgactatccccaccatcgcctgcttcagaaaaatctctgtcagcatggacagcacagaacgggtgaaaccacgccagttctgttcgctgccgatcagcatcgctgccatattctgtgcaataccgtcaaaggtctgcgtggccgcgtttttaacctgcgaaaaactgtccgtcgcactttccgcccactcgccccagccggacttcatcccggccatccagcttccacgaagctgctcctccgcagaccaggtgttcttcagtgcagatgtggccttcgccagcgcagccggattatcaccgtacacctcacgaaggcgctgctcttccgactcccgctgcgcctgacggtcggtgagtccgcgggcttttgcgctgattgccgcctgcttcgcgctctgctgctgttcaaaccgcgccgcctgctgtgccagctcattcagccgtttctggtgttcaatcttgtcgcccagctcagccagctggcgtttgtactccagcgtttctttctcatgggccagcagggatttttcctgctcagataa

SEQ ID NO: 490874 - DNA, 849 bp, Shigella sonnei
atgaatcagactttacccactactgacctgaatactgccggcacgacagatgttattccgtctgtggccatcgaccgcatcatcgcgcagcgtaacgaaggtattgcactgttcatgcaggcgatggaatgcctggcgacagcgcgcaggattctgcttgatgcgtcaggtgatatttttctttacggttttgaagactgcgtgaccgactccgttcggtgcatggataaaccggaagaagcgaaaaggaatatcacccgtcttgccgaccggaaaatctgggaccgcctgatgacagatacgggcatgtacaccttcatgagttcatgccagcgtgatgagtggaacagccagctgatgagcgacacctgtcctgaaatcaccctggacaatgtactggcaacttttcgccatctgaatgccagtaagatgcagacatttgaacagggactgattgatgtctaccggaaattgtcatgggattacagaaccaataatccctgccgtctgggaaagaaaatcattattgaaaacctgctgtaccgctggagtaacgggcgtgtgacgctggactgcagcggacgggaagcactggatgacctggtacgtccgttttatctgctggaggggcgcaacgttcctgacttcaggaacagcatcggggggcagtatggtgaatttctcgggaacggcgacaatgtcggtaagttgttagaaggggaatattttacggtgcgtggctaccagaaagggaccgtacacattgtctttaagcgttctgaccttgttgaaaaactgaatgatattattgcacggcattatcctggtgcattgccgccacgagtctga

SEQ ID NO: 490875 - DNA, 369 bp, Shigella sonnei
atgctggttatctggtccccggaagaaattcaggccctcgctgacggaatggatatttccctgtccgatcatgaaatcaggactgtcctggcgcgcctggaggacatcccggaagaccagcggactgaatccggtatttcttccggtgcggcgatggagatcatcaataacgtgagagaaaaccgccaggtgaccgtccctgctgaactgctggcgtccctgattcagaccgctgaacaggcactgtggaaacgtgaatgggccgcccgtgataacggccttgccgtcccggaatgtgttacccgccgtcaggcagtgattaatcaggcccgcaccctgctgaaaaacaacacacacgaaaacaactga

SEQ ID NO: 490876 - DNA, 822 bp, Shigella sonnei
atgttatcgccgcctgccctgcgggcggcgatacagggagaacgcttaatcatgaacaaaacgctgaatgcactggtttgtcgtcacgcccgtaacctgctgctggcgcagggctggccggaagagacggatgttgaccagcgaaatccgaactatccgggctggatcagcatttacgtgcggctggatgcgccccggctggcgacgttacttatcaaccgtcacggcggcgtactgccgccgcacctggcctccgccattcagagactgaccggaaccggggcggaactggtactgtccggcagtcagtggcagtcgctgccggtacttccggcagacggaacgcaggtgtctttcccgtatgccggagaatggctgaccgaagacgaaatcagggctgttcttgatgcggtgcacgatgcggtacgaagcatctgttaccaggtggcagaagatgcgcggcgtatccgtgcggcgctgaccaccaccggtcagacgttgctgacccgccagacgcgccgctttcgcctggtcgtgaaggaaagcgatcacccctgctggctcgatgaagatgacgaaaacctgcccgtggtgctcgatgccatcgtgaaccggggagcacgtttttcgtcggtggaaatgtacctggtcagcgattgtattgagcatatcctgtcctgtgggctggcctgcgatgtgctgcgtatacccgatgaaccgccccgccgctggtttgaccgtggtgttctgcgggaggtggtccgggaagcccggaccgaaatccgcagcatggcggatgccctggcaaaaatccggaaatga

SEQ ID NO: 490877 - DNA, 381 bp, Shigella sonnei; identical to SEQ ID NO: 486980

SEQ ID NO: 490878 - DNA, 234 bp, Shigella sonnei
atgagcgaatatttcagaatacttcagggactgccggacggctcctttacccgcgaacaggcggaagccgttgccgcacagtaccggaacgtctttatcgaggatgaccacggagaacattttcgcctggttgtccgtcaggatggcacgttgatctggcgctcctggaattttgaggacggtgccgggtactggatgaaccagtacatcagggatttcgggattcttaagtaa

SEQ ID NO: 490879 - DNA, 258 bp, Shigella sonnei
ttgcgcctgagcgttctgctgtggtgcactccccagcatctgcatggtgcccgtggtcttaacaagaatttcagtgatgtagcgggtgatgccgttgtcgtcccagctacgggtacggagttgcccctcgatgtagacctgcgcgcccttgcgcagatattcacctgccacttccgcgagcttgccgaacagcacaacacggtgccattccgtctgctcccgcatctcccccgtctgtttgtcgcgccagctttctga

SEQ ID NO: 490880 - DNA, 645 bp, Shigella sonnei
gtgcggctggatgcgccccggctggcgacgttacttatcaaccgtcacggcggcgtactgccgccgcacctggcctccgccattcagagactgaccggaaccggggcggaactggtactgtccggcagtcagtggcagtcgctgccggtacttccggcagacggaacgcaggtgtctttcccgtatgccggagaatggctgaccgaagacgaaatcagggcagttcttgatgcggtgcacgatgcggtacgcagtgtcagttgccgggtggcagaagatgcgcggcgtatcagggcggcgctgaccacaaccggtcagacgttgctgacccgccagacgcgccgctttcgcctggttgtgaaggaaagcgatcacccctgctggctcgatgaagacgacgaaaacctgcccgtggtgctcgatgccatcctgaaccggggcgctcgtttttcgtcggtggaaatgtacctggtctgtgagtgtgtggagcatatcctgtccagtgggctggcctgcgatgtgctgcgtataccggatgaaccgccccgccggtggtttgaccgtggtgttctgcgggaggtggtccgggaagcccgggctgaaatccgcagcatggcggatgccctggcaaaaatcaggggctga

SEQ ID NO: 490881 - DNA, 135 bp, Shigella sonnei; identical to SEQ ID NO: 10658

SEQ ID NO: 490882 - DNA, 135 bp, Shigella sonnei; identical to SEQ ID NO: 488400

SEQ ID NO: 490883 - DNA, 291 bp, Shigella sonnei; identical to SEQ ID NO: 488256

SEQ ID NO: 490884 - DNA, 525 bp, Shigella sonnei; identical to SEQ ID NO: 488160

SEQ ID NO: 490885 - DNA, 378 bp, Shigella sonnei; identical to SEQ ID NO: 476066

SEQ ID NO: 490886 - DNA, 702 bp, Shigella sonnei
atgccggatatgacccgctacgctggtgatggggcgggaattaaggctattacaggcggtgacaaggtggcaatcgacccaaaacataaagccccatattcaacgcgtatcccggcagtagtgctggcggttaacaataacgctatgtcattcagtgaccgcagtggggggatctcgcgccgtcgggtgatattcaatttttcggaagttgtaccggagaacgaacgcgattcaatgctggcggaaaaaatagaaggtgagctggcggtagtgattcgtcatctgcttacacggtttgctgaccaggacgaagccagacgccttttatatgagcagcagaaatcagaagaagcactcgcgataaagcgtgaaggtgattcgctggtggacttctgcggctatctcatggcgtcggtaatgtgtgatggcctgttagtgggtaatgctgaaattgtgccattcagcccgcgcaggtatctctatcatgcctatctggcttatatgaaggcacatgggtttggtaaacctgtaacactgacgcgcttcggtaaagatatgccgggggcaatggcggaatatggcagggagtatatgaaacggaaaacgaagcacggtttgcgttcaaacgtgacactgacggaggaatcagaagactggatgccatcatgtgtatcggtcactaatgacgatagcaaaaattaa

SEQ ID NO: 490887 - DNA, 246 bp, Shigella sonnei; identical to SEQ ID NO: 112030

SEQ ID NO: 490888 - DNA, 213 bp, Shigella sonnei; identical to SEQ ID NO: 486092

SEQ ID NO: 490889 - DNA, 189 bp, Shigella sonnei; identical to SEQ ID NO: 463227

SEQ ID NO: 490890 - DNA, 1254 bp, Shigella sonnei; identical to SEQ ID NO: 487979

SEQ ID NO: 490891 - DNA, 543 bp, Shigella sonnei; identical to SEQ ID NO: 490571

SEQ ID NO: 490892 - DNA, 582 bp, Shigella sonnei; identical to SEQ ID NO: 490383

SEQ ID NO: 490893 - DNA, 189 bp, Shigella sonnei; identical to SEQ ID NO: 463227

SEQ ID NO: 490894 - DNA, 225 bp, Shigella sonnei; identical to SEQ ID NO: 486969

SEQ ID NO: 490895 - DNA, 582 bp, Shigella sonnei; identical to SEQ ID NO: 490383

SEQ ID NO: 490896 - DNA, 528 bp, Shigella sonnei; identical to SEQ ID NO: 469185

SEQ ID NO: 490897 - DNA, 582 bp, Shigella sonnei; identical to SEQ ID NO: 490383

SEQ ID NO: 490898 - DNA, 930 bp, Shigella sonnei
ttggtcgcactgctgagctgtactatcccctttttcgtcgtgctcgcatcctcaagcgccacggcggatgcaatatcctctgcccgttttgctgctgtctcggcgcgcgttgccgcggattccgccgtacttttgctctgtgctgccgctgccgcactgccagcagcctctgtcgccttcgtggatgccgtcgtggcgctgcccctcgctgctgacgcctgtctggtcgcctcatcttttgaagcagacgcagatgatgccgatgacgccgccgaactggcggacgatgcggcagccgtttttgaggattctgcgctggtttccgacgctttcgcgttcgtttcggatgtcttcgctgcggaagcagacctcgctgctgcgctggcctgttcagtggcttcgccagccttcgttgtggctgttgaagcggatgatgcggcgctttctgccgattttccggcggcggtggcactgactgctgcctcctctgccttaatggacgcctcacgggccgatgatgcagctgctgtctcagagtctgccgcagctgaggcgctctgttccgctgccgtttcagaagacctggcattcgtctcggacgtttttgccgccttcacggaatttcctgccgccgttgccgaggaggctgcactgctggcgcttgtggaggcgttcgtttctgatgattttgccgcctctttggaggccgccgcatctctggctgaagtggcggcttctgacgctttcgtcgtcgcagtggatgcagaagtggctgctgatttttgtgacgctgcagcattcgtttctgacgttttcgccgcaccggcactggtggccgccgcgctttttgaggactctgcagcggcagcactttttgatgcttcagtggcctttgttgatgccgttcctgcgctggaagacgcctcctga

SEQ ID NO: 490899 - DNA, 738 bp, Shigella sonnei; identical to SEQ ID NO: 487141

SEQ ID NO: 490900 - DNA, 804 bp, Shigella sonnei; identical to SEQ ID NO: 6089

SEQ ID NO: 490901 - DNA, 456 bp, Shigella sonnei; identical to SEQ ID NO: 488050

SEQ ID NO: 490902 - DNA, 774 bp, Shigella sonnei; identical to SEQ ID NO: 236338

SEQ ID NO: 490903 - DNA, 192 bp, Shigella sonnei; identical to SEQ ID NO: 8281

SEQ ID NO: 490904 - DNA, 1188 bp, Shigella sonnei
atgcttccccgttttgccgatatctttcagcagggaaaccgctggcttaactggctggagaagcagccggaaggggcagtacgtccggtggtgattgagtcggtgaccaaaatcatggcgtgcgggaccacactgatggggtatacacagtggtgctgttcatcaccggactgttgccatacaaaaaaggtctgcttccggtgtaaaagccgctcctgcccgcactgcggggtgaaggctggcgcacagtggatacagtatctgctgagcctggtccccgactgcccgtggcagcatattgtgttcacacttccctgccagtactggtccctggtgttccacaaccggtggttactgacagagatgagccgcattgcagcggatgtgatactggaaatctgccatcaggcagatgtggagccggggatattcacggtgatccacacatgggggcgtgaccagcagtggcatccgcatatccatttatcgacaactgccggtggtgtgacgtcgggccacacctggaaaaatcttcatttttacgcccgtaaggtgatgagcatgtggcgctaccggataacacggttgctgtcacggaaataccctgacctggtgatgccggatgcgctggcagcagaaggaagcagtaaacgggaatggaatcgcttcctggacacgcattaccgccgtggctggaatgtcaacgtatcccgggtgatggataatgccacccatgtggcggtgtactttggctcttacctgaaaaagccaccggtgccgatgagtcgtctggagcattatgccggtcaggatgaaatcggtctgcgttacaacagtcaccgaacaaaacgggaagaatacctgttgatgagtggagatgagttcatggaaaggttctcctggcatgtggcggataaggggttccgtatggtgaggtactacggttttttgagtccggcgaaacggcggttactggaagaagtggtgtacatcataacggagacagtgagaaaaacggcgatgcaaatcacctggagagggatgtatcagaggttactgaaggttgacccgctgaagtgcgtgctgtgcgggagtcagatgcgttttacggggctgaagcggggctaccgtctggcagagcaggtcctgatgcatgagccgctggcccggatgcggtggtgcggctga

SEQ ID NO: 490905 - DNA, 258 bp, Shigella sonnei
ttgcgcctgagcgttctgctgtggtgcacgtcccagcatctgcacggtgcccgtggtcttaacaagaatttcagtgacgtaacgggtgataccgttatcttcccagctacgggtgcgaagctgaccttcgatgtagacctgcgcacccttgcgcagatattcacctgccacttccgcgagcttgccgaacagcaccacgcggtgccattccgtctgctcccgcatctcccccgtctgtttgtcacgccagctttctga

SEQ ID NO: 490906 - DNA, 207 bp, Shigella sonnei; identical to SEQ ID NO: 485753

SEQ ID NO: 490907 - DNA, 258 bp, Shigella sonnei; identical to SEQ ID NO: 28312

SEQ ID NO: 490908 - DNA, 354 bp, Shigella sonnei; identical to SEQ ID NO: 466835

SEQ ID NO: 490909 - DNA, 234 bp, Shigella sonnei
atgagcgaatatttcagaatacttcagggactgccggacggctcctttacccgcgaacaggcggaagccgttgccgcacagtaccggaacgtctttatcgaggatgatcagggaacgcattttcgcctggttgtccgtaataacggaacaatggtctggcgtacctggaattttgaggactgtgccgggtactggatgaaccatgccatccgtgatttcgggattcttaagtaa

SEQ ID NO: 490910 - DNA, 189 bp, Shigella sonnei; identical to SEQ ID NO: 463227

SEQ ID NO: 490911 - DNA, 258 bp, Shigella sonnei; identical to SEQ ID NO: 490879

SEQ ID NO: 490912 - DNA, 210 bp, Shigella sonnei; identical to SEQ ID NO: 486270

SEQ ID NO: 490913 - DNA, 225 bp, Shigella sonnei
atgaaaacggtgaacggaacgcgaaatcctttcgcgggtcgtgaggcgttggacaagcgaagcgcgtcagtttttccggctcttacccgtgacaggtttctccaccagtttatcttccagtgtcacaactttctgatacaccgccgctgtggcgttgtagttcctgtcgagtattgttttcattccccatccgagcacacagaacataaccagaaaagccactga

SEQ ID NO: 490914 - DNA, 543 bp, Shigella sonnei; identical to SEQ ID NO: 490571

SEQ ID NO: 490915 - DNA, 582 bp, Shigella sonnei; identical to SEQ ID NO: 490383

SEQ ID NO: 490916 - DNA, 231 bp, Shigella sonnei; identical to SEQ ID NO: 27634

SEQ ID NO: 490917 - DNA, 144 bp, Shigella sonnei; identical to SEQ ID NO: 244907

SEQ ID NO: 490918 - DNA, 366 bp, Shigella sonnei; identical to SEQ ID NO: 462994

SEQ ID NO: 490919 - DNA, 267 bp, Shigella sonnei; identical to SEQ ID NO: 80745

SEQ ID NO: 490920 - DNA, 366 bp, Shigella sonnei; identical to SEQ ID NO: 10065

SEQ ID NO: 490921 - DNA, 435 bp, Shigella sonnei; identical to SEQ ID NO: 35931

SEQ ID NO: 490922 - DNA, 222 bp, Shigella sonnei; identical to SEQ ID NO: 8360

SEQ ID NO: 490923 - DNA, 426 bp, Shigella sonnei; identical to SEQ ID NO: 8372

SEQ ID NO: 490924 - DNA, 366 bp, Shigella sonnei; identical to SEQ ID NO: 10065

SEQ ID NO: 490925 - DNA, 366 bp, Shigella sonnei; identical to SEQ ID NO: 10065

SEQ ID NO: 490926 - DNA, 366 bp, Shigella sonnei; identical to SEQ ID NO: 10065

SEQ ID NO: 490927 - DNA, 258 bp, Shigella sonnei
ttgcgcctgagcgttctgctgtggtgcacgtcccagcatctgcacggtgcccgtggtcttaacaagaatttcagtgacgtaacgggtgataccgttatcttcccagctacgggtgcgaagctgaccttcgatgtagacctgcgcacccttgcgcagatattcacctgccacttccgcgagcttgccgaacagcaccacgcgatgccattctgtctgctcccgcatctcccccgtctgtttgtcacgccagctttctga

SEQ ID NO: 490928 - DNA, 420 bp, Shigella sonnei
atggtcggcatgtgggcgttcagctttattcttcgcttctttgatttgcaacgcattctgaccgtactggctggtctggctgcgattctgatgtacgtctttaacaccggaacaccagcacatatggcgtggtcaattctcgctctgggcttcttctccagcgcgatctataccaccatcatcaccctgggttcacagcagaccaaagtaccgtcgccaaaactggttaactttgtcctgacctgcggaaccatcggtactatgttgacctttgtggttaccggcccgattgttgaacatagcggtccgcaggcggcactgcttacagcaaacggtctgtacgctgtcgtctttgtgatgtgcttcctgttaggtttcgtcagccgtcaccgtcagcataacaccctgacctctcattaa

SEQ ID NO: 490929 - DNA, 2544 bp, Shigella sonnei; identical to SEQ ID NO: 483472

SEQ ID NO: 490930 - DNA, 189 bp, Shigella sonnei; identical to SEQ ID NO: 463227

SEQ ID NO: 490931 - DNA, 189 bp, Shigella sonnei; identical to SEQ ID NO: 463227

SEQ ID NO: 490932 - DNA, 1092 bp, Shigella sonnei; identical to SEQ ID NO: 485042

SEQ ID NO: 490933 - DNA, 189 bp, Shigella sonnei; identical to SEQ ID NO: 463227

SEQ ID NO: 490934 - DNA, 381 bp, Shigella sonnei; identical to SEQ ID NO: 458903

SEQ ID NO: 490935 - DNA, 549 bp, Shigella sonnei; identical to SEQ ID NO: 489541

SEQ ID NO: 490936 - DNA, 189 bp, Shigella sonnei; identical to SEQ ID NO: 463227

SEQ ID NO: 490937 - DNA, 189 bp, Shigella sonnei; identical to SEQ ID NO: 463227

SEQ ID NO: 490938 - DNA, 303 bp, Shigella sonnei
atgatggtcagatattatatcagttctgctgatttaaccgctgagaagtttgcgacagcgattcgaaatcactggcacgtggagaataatctgcactggcgtctggacgtggtaatgaatgaagacgactgcaaaataagaagaggaaatgcagcagaattattttcagggatacggcacattgctattaatgttttgacgaatgataaggtattcaaggcagggttaagacgtaagatgcgaaaagcagccatggatagaaactatctcgcgtcagtccttgcggggagcgggctttcgtaa

SEQ ID NO: 490939 - DNA, 189 bp, Shigella sonnei; identical to SEQ ID NO: 463227

SEQ ID NO: 490940 - DNA, 480 bp, Shigella sonnei; identical to SEQ ID NO: 464934

SEQ ID NO: 490941 - DNA, 366 bp, Shigella sonnei; identical to SEQ ID NO: 462994

SEQ ID NO: 490942 - DNA, 207 bp, Shigella sonnei; identical to SEQ ID NO: 488007

SEQ ID NO: 490943 - DNA, 201 bp, Shigella sonnei; identical to SEQ ID NO: 488102

SEQ ID NO: 490944 - DNA, 342 bp, Shigella sonnei; identical to SEQ ID NO: 477302

SEQ ID NO: 490945 - DNA, 1659 bp, Shigella sonnei
atgaaaatagtgattgttggtggtgttgccgggggagcatccgctgcagccagggctcgtcggttatcagaggatgtcagtattgttgtgtttgagcggggaagcgatgtctctttcgccaactgtggattgccttatcatataggcggaaaaattccgttacggcagtcgctgattctgaaaaccccggaggattttaaatcccgttttaacatagacgtccgtatccgtcatgaagtgatgtcagtagacccggttaataagatggtgacggttaaaaatctgacctccggggaggtctataccgaagaatgggatcgtctgctcctcagtaccggtgccgctccggttgttccccccttgcccggactacaggaagcgggtgtctttacactgcgaaatcttactgacatggatgctatccaggcgtggattgagcaacataatatcgctcacaccacgcttgtcggggggggatttatcgggctcgaagtgatggaggcactgagcgaaagggggatcagtgtgaccctgctggagatgggggaacaggttatggctccggttgatcctgaaatggcatcggccctgcatcaggaaatcaggagtcatggcgtggatctgcgtctcagaacggcgctcaccgaggtactgcggacagagacgggattccgcgttgcactgtctgacggtgggtttctgcagaccgacatggttattctcgccatcggggtaaaacctgagagcagccttgccacaggagccgggctcgccgtgggtaaacggggaggcataagtgtcaatgcctgtatgcagacaagtatccctgacatctatgccgtgggggatgcagttgaaacacctgaccttgtctttcaggaacccgctaatgttcctctggcagggccagccaaccgccagggacgcattgctgctgataatatgctcgatcgtcacagcctttaccatggcagtcaggggacatccatttgtaaggtattttcgctgagtattggcagtgtcggggcgaatgaaaagcagctgaaagcccatggtacccgatacgagaaggtttacgtccatgccgctgatcatgccagttactacccgggggcaacaatgatcagcctgaaactgctgttcagccccgataccggtaaaattctcggggcccaggcgtcagggaaaaaaggggttgataaacgcatcgatgtcctggctgtcgtacagcgcgcggggcttaccgttaacgatctcgagcatctggagctgacctatgctccgcctttcaacagtgcaagggacgtcgttaaccaggctggaatggtggcggcaaatgttatcaagggcgatacggtcatctgtcatgtccgcgatgtgttacaacgggaaccgggcagttattgtttacttgatattcgttctcctgcggaactgaaacaatttggtgaatatcctgacgcgctatccatccctcttgattccctgcgggagaatcttgataagttgcctgaagataaagagattattatcgggtgtcagagtggtctgcgggggcatgtggcataccgtatgcttcagtctcacggcttccggacatataatctgagtggtggctttataacttggcaggcggttacggaatcaatgagtcaataa

SEQ ID NO: 490946 - DNA, 534 bp, Shigella sonnei
atggcgaacaaatttgtggtaattatcccagaatggaatattttcctcatcaaaccagtgagaataagaggttatccaggtcagatttttatgtggcgcgccttgtttcttatcttgcaaccagggcagcaaggaaacaccatccagcttaaggtcttttggaatgctgatatcggctgcatcaagagctgttgggtagaaatccattgcggaaatcagcttgtcataattaccgggttgaagttttcctttccaccacataaacattggggtgtgagtaccgccaggataggtctgactcttatagcctttttgcgccccgttcagcggcagaggaccatcgataaccgcaccattatcggaggtaaagagaataattgtattgtcatactgtccgtttttcttcagttgttcgagaatgcgttttacaccctgatcaacagaataaacggaagcgtagtagttatctgctgtttgactaccggtattaaattgcttctgatattgatccggtgcaggattatcatttggtag

SEQ ID NO: 490947 - DNA, 156 bp, Shigella sonnei; identical to SEQ ID NO: 489386

SEQ ID NO: 490948 - DNA, 366 bp, Shigella sonnei; identical to SEQ ID NO: 462994

SEQ ID NO: 490949 - DNA, 366 bp, Shigella sonnei; identical to SEQ ID NO: 10065

SEQ ID NO: 490950 - DNA, 366 bp, Shigella sonnei; identical to SEQ ID NO: 10065

SEQ ID NO: 490951 - DNA, 366 bp, Shigella sonnei; identical to SEQ ID NO: 462994

SEQ ID NO: 490952 - DNA, 471 bp, Shigella sonnei; identical to SEQ ID NO: 488965

SEQ ID NO: 490953 - DNA, 543 bp, Shigella sonnei; identical to SEQ ID NO: 490571

SEQ ID NO: 490954 - DNA, 504 bp, Shigella sonnei; identical to SEQ ID NO: 485763

SEQ ID NO: 490955 - DNA, 504 bp, Shigella sonnei; identical to SEQ ID NO: 485763

SEQ ID NO: 490956 - DNA, 642 bp, Shigella sonnei
atgaacgacgtgttcctgaaacgcctgacggcccccaccattaccagcggtggaaatccatcggcattttccctgacatcagacgggagactgaccgctaaaaatgcggatatcagtggcagtgtgaatgcgaacgccgggacgctcaacaatgtcacggtaaatgaaaactgtacgattaagggcatgctggaggcgactcaggtcagaggtgacttcgttaaagctgtatccaaatcatttccgaaacaggctggtacgtggggtaacacggaaacaccaaacgggacggttacagtcaccataagcgatgatcataactttgaccgccagattattattccgcccattatttttaacggtatagcgtatgacgatccggggagcggaaataacccaggaggcacgcgatacacgggttatggttttgaagttcgcaaaaacggcgtattaatcgcatccagagaaactaaaggtgccattcccggtagttacagtgcagttattgatatgcctagtggtggtggtagcgtcactctggagtttaagattttccagaaaggcaatcagggggcaggcaatatcaccgactgtacggtgattgtgaccaaaaaagcggcttccggcatcagtattcgttga

SEQ ID NO: 490957 - DNA, 354 bp, Shigella sonnei; identical to SEQ ID NO: 466835

SEQ ID NO: 490958 - DNA, 384 bp, Shigella sonnei
gtgaaagcgaagaagcaggaaactgccgcgaccatgaaagacgttgccctcaaggcaaaagtctctacagcgactgtctcccgagcattaatgaatcccgataaagtctcccaggccacccgtaatcgggttgaaaaagcggcccgggaagtgggttatttaccgcagcctatggggcgcaacgtcaagcgtaatgaatcccgcaccattctggtgattgtcccggatatctgcgatcccttctttagcgaaattattcgcggtatcgaagttacggcggcaaatcacggatatctggtgctgattggcgactgtgcgcatcaaaatcagcaggaaaaaacctttatcgatttgatcatcaccaagcaaattgatggcatgtag

SEQ ID NO: 490959 - DNA, 129 bp, Shigella sonnei
atgttgcttgcaaaaatcgtggcgattttatgtgcgcatctccacattaccgccaattctgtaacagagatcacacaaagcaacggtggggcgtgggggcaaggaggatggaaagaggttgccgtataa

SEQ ID NO: 490960 - DNA, 225 bp, Shigella sonnei; identical to SEQ ID NO: 133446

SEQ ID NO: 490961 - DNA, 384 bp, Shigella sonnei
atggccattgattctggcttgatggaatataagcaatacttgaaaaagcatacagatcttgagttagcacgttttttccaaaggtctgaagaagaaaatgctgatttaaagagtgcagagaataatgattattcattgttttccctcttgcctgcatatgcgctaagtgaaatcaaagatgcgttcaaaataggtttttatttatatttgccatttgttgttgttgatcttgttatttcaagcattttacttgcacttggtatgatgatgatgagtccaatcacaatatcagtaccaataaaacttgtattatttgttgcgcttgatgggtggggtatcctgtctaaggccttgattgaacaatatatcaatgttcctgcttag

SEQ ID NO: 490962 - DNA, 282 bp, Shigella sonnei
atgacgaaagagttgacgggtaaagccctgtttatggcgctcaggagccagcacccacctgccgggctaatccaccactccgatcgaggttcacagtactgcgcatacgattaccgggtcatacaggagcagtctggtctgaaaacatcaatgtcgcgtaaaggtaactgttacgacaacgctccgatggaaatcttctggggaacgctgaaaaatgaaagcctgagccactatcgttttaagagccgggatatttcgtcagcatacgggaaaactgattga

SEQ ID NO: 490963 - DNA, 930 bp, Shigella sonnei
atggtggatttgtgcaacgacttgttaagtataaaggaaggccaaaagaaagagtttacactccattctggtaataaagtttcctttatcaaagccaagattcctcataaaaggatccaagatttaaccttcgtcaaccaaaaaacgaatgtacgcgatcaagaatccctaacagaagaatcattagccgatatcataaaaactataaagctacaacaattcttccctgtaataggaagggagattgatggtagaattgaaattctggatggcactcgtagaagagcatctgcaatatatgcaggagcagatcttgaagttctatattcaaaagaatatatatctactcttgatgccagaaaactagcaaacgatatacaaacagcaaaagagcatagcatccgagaacttggtatcggtcttaattttctgaaagtatcagggatgtcctataaagacatagccaaaaaagagaatctgtctcgcgcgaaagtcactcgtgcctttcaggcagcaagcgttccacaggaaataatatctctatttccaatcgcgtcagaacttaactttaatgactacaagatattattcaattattataaaggacttgaaaaggctaatgaatctcttagttctacactaccaatattaaaggaagaaataaaagaccttgatacaaatttgcccccggacatatataaaaaagaaattttaaacatcataaagaaaagcaaaaacagaaagcaaaacccttcgctaaaagttgactcgttatttatttctaaagacaaacggacttacataaaaagaaaagagaataaaacaaacagaactctaatatttacattatctaaaataaacaaaacagttcagagagaaatagatgaagctattcgggatataatttctcgccatctatcgtcttcataa

SEQ ID NO: 490964 - DNA, 1743 bp, Shigella sonnei
atgcataatgtaagtaccacaaccactggtttgtctcttgccaaaatattggcttccactgagcttggagacaatactatccaggctgcaaatgatgcagctaacaaattattttctcttacaattgctgatcttactgctaacaaaaatattaatacaactaattcacactcaacttcaaatatattaatccctgaacttaaagcaccaaagtcattaaatgcaagttcccaactaacgcttttaattggaaaccttattcaaatactcggtgaaaaatctttaactgcattaacaaataaaattactgcttggaagtctcagcaacaggcaagacagcaaaaaaacctagaattctccgataaaattaatactcttctatctgaaactgaaggactaaccagagactatgaaaaacaaattaataaactaaaaaacgcagattctaaaataaaagacctagaaaataaaattaaccaaattcaaacaagattatccgaactcgacccagattcaccagaaaagaaaaaattaagccgggaagaaatacaactcactatcaaaaaagacgcagcagttaaagacaggacattgattgagcagaaaaccctgtcaattcatagcaaacttacagataaatcaatgcaactcgaaaaagaaatagactctttttctgcattttcaaacacagcatctgctgaacagctatcaacccagcagaaatcattaaccggacttgccagtgttactcaattgatggcaacctttattcaactagttggaaaaaataatgaagaatctttaaaaaatgatctggctctattccagtctctccaagaatcaagaaaaactgaaatggagagaaaatctgatgagtatgctgctgaagtacgtaaagcagaagaactcaacagagtaatgggttgtgttgggaaaatacttggggcacttttaactatcgttagtgttgttgcagcagctttttctggaggagcctctctagcactggcagctgttggtttagctcttatggttacggatgctatagtacaagcagcgaccggcaattccttcatggaacaagccctgaatccgatcatgaaagcagtcattgaacccttaatcaaactcctttcagatgcatttacaaaaatgctcgaaggcttgggcgtcgactcgaaaaaagccaaaatgattggctctattctgggggcaatcgcaggcgctcttgtcctggttgcagcagtagttctcgtagccactgttggtaaacaggcagcagcaaaacttgcagagaatattggcaaaataataggtaaaaccctcacagaccttataccaaagtttctcaagaatttttcttctcaactggacgatttaatcactaatgctgttgccagattaaataaatttcttggtgcagcgggtgatgaagtaatatccaaacaaattatttccacccatttaaaccaagcagttttattaggagaaagtgttaactctgccacacaagcgggaggaagtgtcgcttctgctgttttccagaacagcgcgtcgacaaatctagcagacctgacattatcgaaatatcaagttgaacaactgtcaaaatatatcagtgaagcaatagaaaaattcggccaattgcaggaagtaattgcagatctattagcctcaatgtccaactctcaggctaatagaactgatgttgcaaaagcaattttgcaacaaactactgcttga

SEQ ID NO: 490965 - DNA, 273 bp, Shigella sonnei
atgactaccgttactgttcattgtccgcgctgtcattccgatgaagtttatcgacatggccgtagttgttcccggcatgagcgtttccgttgtcgctcatgtaaacgtgttttccagctcacttactcttatgaagccagaaaacccggcgttaaggagcagatcgttgaaatggcacataacggcgcagggggctgttataccgccagaacactgaaaatcggcatcaataccgtcatacggacattaaaaagctctcgccccggcggataa

SEQ ID NO: 490966 - DNA, 255 bp, Shigella sonnei
ttgttgatagtgaataactttacggaaaaaatccaggccagccagagtgggttcaccgccttgccaggtaaaatagacctgattgccagacgcttcgatatattgtttgatgaactctttcagagtgctgtcatccatccatttttcatgagtaaactgcgactctttttcaaggtaaaaacagtaatcacatttgagattacattgaaaactggagggcttggctgtaacgtgcatcgctatctcgctcaataa

SEQ ID NO: 490967 - DNA, 273 bp, Shigella sonnei; identical to SEQ ID NO: 488057

SEQ ID NO: 490968 - DNA, 141 bp, Shigella sonnei; identical to SEQ ID NO: 463018

SEQ ID NO: 490969 - DNA, 225 bp, Shigella sonnei; identical to SEQ ID NO: 133446

SEQ ID NO: 490970 - DNA, 225 bp, Shigella sonnei; identical to SEQ ID NO: 133446

SEQ ID NO: 490971 - DNA, 999 bp, Shigella sonnei
atgaatataacaactctgactaatagtatttccacctcatcattcagtccaaacaataccaacggttcatcaaccgaaacagttaattctgatataaaaacaacgaccagttctcatcctgtaagttcccttactatgctcaacgacacccttcataatatcagaacaacaaatcaggcattaaagaaagagctttcacaaaaaacgttgactaaaacatcgctagaagaaatagcattacattcatctcagattagcatggatgtaaataaatccgctcaactattggatattctttccaggaacgaatatccaattaataaagacgcaagagaattattacattcagccccgaaagaagccgagcttgatggagatcaaatgatatctcatagagaactgtgggctaaaattgcaaactccatcaatgatattaatgaacagtatctgaaagtatatgaacatgccgttagttcatatactcaaatgtatcaagattttagcgctgttctttccagtcttgccggctggatctctcccggaggtaacgacggaaactccgtgaaattacaagtcaactcgcttaaaaaagcattggaagaactcaagaaaaaatatgaagataaaccgctatatccagcaactaatactgttagtcagaaagaagcagataaatggcttacagaattaggtggaacaatcggcaaggtatctaaaaaaaacgggggatatgttgtcaatataaacatgaccccaatagacaatatgttaaaaagcttaaataatctaggtggaaatggcgaggttgtgctagataatgcaaaatatcaggcatggaatgccggattctctgccgaagatgaaacaatgaaaaataatcttcaaactttagttcaaaaatacagtaatgccaatagtatttttgataatttagtaaaggttttgagtagtacaataagctcatgtacagatacagataaactttttctccatttctga

SEQ ID NO: 490972 - DNA, 918 bp, Shigella sonnei
atggcttccgctctttcgtcatttataaacagaagagaccttgagaaactgaaaggaacaaatagtgatagtcaggaacgtattttagatggggaagaagatgaaattaatcacaagatttttgatttaaagagaacgttaaaagataaccttcctctagatcgggattttatagacagactaaagagatattttaaagatccaagtgatcaagtcttagcattaagggaacttttgaatgaaaaagatcttactgctgaacaagtcgaatcattaactaaaattattaatgagataatatcaggtagtgaaaaaagtgttaatgctggaataaattcagctatacaggctaaattatttggcaacaaaatgaaacttgaaccacagcttttgcgtgcatgttatcgtggttttatcatggggaacatatcaacaacagatcagtatatagaatggcttggtaattttggttttaatcacagacatacaattgtgaattttgtagagcagtcactgattgtagacatggattctgagaaaccgagctgtaatgcttatgagtttggttttgtgttatctaaattaattgcaattaagatgattagaacttcagacgtaatttttatgaagaaactggaatcctcaagcttgctaaaagatggcagtttaagtgcagagcagctattgctaactttattatatatttttcaatatccaagtgaaagtgagcaaattcttacttctgttatagaagtatcacgagccagtcatgaggattctgtagtgtatcaaacatatctatcttctgttaatgaaagtcctcatgatatatttaaaagtgaaagtgaaagagaaattgcgatcaatattctacgagagcttgtcacaagtgcatacaagaaagagctttctagataa

SEQ ID NO: 490973 - DNA, 624 bp, Shigella sonnei
gtgatccagtcttttcttaagcaagtaagtactaagcctgaattaattatattagtgcttatggttatgatcattgctatgttgatcataccattacctacataccttgttgattttttaatagggcttaatattgtacttgctattctcgtttttatgggatcattttatattgaaagaatattgagtttttctacattcccttcggttttgttgataacgacattatttcgtctcgctttatcaataagtactagtcgactaattttagttgatgcggatgcgggtaaaattattactacatttggccagtttgtcattggtgatagtctggctgtaggttttgttattttttcaatagtaactgttgtgcagttcattgttataacaaaaggatctgaaagggttgcggaggtagctgctcgcttttctcttgacggtatgccggggaaacaaatgagcattgatgcggatttaaaggctggaattattgatgccgcaggagctaaagaaagacgcagtattctggaacgtgagagtcaattgtatggttcatttgatggagcaatgaagttcattaaaggtgatgcaattgctggcatcattattataattgtaatttga

SEQ ID NO: 490974 - DNA, 1287 bp, Shigella sonnei; identical to SEQ ID NO: 486968

SEQ ID NO: 490975 - DNA, 804 bp, Shigella sonnei; identical to SEQ ID NO: 485810

SEQ ID NO: 490976 - DNA, 363 bp, Shigella sonnei
atggaagatttagcagatgttatttgccgagccttgggtatccctttaattgatatcgatgatcaagcaatcatgcttgatgatgatgtgctaatatatattgaaaaagaaggagattcaataaatttattatgccctttttgtgcattgcctgaaaatataaatgatcttatatatgcgttgagcctaaattactcagaaaagatatgcttagctactgatgatgaaggcggaaatctaattgcgcgattagatcttaccgggataaatgaattcgaggatgtatatgttaatacagaatattatatttcgcgtgtgcgttggctgaaggatgaatttgcgcgaagaatgaaggggtattaa

SEQ ID NO: 490977 - DNA, 276 bp, Shigella sonnei
atgcaggatgctgaaattaaaagagaaataataagaaaacatgaaacaggtcagttttctcaattaaatagtaaattatcctcagaagagaaaagattattttctactattctaatgaatagtggtaatatggaaatccaagagatgaatactggtgtgcccggaaataaagtcatgaaaaaattgccgctatcttcgttagagctatcttattctgaaagaataggggactcaaaaatatggaatatggtgaaagggtattcgtcatttgtataa

SEQ ID NO: 490978 - DNA, 306 bp, Shigella sonnei
atgtgtcgcaaactatatgataaactttatgaaataacaggtgcaaagcttgattttaacgataaaaatcaagcctttatattgctcgaagaacaaatacctgtttgtataacagataatgatgaatacatctttttgaccggacttcttaatgaacatgaactttttacagaaaatattattaatccagaacacatactcatccttaactactctttgagtagagattatggttcttctatctgtcttctccctgatactcatcaatgtgttttgaccgagtatttgaataaggtttccaattaa

SEQ ID NO: 490979 - DNA, 411 bp, Shigella sonnei
atgaagtatattgaatctgattttgatctttccagattgactcaattacgacgtagctatcttaaaagtttcaataaaattaaccttatccacaccccaaaaacattcaagcctttatcaatttcactttacaaacatcctactgaaaatgtatcttcagaagactttgatgcggtcatcaacgcttgccactcatacttagtaaaatcagcacccagcaatatgtctcgtgtattaaacgaattaaaaaccggagcaacagataaaaaagaagaaattatcgaaaagtcaataaaaactattgattattacaattctcttaaatcgccagatcttggaaccaaactttacattcacgacttattacaggtcaataagcttttattgaataactctcattctaatatatag

SEQ ID NO: 490980 - DNA, 225 bp, Shigella sonnei; identical to SEQ ID NO: 133446

SEQ ID NO: 490981 - DNA, 516 bp, Shigella sonnei; identical to SEQ ID NO: 474713

SEQ ID NO: 490982 - DNA, 366 bp, Shigella sonnei; identical to SEQ ID NO: 487772

SEQ ID NO: 490983 - DNA, 141 bp, Shigella sonnei
atggcgttcagtccatgcatcggaatagatgtattccgcgccgaagtagggttgatgcgaaacatcacccacggcgaatttttgccagtccaggcgtgttttgaaggtgtaattatctacagcctgggaaatgtgtcctaa

SEQ ID NO: 490984 - DNA, 498 bp, Shigella sonnei
atgcaaattctaaacaaaatacttccacaggttgaattcgcgattcctcgcccatcatttaattcgttaagttacaataagcttgtaaagaaaatattatctgtttttaacttaaaacaacgctttcctcagaagaattttggatgcccggtgaatataaataaaatcagggacaacgtcatagacaaaataaaagatagtaattcggggaatcaactattttgttggatgagccaagagcgaacctcttatgtctcttcaatgataaacagaagtatagatgaaatggccatacacaatggagttgttttgacctcagataacaaaaaaaacatatttgcagctattgaaaaaaaattcccggatataaaacttgatgaaaaatcagcacaaacatctatcagtcatacagcactaaacgagattgcctcatctggcctcagagcaaagattttaaaacgctatagcagtaacatggatttcgtagttaagatctga

SEQ ID NO: 490985 - DNA, 225 bp, Shigella sonnei; identical to SEQ ID NO: 133446

SEQ ID NO: 490986 - DNA, 294 bp, Shigella sonnei; identical to SEQ ID NO: 475685

SEQ ID NO: 490987 - DNA, 138 bp, Shigella sonnei; identical to SEQ ID NO: 480428

SEQ ID NO: 490988 - DNA, 273 bp, Shigella sonnei
atgtcacacaacctggagcaccagaaagtccacaccagaatggtgaaagaggttctgaaagccgtcgccagagccaataatcacccttatcagtccgtatttgcagactttatcaccggtcatccctcctgcacggtctgtttctgggaaaccttccacaaaatgtacccggattcaccgtacgaatacgtcacgttctgccatacctgccgtcgttttgatttatacgaaacagaagcggagatgaaggcggatgacccgaagtggtggtga

SEQ ID NO: 490989 - DNA, 291 bp, Shigella sonnei; identical to SEQ ID NO: 467055

SEQ ID NO: 490990 - DNA, 255 bp, Shigella sonnei; identical to SEQ ID NO: 486211

SEQ ID NO: 490991 - DNA, 189 bp, Shigella sonnei; identical to SEQ ID NO: 463227

SEQ ID NO: 490992 - DNA, 387 bp, Shigella sonnei; identical to SEQ ID NO: 485815

SEQ ID NO: 490993 - DNA, 267 bp, Shigella sonnei; identical to SEQ ID NO: 11114

SEQ ID NO: 490994 - DNA, 327 bp, Shigella sonnei; identical to SEQ ID NO: 486130

SEQ ID NO: 490995 - DNA, 360 bp, Shigella sonnei; identical to SEQ ID NO: 372517

SEQ ID NO: 490996 - DNA, 222 bp, Shigella sonnei; identical to SEQ ID NO: 14519

SEQ ID NO: 490997 - DNA, 1122 bp, Shigella sonnei; identical to SEQ ID NO: 490190

SEQ ID NO: 490998 - DNA, 438 bp, Shigella sonnei; identical to SEQ ID NO: 490192

SEQ ID NO: 490999 - DNA, 450 bp, Shigella sonnei; identical to SEQ ID NO: 14533

SEQ ID NO: 491000 - DNA, 177 bp, Shigella sonnei; identical to SEQ ID NO: 490282

SEQ ID NO: 491001 - DNA, 540 bp, Shigella sonnei; identical to SEQ ID NO: 490175

SEQ ID NO: 491002 - DNA, 1290 bp, Shigella sonnei
atgagtgctgaacaggatgccggtaaatccggaaagaaactggctgccttgcttggactgggcagcatcatcttatttggcggcggctatatcgcgttttccaaactatcagggagtaacagcgatatgcagtcagccgtgaacattaacagtgcagcaagcggcggaacgcgcagcgttaccgaaacgcctcactatcgtgaactgttaagagcggataatgaacgaggggccgcagctgcagcccgcaataatcagacgttcattgccagtcttccacaggggcttgatattccggacactccggaaaagcaacaacagcctgcagcaaaaccggaaaactatgctcatcgccaggcttccggcacaccacaggaggatcgagcagccagtgaaaaacgtatggagcggctgcaaaagctgattgtaagaataaaagatcagcatcctgccggtagtacaccaaccatagcaacgactatgtggaataaatctccggcagaaacaacagggcagaatggtacgcagcaattcgcattacagaatgccagcctgtccacgcctgtagcagaaaaagggatacaactgatacctgctctgacccgtataccggcatatattgatactgcagtggattctgataacccgtcatccaaggttatcgcaaccattcccgctggcccctgggcaggggcaacgctgttcagtccgggagtcaaactggtgggtaacggcgtggagatccatttcgaccggatgagctggaacggcatggaccttaaggtcaatgcatatgctcaacgggaagacaacctgatgtcatccgtggccagcaatgtgaatacacgctggtttaaacatatcattctgccgtcagtgttaggaggtgtgggcagtattggcacactttataaagatgccaacacgcaggttattcagggtaactatggcacggttaccggacgcgtgggaatgcccagtggtgaagctgttgcgggcgttattgccggtggtatggcggaaagaggaagtcagatattaacccgccaggcagaaagtgagccctataaacaggtagaagtgtatcagcatgaagtcgtatcaattctgtttgttgacccggtaatgacaaacgacgccaggtcatcttccctttccagtggcatttccccttcagttaatcgtacatcacaggcggaacaacgctcgcaggcacgaatgcagacagccatggagcaaagaaaagctgtgatgcaacgtcggtatgatgaacaaccggagacaccataa

SEQ ID NO: 491003 - DNA, 612 bp, Shigella sonnei; identical to SEQ ID NO: 488262

SEQ ID NO: 491004 - DNA, 366 bp, Shigella sonnei; identical to SEQ ID NO: 10065

SEQ ID NO: 491005 - DNA, 642 bp, Shigella sonnei
atgaatgaagtgttcctgaaacgcctgacggcccccaccattaccagcggcggtaatcctccggcattttccctgacatcagacgggagactgacggcgaaaaatgcggatatcagtggcagtgtgaatgcgaactcaggaacgctcaacaatgtcacgattaaccagaactgtacgattaagggcatgctggaggcgacccaggtcagaggagatttcgttaaagctgtatcaaaagccttcccgaaaaaagtcggtacgtggggtaacacggaaacaccaaacggtacggttacagtcaccatcagcgatgatcataactttgaccgccagattattattccgcccattatttttaacggtatagcgtatgacgatccggggagcggaaataacccgggaggcacgcgatacacgggttatggttttgaagttcgcaaaaacggcgtattaatcgcatccagagaaactaaaggggccattcccggtagttacagtgcagttattgatatgcctagtggtggtggtagcgtcactctggagtttaagattttccagaaaggcaatcagggggcaggcaatatcaccgactgtacggtgattgtgaccaaaaaagcggcttccggcatcagtattcgttga

SEQ ID NO: 491006 - DNA, 366 bp, Shigella sonnei; identical to SEQ ID NO: 10065

SEQ ID NO: 491007 - DNA, 348 bp, Shigella sonnei
atgatcccgttaccttccgggatcaaaatttggctggttgccggtatcaccgatatgagaaatggcttcaacggccttgctgcgaaagtacagacggcgctgaaagacgatcccatgtccggccatgttttcattttccggggccgcagcggcagtcaggttaaactgctgtggtccaccagtgacggactgtgcctcctgaccaaacggctggagcgtgggcgcttcgcctggccgtcagcccgtgatggcaaagtgttccttacacaggcgcagctggcgatgctgctggaaggtatcgactggcgacagcctaagcggctgctgacctccctgaccatgctgtaa

SEQ ID NO: 491008 - DNA, 186 bp, Shigella sonnei; identical to SEQ ID NO: 462789

SEQ ID NO: 491009 - DNA, 504 bp, Shigella sonnei; identical to SEQ ID NO: 485763

SEQ ID NO: 491010 - DNA, 504 bp, Shigella sonnei; identical to SEQ ID NO: 485763

SEQ ID NO: 491011 - DNA, 189 bp, Shigella sonnei; identical to SEQ ID NO: 463227

SEQ ID NO: 491012 - DNA, 378 bp, Shigella sonnei
atgatttcccgctatttcactcactccttaaatgtagtgaaatattataactcaccgcgtcaatataattttttcttgaccagaaaagaatctgtcgttcttaatgaagtactcaatcgatttgttgatgctttgacaaatgaagttcgctatgaagtatcacaaaattggcttgatacaggaaacctggcctttctgaacaaaccattagaactcactgaacatgaaaaacaatggattaagcagcatcccgatttaaaggtgctggaaaatccttactcccctccctattctatgacggatgaaaatggctcggttcggggcgttatgggggataatttgctactcgagcaatatttactggttttgatgaggtaa

SEQ ID NO: 491013 - DNA, 420 bp, Shigella sonnei
ttgctgaataaaaccacctttggtcgtaacaccctggcgattggcgggaacgaagaggctgcgcgtctggcgggtgtaccggttgttcgcaccaaaattattatctttgttctctctggcctggtatctgcgatagccggaattattctggcttcacgtatgactagtgggcagccaatgacgtcgattggttatgagcttattgttatctccgcctgcgttttaggtggcgtttctctgaaaggtggcatcggaaaaatctcatatgtggtggcgggtatcttaattttaggcaccgtggaaaacgccatgaacctgcttaatatttctcctttcgcgcagtacgtggttcgcggcttaatcctgctggcagcggtgatcttcgaccgttacaagcaaaaagcgaaacgcactgtctga

SEQ ID NO: 491014 - DNA, 219 bp, Shigella sonnei; identical to SEQ ID NO: 15446

SEQ ID NO: 491015 - DNA, 357 bp, Shigella sonnei
  misc_feature (148)..(157): n is a, c, g, or t
atggacattgagttttcgcagattcatgaaatggtctatatgcatgatattgtaaattcggactcgaaaaagaaaccaaggattccgttaaaaaaattccttaatgctgagaatgttctcacgcaaacaacatcatggacattaaatnnnnnnnnnnatgtaaaatatcatgtatcaaccacatcatggacattaaattcaagatatgtgaatgttaattctgtcaataaagtcaacgtaaagagtaaagttaaaaacagttatatctcacgatctgtcaatgatgagtttagtttaacagatgatgaaatcaattcttttaaagaaacgttagtcctttcctctattgattcctga

SEQ ID NO: 491016 - DNA, 1779 bp, Shigella sonnei
gtgagtatccgtgagaacgacgacggcacgtatgccatcaccgccgtgcagcatgtgccggaaaaagaagccatcgtggataacggggcgcactttgacggcgaccagagcggcacggtgaatggtgtcacgccgccagcggtgcagcacctgactgccgaagtcaccgcagacagcggggaatatcaggtgctggcgcgctgggacacgccgaaggtggtgaagggcgtgagcttcctgctccgtctgaccgtaacagcggatgacggcagtgagcggctggtcagcacggcccggacgacggaaaccacttaccgcttcacacaactggctctggggaactacaggctgacagtccgggcagtaaatgcgtgggggcagcagggcgatccggcgtcggtatcgttccggattgccgcaccggcagcgctgtcgcggattgagctgacgccgggctattttcagataaccgccacgccgcatcttgcggtttatgacccgacggtacagtttgagttctggttctcggaaaagcggattgcggatatcaggcaggttgaaaccagcgcccgctatcttggcacggcgctgtactggatagccgccagtatcaatatcaaaccgggccatgattattatttttacgttcgcagtgtgaacaccgttggcaaatcggcattcgtggaggctgtcggtcagccgagtgatgatgcatcaggctatctggattttttcaaaggcgagatagggaaaacccatctggctcaggagctgtggacgcagattgataacggtcagcttgcgcctgacctggctgaaatcaggacgtccattacggatgtcagcaatgaaatcacgcagaccgtcaataagaaactggaagaccagagtgcggcaattcagcagatacagaaggttcaggttgatacaaataataacctgaacagcatgtgggctgtgaagctgcagcagatgcaggacggacgcctttatatcgcgggtattggtgccggtattgagaacacccctgacggcatgcagagtcaggtgctgctggcggcagacaggattgcgatgattaatcctgcgaatggcaacacaaagccgatgtttgttggtcagggcgatcagatattcatgaacgacgtgttcctgaaacgcctgacggcccccaccattaccagcggtggaaatccatcggcattttccctgactccggacggaaagctgaccgctaaaaatgcggatatcagtggcagtgtgaatgcgaacgccgggacgctcaacaatgtcacggtaaatgaaaactgtacgattaagggcatgctggaggcgactcaggtcagaggtgacttcgttaaagctgtatccaaatcatttccgaaacaggctggtacgtggggtaacacggaaacaccaaacgggacggttacagtcaccataagcgatgatcataactttgaccgccagattattattccgcccattatttttaacggtatagcgtatgacgatccggggagcggaaataacccaggaggcacgcgatacacgggttatggttttgaagttcgcaaaaacggcgtattaatcgcatccagagaaactaaaggggccattcccggtagttacagtgcagttattgatatgcctagtggtggtggtagcgtcactctggagtttaagattttccagaaaggcaatcagggggcaggcaatatcaccgactgtacggtgattgtgaccaaaaaagcggcttccggcatcagtattcgttga

SEQ ID NO: 491017 - DNA, 1779 bp, Shigella sonnei
gtgagtatccgtgagaacgacgacggcacgtatgccatcaccgccgtgcagcatgtgccggaaaaagaagccatcgtggataacggggcgcactttgacggcgaccagagcggcacggtgaatggtgtcacgccgccagcggtgcagcacctgactgccgaagtcaccgcagacagcggggaatatcaggtgctggcgcgctgggacacgccgaaggtggtgaagggcgtgagcttcctgctccgtctgaccgtaacagcggatgacggcagtgagcggctggtcagcacggcccggacgacggaaaccacttaccgcttcacacaactggctctggggaactacaggctgacagtccgggcagtaaatgcgtgggggcagcagggcgatccggcgtcggtatcgttccggattgccgcaccggcagcgctgtcgcggattgagctgacgccgggctattttcagataaccgccacgccgcatcttgcggtttatgacccgacggtacagtttgagttctggttctcggaaaaacggattgcggatatcaggcaggttgaaaccagcgcgcgttatcttggtacggcactgtactggatagccgccagtatcaatatcaaaccgggccatgattattatttttacgttcgcagtgtgaacaccgttggcaaatcggcattcgtggaggctgtcggtcagccgagtgatgatgcatcaggctatctggattttttcaaaggcgagatagggaaaacccatctggctcaggagctgtggacgcagattgataacggtcagcttgcgcctgacctgactgaaatcaggacgtccataacggatgtcagcaatgaaataacacagaccgtcaataagaaactggaagaccagagtgcagcgatccagcagatacagaaggttcaggttgatacaaataataacctgaacagcatgtgggcagtgaagctgcagcagatgcaggacggacgcctttatattgcgggtatcggtgccggtattgagaacacccctgacggcatgcagagtcaggtgctgctggcagcagacaggattgcgatgattaatcctgcgaatggcaacacaaagccgatgtttgttggtcagggcgatcagatattcatgaatgaagtgttcctgaaacgcctgacggcccccaccattaccagcggcggtaatcctccggcattttccctgacatcagacgggagactgacggcgaaaaatgcggatatcagtggcagtgtgaatgcgaactcaggaacgctcaacaatgtcacgattaaccagaactgtacgattaagggcatgctggaggcgacccaggtcagaggagatttcgttaaagctgtatcaaaagccttcccgaaaaaagtcggtacgtggggtaacacggaaacaccaaacggtacggttacagtcaccatcagcgatgatcataactttgaccgccagattattattccgcccattatttttaacggtatagcgtatgacgatccggggagcggaaataacccgggaggcacgcgatacacgggttatggttttgaagttcgcaaaaacggcgtattaatcgcatccagagaaactaaaggggccattcccggtagttacagtgcagttattgatatgcctagtggtggtggtagcgtcactctggagtttaagattttccagaaaggcaatcagggggcaggcaatatcaccgactgtacggtgattgtgaccaaaaaagcggcttccggcatcagtattcgttga

SEQ ID NO: 491018 - DNA, 381 bp, Shigella sonnei; identical to SEQ ID NO: 458903

SEQ ID NO: 491019 - DNA, 1086 bp, Shigella sonnei
atgaatgaatatatcaatgacactaaccattacatgaattatcagaatgaaaaagagagttatattgtcacgtttaaccagtatcttgaatcattaaggttaaatacatacgtaagtttggctcgtaatacttactgggacgccagcagtaatgtgaattattcattatcacttagccgcgattttgatatcgggccattaaaaaacgtctccgcttctctaacatttagccgaataaactgggaagaagacaaccaggatcaactgtacctaaatatttcgattccctggggaaccagtagaacattgagctatggtatgcaacgaaatcaggataacaagatttcgcatactgcttcgtggtatgactcttccgatcgaaataattcctggagcgtttctgcttcaggcgacaatgatgaattcaaagatatgaaagcgtcactacgcgccagttatcagcataataccgagaacggtcgtctctatctctccgggacatcacagcgagacagttattattctctgaatgccagttggaatggttcattcacggcgactcgtcacggagccgctttccatgactatagtggtagtgctgactcgcgttttatgatcgacgcagatggtgcagaagatattccgttgaacaataaacgcgcggtaactaatcggtatggcatcggagttattccatcagtcagcagttacataacaacatcattaagcgttgatacccgaaatcttccagaaaatgtggatatcgaaaactcggttatcaccaccaccttaaccgaaggtgctattggctacgccaaacttgatacccgcaagggctatcaaatcatgggggttattcgcctggcagatggtagtcacccaccactggggattagcgtaaaagataaaaccagccataaagaattaggactggttgctgatggcggctttgtatacctcaacggcattcaggatgacagcaaacttactttacgctggggtgataaatcctgttttattcaaccacccaatagcagcaacttaaccaccggaacggttattttaccgtgtattagccaaaattaa

SEQ ID NO: 491020 - DNA, 600 bp, Shigella sonnei
atggagtggcgcgaggacgcctataccctcgatgaactggcagattatctcgatttgagcgcctcagagcgtcgtagcatcgataaacattacgggatggggcgaaactgccacctgttcgaaatgacgcgcaaatgggcttacagggcgattcgtcagggctggccagcgttctcacagtggcttgaagcggtgatccagcgtgtcgaaatgtacaatgcatcgcttcccgttccgctttcactggctgaatgtcgggctattggcaagagcattgcgaaatacacgcacaggaacttcacgccggaaactttcgcacagtatgtggctgatacgcacacgccagaaattcaggcagcacgcggtcgcaagggcgggaaggccaattcgtcagaaaatcagtcggacaaagggaaaaaaagcgccgctgttcggtggactgctaacgacgacaaacgtcgtagggcgcttgatatgtatatcttgggagcgtcaacggaagatattgcagtggcggttggtgttagcagccggactattcgacgctggatggataattctggagaatggctaaccaagaaacaaataattaaatgttag

SEQ ID NO: 491021 - DNA, 348 bp, Shigella sonnei
gtgagttttcgttccactgagcgtcagaccccgattattgacctgctcgacaacgaagcaggactcacagaacaggaacgcaaactcctccacgtactggcaacagcggaaaaaaacgacttacaggcacaggagaacgaacgaaaacaggcggtccaaaaacgaatcgagggaaaaaaacaacgacgagaacgcaatcaccgactctttctcgcggctgggctactgatcgaagcaggactggtagacacaaaaacaggcgagctatgctataaaaaagacaggatattacaggcacttaaggaaattaagtacgatctggagacatccccaaacccagacgcgtaa

SEQ ID NO: 491022 - DNA, 600 bp, Shigella sonnei; identical to SEQ ID NO: 491020

SEQ ID NO: 491023 - DNA, 366 bp, Shigella sonnei; identical to SEQ ID NO: 488120

SEQ ID NO: 491024 - DNA, 477 bp, Shigella sonnei
atgacgcgcaaatgggcttacagggcgattcgtcagggctggccagcgttctcacagtggcttgaagcggtgatccagcgtgtcgaaatgtacaatgcatcgcttcccgttccgctttcactggctgaatgtcgggctattggcaagagcattgcgaaatacacgcacaggaacttcacgccggaaactttcgcacagtatgtggctgatacgcacacgccagaaattcaggcagcacgcggtcgcaagggcgggaaggccaattcgtcagaaaatcagtcggacaaagggaaaaaaagcgccgctgttcggtggactgctaacgacgacaaacgtcgtagggcgcttgatatgtatatcttgggagcgtcaacggaagatattgcagtggcggttggtgttagcagccggactattcgacgctggatggataattctggagaatggctaaccaagaaacaaataattaaatgttag

SEQ ID NO: 491025 - DNA, 186 bp, Shigella sonnei; identical to SEQ ID NO: 490402

SEQ ID NO: 491026 - DNA, 186 bp, Shigella sonnei; identical to SEQ ID NO: 462789

SEQ ID NO: 491027 - DNA, 204 bp, Shigella sonnei; identical to SEQ ID NO: 484673

SEQ ID NO: 491028 - DNA, 699 bp, Shigella sonnei
atgcagaatatccgacaggaaacactgaatgaatgcacccgtgcggagcagtctgccagcgtggtgctctgggaaatcgatctgacagaggtcggcggagatcgttatttcttctgtaatgagcagaacgaaaaaggtgaaccagtcacctggcaggggcggcagtatcaggcctatcccattcagggaagtggatttgagatgaacggcaaaggagccagtgcaaggccaacgctgaaagtctctaatctgcacggcatggtcaccgggatggcggaagacctgcagagtctggtcggaggaacggtggtcaggcgtaaggtttacgcccgttttctggatgcggtgaacttcgtcaacggaaatagcgatgccgatccggagcaggaggtgatcagccgctggcgcatcgagcagtgcagcgaactgagcgcggtgagcgcctcttttgtactgtccacgccgacggaaacggatggcgctgtttttccggggcgcatcatgctggccaacacctgtacctggacctatcgcggtgatgagtgcggttatagcggtccggctgtcgcggatgaatatgaccagccgacgtccgatatcacgaaagataaatgcagtaaatgcctgagtggctgtaagtttcgcaataacgtcggcaactttggcggttacctttccattaacaaactttcgcagtaa

SEQ ID NO: 491029 - DNA, 903 bp, Shigella sonnei; identical to SEQ ID NO: 488162

SEQ ID NO: 491030 - DNA, 225 bp, Shigella sonnei; identical to SEQ ID NO: 486969

SEQ ID NO: 491031 - DNA, 276 bp, Shigella sonnei; identical to SEQ ID NO: 484087

SEQ ID NO: 491032 - DNA, 543 bp, Shigella sonnei; identical to SEQ ID NO: 488208

SEQ ID NO: 491033 - DNA, 366 bp, Shigella sonnei; identical to SEQ ID NO: 10065

SEQ ID NO: 491034 - DNA, 300 bp, Shigella sonnei
atggacggctttttcactcgctacggcaaacacaccatcctggtctgtcggttattgccttttgtccctttcgatccaatcagctatgctgccgatctgacttcaatacgttttcgctcgttttttatcgccaccgggcttggtcaattaccgacgactattgtttattcctgggcgggcagcatgttaacaggcggtactttctggtttgtcaccggactgtttattctgtttgccctgaccgtggtgatttttatggcgaagaaaatatggcttgagcgccagaagaggaatgactga

SEQ ID NO: 491035 - DNA, 294 bp, Shigella sonnei
atgaagaaaaaaattgaatcctaccagggtgctgcaggtggttggggtgctgttaaatccgtagcgaatgcagtacgtaagcagatggatatacgccatgatgttattgccatgtttgacatgaataagccagagggctttgactgtccgggttgtgcatggccagatcctaagcacagtgcgtcattcgacatttgtgaaaacggcgcaaaagcaatcgcctgggaagtcacggataagcaggtaaatgcctctttctttgctgagaatacggttcaatcattacttacctag

SEQ ID NO: 491036 - DNA, 1326 bp, Shigella sonnei
  misc_feature (1283)..(1292): n is a, c, g, or t
atgaagtttttaccctatatttttcttctctgttgtggtctttggtcgaccataagtttcgcagacgaagattacatcgaatatcgtggcatcagtagtaacaaccgtgtcatacttgatccagtacgtctgagcaacaaggaattacgttggttagcgagcaaaaaaaatcttgtgattgcagtacataagtcccaaacggctacgttgttgcataccgattcgcagcaacgagttcgtggtattaatgctgattatttaaatcttttaaaaagaacgttaaatatcaaattaacactccgggaatacgccgatcatcaaaaagcaatggacgcgctggaagaaggtgaagtcgatatagtgttatcacatttagtagcttcgccgcctcttaatgatgacattgctgcaaccaaaccactgataattacctttccggcgctggtaaccacccttcacgattcaatgcgaccgcttacctcatcaaaaccagtaaatattgctcgagtagcaaattatccccctgacgaggtaattcatcaatcatttccaaaagcaacaattatctcttttacaaatttatatcaggcattagcatccgtctcagccggacagaatgattactttattggtagtaacatcattaccagcagtatgatttcccgctatttcactcactccttaaatgtagtgaaatattataactcaccgcgtcaatataattttttcttgaccagaaaagaatctgtcgttcttaatgaagtactcaatcgatttgttgatgctttgacaaatgaagttcgctatgaagtatcacaaaattggcttgatacaggaaacctggcctttctgaacaaaccattagaactcactgaacatgaaaaacaatggattaagcagcatcccgatttaaaggtgctggaaaatccttactcccctccctattctatgacggatgaaaatggctcggttcggggcgttatgggggatattcttaatattattactttgcaaacaggtttaaatttttctccgatcaccgtttcacacaatatccatgctggaacacagctgaatcccggcggatgggatatattacccggtgctatttatagtgaagatagagaaaataatgttttatttgctgaagccttcataacaacgccttacgtttttgtcatgcaaaaagcgcctgacagtgaacaaacattaaaaaaaggaatgaaagttgccattccatattattatgagcttcattcgcaattaaaagagatgtatccggnnnnnnnnnntgtatccggaggtagagtggataaaagtcgataa

SEQ ID NO: 491037 - DNA, 1455 bp, Shigella sonnei; identical to SEQ ID NO: 485766

SEQ ID NO: 491038 - DNA, 195 bp, Shigella sonnei; identical to SEQ ID NO: 487960

SEQ ID NO: 491039 - DNA, 1413 bp, Shigella sonnei; identical to SEQ ID NO: 486780

SEQ ID NO: 491040 - DNA, 672 bp, Shigella sonnei; identical to SEQ ID NO: 490007

SEQ ID NO: 491041 - DNA, 1446 bp, Shigella sonnei
ttgtgtgaagcggtaagtggtttccgtcgtccgggccgtgctgaccagccgctcacggccgtcatccgctgccacggtcaggcgaagcaggaagctcacgcccttcaccaccttcggcgtgtcccagcgcgccagcacctggtattccccgctgtctgcggtgacttctgcggtcaggtgctgcaccgctggcggcgtgacaccatttaccgtgccgctctggtcgccgtcaaagtgcgccccgttatccacgatggcctctttttccggtacatgctgcacggcggtgatggcatacgtgccgtcgtcgttctcacggatactcacgcagcggaacaggcgctggcgcaacgtcggcagcttcagcccccatacgctgtattcagcaacgccgtcaggaacacggctcactttcaccttcacgccgtcggtgacggactgaacctccacgctgaccggactcccctgcccgtcaaccaggcttatcagcgtggtgccggaagatggcagcgtgatttcacggtcgagcgtcagcgtccgggtctggctgtttaccgccagcacgcgcccgccggtgcggataccggcatagtcatcatcgcagatttcaatgacatcgcccggtacatggcgaagcccttcggcacccacgctgaagtccacggtctgcgtttccagcagttctgttttaatcagccacagcccggcgcggtgtgcctgcccccggctggtacagccaaaagcatccatcttcgtgacgttacgaccgtaacgggcaatggcctgcgtgtcctccacaagctctgtcgccgtctcccagccgttattcgggtcaatccagttcacctcaacggcattatggcggtccttcagggcgctgaagctgtagcggaacggcgcaccatcatccggcatcaccacattactgcggttataggtccacaccttatccgacggtcggtcctgcacgaacgtcagcgtctgcccgttccataccggcatacagcgcatcgcagagcagaaatcactgagcacatcccacgccttgcgctgtgtggtcaggtacgcattacaggtgatgcgcggctccgtgccgccaaaaccgtccggcaccgactgatcgcaatgctggccgatgacatacagcgcccatttgtccacatccgccgcaccaagacgtttccccatgccgtagcgcggatgggtcagcatatcccacagacaccaggccatgttgttgctgtatgctggcttaaacgttccgtcccagataccgctgtattgccgcgtctgcgggttatagttcgacggcacctgcagaatgcgcccgcgaagatgataattacggctcacctgctggctgccgaactgctccgaatccacctgtacgccgaccagtgccgtattcgggtagcactgtttcacatcgatgatttcggtgtatga

SEQ ID NO: 491042 - DNA, 648 bp, Shigella sonnei
atggcagcgacgcacacactccctctggcgtcaccgggcatggcgcgcatctgcctttacggggatttgcaacgatttggccgccgcatcgaccttcgtgtgaaaacgggggctgaagccatccgggcgctggccacacagcttccgtcgtttcgccagaaactgaatgagggctggtatcaggtgcgcattgccgggcgtgatgcaggcgaaaatgaattatctgcccgtcttaatgagccgctggaaaatggtgccgtgattcacatcgtgccgcgtatggcgggagctaaaagtggcggtgtgtttcaggtggtgctgggggcggcgctgattgcggtggcatggtggaaccctgtgggctggctgggtgctgcggctgtatcgggcatgtatgcggcaggggccagtatgatcctgggtggtgtggcccagatgctggcaccgaaagccaggacgcccacggcagccagtacagataacggcaaacagaacacctatttctcctcactggataacatggttgctcagggcaatgttctgcctgttctgtacggtgaaatgcgtgtggggtcgcgggtggtttctcaggagatcagcacggcagacgaaggtgacggtggtcaggttgtggtgattggtcgctga

SEQ ID NO: 491043 - DNA, 153 bp, Shigella sonnei; identical to SEQ ID NO: 38791

SEQ ID NO: 491044 - DNA, 1110 bp, Shigella sonnei
ttgcagctggcgtgggcggtctttaaaatctttcgtattccggtgaatcagtggacgctggcgacggcggcgctgggaggcgtgtttctggtgagtggtttgattttgttgatgaactacaaccacccttacacttttaccgcgcaaaaggcagtgatagcgatccctatcacgccacaggtgacgggaattgttactgaagtcactgacaagaataatcagcttattcaaaagggcgaggtgctttttaagctcgacccggttcgttaccaggtgcgagttgacagacttcaggctgacctgatgacggcgacgcataatataaagacgctgcgtgcgcagctcactgaagcgcaggccaacaccacccaggtttcagcggagcgcgaccgtctgtttaaaaattatcaacgttacctgaaaggcagccaggcggcggtgaatccgttctcggaacgtgacatcgacgatgcgcggcaaaatttcctcgcgcaggatgcgctggtgaaaggctcggtggcggagcaggcgcagatccagagccagctcgacagtatggttaacggcgagcaatcgcagattgtgagcttaagagcgcaacttactgaagcaaaatataaccttgagcagactgtcattcgcgcgccgagcaatggctacgttactcaggtactgatccgcccaggtacatacgcagctgccttgccgctgcgtccggtgatggtcttcatccccgagcaaaaacggcaaattgtcgcccaatttcggcaaaactcgctgttacgtctgaaacctggcgatgatgcggaagtggtgtttaacgcgctacctgggcaggtgttccacggcaaattgactagtattttacctgtcgtgccaggcggttcttatcaggcgcagggggtattgcaatcattaacggtcgttcccggcacggacggcgtgctgggaaccattgaactggaccctaacgatgatatcgatgccttacccgacggcatttacgcccaggtagcagtttactccgaccatttcagccatgtttcggtgatgcggaaggtgctgctaagaatgaccagttggatgcattatttgtatttggatcattga

SEQ ID NO: 491045 - DNA, 255 bp, Shigella sonnei; identical to SEQ ID NO: 486211

SEQ ID NO: 491046 - DNA, 2628 bp, Shigella sonnei
atgacagtaaaaatttctggcgtgcttaaagatggcacaggaaaaccagtacagaactgcaccattgtgctgaaggccagacgaaccagcagcacgatggtggtgaacacggtggcctctgaaaatccggatgaagccggacgttacagcatggatgttgagcatggtcagtacagcgtcaccctgctggttgaaggttttccgccttcacatgccgggaccattaccgtctatgaaggttccagaccaggtacgctgaatgattttctcggtgccatgacggaggatgatgtccgaccggaggcactgcgccgctttgagcagatggtggaagaggtgtcacgtaacgcctccgcggttgcacagaatacggcagccgcgaaaaaatcagccagcgaggcggcaactcatgcaaccgatgctgcagcctcagcacgtgccgccagcacgtcagccggacaggccgcgtcgtcggctcagtcagcgtcttccagcgcaggaacggcatcgacaaaggcccgtgaagcagcaaaaagtgctgctgcagagtcatcaaaaagcgcggcagctaccagcgccagtgccgcgaaaacgtcagaaacgaatgccgcagcatcacaaaaatcggcagccacttctgcatccacagcgaccacgaaggcgtcagaagctgccacctcggcacggggtgcggcggcctcaaaagaggcagcgaaatcttcagaaacgaatgcatcatcaagtgccagtagtgcagcttcctcggcaacggcggcaggaaattccgcgaaggcggcaaaaacgtccgagacgaacgctaagtcttctgaaacagcagcgggacagagcgcctcagctgcggcaggttcaaaaacagcggctgcattatctgccagtgccgcgtcaacaagtgccgggcaggcctcagccagtgccaccgccgccggaaaatcggcagaaagcgccgcatcatccgcttcaacagccacaacgaaggctggcaaagccactgagcaagccactgcagcagcgaggtctgcttctgcagcaaaaacctctgaaacaaatgcaaagacttcagcagacaatgctgcttcctctaaggcagcagccgcatcgtcagccagttcagcggcgtcatcggcatcatctgcgtctgcttcaaaagatgaggcgaccagacaagcgtcagcagcgaaaggtagtgccacgacagcaacaacgaaagcatcagaggcggcaggcagtgcgacggctgcatctcagagcaaagttgctgctgaatccgcggcaacgcgcgccgagacagcagcaaaacgggcagaggatattgcatccgccgtggcgctggaggatgcgagcacgacgaaaaaggggatagtacagctcagcagtgcgaccaacagcacttccgagtcactggcggcaacgccaaaagcggttaaggcggtaatgggtgaaacgaacaagaaagcgcccttaaatagtcctgcactgaccggaacgccaacaacaccaactgcgcgacagggaacgaataatacccaaatcgcaagcacggctttcgttatggctgcgattgccgcccttgtagattcgtcacctgatgcactgaacacgctgaacgagctggctgcggcgctgggcaacgacccgaattttgcgaccaccatgactaacgcgcttgcgggtaagcaaccgaaagatgccaccctgacggcgctggccggacttactactgcggcaggcaagtttccgtattttacggggaatgatgtcgccagcctggcaaccctgacaaaagtcgggcgggatattcttgcgaaatcgaccgttgctgccgttatcgaatacctcggtttacgagaactcggcacaagcggggagaaaataccgttactcagtacagcgaatacctggactaatcgacaaacattcagcggtggcctttctggtgaactatccggcaatgcttctacagctgcaaaattaaaaactgccaggaaaataagcaatgtggcttttgatggttcctccgatatcacattaaaagcaagtcatgttggtgcgtttgccttagggaaaacaggaagcaccgttgcgaatgataaagcagttggatggaactggagtagcggagcctataacgcaactattagtggtgcatcaacgttaattattcatttttatatgggagaaggaagttgtcctgcagctcagtttcggattaattataaaaatggcggtattttttatcgttcagcccgtgatggttatggttttgaagccgactggtccgaattttacaccaccagaaaaccttcagcaggagatgttggtgcactgccgttatctggtggtcaactgaatggtgcactgggtatcggaacatccagtgctcttggcggtaattcgattgtattgggtgataatgacacgggctttaaacaaaaaggcgatggtaatctggatgtttatgctaataacgtccatgttatgcgctttgtctccggaagcattcaaagtaataaaaccataaatattacgggacgtgttaatccctcggattacggtaactttgattcccgctatgtgagagatgtcagacttggcacacgagttgtttag

SEQ ID NO: 491047 - DNA, 282 bp, Shigella sonnei; identical to SEQ ID NO: 488002

SEQ ID NO: 491048 - DNA, 2379 bp, Shigella sonnei
gtgtggacctataaccgcagtaatgtggtgatgccggatgatggtgcgccattccgctacagcttcagcgccctgaaagaccgccataatgccgttgaggtgaactggattgacccgaacaacggctgggagacggcaacagagctcgtggaggacacgcaggccattgcccgttacggtcgtaatgtcacgaagatggatgcctttggctgtaccagccgggggcaggcgcaccgcgccgggctgtggctgattaaaacggaactgctggaaacgcagaccgtggacttcagcgtgggtgcagaagggcttcgccatgtaccgggcgatgtcattgaaatctgtgatgatgactatgccggtatcagcaccggcgggcgcgtgctggcggtgaacagccagacccggacgctgacgctcgaccgtgaaatcacgctgccatcttccggcaccacgctgataagcctggttgacggaagtggaaatccggtcagcgtggaggttcagtccgtcactgatggcgtgaaggtaaaagtgagccgtgttcctgacggcgttgccggatacagtgtatgggggctgaagctgccgatgctgcgccagcgcctgttccgctgcgtgagtatccgtgagaacgacgacggcacgtatgccatcaccgccgtgcagcatgtaccggaaaaagaggccatcgtggataacggggcgcactttgacggcgaccagagcggcacggtgaatggtgtcacgccgccagcggtgcagcacctgaccgcagaagtcaccgcagacagtggggaatatcaggtgctggcgcgctgggacacgccgaaggtggtgaagggcgtgagcttcctgcttcgcctgaccgtggcagcggacgatggcagtgagcggctggtcagcacggccaggacgacggaaaccacataccgcttcacgcaactggcgctgggaaattacaggctgacagtccaggcggtaaatgcgtggggacagcagggcgatccggcatcggtatcgttccggattgccgcaccggcagcaccgtcgcggattgagctgacgccgggctattttcagataaccgccacgccgcatcttgcggtttatgatccgacggtacagtttgagttctggttctcggaaaaacggattgctgatatcaggcaggttgaaaccagcgcgcgttatcttggtacggcgctgtactggatagccgccagtatcaatatcaaaccgggccatgattattatttttacgttcgcagtgtgaacaccgttggcaaatcggcattcgtggaggctgtcggtcgggcgagcgatgatgcggaaggttacctggattttttcaaaggagaaatcgggaaaacacatctggcccaggagctgtggacgcagattgataacggtcagcttgcgccggacctggctgaaatcaggacgtccattacgaatgtcagcaatgaaatcacgcagaccgtcaataaaaaactggaagaccagagtgcggaaatccagcagatacagaaagttcaggttgatacaaataataacctgaacagcatgtgggccgtgaaactgcagcagatgaaggacggacgcctttatattgcgggtatcggagccggtattgagaatactccagcaggtatgcagagtcaggtgctgctggcggcagacaggattgcgatgattaatcctgcgaatggcaacacaaagccgatgtttgttggtcagggcgatcagatattcatgaacgacgtgttcctgaaacgcctgacggctccgaccattaccagcggcggtaatcctccggcattttccctgacaccggacgggcggctgacggcgaaaaatgccgatatcagcggtaacgtgaatgcgaactccgggacgctcaacaacgtcacgattaacgagaactgtcgggttctgggaaaattgtccgccaaccagattgaaggcgatctcgttaaaacagtgggcaaagctttcccccgggactcccgtgcaccggaacggtggccatcagggaccatcaccgtcagggtttatgacgatcagccgtttgaccggcagattgttattccggcggtggcattcagcggcgctaaacatgagcgggagaataacgatatttattcgtcatgccgcctgatagtacggaaaaacggtgctgaaatttataaccgtaccgcgctggataatacgctgatttacagtggtgttattgatatgccagctggtcgcggccacatgacgcaggagttttcggtgtcatcatggctggtaaatgactggtatcccacagcaagtatcagcgatttgctggttgtggtgatgaagaaagccaccgcaggcatcagtatcagctga

SEQ ID NO: 491049 - DNA, 465 bp, Shigella sonnei; identical to SEQ ID NO: 490582

SEQ ID NO: 491050 - DNA, 657 bp, Shigella sonnei
atgcctgcgatcaatgccaaacgtgtttaccggatcatgcgccagaatgcgctgttgcttgagcgaaaacctgctgtaccgccatcgaaacgggcacatacaggcagagtggccgtgaaagaaagcaatcagcgatggtgctctgacgggttcgagttctgctgtgataacggagagagactgcgtgtcacgttcgcgctggactgctgtgaccgtgaggcactgcactgggcggtgactaccggcggcttcaacagtgaaacagtacaggacgtcatgctgggagcggtggaacgccgcttcggcaacgatcttccgtcgtctccagtggagtggctgacggataatggttcatgctaccgggctaatgaaacacgccagttcgcccggatgttgggacttgaaccgaagaacacggcggtgcggagtccggagagtaacggaatagcagagagcttcgtgaaaacgataaagcgtgactacatcagtatcatgcccaaaccagacgggttaacggcagcaaagaaccttgcagaggcgttcgagcattataacgaatggcatccgcatagtgcgctgggttatcgctcgccacgggaatatctgcggcagcgggcttgtaatgggttaagtgataacagatgtctggaaatatag

SEQ ID NO: 491051 - DNA, 657 bp, Shigella sonnei
atgcctgcgatcaatgccaaacgtgtttaccggatcatgcgccagaatgcgctgttgcttgagcgaaaacctgctgtaccgccatcgaaacgggcacatacaggcagagtggccgtgaaagaaagcaatcagcgatggtgctctgacgggttcgagttctgctgggataacggagagagactgcgtgtcacgttcgcgctggactgctgtgatcgtgaggcactgcactgggcggtgactaccggcggcttcaacagtgaaacagtacaggacgtcatgctgggagcggtggaacgccgcttcggcaacgatcttccgtcgtctccagtggagtggctgacggataatggttcatgctaccgggctaatgaaacacgccagttcgcccggatgttgggacttgaaccgaagaacacggcggtgcggagtccggagagtaacggaatagcagagagcttcgtgaaaacgataaagcgtgactacatcagtatcatgcccaaaccagacgggttaacggcagcaaagaaccttgcagaggcgttcgagcattataacgaatggcatccgcatagtgcgctgggttatcgctcgccacgggaatatctgcggcagcgggcttgtaatgggttaagtgataacagatgtctggaaatatag

SEQ ID NO: 491052 - DNA, 366 bp, Shigella sonnei; identical to SEQ ID NO: 487772

SEQ ID NO: 491053 - DNA, 1971 bp, Shigella sonnei; identical to SEQ ID NO: 488036

SEQ ID NO: 491054 - DNA, 861 bp, Shigella sonnei
atggataattttcttgctctgaccttaacgggtaaaaaaccggttatcaccgagcgagaaatcaacggcgttcgctggcgctggctgggcgatggtgtgctggaactgacgccattaacgccaccgcaaggcgcgctggtgatcctcggggatcctcctgcgctgaagcaagggaaacgttattgccatagcgatatgaaccgaatgtttggcggtcgttggcagctatttgctgaaagcggagaaacctgtcgggcgcgcgaactggaacagtgcctggaagatttttatgaccagggcaaagaatctgtgcgttggcaccttgatctacataccgcaattcgtggctccttgcatcctcagttcggtgtattaccgcaacgcgacattccctgggacgagaaatttctgacgtggctgggtgcggcggggctggaggcgctggtgttccatcaggagcctggtggtacgtttacccatttcagcgccagacattttggcgcgctggcctgtacgctggaacttggcaaagcgttgccctttgggcaaaacgatcttcgccagtttgcagtaactgccagcgcaattgctgcgctgctatctggtgagagtgtcggtatcgtgagaacaccgccgctccgttatcgggtggtttcgcaaattactcgccactcgccgtccttcgaaatgcatatggcaagtgacacgctgaattttatgccgtttgagaaaggaacattgctggcgcaggacggagaggaacgttttaccgtaacccatgatgtagagtatgtgttattccctaatccgttggtagcgttgggattacgcgcgggattaatgctcgaaaaaataagctaa

SEQ ID NO: 491055 - DNA, 537 bp, Shigella sonnei; identical to SEQ ID NO: 16554

SEQ ID NO: 491056 - DNA, 1212 bp, Shigella sonnei
ttgtgggcaggagaaaccttaactggcgcgacgcaggatgcaattgttgagatcactgctactgacggcatgaccactcattacggtcaaattacttatctacaaggtcgacgtatattccctgcgccaggccttgtgctgtatggcgaatatcttccgcaagcggtttgtgccggacaactgtggtcaatgaaactcaaagttcgtgccgttcatggtcaacttaatgatggcggctttgatagccagcgttatgccattgcccagcatcagccgctcaccggccgctttctgcaggcaagtgttattgaaccgaattgtagcctgcgtgcacagtatctggcgtcactacaaacaacgctgcaaccctatccgtggaatgcggttattcttggtttaggtatgggggaacggttatccgtccccaaagaaatcaaaaatatcatgcgcgatactggaacggcgcatttaatggcgatatcgggattgcacatcgcttttgcggtgttgctggctgccggactcattcgcagtggacaaatttttctgcctgggcgctggatccactggcaaataccattaattggtgggatctgctgtgctgctttttatgcctggttgacgggaatgcaacctcctgcattgcgtaccgtggtggcgcttgctacgtggggaatgcttaagttaagtgggcgacagtggagtggctgggatgtatggatatgttgtctggcggcaattttgctgatggatcctgttgccattctctcgcaaagtttatggctctctgccgctgcggtcgcggcactgattttttggtatcagtggtttccctgtcctgagtggcaactgccgccggtattgcgtgcagttgtttccctcatccatctgcaactgggtatcacacttctgcttatgcccgtgcaaatcgtcatatttcatggcattagtctgacctcgtttattgcaaatctattagcaattcccttggtgacatttatcacggttccgttgatcctcgccgcgatggttgtgcatttaagcgggccgttaatcctggagcaagggttatggtttcttgccgaccggtctttggctttacttttctgggggttaaagagtttgccagaagggtggatcaacattgctgaacgttggcaatggctatcattggatttgcccctatatttccagacatctgttatcacttaa

SEQ ID NO: 491057 - DNA, 588 bp, Shigella sonnei; identical to SEQ ID NO: 486977

SEQ ID NO: 491058 - DNA, 381 bp, Shigella sonnei; identical to SEQ ID NO: 458903

SEQ ID NO: 491059 - DNA, 1086 bp, Shigella sonnei; identical to SEQ ID NO: 486649

SEQ ID NO: 491060 - DNA, 267 bp, Shigella sonnei; identical to SEQ ID NO: 11114

SEQ ID NO: 491061 - DNA, 267 bp, Shigella sonnei; identical to SEQ ID NO: 11114

SEQ ID NO: 491062 - DNA, 267 bp, Shigella sonnei; identical to SEQ ID NO: 11114

SEQ ID NO: 491063 - DNA, 381 bp, Shigella sonnei; identical to SEQ ID NO: 458903

SEQ ID NO: 491064 - DNA, 129 bp, Shigella sonnei; identical to SEQ ID NO: 488912

SEQ ID NO: 491065 - DNA, 291 bp, Shigella sonnei; identical to SEQ ID NO: 467055

SEQ ID NO: 491066 - DNA, 267 bp, Shigella sonnei; identical to SEQ ID NO: 487831

SEQ ID NO: 491067 - DNA, 267 bp, Shigella sonnei; identical to SEQ ID NO: 11114

SEQ ID NO: 491068 - DNA, 267 bp, Shigella sonnei; identical to SEQ ID NO: 11114

SEQ ID NO: 491069 - DNA, 195 bp, Shigella sonnei; identical to SEQ ID NO: 489869

SEQ ID NO: 491070 - DNA, 423 bp, Shigella sonnei; identical to SEQ ID NO: 487379

SEQ ID NO: 491071 - DNA, 189 bp, Shigella sonnei; identical to SEQ ID NO: 463227

SEQ ID NO: 491072 - DNA, 423 bp, Shigella sonnei; identical to SEQ ID NO: 485448

SEQ ID NO: 491073 - DNA, 276 bp, Shigella sonnei; identical to SEQ ID NO: 484087

SEQ ID NO: 491074 - DNA, 333 bp, Shigella sonnei
atgtctgcacaacccgtcgatatccaaatttttggccgttcactgcgtgtgaactgcccgcctgaccaaagggatgcgttgaatcaggcagcggacgatctgaaccaacggttgcaagatctgaaagaacgcactagagtcacaaatactgaacagttggtcttcattgccgcattgaatatcagctatgagttagcgcaagaaaaagcgaagactcgtgactacgcggcaagtatggaacagcgtattcggatgctgcagcagaccatagaacaagcgttacttgaaccacggcagcctggcggctgcaaatcggggtgtggcagaatatga

SEQ ID NO: 491075 - DNA, 660 bp, Shigella sonnei
atgacagaagagttgaaagcgctgggcctgcaggttgggcagcgtcgggttggacgtttgatgcgccagaataacattacagttgttcgaacgcgtaaattcaaacggacaacggatagtcatcataccttcaacattgcaccgaacctattaaaacaagactttagcgcaagcgcacccaaccagaaatgggcaggcgatatcacttatgtttggaccagagaaggatgggtctatcttgctgttatccttgacctgtattcccgtcgcgtgattggctgggcaacaggtgatcgattaaagcaggatcttgcattaagggcactgaatatggcgttggctttacgcaaaccaccaccgggttgtattcaacacacagaccgtgggagccaatattgcgctcatgaatatcaaaagctactgctcaaacatcaattgctgccgtccatgagcgggaaaggcaattgttttgataactccgcagtagaaagcttctttaaatcattaaaggctgagttgatttggcgcagacactggcaaacaaggcgagatattgagattgcaatcttcgaatatataaatggcttttataatccacgccgaagacattcaacactcggctggaaatcgccggtggcatttgagaaaaaagccgcttaa

SEQ ID NO: 491076 - DNA, 705 bp, Shigella sonnei; identical to SEQ ID NO: 5348

SEQ ID NO: 491077 - DNA, 705 bp, Shigella sonnei; identical to SEQ ID NO: 5348

SEQ ID NO: 491078 - DNA, 927 bp, Shigella sonnei
atggccaatgcgcaagatcctaagtctgccttatctgaaatgatgagcttctttgtctatcgaaccaactggatagcaacagagataagtggcacaggaacaacaagcgatcaggtcaatccattgataaagatgaaaaatattggtgattatacattaggaacaacagagattctctggagtggatatacaacagttagagttctcgcgacagtaggtgataactctattttcggaaaggttgccaatttattctctggattacctaaaggattagttgctctgctggatgctgcagctcccccaatatatttcttgttgttcctgttgttttgtgcgggtttttccttatcaatttacctaccatttataccattcattttctggatgacaggcattgggaactggatagtcagtgtattaataggatgtaccgccggacctctgtgggctgcaacacatctcggaacatcagaagacagaggaagtcgggcagcctacggttatatatacttaattgatagtatgataaggccgcccatcatggtctttggttttttctttgcttctgttgccatcatcgccgtaggcacaatactgaatgcattatttggcgctgccctggttaacgtacagttcaattcgctgaccggtattttcagtcttgctggtttcttgctgatatacgccagaatttgtacaaccactgtggctgccatatttgcccttcaggcctacctacctgatcatgttattaatttccttggtgggcgtgagggagccaacactcttggcagcatggcaaattctgttaaagaaatatttattggaggaagtcgcaatatccgacatactcctggaatgaaaacagatcgtcttaaaaataatacaaatggaagtgacgacaaggacggaataaaaggataa

SEQ ID NO: 491079 - DNA, 390 bp, Shigella sonnei
atgaacaacaataacacattgtacgtcgggttagatgttcacaaagaatcgattactgtcgcttatgctatcaattcagaacctgttgaactgatgggtaaaattggcacatcacctactgatattcagaatctttgtaaacgtctcaggtcaaagtcatcacaggtcagtatcgtttatgaagcggggccctgtggttatggactttatcgtcggctggtgaaatccggttttgactgcatggtctgcgccccctcacttatcccgaaaaaaccgggggagcgggttaaaaccgatcgccgtgatgccatcagacttgtgcgttcactgcgtgcaggagtgtcaacgccacgatgtttgaccgttatttgccattttcatgcccgctaa

SEQ ID NO: 491080 - DNA, 516 bp, Shigella sonnei
atggctcaccctcatttattagcggaaagaatttcccgcctgagcagttcgttggaaaaggggctttatgaacgtagccacgccatccgcttgtgtttattagcggcattaagtggtgaaagtgtgttcctccttggcccgccaggtattgccaaaagtttgatcgcccggcgcttaaaattcgcctttcagaatgcccgcgcgtttgaatatctgatgacccgcttctccacgccggaagaagtttttggtcccctttctattcaggcgctaaaagatgaagggcgctatgaacgtttaaccagcggttacctgccggaagcagaaattgtctttctggatgagatctggaaagcgggcccggcaattcttaataccttgctcaccgccattaacgagcgccagttccgcaacggtgcacacgtagaaaaatcccgatgcgtctgctggtggcggcctccaacgagctgccggaagcagacagcagtctggaagcgttatatgaccgcatgctga

SEQ ID NO: 491081 - DNA, 216 bp, Shigella sonnei
atgactgttcaggactacttattaaaatttcgcaaaatcagttcactcgaaagtctggaaaaactctacgaccatcttaattacaccctgacggacgatcaggaactgaccaatatgtatcgtgctgccgatcaccgtcgcgcagagctggtttctggcgggcgtttgtttgacctcggccaggtaccgaagtccgtctggcactatgtccaataa

SEQ ID NO: 491082 - DNA, 210 bp, Shigella sonnei
atggctattgccgcaagttacaccatgcatctctactgtgattgtcgccagtgtacaaatggtaaatatcagtcgccagacttcggtgagtatatcggtacgtcatgggctggctgtgcaaaagaagcacgtaaagatggatggcgaataagcgccgacaaaacacgtgcttttgcgcccggacataaagttttgaggattaacaaatga

SEQ ID NO: 491083 - DNA, 327 bp, Shigella sonnei
atgacaacatttaccgacgacgacaagaaactaattaaagaaatcagggagcgaatcggcagcctggacgtgcgagacaatattgagcgccgggcttatgaaattgctctggcatcactggaagcagaagcgccaaatttgcctggtggtttcacaattgaagaagcaaaagaattacacgaaaatctggtaaaaagtcacgtaagcaaggctttaagtggcgaaaaaatgaaaaaagaaaatcgtgatgccgatttgcgctggattcatggcgtaatagttcaggccgcgtggtttgtgaaagcatcactagggcagaatgcatag

SEQ ID NO: 491084 - DNA, 444 bp, Shigella sonnei
atggctcaaccaaccccagaaaagatactggcaatcatagatgatcatgatcgcgcacaaaaaaaacaacgcaacaaaaacgtcttcatttatttatgtctctgcttggcaattattggagtggtcgcgcattcctttatatcaacgtttcgtcttgatggtgtagccgtccttacaattcttttgggcgtgtcagcaatcgcattttttctacattatgtagaatcagggaaaggccagattcttagcagtgaccgcatattgtccatactcgctcaaaccaaagattaccccacaattcgacgtaaagttgttaatcgcttgctctccggttcaaaactcacgggtaaagatgaagagtacatattcagtgaactgaaaaaggctgaacaaagcaacgaacgtgaaaagagattgcaagcaattaaagagtatacatcgtaa

SEQ ID NO: 491085 - DNA, 267 bp, Shigella sonnei; identical to SEQ ID NO: 22627

SEQ ID NO: 491086 - DNA, 390 bp, Shigella sonnei; identical to SEQ ID NO: 486384

SEQ ID NO: 491087 - DNA, 390 bp, Shigella sonnei; identical to SEQ ID NO: 486384

SEQ ID NO: 491088 - DNA, 1134 bp, Shigella sonnei
atgaccaaggcagattttggtgtaactattgatgatactttaataactgattttcgagatgtggttaatgaaggggagtttgcttacagctacttcataaacagaaatggtaaaaaccagttcagccctatctgttcgtgcatggattggataagcgtttctgttcgcaatctgatgaacttccctgagctgtcggaagatattgatgtcaaggccatgcaggtttactcccttatatcatctattgatattgctgtggaggcgttgcagcagcttcaccgcatcattgagagtgatgataagttagcgaggtggcctttcaagaaatcaacgaatgtctttaagaataaaacgccctatctttcacatgaggatgatgacgcatactttaagagtattcgagctatctttggtgctcaccctacaaatcttaaaaatagtgatggtgagcgactgtttgcaagctggcctcattttcatgctttcaatgaaaatgatttcactataagcctttacaacaacacgccagggaaagatgatgttattttcggcattaaattcgatgagctaattacatatattgaagataggtataaatatctaacaagcctaaagggttccgtaatagcaatccgtataaaacattacagcaccctatccaaacagattataccgtctactgataacattcatgctgagttaaagttgcttctttcagaagttgcggtgcgaggtgataacgattattaccgaatggaagtggaagagttaataaagttgttcgaggggaatgttaaagaggcacatctcaaggatgaagctgacgtatttttaagtaaactacatccaattgcagtagagattagatataatcttcaggaaatgaatattgaggatttagcaactaagcatggcgtgttgatttcaacacttccgaaaaatgccctgcattacgttcttcagaaaatgtttacttggctccactctgatagatatgacccaatgggtggcttttacttggacaagttaaatgaatattcaggcgggcgatacaatttttgttctgaggatgatgacagtacaactctattgaagctccggatgatgttgcattggtatcatcaacaaaaatag

SEQ ID NO: 491089 - DNA, 525 bp, Shigella sonnei; identical to SEQ ID NO: 487961

SEQ ID NO: 491090 - DNA, 282 bp, Shigella sonnei; identical to SEQ ID NO: 487352

SEQ ID NO: 491091 - DNA, 390 bp, Shigella sonnei; identical to SEQ ID NO: 486384

SEQ ID NO: 491092 - DNA, 363 bp, Shigella sonnei; identical to SEQ ID NO: 19892

SEQ ID NO: 491093 - DNA, 891 bp, Shigella sonnei
gtgctcgcatcctcaagcgccacggcggatgcaatatcctctgcccgttttgccgctgtctcagcgcgcgttgctgcggattctgccgtacttttgctctgtgctgccgctgtcgcactgccagcagcctctgtcgccttcgtggatgccgtcgtggcgctgctcttcgctgctgacgcctgtctggtcgcctcatcttttgaagcagacgccgatgatgccgatgacgccgccgaactggcggacgatgccgctgccgtttttgaggattctgcacgggtttccgacgctttcgcgttcgtttcggatgtcttcgctgcggaagctgacctcgctgctgccgtggcctgctcagtggcttcgccagccttcgttgtggctgttgaagcggatgatgcggcgctttctgccgattttccggcggcggtggcactggctgaggcctgcccggcacttgttgacgcggcactggcagatgatgcagccgctgtttttgagcctgccgcagctgaggcactctgttccgctgccgtctcagaagacttagcgttcgtctcggacgtttttgccgctttcgcggaattgcctgccgccgttgccgaggaagcggaactactggcgctcgaggctgcgctcgtttctgatgatttcgctgcctcttttgaggccgccgcatcccgggctgaggtggcagcttctgacgccttcgtggtcgcggcggatgcagaaatggctgcagatttttgtgacgctgccgcattcgtttctgacgttttcgcggcactggcactggtagctgccgcgctttttgaggactctgtagcagcagcacttttcgatgcttcactggcctttgttgatgccattcctgcgctggaagatgctgactga

SEQ ID NO: 491094 - DNA, 315 bp, Shigella sonnei
atgaaacttttaaaagtagcagcaattgcagcaatcgtattctccggtagcgctctggcaggtgttgttcctcagtacggcggcggtaatggtgcagatgttggtcagggctcggatgacagctcaatcgatctgacccaacgtggcttcggtaacagcgctactcttgatcagtggaacggcaaaaattctgaaatgacggttaaacagttcggtggtggcaacggtgctgcagttgaccagactgcatctaactcctccgtcaacgtgactcaggttggctttggtaacaacgcgaccgctcatcagtactaa

SEQ ID NO: 491095 - DNA, 1287 bp, Shigella sonnei; identical to SEQ ID NO: 486968

SEQ ID NO: 491096 - DNA, 1125 bp, Shigella sonnei
gtgaacaccgttggcaaatcggcattcgtggaggctgttggtcagccgagtgatgatgcatccggttatctggattttttcaaaggcgagatagggaaaacccatctggctcaggagctgtggacgcagattgataacggtcagcttgcgcctgacctgactgaaatcaggacgtccataacggatgtcagcaatgaaataacacagaccgtcaataagaaactggaagaccagagtgcggcaattcagcagatacagaaggttcaggttgatacaaataataacctgaacagcatgtgggcagtgaagctgcagcagatgcaggacggacgcctttatatcgcgggtattggtgccggtattgagaacactcctgacggcatgcagagtcaggtgctgctggcggcggacaggattgcgatggttaatcctgcgaatggcaacacaaaaccgatgtttgttggtcagggcgatcagatattcatgaacgacgtgttcctgaaacgcctgacggctccgaccattaccagcggtggaaatccatcggcattttccctgactccggacggaaagctgaccgctaaaaatgcggatatcagtggcagtgtgaatgcgaacgccgggacgctcaacaatgtcacggtaaatgaaaactgtacgattaagggcatgctggaggcgactcaggtcagaggtgacttcgttaaagctgtatccaaatcatttccgaaacaggctggtacgtggggtaacacggaaacaccaaacggtacggttacagtcaccatcagcgatgatcataactttgaccgccagattattattccgcccattatttttaacggtatagcgtatgacgatccggggagcggaaataacccaggaggcacgcgatacacgggttatggttttgaagttcgcaaaaacggcgtattaatcgcatccagagaaactaaaggtgccattcccggtagttacagtgcagttattgatatgcctagtggtggtggtagcgtcactctggagtttaagattttccagaaaggcaatcagggggcaggcaatatcaccgactgtacggtgattgtgaccaaaaaagcggcttccggcatcagtattcgttga

SEQ ID NO: 491097 - DNA, 267 bp, Shigella sonnei; identical to SEQ ID NO: 11114

SEQ ID NO: 491098 - DNA, 738 bp, Shigella sonnei
gtggcgctgcccttcgctgctgacgcctgtctggtcgcctcatcttttgaagcagacgcagatgatgccgatgacgccgccgaactggcggacgatgcggcagccgtttttgaggattctgcgctggtttccgacgctttcgcgttcgtttcggatgtcttcgctgcggaagcagacctcgctgctgccgtggcctgctcagtggcttcgccagccttcgttgtggctgttgaagcggatgatgcggcgctttctgccgattttccggcggcggtggcactggctgaggcctgcccggcacttgttgacgcggcactggcagatgatgcagccgctgtttttgagcctgccgcagctgaggcactctgttccgctgccgtctcagaagacttagcgttcgtctcggacgtttttgccgctttcgcggaattgcctgccgccgttgccgaggaagcggaactactggcgctcgaggctgcgctcgtttctgatgatttcgctgcctcttttgaggccgccgcatcccgggctgaggtggcagcttctgacgccttcgtggtcgcggcggatgcagaaatggctgcagatttttgtgacgctgccgcattcgtttctgacgttttcgcggcactggcactggtagctgccgcgctttttgaggactctgtagcagcagcacttttcgatgcttcactggcctttgttgatgccattcctgcgctggaagatgctgactga

SEQ ID NO: 491099 - DNA, 462 bp, Shigella sonnei; identical to SEQ ID NO: 488384

SEQ ID NO: 491100 - DNA, 726 bp, Shigella sonnei
atgaaaatattcaattcaagttttatagcaaacatatcatctacaataagaacccacctcccgatactacaaaaaaatataagaccacatccatcaccaaacctcgacgtaacaagtcatcatcgtgtattccagaaagacggaataggattgagccaaacaggaaaatcaacacaacttgttattatgtcgcacggtggatggaaagagatctcccatccacaaacactattcacgcgtcaaaaaggcgatggatggactgttgtaccccaaaacctaaggcttgacttttatactaaagataacgacttcacaaagggactaagcgttctttcagaggtaaacaaacgccatactgaagcacaaacagggttaacactatcactaaacataagccaagatgacctaagttttctggcaaacgcgcgcaatatacctcaatcaaaactagaagaagaaatgaaatcacaagctatatatagaaaagaatacgcaataagtaatgagaagataaaaaactatgctttatattatcatgaccaagccaaaaacattatacaaaaacatcaagatggttcgggaaatcaaaacgtcgatatagcatttataactgataaaaatcataaaaaacacctttctgacatatttaaagtaataaatgaatcaggagtaaaatatgatgtgattcactttggcgcttgccgagtaaatagagaggagcaataa

SEQ ID NO: 491101 - DNA, 324 bp, Shigella sonnei
atgacaaaacgaagtggaagtaatacgcgcaggcgggctatcagtcgccctgttcgtctgacggcagaagaagaccaggaaatcagaaaaagggctgctgaatgcggcaagaccgtttccggttttttacgggcggcagctctcggtaagaaagttaactcactgactgatgatcgggtactgaaagaagttatgagactgggggcgttacagaaaaaactctttatcgacggcaagcgtgtcggggacagggaatatgcggaggtgctgatcgctattacggagtatcaccgtgccctgttatccaggcttatggcagattag

SEQ ID NO: 491102 - DNA, 465 bp, Shigella sonnei; identical to SEQ ID NO: 483873

SEQ ID NO: 491103 - DNA, 435 bp, Shigella sonnei; identical to SEQ ID NO: 490256

SEQ ID NO: 491104 - DNA, 390 bp, Shigella sonnei; identical to SEQ ID NO: 486384

SEQ ID NO: 491105 - DNA, 129 bp, Shigella sonnei
atggttgctcagggcaatgttctgcctgttctgtacggtgaaatgcgtgtggggtcgcgggtggtttctcaggagatcagcacggcagacgaaggtgacggtggtcaggttgtggtgattggtcgctga

SEQ ID NO: 491106 - DNA, 255 bp, Shigella sonnei
gtgatccacggcgcaaccgacaaattcgcgccggcaggttttgcgccgatcgctattggtctggccttaaccctgattcacttaattagtattccggtgactaacacttctgttaacccggcgcgcagcaccgcggttgctatcttccaggacggctgggcattagaacaactgtggttcttctgggtggtgccaattgtcggcggcattatcggtggtctgatttaccggaccctgctggaaaagcgtgattaa

SEQ ID NO: 491107 - DNA, 156 bp, Shigella sonnei
atggacactcgttttgttcaggcccataaagaggcgcgctgggcgctggggctgacccttttgtatctggcagtttggttagtagccgcttactacctggcgttgcccccggttttaccggctttccgcgctggtttgagatggcctgcatcctga

SEQ ID NO: 491108 - DNA, 195 bp, Shigella sonnei
atgctaaaacagcaagatatgacagaaacggcgaaagttgtttttaatgaattaagcatcgaaccggcaacagtcggggagattgcacaaaacacatacctttcacgcgaacgctgtcagttaatactgacccagttggttatggcggggctggcagattaccagttcggctgttacagacgccttcagcaatga

SEQ ID NO: 491109 - DNA, 1332 bp, Shigella sonnei
atgttagatacactatctttcactgaacgtgacgagttccaacgaagaaacatcgctgaaaatatcatcaagttgctaaaaccagaggcagacatttcaccactggtaatagacggcgcatggggaacagggaaaacagaatttagtatcaaactgaaaaatctcattattgagcaagaaactgaatctaaagttgtttatattgatgcctttaaaggggatcatgcagaatctccattacttctcataacctctgcaattgccagcattttgcctgaggaagaaaaacaacacttcattaagagatctcttcctgcaattcgctttggtttaaaaacggtactaaaagctggtgcaggttggtttttacgacaggaggctagtgaagttgccgaagaattccaagatgcgatgaagaaagcaagcaatgcagcaatagatgggactattgaaaatttgcttgaagaccatatggactcagagaaaaacataaattcacttaaatcctgcatcgaaagcatatcaaaaaatcaaaaaatcgtaattataattgatgaattagacagatgtaagccgagtttttcaacaaatgtcattgaaacaataaaacacatttttgacatcaataatgtcttttttattttagttacaaacacagaacaattaaaagcatctataaatcatatttatggttatagcattaactcacaaaagtatcttgacaagtttataaaatataccatcacgcttccagatacatgtttgataaatggtcacaacgtatgtaaagcctctgttatatattgggattaccttgtagaaaaaacaaggttattgaataaaatcaatagattatcaggttactttatccgtgatttaattcaacgaaccaacttatcattacgtgaaacacaaacattttcacgcaatcttaacattttccaactgttaaacgacgatgagaacaaaagcagtgatcctttaataaatatgatctttgtcgtagctgccttcatacattgctttggtaacaaggaaaaactaaaacaagaaattaccgctgaatctatatcttatttagcagacctgcttaacataaaagaaataccttattcttatgagagaagatcgcaaatccctgaaatatcgattgtattcttcggaataattaaagacagtattactcttaatgagcgatttgcccctaaaagtgatgaagaacttaaaaaattcacaaatgtttatactgattatgaacacataaatttttggagtactacacccagagagttattgataaaatatattaatcaaatgtcattcatccagtaa

SEQ ID NO: 491110 - DNA, 366 bp, Shigella sonnei
atgcgtgatattcagatggttctggagcgttggggggcatgggcggcgagtgatagttcaggcgttgattattcacctatagccgctgggtttaagggacttcttccctatacaagcaagaaacgcttggcttgttcggatagtgatgccttaattattgaaggttgtcttgctcgtctaaagcaaaaaaggccggacgaacattcgcttcttgttgcccattacctatacggtatctctaaaagaaagctcgccaaggctcgtaaaaaagatgagaaattgatacgtatagaaatacagctagccgaaggatttattgatggctgcctttccatgctagatctaacattagatttggacgtttaa

SEQ ID NO: 491111 - DNA, 879 bp, Shigella sonnei
atgtgcataactcatgtagttagtttttctggcgggagaacatccgcatatcttgttcacctgatggaagaacaaagaaaggctggcaataacgtctgctacatctttatggataccggttgcgaacatccgctgacataccgctttatccgggaggttgtgaagttctgggacataccactaactgtgttacaggtcgatataaatcctgagcttgggcagccaaatggttatacagaatgggagccaaaggatattcagacacgaatgccggtgcttaaaccgtttatggacatggttaaaaagtacggcacgccatacatcggcggcgcgttctgtactgataggctaaaactcatccctttcacgaaatactgcgataaccatttcgggcgaggtaattacatcacatggctgggtattcgtgcagacgaaccccgtaggctgaaaccgaaatcgggcgtccggtatcttgccgagctgtcagattttgataagtcggatgttatccggtggtggcgaaaacaaccttttgatttgcaaatcccggagcatctcgggaactgtgttttctgcatcaaaaagtcaacgcaaaagctggggcttgcatgtaaagacgaaccaggtctgatgcgagtttttaatgagctggttacaggcaaacacgtcagggatggtcatcgcagaacaggtaaagacattatgtaccgtggtcacctgacgcttgacggaattgccagaatgtctgccaacagcgactacagaaatttgtatcaggcgatggtacaggccaggcgattcgataccggctcgtgttcagagtcatgtgaaatctggggtgatcaattggaattggaattcaaagaggtaggggtatga

SEQ ID NO: 491112 - DNA, 204 bp, Shigella sonnei; identical to SEQ ID NO: 484673

SEQ ID NO: 491113 - DNA, 3543 bp, Shigella sonnei
atgacaaataaaaaaaatttgagtaatcctttttctacaggcggaggcggtgttcattttgaagcacatgtccaagcgtcttttgttgctctaatgctaacaggcggtaatgcaccttgtcttccttgttggcccatagtggagataaatctccagggcaagattgatggttttgataccgacgacttgatcgtcgttgttaaagatttcaacagcaatgaaaaacggaagctattaggacaaataaagcattctatttcatttacgcaaggtaatgcgatacttggggaagttatacaggctgcttggaacgatttcaacaatcctgacttgtttaccaagaacaaggatgttattgcactgatcaccggtccgctcagttcgaccgatacacacaatgtgctctggttattgaatcaggctagacacacaaaaacagtcgatgaatttttgaggaacgttcaaaaagccaagttcagcccgcctaaaagtactgagaaactggaggccatccagtttcatctgaagatggcaaacagtgggaacgatttaacaaacgatgagctttatgactttttgaaccatttccatttactagggtacgatctgggtaatgaatcaggcgtcgtcctttctttgctgcactcccacatagcgcaattccatcaacagtatcctcagtgggtttggtcgcggatagttgatatcgtacaaacttggaataaagatgctggcactatcatttcaagtaagctacctgaagatcttttagatgttttcaaacaaagggttattgctgaaatacctgagaagttgaggttagtacaaccggtagtcaaaaccgactggactcaccacccagatgcctcttatttagccttagcagtgttgattgggcaatggaatgataaaaatgagtgtgaccgaaatgtactaacccaattgcttggtatcagctatgacgaatggctaaggaaggctcgagagattttacatagcccagacagtcctttgtccctaaaaaacggcatttggaaagtaacaaatcgaatggagctatggagtcttcttggatcccgcatttttgatcagaatcttgaattgtttaagtcttccgcgatttccgtactcaaagagccagaccctgctttcgaattacctgctgaagagcgttacgctgctagtattcatggtaaggtgctgaagttttcatccacgctgcgacaaggtatagcagagggtttagccataatcgggagtcggccagaggtttgcgttaactgctctcaggggaatgctgaaacttccgttaacgtcgcaatacatacaattttgactgatgcaaactgggttttatggggtagcctaaacggtttgctaccaactttggctgaagcagctcctgcaaaatttcttgatgcagttgagaaggcaatgcgtcagactccttgtgtatttgatgagcttttttctcaagaagtaaatggtatcactggtggtaattatctgacaggactgctatgggctctagaagaattagcctgggatgagcaatacctagtacgcgtctgtgttgtactggccgaacttgccagccacgatcctgggggcaagtgggctaatcgaccatctaactcgcttactactatattattaccgtggtttccgcaaacgctggcatctatagaaaaacgaaaagttgcagtcaacgtcatcttgcaggaatggcctgacattgcctggaatttactcgtccagcttctacccggtcaccatcaaacctcttctgggtcacacaagccctcttggcgccgaataatcccagatgattgggaaagcaaagtgactaatcaggattactggttgcagacatctttttatgctgagcttgccgtcaaaaacgccggagaagatatcgaacgccttaccttgttgattgataattttgatagccttccatctcctgctttcgaacatcttcttaagcacctctcttcggaaacaattaattgtcttaatgaagagcagcgagttgtaatttgggatcatcttcatcgattcgcaaataaacatcggcgattctctaatgctaattgggctttacctgatgatctgctgaccaaaatcgaaaatgttgccgagcaactggcacctaccaatccattcaacttatatcagcaccttttttcaaatcgagattttgatctttacttagaaaatggcgattgggaagaacggagaaataaactcgaatcaaggcgcgaatccgcaatatcagaaattcttaggcaagatggcgcagaaggcgttattcgatttgcagatcacgtttctgcgccccatcaaataggaagtgtactcggcactatcaacgatgatgtgttcgaaaaacttcttttgccccgtttcctcaatacaaaagaaaataagtataaggcattggtaagcgcttttatttggaagcgtttctatctcaaaggctgggagtggttcgacaatctggataaagctgactggactcctgaacagttaggccaattctttgcttatctgccttttaacaaggagacctggacccgagtctctcattatcctcaagcttccgagaacgaatattgggctcgcaccgatgcaaatcctgacctgggtgaaggtgatcttactagtgccatcgataagctgattgatcatggcagaccacttgcggcaatcaattgcctgtgcaggatgcatcagacaaagcagccaatcgatactgaacagtgtatccgcgctttgcttgctgccacttcaactaacgaatctagctccaacatggatggttacaacataactacccttatccaatttcttcagactgatcccaaagtgaatccggataatctttttcagatcgagtgggcttaccttccattgctcgatggtcaccaagatgctgtgcctaagttccttgagaataaaatggctaatgatccagaatttttctgcgaagtaatccaactcatttatcgttctgacaaagaagacaatatgacaagtgaaccaacagatgaattgaaagcaatcgcaaaaaatgcctggactcttttgtacaactggaagacaccgccaggaagccaatcaaatgggacgttcaacggagaacgctttactgaatggcttcagaaagttaaggagggttctacggcatcaggtcacctggacgttgcactcagcaaagttggtgaagtcttgatttatactccctccgatccgaatggcttgtggataaaccgagaggtcgcagctgctctcaacgatcgagatgctgagagtatgcgcaggggctacatgacaggagcctacaactcacgaggtgtttattgtgttgatccaacaggaaaacctgagagagagctagctgaccagttccgggcaaaagcagaagaagtggaaaacgctggttttcagcgattcgccgttaccttaagagatttagcggttggctatgaccacgaagctgcacaggttatcagcaatctaaatattggagaggatgattaa

SEQ ID NO: 491114 - DNA, 336 bp, Shigella sonnei; identical to SEQ ID NO: 485290

SEQ ID NO: 491115 - DNA, 531 bp, Shigella sonnei
ttgctgctgtgcgaatttatccgcctgctgcgccagcgcattcaggtgctcctgatacgtaaccttgtcaccaagtgcagccagctggcgtttgtactccagcgtctcgtctttatgcgccagcagggatttctcctgtgcggacagctggcgacgttgtgccgcctcctccagtaccgcgaactgactttctgccttccacaaatcccggcgctgctggctgattttctcattcgctccggcatgcttctccagcgtccggagttctgcctgaagcgtcagcagggcagcatgagcactgtcctcctgacgatcgcccgcagacaccttcacgccggactgtttcggctttttcagcgtcgcttcataatcctttttcgccgccgccatcagcgtgttgtaatccgcctgcaggattttcccgtctttcagtgccttgttcagttcttcctgacgggcggtatatttctccagcggcgtctgcagccgttcgtaagccttctgcgcctcttcggtatatttcagccgtga

SEQ ID NO: 491116 - DNA, 621 bp, Shigella sonnei
atgaaagatcaagatgttaggttcgcggtgcatcataagcttttgaaagaatcgcatttagatcctgactgccttgtggtcgatgaattttccatatcccttggcgccagtagagcagacattgctgtaataaatggtgttatacacgggtacgagctcaaaagtgaatatgactctttggagcgtttgcctcttcaaatcaagcattattcttctgtaatggacaaggttactcttgtcgtagctgagaaacatcttgagggagcattaaagttaatcccaggttggtggggcgttaaaacggtttctgttgggccaaaaggcgccattcttataaagcacatgcgtggagaaaagcttaatcgaaaccataactcattgatgctcgctcaattgctttggaaagatgaatgtatcgacgtacttgaacgatggggctattccaaaggaatcaaaagcaagccccgatttgagttatggaatattattgcggaaaatattccaatagcgaatctcaggcttgaagtcagaacagccttaaagaaacgcgtaggctggaaagttaaggcttggcaggctgagtctgcgccaaccaataaagctgtctcacgactaacgtaa

SEQ ID NO: 491117 - DNA, 1068 bp, Shigella sonnei
atgagtcaacatcaatattacccacagctgaaatggaagcctgctgaatatgaatctctgatgcttttagatcaaactacgctctctggttttactccgatcattaccattccagacatagactgggattatgaaaacgaatgctacaagaagagtttgagttcttacttatctgacttcggtattaaccttgcggcatcctggaaagccaatcgtcctgttttgctggatgttaaatatttagataaacatggttcgagccgccatcatcctctagatatgtgtatccaagatgctagagtaaatggtaaggaaattatccctgttgtctctcccgcatattcaacaaactatatacatgctgttcaacgcaacttaatcaatgggctcgctatatctatcaccccccagacatggcaccaattcacaagtctggttaaccacttaaatattcatcctagtttaattgatgtaatcattgattttggagatattcaaaacgcaactgatagtttaaaacaacaagcattaagcatggtcaacacattatcaggccaagctccgtggagaaacttgattttatcttcaaccgcataccctgcatcacaggcagggataccgcaacatcaagttcatcatattccgcgccatgaatacgatctttggatgtatgtagtacagaattttagcaatggaagaacgccaagttttagtgattatcccaccgctagctctaccattacgagcgtagacccacgcttcatgtctcagtatgtctcagtgagatattcgaacgatacctcatggatctttgtaaaaggtaccgcagttaaaggaaatggatggggccaaactaaaaacttatgtactacccttgttagttcgccagagtatcacgtctttggctccaaatttagttggggggatgattacatttaccaaagatcattaggcgctaacaaatctggcggctctaaagaatggcgtaaagttgcacatacgcaccatattacgttagtcgtgagacagctttattggttggcgcagactcagcctgccaagccttaa

SEQ ID NO: 491118 - DNA, 195 bp, Shigella sonnei; identical to SEQ ID NO: 489869

SEQ ID NO: 491119 - DNA, 600 bp, Shigella sonnei; identical to SEQ ID NO: 487149

SEQ ID NO: 491120 - DNA, 654 bp, Shigella sonnei
atgtttgttggtcagggcgatcagatattcatgaacgacgtgttcctgaaatgcctgacggctccgaccattaccagcggcggtaatcctccggcattttccctgacacctggcggacggctgacggcgaaaaatgccgatatcagcggtaacgtgaacgcgaactccgggacgctcaacaacgtcacgattaataagaactgtcgggttctgggaaaattgtccgcgaaccagattgaaggcgatctcgttaaaacagtgggcaaacctttcccacgggactcccgggcaccggagaggtggccatcagggaccattaccgtcagggtttatgacgatcagccgtttgatcggcaaattgttattcccgcggtggcgtttcgcggtgctaaacatgagcggaagaataacaatatttattcgtcatgccgcctgatagtgaagaaaaacggtgctgaaatttataaccgaacgaccctggataatacgctgatatatacgggtgttattgatatgcctgccggtcacggtcacatgacgctggagttttctgtatcggcatggctggtaaatggctggtatcccacagcaagtatcagcgatttgctggttgtggtgatgaagaaagccactgcaggcatcacgattagctga

SEQ ID NO: 491121 - DNA, 369 bp, Shigella sonnei; identical to SEQ ID NO: 487152

SEQ ID NO: 491122 - DNA, 351 bp, Shigella sonnei; identical to SEQ ID NO: 489322

SEQ ID NO: 491123 - DNA, 984 bp, Shigella sonnei; identical to SEQ ID NO: 485819

SEQ ID NO: 491124 - DNA, 291 bp, Shigella sonnei; identical to SEQ ID NO: 485560

SEQ ID NO: 491125 - DNA, 336 bp, Shigella sonnei; identical to SEQ ID NO: 485290

SEQ ID NO: 491126 - DNA, 156 bp, Shigella sonnei
gtggttctgggcacggtaggacgcaccggtatttcagcagcattcctcggcaacacggcggaacaggtgattgatcatcttcgctgcgatctgttggtcattaaacctgaccagtatcagacacccgttgaactggatgacgaagaagacgattaa

SEQ ID NO: 491127 - DNA, 636 bp, Shigella sonnei
atggcgaattaccgtcttatatcactggcgctgacacttgagcgaaaacctgctgtaccgccatcgaaacgggcacatacaggcagagtggctgtgaaagaaagtaatcagcgatggtgctctgacgggttcgagttccgctgtgataacggagaaaaactgcgagtcacgttcgcgctggactgctgtgaccgtgaggcactgcactgggcggtcactacgggcggcttcaacagtgaaacagtacaggacgtcatgctgggagcggtggaacgccgcttcggcaacgagcttccggcgtctccagtagagtggctgacggataatggttcatgctaccgggctaatgaaacacgccagttcgcccggatgttgggacttgaaccgaagaacacggcggtgcggagtccggagagtaacggaatagcagagagcttcgtgaaaacgataaagcgtgactacatcagtatcatgcccaaaccagacgggttaacggcagcaaagaaccttgcagaggcgttcgagcattataacgaatggcatccgcatagtgcactgggttatcgctcgccacgggaatatctacggcagcaagccagtaatgggttaagtgataacaggtgtctggaaatatag

SEQ ID NO: 491128 - DNA, 195 bp, Shigella sonnei; identical to SEQ ID NO: 489869

SEQ ID NO: 491129 - DNA, 195 bp, Shigella sonnei; identical to SEQ ID NO: 5251

SEQ ID NO: 491130 - DNA, 180 bp, Shigella sonnei
atgaagaaaaagcgtacgttgttttttattagtagcctgatgttgctgggcagtggaaccacaatagcaggagataatttgcactttaccggcaatttaatcagtaaatcgtgtacgccagtgattgtggtagccagttggcagaagtacattttcctgccattgccgccagcgatttaa

SEQ ID NO: 491131 - DNA, 375 bp, Shigella sonnei
atgcttatatatacccaaactttgggatacttcgccataccttgcataattctttttatgctctcgtgtttatcagcggtatggtccgcactaacggaaaatgaaaagacatttaatataagtggtattttagctgtcttatgtttttccggcattattacttcaataatgataccaacctataacgatgaggatatcaaagcaggtgaagcattagctgcatgtaaaatcgtagaggaaaatgcgtataacggattatttagcgacaatgtaaataaaattgattgcgacggcatcataaagaacattcctgtaaacacatataacaaactaatgtacgtctataataaaaataaattcagagcgcaggaatga

SEQ ID NO: 491132 - DNA, 243 bp, Shigella sonnei
atggtcggttcagtttgtggtgcagtaactgcggcgctggtcggtgcgcagtgctatgcaggctggggtggtctgattgtgctgccggtggttgaaggcaagctgggttatatcgcagcagtggctgtcggagcagtggtgacggctgtttgtgtgaacgtgctgaaaagtctggcgcgtaaaaatgggtcttcgactgatgaaaaagaagacgacctggatttggattttgaaattaattaa

SEQ ID NO: 491133 - DNA, 2502 bp, Shigella sonnei; identical to SEQ ID NO: 482616

SEQ ID NO: 491134 - DNA, 1518 bp, Shigella sonnei
atgcgtaatggcgacagccgtccgttgcataaaccgacgacgccgctgccttctctggatttgctgacaccgccgccgagcgaagtggagccggtagatacctttgcgcttgaacaaatggctcgcctggtggaagcgcgtctggctgatttccgtattaaagccgatgttgtcaattactctccggggccggttatcactcgctttgaattgaacctggcaccgggcgtaaaagcggcgcgcatttctaacttgtcacgggaccttgcccgttcactttcgacggtggcggtgcgtgtcgttgaagttattcctggcaaaccctatgtaggtctggagttaccgaataaaaaacgacaaaccgtttatctgcgcgaagttttggataacgccaaattccgcgataatccgtcgccattaaccgtggtgctgggtaaagatatcgccggtgagccggtggttgccgatctggcgaaaatgccgcacttgttggttgcggggactaccggttccggtaaatctgtcggtgtgaacgcgatgatcctgagcatgctttataaagcacagccagaagatgtgcgtttcatcatgatcgacccgaaaatgctggagctttcggtttatgaaggcattccgcatctgttaacggaagtcgttactgatatgaaagatgccgccaacgcgctgcgctggtgtgttaacgagatggagcgtcgttataaactgatgtctgcgctgggtgtgcgtaatctggcgggttataacgaaaaaattgctgaagccgatcgcatgatgcgtccgattccagacccgtactggaagccgggtgacagtatggatgcccagcatccggtgctgaaaaaagaaccatacattgtggtgttggttgacgaatttgccgacctgatgatgacggtaggtaaaaaagtggaagagctgatagcacgtctggcgcaaaaagcccgtgccgcgggtatccacctcgtactggcaactcagcgtccatcggttgatgttattactggtctgattaaagcgaatattccgacccgtatcgcctttaccgtatccagtaagattgactcacgtaccattcttgatcaggctggcgcggaatcactgctggggatgggggatatgctctactctgggccgaactccacgttgccggtacgtgtccatggtgcttttgttcgcgatcaggaagttcatgccgtggtgcaggactggaaagcgcgtggtcgcccacagtatgttgatggcatcacttccgacagtgaaagcgaaggtggcgcgggcggtttcgatggcgctgaagaactggatccgttgttcgatcaggcggtgcagtttgtcactgaaaaacgcaaagcgtcaatttctggcgtacagcgtcagttccgcattggttataaccgtgcagcgcgtattatcgaacagatggaagcgcaggggattgtcagcgaacaggggcacaacggtaatcgtgaagtgctggctccaccgccgtttgactaa

SEQ ID NO: 491135 - DNA, 516 bp, Shigella sonnei; identical to SEQ ID NO: 491080

SEQ ID NO: 491136 - DNA, 288 bp, Shigella sonnei; identical to SEQ ID NO: 84381

SEQ ID NO: 491137 - DNA, 240 bp, Shigella sonnei; identical to SEQ ID NO: 7038

SEQ ID NO: 491138 - DNA, 333 bp, Shigella sonnei; identical to SEQ ID NO: 7039

SEQ ID NO: 491139 - DNA, 1341 bp, Shigella sonnei
atgatcaaagagactgttacgatgagtcataaggaactccaccgacttcagattattcaggagtcaattaatcgacatattactcaggaacaagctgcggcacgcattggcatttctattcggcaggttaaacgtctggtgcaacggtatagaaatgaagggccttctggtctggtttcccaccgacgtggaaagcgtcctaataattccttttctactgaattcagagcaacagtaatttcactcctcaaaggccgttacgctgattttggacctacgtttgcgtgcgaaaaattgcgcgagatacacggtttatctttatccgttgaaactctcagaaagtggatgatagaagaggggttatggcgtgaacgccgtcgtaaaattgcccgtatatatcaacgccgcatgcgacgaccatcttacggtgaactgatccagattgatggctcacctcatgactggtttgaaaatcgaggccccagatgtacactgatcgttttcattgatgatgccaccagtgcgttgatggcgttgcgttttgtgcctgctgaaacaacccgggcttacatggaaaccctccggggttaccttaatgatcatggcgtaccgctcgctctctactctgatagacacagtatattcagggtaaataacccagagcgggaaggtgagctgacccagttcactcgtgcgataaagacactgggcatcgagccaatccatgccaacagcccgcaggcaaaagggcgggtagagcgcgccaatcagacactacaggacaggctggtcaaagaaatgcggcttcagaatatcagtgatattgaaacagcaaatgcatggttgccgacctttattgaagcctataacaaccggttcgctacgtcgcctcgtactactgataatgctcatcttgatgtgcaccattctgaagaggaactgggttatatcttcagcctacaggcgaagcgcgttctgtctaaaaatctcactttccagtacaaaagcagtgcgtttcaggtacgcagtgagagccggggatatcgacttaggcattcggttgttactgtatgcgagaactttgacggtgaaattaacgttctgtatgacgggaaagcgctgggctgggaaaagtatgttgatggcccggagcctataccactggatgatgaaaagagtgtccatgaacgagtggataatgcccgtattgatttacgctcaaaatactatgttaaacctaaagctgaccatccctggcttacgcgccgaacgcaaagtcatcagcaagttaagcccccgaagttacctaaaaagaagcctgatcccgataaaaaagattga

SEQ ID NO: 491140 - DNA, 813 bp, Shigella sonnei
atgtgggccgtgaaactgcagcagatgaaggacggacgcctttatattgcgggtatcggagccggtattgagaatactccagcaggtatgcagagtcaggtgctgctggcggcagacaggattgcgatgattaatcctgcgaatggcaacacaaagccgatgtttgttggtcagggcgatcagatattcatgaacgacgtgttcctgaaacgcctgacggctccgaccattaccagcggcggtaatcctccggcattttccctgacaccggacgggcggctgacggcgaaaaatgccgatatcagcggtaacgtgaatgcgaactccgggacgctcaacaacgtcacgattaacgagaactgtcgggttctgggaaaattgtccgccaaccagattgaaggcgatctcgttaaaacagtgggcaaagctttcccccgggactcccgtgcaccggaacggtggccatcagggaccatcaccgtcagggtttatgacgatcagccgtttgaccggcagattgttattccggcggtggcattcagcggcgctaaacatgagcgggagaataacgatatttattcgtcatgccgcctgatagtacggaaaaacggtgctgaaatttataaccgtaccgcgctggataatacgctgatttacagtggtgttattgatatgccagctggtcgcggccacatgacgctggagttttcggtgtcatcatggctggtgaataactggtatcccacagcaagtatcagcgatttgctggttgtggtgatgaagaaagccaccgcaggcatcagtatcagctga

SEQ ID NO: 491141 - DNA, 258 bp, Shigella sonnei; identical to SEQ ID NO: 490905

SEQ ID NO: 491142 - DNA, 435 bp, Shigella sonnei; identical to SEQ ID NO: 236353

SEQ ID NO: 491143 - DNA, 273 bp, Shigella sonnei
atgcagcggctggacgatgcctttgagcatggtgcggatgtcagcgttgttcacgacgttgttcgtgaactgatggaagaaaagcgcgccagccgtcaggtgacagtcccggcggtgatgctggaaaaagtgttggcgctggcaggcagtgaaatgaagcgcctgtatgccgtcgggagtgagaacgggggcgacggtgatgcgttcgtcagggaagaacgcgaagcaatggatgttgtgttacaggcgctggacggggagcacatgtcatga

SEQ ID NO: 491144 - DNA, 213 bp, Shigella sonnei
atgcggctgcgtctcgcgcggatttgctggactggtgatgttcttgccgaacatgcagcctttcgccgtcagcgaccagaattttttgatgttgttaatcccggtacggctgtatcgttcgcgctgctcgacgatccccagcttcaccatctgatgatatgcctgattagccgtcaggcggataccatactgtttcagcagtgcactcagtga

SEQ ID NO: 491145 - DNA, 819 bp, Shigella sonnei; identical to SEQ ID NO: 483948

SEQ ID NO: 491146 - DNA, 825 bp, Shigella sonnei; identical to SEQ ID NO: 483952

SEQ ID NO: 491147 - DNA, 1221 bp, Shigella sonnei
gtgggaaaagcactaaacaaactgagcgattcaacgttaaaaaaattggtggctgtccaggcagaaaaagagcgtttttactccgacgggggcgggctggagattaaacactcaaagggcggcaaattaacctggtatttccggtaccgaacgggaggccgtgaggttgccgcagagcggttaaagctgggggcttaccctgaattgtcgctgaaagccgcaagggaaaaacgcacactgtgccgggcatggctggctgagggtaaaaacccccgttatgagttgtgcgccacagtacaggaagcactaaaacccgttacggtgaaggaagcgattaactactggctggaggaatatgcgaaggataaccgcaaagattacataaagctggtgcagcgtatggataagcacatcatttgccatattggggcaattccccttgataagtgtgatacaaggcagtggatcgcatgttttgaccgcgtacgaaaaaaagcaccagtagcagcgggccatgtcatgcagacatgcaaacaggcgctaaagttttgccgcaggcggcgctacgcgtttagcaacgccctggacgatttgatcgttactgatgtgggtaagagagcagaaatccgcgagagagtgcacagcaacagcgaactaaaagaaattctacgcgctattgatggtgatgtgttcgctccctattacagtgcgttaatgcgcttgttaattgtgttcgggtgcagaacggcagagatcagactttcagagatcaaagaatgggatctgaaagaaatgttgtggacagtgccaaaagagcacagcaaaacgaaggtaacaatattccgacctattcctgatggtattttgccgttcattcagaagctggtggagcaaaacgcacacactgggttattactcggcgaactgaaaaaagataccacggtggcgcaatatggacgaaatgcgcataagcggcttaagcaggaacactggacgctgcatgatttccgacacacgtttacaactatgctgaatgatttaggtgtcgatccgcatatcgtggagcacatcacagcgcatcagatgccaggtcagcaaaaaacctataaccattcacgctatttgcaggcgaaacgggacgcactgaatctatgggttgagcgtcttgatgtgattgcaggatataatgaaaatattgtgatattgagagggatacaatga

SEQ ID NO: 491148 - DNA, 855 bp, Shigella sonnei
atgacgaaaaaagtaaatagtaaaaaagatttaccaaagtcatttgatttaggcaaatatgattgcctagaaaacttgtcggataaagatctatttcgccaattatattggcgacaagatgatttaacaatgaaacattctgagatgcctgaatatggatttatgtttggtgctgaatacccgttgcataataattacggggatccatttggagagctgaaagaagacgattggttttgtgataaacaaaaagaatatgaccataaagtgcaaccgaagttaattgagctaagttatgatgatggaattaaacctgtaacaaggtttgatatatcaatgattaataaactgactgcggaaagaggatattggaaggataaaccaatcatcatagataatgagatggttggaagtttaatatcagaagataatgggatgttttgggctgtgatgcgtgaaccagtgaatctcctttctgatacattagataatatgcttgtttctgttgacttactacataacagagatgatgagttgattgaagcgtttacaaaactattaccaaaatggcgtagtgaactttcaattgttgagccagacaaaccaattgcaggaagttgggaaagcatacgacgtaaaattattgattataagataatcccattaattgacttattatcttgggagttgtctacagatagaaaaatttcattaggggtgcttgccgtatctttgtaccctgatggtgaaaaggacacctttgctattgctcagactgtaaaacctttcttagaaaaaataatgcgcagcgattctttagaaaaaataagaaaaatgttatctaatgaaaattaa

SEQ ID NO: 491149 - DNA, 225 bp, Shigella sonnei
atgaatcaaaatacacaatttcaatcactaacagatcgcgtaattcgtgaggatgaatgtcgtaagttaacaggcgtcagccgtactacacgctacgaactggagaagaaagggggctttccgtctcgccgtaatcttggggggcgttctgtaggctggttgctttccgaagttatggactgggtgcaaagccgtgaccgcgttaattcaggtaaggcagcctag

SEQ ID NO: 491150 - DNA, 714 bp, Shigella sonnei; identical to SEQ ID NO: 16647

SEQ ID NO: 491151 - DNA, 309 bp, Shigella sonnei; identical to SEQ ID NO: 487355

SEQ ID NO: 491152 - DNA, 354 bp, Shigella sonnei; identical to SEQ ID NO: 466835

SEQ ID NO: 491153 - DNA, 708 bp, Shigella sonnei
atggaagcacagagcgacatttacgaccggacaaaaggccgtctggcgatacccggcgcattcggctttgggtgtgcttttctgcctgaagatgttatccgttttgacactaagagtgatttcctggcctgggtaaggaatgcgctgccaggtgaatattccgttgctggcccctacgacatcatcatacccgacacacggtttgaaggggtgctcagcatccggtggactgatgcacgccctgagacaacagaaccgaggtacagagccaaatcccttactttttacggcattaacggccccatttatcacacccgctactgctactggcccatatccagactgactggctgggtgaaaataaatataaccacagaagatattatttacagaatcgtggcgagctctgtctgcaacagatggggagaccctgacattggcgggctgattattgctgcgtaccagggagaagctgacggtgataaagtcatcagacttgtcagggggcagtcatacagaggctcacgactgggaccggtggggatttcagtgcccagtactcccaccggaacgtatatagcatccccacaatttttcattacgggatgttcagagcattcattaccggggtcatatagcgccctgtccggggtgccggatgctcatgtctctggcgcaatgcccgggctttttattcgcacatcgtga

SEQ ID NO: 491154 - DNA, 189 bp, Shigella sonnei; identical to SEQ ID NO: 463227

SEQ ID NO: 491155 - DNA, 381 bp, Shigella sonnei
atgctgggagcggtggaacgccgcttcggcaacgatcttccgtcgtctccagtagagtggctgacggataatggttcatgctaccgggctaatgaaacacgccagttcgcccggatgttgggacttgaaccgaagaacacggcggtgcggagtccggagagtaacggaatagcagagagcttcgtgaaaacgataaagcgtgactacatcagtatcatgcccaaaccagacgggttaacggcagcaaagaaccttgcagaggcgttcgagcattataacgaatggcatccgcatagtgcgctgggttatcgctcgccacgggaatatctgcggcagcgggcttgtaatgggttaagtgataacagatgtctggaaatatag

SEQ ID NO: 491156 - DNA, 309 bp, Shigella sonnei; identical to SEQ ID NO: 486565

SEQ ID NO: 491157 - DNA, 297 bp, Shigella sonnei; identical to SEQ ID NO: 488049

SEQ ID NO: 491158 - DNA, 327 bp, Shigella sonnei; identical to SEQ ID NO: 486130

SEQ ID NO: 491159 - DNA, 444 bp, Shigella sonnei
atgatgattattaatggtgttacttttactaaaaatgatactcaaaactcacttattattttagatagaacatggcaacatcatgatgtgattgacattaaatttatagctgatatacagtttaatactgacttatgtggtgacacttatatttccagaggtcccgttttatatgcaattgagcttgagagcgatattttaatcaaaaaaaacctgctgaacgggaaatattttgactcaggatacataccctgtagtagagctgatgaatctatccagttctcttatgctgatatggaatctttttcatattcaacctcaccagagggcaaacaatacattgaaggctgtttttatttaaacaagactaaaatagtcagaaaacttataccatttggtcaaaccattcttcgcaaagtaactttctccaatatagagagttaa

SEQ ID NO: 491160 - DNA, 480 bp, Shigella sonnei; identical to SEQ ID NO: 464934

SEQ ID NO: 491161 - DNA, 171 bp, Shigella sonnei; identical to SEQ ID NO: 490441

SEQ ID NO: 491162 - DNA, 204 bp, Shigella sonnei; identical to SEQ ID NO: 486816

SEQ ID NO: 491163 - DNA, 468 bp, Shigella sonnei
atgtcttccatgacaacaactgataataaagcctttttgaatgaacttgcccgtctggtcggtcattcacacctgctcaccgatcccgcaaaaacggcccgctatcgcaagggcttccgttctggtcagggcgacgcgctggctgtcgttttccctggctcactactggaattgtggcgggtgctgaaagcctgtgtcaccgccgacaaaattattctgatgcaggctgccaatacaggcctgaccgaaggatcgacgccaaacggtaacgactatgatcgcgatatcgtgatcatcagcaccctgcgtctcgacaagctgcacgttcttggcaagggcgaacaggtgctggcctatccgggcaccacgctctattcgctggaaaaagccctcaaaccgctgggacgcgaaccgcactcagtgattggatcatcgtgtataggcgcatcggtcatcggcattttgtaa

SEQ ID NO: 491164 - DNA, 720 bp, Shigella sonnei; identical to SEQ ID NO: 8275

SEQ ID NO: 491165 - DNA, 585 bp, Shigella sonnei
atggcattcagaatgagtgaacaagcacggaccataaaaatttataatctgctggccggaactaatgaatttattggtgaaggtgacgcatatattccgcctcatacaggtctgccagcaaacagtaccgatattgcaccaccagatattccggcaggcttcgtggctgttttcaacagtgatgaggcatcgtggcatctcgttgaagaccatcggggtaaaacggtttatgacgtggcttccggcgacgcgttatttatttctgaactcggtccgttaccggaaaatgttacctggttgtcgccgggaggggaatatcagaagtggagcggcacagcctgggtgaaggatacggaagcagaaaaactgttccggatccgggaggcagaagaaacaaaaaacagcctgatgcaggtagccagtgagcatattgcgccacttcaggatgctgtagatctggaaatcgcaacggaggaagaaacctcattgctggaagcctggaaaaagtatcgggtgttgctgaaccgtgttgatacatcaactgcaccggatattgagtggccagaagaaccagacaccgtgtaa

SEQ ID NO: 491166 - DNA, 744 bp, Shigella sonnei
atgaccacaccaaatccactggcaaagacgaaaggtgcggggacgacgttctggatgtataccggcaacggcgatgcgtttgcgaaccctttgtcggacactgactggctgcgtcttgcgatggtgaaggatctgcaacctggcgaaatgaccgctgatgcagaagatgacacttatctcgatgatgaagatgcagactggaaaacgacaacccaggggcagaaatccgttggtgatacttcggcgacgctggcctggcgtccgggtgacagcgggcagaaaaaactggttcagttgttcgactccggtgaagtctgcgcgtttcgtatcaaatatcccaacggcactgttgatgttttccgtggctggctgagctcactgggtaaaaccattgcctcaaaagacgtgatgacccgcacagtgaaaatcagcggtgttgggcgtccgtatctggcagaggaaggcactgaaacagtgagcgttaccgggctgacggtggcaccggcatctgccagtgtaaaagtgggagcaaccaccacgctgacctttacagtaaaacctgacggagccagtgacaaagcgatcagtgtgcattcgacagatccacagactgccacggtgaccctgaacgggcttgtggccacggtgaaaggcgtgaagcagggcagtgtcagcattgtgggcatgacttctgacggcgattttgtggcagtggctacggtggctgtcagcgccgcaggttaa

SEQ ID NO: 491167 - DNA, 735 bp, Shigella sonnei
atgtcgtcaaccctacgagaagccagtaaggacacgttgcaggccaaagataaaacttaccactactacagcctgccgcttgctgctaaatcactgggcgatatcacccgtctacccaagtcactcaaagttttgctcgaaaacctgctgcgctggcaggatggtaactcggttaccgaagaggatatccacgcgctggcaggatggctgaaaaatgcccatgctgaccgtgaaattgcctaccgcccggcaagggtgttgatgcaggactttaccggcgtacctgccgttgttgatctggcggcaatgcgcgaagcggttaaacgcctcggcggcgatactgcaaaggttaacccgctctcaccggtcgacctggtcattgaccactcggtgaccgtcgatcgttttggtgatgatgaggcatttgaagaaaacgtacgcctggaaatggagcgcaaccacgaacgttatgtgttcctgaaatggggaaagcaagcgttcagtcggtttagcgtcgtgccgccaggcacaggcatttgccatcaggttaacctcgaatatctcggcaaagcagtgtggagtgaattgcaggacggtgaatggattgcttatccggatacactcgttggtactgactcgcacaccactatgatcaacggccttggcgtgctggggtggggcgtgggtgctgtctcttatacacatctgacgctgccgacgatactccttgtgtag

SEQ ID NO: 491168 - DNA, 297 bp, Shigella sonnei; identical to SEQ ID NO: 488049

SEQ ID NO: 491169 - DNA, 468 bp, Shigella sonnei; identical to SEQ ID NO: 19402

SEQ ID NO: 491170 - DNA, 930 bp, Shigella sonnei; identical to SEQ ID NO: 490898

SEQ ID NO: 491171 - DNA, 369 bp, Shigella sonnei
atggttttacagcgcgcggctggcactcactacattgcggatgctgtcgcacagtctgctggtggggtgttcgtatcgcttcctgaaattgaggaagtagagaacgccgatataaaccagcgcctgctggaagtcatcgaacagatcgggaattactcaaagcagattcgttcggcaatcgaagatggggtcgtggagccacacgagcagacagcaattaatgatgagttgtatctgtcaatttcgaagctccaggagcatgcagcactggtctacaaaatcttctgcgctccagaaaagagtgacgcccgcgagtgtgcagctccgggcgtcgtggcgttttgtgtctgtggagaaactaacgcatga

SEQ ID NO: 491172 - DNA, 177 bp, Shigella sonnei; identical to SEQ ID NO: 402013

SEQ ID NO: 491173 - DNA, 366 bp, Shigella sonnei; identical to SEQ ID NO: 488000

SEQ ID NO: 491174 - DNA, 180 bp, Shigella sonnei
atgaataagccgcaactggcggaatcacagaagaccgctttgcttaccgaagcggagtctgtcatccggccgcgggggcgtgctgtcaggctgaacagagaaacggatgaatccggggaggcccgggggcgggcctctgtttttccggagtcagtccggtctgtggtttatgcgatgtga

SEQ ID NO: 491175 - DNA, 330 bp, Shigella sonnei; identical to SEQ ID NO: 488222

SEQ ID NO: 491176 - DNA, 231 bp, Shigella sonnei
atgctacctaggtacaaattttataaactggcatcacatctaatcagacaagatacccgctcaaaagaatatgaagatgttacgcttgaccgtaacaagaaaagactaaagccacatcaaattgagcagttacgctatgaattaaagtcactgggtatcgagcttgattatagtgacccgactcaatttaagcgggcttatgaactcattaagaattggggggaagaatga

SEQ ID NO: 491177 - DNA, 501 bp, Shigella sonnei
atgtctgttgttgcacctgctgtatacgttggaacctggcacaaatacaactgtggaagcatcgccggacgctggtttgacctgaccacgtttgatgatgagcgcgactttttcgccgcctgccgtgctcttcaccaggatgaagccgatcctgaactgatgtttcaggattatgagggattcccggggaatatggcctctgaatgccatatcaactgggcctgggttgaaggcttccgccgggcacgggatgaaggctgcgaagaggcttatcgtctctgggtggatgataccggtgagacggattttgacaccttccgcgatgcctggtggggcgaggctgacagtgaggaggcttttgcggttgagttcgccagtgataccggcctgctggctgacgtgccggagacggtggcgctctattttgactatgaggcgtatgcgcgggatttattcctggactccttcacctttattgacggtcatgtgttccgtcggtga

SEQ ID NO: 491178 - DNA, 267 bp, Shigella sonnei; identical to SEQ ID NO: 381271

SEQ ID NO: 491179 - DNA, 141 bp, Shigella sonnei
atggcgctggcaggtagtgaaatgaagcgcctgtatgccgtcgggagtgagaacgggggcgacggtgacgcattcgtcagggaggaactcgaagcaatggacgttgtgttgcaggcgctggacggggagacgatgtcatga

SEQ ID NO: 491180 - DNA, 216 bp, Shigella sonnei
gtgaaagaaatccacaataatgatcttaagcagcaattgatgagtgaatccgcgtttaaggattgctttttaacggatgtttcagccgatacgcggctgtttcattttttagcgcgtgactacattgtgcaggaagggcaacagccgtcctggctgttttacctgacgcgaggccgcgccaggctttacgccacgctaaatagctgcgcggaatag

SEQ ID NO: 491181 - DNA, 987 bp, Shigella sonnei; identical to SEQ ID NO: 483808

SEQ ID NO: 491182 - DNA, 579 bp, Shigella sonnei
atggaaaaattccacatgtttgatgaccgtatttatcagatgactaatggcgttaaagctgccgaccgtattatttacactgtcatgttgaatgaacaaaagttttatcacgataaggggcaatattataccccttcatatgctcatcttggtcagtatgctggaatcacaagaacatccgtgattgcatgtatgaaacaacttgaggcacatggtttaatcaagaaaactaacgttgcaagcaatcagtgtgttattaaagtttattcacttgatgaagtaccggaggttttaacagagcttacagctaaggaagccagaaaggcaaagctggagtctaaagttactcagtcagtcaagaaagatgacccactgagtcaaaattttttactcagtcagtcaaaatctttgacacgtataataacagtaataacaagaaagaacttattaataacaataaagaagatgactttgaagaagaatattttaagaagggagcttcgctctgtgattcacatgaatgtgattctcttggtattgaagaggctattaaagagactgttaaaacatctgacttag

SEQ ID NO: 491183 - DNA, 552 bp, Shigella sonnei
atgcgtatttccttgaaaaagtcagggatgctgaagcttggtctcagcctggtggctatgaccgtcgcagcaagtgttcaggctaaaactctggtttattgctcagaaggatctccggaagggtttaacccgcagctgtttacctccggcaccacctatgacgcctcttccgtaccgctttataaccgcctggttgaatttaaaatcggcaccactgaagtgatcccgggcctcgctgaaaagtgggaagtcagcgaagacggtaaaacctataccttccatctgcgtaaaggtgtgaagtggcacgacaataaagaattcaaaccgacgcgtgaactgaacgccgatgacgtggtgttctcgttcgaccgtcagaaaaacgcgcaaaacccgtaccataaagtctctggcggcagctacgaatacttcgaaggcatgggcttgccggagctgatcagtgaagtgaaaaaggtggacgacaacacagttcagttcgtactgactcgcccggaagcgccgttcctcgctgatctggcaatggacttcgggtaa

SEQ ID NO: 491184 - DNA, 459 bp, Shigella sonnei
atggcgggtgatttacgcaggttaaggggagatcgtgacaaaaaaagcgttcctcactgtatcgttcatgcctgcatgaacgggttattcttcctgactacagaattacatcgctccttcagttcatacatcacttttacatcattccttcagctcatacgtcactttcatcctctgtgccatttgtacatcacccccttcctgaacgtgctgacagcgggttttccggctgcgccggcaacgcttcacggccacgcaataaattgcgtccccgttcaccgttttcggatgggaagaacgccggaaacaggacttaccccggctgaatggtgtgaatttccgcgctatgcacttgtgcgcatactcatgcatgccgtaaaaacagagcctgcgcgtttctggcgggttttcgggtggtttgttgcctgttttaccggtttcccgtcagaaacgccctga

SEQ ID NO: 491185 - DNA, 366 bp, Shigella sonnei; identical to SEQ ID NO: 486089

SEQ ID NO: 491186 - DNA, 159 bp, Shigella sonnei
atgaatctgacagtgcgtgatggaatgcgtaagccatgtcgtcgtttactgcaaccggcactgccggcgctgcgtaaagcggtgttatatctgcccgaaaatcacatgctttatgcagtcgtacccaacactcaacttccgctttgtcaaaatatatag

SEQ ID NO: 491187 - DNA, 1386 bp, Shigella sonnei
gtgcaggatcaagactctgtcatcacggtacgcagactctataatgggtatttcggtaatggcacagtcaatatttccaataatggtctgattaataacaaagaatattcattggtgggcgttcaggacggttcccacggtgtcgtcaacgtgaccgataaagggcattggagtttcctcggaacaggcgaagctttccgctatatctatatcggtgatgctggtgacggtgaacttaatgtctcgcgtgaaggtaaagtagattcgggaattatcactgcggggatgaaagaaacaggcacaggcaacattactgttaaggataagaactccgttatcactaatctcggaactaatcttggttatgacggccacggcgaaatgaatatcagtaatgaggggcttgttgtcagcaacggaggaagctcactcggttatggagaaaacggcgtcgggaatgtcagcatcaccacgggggggatgtgggaggtcaataagaatgtctataccaccattggtgttgcgggcgtcggaaacctcaatattagcgatggcggtaagtttgtatcgcaaaatattacttttttgggcgataaagcaagcggtatcggcacactgaacctgatggatgcgacatcatcgttcgatactgtgggtatcaatgtcggtaattttggtagcggtatcgtaaatgtcagtaatggtgccacccttaattcaacgggctatggatttatcggaggaaatgcctccggtaaggggatagttaatatttcaacggacagtctctggaatttaaagacatcatctactaacgcacaattgctacaggtcggtgtattaggcacgggtgaactgaatattaccaccggaggtatagttaaagcgcgtgatacacagatagctctcaatgacaaaagtaagggcgacgtgagggtggatgggcagaactctcttcttgaaacattcaatatgtacgtagggacatctggtacgggtacgttaaccctgacgaatagcggcacgctgaatgtcgaaggtggagaagtttacttaggtgtttttgaacctgctgtaggaacgctaaacattggtgcagctcacggtgaggcggcggcagatgccgggtatataaccaacgcgacgaaagtagagtttggttctggcgaaggtgtttttgtctttaatcatactaataacagtgatgccggctaccaggtcgatatgctgattacaggtgacgataaagacggaaaagtgatccatgatgcaggccatacggtgttcaatgcagggaatacttatagcggtaaaacgctggtcaatgacggcctcctagactggccccctgaatctccagacaaccagtatcacttaaataagtga

SEQ ID NO: 491188 - DNA, 381 bp, Shigella sonnei; identical to SEQ ID NO: 486980

SEQ ID NO: 491189 - DNA, 840 bp, Shigella sonnei
atgggttcgagtgaagtcaccattgcaagccccggtacgctcgacattctcgcatcaacgaacagtgcaggagattacacgctgaccaatgcgctcaaaggcgatggcttgatgcgagtgcagctgtcatcctacgacaagatgtttggctttacccatgcaacagggactgaattcgccggtgttgcccaactgaaagacagaaccttcactctggaacgcgacaacaccgctgcgcttactcacgcgatgttgcagtctgacagtgaaaataccacatcggtaaacgtgggagagcaatccattggtggactggccatgaatggcggtacgctcattttcgatacggatattcctgctgcgacgcttgcagagggatatatcagcgtcgatacgctggttgtcggcgcgggtgactacacctggaaaggccgtaactatcaggtaaacgggacgggcgacgtgcttatcgacgtgcctaaaccgtggaatgatcccatagcgaataaccctctgacgacgctcaatttgctggaacacgatgatagccatgtcggcgttcaactggtgaaggcgcaaacggttattgggtcgggtggctcattaacgttacgtgatttacagggcgacgaggtggaagcggacaaaacgttacacattgcgcaaaacggaacggtggtcgccgagggtgattatggattccgcctcacgaccgcaccaggtgatggtttgtacgttaactatgggctgaaagcgctgaacatccatggtgggcaaaagctgacgttagccgaacatggcggagcctatggcgcaacggccgatatgtcggcaaaatag

SEQ ID NO: 491190 - DNA, 738 bp, Shigella sonnei; identical to SEQ ID NO: 486991

SEQ ID NO: 491191 - DNA, 783 bp, Shigella sonnei; identical to SEQ ID NO: 485032

SEQ ID NO: 491192 - DNA, 330 bp, Shigella sonnei; identical to SEQ ID NO: 489863

SEQ ID NO: 491193 - DNA, 381 bp, Shigella sonnei; identical to SEQ ID NO: 458903

SEQ ID NO: 491194 - DNA, 201 bp, Shigella sonnei
atgtgtcaggtatttggtgtatccaggagcggttattacaactgggtacagcatgaaccctcagacagaaaacaaagtgatgagcggctaaaactggagattaaggtggcacatatccgcactcgcgaaacatatggaacccggcggctccagacggagctggcagagaatggcatcatcgttggtcgtgaggtagcctga

SEQ ID NO: 491195 - DNA, 195 bp, Shigella sonnei; identical to SEQ ID NO: 489869

SEQ ID NO: 491196 - DNA, 1146 bp, Shigella sonnei; identical to SEQ ID NO: 483149

SEQ ID NO: 491197 - DNA, 264 bp, Shigella sonnei; identical to SEQ ID NO: 490106

SEQ ID NO: 491198 - DNA, 306 bp, Shigella sonnei
gtggaacagacctatctgcaactgctggagcaacgttacctgccctcgctgtttaacgggctggtcaaagcgatgaacgccgcgccgccggagagtgaagaaaaactcgcggtgctgcgcgtgatgcgaatgctggaggacaaaagcggacgtaacaatcaggtggtgaagcagtatatggcaaaacgctggagcgaaaagttccacggtcagcgcgatatccaggcacaactgatgtcccatcttgactacgcgctggctcatactgactgcttcctgccgacctcaatctgcgtgaccaggtag

SEQ ID NO: 491199 - DNA, 2784 bp, Shigella sonnei; identical to SEQ ID NO: 485287

SEQ ID NO: 491200 - DNA, 2373 bp, Shigella sonnei
atgaagcgagttcttattcctggcgtcattttatgtggcgctgatgtggcgcaggccgtcgatgacaaaaacatgtacatgcatttttttgaagagatgacggtctatgctcctgtccctgtacccgtaaacggcaacacgcattacaccagtgaaagcatcgagcgtttaccgaccgggaatggcaatatcagcgatctgctgagaaccaaccctgcggtacgcatggattcaacgcaaagtacctcgttgaaccagggagatattcgccctgagaaaatctctattcacggtgcgtcgccctaccagaatgcctatttgattgacggtattagtgcaactaataacctgaacccagcgaatgagtccgatgccagtagtgcaaccaatattagcgggatgtcacaggggtattatcttgatgtcagcttactggacaatgtgacgctttatgacagttttgtgccggttgaatttggtcgcttcaatggcggggtaattgatgcaaagatcaaacgcttcaacgctgatgatagcaaggtgaaattgggttatcgcactacgcgttcggactggttaacatcgcatatcgatgagaataacaagagcgcatttaatcaaggctcttcaggaagtacttattactccccagattttaaaaagaacttttataccttgtcgtttaatcaggaactcgctgataacttcggcgttaccgccggtttatcgcgccgccagtctgatatcacccgcgcggattatgtttcgaatgacggcattgtcaccggtcgggcacagtataaaaacgttatcgatactgcattgagcaaatttacctggtttgccagcgaccgctttacccacgatttaaccttaaaatataccggctccagccgtgattataataccagcaccttcccgcagtctgatcgcgaaatgggtaataaatcctatggtctggcatgggatatggatacgcaactcgcatgggccaaactacgtaccaccgttggttgggatcatattagtgattatacccgtcacgatcatgacatctggtacaccgaactttcatgtacatatggtgatattacagggcgttgtacctgtggcggattaggacacatttcccaggctgtagataattacaccttcaaaacacgcctggactggcaaaaattcgccgtgggtgatgtttcgcatcaaccctacttcggcgcggaatacatctattccgatgcatggactgaacgccataaccagtctgaatcctatgtgattaatgctgccggaaagaaaactaaccataccatttaccataaaggtaaaggcagcctgggaattgacaactacacgctgtatatggcggagcacattagctggcggaatgtgtcgttaatgcccggtgtgcgttatgactatgacaactatctgtcaaaccacaatatctccccgcgctttatgacggaatgggatatttttgctgatcaaacctcaatgattaccgccggttataaccgttactatggcgggaatattcttgatatgggattacgtgatatccgcaatagctggacggaatcggtatcaggtaataaaactctgacgcgttatcaggatttgaaaacgccttataacgatgaactggcaatgggattgcagcagaaaatcggtaagaacgttattgcgcgtgcaaactatgtttaccgtgaagcgcatgatcaaatcagcaaaagcagtcgtaccgacagcgcgactaaaaccaccattactgaatataacaacgatggcaaaaccaaaacgcattcgttcagcctcagttttgaactggccgaacccctgcatatccgccaagtagatattaacccacaaattgtctttagctatatcaagagcaagggcaacttgtcgttaaacaatggttatgaggagagcaataccggtgataaccaggtggtttataacggtaatctggtctcttacgatagtgttccagtggcagattttaataacccattaaagatctccttaaacatggatttcacgcatcaaccgagcgggttagtgtgggcgaatacgctggcctggcaagaagcgcgtaaagctcgcattatccttggtaagacaaatgcgcaatacatcagcgaatattcagattacaagcagtatgttgacgaaaaactggatagcagcctgacctgggacacccgcttgtcctggacgccacaatttctgaaacaacaaaacctgacgatcagtgccgatattctcaatgtactggatagcaaaaccgctgttgatacaacgaacaccggtgtggcgacctacgccagtggccgtactttctggcttgatgtcagcatgaaattttaa

SEQ ID NO: 491201 - DNA, 267 bp, Shigella sonnei; identical to SEQ ID NO: 11114

SEQ ID NO: 491202 - DNA, 1641 bp, Shigella sonnei
gtggaggtgattcatcaacgttttgtccttgccggagccaaacttgcgcaagctgataaagcaaaattaaaagtactgaatacagaagctgcgaccctgaccagccagtttaaccagcgattactggcagcaaataaatccggcggtctggttgtgaacgatatcgcgcagctggcaggaatgagtgagcaagagattgcgctggcggcagaggcggctcgcgagaaaggtctggataacaaatggctgattccgctgctgaataccacccaacaaccggcgcttgccgaaatgcgcgatcgtgcgacgcgtgaaaaactgtttattgcgggctggacgcgagcggaaaaaaatgatggcaatgatacccgcgctatcattcaacgtctggtagagattcgcgcacagcaggcgaaactgcttggttttcctcattatgccgcatggaaaatcgccgatcagatggcaaaaacgccagaagcagcactcaactttatgcgggaaattgttccagcggcgcgtcaacgtgcgagcgatgaattagcctccatacaggcggttatcgataagcagcagggcgggtttagcgcgcagccgtgggactgggcattttatgcggaacaggtacggcgggagaaatttgatcttgatgaagcgcagctcaagccatattttgaattaaacacggtgttgaatgaaggtgtattctggaccgcgaatcagctcttcggtattaagtttgtcgaacgttttgatattcctgtctaccatcctgacgttcgggtgtgggaaatttttgatcataatggcgtggggctggcgttattttacggtgatttcttcgcccgtgattcaaaaagcggcggtgcatggatgggcaattttgttgagcaatcaacgcttaatgaaacgcatccggtaatttataacgtctgcaattatcagaaacccgctgccggtgagcctgcgttgttactctgggatgatgtaataaccttattccatgaatttggtcatacgctgcacggcctttttgcccgccagcgttatgccacgctttccggcaccaacacgccgcgtgattttgtcgaatttccgtcgcaaatcaacgaacactgggcaacgcatccgcaggtattcgctcgctacgcccggcattatcagagcggggcagcaatgcctgacgaactgcaacagaaaatgcgtaatgccagcctgttcaacaaagggtatgagatgagcgaactgcttagcgccgcacttctcgatatgcgctggcattgcctggaagaaaacgaagcaatgcaggatgtcgatgattttgaattgcgggcgctggtggcggaaaatatggatcttcctgctataccgccacgctatcgcagcagttatttcgcccatatttttggtggcggatatgctgcaggttattacgcttatctgtggacgcaaatgttggccgatgatggttaccagtggtttgttgagcagggcggattaacgcgtgaaaatgggcagcgttttcgcgaggcgatcctttccagaggtaacagcgaagatctggaacgcctgcatcgacaatggcgcggtaaggctcctcagattatgccgatgctgcaacatcgtggcttgaacatataa

SEQ ID NO: 491203 - DNA, 1386 bp, Shigella sonnei; identical to SEQ ID NO: 485526

SEQ ID NO: 491204 - DNA, 309 bp, Shigella sonnei; identical to SEQ ID NO: 487355

SEQ ID NO: 491205 - DNA, 1074 bp, Shigella sonnei
atgtctgaacaagaaacacggggagccaatgaggctattgattttaacgatgaactgagaaatcgccgcgaaaaactggcggcactacgtcagcaaggtgtggcgtttcccaatgattttcgccgcgaccatacctctgaccagttgcacgaagagtttgatgcgaagaataaccaggaactggaatccttaaacattgaagtctcggttgctggccgaatgatgacccgtcgtatcatggggaaagcctcctttgtaacgttgcaggatgtcggtggccgtattcaactgtacgttgcaagagatagcctgccagaaggtgtttataacgatcagtttaaaaaatgggatctgggtgacattatcggtgcccgcggtacgctgtttaagacgcaaacgggtgagctttccattcactgtactgagttgcgcctgctgactaaagcactacgtcctttaccagataaattccatggtctgcagaatcaggaagtccgttatcgtcaacgttatctggacctcatcgctaacgataaatcccgtcaaacgtttgttgtccgttcaaaaattctggccgctatccgtcagttcatggtcgcgcgcggctttatggaagtagaaaccccgatgatgcaggtaattccaggtggggcatctgctcgcccgtttattacccatcataatgctctggatttagatatgtatctgcgtatcgcgccggagctgtatctgaaacgtctggttgtaggcggttttgaacgggtattcgaaatcaaccgtaacttccgtaatgaaggtatttctgttcgccataatcctgagttcacaatgatggaactctacatggcgtatgcggattaccacgatttgattgaactgacagagtcactgttccgcaccctggcacaagaggttctgggtaccactaaagtcacttatggcgagcatgtgtttgatttcggcaaaccgtttgaaaaactcaccatgcgcgaagcaatcaaaaaatatcgtccagaaaccgatatggccgacctggataattttgatgctgctaaagcattagctgaatcttga

SEQ ID NO: 491206 - DNA, 765 bp, Shigella sonnei
atgaaatcaatggtgaatgatactgatggtatcgtgcgcgttgcagaaagcgtcattcctgaaattaaacatcaggatgaggtgcgggtaaaaattgccagctcgggcttatgtggttccgatttacccaggatatttaaaaatggtgcacattattatccaataacgttaggccatgaatttagcggctatattgatgcggtgggatccggtgttgatgatttacaccctggcgatgcggttgcctgtgtgccgttattaccctgttttacttatccagagtgtttgaaagggttttattcccagtgcgcaaaatatgattttattggctcgcggcgtgatggtggatttgctgaatatattgtcgttaagcgaaaaaatgtctttgctctacccacggatatgcctattgaggatggggcttttattgagccgattaccgttggcctgcatgcttttcatttagcgcaaggttgtgagaataaaaacgttattattattggtgccggaaccattggcctgctggctattcagtgcgctgtcgcgctgggagcaaagagtgtgacggcgatcgacattagctcagaaaaactggcattggcaaaatctttcggtgcgatgcaaacatttaacagtagcgaaatgagcgcgccgcaaatgcagagcgttttacgcgaactgcgctttaatcagcttatcctcgagacggctggcgtaccgcaaactgtcgaactggcgggtgatgctgccaacttactgatttag

SEQ ID NO: 491207 - DNA, 267 bp, Shigella sonnei; identical to SEQ ID NO: 11114

SEQ ID NO: 491208 - DNA, 489 bp, Shigella sonnei; identical to SEQ ID NO: 490109

SEQ ID NO: 491209 - DNA, 195 bp, Shigella sonnei; identical to SEQ ID NO: 489869

SEQ ID NO: 491210 - DNA, 1005 bp, Shigella sonnei
atgtcaattaagaagctcgaagatggtcgttatttgctggacatcaggccgaacggacgcaagggaaagcgcgtgcgtaaggtatttgacaaaaaatcggtagcggtggccactgaacgctacatcatggcgaacgctgaaaagcgggaatatatacagggctaccgtgatcgccgaacgctaaatgatttgcttgagttgtggtggatgtatcacggtcaacacaggcgtaaggcggaagaagaccgaaaacaactgcgcaacataatcaatgagcttggcgctgatatgcaggctgtggatcttgataagctgaaaattatcgcgtggcgttctcaaaagatagctgatggattgaaaccgtcatctgctaacaggtacatgaatcggttatccggaatgtttaccgtgctgaaaaaaataggtctttgggatgcagaacatccggtaaggggaatttctattctttatgtatctccacgagaaatggcgttcctgtcacagaaggaagttgcgttattgctcgatacattggagggagattactggcgtgttgctcttttgtgtttaagcacaggagcgcgctggagtgaagcctgtaagctccgtggtgaacagatagttcataaccgagtgacgtttcttgaaaccaaaaatggccggaagagaacggtgccaatttcgcaggcggtttgtgaggcgatcagaaccagagaaacaggcagcttgtttgaggtgaagtaccgggaattctgtctggcgctgaaaagagttaagcccgatttgccaaaaggccaggctgcacatgtgctgcggcatacgttcgccagccattttgtgatgaacggaggaaacattattgcgcttcagaagattcttggccacgcaaccattcagcaaacaatggcatatgcacattttgcaccggattacctgcaggatgcggtggcccttaatccgctgaaaggtggcgtaagtgtccacgcagtgtccacgggggattaa

SEQ ID NO: 491211 - DNA, 321 bp, Shigella sonnei
atgatccataaatcaagccttggagaaaaacttcgcctgattcgagaggcagagggattgtcacgtagagagatggaagaggtgacaggggtatctcaaaacaatctcaaaaattatgaaatattgggaagaatgatacctggagaaacgttactcctgattttgaatcatcctcgttttcggaagtattcggattgggtgatgtttaatcaaactaatgctgcgacggggcagatcgctccgcctctctctcttgatggcttcttcgattcggagggagatcaggtttcaaccgaaacaagccaaaaatcaccccgctaa

SEQ ID NO: 491212 - DNA, 288 bp, Shigella sonnei
atgagcgaatcagagcttgaggggttcattcaggtagcaccatatccacttgaagcggtgccatatcaactatttgccaagatgattggtcgcaaagaatcaaccgtcagaaccatgattgacgctgcaaagttaccaacgattgactttgtgaaaccaggttcagtgaagacgcgagcatcagaaaactgggtatatctgccagcatttaacgcaggtatgcgcaaagcgttttttgatcagccgaaagaacgccgcgatgcatggttgttgtggctggggctttaa

SEQ ID NO: 491213 - DNA, 207 bp, Shigella sonnei
atgaccagcaatatcaccagcgccattttggaccttgtattcctagaagtgggtgtaatagcgatttatctgcttagcaagctaacaggacaaaaagaacgctttattgttctcaacgttcattacctcgccgcttatgccagaggtctttttccgatcaccattggtgcggtgctcatagcgtttgttatttggctcatcggatag

SEQ ID NO: 491214 - DNA, 147 bp, Shigella sonnei
atgaataagcaacagcaaaacagcgaaccccatcacatgaggtttcgccgtagatacttcaaaaatggacgttatgtaggatgcatcaatcgattagccaagcaagtgtttaaaagcaaaggagatacctgtggtaagtgcagatga

SEQ ID NO: 491215 - DNA, 441 bp, Shigella sonnei
atggcaacaccttcaaatattgatgtttttaatgaaactgttggtaaaacttttgcgtttctttatgagtcatttccccgaaaagtaaccattgatgtttgtgctttaaccggggtttccgctccaacgtttgaagagaaggacccggcggtcagaaagcaaaaacatgaagctcttgttcttcgttattactccattgagtggcttattgctgctggttatgtatctgctgatgctgttccttttgaaagtttcgataaggcggtacttacggctaaaggacttgaattattgaaacttgatccagagtcacttaagcaatcgcttggagataaacttgtcgatgcaaccaagagtggggcgatagatgcaataaaaagcaccgcctcatctgcacttaccacaggtatctcctttgcttttaaacacttgcttggctaa

SEQ ID NO: 491216 - DNA, 342 bp, Shigella sonnei
atgaaacagcaacgtaattcacgctttcgtaatggtgctgaacgccacgctaaccgtttcgctaccagtgcatcgcgtagcaactctcgctacagcctgagcgaaacacacgcaacgccggatggctacccagtaaaacaaatcggcgagcatgcctggctgattgagaaagctggaatcgtggtccacaaatgcccacgcaatccgtttaccggaaaccgcatttttgcattgagctgcggcgacaatcacttcgggcaggatttcacattatacgaagcacttcgcacggttgatcgtctgcttcgcgggcaaagttttattaaacaggctgatttataa

SEQ ID NO: 491217 - DNA, 279 bp, Shigella sonnei
atgaccaaagagcatgcacaaggtgtatttatccgttttattgattttcgcggtgaactgttattacgcgcatcagccattgacggagttgttccatccgaaaaaaacgcagctacttacgtttatctgaacggtacgcgcctgactgtggagcttccgtaccagaccgtacgagaaatcattagcgaagctgaaaaggcacgtcaggttaatggcgatgaaccctatatcgaaattatttgtatggattcagaagctgaaattcagaaagcagattaa

SEQ ID NO: 491218 - DNA, 243 bp, Shigella sonnei
atgggcaaagaatataaaactctcattaacaaagcacttgaacgattttattttcgcttaagtgcatcaggcgctcatgctgaacgtgcagcccgtgactcattgaccagggcaatccggagtctgtatgacgtggctttttacgctgatgatctggatgcacttaacgaactttccgagctgatctgtgccgcagaatgcggggaacacattgaaccgtataagctggggaatatcgcatga

SEQ ID NO: 491219 - DNA, 417 bp, Shigella sonnei
atgaacgcaaaagaaaaaaatattatcaatacattaaaaatagtgtcagcagagcaagacaagctgtccagggcagcccagaaagataatcaacatatggcagcgctttacgcactgaccatcgcaatagccacctctgaagcagccaaagttattgaggaacagagcaaagaaatcgacactcttaaaacacagtcaacagttgcagccatgaatccgtccagcactggacgctgcatttatattcttggttcagcaatgatgctgcaatacaccattattgccgaactgcacggcaaatacctgataacgccttaccacacaaaagagtcagagcttctgacaaatctccgcctgatagaacgctctcaagctgtattcattgatgacgcgcaatgtgccgtatttaacgcatag

SEQ ID NO: 491220 - DNA, 204 bp, Shigella sonnei
atggcaattaagcattttcctgtcgttcgttttacctccagaggacgtgaatacgaagtcgacgaacgcctgattaccacaatcgacaaacaccgttcagaaaaggatgcacatcacatctatctcactgacggcacttacttctgcgccacgaatgtggtgcaggtgaaccttatccgacaggtacaggagtcacgcagatga

SEQ ID NO: 491221 - DNA, 246 bp, Shigella sonnei
atgaccattctggattatatcgctgccaatccggggtgtagcggtggagaaatcgccgcagcactgaataccccaaccacagccattaatgcggagttacgccgactctggcgcagcggttcagtcataagaaaagagcgcaaaacaggcggtcgcttttcttaccagataaacccgatgccgttcgggtgcggcaatccacttaccaacatgtttaaccagctactgaaggaagccagagcatga

SEQ ID NO: 491222 - DNA, 300 bp, Shigella sonnei
atgagcgccatcaaccaccaggaattacgcgaactggcaactgaccttcaacgaatggcaacgcatcaaaaattactggcgtttcgcgcaatgctctcgccgtctgctgtgctggcactgctggatgagctggagcacgccagaaccacggctcctgccattcgcctgacactccatcatgaaatcgctgatttctgcgcgacgttggaggcacccggcgaaccggaaacgccggaagcaatacagcaagagctgctgcaacgcattgacaaggtttttgatttttttctgaaccagtaa

SEQ ID NO: 491223 - DNA, 231 bp, Shigella sonnei; identical to SEQ ID NO: 5413

SEQ ID NO: 491224 - DNA, 1284 bp, Shigella sonnei
atgcctgccggtagtgcatttgctatagtagggcacttttttaattccatcacggatgtcgtagttcagaccatgaataccattttttccgctcgtatcatgaagcgcctggcgctcaccacggctctttgcacagcctttatctctgctgcacatgccgatgacctgaatatcaaaactatgatcccgggtgtaccgcagatcgatgcggagtcctacatcctgattgactataactccggcaaagtgctcgccgaacagaacgcagatgtccgccgcgatcctgccagcctgaccaaaatgatgaccagttacgttatcggccaggcaatgaaagccggtaaatttaaagaaactgatttagtcactatcggcaacgacgcatgggccaccggtaacccggtgtttaaaggttcttcgctgatgttcctcaaaccgggcatgcaggttccggtttctcagctgatccgcggtattaacctgcaatcgggtaacgatgcttgtgtcaccatggccgattttgccgctggtagccaggacgcttttgttggcttgatgaacagctacgttaacgcactgggcctgaaaaatacccacttccagacggtacatggtctggatgctgatggtcagtacagctccgcgcgagatatggcgctgatcggccaggcattgatccgtgacgtaccgaatgaatactcgatctataaagaaaaagaatttacgtttaacggtattcgccagctgaaccgtaacggcctgttatgggataacagcctgaatgtcgacggcatcaaaaccggacacactgacaaagcaggttacaaccttgttgcttctgcgactgaaggccagatgcgcttgatttctgcggtgatgggcggacgtacttttaaaggccgtgaagccgaaagtaaaaaactgctaacctggggcttccgtttcttcgaaaccgttaacccactgaaagtaggtaaagagttcgcctctgaaccggtttggtttggtgattctgatcgcgcttcgttaggggttgataaagacgtgtacctgaccattccacgtggtcgcatgaaagatctgaaagccagctatgtgctgaacagcagtgaattgcatgcgccgctgcaaaagaatcaggtcgtcggaactatcaacttccagcttgatggcaaaacgatcgagcaacgcccgctggttgtgttgcaagaaatcccggaaggtaacttcttcggcaaaatcattgattacattaaattaatgttccatcactggtttggttaa

SEQ ID NO: 491225 - DNA, 645 bp, Shigella sonnei
atgaactatcgtggcttcacattcccgttgtggggatttcttgccaataccgatatctcttacgatccgcagcaaattgatgcccaaacctgtatggcctggatggataattaccgcgcagggctttctcatcaacaacaattacgtatgtttaatcagctcgacagccacgatactgcgcgatttaaaacgctgctcggtcgggatattgcgcgcctgccgctggcggtggtctggctgttcacctggcctggtgtaccgtgcatttattacggtgatgaagtaggactggatggcaaaaacgatccgttttgccgtaaaccgttcccctggcaggtggaaaagcaggatacggcgttattcgcgctgtaccagcgaatgattgcgctgcgtaagaaaagtcaggcgctacgtcatggcggctgtcaggtgctgtatgcggaagataacgtggtggtatttgtccgcgtgctgaatcagcagcgtgtactggtggcaatcaaccgtggcgaagcttgtgaagtcgtgctacccgcgtcaccgttgctcaatgccgtgcaatggcaatgcaaagaaaggcatgggcaactgactgacgggattctggctttgcctgccatttcggctacggtatggatgaactaa

SEQ ID NO: 491226 - DNA, 261 bp, Shigella sonnei
atgttccgttgtccgctttgtggcgcatctgcccgtatccgcaccagtcgtccggaaaatgattcaaacaccgtgcggcaaaagtattaccagtgtaacaacctggaatgcggcgtatgcttctcaacactggaagctttccataaattcacatcgaaacacgcctccggcgttcactcatcagaaggtatcccgtggcatgagctgccagcttcacacaggggaaacaatcagatgagtttgcctttccctcagaattaa

SEQ ID NO: 491227 - DNA, 147 bp, Shigella sonnei
atgacgcaaattccgttaaaaaccttgctactgtgtttaaccgcagtagcgataatctggatcctccacacatcaccttgtgagttgcgattcaggtttgcaggcacggaaattgcggcattcttacagtgtaagtctacactgtaa

SEQ ID NO: 491228 - DNA, 786 bp, Shigella sonnei
gtggggatcgcaatccagcaccaaccagcacatacaccggaacacactaaggtttatcagactgacaatgccacgctctgtcgtgggaatgcactggaaatattgccgctgattgagccagaaagtattgatgccttaatcactgacccgccttacagttcgggcgcgacacacaaggccggacgcaccaaccagggcagccacgcaaaatatctgaacagcgagagccttcaccgctttgatggatttgcgggtgaaaatatggatgcccgttcgtgggcttactggacacaattatggatggcacaggcacaccgcgcagtcaggccgggtggttatgccctggtatttactgactggcgacaactgcctgctttaaccgatgcgtttcaggccagtggctttacatggcgcggcatcattgcgtggaacaaaggaagggggtcacgaacaccccatacggggtatttccggcatcagtgcgaatacatcgtctggggcagtaaaggccatttaggtaaatcgccttcgggaccgttcgacggctgcatgacgttcccggttatcccatcaaagaaaatgcacccgaccggaaaaccagaagtacttatggcagaactggtcagaactgcgaatagtggtggaacagtccttgatccttttatgggatcgggaacaacgggtgttgcagcactgaaagcaggacgcaaatttattggtatagaaaccagtgatcattattttgatgtagcaacacaacggctcaaaacggcgatcgaaccataa

SEQ ID NO: 491229 - DNA, 606 bp, Shigella sonnei
gtgcagaatgtggctgccactgtgcttgcgcagtatgctgccagcccccgactcaatgccctcattaacagctttaacgcagcgctttcccccgacagttttatcagtgatttttatggtcttatctggaacatcgataccgcagaaaagtacggtcttgatgtctgggggaagattgtgggtgtcagtcgccggctgacggtaaaggacgattttaattacctgggcttcagcgagtccaggatggacaccccggtaatggatgatccctgtccgtttaatcaggcaccgttttacaacggaaaatcggatacccggactgttgacctgtctgatgctgtataccggcggctgatactgatgaaagccatgtcgaacattactgactgttccgttccggatattaaccggatgctgagatttatgttcggaaaaaaacggcgggcttatgttctgaataatggtgggctgaggatgagttacatctttgagtccgcgctctcgttggcagaactggcgattatccagtcgtcgggtgcactgccatccccgccgggtgtttatgtttcagtggttttaaaggagccccgtaatgaaggccagtga

SEQ ID NO: 491230 - DNA, 1242 bp, Shigella sonnei
atgagtgaaaataaatctttttctaccgcagtgcccgctgtacagatttcggatagcgggctgaatgtgccggatgaagcggatattctgagcggcaggcttgctgatttttcggcggcgctgggcggggccatgagtaccagtctgagcagtccgcagggacaacttgcatccagcgaaagcgccattattgcggataaaaacgatcagttgctgtatatcgttaaccagatcaaccctgacttttccagtggtcgctttcaggatgcaataggcaggatttatttcctggagcgccgcggggccacaggtacgacagtaacagcgacctgtaccgggctggttggcacgctgatcccggcgggcagtatggcgcaggatgaggccggttataagtatgtcagtcagtcagacgtcactatcggcgcatcagggcaggttgatgcggtatttctgaatttgtccaccggccccgtcggctgtcctgtggggacgctgaataaaatttataaggcaatacctggctggtcaggtgtcactaacgccagtgccggtgtgccgggcagcgatgaggaaacccgtgcggactttgaaaaccgccgacgtaattcagttgcccgtaatgcccggaatattctggaagccatccggggtgaaatactctccacggtagaaaacgtggtggatgtttacgtcacccataatccgaaaaaaacagaacaaaaagccggagtcagtcagtatccattaacacccggttcgctgtatgttggcgtgtacggcggcagcccggcagatatcgcggctgccatctggcgtaaggctccgccgggtattgatatgaatggcaacacaacgttcactgttgcagataaggagtacgatccgccgtatcctgaatacgtgatcagctggcagacactcaaacccgtcagtctgcatgtcagtgtgacgctgaaaaaaagtgactacctgccttcagatattacccgacaggtacagcaatccgtgctggacgcatttaatggtacagatggtggtctgcgggcaagagttgcctctgttgtctctgccgggcgctactatgccggcatttacaaaaccgatccggaacatattgatattctgggccttactgtgagccgtgacggttcgtcatggacaacggctgtcactttcgggatagatgagattccggttctggatgtgtcggatatcagtgtgaaactccaggaggcataa

SEQ ID NO: 491231 - DNA, 357 bp, Shigella sonnei
atgcagtcacgatcacttcttcttgacaccgggacatgggatatcctgcttgatgataccggaaatcttgccattactgataatccccatgcggtagctcaggatgtggcgtgtgcgtgcagtacttttctgggggagtgctggtacgactcaacggctggcataccttactggccacgcatcctcggacactggcccggcacacaactggtgaatgccactctgcaacaggaagcacttaaactgccgaccgtgagcgccgctgtctgccaggtcacagctgatcaaacccggacagtaacaggtgtgctgcgtattacagataccaataatgacatttttacggtactgctatga

SEQ ID NO: 491232 - DNA, 678 bp, Shigella sonnei; identical to SEQ ID NO: 477710

SEQ ID NO: 491233 - DNA, 870 bp, Shigella sonnei
atgagctacagacaacgtaaaataacggtggagttcactctttcagacggacgaacgtttggtaatggccagggcaatatgctgaccattaccgacgcaagctgttttgccagtattgccgtatatggaggggtggctggtacacaaatcacgctgtatatctggggaatgtcaccggcgcatatgacgaatttaagctggcgcggtgtgtggcgacaggagcagagtaccgcaaataaaatgcggctgtgggccgacgggcggcttatttttgaaggtgatattactgatgcatacgccgactacaaccaggcaccggatattccgctcattctgacaggacagattcattttaatctgcgtaatcagccggcggcagatttcagcgcaaagggcgatgttgcggttgcagatattatccgtgcgctggcgtcaactgtcgggcttggatttgaaaaccagggggtcagccgcagtctgtctgacccgcatttttccggtaatgttgtacaacaaatgctggatgtcgcttcagccgccgatattaacattgatctggggaatgtggagaaagtcaccatctggccgaaagggcagaaccggaatattccgccggtactgatttcgccggatcacggactgactggctatccggtttacaccatgaccggactcagcgccaccacgatattctgccccgatctctttactggcaggccagcgcatctggaatcgtcactgcctgatatgacgggcgattatacgatcacaggggtgatacacaccattacttcgcgaaccgtgggcggtccgtggagttccaactgtaccatgatgagggctgaagaaaatggcacaaccactcagtaa

SEQ ID NO: 491234 - DNA, 303 bp, Shigella sonnei; identical to SEQ ID NO: 462573

SEQ ID NO: 491235 - DNA, 711 bp, Shigella sonnei
atgagtttttctttcgataatatttccctgaataacttttcgctcagtgaaagtaacgtactgagtgcagttcgtggcggcggtgtcctgggactcattaacagtgtactggcaccgtcattcggtatttattacgcacggaatgatccggcaggtgcccatcagaagggtggcaaacctttctccccggattcttttgttgtcgttgaggtgggcgcggaggcttctgtttccaccgtccccgtggagcagggggcttatactacctttaataaaatccagagatcgccggaactgcatgtgactttcactgtagaggggtggacggccttttccggatccgtcccgaacctgacaaatttttccaccacctcgcggacgaatgtgctggaaacgcttgaaaggatgcgtaccacggcaggactctacgatattgagacgccggacaagacatggacatcctgcgaccttgtgaaatatgactaccgaatgcgaagtaataatggtccgaccttactgacggttactgcggtatttcagaccgtaatgaatacaggagaggtgtcagtgggaagtacggataagtcgtctcccacggacaacgataaagcaaaaggggccgcatcggttaaaacgcagccagttacggcgtcggtgacacaaccgtcagacgctgacagacgaagcgccacgaacagggggatcacctga

SEQ ID NO: 491236 - DNA, 2022 bp, Shigella sonnei
atggcgcaggtacttgatgagcttgttctgtccctcgggattgatgacagggactttactgccggggaacaggcagtacatgctgcccttaaccggctcacgacggtgatggaaggtgtcgctgacacattcagtcagggacagaagaaaaccagtgaatcactggaaaaaaccggaaaagatgctgataaaacggcccgtcgaatggaagatgccgggaaacgggcgtcccgttttttttcagggatccgtagcgagattctggctcttgcgggtgtcagtctgacgctgggggggctgaagaacctggtaacaggttttgcccgtgatctgaaccgtctgtccgtggaatctgatgcttttggcatgaaggccagaaatctggacggatggttacgggctgcgcgggcaaataatgttgatgaaggggaaatgtctggggcattttcccggcttgcaaatgcaaaagcggccttcagagccggaaggtcctttgatcctgtgttacaggatttgtttcaggttgcagccagggcgggcattagtgttgatttaaatactgacagcactgaagccatcatgcgcaagctggcggttatttttccgcgactgacaaagtccgaacaaactgcctacggcaacgcgctgggcttcagttatgccggacagcagtttcttggctccggtcatgcgctgaaagatgtggacgaatttacttcccgttcgcaggttacgccggggcgtatagcgctggcccgtaagctacgaaaagagcttgttgagctcgatcagacctggtccggcatcgggatgacgattagcaccgcgttgatgccgtacgcgctgaagctcagccactggctggagacactcggtgactggatgcagcaacatccggaggaagtgaacaggtttatcaccacatttctgaatgacgttgagtcagtggcctccctggcgaataaggctgccggagaactggggggctggcagaatgtcattattacgctgatcgggctgaaagtggcgtcatgggtgcgggggctgacaaaagccctcagtggccccggaggccttctttttgcgataacggcgctttacccggttgttgacggattactgacatccattgttggcagggaaaataaggactggctggattcacatggttttttctgggcttcagacgggactttctttttcaataagaaagagatggagacgtatcagacaaaactggatgccggagaaaagcctggcaacatcacccgggcacaatcacccacagtatggcagcagggcatgctggatactcaggcttctcaggcaaccgggagggaagcagccttcggtgaatcctggctacagggtatgcgtgcgacgcaggaaaaactcggtaatgccatgcaaaaccgccagcgaccgacgaagaccggggaagccctgttaggctggctgcaaccgaaactgtctcaactggaggaaaaatataacctgccgcccggactgctgcgcagcgttgcgatcaccgaatcccgtggtaatcagtttgccgtctcacctgctggtgcgatgggactgtttcagttcatgccgaagacggccagtgaatttggtctgagggggaacgatgcctttgatcccgaaaaagccgctgatgccgccgcgagaaaacttggtggcctgatacgtttttttcatggcgatctggctaaggctctggcggcatataactggggagagggaaatgttcagcgtaagggactggctgctgctccggaggagacccgcaactatattccgcgggtgctggcgaacctgccttatccgggtgcggcaatggccatacggtcgcgccatcctgcgcctgtatcgcagtccaccgtaacggaaaccacgcatatcgggacactgaatgtcaccacaacgtcggacaatgtgaagggtattaccgatgacgcacgtcggcgtatcacgaattcggcgcttgtgtcggtttattccagcggggtaacaggatga

SEQ ID NO: 491237 - DNA, 405 bp, Shigella sonnei
atggcccgtaaagagaaatttatcactattgaaggtcagggacgggataagggcaaggtatttcatcttaccgaaatgtctgcctcacaggcggaatggtgggcgatgcgtgccattatggcaatggggcgtggtggcgtggagttaccggatgatgttcgtagtctggggatggctgcgcttgcccttgaagggctgaaagcattatcgaaaattccgcctgatgaggcgcgtccgttgatggatgaaatgatggactgtgtgcagtttgttcccgatccgaaaaaacgcagcatccggagaccgcttgttgaagaggatattgaagaaatcattacccgtcttaatctgcgtgcggaggtctttaagctgcatgtggattttttcgctaccgtcgtcagctag

SEQ ID NO: 491238 - DNA, 447 bp, Shigella sonnei
atgtcgggtaacaacaacaccatcactgcggcggatgccattatcacgctgacagtgaataatctgtatccctccggcgtacgacttcagggatttgcaacagataacgtttatggcaccgatccactggtactggcggaaactgcccgcggtattgacggtaaactgtccgcgggatttgtgtacagcaacattatccagacgtttcatatcatgccggattcccccagccgggatatttttgatacctggtcaaccacatcccgggccagtcgggctgtattccgttgtaacgctgtcgtcctgcttccggcgattggccgtaaatatacctgcgtgaatggcgtactcaaacaatggaaagcgctgcctgatgcagctcgtacgttgcagccagggcaggcggttattgagtgggaaaccattactccggaggtttttaactga

SEQ ID NO: 491239 - DNA, 1485 bp, Shigella sonnei
atgccaattccactcagtaaagatgtacagataaatcccggtgtgctggctgtggcgggtaatgccgtcgatcttaacggcctgctgttgaccagtaatccgttacttccggtcggcactgtggttccgttttcctctccggatgatgtggccgcgtattttggtgcattatccgatgagtacgcacgcgctcagctttatttccagggcttcaaaaatgccaccaggacgccggggcaattgttgttttcccgtttcagtcctgccccatcggcggcctggttacgtagcggttcgtttaagggcgcgactgttgaacagctacaaaaactttccggcacgctgatgctgagtattaacgggaaaagcgtcagcattgaagtgaattttaacggtgtcgccagcttcgccgctgctgcaacggcactacagacagcgctgaccgcagcagtggctacagtggtattcgataccacacagaatgcttttgtcattactgtcgccggggcgaaacccgggagtaccacgataacgttcggcagtggatcggcagcagaactcctgaagatgaccagtaacaccggtgcggtgatatcccggggcgcgcctgtatctgatgtccctgacacaatggcagccattaaggccgcttcccagcaatgggcgggtttttccacggtatctgaggtcactgacgagcaacacctggcgttttctgcatgggcaaacgggcagggcaagcgttacttttatgtggcatggacaaccagcggcaacgccagagtaaaaggcagtactgaacacatcgcttaccagataattgctgtcaataactacagctctgttgtacctgttttcgcgactgatggtaaccgggctgcagcggtactggggtatgcagcgtgccttgattttgtccgaccagaggggcgtgtatcattcaagttccgcgagtatgaggggctggccgctgatgttaccagtggcagcgattatgatgcgctgatcgccgcaggttacaatttctacggaaaatatgcggaaaacagtgtggtggaagattactgggcggatggcactattaccggtgattttaaatggctggacagtttctgcgggcaaatctggctgaatgccagtttgcagggggcggtgatcgcgttattcaagtcaaaccagacgatcccctacaacaatgaagggcgggcgctggttgcagcgtcaatgagtgacgttatccagcagtacaaacgctggggagggatccgtgaaggggtgacactgacggaggcgcagaagaaacagattaacaatgttgtgggggcagatgtttcttcaacgttgtttgccaccggctattacctgtatatcggcgatatgcttccctctttgcgggcaacccgtagcagtccgtcctgtacgctctggtactgtgacggcggtagtatccagaaacttgttattgcatccacggaggtccagtaa

SEQ ID NO: 491240 - DNA, 546 bp, Shigella sonnei
atgccttcaggtgtgaccctctccgttacggaaagcgctctttatcaggccctcggtgattatctccgggggcttttttctgatgccgggattgaacgaacgcagcagaaccaggtcccgatgcctcaggggaatttcatcaccatgacgggcattgatgttaccggattatccactgcggtagtggcatattctgcgccagcgcaggctggtgagggctctcagcatatcacccgtaccacaaaatggcgttgccagcttgatttctacggccctcacgcggcagataacgcgcaggtgctggcaacgcttttccggtctgaattttccgtacggcttttccggcagggcggtgggctgatttccccgctgtattgctcagagccctttaacaccacattccccaacggtcagcaacagtatgaaccgcgctggacgcttgatattcagatgcagattaaccctgtggtcacaacttccctgatgttttttgacaacgtgatcacccggacaacggaggctgataatgccaattccactcagtaa

SEQ ID NO: 491241 - DNA, 366 bp, Shigella sonnei
atgaactttcacggtattgtttccggcgcagtacgtcgggtaaatccctttacagacgcgctggtttatcgttcccgcgggagtacacagcaggcagattattcccgcgtacctgagtatgaagatccggtttctgtcagggtgcaaaagcaggctgtcacccaggctgatttacgtcatcttgataatcttaaccagcagggagttttcgccacattgtataccgatggtaactggtgcgggcttaaccgtgcccggcaacagggaggcgataaatttgttattggcgatgaaacgtggctggtgattgaggtaccggaaatctggcctgactggacgagggttattgtatgccttcaggtgtga

SEQ ID NO: 491242 - DNA, 585 bp, Shigella sonnei
atggtaaataaagtcacaggtggcaaacagttccggcagaagctgaaacaggttgccgcgaacctttcattgggtaaaaaactcaaagtgggttttcttgagggagcaacttaccctgacggtacgtcagtggcttatattgccgcagttcaggagtttggtggaagagcggtcatacccgcccgtgagcagacgctccactttcgctataacgaaaaaacgggagaaaccgggcaccgctttgtcaaagccggtaaagggaattttgttcaggatgtggttattcctgagcacacggtcaccattcccccccgtccgttcttccgtaagatgatcgaacataaaagtcccgaatggggcgaaaaaatggcgaccttattacgggcgaatgattttgatactgcgaccgctctggtgtgtatgggagaacatatcaaagggcagttgcagatgtctgttcgcgactgggaaagtccgcccaacgctgcatccactgcccggcaaaagggttttaacaacccgcttattgaaaccggacatatgatggacagcgttgattattctgtagacgggggcaaaaaatga

SEQ ID NO: 491243 - DNA, 456 bp, Shigella sonnei
atgggtacggtgacgtttgactgtcggatgtttgtcagtctgtacccggagttttccacggtgacaccggagctactgacggcggtgtttaaccaggcgaccgcgttgtacctggataacacggacgacagtccggttaccgacctgaaggagcgggaacagcttctgttcctgctggttgcgcatctgtgcgcattgcgggggctgggaaacgggagagacgggcaggctggtctggtggggcgtatcaccagtgcgtcggaaggttctgtatcggtatcggtggataatagcggcagtaatgatgcgtcgtggtggtatctccagaccccctggggtgctgactactggcaggcgacagcgccataccgctcaatgcagtatcattccggggggtcaccttcgcgatatccggggcattattaccggggatacgggagggggcgtcgatggtaa

SEQ ID NO: 491244 - DNA, 348 bp, Shigella sonnei
atggctgaaatggtaacagtgggctgcaaactgccgaacggtctggtgctggaagtgggtcagaaacgggttcaggtggcaggctggcggaataacgcggttaaaattgtggggggctatggtctgacgcaggtcgataaggtgttttttgacgcctggctggcggagcacggacagcaaccttatgtgaaaaatggcgttatttttgcgcaggataaggcgaacagtgcagtctcgcaggctacggagcagaaagccgttaaatccggccttgaaccgctgccgcagaaaaatccggctccgggcgttaaccgcaatgatgaagtgatgggtaaacctcaggagtaa

SEQ ID NO: 491245 - DNA, 1029 bp, Shigella sonnei
atgaataaatttaaacagcattatgcgacggcaagtcgcgactacgggattattcttcccggagcacaggcttatttgccgaaggagtacgccgccgattacggactggcgatggacgcgcagcctgcgctggtcacagcggctaacagcggtatccctgcgtatttcaccaattacgttgagccagaactgatccgcgtgctggtgacgccgatgaaagccgctcagattctgggcgaaaccaaaaaaggtgactggacgacactgtcggcacaattcccgattgcagaatctgacggggaggtgagttcctacggggattacagcaacaacggggtggtaagcgcaaacgtcaactgggtaccgcgccagagctatcacttccagaccttcaccgtatggggcgaacgtgagctggagatgtacggcgcagcccgtattggctgggcggcagagctgaacgtggcgtcagcactgacgctgaataagttccagaataagtcctatttctacggtattgccggactgacgaactacggtttgctgaatgatccgtcgttatctgcaccaatcaccccggataccgttgacggtaaactgaagtgggacgacaaggacggacagggcgtgtatgacgatatcgtgaaactctttaagcaactggtgaaacagactaacggtcatattgagcgtaccgacaaaatgaaactgtgcatgtcgccgctggcagaggtgaacctcaccaaaacaaaccagtacagggttaacgtgtccgatctgctggcgaaaaatttcccggcgatgaccattgaaacggcggtggaatacacctctgacgctggcgagctggtacagcttatcgcggagcgtctgggtgaacaggatacaggctattgcgctttcactgaaaaaatgcgcgcccatgcggtagtggcagatacgtcttcctggaaacagaaaaaatccgctggtacctggggggcgattattcgccagccgctggcgtatgcacaaatgctgggggtgtga

SEQ ID NO: 491246 - DNA, 483 bp, Shigella sonnei
atgaatacttttcagacacacatgaaccagtacccggcaccgggtattccgggggcgtttgccagtgctaaccctcatgcctcgtatgtggcgggagatggcgggctgattaccggccctgacgggctggtaattgcccggtttgcctgggtaaccaaaggtgttgccgctaataagggggccggcgcaccggcgggttttgttcctcgtgacgggcaggcttccattgtggaatggctggccgggaactcgaacaccatttatccggggcgtgaatgcaccctgatggtgtcgggggatttctgggcgctgaccaccactactgcgacgatcgggcagaaagtatttgcctcactggccaccggggagatagccacgggggcggctggcacctcgatggcggggtttgtcgaaacctggttttccgttgccagcgctgcggcggcaaaagaagtcattaagatcagtacctggagcaaataa

SEQ ID NO: 491247 - DNA, 1350 bp, Shigella sonnei
atgattattaccgaaatgctggcgtttgaccgggcatcggtaaggcagttcgataaagtcggtcgcctccagattgagcgcagtaatctcagcaaggcgaacgtctgcggttatttcgggtatgaaataccgggggcggaagcgctgggactcgaccccaaaaaactttatcagctttaccgtgaccccgatgaactgcgcaaggcagtttcaaccttcaacaatattcccgtcctgtgccgacacaaacccgattatccgggcgcgcccgcgcgcgagtaccgggtggggacgactcatgccaacagcgagtttgacggtacctatctggttaacggcatgtccatctgggacaactccgccatcgcggggatagaaacggatgaacaacgggaaatctcatcgtcatatgcctatgtggcagatatgacgccgggaaccacccccgacggtgagccgtatgacggcgttatgcggaatatcgtgggaaatcatgtggccctggtcggcgatggccgggtagggtcggactgtcttgttatggactctctccctcaggagctaaaacgcatgaaactgagtaaaaaagaagtggcggtgcttaccgcgctgggaacctatcttgcgccgcgtctggcgcaggatgcggctcccggggatttgttacgcctgatggcgcagtataagcgtccggcagctatcgccagcgcggtaaaaactgcttacagcgaacggctggcacaggatatggatattgaaccggcggagctggcgcaactgatggaatcagcagaagccgtaccggagctggtcggggatgatgataccgggttaactgacgagtcgaaggcatttgataccgacagcccgatggaaagtgtactggcgttgctgtccggcaaagttcctgatgatgtgctggaaaaaattaaatccgcactgtctccgacaaccgacgaagcctccgaaacaaaagaggctgatgtgaaacccgacgatgtgaaagtcgataaacctgcgatggatgcagcaatcaggctggcaactgaccaggcaacgaaacgggctgctgaaaatttccgcgccgtccgtgtggctgaagctgaagtgcgaccgctgattggcgatgtggtggcgatggactgcgccgaagatgtttaccgtaccgcgctggaacagacggggatcgatatccagggtattcaccccggtgcgtaccgcagcatggtgaagtttgccgttgagcagaagcagacggccaaatcctctccccgtgtggcgatggatcaggccagcgcatcgacgtttgcggcagatttccccggtgcaaaactgaaacgaggttactga

SEQ ID NO: 491248 - DNA, 771 bp, Shigella sonnei; identical to SEQ ID NO: 468873

SEQ ID NO: 491249 - DNA, 1542 bp, Shigella sonnei
atgtggccgtttaaacgaaaagaaccgtcagcgccggcggtaccggacaaacaacctgaaccacagccaccggaaattaacgatgaggtgattgcttccgtccggcagaaaccacggagggagtttgttcgctatgagccaccaccgggcgttatcccggcaccggttcgcgacgctgtgctggcaatggatgcaacaccgtatgacaccctgaacagtcattatcctgattttgtttatggtggtttcccgggctatccgtatctggcacttcaggcgcagttaccggagtaccggtgtatggtcagtgtgcttgccgaggagatgacccgtaagtggataaaggttaaggcggtcggagaaggggacgacagccacgcgtcacgcatagcgcagcttactgacgcactggagcactataacgtacaggacgttttcagactggcgattgagcacgacggctttttcgggcgagggcagatttatattgatgtgcgttcgccatcgggtatatctgcctggactgacccggcggagctgggatccggactgtttatttccgacaaaaaaatcccgaaaggttccctgctggggcttcgtgttattgaacccgtctggacgtatccgggtatatataacgcggataatccgctgagtgatgatttttaccgtccgtccgaatggtacgtaatgggaaaaacggttcacgccagccgcatgattgatctgatctcccgtccggttccggacatgctgaagccggcctacaactttggcggcctgtcactggttcagattgctgagccttatgttgataactggctgcgaacacgcgacagcgtgggcgatatgctgcattcgttttcgctgagcgggattaagacggatatgacacaggtattaagtggtaaaagggacccgaattacgcaaaacgcgcggagttgtttaaccgtacccgtgataaccgcgggctgctgatgctggacaagacgaacgaagagtttttccagttcaacactcccctgagcggcctcgacacccttcaggcgcaggcacaggaacacatgttctttgtcagtgccataccgtccgtaaaattcgccgggctgagcccaacgggactgaatgcgtcgagtgagggtgaaatccgggtgttttacgacaccattgctgcacttgccacccgtcttctgaagaaaccgctgaaaaaggtgctggatattatccagttgtctgagttcggcgatatcgatcctgatatcacgtttgaatttgaacccctgcatgaactgacgcgtgagcaactggcgaatatccgtaaaactgaggcggaaacggatcagatttatgagagcaccggagcagtgaccaataacgaagtacgcgaacggctggcgactgcgcaggacagcccgtacagcggtattgacctgagcggggacatcgaaattgacgacactgaaattgacaacaccgaagaaaatccgccgcaaggcccgaatgcagaccctgaggcggatttcacccaacgcggggattga

SEQ ID NO: 491250 - DNA, 1620 bp, Shigella sonnei
atgccgttaccattccccttcgattttaaacatcctgattaccagatggtttttgaatggcggatggaacgcctacagcgcattcgccagaatcctgaaatattgcccgtattgaagcagttttaccgaaccaatccggctcagttcatcatcgactggggcatgacaacggacccgcgtaatattgattatggcctgccggtgaccattccgtttttactcttccctaagcaggaggagtggatccactggattatggaacgctggagcaatcgggagaatggtattaccgaaaaatcccgtgaaatggggctcagttggaccgcgatcggactggcctgctcgctttgtctcttcaacaaagaaatggttatcggtttcggctcccgtaaagaggaatacgtcgacagcaccggtgacccgaaagcattgttctggaaggcgcgcaagttcgtggaaacactacctgtagagtttcgcggttcgtggagcgagaagaagcacgcgccatatatgcgtgttgagtttcctgaaactggtgccgttatcaaaggcgaggctggcgataatattggtcgtggtgaccgtaccacgctttatctggttgatgaggctgcttttctccagcgaccattacttattgatgccgcgctttcccagacaacccgatgtcgtatcgatctctcatcgattaacggcatgaacaaccccttcgcacagaagcggcacagtggaaaaatcccggtgtttacgtttcactggcgtagcgatccgcgtaaagacgatgagtggtatcacaaggagtgcgagaaaattgataacccagtcatcgttgcccaggaactggatcttaattaccaggcatcagcagaaggcatcctgatcccctcagaatgggtacaggctgcggttgatgcacatatcagactgggcattccgcccggcggccaacggcttggtgcaatggatgtcgccgacgaagggcgggataaaaacgcctgttcgctccgttatggcatcctgctgaatgacgtacaggagtggtcaggtaaggggagtgacatctatgactctgtggttaaggtttttggtctgtgcgatgactttggtgccgatgagtttcgctttgatgaggacggattgggtgctggcgttcgtggtgatgcgcgcgctatcaacgaactgcgtgaagcggagggcatctgtcaaatcaccgccactccattccggggcagcgggagcgtgtttcatcctgaaaatgaagctgttcccggtgataatggtaaaccggctcgtctgaataaggacttttttgtcaatgccaaagcccaggggtggtggcatcttcgcaaattattccgcaatacatttcgtgcactacagggtatggagtatgacccggatgagattatttccatcagcagcacaatggaaaataaagaccggttgttgatggagctgtcacaacctacctggtcaaaaaatgccaccggaaaaattcttgtggataagcaacctgacggaacgaaatctccaaacctggctgattctgtgatgattgcttatgccccgatggaaatgcccatcgtaatttctgatgactttatggagtggatctga

SEQ ID NO: 491251 - DNA, 555 bp, Shigella sonnei
atggcaaagctcaccgacaaacaagagctgtttgcccgtgagtacctgaaagatctgaacggcacacaggcagctatcagggcgggctacagcgagaagaccgccaatgagcaggcatctcgattattagcaaatgttaatgttcaaaaattcgttgctgaacttaaatccgcccgcgttgagcagacgggtatagatgccgcctatgttcttcgtagattggttgaaatcgaccagatggatgtgctcgacattctcctgcaaaacggtgagctaaagcccattaaagactggcctaaggtatggcgcacaacgctatcaggaatggatgtcgtggagatggtatccgcagatagcgccgcacttctgaagaaaatcaaatggcctgataaggttaaaaaccttgagttgcttgggcgccatgtttctgttcaggcgtttaaagacaacgtcaaaaatgaagtgactggcgctgacggaggaccagtcagaacagaaattaccaaattaacgcctgagcaggccgcagaggtgtatagaaaaatgatgggctaa

SEQ ID NO: 491252 - DNA, 213 bp, Shigella sonnei; identical to SEQ ID NO: 476296

SEQ ID NO: 491253 - DNA, 771 bp, Shigella sonnei
atgagcctcgcacttgcggggcttttatatgtccgcagtaaaccgcgcatcgcagcgcgtaacaatcccgagtctttcagaaagctgagcctgagaactgccgtatatggtggcgaccatctcggggcggcttttctgtgcgaacaggctcaactttctaaaggaaataccgacatgaacaaatcattaaccgttcttccttctggcgaatacccgaccatgagcagtcttgagatggtggattacattaatgctgatcggaaatccaaagcggaggcggaggggcttgcgttcccctgtaagaaatatcgcaaactcgaacaccgcagtttcatgaagaaagtacccagggtcctcggggatgcagctgcaaaattttttgcaactgatacctatatcaacggaacaggtggtgttgtggagagggatatttgcaattttcccaagcgtgaagcttgcctcatggcaatgagctacagctatgagcttcaggcgcaggtgtatgaccacatgacggagcttgagggcgggaaggacattaacctcctcgatttctctggcctgaccgatatggcaatcagcgaaatgcaaaaccgtgtcgcggctgctgagaagttctcatttgaaatgcacggtcaagcaggtagcgctctcatgactcgtcggaagaaagagaagaaggccattaaaaaggctgagcagcttgtgaaggatctgattcagttcaagctatgtgacatgggggatttccctgatggtaaaccagcatga

SEQ ID NO: 491254 - DNA, 297 bp, Shigella sonnei
atgagcattattgaatgtgaaattgaacttgatgttattaacgattctctcgccgaatttaaatgtgggaatacattacatagtttcattcagatttcccaaaaagaaaacgtcacggtaattattgatgacggttacgttctgggaacatttgattgttgtgtatgtgccattaaagaaattgcattactcacagctcgcattgaagaggctgacaagaaatacggtatcagttatcaacgactgaaagaactctctcatatcgcatcatcagttcgtttcttttatgcaatctga

SEQ ID NO: 491255 - DNA, 282 bp, Shigella sonnei
atgaaccccatgcttgattattgttttacacctgccctcaggcagaccatcagtcataccgggattaaaaaatggctgtggagaatcagaaaaattctccagcaaaaaggtgacccggatttaatacaatgtgattaccatctctgcaataaacagtttttacctgaaaaagcttttactggcgagcttatttatatgcatggaaacatgattgccagaaagaaacgaaaatattgcagtgcagcttgtgccgaaaaagacaagatggcacacgaactttaa

SEQ ID NO: 491256 - DNA, 321 bp, Shigella sonnei
atgcaggttgaatacacacttaccgccagaacaagccttgagcaaattgccgaccatctccggagtaacgacattgacccacgccctgtaatagcagaaattcttgagcgatttgaaacaagagttactgcattcccgtccggatgtcagttatgcccggagttgctcaagcttggcgtggctaaatacagagagtgcaacacaccagaaggctacagagtgctgtactctgtcgaggaggatattatcactgcacacgtgattctttcccaacgtcaggatattaaacagttactgttcagacgattgatcagagtttag

SEQ ID NO: 491257 - DNA, 234 bp, Shigella sonnei
atgaaaatagaaactatcagctacatcaagaaaaacgcagcctcactggacctggcggaacccattcttgtcacgcagaatggtgttcctgcatacgtaattgaatcctatgagcagcaacaggaacgcgagaacgctattgcgttactgaaacttctcactatttcagaaaacgacaagtctgaaggtcgcgtgttttcaaaagcacagttgctggatagctttaacaactaa

SEQ ID NO: 491258 - DNA, 468 bp, Shigella sonnei
atgtttgatctatcattagcgatgtcagctctcaaagagactgcatcaatgttaaaattattcaatgaagcaaaaactcaggctgaggttgatcgcgctgtgtctgaaataaactctaagttgtcaagcattcagcttgaatatttgtctctcattgatgagctgacaatctctaaaagcaatgaggctgcgctcaaagcaaaactcacggagatagaaaagtttaagttccaaagtgaagactgcgaacctcgccaattgattactggaacgattgtgtatgccagacagtgcaatactagctctggcaagattaccatgtatttttgtccagaatgttttgcgaagagagcaatatctatattgcaacctttccctatcgaggaaggcgataaatatacgaaaactcaatgtccctcctgtaaaaatgagtatctcatggactacaatttcaataatgatttttga

SEQ ID NO: 491259 - DNA, 303 bp, Shigella sonnei
atgaagatcatctcagttaaaacactcagggatttttgggcggagaatcccgatgcagaacaaccgctaagggcatgggtggatgaggcagcaaaagctgactggaaaagcccggcagacattaaggcacaataccgaacggctagtatattgaaaagccggcgtgtggtattcaacataaaaggtaatcattaccgtttaattgttgcaattgcgtatcagcgaggatgggtatttgttaaattcatcggaagccacaaggaatacgatgccattgatgctgataccatcgaactggagtaa

SEQ ID NO: 491260 - DNA, 360 bp, Shigella sonnei
atgaacatcaaacctattcgtacagagcaagattatgaagccgcgttgcgtgctgttgagcctatgttcgacaatgaaccggaaattaacacgcctgagggggatttctttgaggtgatgtgtttgctaatagaggaatatgaaaaaaaacattatcccattgagccaccatccccaattgaagctataagatttcgcatggaacagcaggggctgaccgtgaaagatttggaacccgcaattgggaaaaaaaatcgggtttacgaggtgttgaatggcaccagaagccttacgttaccaatgattcgccgtcttcataatcaatttggtatccccttggaaagcttggtgggattataa

SEQ ID NO: 491261 - DNA, 393 bp, Shigella sonnei
atgatctttgtaaaacgccttcagcaggtgttgcaggaattgaatataaaccagtcagagctgggaagacgtcttggtgtaaaaccccaatccgtgcaaggttggttgaaaggcgtgatgccaagaatggataaactggaaaaattagcagagctctcacaacatcccgtccattggttctttatggaagaagaagctctcggcgataagatggctgtatccactaatgacaaccaaccgcaacttacagaacagcaacgaaaaatcatatcgcttttagatgagttacctcaaagcgacgcagagcagatcattcgagatatggagcaaaaacgcgatttctataaacgaaaacttgaagagttactgcggcagaaaaacaaaactgcctga

SEQ ID NO: 491262 - DNA, 273 bp, Shigella sonnei
atgcaaaaaagtactcaaataaaaatcctgtcgataatgagccaatcagaattagggcgtcgtcttggtaaaactccacaaaccataagtgggtggtttaaaaaacgagttcctgcggaggaggttattcctgcatgtgaggcgcttgactggggagtgactccgcatgaattgcgccctgataaataccctaacccgaccgacggtttacctgttggatgtaaggttaacagatcaaatgaaccggagttgattcatgaaaatcaggcatga

SEQ ID NO: 491263 - DNA, 732 bp, Shigella sonnei
atgaaatcatcgacgcttgagaaaaaccagaaggttttcagcccctttaataaaaatctcgggggagtgaaattcgtaaagaccatcaacagaataactaccgcaattttcgcatgccttctcatatgccatgaaggcatggctgagtcttcgcgctttcctggcgctaagcattctttcgagttcagcgatatcacgcgggctaatttgcactatgttgagaagcccttttctggcaaggttaattttttgcatcaattcggccgcgataggatctgcgattgcgttgaattccttgcgtctgtccctgtttactgccagccaatgaccgaaacagatacccaacccaaaggtaatcacggtccatatgaacgaaatgagagctggattcgtattgaacaaggtaacaaattcactccagatagtatccatggttctcgccgattactcctggttctgctggctggcgctgtgattgtatttccgtcaggggtttactttggtctaaaggcagtatgcagacgtgattatgcccgaagacgttatacagggaaagcaccggttcttggtgttctttcagtcctggtaatcccgaagaaagtgaaatgtcgcagatggcagatctgggagcagcgtcaatggttccgtgatatgaaccttagtcacggtattgatattgcgtaccaggatacccggaactggaaaaaactggtagcggagcgctggtattaa

SEQ ID NO: 491264 - DNA, 1041 bp, Shigella sonnei
atggctacttcatggctcagattatggcatgacatgccaaatgatcccaagtggcgaacaatttccagggtgtcagggcagccaatcgcaacggtgatggcggtttatgttcaccttctggtgagtgcgtcacgaaatgtcacgacatgtcacgacgtgtcacgacgtggtcacattgatgtcacgacagaagatttggcaagtgcgctcgacgtgacagaagagtcaattgattcaattttgcgggcaatgcaggggcgggtacttgatggagatttaatcaccggatgggaaaaacgccaggtagcgaaagaggataacggtaatgtttcgcaaaccgcgaaatccccggcagagcggaagagagcgcagcgtgagagggaaaaatcacgaaaaaaggatgagggatgtcacgatgagtcacgcatatgtcacgacatgtcacgacgagtcacgacagataaagatacagataaagaattaaaccccacacataacgcgcgcgtgcgcgagagtgctccgaccagcgagtcgaacggtacgccgttgcaggtggcggaacctgaatttccggacggcctgagtgaacccatcgggaaatttccgatgaccgatggctggcatccgtcgccggattttcgacggcgggctgcattgtggggagtggctctgccggagccggaatttacacctgctgaacttgccgcattccgggattactggatggcggagggcaaagtgttcacgcaggttcagtgggagcagaaattcgcccgtcacgtaaatcacgtcagggcacaggtcaaaccagtcagcaaggggggcagccatgcagcagcaccaggtggcaccgcatcacgggcagttcaggaaattcgggcagcacgtgagcagtgggaacgtgaaaacggatttatcagcgacggaaacggcctggaagctgtgggaactcatgggggaggtttattcgaaccgctggacccggaagaacggagccgcaccttcgaagctctggattgcacagattggcgcgatgactga

SEQ ID NO: 491265 - DNA, 423 bp, Shigella sonnei
atggagcgttgtcgggcgggtgaaacatggcctccggacctggctgagtttgtggcgctgatttcggaaagcggagccaatccattcggtctgacggtggatgccgtgatggaagagtaccgtcgctggcgcaatgagtcctggcgatacgacgggagcgataaatacccgtggccccagcccgtgctgtatcacatctgcctcgagatgcgttcaaaagggattgagcggcagatgaccgaaggggagttaaaacgacttgcagaacggcaactgacgaaatgggcaaagcatgttggtaatggcttcagtgttccgcccatccggcgacaactggcaggaccaaaacgtcctgcgggaccaacgccaattgagttgctgaaacaggagtatgaacgccggaaagcggctggttttgtttga

SEQ ID NO: 491266 - DNA, 513 bp, Shigella sonnei
atggagaccgtttttgacgcactgaaagcaatgggaaaagcctcttcacaggaagttgcagcacgcctgggcatgacccgggatgaagcaatcaacgagctgtggaaactgaagcgtcggggtgaggcagacaacaaaggcccgatgtggtggctgacatccggcgatgaggaaaaacaggccgggtatcgtgaaacccccgttgtggatttaatcccacagagagggactgagagtgaaaaaacagccagacaggaagcgtccggaacagaaaacacgggtcagcatgcagatgtgacagaagttgttcagccaatccctgcgtttactgaaaaacagcaggattatgtgattctgccatcactgcatgcggcaaaccgtgagctgcgccgggcaaaaggtcaggtccagaagtgggagcgtatctgcgccgcgctacgggagctgaataaacaccgggacgttgtccggcagattgtcgactcttcccgccgtgttgcatcggaaaagtga

SEQ ID NO: 491267 - DNA, 426 bp, Shigella sonnei
atggcaaaagtatttacacaggaagagcgggaaaaattaaaggggcgggttgttgaacttgtacgtcttagcggtcgcgagacgttacggcaactggaagcgaaaacaggtgcgacaagatatctgttgagcgttctcgccagagagctggttgccagtggtgatgtatacaactctgactacgggttatttccctctgaacaggctcgtaaggactggcaaaacgcccgcaaaaaactatcaagggcaaaactgaagaaaaaaacatctgtggttgatccggaccttatctggtcgttaccagacggcgaaatacgtcgctacgacagtcgcctaaacataatctgtcgcgagtgccggaagagcgaagttatgcagcgcatattgtcgttttatcagggtaattttcaggaggtgatggcgtga

SEQ ID NO: 491268 - DNA, 306 bp, Shigella sonnei; identical to SEQ ID NO: 462561

SEQ ID NO: 491269 - DNA, 375 bp, Shigella sonnei
atgggtaagagtttagggggcttttttggagccataattacggcagttgtcgtcgcggctgctgtgtacttttcaggaggtacagcattagcagcaataggttggggtgcagcagccggatctttgtcattagttgcaagttctatgttaggtcaaatcggggtttctggatacggtgatgtagcagactcactaagtagaagtacttcaccaactactggattacccgttatatacggtggagaactaccacataaaaatggtgtatcaggcggttccttcatcctaaccggaagcatagtagcctggtacaacgtaccaaattctgattctcagtacttattctcagaacaggctgtagcatatgctggttag

SEQ ID NO: 491270 - DNA, 486 bp, Shigella sonnei
gtggtgaccagatcccgtaaatctgtacgctctgttcgccgtaatcgttcagctcatcggcgaggtcgtaggcggtgcgaatcaggtagtctttgcgtggaacaagtacgccgccctgtttctcaatgtaggtggcaaaacaccctgcatcagcggcagcgagtaccgcatccattgcatcatccttcagccgttgcgggccttccgggttgcgtgccatctggctggcaaggcggcgcagttcacgccatacctggcgggaggggatgccaaagaactggaactggcggacccggtgaaggcgcgcccagccgatggcgcgttccacgctctcggccattgattttccggtttcgtggtcaacgcgtggcttgcccgttttcgggtcgatgccatccacggcgcggctgtccaggtttttcccgatgtaggtggcgatgtagctggttggcgtgccttttgagccgtctacatactccgccttaa

SEQ ID NO: 491271 - DNA, 642 bp, Shigella sonnei
atgcgacgcggaagcgatcttgaatcatggtggtatgtgcaggatggtaaggacgcgtttcagtttcgccctggcaaagtgtgccacctgatgaacccggatattaaccaggaaatctacggcatgccggaatatcttggcgcgttactctcggccagcctgtctcattcggcggacatgttcagaaaactgtattacgacaacggatcccatgccgggtgcatcatctacatcggtgcagcgcaggtaaaccgcgaaagcatggactccctgaaagaaacgctacagggtgcacgtggtggtggtgcgtttaaaaacgtgctcattcatgcgcccaacgggggcaaagagggggtgcaaattttgccgttccagcagatcaccgcaaaggatgagttcatgaatgttaaggcggcatcccgtgatgatgtgctggctgcgcaccgcgttccgccgcaactgatgggggcgatgccgggcgaaaaaagtgcgtttggtgatgtggagaaggccgcgcgggtttacgcaattaacgagctgatgcccgttatggaggccatgaagcacatcaatgactggcttggcgaagaggtgatccgctttaactcttatgctcttcttgatgaaaaaacagccccgtga

SEQ ID NO: 491272 - DNA, 525 bp, Shigella sonnei; identical to SEQ ID NO: 469143

SEQ ID NO: 491273 - DNA, 504 bp, Shigella sonnei
atgagccactttaatgatttatgccagatcaatcgtgaagctgaagaaaaacgcgctgaggcagcgcaaattttgcgggatgaagcagcaaggctgattgatttctatgaagaatggctggggcttccatccatgtactgggaagacgatgatggcgacctgcaccgctacgtggagacaggcttgccatgtaagacggcagcggattttagtccgctttcagtccacaatatcgcatctacaccagacaatatttttcgcatggccgtgcgaacctgggttaagtcatctgattgcagctaccccgtaagcgtggttattgcacttgaattatattcagtggatgcggaacgggtgtctctgagagtccgggtggaagacgatatttctgttcgcgtatttatcaataaacccagtgaagaagcctggggcgatgttgttatgcatgtgaaaaagcacatcgctaatcacctgaaaaagcgcgcgccatcagcacttcgttaa

SEQ ID NO: 491274 - DNA, 345 bp, Shigella sonnei
atgaaaactgtaactgatgatgaatttcgtgagaacctgagtgaaattctggattacctttcttccggtggcagtgtcgttatcacggcgcagggagggaaggatgttgttcttgctggttctgatcttagtcctgaaatacgggctgtccttggcaaaaccaaaaaactgcgggatcaaataaacaaaatgaagcaaccactcttaataaatgcagtgagagatctggaaaaacgtcatccagctcttgtcgcacagagaaaaaaaggattgtcttttgaagatgcaatgaagcgtacaagagaaaaacatgcggatatcattaaaaagcttgaggataactga

SEQ ID NO: 491275 - DNA, 408 bp, Shigella sonnei; identical to SEQ ID NO: 28696

SEQ ID NO: 491276 - DNA, 336 bp, Shigella sonnei
atgcaacgcattgacagagaaaaagcgcagcgactgattgagcggatggaagcgctggcgaaagaagaaaatgtcaacatccaaaaaatagctgaatgtggccagatagttcttcgtcgtgaaaaagacctcaaacaactgatgtctggcgaaaccagcaaaacatggacttcaggtgaggagacgatttattgcagcttctgcaataaatcccagtacgaagtcacaaaggtgattgccggaccgtctgtttacatctgcaatgagtgcgttgatttgtgcaatgaagttatcaggagagaagtgacagaccatgaagaaaaaacgcatgaatga

SEQ ID NO: 491277 - DNA, 657 bp, Shigella sonnei; identical to SEQ ID NO: 463703

SEQ ID NO: 491278 - DNA, 204 bp, Shigella sonnei
atggaagctcgtaacatcaatgatatcgtcaaaagtgcatcccgcagcagccagggtcgcatgcaaattatcaaatgccagtctgacttgttgctgaaaatcgggttctggtgttccgtcctctcgacttcctacttgcccggaaacaaacagcaaatcgccggaacgaatagccgcagaataacgatgttcagcatacagtga

SEQ ID NO: 491279 - DNA, 543 bp, Shigella sonnei
atgatttacccaacaaatacaggcaaaagcggggaacaccttcgtctcaccacgctggaaagtgtctggattcagggaaaactgcgcatgtgggggcgctggtcgtatattggtggcggtaagacgggaaatatattcaatcagttgctggcatcccaaaaaatgacaaaaacagccgtcaatgaagccctgcgcaggatgaaaaaagcgggaatagagaaacctgagctggaagcgtttttgcgagagatgatcaatggcaagcaaaagacctggctggcgcattgtactgatgcagaggcgttatgtattgatagagtcataagtgaggtgctggcagagcatcctggattgattagtgtcctccggcaacggtataaagggcgggggatgagtaagctgaaaatggcacaacagttaaataagtatcgccctggctggagcttgaaaacttgcagaaatcgcattgacgcatggttgggtgttgctgaacacattctgtatataccaatgaaattagcgttatgcggagaaagccaataa

SEQ ID NO: 491280 - DNA, 1287 bp, Shigella sonnei; identical to SEQ ID NO: 486968

SEQ ID NO: 491281 - DNA, 240 bp, Shigella sonnei
atgatcggtttcagtcagtaccttgttcagatattcagtgacgtgcgcggggatgacctcgatcccaattggtgcttcttttacggacgcaaccacgatggcgcgggaataatccagcccgccaggcatggtgatgaatttgtcgcggaaaacagaaaagggcggtttattttcagcgataatttcctcaatgcgtttagcgtgtgccggatgaaggttatagatgtccagatccattga

SEQ ID NO: 491282 - DNA, 297 bp, Shigella sonnei
atgtctggaaatataggggcaaatccagccagtctgttcttccggctactgaaccgtcgatatgaaaaagcgagcatcatactgacgtcaaacaaagggttcgcagactggggagaaatgttcggagatcacgtactggcaacagcgatcctggatcggctgctacatcactcaaccacgctgaatatcaaaggagagagttaccggttaaaagagaaacgtaaagctggagtgctgaccaaaaacacaacgccaatcagtgatgatgaaatggtggaaagcggacagcatcagtaa

SEQ ID NO: 491283 - DNA, 414 bp, Shigella sonnei
atgttctttcagtttgtcatccacgtaatccactgtggccataaccatggtgttatccacggtaagcgccacggtggcagtgctggatacggtcagaatggtgcgaaatgtttgtgcacgtccggatccttcggcaacggttggcttgtaactttcggcagtactgcccaccgcgatcaaatcgccgtgctcatcaaatataccaatttcccggatccagaatccgcccgtttcaggaggaataaccagctccgcaataatgtggttctgatgtgttgcgtccaggatgacgcgattaacagtatgtcgccacacctcatgcaccagacggatctgcttactgtctggtatgggcaacgtgccgccaccgtcgcccacggccatatgagtcaggcggacaggcttaccatctga

SEQ ID NO: 491284 - DNA, 474 bp, Shigella sonnei
atgtccaggcatgtgttctggtcgttgcaggccgaagacagtgatgccaacagcctcaacaacaaagaaatcacgaccattattcgtcgcaacgggttccgcttctggggcaaccgcacaccggaaacgaacgcctacatctttgaggtgtatacccgaaccgcacaggtgctggctgattcaattgcggaagcgcagtttgaaaccatcgacagtccactgacgcctgcgaacgtgaaggatgttatcggtgccatcagggcaaaactggattcactggttactgccgggaaactgattggggcgtcgtgctggtatgacgtggtggataacggcaccacgaatttacgtcaggggcgcgtgcgtattcgctacaaatatacgcctgttcccccgctggaagacatggagctttaccagtcgtttactgatgaattctttggtcccgcatttgcggtgctgggaggtgcctga

SEQ ID NO: 491285 - DNA, 240 bp, Shigella sonnei; identical to SEQ ID NO: 394363

SEQ ID NO: 491286 - DNA, 435 bp, Shigella sonnei
atgcttgaggggcagggacacgccgatcatgatcgtttcatatcaggggtggtctggaggtcatgcggtgtgtcctctgcactcgccggaataaggaagtcgccggcggctccgcttttacccggccatgcggggcatggccttgtgggttttcagctctgtggcctcagcgtcgtgtgcgggcggtgccgtgcctccatcttagccgggctggcagggatgcaagggtacgcttcgccgctgcggtcacccggtccctccttcccgtctgccgtgattttccggtcgttcgtccgctcaggtttcgcggcctcaccctgcaactcccgtcagccgtgtgcgtcaggctgcggcttcccttgcgcccctgcatccccgccttatcgcccggcttttatggaggcacggcaccgcccggtgccgcagaacatgtga

SEQ ID NO: 491287 - DNA, 546 bp, Shigella sonnei
gtgaaggctgaaaataaaatattaaatctttttcatgcgacaacaatgagcagaggcctgcaaataataaaagatgggaaaataagaactgatgctccttctgttatatgctggtcgttagagacgacaccaggatggatttatttatcggatcaacttgataatgcggtgcattgggggaataaaatagcatgcctttcaaaagatgaattatttttctatattttcagagttcaggttcaggaagaaaattgttatcctgatacagatgatttgcaatatgtgtcgtggttatctcctgaggaggcagaaaacacagacctgtatacatgtctttctctttgccattcctgccgaactgacaaagaactgtatacaggttgtgaaatatcagattatgcagtccttcctgcaacaacactgtatactgacaattcaggatatcctcaatatgatattgttaatacgcttaaaaaacatataggcaaagatgagtataatcagtatgaatcacttcgtcagcgtattgaatgggtttgtttataa

SEQ ID NO: 491288 - DNA, 381 bp, Shigella sonnei
atgaaaattcaccgcatatccccggagacgcttataacactcatccacgcacacctggccggaaaagctgacagtaccgccaaagaagagcaccggctactccgtcgtttcctgcgggatgatgacggcaggctggccggcatactgctgaatattgccggaatacttcagttcaacagggaattaagtgcgcggcataattatccggccacacccctgactgaattttcattaaggaaacggggaaaacaacttcatctctgtctctgcagtctccgtttcttttatattcctccggtatttatacaaaacaaaagaagaaaatctattgttgtacaccttaataagatcacttataaacaaacccattcaatacgctga

SEQ ID NO: 491289 - DNA, 351 bp, Shigella sonnei
atggataccctcactgccggatatcagttttccgcagatgcattccggcgctttattatccagacgctgactgacgatattccgcctgacggagatgaaaaagagattgcccggttcattctccgccacccggcatttaacggcggctggctgctctttctggctgcagaaattcatgaaagatcccgtacccataacagcatcaccgtcacagtgagcgtcgataactatctctcatggatggatattgccgtgtccggtctcccggaattaccggatatgcccttctgtgattttttcattcgccgccagcagtttatttatccgggtgtacccccgacaaaatcgtaa

SEQ ID NO: 491290 - DNA, 4455 bp, Shigella sonnei
atgaagtccagatatcgaacctggcttgctgtcccgcctgaggagacagaagccgtaaaaaatgcggttcccccgttaaatggccgcaaagctgtcgcatgggatccagaaaaaaagctctggtatgcccgggcgggtaccgaactttcactgctggagcgctggttaccccggccacaggaactgtcgatggatgccggcgatccggtcactgaatttgctcaggtcctggaaaacgccgggctggttattcagggattgccacagatggacggagccatacacagagtggccacccgggatgacaaaaaaggggccaaaagtggcgcatacagggcctatcttgatggtcgtcccgccggctggtaccgcgactaccggagcgccgatgacagtcccacaaactgggtattttccggcggagaacaacacgatcctctggccagactgcatctgcgggcattcgctcagcaacagcgcgatgataacgcacgtaaactgcagcaacagtataacaaacaggccggctatgcccgcttctatattaacgggttgccacaggcaacagcacatgaatacctgacgcgcaagggcatccgggccgcgcctggcgtgcggctgaacaataaaaatgagctggttattcccttcagcaacggccggggagaaatacgttcgtaccagcgtattccggtcaccggcgggaaggatgcccgcattctgaaagactccgagaaaaccggcaactggttcaccttcggaaccccggaaaatggccgccccctgttatttgcggaaggttacgctactgccgcctccctgcacgaagcaaccggccttccggttctgatgacagttgatgccagcaatatgattgccgtggcagaaaatgcccgccaaatctggactgacagcccctttgtcttctgtgccgacaacgatcatcaacgggaaattaacaaaggggtttttagtgcaacaaaggccgcagaagtcacgaatggcgaagtcattattccggcctttacggaggcggaaaaagcacagggactgaccgatttcaatgacctggacgccagccggggacgggacaactttcagaatgccatgaacgcacagttaaaacatatcggtatccccacacccaacagtgacactgccgaccatcgtgaggctgtcgtgatcggcaacctgatattcacaccggtaaaagatgagaagccacaaatgtcccctgaaaacagacagagcacagccccggaaacggagctggcgacacaggatacgccttatgacacccactccgacgatacagaaaaccaggcatatgaagatgactatgccgcctatgcatccctgcaatcagtaactgcggagacgttatccccggataaaccactggagaatattgcgtctgccgctgataccggcacagagaatacctctgtggctaccgctggcgaccaggaaggcctcaatacagacgccacaggtacagacaccgctcacaacagcgacacagcagaaacaggagcgcttcctgaacctgccgggatgcagtccgtgcagcaggcaaccactgaaccgaccgcagaagataaaccacacgagaacgttgtttccgctgccgataccagagaagaaaatgcctctgtggctaccgctgataccggtgaagaaaatgcctctgccaccaccgctgacaaccagagcacgcaggcagaagaacatccccggagtgaagacacaccggaaacctccctctccgacgcgctcgggacacagcacaccaccacaacgcagtctgaagaacaagtgcaggtttccatggccagcgctgacgactggagcgcatttgcggaagatctcaacgctgacactccgggggcccccactgttcacaacaccgacaacgcggagacaaacacagtttctgaaccggccgggatgcggccagttcagcaggtgaccactgaactgacggcagaagataaaccacacgagaacgttgtttccgctgccgataccagagaagaaaatgcctctgtggctaccgctgataccggtgaagaaaatgcctctgccaccaccgctgacaaccagagcacgcaggcagaagaacatccccggagtgaagacacaccggaaacctccctctccgacgcgctcgggacacagcacaccaccacaacgcagtctgaagaacaagtgcaggtttccatggccagcgctgacgactggagcgcatttgcggaagatctcaacgctgacactccgggggcccccactgttcacaacaccgacaacgcggagacaaacacagtttctgaaccggccgggatgcggccagttcagcaggtgaccactgaactgacggcagaagataaagcacaggaaaagagcgttgcgtctgccgctgagaccggcgcagagcactcctctgacatcaccgatgacaacaggaacgcacccgctgaggagctcaatgccgatgccacggttgctgttcacaacaccggcacagcagaaacagcctcaccttctgaacctgcagaaactcagccagtccggcaggccaccgctgaaccgacggctgaagataaactgcaggaagagcgtcttgtgtccgccactgagaccagcacagcgaatgaagcagcccaccctgatacgccatcgcttttcagccgtctgcgccgttttctgaccggtgggaaatcacgcacctcagaaccttccgttattcaggagaaaaagcccacggaggctgaaacagcaacagaggtggtcgcaccaccatcaccaccggaaaccagcccggaagacacatcgtcagcggaaccggacacgattatctttgcaccccgccgtcccgacagtccgcagcggcacaacctggacgagatccttaaaaatcttacacacaaagagtttcccgacaggactgcgctctacagcgttgacggtgaacccgccttcctggacagactctactgtctcgaaatggtggatggcgccagcgcggatgacaaaaaggtcctggctgcccttgctgtggccaccaacttctatggcggcgttatcgagctgaccggcagtgatgcctttaagcaaaaagccatgcagctgattgtcgaatacgacatcaaggttcgcatgaaactcccggcccagcgggcagcactggaaaaactccgcaaggaaaaagagatggcgcatgatgccattgtcacccacagacccacgccggaactcaaccgccagtcaccggaagagacaacaatggcccaaccggctccccctgtgtcaccgaaggcagaggctgaacaaacagcaggcagtacggctgaaacaccgcatccggaagcgccggtcacggcaaaagctgaagccccccgggccgacagaccggaacaacccgccgccccgtcgtctgcgccagaaaaagcccctgtcagtgcacagccgcagcaacccgacacaccggaggaagagccgcccggcaagctcagccccggtgaaagtgtgactgccgtcctgacaaactacggagaaaaagagtatgcgcccggaaaagggcgctgcttttttgtggaactcaccaaccgcagtggcaaacgggaatactggggaaacggcctggaagaactggtcaaaaaccatcagaagggtgaccccgtcacactgacactgcaggcgagagaaacattccgactgtccggtgaaacgcgggatcgtatccgtaatatctgggccataaccccggtcagtaacggcattaccgttaataatgaccaacctcatgcgggtcagcataccctggagtttccgatggcaacattcagccaggtgatgttacagatgcaacaacactggccacagataatgcaggaagttcgctcccccaaaaatcctcccaataatctgtacattggtgaagacaggcaacctgcatcagcacctcaggatcaatcaatgcgacttcccctcgctggtaatgcccccaatgaactgataccagccatcgcctctgccgataaggacaatcgtcagttgaatcttctgctggtccacagcgcagatgatcatctgcagggcgtggtccgcctgaacggcaccctttacccggcactggccaccccgtcagctgacaaccgtcagctggtcatcaatgccctgacggataacggtctgcagtttgccggttacggtgaagctgttaaccatgatgagaataatcatcagcgtccgtccccacaaataatgcagtttcacctgaagcaacaggactccccgttgtttgccgccatccacaaaccggaagagcaaccggacaagcttttccgctctctgggttttgagcagacctggaaagagtggtctgacagccaaaaggcggaggacaggcaggaaaaaactctgcaacaggcacaatcccacagccccggccgatga

SEQ ID NO: 491291 - DNA, 801 bp, Shigella sonnei; identical to SEQ ID NO: 483940

SEQ ID NO: 491292 - DNA, 1095 bp, Shigella sonnei; identical to SEQ ID NO: 484487

SEQ ID NO: 491293 - DNA, 234 bp, Shigella sonnei
atgaagattattgccggtattacccctgctgatagcggtacgctggagattgggggcaacaactacgtcagattaacgccagttcatgctcatcagctgggtatttatctcgttccccaggaaccgctgcttttcccaagcctgtcgataaaagaaaacatcctgtttgggctggcaaaaaaacagctctccatgcagaaaatgaagaacttgctggcggcgctgggctgctag

SEQ ID NO: 491294 - DNA, 708 bp, Shigella sonnei
gtgcgggtattacttcgacctgttctggtaccggaactcggtctggttatcgttaagccaggccgtgaatcaatgtcagcattccataacggcagaatactggtggagccggaaccaaaaagcatgcgtaatctgccgtccggggtcgttcctgccgctcgccagccgctggtggaagacaaaacattgctgccgtttttcagtaacgcacgggtgattcgtgctgctggtggtgctggtgcattgtctgactggctgttgcgccatattaaatcctgccagtggccacacggcgattatcatcacagcgaaaccgtcattcaccgttatggtaccggcgcaatggtgttgtgctggcactgcgacaaccagctgcgtgaccagacatccgaatcactcgagcaacttgctcatcaaaacctgtcagcatggatgattgacgtcatcggtcacgcaataagcggtacgcaggagcgtgaattatctctggctgaattatcctggtgggcggtccgcaatcaggtggcggacgcgctaccggaagcggtattacgtcgttcgctggggttgcgtgcggaaaaaattcgctctgtgtacagtgaaagcgacatcataccgggagagcagacagccaccagcatactgaagcagcgcacaaaaaatattgcgttactgcctcacgtccaccagcaacagaacccaccatag

SEQ ID NO: 491295 - DNA, 663 bp, Shigella sonnei
atggaacttaaaaaactgatggaacatatttctattatccccgattacagacaagcctggaaagtagaacataaattgtcagatattctactgttgactatttgtgccgtcatttctggtgcagagggttgggaagatatagaggattttggtgaaacacatctcgattttttgaagcaatatggtgattttgaaaatggtattcctgttcacgatactattgccagagttgtatcctgtatcagtcctgcaaaatttcacgagtgctttattaactggatgcgtgactgccattcttcagatgataaagacgtcattgcaattgatggaaaaacgctccggcactcttatgacaagagtcgccgcaagggagcgattcatgtcattagtgcgttctcaacaatgcacagtctggttctcgggcagattaagacggatgagaaatccaatgagattacagccattcctgaacttcttaacatgctggatattaaaggaaaaatcatcacaactgatgcgatgggatgccagaaagatattgcagagaagatacaaaaacagggcggtgattatttattcgcggtaaaaggaaaccaggggcggcttaataaagcctttgaggaaaaatttccgctgaaagaattaaataatccagagcattga

SEQ ID NO: 491296 - DNA, 642 bp, Shigella sonnei
atgaactatacaaaatttgatgtaaaaaattgggttcgccgtgagcattttgagttttatcggcatcgtttaccatgtggttttagcttaacaagcaaaattgatatcacgacgttaaaaaagtcattggatgattcagcgtataagttttatccggtaatgatctatctgattgctcaggccgtgaatcaatttgatgagttgagaatggcgataaaagatgatgaattgatcgtatgggattcagtcgacccacaattcaccgtattccatcaagaaacagagacattttcagcactgagttgcccatactcatccgatattgatcaatttatggtgaattatttatcggtaatggaacgttataaaagtgataccaagttatttcctcaaggggtaacaccagaaaatcatttaaatatttcagcattaccttgggttaattttgatagctttaatttaaatgttgctaattttaccgattattttgcacccattataacaatggcaaaatatcagcaagaaggggatagactgttattgccgctctcagtacaggttcatcatgcagtttgtgatggcttccatgttgcacgctttattaatcggctacaagagttgtgtaacagtaaattaaaataa

SEQ ID NO: 491297 - DNA, 858 bp, Shigella sonnei
atgcgtgactgccattcttcagatgataaagacgtcattgcaattgatggaaaaacgctccggcactcttatgacaagagtcgccgcaggggagcgattcatgtcattagtgcgttctcaacaatgcacagtctggtcatcggacagatcaagacggatgagaaatctaatgagattacagctatcccagaacttcttaacatgctggatattaaaggaaaaatcatcacaactgatgcgatgggttgccagaaagatattgcagagaagatacaaaaacagggaggtgattatttatttgcggtaaaaggaaaccaggggcggctaaataaagcctttgagaaaaaatttccgctgacagaattaaataatccagcgcatgacagttccgcaatgagtgaaaagagtcacggcagagaagaaatccgtcttcatattgtttgcgatgtccctgatgaacttattgatttcacgtttgaatggaaagggctgaaaaaattatgcgtggcagtctcctttcgctcaataatagcagagcaaaagaaagagcccgaaatgatggtcagatattatatcagttctgctgatttaaccgctgagaagtttgcgacagcgattcgaaatcactggcacgtggagaataatctgcactggcgtctggacgtggtaatgaatgaagacgactgcaaaataagaagaggaaatgcagcagaattattttcagggatacggcacattgctattaatgttttgacgaatgataaggtattcaaggcagggttaagacgtaagatgcgaaaagcagccatggacagaaactatctcgcgtcagtccttgcggggagcggactttcgtaa

SEQ ID NO: 491298 - DNA, 165 bp, Shigella sonnei; identical to SEQ ID NO: 39229

SEQ ID NO: 491299 - DNA, 288 bp, Shigella sonnei; identical to SEQ ID NO: 39232

SEQ ID NO: 491300 - DNA, 396 bp, Shigella sonnei
atggctgttcaatcatacaaacaccaatccctcttggataagggatacattcgcatcaagctaagtcgttctcagcataaggccatttttagggtaaggaaaattcgtatatgggatacgtatacgtattactataacggtgaagaggttattgttgagcactttcttgccagatggtttgtagccctgatttttgtcccttttctgttaattggcactttggcagacggttttcctagcacatggcaggagctaaagaaatgccttttcccgcatagatacggtagcctttcggcagacagctggcgagttatacctggtaaacattctgtggatgagcaaccgattgttgattactggttgaagcgtatggctgatgctaaaaaagttgattga

SEQ ID NO: 491301 - DNA, 327 bp, Shigella sonnei; identical to SEQ ID NO: 39234

SEQ ID NO: 491302 - DNA, 192 bp, Shigella sonnei; identical to SEQ ID NO: 34317

SEQ ID NO: 491303 - DNA, 3996 bp, Shigella sonnei
atgacattaaacgatttctatgcggatcgctttggcagcgatccgttctcgctaattgaagcagcacgggatgaactaaccgagctggcacagatggctggtatcaactggtctgcctgttccgacaacatccaactcaaccctcgcgggggtgttgagcgttactcttcatacaataaaacatctccagaagctctcgaaaagagcctcaaaggacgcgtagaaatttactcccggctggaacacagcaaagggattgattacccgttcattaacttcgtccataaaggcagcgatgctggctcatggagcggtttctccttcctgttttctgaatatcgccgtgagcaacaacggaataatgcgaccgtggtcgcacaaccggaagaagaacgggcaagaataaaacgtcaggccgaagcacgtcgtcgccgtgaagaacaaaaacgaattaatgacctgaaaaacaaccaaatggaccatgaacgtttgctgggatggctggcattccacagcgcgtgggaacatgctcctgcagaagacggctcatggccatatgcgattaaaaaaggtattcgtgacgtttttagttcatgtgatgtgcgtcgcgtgaccagtcacgacagtgcgaaatggaaccgggggccaatcacatatatggctatccctctggctcacctggacggtcgttacgatggtcgtattgtgggttggcagcgaatcgacaaacaaggtgggaaataccagaccagcgcagtaaccagcggcgatttcgtcggtgcctgctttgttatcggtgagctgaaaggggcgcaaaacatcgctgttacagaaggttttgctactggtgcatccatctggcttgccacgaaaaaagataaacgctttgacgctgtggttgtcgctgtatccgctaacaacatggttcatgttgtggaacaactggtaaacatgtacccggcggcaaaaatcacctgcgcactggataatgaccggaaatcagccacagaaggaaaagggaataccggcctgcggactggctatgaaatcttatcgaaattcaacgatgtccgctgcgtctatccaacttttgaagacgatccgcaaatggagtgcagtgacttcaacgacctgcacaaactacgtggacttcgtgaaacagcacgtcaactatttgcaacagcaaaccgcctgaaaaccggcactgatttgctatctctgacgctcaaccgcctgaagacaattaagcgggataaccgtcgtacttttgccaaagagctgctgagagcggtggatattggcatgctaacctgtccggttcctaacagtccgtcagatttgtttaacatgttctgcatcgttctgcgtgaaatggggctggaaaatatctatcgcgctacggtaaaagaccacattgcccgtcgcctgaataaaaagtgccgtattgcccaggctccgcgctctttcagcgaacgcataactgatcccaataaacgccctcaacatatcacctataagcgttttgaaacttcggtaatgaccgatgacgtcctgaagtacgtgcaatcactacaggggatcgtcatcgttcgtgctggtatgggttccggcaaatctactggattgttacgaccgttaatgcatagctcagaacgcggtatctctgtagctcaccgtgtttcccttattggtggcctgtgggaaatgatgactgaaggaaaaggtgtaaaagccgatatcctgcactatcaggaccctggctatcaggaaatggctccatacgccagtaaactgaccatctgcataaactcgattgttaaaaactgctggcaaccgttgatgcgccagcacgactattttggctttgacgaggccacacaagggctacgtgccgttctttccggtcgggctatggaaaacccggtggctgtattcaatacgctaattgacgcgctggccagaacggaacaacacccaatcatggtggatgctgatgcgaacgatctgctggttgacctggctgaactggctatgaaacgccgtgaagaactaggtttaccggcatggctgcagatccacgtaattgaattacctgttgatgttcgcaaccgcgaaacaggtgagccaatccgggttttttatacagaaaaagatcgcatcatgaccgaggtggtgaaagctgtatcggatggcgaaaaaatcatgttggccaccgacagctccacctttgcagaagatgtgacagccaccctgagaatgcattttcctggtaagaaatttctgtgtgtaaaccagaaaaacaaaccagagccagaagttgaagcatttaccaatcaaccgaaaaagatggtcaaaaaatacgacggcctgatttatagcccgtctatttcatccggcgtgtcgattgagcaaaaacattttgaccgtcatttcggcatgttctgtggtgaagttgtacccagcgacgcagtgcaaatgctacgccgcgaccgtacagcaaaagaatttattatcggctttgataaagctcgtgcaaaacgtgaaactgacccgcaaaaaatagaacgagcattcgcccaggcattgcttgctaccgcaggtatgaacggtgaactgacggatgtcattttcgatggcgaccgtatatcaatgggggtggccaataccgactttaccaggatgaaaattaaagcagccgcaattgaagcgactgcgcgtaacgactacgccagcaacatgatctgcatcatgcacagcgacggttataaggtatcgccgctgggcaccgattatgctgcgaatgatatcggtaaagatctgcgtaaagaagcgcgggatattgtgtgggaacagacactggatctgcacctcaatacagaaactccacaagaatcagagcgtgaagaactgctaaaaaaacgcgcgctgacgcttgaagaacaggcaaaacttgtccgctgggatattgaaaacgaactgaaactaccggttgaagaaggcacactgaaattctatttcgatggtgctcgagacaaagttcgccgctatgaaacaatgcttttagatgaggtaacagctcgtcgttacgaccgggaagaagcagccatcaattttacctacgcataccgtcaggcgggacagtggcaatattttgtagtgaccgcgatgactcgcgagcaggctgatgatgtctttaaaactaaattccctggaataatcgatcacaaggtaaaagctactcctactgttgaagtcggggcgcgcggtttctatgcgcttaaatcagcaactctccggcagtactttatcgactgcggtatcaaccctgagactatgaccggcgaggcgactcaggagcgtctcaaattcgctcgagataatctcatgacagccgaacgccgtgacctgttgaataacgttctgcacattggtggttttatgacgccaaaagggaagcctaaagtgccggaagcgttgtttaaaaacatttgcgactctcttggccttaaaacaggtaaacgtcgcggcagagacggcgataagcgtccaaccttgcgttttgttgagcctgaatcagcggcatttatgctggatattcttgttcagcgtcagaaagatggcctaaccctaaaaacgcgtaaagccgagaagacagccatcgaaatggatcgcgatttggatctcaatatatatatggatgataaaacgcgatccacaaacgagcaggttcaaaacgcccctcattcagtaatttctgaggctttggccgtattgccggtggctgttcctgagtcctgggcgatgagtgcgctttccggtgaggagctggccactatgtcatcatggtcatcaaccagcatagctatgacgtttgcatctctgtacctcacagagttcatggatcacttgtccagcaatgaactgcggcggttacgagaatacattaccgggaatagctcatgcagctacgaagagcagggcgctttctatgggtaa

SEQ ID NO: 491304 - DNA, 597 bp, Shigella sonnei
atgaaaacacgaggcgaacgactgaaagcacgccgtttagagatgaagctgacgttgcgagaagttgctgaggctgtcgatatctctattgcaggcgtccaaaacttagaacgtggcgacgtaatgccgtcactggagataggtattgccctggctaaatgcttacgcaagccagtgcattgggtgctgtatgggacagaatatgaccctgatcgcattcctgttattggcacaactgaaagtggacctgatgaagagtggaagccaggacaggttccaaatactgagcgattcctgccattcatcagccagcgcaatactgtttatgcgttaactatcagcaatctggcgcagggaaactatcagcctggcgattttctcctggtcgattctgcgctggaactggtccccggcgaggatgttctggttcgtgatactgcaggaaatatcaccatccagcgcctggcccgttttgatgatgaaaattactatctggacggaacaaattcacaacgcgccatcttcaggaaaagcgatcttgaatttgttcaccaaatagtcggaacgatcaaatcattcatggttgagggtagatga

SEQ ID NO: 491305 - DNA, 291 bp, Shigella sonnei; identical to SEQ ID NO: 39237

SEQ ID NO: 491306 - DNA, 243 bp, Shigella sonnei; identical to SEQ ID NO: 39227

SEQ ID NO: 491307 - DNA, 222 bp, Shigella sonnei; identical to SEQ ID NO: 490854

SEQ ID NO: 491308 - DNA, 1122 bp, Shigella sonnei
atgcgcatcgccgggttagcttacccaggcaaaaaaataatagctatgttcaaaaccactaatattcatggcgcacaactcgtttgcgcagattctctgcaatttatcaaaaccatccctgataactcggtcaatttgattgcaacagacccaccatacttcggcgtaaaggctaacgcatgggataaccagtgggatagcgatgctgactttttggggtggattgacgaatttttggcagaattttggcggatattggcccctaatggcagcctgtatatgtttaccggctctcgccttgcgtcaaaaattgaattattaactcgcgaccgtttcaatgttctgaaccatattatttgggctaaacccagtggtatgtggcgcggttgtcataaagaaagtttaagggcttattttcctgctactgaaagaatattatttgcagagcattacggcgcgtcaggttatgctaaaggtcagtcaggttatgcttcaaaatgtgcagatttaagaaaaaatattttttctccactaattgatgctttttcgctggctcgccgtcagttagatatatcagccgcagacattaattcagcgacaggaaagcagatgtgttcacactggttttcttattcgcagtggcggcttccatcattaattgattttaataaactatgcgaattatttcgcaggaaggcagattcactcggtgtcccgtgtccatatccttttaatgttgattattcagaacatgaaaagcgttatagcgatctgaaattgcattatgaggaagtaaagaagcagtatgatgatttgaaggctcagtatgaaaatttacgccgtccatttcatgttactgctgatgtaccttataccgatgtatgggagtttcctcctgtgcaatattatcctggcaagcacccatgtgaaaaacctgcagcgatgatggaacatattataaagagtagttcacgccccggagatatcgttgccgatttctttatgggatcaggctcaactattaaagctgcgctgaagttaggacgtcaggcaataggtattgagattgagggcgaacgttatcttcagacagttgatgaagtgaaaaagttatttgagtaa

SEQ ID NO: 491309 - DNA, 438 bp, Shigella sonnei; identical to SEQ ID NO: 489792

SEQ ID NO: 491310 - DNA, 312 bp, Shigella sonnei; identical to SEQ ID NO: 489811

SEQ ID NO: 491311 - DNA, 540 bp, Shigella sonnei
atgccggttatccagctcaggaaaacgtcgctgcaccgacagaggaataccgtcgagaatactggatatttcccttgctatacgcgacagcacgaaagtacagaatgcggtttccaccacttcagccgattctttggcatttttcagttcctgcgccgtcgcctgagcacgagtcaggcgatggcgctcaaattcaagtgttccggggtgaagatctgcctcgctggccagccgcagttcttcaacctcccggcgcagcttttcgttctcaatttcagcatccctttcggcataccattttatgacggcggcagaatcataaagcacctcattacccttgccaccgcctcgcaaaacgggcattccctgctcctgccagttctgaatggtacggatactcgcaccgaaaatatcagccagctgctttttgttgacttccattgttcattccacggacaaaaacagagaaaggaaacgacaaaggccaaaaagcccgttttcagcatctgtcgtttcctttcttttcagtgggtgttttaa

SEQ ID NO: 491312 - DNA, 906 bp, Shigella sonnei
atgattcagttacccgctggcgcgacgcaagagcggacgcaaaaagtgttggatcaagtgacggattactatctgaataacgagaaagcgaacgtagaaagtgtctttacggttaacggctttagcttcagcggccaggcacaaaacgccggtatggctttcgtcagtctgaaaccgtgggaagagcgtagtggtgacgaaaacagtgcggaagcggtaatccatcgtgccaaaatggaattgggcaagatccgcgacggttttgtcattccattcaatatgccagccattgttgaactgggcacggcaacgggtttcgactttgagttaattgatcaggctgggctgggtcacgatgccctgacccaggcccgtaaccagttgcttggcatggcggcgcaacatcctgccagcttagtcagcgtgcgtcctaatggtctggaagacaccgcgcagtttaaactggaagttgaccaggaaaaggcgcaggcattaggtgtttcactttctgacatcaatcagaccatttcaacggcgctgggtgggacttacgttaacgacttcatcgaccgtggtcgcgtgaaaaaggtgtatgttcaggcggatgccaaattccgtatgctgccagaagatgtcgataaactttatgtccgcagcgccaacggcgaaatggtgccattctctgcctttaccacttcacattgggtgtatggctctccgcgactggaacgctacaacggtctgccgtcaatggagattcagggggaagccgcgccaggaaccagttccggcgatgccatggcattgatggaaaaccttgcgtcaaaattacctgcgggcattggttatgactggacaggtatgtcgtatcaggaacgcggtgatgctgccaacttactgatttag

SEQ ID NO: 491313 - DNA, 252 bp, Shigella sonnei
atgactctcaataaaaccgatcgcatcgtcattacgctgggtaaacagatcgttcacggcaaatacgtaccaggctcgccgcttccggctgaggcggaactctgtgaggagtttgcaacctcgcgcaacatcatccgtgaggtgttccgttcgttgatggcgaaacggctgattgaaatgaaacgttatcgcggcgcgtttgtggcaccgcgtaaccagtggaattacctcgacactgacgtactgcaatag

SEQ ID NO: 491314 - DNA, 2415 bp, Shigella sonnei; identical to SEQ ID NO: 483545

SEQ ID NO: 491315 - DNA, 483 bp, Shigella sonnei
atgcggaaccagaagaacaggtcgatccgcgcaaagccgccgtcgaagccgctattgcccgtgccaaagcgcgcaagctggaacagcaacaggctaatgcggaaccagaagaacaggtcgatccgcgcaaagccgccgtcgaagccgctattgcccgtgccaaagcgcgcaagctggaacagcaacaggctaatgcggaaccagaagaacaggtcgatccgcgcaaagccgccgtcgaagccgctattgcccgtgccaaagcgcgcaagctggaacagcaacaggctaatgcggaaccagaagaacaggttgatccgcgcaaagccgccgtcgaagccgctattgcccgtgccaaagcgcgcaagctggaacagcaacagactaacgcagaaccagaagaacaggttgatccgcgcaaagcggcagttgccgcggctattgcccgcgctcaggccaaaaaagccgcccagcagaaggttgtaa

SEQ ID NO: 491316 - DNA, 1167 bp, Shigella sonnei; identical to SEQ ID NO: 39241

SEQ ID NO: 491317 - DNA, 576 bp, Shigella sonnei
atggcattcagaatgagtgaacaaccacggaccataaaaatttataatctgctgaccggaactaatgaatttattggtgaaggtgacgcatatattccgcctcatacaggtctgccagcaaacagtacctatattgcaccgccagatattccggctggctttgtggctgttttcaacagtgatgaggcatcgtggcatctcgttgaagaccatcggggtaaaacggtttatgacgtagcgtcaggggacgcgttatttatttctgaactcggtccgttaccggaaaatgttacctggttatccccggaaggggagtttcagaagtggaacggcacagcctgggtgaaggatacggaagcagaaaaactgttccggatccgggaggcggaagaaacaaaaaacaacctgatgcaggtagccagtgagcatattgcgccgcttcaggatgctgtagatctggaaatcgcaacagaggaagaaacctcgttgctggaagcctggaaaaagtatcgggtgttgctgaaccgtgttgatacatcactatctccagatatcgagtggccaagtcaaccataa

SEQ ID NO: 491318 - DNA, 2034 bp, Shigella sonnei
gtggcgcttgaggatgcaagtacgacgaaaaaggggatagtacagctcagcagtgcgaccaacagtacgtctgaaacgctggcggcaacgccaaaggcagtaaaatcagcctatgacaatgcagagaaacgtctgcagaaagaccagaacggcgctgatatacccgataagggacgcttcctgaacaacattaacgcggtcagtaaaacagactttgctgataagcgtggtatgcgttatgtgcgggttaacgctcctgcaggtgcaacatctggaaaatattaccctgttgttgttatgcgttctgctggctcagtaagcgaactggcatcaagggtcattatcaccacggcaacgcgaaccgcaggcgatccgatgaataactgcgagtttaacggatttgttatgcctggtggctggactgacagggggcgttatgcttatggaatgttctggcaatatcaaaacaatgaacgagccatccactcaataatgatgagtaataagggcgatgatttgcgctctgtgttctatgttgatggcgctgctttccctgtttttgcgtttatcgaagatggcctgtcaatatccgcacctggtgctgatctcgttgttaatgatacgacctataagtttggggcaacaaatccggcgactgaatgtatcgcggcggacgttatccttgattttaagagtgggcgtggtttttatgagtctcattcgttaatcgttaacgataacttgtcgtgcaaaaaactttttgccacagacgaaattgtagcgcgtggtggtaatcagattcgaatgataggtggggagtatggggcattatggcgtaatgatggcgctaaaacttacctgctgcttaccaatcaaggtgatgtttatggtggctggaatacattaagaccgtttgctattgataacgcaaccggcgaactggttattggaaccaaactgtccgcaagtctgaacggtaatgcattaacagcaacaaagctgcaaacgccaagacgggtttctggtgttgagtttgatggttccaaagatattactttaaccgccgcgcatgtggctgcttttgccagaagggcaacggatacatatgccgatgcggatggtggcgttccctggaatgccgaatcaggcgcttataatgtcacccgctctggcgacagctatattctggttaacttctataccggagtcggaagttgccggaccctgcagatgaaggcgcattacagaaatggtggtctgttctaccgttcttcaagagacggttatggttttgaggaagactgggcagaagtttatacctcgaaaaatcttccaccagaaagctacccagtcggcgcaccaatcccgtggccatcagataccgttccgtctggttatgccctgatgcaggggcagacttttgacaaatctgcttacccgaaacttgcagccgcttatccgtcaggtgtgatccctgatatgcgtggctggacgattaagggcaaacctgccagtggtcgggccgtattgtctcaggaacaggacggcattaaatcgcatacccacagcgccagcgcatccagtacggatttggggacgaaaaccacatcgtcgtttgattacggcactaaatccacgaataacactggtgcgcatacccatagtttaagtggcagcacgaatgcagctggtaatcacagccatagagatggccgtcgatttaaccccagtgtttttaaagatacttatcaatatggttatacaagctcaggtcaaaatacctggggtgtacaaggctcagtaggtatgtctacggggtggttagcgaataccagtacagatggtaatcatagccactcactgtccggcacagcagcatctgcaggtgcacacgcgcatactgtcggtattggtgctcatacgcactccgttgcgattggttcacatggacataccatcaccgttaacgctgcgggtaacgcggaaaacaccgtcaaaaacatcgcatttaactatattgtgaggcttgcataa

SEQ ID NO: 491319 - DNA, 267 bp, Shigella sonnei; identical to SEQ ID NO: 487623

SEQ ID NO: 491320 - DNA, 267 bp, Shigella sonnei; identical to SEQ ID NO: 11114

SEQ ID NO: 491321 - DNA, 1119 bp, Shigella sonnei
atggcaaaattatatctttaccttgttcttgctgcatcattatcggcattatcaactgacatgattgtgcctgcgttaccagaactacagaaagcatttaatgctgactactcattaattcaactaagtattagtggatttcttattgtatttgcatttagtcaactgatatcaggaaccataggtgattattttggaaaagtacgcgtaatgactatatgcttaattatttttcttattggtagtattgtatgttttatggccaataatttaaatatgcttcttttgggtagaattctacaggcaataggtgcaggtgccggacctgtaatatcaaaagcaattgcaaaagagtcttttccaccactaaagctaaaaagagcactttctgacatatcatcaacaagtgcgataataccattaatagcacctctggccggagcattaatacttgattattataactggaatgtaatatttattgtaatgggtgcatttagcattctaaccatactcctgtcacctaaagagtctaataaacaggagaaaaaaacacatcaagataatgtaaaatttgtgactaaagatttcatctgcgggacaatactcgtttcactaatgctaagctcactattttgctacatatcaatatcgcctgcactatttatgagcgattatggattaaatacatttaactactctgttgttttttccctgtcagttttgtttttcatcattggaaaccaattatcaaaaatcgaaaaaatatcaaacccatggatcttatttcccctaaacgcaatatcagtcacacctttccttatattaaatgatgcttttataatatgtgttattggagcaatgattttcaatttaactcttggcgcatactatccaatagctaatttcatctcattacagataaacggttcacgaactggtttggcagcatcaattacaggctttactcaaacagtaagcgcagggacaattagttttctttcagtaaaaataagcgataatggagtttctttgggaaccactttaagtattagctgtcttattcttgcattattgtcaatattcgtaaccattattatagggaataataaaaaatga

SEQ ID NO: 491322 - DNA, 276 bp, Shigella sonnei; identical to SEQ ID NO: 24883

SEQ ID NO: 491323 - DNA, 702 bp, Shigella sonnei
atgtccgatctgattgcctataaatccaatgcgttagttgaggccagttataagctcaccttacaagaacaacgtttcttgttgctttgtatcagtcgattgaaatcaggagttgatgcagcatcatcggagttgcaaaaaaatctgataattacggcggaggagtatttcaattcattccctgatatgggcagaaaaaacgctgagattcagttacaggaagccgttgatcggctgtgggacagatcgatccttctcaaggatgacgagaagcgagaggaatttcgttggatacaacgtcgtgcgcaatacctgaaaggcgaagcaaaggtacagatcactttttctgattctgtgatgccatacctaacgcaactacaagggcaattcacaaaggtgataattaagaatatatcaagattatcaagaagttacagcattaggatttacgagttgctccagcagtttcgcagtacaggtgagcgcattatttcacttgatgactttcgttcaatgcttgatatttgtgataaatatcaaacatataaatctcttaaccaacagttattaaaaccctgcattgatgaattaaacctgaaaagtgatctgcttgttactgttgagacaatcaagaaggggcgtacggttgtagcactacattttcgcttcaaggaagataaacagatcaaagtcccctcataa

SEQ ID NO: 491324 - DNA, 1095 bp, Shigella sonnei; identical to SEQ ID NO: 484487

SEQ ID NO: 491325 - DNA, 1719 bp, Shigella sonnei; identical to SEQ ID NO: 485613

SEQ ID NO: 491326 - DNA, 267 bp, Shigella sonnei
atggcgacgctggggcgtcttatgagcctgctgtcaccctttgacgtggtgatatggatgacggatggctggccgctgtatgaatcccgcctgaagggaaagctgcacgtaatcagcaagcgatatacgcagcgaattgagcggcataacctgaatctgaggcagcacctgacacggctgggacggaagtcgctgtcgttctcaaaatcggtggagctgcatgacaaagtcatcgggcattatctgaacataaaacactatcaataa

SEQ ID NO: 491327 - DNA, 672 bp, Shigella sonnei
atggcagcgacgcacacactccctctggcgtcaccgggcatggcgcgcatctgcctttacggggatttacaacgatttggccgccgcatcgaccttcgtgtgaaaacgggggctgaagccatccgggcactggccacacagctcccggcgtttcgtcagaaactgtgcgacggctggtatcaggtacggattgccgggcgggacgtcagcacgtccgggttaacggcgcagttacatgagactctgcctgatggcgctgtgattcatattgttcccagagtcgccggggccaagtcaggtggcgtattccagattgtcctgggagctgccgccattgccggatcattctttactgccggagccacccttgcagcatggggggcagccattggggccggtggtatgaccggcatcctgttttctctcggtgccagtatggtgctcggtggtgtggcgcagatgctggcaccgaaagccagaactccccgtacacagacaacggataacggcaaacagaacacctatttctcctcactggataacatggttgctcagggcaatgttctgcctgttctgtacggtgaaatgcgcgtggggtcacgcgtggtttctcaggagatcagcacggcagacgaaggggatggtggtcaggttgtggtgattggtcgctga

SEQ ID NO: 491328 - DNA, 1044 bp, Shigella sonnei
atgtataaaaaattaaaattaaccacaataagcgaattgattaaaaatatttattgttcattatccgttctcatcattggttgtgcgtcagcttatgccgttgaattcaacaaagatttaatcgaagccgaagatcgtgaaaacgttaacctttcccaatttgaaactgatggccaattacccgtaggtaaatactcattaaacgctcttattaataataaaaggacgccaatccatctggacctgcaatgggtattaattgataaccaaactgcagtttgtctgactccagagcaattaacattattaggctttactgatgagattattgaagaggctcagcaaaacctgatcgatggttgttaccctatcgaaaaagaaaaacaaattacaacttatctcgataaagggaaaatgcaattatccatatctgcacctcaggcatggttaaaatacaaagatgcaaactggacgcctcctgaactttgggatcatggtattgctggggcatttcttgactacaatttatatgcctctcattatgcaccacatcagggcgataattcacaaaatataagttcctatgggcaggctggggttaatcttggggcctggcgcctgcgtactgattaccagtacgatcagtcatttaacaatggcaaaagccaggcgaacaacctggattttccgcgtatttatttgtttcgcccaatcccagcaattaatgcaaaactaactataggtcaatacgatactgaatcctctattttcgactctttccatttttctggcgtttcgttgaaaagcgatgagaatatgttgccgcctgatctacgtggttacgcaccgcaaatcacgggtgttgcacaaacgaatgcaaaggtcactgtctcacagaacaaccgtattatttatcaagaaaatgttcctcctggcccatttgctattactaatttattcaatacattacaggggcaactggacgtcaaggttgaagaagaggacgggccagtctatatatcaatgacactaaccattacatga

SEQ ID NO: 491329 - DNA, 267 bp, Shigella sonnei; identical to SEQ ID NO: 11114

SEQ ID NO: 491330 - DNA, 267 bp, Shigella sonnei; identical to SEQ ID NO: 11114

SEQ ID NO: 491331 - DNA, 267 bp, Shigella sonnei; identical to SEQ ID NO: 11114

SEQ ID NO: 491332 - DNA, 261 bp, Shigella sonnei
atgtctggaaatataggggcaaatccagttattgaatatcgtaaatcgctttatatctggctgaattcacaattgaccgctgaaccttatgcgtttggtgagcaactaacgctggtggactgttatctttgcactatgcgcacatgggggtctgggcatgaatggtttcaggataatgccacgaatatcagtgcgattgctgatgctgtatgtcagttaccgaaattacaagaagtattaaaaaggaatgaaattatttga

SEQ ID NO: 491333 - DNA, 246 bp, Shigella sonnei
gtggccagatgtacagtggcgcgcctcatggcggttatgggacttgtcggtgttctccggggtaaaaaggtccgcactaccgtcagccggaaaaccgttgccgcaggcgaccgcgtaaaccgtcagttcgtggcagaacgacctgaccagctgtgggtggctgattttacttacgtcagcacatggcagggcttcgtctatgtggcgttcatcattgatgtgtttgccggatacatcgtgtggtga

SEQ ID NO: 491334 - DNA, 150 bp, Shigella sonnei; identical to SEQ ID NO: 485699

SEQ ID NO: 491335 - DNA, 201 bp, Shigella sonnei; identical to SEQ ID NO: 491194

SEQ ID NO: 491336 - DNA, 267 bp, Shigella sonnei; identical to SEQ ID NO: 11114

SEQ ID NO: 491337 - DNA, 267 bp, Shigella sonnei; identical to SEQ ID NO: 11114

SEQ ID NO: 491338 - DNA, 267 bp, Shigella sonnei; identical to SEQ ID NO: 11114

SEQ ID NO: 491339 - DNA, 207 bp, Shigella sonnei; identical to SEQ ID NO: 402984

SEQ ID NO: 491340 - DNA, 534 bp, Shigella sonnei
gtggcgaccgtcatcacttccggtcagcacatcgtgcgttttccccttgttgtcagttacgcggagataatccccggagaaagtcgacacacggctgtaagccacacccgccatcgcatacgcgctgaaccattcattcacgcgcacagacggccccgccatcacgctgaaccagcggttacgcacggaatcttcatgccagcgggtatcgctgtagtgcgttttttgctcatcctcagcattggcataactgaaggacgtaatcagccccagcgcgtccgtaaactcataacggtatttcacgttaatcccgttcagattatcgctgccgggagcgttcgtacgggcatgaagataccctgcgctcagtgtggcctgctgctcagacgcccatgcaggcgcaccggatacggccagacagatggctgcggacaaaatggctgcacaaactttacgcataattacctctcgcttttctgcaataaaaaaggcgccatttctggcgcccgtatatgggttataaaattcagctga

SEQ ID NO: 491341 - DNA, 303 bp, Shigella sonnei; identical to SEQ ID NO: 21213

SEQ ID NO: 491342 - DNA, 489 bp, Shigella sonnei
atgacgaagcccttcagcacccacgctgaagtccacggtctgcgtttccagcagttccgttttaatcagccacagcccggcgcggtgcgcctgcccccggctggtacagccaaaggcatccatcttcgtgacgttacgaccgtaacggacaatggcctgcgtatcctccacaagctctgtcgccgtctcccagccgttgttcgggtcaatccagttcacctcaacggcattatggcggtctttcagggcgctgaaactgtagcggaacggcgcgccatcatccggcatcaccacattactgcggttataggcccacaccttatccgactgtcggtcctgcacgaacgtcagcgtctgcccgttccataccggcatacagcgcatcgccgagcaaaaatcactgagcacatcccacgctttacgctgtgtggtcaggtacgcattacaggtgatgcgcggctccgtgccaccaaagccgtccggcactga

SEQ ID NO: 491343 - DNA, 273 bp, Shigella sonnei
atgactagtctaaaaactagtattaagactatcacttatttaagtgatactggttgtctggagattcagggggccagtctagtggtacgccgtctgcgtttctccggccctaagacatcaatcatctgtactccaatgactagtctaaaaactagtattaagactatcacttatttaagtgatactggttgtctggagattcagggggccagtctaccccgtccaacacaggtagccattataaacagtaaaaaattgtattcgctgttatga

SEQ ID NO: 491344 - DNA, 465 bp, Shigella sonnei
gtggcactggctgaggcctgcccggcacttgttgacgcggcactggcagataatgcagccgctgtttttgagcctgccgcagctgaggcactctgttccgctgccgtctcagaagacttagcgttcgtctcggacgtttttgccgctttcgcggaattgcctgccgccgttgccgaggaagcggaactactggcgctcgaggctgcgctcgtttctgatgatttcgctgcctcttttgaggccgccgcatcccgggctgaggtggcagcttctgacgccttcgtggtcgcggcggatgcagaaatggctgcagatttttgtgacgctgccgcattcgtttctgacgttttcgcggcactggcactggtagctgccgcgctttttgaggactctgtagcagcagcacttttcgatgcttcactggcctttgttgatgccattcctgcgctggaagatgctgactga

SEQ ID NO: 491345 - DNA, 609 bp, Shigella sonnei
atggtggcgaaaattaatctcttatcacggcttacgccgcttttattcgtgttcgctccttttttggcacagtcaaatatgactgtttatcctatggctgtttccattaatagtcagggtgaaggcaacgttcgcgtaatatctaaaagtaatgaagttcagtacatcaaggcgacagtattccgtatcgataatccatcgacgcctcaggaaaatgaagttgagattaaatccggtgatgcaaatcatctggttgttatgccacctaaattcgctttaccagccggtagtagcaaaactgtgcgctttgttgcaatggaaccagagcaaaaagaaaaaaattatcgcgttaaatttgaagcggttcccagtattgatgacgttgccacagataaaaaagatctctctatgcagttaacagttaacttaatttgggggattgttgttagtgttccacctcagcaacctattgctaagttagaagtaaatgctgcccaaaaattagttaatgcagggaatcaacgcttaggtaatgactccaacttattgatagtgttttatgttcagataatgcccgatgactttgtcatgcagctccaccgattttga

SEQ ID NO: 491346 - DNA, 264 bp, Shigella sonnei; identical to SEQ ID NO: 490106

SEQ ID NO: 491347 - DNA, 369 bp, Shigella sonnei; identical to SEQ ID NO: 487152

SEQ ID NO: 491348 - DNA, 303 bp, Shigella sonnei; identical to SEQ ID NO: 487011

SEQ ID NO: 491349 - DNA, 642 bp, Shigella sonnei; identical to SEQ ID NO: 489892

SEQ ID NO: 491350 - DNA, 720 bp, Shigella sonnei
atggataagttgctgaacaaaaagataaaagttaagcagtctaacgagcttaccgaagctgcttactacctctcgctaaaagcaaagcgcgttatctggttatgtcttatgcagacgtatttcacagcttcagtaagcgaagatgatgatgagatggctgtactcggtgactctactttcaaagtaaaggtggctgactatgagcaaatttttcaggtaagccgtaaccaggctatcaaggatgttaaagaaggcgtgtttgagttaagccgttctgtggtaatcttttacccgaaagaagggagttttgactgcgtcgcgcgcccctggctaacagaggctggcagccgatcagctcgtggtatctgggaaatcgaatttaaccataaactcctgcggtacatttacggcctgacgaaccagttcaccacctactcgctccgcgattgtggcagtcttcgaaatccacggacgatccgcctttatgaaagtcttgctcaattcaaatcttcaggcttatgggttactactcatgcttggttaaatgaccgtttccttttgccggaatcccaacagaagaacttggcagagttgaaacgatctttccttgatcctgcactcaagcagataaatgagaaaacacctttacttgctaagtatagtattgatgattcaggaaaatttctgttctcaataattgataagcaaaatcccgtctga

SEQ ID NO: 491351 - DNA, 342 bp, Shigella sonnei; identical to SEQ ID NO: 16817

SEQ ID NO: 491352 - DNA, 792 bp, Shigella sonnei
gtgaatttgcctacacccgaaacttacgatgaacttcagagagcctacgattttttcaatgagaagctattcagcaacgagctgccgccatgcctgataacgttgcagcgtgagaagcgaacgtatggctattgttcctttaagcgtttcgtcggccgtgagagtgggtacacggtagacgagatcgctatgaatccggtgtatttctcgatcagaaccataaaggccacgctttcaacactggtgcatgagatggttcatcagtggcaattccattttggcgagcctggccgccgtggctatcacaacaaacagtgggcggcccggatggaacgggtaggactaatgccttctgataccggcgaaccgggaggcaggaaagtgggccagagcatgacccattatattattgccggtggccctttcgatatggcctgtgatgaactgctgacaggccatttccggctttcctggatggacaggtttccgccttaccagcctaagcctggcgctgtgctaagccctacaggaaaaggctatattgacgacgaggaagatgatagcgaacacgaacaggaggtggaggaagggcgcgacccggttgaactcgacgacgagatcatagaggccatgcgatttgtaaccccgccgcctgaagcgccggtgaacaaaacaaacagggaaaagtacagctgcccggtgtgtcatatcaatctctggggtaaaccggggatagtggtttactgtggtggcgagcactgtaataaagccgcgttagtagtcttaaaataa

SEQ ID NO: 491353 - DNA, 1266 bp, Shigella sonnei
atgtttgcgctgattgatgtcaatggcatgtacgccagctgtgagcaggcatttaggccagatctggcaaaccgagcagtggccgttttatccaacaatgacggcaacattgtggcccgtaattacctggcgaagaaagcgggcctgaaaatgggcgatccgtacttcaaagtcagacccataatcgagcgtcataacatcgctatttttagctctaattacactctctatgcctccatgtcggcccggttcgcggccgtagttgagtcccttgcaagccacgtcgaacagtattcaatcgacgagctttttgttgactgcaaagggataacgaccgccatgagccttgacgctttcgggcgccaactgcgcgaggaagtcaggcgacacacaacgctggtatgcggggtcggtattgcccgtactaagacgctggcgaagctgtgtaaccacgctgcaaaaacatggcccgctactggcggggtggttgctctggacgatggcgccagactgaagaaattaatgagcatcctgccggttgcggaagtctggggcgtcggccatcgtacagagaaagcactcgccacaatggggatcaaaacggtgctggatttagccagggcagatacgcgcctaatccgtaaaacattcggcgttgtgcttgaaagaacggtacgggagttgcgcggcgaggcttgcttcagcctggaagaaaaccctcctgcgaagcagcagattgttgtgtcgcgctcattcggccaacgcgtagaaaccctgacggacatgcagcaggctgtcaccggatttgcagcgcgcgcagctgaaaaactgcgtaatgagaggcaatactgccgcgtcataagcgtctttatccgtaccagtccttattcagtgcgtgatacacagtatgccaatcaggcaaccgaaaaactgacggtggcaacccaggacagccgcacgataattcaggcagcacaagccgcgctggcgcggatctggcgggaagatattgcgtatgcaaaagcaggggtcatgctggcagattttagcgggaaggaggcccagcttgatttattcgactctgctacgccttcagctggcagcgaggctttaatggctgttcttgatggtataaaccggcgtggaaagaaccagcttttttttgcaggccagggcatcgataactcctttgccatgcgtcgtcagatgttgtcacctgattacacgacagactggcgctcaataccaatagccaccatcaaataa

SEQ ID NO: 491354 - DNA, 441 bp, Shigella sonnei; identical to SEQ ID NO: 97223

SEQ ID NO: 491355 - DNA, 426 bp, Shigella sonnei; identical to SEQ ID NO: 16821

SEQ ID NO: 491356 - DNA, 405 bp, Shigella sonnei; identical to SEQ ID NO: 16822

SEQ ID NO: 491357 - DNA, 240 bp, Shigella sonnei; identical to SEQ ID NO: 16823

SEQ ID NO: 491358 - DNA, 546 bp, Shigella sonnei
atgtggtcgaaaatctttaaaagcgaacccccggacgtcacccctccggggccgttctgctgtgctgcgcatcgagccgctacgcgtctcgccccgctcacgcgggcagctgccactgacgcctccggcctgcggcctccgcgctccgcttggcaaccccttcccctgctgccgctcatttccccttcagcctcctatcatgattcgtctcctgcattatccgtggattgtgcagctcagtggggcgctggccgtgacggtgcggtgtcccccgtaaccggccgcgcggcggccgctaactcgcagtacggcgccgcgacccgcaggcgggccgccgtacccgcgcgcaggcgcgcggcgcccactgcgcacccccgtgggggacgtgcggcagctgcgtggcggcgggctgggttatggcttagcagggaggggggttggcctgttgctccggtcagtcccgcagtttccggcgatttgcggccggtgtccggtggagtccggcgcggtcgccttccatgccctgacgggtataaaaacaggtaa

SEQ ID NO: 491359 - DNA, 297 bp, Shigella sonnei; identical to SEQ ID NO: 97149

SEQ ID NO: 491360 - DNA, 285 bp, Shigella sonnei; identical to SEQ ID NO: 379487

SEQ ID NO: 491361 - DNA, 510 bp, Shigella sonnei; identical to SEQ ID NO: 97269

SEQ ID NO: 491362 - DNA, 180 bp, Shigella sonnei; identical to SEQ ID NO: 97153

SEQ ID NO: 491363 - DNA, 321 bp, Shigella sonnei
atgaccacacaaacccttgagcagactcttgaagattttcgtcgccagtgtgagagttttgcgcgcgaacaacagccccgctgcggcctgatttatgaactgtatcagcgccgcctgagcgcggatattgacggctatcttgctggcgttccggccgagtatcgggaagaactgatcgcggtagcgcggcgtgaatttgactatctgacccaagacgagatcgcggaagaaatccggcaggatcgggaaaacgattattgcagccacggtattgagcgtaattgttgcccgctgggctgcggagatctagacgattactga

SEQ ID NO: 491364 - DNA, 345 bp, Shigella sonnei
atgaatgaccgacagcgtgaacaagcccgtattcgccaggcccggcgccgcgcgcgactcaaagaggaaggcgctagcgtgacagtcacgctaacaaaacaggaagaagcaatgttacaggagctttgccgggttcgccgtccaggacgaacagcctattccacgaatgagtttttccaactgctgctgatccgaaactggcaacagtggcaggagcaaaaggcgcagctggggaaatgccaggcttgcggaaagctgaaagcggagggaggttgcggcggcgaacggcagagcgaaacctttaactgctggctagccgtcgaagcaaacgagcttaatgtgtag

SEQ ID NO: 491365 - DNA, 369 bp, Shigella sonnei; identical to SEQ ID NO: 97156

SEQ ID NO: 491366 - DNA, 717 bp, Shigella sonnei; identical to SEQ ID NO: 379481

SEQ ID NO: 491367 - DNA, 420 bp, Shigella sonnei; identical to SEQ ID NO: 379480

SEQ ID NO: 491368 - DNA, 417 bp, Shigella sonnei; identical to SEQ ID NO: 379479

SEQ ID NO: 491369 - DNA, 1530 bp, Shigella sonnei
atggacgatagagaaagaggcttagcatttttatttgcaattactttgcctccagtgatggtatggtttctagttgcaaaatttacctacggtattgatccatccacggctaaatacctgattccgtatctggttaagaatactttttcgctatggcctttatggtcagctttaattgctggctggtttattggtgttggcggtctgatcgcttttatcatttatgataaatcacgcgtgtttaaaggcgaaagattcaaaaagatttatcgtggtacagagcttgttcgcgccagaacactcgctgataaaacacgcgaaagaggtgtcaaccagttaaccgtggctaatatccccatacctacatacgctgagaacttgcatttttcgattgccggtacaaccggtactggtaaaaccacaattttcaatgaactgttatttaagagcatcattagaggcggcaaaaatattgctttagatccaaatggggggttcttaaagaatttctatcgtcccggcgatgttattttaaacgcctatgataaacgcactgaaggctgggtgtttttcaatgaaattcgccgttcatatgattacgagcgcttagtgaactctattgttcaggaaagccctgatatggctactgaagaatggttcggctatggccgtcttatttttagtgaagtttcgaaaaaacttcacagcctatacagcacagtaactatggaagaagttattcactgggcctgtaacgttgaccagaaaaaattaaaagaatttttaatggggacgcctgccgaagctattttttccgggtctgaaaaagcagttggaagcgcgcgatttgttctcagtaagaatcttgccccacatttgaaaatgccggaaggtaatttttccctgcgtgactggcttgatgatggaaagccgggaaccctgtttatcacctggcaggaagaaatgaaaaggtcacttaatccgctaatttcctgctggctggattcgattttttctatcgtgctgggtatgggtgaaaaagaaagccgcattaatgtatttattgacgagctggaatcactccagtttctgccaaacctcaacgatgcactgaccaaagggcgtaaaagcggtctgtgtgtttatgctggctatcaaacctattctcagctggttaaggtttatggtcgggatatggctcagacaattctggctaacatgcgttctaacatcgtgctgggcggcagccgtctcggtgatgaaacgttggatcaaatgtcgcgctcactcggtgagatagaaggcgaagttgagcgtaaagaatccgatcctcagaagccctggattgtccgtaaacgccgcgacgttaaagttgttcgtgccgtaacgcctaccgaaatatcaatgttgccaaacctcaccggctatctggcgttgcctggtgatatgcccgtcgctaagttcaaggctaaacacgttaaataccatcgcaaaaaccctgttcctggcattgaactgagggagatctga

SEQ ID NO: 491370 - DNA, 3231 bp, Shigella sonnei
atgcttgatataaccacgattacccgccagaacgtcactagcgttgtgggctactactctgatgcaaaggatgattactacagtaaggattcatcattcacgtcctggcagggaaccggagctgaagccctcggcttgtccggggacgttgaatcagcccggtttaaagagctgcttgtcggtgagatagataccttcacgcatatgcagcgacacgtgggtgatgccaaaaaagagcgtctgggctacgacctgacgttttcagcgcctaaaggggtatccatgcaggcgctgatacacggcgataaaaccattatcgaggctcatgaaaaagctgttgccgctgctgtgcgtgaagctgaaaaactcgcgcaggcccggacgactcgccaggggaaatcagtaacccagaataccaataaccttgtcgtcgctactttccgccacgaaacgtccagggcgctagatcctgatttgcacacacacgcttttgtcatgaacatgacccagcgcgaggacggccagtggcgcgcgctcaaaaatgatgagctgatgcgtaacaaaatgcacctgggcgatgtttacaaacaggagctggcgttggagttgaccaaagccggttatgagctgcgttacaacagcaaaaataacacgttcgatatggcccatttttcagatgaacagattcgcgctttttcccgccggtcggagcaaattgaaaagggactcgctgcaatgggtctgacgcgggaaaccgccgatgctcagacgaaaagccgcgtctcgatggctacgcgtgaaaagaaaacagagcattcccgtgaagaaattcaccaggaatgggccagccgcgccaaaacgctcggcattgattttgataaccgtgaatggcagggacacggtaaacctctggaggctgatatagcgcgcaacatggccccggattttaccagcccggaggttaaagctgaccgggctatccagtttgcagttaagtcgctgtcagagcgcgatgccagctttgaacgccagaagctgattcaaatcgctaataagcaggtgctgggccatgccacaatagccgatgttgaaaaagcgtacctgaaggcggtacagaagggcgccatcatcgagggcgaagcccggtatcaatcaactctgaaggtcggtgcttcagttatggccgaaactctgacgcgcaaagagtggatcgactcgctgacgaatagcgggatgcgtgcggataaagcccgttttgcggtagatgatggtattaaaaacggcaggcttaaaaagaccagccaccgcgtcactaccgtggagggtattcgccttgagcgttccattctgactatcgaatcacgcggccgggggcagatgccgcgacagctgaccgcagagattgcaggccagctgcttgccgggaaaaccctcaagaaggagcagatgcgcgcggttacagaaattgtgacgagcaaagatcggtttgtggccgcacatggttacgccggtaccggtaaaagctatatgacgatggccgctaaagagctgctggagtcacaagggctgaaggtcacggcgctggccccctatgggacacagaaaaaagcgcttgaagatgatggattaccggcccgcaccgttgccgctttcctcaaagcgaaggataaaaagctggatgaaaaatcagtcgtattcattgatgaagccggggttatacccgcccgacagatgaaacagctgatggaggtaatcgagaagcataacgctcgcgcggtattcctgggggatacgtcacagacgaaagcggtagaagccggtaagccttttgagcagctgattaaagcaggtatgcagaccagctacatgaaagacattcagcgacagaagaatgaagttttgcttgaggcggttaagtatgccgctgaaggtaatgccgcgcgcgccctgaaaaatatcaccggcgtgaacgaactgaaggaagaagcgccccgactcgctcaacttgccgatcgctacctgtctctgtcctcagaacaacaggatgccaccctgataatctctggtacgaacgcctcacgcaaaaccctcaatgactacatccggggcaatctggggcttgccggaaccggcgaaacgttcacgctacttgaccgcgtggattcgacacaggcggaacgccgcgacagccgttatttcagtaaagggcaaatcattatccccgaacaggattacaaaaatggtatgaagcggggcgagtcttaccaggttcttgataccgggccgggcaacaaattgacggttgaaagcatcagcggtgagcagatcgctttcagcccgcgtacacacaccaagctgtctgtataccaggcagtcagcgccgaactggcgccgggcgataaggttatggtaacgcgtaacgataaaacgctggacgttgccaacggcgaccgcttcacggtgaaaaccgtggagggtgaaaaactgacgcttgaggacaaaaaagggcgcacggttgagctggataaaaaacaggcttcttatctttcctatgcttatgcaaccaccgtccacaaatcccaggggcttacctgtgatcgcgtgttgttcaacatagataccaaatcgcttaccacttctaaggacgttttttatgttggtatttcgcgtgcgcgtcatgaggtggaaatttttaccgacgataaaaaatctttggcatcgagcgtgagccgcgacagcccgaaaaccacggccgcagaaattgaccgtttctttggacttgaggccaggtttaaggatattggccgcgataccagtttagaaacccgatcagctgaaaaaggtctgccagaagccacgggggaaagcatggcgtttaaccagaaacccgatgaacataacatgacaaccggcactgattatcagccggtgagcaacgcagaggacgcctttcatcttaagcagaaccctatggatgattccgttggcctgcggcgtcatgaagcacagcaaaatgatgcagagctggcccatgattatgctgctgccgacgatcagcagtggagcgcgcaggagtatgccgattacgagcattatgccgaagcatccgactacgactttgacagcagcatttacgacgattacgccatgccgcagacgtctcaggcggaacagagccataccggaaaagaacacacccatgagcatgaagaagggggccatgaaatctga

SEQ ID NO: 491371 - DNA, 627 bp, Shigella sonnei
atggagcagatcgacaagcgcaagcaggataaactgaagttcgaccgggtaattaatctggcgcacagactgccgcaaccggcgatccatgacttactacgcgcgctgatactgccaattcaggccgattacttgctggccgttggcacggagggccaggacgcgcgcccggacatgaacgagcgcgagttcttcttcacaaaaatcatctgggcgatggattacacgcacatgaaatcactcaggcttgcagctgaagattttcccctggcgcttgcgacggccaagatcctgccgtggccgtggggtgaatcaagctaccggagtgctttagccgatataggcagcgctaagggcaatccgtgggtacaggatattaaccaccgcgttactttgtggttgccctggcggataggctttgtacgaggagggaaccattctattgccagcggcgttctggccggtgagggtgaggtaatacccgatacggtttatgatatgcggtatttgctcgatattgtcagcactgacgggtattactggtacatgagcgggaagatctgcgagagagtcagtgactaccgtacagccgccttttttgaaataggccgcctgcttacactgtga

SEQ ID NO: 491372 - DNA, 1797 bp, Shigella sonnei; identical to SEQ ID NO: 120698

SEQ ID NO: 491373 - DNA, 534 bp, Shigella sonnei; identical to SEQ ID NO: 373449

SEQ ID NO: 491374 - DNA, 996 bp, Shigella sonnei; identical to SEQ ID NO: 480395

SEQ ID NO: 491375 - DNA, 1161 bp, Shigella sonnei; identical to SEQ ID NO: 480394

SEQ ID NO: 491376 - DNA, 885 bp, Shigella sonnei; identical to SEQ ID NO: 480393

SEQ ID NO: 491377 - DNA, 699 bp, Shigella sonnei
atgaaagctaataaaaaaacagggcttacacgtgaagccattaaagagttcaacgaaagccgtaaagggcttgaagttgatctgatggatgaagtgctgaagtcccggcgtaccgcctggatggttgccaccggttcagcggtggtaactgtttttgcactctctttagttggttacgtagtgcataagtacagccagccaatccccgcacatctgctaacgctcaacgaggccactcacgaagtacagcaggtcaagctgacccgcgaccagacctcttatggtgacgaaattgataagttctggctgacacaatatgtcattcaccgtgagagctatgacttctattcagttcaggtcgactatacggccgttggcttaatgtccacgccgaacgtggcagagtcttaccagagcaagttcaagggtcgcaatggtcttgataaggttctgggtgacagtgaaacgactcgcgtgaagattaactctgtgatcctcgataaaccgcacggcgtagcaacaatacgctttactacggttcgccgcgtgcgcagcaatcccgttgatgatcagccgcagcgctggattgccattatggggtatgaatataaatcgctggcgatgaatgctgagcagcgttatgtcaacccgctgggtttccgcgtgacgagttatcgcgtcaacccggaagttaactga

SEQ ID NO: 491378 - DNA, 147 bp, Shigella sonnei; identical to SEQ ID NO: 17405

SEQ ID NO: 491379 - DNA, 1041 bp, Shigella sonnei
atggcattcaccctggtacaagacattttcgcaaaagtagacggggcgattacgtcaatggtgagcgccaacgttgccaccattatctctgacgttacgcctctggtggcaacctgtctgaccataaagctgatgatgcagggcttgtactcgatgtttaatccgggggcaggcgacagcctaagctcgctgattaaagagtatctatctatagcccttatcctgagctttgcgacggcaggcggctggtttcagcaggatttggttaatgtggcgcttcacatgccagatgattttgctggcatcttatcttcccctgataaagtcgaagccagcggcgtaccggcgatcattgatagcggtattgaaaaaggcgtcaggattgtaaatacagcgtgggatgcggcagatgtattttcgtcaagcggtctggccgcatatgccattggcggaattatgttggttgctaccgttgtgctgggtggcctcggtgcgggctttgtgatcatggcgaaaatccttcttgccgttacgctttgtttcggcccgattgccattttctgcctgctgtgggggccaacaaaaaacatcttcgcgcgctggcttggatcggtaatcaactacgggctggtcgttgtcgtgctggctctcgtgtttggtttcatcatgcagatgttcgacaaccttctgtcctcgatgaactccgatgcggcctattcatctatcactggctctatggccgcgctgctgctgaccattatctctatctttgttctgtttcagatcccgcaggtcgcccagagctggggtagcggtatcagtgccggtgtcgcagatgctgcacgttctaccggttcttcaatgcaggcgcttggcaacatgggtagtcatggcatgtttggcggtaatgcgttccggggcggtaataccggcggcggccagcaatcggcaggtggaggaagtggcagcaacagcggaggaagcagtggttctaatttaagtggtaaggcaaggggcagtcgcgggaagaaggctgcataa

SEQ ID NO: 491380 - DNA, 228 bp, Shigella sonnei; identical to SEQ ID NO: 167500

SEQ ID NO: 491381 - DNA, 714 bp, Shigella sonnei; identical to SEQ ID NO: 379830

SEQ ID NO: 491382 - DNA, 2601 bp, Shigella sonnei
atgagagctgccaccgctacgaagccaaaaaaaattgatgcctaccgtaaggagccatcagtaaataaaaagtatttgccctattcttatcacctcaatgattacgtgatttcgatggaaaacggcgatctgatggcttttttcaagctggatggccgcacacatgactgcgcatcagatcgggaactggtcacctggcataaagaccttaatacgctggtcaagagcttcggaacagaccatgtagagctgtggacgcatgaatatcaccatgaggctaaagagtacccggatggtgagtatgaccattttttccctgcttatattgatcaatataaccgtaagttgcacggtgattccaagcagctgattaatgacctttatctgaccgttatttacaaacaggtaggggataaaacacagaagtttctggcgaaatttgaaaagccgactcgtgatgaaattcagcaaatgcagaatgaggcgcttgaaggtctggaagatatttctgaacaaatcctggaagcaatgaagccgtatggcattcagcagttgggtatctattatcgtgacaaacgcggtgttgaaattcctgcgcctgataaaaaagaacgtgaagaacttgctgaagtcgatgaatcagacatttttgacgaagccattgttatcgaacgcaacgagcctgaaccttcgcaggctcacgcttattcaaaagcgctggagttcctttatttcctcgcaaatatggaatgggccatcgtgcctgtttgccgtgatcgtatccgtgagtacatcatggacaaccgccctgttagctccctgtggggggatgttgtccagatcagaacggtagatcacaacttctataccaccggcattgaatttcgtgaatacgaagaagatacagagccaggccagcttaacatgcttaaagaagccgattttgaataccttctgacgcagagtttttcttgcctctctgaatcttcagctaaaacgtttctgacgcatcaggaaaaatctttgcaggaaacgcgcgaccgtgcgcaaagccagctggcacagcttggtaccgcgctcgatatgctgacgtccagagagttcgtgatgggctaccatcatggaaccgtgcatgtctgggataatgaccaaaacgcggtacagcgcaaagcgcgtcgtgtgaaggttatgctaaccggctgtggcgtggttggtgggactctcagcctggcctctgaggctgcatattatgcgagactgcctggcaaccagaaatgggcgccgcgcccggttccgataaactcatggaacttcctgcacttcagcccgttccacaattttatgcgtggcaagcctgacaataacccgtgggggccagcgctgaccatgttccgcacgatcagcggtacgccactctattttaatttccatgtgaccccgcttgaagaactttcctacggtaaacgcccactgggccatgcgttaataacgggtatgtcgggggaaggtaaaaccacgctgcttaacttcctgctggcgcagtcaatgaagtacaacccgcgactttttgtttatgaccgtgaccgcggtatggagccgttcattcgaagcgttggtggctactataaagttctgcaacagggtatgccgtccgggtttgccccgcttcagattgaaccgaccaaacgcaatattgccctcattaaaaacctgttccgcatttgtgtggaaaccaccaataacgggcctatcagcgcaacgatggctaccgaactggctgaaggcgttgatgcggttatgggggaaggctcacttattccacgcgaggcgcgcaccgttacgatcctggacgggtacgtgaatgaagttgtggaaaatggcgtatcactgaaagggctgctgcgcgaatggacgcgcgaaggccagtatggctggctgtttgacaatgataaagacagcctggatctcagcgcgaatgatatttttggcttcgatttatccgagtttatcgcagccaaagaggaagtatccagcccggcccgtactccgctcatgatgtaccttctgtaccgggtacgtgactccatcgacggcaaacgccgcgtcattcagtgctttgacgagttccacgcctaccttgacgatccggttatcgagcgtgaagttaagcgtggtatcaaaactgaccgtaagaaagacgctatctatgtgtttgccacgcaggagccgaacgatgcgctgtccagccgtattggccgcacgatcatgtcgcagaccgtcacaaaaatctgcctgcgcgatccggaagctatccgagaggattatgccttccttactgatgctgaatacgacgcgctgatgtcgattaccgaacactccagacagttcctggttaaacaagggcaacagtctgcgattgcttctttcaatctctaccctcgcaacagcgacgatattgatgcagatattaagacaatggacaacgtacttagcgtgttgtccggtgaaccacaaaacgccgaaattgcgcatgagctggttgaacggctcggtaatgaccctgaagtatggctcaaagaatactggcgcctgacggcttaa

SEQ ID NO: 491383 - DNA, 318 bp, Shigella sonnei; identical to SEQ ID NO: 16851

SEQ ID NO: 491384 - DNA, 294 bp, Shigella sonnei; identical to SEQ ID NO: 379833

SEQ ID NO: 491385 - DNA, 282 bp, Shigella sonnei; identical to SEQ ID NO: 379834

SEQ ID NO: 491386 - DNA, 735 bp, Shigella sonnei; identical to SEQ ID NO: 379835

SEQ ID NO: 491387 - DNA, 306 bp, Shigella sonnei; identical to SEQ ID NO: 97181

SEQ ID NO: 491388 - DNA, 378 bp, Shigella sonnei
atgggcgaacttattgattttgcggaaaggcaaaaaagcagaaggaagaaaaaagcatcttccattccgcccatttttagaaaatttcgtgtccatgcgttcaggttactcgccagcatcatcaaatccggctcttattcagttgcttatatcgttaaaaaaattacaggaaagttaatcaagttttacacaattttaacgattttcatttttgttgtcgaatatattgcaggcgatataggttacaaatccatttataacgcagcgttattattaatattacttacctttatcaacattctggcgagtgtatatctgaacaaactgttaaggacaaaaaatgaagaaactcttaatacctctgatagcagctggtag

SEQ ID NO: 491389 - DNA, 315 bp, Shigella sonnei
atgaagaaactcttaatacctctgatagcagctggtagtctgctttatattcctgccagccatgctgaagatccctgcaaagttattatgtgcatggcgggcaagctcaccggcgatagcggcggaagcgagtgtaacagtgctgaagctgctttcttcaatatcgttaaaaagaacaagcacggctttttacccaaccacacgaaggatgctaggaaggcttttcttaatgaatgcccggataatggcgaaggtggaagtaaccagtcgatgataagccagatcataagtaaatacgggaaagttcgcttatag

SEQ ID NO: 491390 - DNA, 312 bp, Shigella sonnei; identical to SEQ ID NO: 97178

SEQ ID NO: 491391 - DNA, 648 bp, Shigella sonnei
atgaccatgatccccttccccactacagaaaaccttattctatgggcttgcagcgccatcgtactgcttgccgttgtattcttccggcgttcagtacggcacaggcgacacaaaaggaagcagcaaagtgcgcggcgggtgctggagcgcataaagacgttgccgggcttcccacaaaaaattaactacctgagaaaaattgatccttttgtgtttgaagaactgttgctggaaggatttgaagcgcatggcttcagaaccatcagaaacaaacgctataccggcgatggaggcattgacggccaggtaataataggaaaatatcgctatcttattcaggctaaacgctatcgcggccatattgctttacagcacgtacaggagttcgagaagttgcttaaacgtcataactgtcgcggtctgttttgccataccgggaaaaccggcgcaggttcaaaatctgtcagtattgccagtgaacggatggagattatcagcggccagcgcctgatagatttgctcacgcccggtagctccttcactatcgcaaccgccccgcagacgatgatgaagcgtaccgcagcaacgctagaaacgagcaccattgttaaagatgccggtaaagaaaatcgataccatgagagttaa

SEQ ID NO: 491392 - DNA, 198 bp, Shigella sonnei
atgaagtcagtaactatagaagcaaaaacatttgctgaaatgttaggaataacagaaggtgagttaatctttgccattaagaaaactcgcacattcaaaaacaagacaatcccacaacctcatgagccacataaatcaaataatagatttttatattcagacgtaatgaggtttatagaatcactaaaagacaaatag

SEQ ID NO: 491393 - DNA, 1215 bp, Shigella sonnei; identical to SEQ ID NO: 373423

SEQ ID NO: 491394 - DNA, 597 bp, Shigella sonnei
atgataatcggctatgcgcgtaaatcgacacatcttcaggatgtaacgcatcaggttgatgaactgacaaaagcgggttgcgagcaaatctatcatgaacagatctcacgcggcggcactaaacgcgccaaaaatggtgccccggaactggagaactgtctgaaggcattgcgcgaaggtgataccctggttgtttgggcgcttgatcggctcggcggttcattgagccaggtgattacgttgcttgacgacctgaaaaagcgcggaatcacctttatagccatcaaagacagaatagatactagcgctcctgttatcggggaaatctatactcatctgatggctatattctctaactttgaacgcaaccgcaatattgaacgaacgagatctggactcgcagctgctcgcgcaaggggccgtgtagggggaagaaaaccgtcactttcggaagatgatattaagcaaatgaaaattctgcttgctgatcctgaattgacagtaggagctgttgcgaagcgcttcaatgtttctcgcatgactatttatcgctacacgacaaaaggcaaccattcagagaaaataaatgatgaataa

SEQ ID NO: 491395 - DNA, 243 bp, Shigella sonnei
gtgaaatacgtgccggtgaagccggtgccgatccccgctgaatggctggctgactgtctggtccctcctgtgccgcagccgttcacatttggcgcatcggtcacttacaacctgcaactgctggcggtgattaaaaactgcaacgtggacaaggccagcatccgccgtctggaggcacagcgacagcatgaatttactgatatggccggaacgactgctgttccggcaggaaagacgaagtaa

SEQ ID NO: 491396 - DNA, 906 bp, Shigella sonnei; identical to SEQ ID NO: 491312

SEQ ID NO: 491397 - DNA, 252 bp, Shigella sonnei
atggtttttacgtcaagttgctgcgataatttatcaatagatgagattatcgaacgtgctgaaaaaggcgattgcgaggctcaatatattgttgggttttattataatcgcgatagcgcaattgactctccggacgacgaaaaggccttttactggctgaagctggccgctgagcaaggtcattgtgaagcacagtattccttagggcaaaagtataccgaggataaaagccgtcataaagataatgggtga

SEQ ID NO: 491398 - DNA, 3858 bp, Shigella sonnei; identical to SEQ ID NO: 484798

SEQ ID NO: 491399 - DNA, 243 bp, Shigella sonnei
atgtatcactaccgtcgggcaaccattgtggcgaataacgacctgcgccggggagatttgctgtttttccatatccacagccgcgagattgccgaccatatgggggtgtatctgggcgacggtcagtttattgagtcaccgcgcaccggggaaaccattcgggtaagtcggttagctgaacctttctggcaggatcattttttgggcgcgcggcggatattgacggaagagacgattttgtag

SEQ ID NO: 491400 - DNA, 1095 bp, Shigella sonnei; identical to SEQ ID NO: 484487

SEQ ID NO: 491401 - DNA, 231 bp, Shigella sonnei; identical to SEQ ID NO: 27634

SEQ ID NO: 491402 - DNA, 1572 bp, Shigella sonnei; identical to SEQ ID NO: 485136

SEQ ID NO: 491403 - DNA, 345 bp, Shigella sonnei; identical to SEQ ID NO: 485793

SEQ ID NO: 491404 - DNA, 786 bp, Shigella sonnei
gtgcaggatcaagactctgtcatcacggtacgcagactctataatgggtatttcggtaatggcacagtcaatatttccaataatggtctgattaataacaaagaatattcattggtgggcgttcaggacggttcccacggtgtcgtcaacgtgaccgataaagggcattggagtttcctcggaacaggcgaagctttccgctatatctatatcggtgatgctggtgacggtgaacttaatgtctcgcgtgaaggtaaagtagattcgggaattatcactgcggggatgaaagaaacaggcacaggcaacattactgttaaggataagaactccgttatcactaatctcggaactaatcttggttatgacggccacggcgaaatgaatatcagtaatgaggggcttgttgtcagcaacggaggaagctcactcggttatggagaaaacggcgtcgggaatgtcagcatcaccacgggggggatgtgggaggtcaataagaatgtctataccaccattggtgttgcgggcgtcggaaacctcaatattagcgatggcggtaagtttgtatcgcaaaatattacttttttgggcgataaagcaagcggtatcggcacactgaacctgatggatgcgacatcatcgttcgatactgtgggtatcaatgtcggtaattttggtagcggtatcgtaaatgtcagtaatggtgccacccttaattcaacgggctatggatttatcggaggaaatgcctccggtaagggtaatgccagtcagttaagcaactga

SEQ ID NO: 491405 - DNA, 198 bp, Shigella sonnei; identical to SEQ ID NO: 489899

SEQ ID NO: 491406 - DNA, 744 bp, Shigella sonnei
atgggctggcaaaagtgtagcggtattaagcgcagctatttagcgattggtattaccgctgtatcttatctttccaccttcttcccagtattaaatgatcctgttccggcgggtatcgcctgtattgctatcgtctgggtatttacctttgtaaatatgctcggcggtacctgggtaagccgtttaaccactattggtctggtgctggttcttattcctgtggtgatgactgctattgttggctggcattggtttgatgcggcaacttatgcagctaactggaatactgcggataccactgatggtcatgcgatcattaaaagtattctgctctacctgtgggccttcgtgggtgttgagtccgcagcagtaagtactggtatggttaaaaacccgaaacgtaccgttccgctggcaaccatgctgggtactggtttagcaggtattgtttacatcgctgcgactcaggtgctttccggtatgtatccgtcttctgtaatggcggcttccggtgctccgtttgcaatcagtgcttcaactatcctcggtaactgggctgcgccgctggtttctgcattcaccgcctttgcgtgcctgacttctctgggctcctggatgatgttggtaggccaggcaggtgtacgtgccgctaacgacggtaacttcccgaaagtttatggtgaagtcgacagcaacggtattccgaaaaaaggtctgctgctggctgtaatgccagtcagttaa

SEQ ID NO: 491407 - DNA, 267 bp, Shigella sonnei; identical to SEQ ID NO: 11114

SEQ ID NO: 491408 - DNA, 303 bp, Shigella sonnei; identical to SEQ ID NO: 487011

SEQ ID NO: 491409 - DNA, 345 bp, Shigella sonnei
atggtagtgtccgctattgccagtacacctcaaaccaccttcaagacggccaataatcccgatgaagatatgcaaatagaacggcaatttatttacgacaatccgatctgttttggcgaagagtcgctattttcacgcgttgatgaaattcgagtcctggagaaaaccgccgattccgcccgcattcatgttcgttttacgctgaccaatggcaacaacgaagagcaagaactggttttacagcggcgcgaaggcaagtgggaaatcgctgattttatccgcccgaacagcggcagcctacttaagcagattgaggcaaaaaccgccgccagattaaagcaatga

SEQ ID NO: 491410 - DNA, 396 bp, Shigella sonnei
atgatgaaagaaaaaataaatgatacagaaccgggaatcaaacaaattgaaagggagattgaacgtggttgtgataatgcaaaaaaatacttctggctttttgtggttttctttgctgccggattgattgtaaggaacgttatgcatgattttttcagtgccggtattgattcgtggaaagctgacccggaattaaataattttcgttatatgtggaacatcctgatgtatgtcattccgattatgttatatgcgcttgcagctggttttcttgctgcggcttctctgtcgccgttgtgcgaaataatatttgggggtgtccggatattcctgctgaaacgccgtatgcgccgggagaacacattaagggagggcagcaataatgcttcgcattaa

SEQ ID NO: 491411 - DNA, 291 bp, Shigella sonnei
atgcttccccgttttgccgatatctttcagcagggaaaccactggcttaactggctggagaagcagccggaaagggcagtacgtccggtggtgattgagtcggtgaccaaaatcatggcgtgcgggaccacactgatggggtatacacagtggtgctgttcatcaccggactgttgccatacaaaaaaggtctgcttccggtgtaaaagccgctcctgcccgcactgcggggtgaaggctggcgcacagtggatacagtatctgctgagcctggtccccgactgcccgtga

SEQ ID NO: 491412 - DNA, 825 bp, Shigella sonnei
atgacagtagggactgttcgacagggtgcggaagagatttatcgtggcaccagcgaaatttcagctggcaatgcggacctgtcatctcgcaccgaagaacaagcggcggctatcgaacaaactgccgccagcatggagcaactcactgcgacggtgaaacagaatgcggataacgcgcatcatgccagcaaactggcgcaagaggcttctattaaagccagcgatggcgggcagacggtttccggtgtagtaaaaacgatgggcgctatctccacgagttcgaagaaaatttctgagatcaccgccgtcatcaacagtattgctttccagacgaatattctggcactgaatgctgccgttgaagccgcgcgagcgggtgagcaagggcgtggatttgccgttgtcgccagcgaagtacggacactcgcaagtcgcagcgctcaggcggcgaaagagattgaaggcttgatcagtgaatcagtcaggttaattgacctggggtcggatgaggtggcaacggccgggaaaaccatgagcactattgttgatgccgtcgcgagtgtcacacatatcatgcaggaaatcgccgccgcctcggatgaacaaagtagaggcataacgcaggttagccaggcgatttctgaaatggataaggtgacgcaacagaatgcttctctggtagaagaggcctcagcggcggcggtgtcccttgaagaacaggcggcacgattaactgaggcggtggatgtattccgtctgcacaaacattctgtgtcggcagaacctcgcggagcgggtgaaccagttagtttcgctacggtgtga

SEQ ID NO: 491413 - DNA, 384 bp, Shigella sonnei
atgattcaaacacgtaatcaatatctgcagtttatgctggttatgctggctgcatggggcattagttggggagccagatttgtcatggagcaggccgttctgctttatggatcaggaaaaaactatttgttcttcagtcatggtactgttctgatgtacctgctgtgtgttttcctggtataccgccgttggatagctccgctaccggtcgttggtcagctgcgcaacgttggcgtaccgtggctggtcggtgcgatggccgtggtgtatgtcggtgtatttctgctcggtaaggcgctggctctgcctgatcgccaccggcgcgagcccggccgtgccgccgattcccggcctgaaagacactccgtactggacttccactga

SEQ ID NO: 491414 - DNA, 258 bp, Shigella sonnei; identical to SEQ ID NO: 7766

SEQ ID NO: 491415 - DNA, 315 bp, Shigella sonnei; identical to SEQ ID NO: 37890

SEQ ID NO: 491416 - DNA, 780 bp, Shigella sonnei; identical to SEQ ID NO: 37891

SEQ ID NO: 491417 - DNA, 705 bp, Shigella sonnei; identical to SEQ ID NO: 8686

SEQ ID NO: 491418 - DNA, 819 bp, Shigella sonnei; identical to SEQ ID NO: 229465

SEQ ID NO: 491419 - DNA, 522 bp, Shigella sonnei; identical to SEQ ID NO: 229466

SEQ ID NO: 491420 - DNA, 792 bp, Shigella sonnei; identical to SEQ ID NO: 229467

SEQ ID NO: 491421 - DNA, 705 bp, Shigella sonnei; identical to SEQ ID NO: 8686

SEQ ID NO: 491422 - DNA, 267 bp, Shigella sonnei; identical to SEQ ID NO: 11114

SEQ ID NO: 491423 - DNA, 267 bp, Shigella sonnei; identical to SEQ ID NO: 487627

SEQ ID NO: 491424 - DNA, 267 bp, Shigella sonnei; identical to SEQ ID NO: 487831

SEQ ID NO: 491425 - DNA, 303 bp, Shigella sonnei; identical to SEQ ID NO: 458125

SEQ ID NO: 491426 - DNA, 222 bp, Shigella sonnei; identical to SEQ ID NO: 8358

SEQ ID NO: 491427 - DNA, 366 bp, Shigella sonnei
atgatcccgggcggcccattcacgtttccacaatgcctgctcagcggtctgaatcagggacgccagcagttcagcagggacggtcacctggcggttttcgctcacgttattgatgatctccatcaccgcagcggaagaaataccggactcaatccgctgttcttccgggatgtcctccaggcgtgccaggacggtcctgatttcatgaccggtcagagaaatttccataccgtcagccagtgcctgaatctcttccggggaccagacaaccagcatcagcggcgtgttctccgtatactgcgctgccagctcacggcagagcgtttcgcatgttccgtacattctcgtctccttctcaatctttga

SEQ ID NO: 491428 - DNA, 198 bp, Shigella sonnei
atgcgttccctgatcatcctcgataaagacattccggtactgtgcggcaacggcttccgcctgttcgcgggtaaaggagccgtccggcagtccctgaagtattctgaaatattcgctcatcctcatatctccggtgatgccccgcacagggcggggcggttgtcacagtcagcccgatcagaacgggatgtcgtctga

SEQ ID NO: 491429 - DNA, 363 bp, Shigella sonnei
gtgggctatcgccacgaatgcgcctacatcctggcaaaaggacgtccggcgctgcctcagaagccattgcccgacgtgctgggctggaaatattcaggcaatcgtcatcacccgactgaaaagcccgttaccagcctgcaaccgctcattgagagcttcacacatccgaacgcgattgtgctggacccgtttgcaggcagcggatcaacctgcgtggccgctcttcagtccggacgccggtatataggtatcgagctgcttgaacagtatcaccgtgccggacagcaacgactgaccgccgtgcaacgggccatgcagcagggggccgcgaatgataactggtttgaaccggaggctgcgtaa

SEQ ID NO: 491430 - DNA, 267 bp, Shigella sonnei; identical to SEQ ID NO: 11114

SEQ ID NO: 491431 - DNA, 222 bp, Shigella sonnei; identical to SEQ ID NO: 19617

SEQ ID NO: 491432 - DNA, 267 bp, Shigella sonnei; identical to SEQ ID NO: 487831

SEQ ID NO: 491433 - DNA, 447 bp, Shigella sonnei; identical to SEQ ID NO: 486126

SEQ ID NO: 491434 - DNA, 195 bp, Shigella sonnei; identical to SEQ ID NO: 489869

SEQ ID NO: 491435 - DNA, 570 bp, Shigella sonnei
atggattcttcaaaattcaatgagaagttagctcagttgaatacttcagtccgagaagcaattgctaaagccagaggtcatacatccaccagcattagtaatacaagcgacgcatttaataatcttgcaagcaatgcaattaagttatctggtgcattttactctgtgatgggtgctcttaacgcttacaaggccattatgaatgcaggtcttaaacgagattccgcacagagagccgctaagtttgtacttggtgataaagcatctgaagctgaaacatttatcaggggactggctgacaagacaggtcttaatatctctgaagggctatcaagctacgctaagtttgcagcaggtgctcagggttctatgtcacaggaacagacacaggagctatttggtaatgcaacggctatgagtcgcttaatggggcttagtaacgacgagctaaacggcattttgaaagcttttgagcagatggcttctaagggcaagattcaggctgaagaacttcgtggtcagctaggtgaccttttagcttgctcatattcgctgaagcattgggtatga

SEQ ID NO: 491436 - DNA, 288 bp, Shigella sonnei
atgagcagaaaaacccaacgttactctaaagagttcaaagccgaagctgtcagaacggttcttgaaaatcaactttcgatcagtgaaggcgcttcccgattatctcttcctgaaggcactttaggacaatgggttaccgccgccagaaaagggctcggtactcctggttcccgcacggtggctgaactggaatctgaaattctgcaactgcgtaaggcgttaaatgaagctcgccttgagcgagatatattaaaaaagcaacagcgtattttgcacaggagtcgctga

SEQ ID NO: 491437 - DNA, 513 bp, Shigella sonnei; identical to SEQ ID NO: 485852

SEQ ID NO: 491438 - DNA, 186 bp, Shigella sonnei; identical to SEQ ID NO: 404695

SEQ ID NO: 491439 - DNA, 453 bp, Shigella sonnei; identical to SEQ ID NO: 7641

SEQ ID NO: 491440 - DNA, 210 bp, Shigella sonnei; identical to SEQ ID NO: 7642

SEQ ID NO: 491441 - DNA, 855 bp, Shigella sonnei
atgatcaatattctgccgtttgagataatttccagaaatacaaagaccctgcttattacctacatttcttcagtagacattacacatgagggaatgaaaaaagtactcgaaagcctacgatccaaacagggtattatttctaaatacctccttgataaactactggacgaatcgcttattgataaagacaagggcaaagagtttcttattaccacaggcgtgataaataaaacgaaaacatcacctctctgggtaaactcagtcataataagcgatgttccacatcttttcagtaatgcccgggaacaatggaaatctgatggtgtttttgtttctcatatcattgatataaaagataataatattaatgtgagcgattcaacactaatctggttacatctcgaaaactatcattcagacattgtaaaaagaatctattcaaaatttgaaagtaaccctggtgttgccttcatccaaagctactacctaaaggagtcattcaggatagatggagtatattcacctgatcttggtactccctgccatttttgtcatatagagagatggctgagcagggaagaaaaaagcttcagacgtaacgaaatgtcctgggcaaacttacttcagttactgaaaaaataccaaatgacactaccagcattggctttaggcgaatcagaaagaggattcagctatcatttaataaaacggcgacttcaggagttgacaggtacttcactggttaaaagtcatgtcgataactttatgtcatctgttagcgctgatttaatcacctgtattttatgtaaagagccggtaattcactggcaggcttgcagctgtctggagagataa

SEQ ID NO: 491442 - DNA, 819 bp, Shigella sonnei; identical to SEQ ID NO: 7644

SEQ ID NO: 491443 - DNA, 1191 bp, Shigella sonnei
atgataaatgtctacagtaaccttatgtccgcatggccggccacaatggccatgagtccaaaactgaacagaaatatgccaacgttttctcagatatgggactatgagcgtattacaccagccagcgcggccggtgaaactctgaagtcaattcagggggcaataggtgaatattttgaacgccgtcatttttttaatgagatagtcaccggtggtcagaaaacattatatgagatgatgcctccatctgctgcaaaggcttttaccgaagcattttttcagatctcatcactgacccgcgatgaaatcataacccataaatttaaaacggtcagagcctttaatctgtttagccttgaacaacaagaaatacctgcagtcataattgcactcgacaatataaccgctgcagatgatctgaaattttatcctgacagagatacatgcggatgtagctttcatggtagtttgaacgatgccatagaaggttccttgtgtgaatttatggagagacagtccctccttctttactggttacagggaaaagccaatactgaaatatccagtgaaatagtaacaggcataaatcatatagatgagattttactggctctcaggtcagaaggagatatcaggattttcgatatcaccctgcccggagttcctggacacgcagtactaaccctgtatggcacaaaaaacaaaatcagtcgaataaaatacagtaccggattatcctatgctaatagtctgaaaaaagcactttgtaaatccgtagtggaattgtggcaatcgtatatatgcctgcacaactttcttattggcggttatactgatgatgacattattgatagttaccagcgtcactttatgtcatgcaacaagtacgagtcgtttacggatttgtgtgaaaatacggtactactgtctgatgatgtcaagttaacgcttgaggaaaatattacgtcagacacaaatttattaaactatcttcaacaaatttctgataatatttttgtttactatgccagggaaagagtaagtaacagccttgtctggtacacaaaaatagtaagccctgattttttccttcatatgaataactcaggtgcaataaacattaataataaaatttaccataccggggacggtattaaagtcagagaatcaaagatggtaccattcccataa

SEQ ID NO: 491444 - DNA, 726 bp, Shigella sonnei; identical to SEQ ID NO: 7646

SEQ ID NO: 491445 - DNA, 732 bp, Shigella sonnei; identical to SEQ ID NO: 7647

SEQ ID NO: 491446 - DNA, 564 bp, Shigella sonnei; identical to SEQ ID NO: 7648

SEQ ID NO: 491447 - DNA, 666 bp, Shigella sonnei; identical to SEQ ID NO: 7649

SEQ ID NO: 491448 - DNA, 1287 bp, Shigella sonnei; identical to SEQ ID NO: 486968

SEQ ID NO: 491449 - DNA, 501 bp, Shigella sonnei; identical to SEQ ID NO: 491177

SEQ ID NO: 491450 - DNA, 234 bp, Shigella sonnei
atgagcgaatatttcagaatacttcagggactgccggacggctcctttacccgcgaacaggcggaagccgttgccgcacagtaccggaacgtctttatcgaggatgaccacggggaacattttcgcctggttgtccgcaataacggtgccctggtctggcgtacctggaattttgaggacggtgccgggtactggatgaatcatgccatcagggatttcgggattcttaagtaa

SEQ ID NO: 491451 - DNA, 288 bp, Shigella sonnei
gtgaaggaaagcgatcacccctgctggctcgatgaagacgacgaaaacctgcccgtggtgctcgatgccatcctgaaccggggcgctcgtttttcgtcggtggaaatgtatctggtcagtgagtgtgtggagcatatcctgtccagtgggctggcctgcgatatgctgcgtataccggatgaaccgccccgccgctggtttgaccgtggtgttctgcgggaggtggtccgggaagcccggaacgaaatccgcagcatggcggattcactggcgaaaatccggaaatga

SEQ ID NO: 491452 - DNA, 336 bp, Shigella sonnei
atgctcgaaggagttcaagtgccatccatagcccaaacaccaaaaccgccgtattacgccgtgatttttacatcacaacgcaccgacggagataatggctatggggaaatggcgacaaaaatggtcgctctagcctcggaacagccgggcttccttggtattgaatccgcgcgggaggaagttggcatcacagtttcctactggtcggatcttgaatctatcaaagcctggaaagcgaatgctgagcaccaggaagcgcagagcaaaggccggaaagagtggtatacgaacttccgggtgagaataaccaaagtagagcgcgagtatggcatttaa

SEQ ID NO: 491453 - DNA, 678 bp, Shigella sonnei
atgattaatgataaatcatttaatatcgaaaacattatttctgatatttttaaagagaccagattaaaaataagtaaggacgatcctgttttaagcataatactaatgcatgaaaaaattctcgaacatgcactaacacaacttaaaaacagtaatcaaatagctactgaaagattatctcatgacatatcttcaataagagatgcaatcaacgcattacctgacgctattgatgaaaaaacgtcagaactacaacatgcagcagtagcacttcatgacgaatttcaggaaagcaaaggagaaattaaaggttctctggaagaagcccgaattaatgcaacagagaaactagcagaaagtgcaaaagagcttcaattaaacattacaaaagttgctgaaaaaacaacagaaacaatagagtcagcaaataaaataatatctgccatagatacaaacctggctgaaattaataaaaaagccttagctaattatgttaatgatatcagaagccttgaaaagaaaggtgaaagtatatctaagaatattgatacagcaattaataatgcttttaaatccagcgtgaaatcatttaaattttattgtggtgctgcattatttattagcactgtcttacaattcacaatgtggggattttttctctataaactcctgacttaa

SEQ ID NO: 491454 - DNA, 756 bp, Shigella sonnei; identical to SEQ ID NO: 33893

SEQ ID NO: 491455 - DNA, 402 bp, Shigella sonnei
atgaaaaagatcgatagtttattatctccaatatgcgaggcgataaaagaaacaaattcaaaatcaaaacaggctgtcttcaatatgtatttatcgaacatacttgaagcaaaaagctattatacatgggagcaaataacagattacataaataacaaaaccaagacagaactagcccaaaagacttatataaacatgaccgagagggccaaaaaaaggcaaaaatgcactgggcaaaaagacctaaaaaaaagcaccaatatgattgaaaaaaaaatagatgaagacaacaaacaaagagagggcataaaaggatttttttcaacaatcagcgagaacaaaaacgaaatagatcacgatccaagcgcaacaaatgaaaaatttataaacaaatatctttaa

SEQ ID NO: 491456 - DNA, 387 bp, Shigella sonnei; identical to SEQ ID NO: 36237

SEQ ID NO: 491457 - DNA, 3288 bp, Shigella sonnei
atgttagtcagaatcagcggtggcaataagggggtatgcgaataccttgaaaaaggtcataagcaaggaagggaatatacccgagatgaaattgaccatcgattagttctggatggcgatctggcattgactgaatcagttattgacgcgatacctgataatggtcaagagcgctatatgcatattacgttatccttttttgaagatgatgtttctgaatcaaagttgcatgatgtagtccaggaatacaagtctctcatgatgaacgcttatcatgaagatgaatataatttttatgcggaagcgcatcttccaaaaataaaacagatgcctgatcataaaacaggagaaatggttgagcgtaagcctcacattcacattgttatccctgaagttaatctggtgacaggaaataaactaaatcctgggggagttattaaccattatttgaaacatcttgatgccatacaggagcacattaataataaatacaatcttgtttctcctaaagatggtgtcagagtcagtgaccataaccacgctaatgtattatccagggctaaaggcgatttttaccgtgagcggcacagtgagtttaaaaccacggtttttgatgcgctggatacagagaatatccgaacagagaaacaattttctgattatctttcccgttttggtgaggtaaaggagtataataaggggaagtctgatcgctactttggtgtgaagctcgaaggagactctaaatttactcgactcaaaagccctttattttcacgtcagtatatctctgatcgaactataccacttttaaaacccacaaagacgcagattgagagtcatctgaaagagtggaagagttcgatcagtcatgagataaaacatattcatccggcagggcaaaaaattcgtaaagaatatgcagcacttgctggtgaagataagcaaatgtatctgaaaaaggtaattaatcgttatgacgaaaaacacaaccttcaaagacaggaccgacgacagaatagtgaccagtccggtattaaatacaataccggaaagtttgtatccggtaagacaatcggattgccacgtctgccagcacgcgaactggtttacggacttcacggaagatcaggtgggaaaagcattaataaatctcagttgttattgcagcaaaatgaatacggttatttatcaacggctggacgacaaaaagtcgatccagatcgatatgtgcgacggttgcaggatagagcaggaagaagagtagttcagtcagcgcttgaatcaaatattaaagcggcgattcagcgcagtgatgatttaccttttttgaaacaaattcgcacagaaattaatgctgaacgttatttgtccaatctgcaaacacgctttaacatagatccatcaaagcatactgtcacctatggacaggatggatctccgcgtttcagagttggcaatcgaaatatgaatgccagtgattttttaactaaacatctgaatcttgaatgggatgaggcaaaagaggtattacttgatatctggcaggatcagaaagataacaaaccttttgatgctgttattacccgtgtaaatcttacgcgtcaacaggcaaaagaaagatttatttgtttaaatgaacataaaggttgggtaaataatgagattaaatataagcataatgataatatagctaattacagggcagaactcagagggcttctggcgataagaaacaagcaggaacgggaggttgctagagggtacattatatttaaaaagctggaaagagagcgtgaaataaactcaattcgaaaggcatgttttcgcgaaataaactcatactatcaccgttggaatccagacaggagatatgatatggctttaggtgattctttaaaaaagataatccgtaatccggttgatggaaacagcatttcttccggtaatgaaaaggaagttttcagcgtagttaagcgagtacagcaatcccagcaagttcaggattatgtaaaacgtgaactaaccgatcttgttcctcataaggtcagcccaaaagaaacgcgttaccttgatccgaagacaacacagactgttttcactgataaaggaaatcatgttcgtgtaaatggtgaaattacccaggataaagctgaagcagcccttctttatgcaaaagagaaatttggtgggatgctgaaactcaatggctcggaagaatttaaggtagcctgtgcaatggcggcagccgagaaggggatgaatgttattctgcgacctgaaaaatatcatgaaatgatgcaggtccgcctccaggaactgaaagctgaacatggacatgaaaacagcgtcgaggcagagcgtcagcaacaagtcgccggacagaaaccagaacaggagcaggaaaagagagcagagcaggttaattcagtcgagaaagacacccaggctaaggaaagaacgccagaagtagcggaatctgtacgtaatgatgataaatcgcgtgatgcagtgccggaacagcctgttaagtcagaaactgtttctcaaaaatccacgtctgaaacatccgtggtacaggaagcggaaaaacaggagtctgtgcagcagaacgtttcggctcattctgaagaacgcgagcagcagccacaagaagcgcagcaacagaagccggtaacagagaaagacgtgactactggtcaggataaacagaccggagatgagcaaagcaaatccgcgttagccactgaaaatcctcatcagcaaaataacgcatcgctacagcagctacaggaagaggcaaaagttattgccagccagcaccaggaagcccagcgtttactgaatgaagctgtagaaaatggtgcgccgaaagaagaggttgatctgctttcgaaaggggttaacagtatttcggcccgtgctcagacgattaatgaacagattaaagcctttgaggaacaacaagggcagaaaaaagctaaatcagtcgaggaaaaaaacgagaatactacagaaaagaaaaagcggactgtcaatagtgaaaaagcgatggaaagagaaattgagcgaatttctaagcaactggcgaaggaaatgaatattgacaaacaaacagtcaaagatacgctcaaattcatacgttttgaggatgtaaacgatctcaaggcagcaatgaaaaaccctgaaacggtagaggccgtgaagcgtgaaatagtgagttatgacaacgctttgaaaaatgagcgtgaacgggaaagaaacagggataacacgcggtcccgttaa

SEQ ID NO: 491458 - DNA, 321 bp, Shigella sonnei; identical to SEQ ID NO: 292722

SEQ ID NO: 491459 - DNA, 270 bp, Shigella sonnei; identical to SEQ ID NO: 33897

SEQ ID NO: 491460 - DNA, 339 bp, Shigella sonnei; identical to SEQ ID NO: 33898

SEQ ID NO: 491461 - DNA, 330 bp, Shigella sonnei; identical to SEQ ID NO: 33899

SEQ ID NO: 491462 - DNA, 2034 bp, Shigella sonnei
atgaagaagaagaaacttattctgcctgtacttatagtctggctgatggccctgacagcctccggctggctggggagttttatactggtgaaaattgcctcgctgccaactgacaatctgcaatggagtacctacctctccacgcttgcctattacggctggcaaccttccctcaaaaaatatctgcttgccggacttgcggggactctgcttccgttcctgattgcactcatcctgacaatcgttatgtttgtcgtcgttcgggagaaaaaaacggtgcacggtaacgccaggctggccaacgatcgggacctggcagacagcggtttttttcccgacgaaaaggaactgaaaaatcagaaatacccgtcactgctcataggaaaaatgcctgaacacaaaggacgttttaaatcacgctatctgcaatacagcggtcagcagtttctgatgctgtacgccccgacacgaagcggtaaaggtgtatcgatcgttatccctaacggcatctggtataccgaatcgatggtattcctggatatcaaacttgaaaactttcttgagacggcgggataccggaaaaatgtgttaaatcaggaagtctatatcttcagtcctgacggctatgcacgagaaatcggcggtgaaacagtgctgacaactcaccgctacaaccccctttactatattcgccgtgatccggtatatcgctttggcgacctggaaaaaatcgcggtgatcctgtttccgatgaccggaggtgaaaacgacacctgggtggaatccagtaaaaacgtttttatcagtctggttctgtggttactcgatactgaacttgagggcaaatttaaagttaatatgaactcggtgatgaaactgagtattccggctgatggctcaagcctggcaaaatggatgctgaacgagatcagaagtcggggtaatgaagttctcactgaacgctggaaagcgtaccatgctttaccggaagaggagaaacagggcaaaacgccctccacctatccgttaagcgatgacaccatccgcctgttccgccagttcgcagccaaagaacccgagcaacaggaaagcatcatgctcgactttaaccgcaccatgtcaatgttcgccaaccctgtcgttgctgcggctacggaagataacgattttgatatgcgtgatgtgcgccgtaaaaaaatgacaatttactacggcatttctcctggtgcattaaagcaatatcagcgtctgactaacctgtttttttcacaactgcttaatgagaacgtgcgtactctgccagagcatgacgcaacactgaaatatcagtgcacactcatgctggacgagtttacgtcaatgggccgcctcgacgtggttcaggtgtccctggcattcactgcgggctataacctgcgttttgtgtttattctgcaaaacagggagcagttatttgatgaaaaacatggttacgggaaaatgggtggaaacactattcttaaaaactgtgcggttgaaattttctatccacctaaaaaagtggatgaaagtgtaaaagatgtatcagaaacaatcgggtattatgattttgtccgcactcaaataagccgtacaactggtaaaaatcccagtacaacccgcaataaaattattgaaaaacgggctgttatgctaccacaagaaattactgatttacgggaccagaaattttcagttaaaggaaagaaaacaagtttttccttaccacaaatcgtaattagtgagttttgccgcccgtttattgcacataaaattgtcagttttgatcaaaacaaggagtctttttttgttaacgcaagaaaatattcccgaaaaaatatcatagacacacctgtacttgatattccacagaatgaagtggttcgtcagttaatgctccagcgggaaagggaggaagcatggaaagcgacgcaacctgcttttgataaagatgattttgatgatgataaggaatattttcctggtgatgatgatggtggtggcggtggtgattaa

SEQ ID NO: 491463 - DNA, 1014 bp, Shigella sonnei; identical to SEQ ID NO: 480538

SEQ ID NO: 491464 - DNA, 1224 bp, Shigella sonnei; identical to SEQ ID NO: 480537

SEQ ID NO: 491465 - DNA, 798 bp, Shigella sonnei; identical to SEQ ID NO: 480536

SEQ ID NO: 491466 - DNA, 747 bp, Shigella sonnei; identical to SEQ ID NO: 480535

SEQ ID NO: 491467 - DNA, 144 bp, Shigella sonnei; identical to SEQ ID NO: 480534

SEQ ID NO: 491468 - DNA, 1047 bp, Shigella sonnei; identical to SEQ ID NO: 480533

SEQ ID NO: 491469 - DNA, 345 bp, Shigella sonnei; identical to SEQ ID NO: 480532

SEQ ID NO: 491470 - DNA, 669 bp, Shigella sonnei; identical to SEQ ID NO: 480531

SEQ ID NO: 491471 - DNA, 2430 bp, Shigella sonnei; identical to SEQ ID NO: 480530

SEQ ID NO: 491472 - DNA, 324 bp, Shigella sonnei; identical to SEQ ID NO: 33910

SEQ ID NO: 491473 - DNA, 306 bp, Shigella sonnei; identical to SEQ ID NO: 480528

SEQ ID NO: 491474 - DNA, 582 bp, Shigella sonnei
atgacactgatcagtcagtgcgcacctggtgtttctcctgaaaccatgcgtgccattattatgactgaatccggtgggaatccctacgctatagcaaatgtcaccgacggtggcagtaaatattttaccactgaagaggaggctgttaatcacgcaaaaaaactgactacagataaaaaaaatttcagtgctggcctggggcagataaacagccgtaacttccagaatttaaatttaactaatgaatccgttttttctccctgtgcgaatattcgtgctgctgcggcagtgctgaaaacgtgctgggataaatacgaaacaaaagggggggaccaacaaaagatactacgtgacgccatgagttgttattactccggtaataacaaacggggttatgtgaaggaaagcaatggcaaaagttatatcgatatagttgaggaaaaagccggaatacatactcattatgatattccggcaataaagtcatattcagaaacatccagccatttaatggtatccagtgataaccatgataaatgggatgtttttggtgatttcggaatacaggattttaaggagtaa

SEQ ID NO: 491475 - DNA, 492 bp, Shigella sonnei
atgaagcataaaaattttattccgaaatggtatgattcaactcttgagtcaattccccatcaagatgttaacacgattcacagtatcattgatgaacaccacaaattatggaatatccagagattaatacgtcttgtgattctattaatcattacagcattcggtttatttagcgctttccttaatagagaaaatatcttttatatattcacagtcggtttttctttgggtttaattctctatataatcgctgctattgattctatctgtcattttctccccaatcctttaagtgatcacgtaataatagaccgcgaaacaatacaatttctgattgttcttaccagccattatccagatgtgcaacaggaactatttaacagactgttatccggtaaaaaactgacgattcatgatgagcgagaaataattgatatctgctcacgaaggagcgcaacatatcatttaaccagaagtaatatccctaagtaa

SEQ ID NO: 491476 - DNA, 285 bp, Shigella sonnei; identical to SEQ ID NO: 33914

SEQ ID NO: 491477 - DNA, 387 bp, Shigella sonnei
atgaaattcgttagttcacaggaagtgattgagtttcatgaccgcttgatttctcgtgatggtggcgtagcgggtatgccagaacccggtcgcgctgacgcgatcattcatcgtgttttgaacatgtatcattatgaaggtgtgacagatattatggatctggctgccgtgtatttagttgctattgctcgtggtcacattttcaacgatgcaaataagcgaacagccttgtttgtggcacaggtttttttaaaacggaatggtgtacatattattagttcacgtatttcgtttgatgaaatgcaaattatcgctttgaatgctgcaacaggagaatataactggaagatggtttctgaccatcttaaagccattattctaaattag

SEQ ID NO: 491478 - DNA, 225 bp, Shigella sonnei; identical to SEQ ID NO: 232735

SEQ ID NO: 491479 - DNA, 282 bp, Shigella sonnei; identical to SEQ ID NO: 12403

SEQ ID NO: 491480 - DNA, 285 bp, Shigella sonnei; identical to SEQ ID NO: 232733

SEQ ID NO: 491481 - DNA, 153 bp, Shigella sonnei; identical to SEQ ID NO: 36877

SEQ ID NO: 491482 - DNA, 414 bp, Shigella sonnei; identical to SEQ ID NO: 461228

SEQ ID NO: 491483 - DNA, 126 bp, Shigella sonnei; identical to SEQ ID NO: 487739

SEQ ID NO: 491484 - DNA, 1497 bp, Shigella sonnei
atgtgtaacgctgacgtaaaattgggcgatctgcttattcatgaaggatcggcgaaggatgcgcagaaattcgcagccaaagtctttcatgccgataaaacctattttgtgctgaacggcacatcggcagcgaataaagtggtgacgaatgcgctgttaacgcgtggcgatctggtgctcttcgaccgtaacaaccataagtcgaatcatcacggcgcgctgattcaggcgggggcgacgtcggtctatctggaagcttcacgcaacccgtttggtttcattggcggtattgatgcgcactgttttaatgaagagtatctgcgccagcaaattcgcgacgttgcgccagaaaaagccgagctgccgcgcccgtttcgcctggcgattattcagctgggaacctatgacggaactgtctataacgcccgtcaggtgatcgataccgttgggcatctgtgtgattacattctgtttgattccgcgtgggtcggttacgaacagtttatcccgatgatggcggatagctcgccgctgctattagaacttaacgaaaacgatccggggatctttgtgactcagtcggtgcacaaacagcaggcgggattctcacagacgtcgcagatccataaaaaagataaccatatccgcggacaggcgcgtttttgcccgcataagcggttgaataacgcctttatgctccatgcttctaccagccctttctatccgctgtttgctgcactggatgttaacgccaaaattcatgaaggggagagtgggcgtcggctgtgggctgagtgcgttgagttgggtattgagtcgcgcaaggctattcttgcgcgctgtaagctgttccgcccgtttatcccgcccgttgttgatggcaaattgtggcaggattatccgacatctgtgttagccagcgaccgccgttttttcagttttgagccgggggcgaagtggcacggctttgaaggatatgccgcggatcagtattttgttgatccgtgcaagctgttactcactacaccaggtatcaatgccgaaaccggcgaatatagcgactttggcgttccggcgacgattctggcgcactatctgcgtgagaacggcattgtgccggagaagtgcgatctcaactccattctgttcttattaactccggcggaaagccacgagaagctggcacaactggtggcgatgctggcgcaatttgaacagcatattgaggatgactcgccgctggctgaggtgttgccgagcgtttataacaaatatccggtgcgctatcgcgactacaccctgcgccagttgtgtcaggagatgcacgatctgtatgtcagtttcgacgtcaaagacctacaaaaagcgatgttccgccagcagagtttcccgtcagtggtgatgaacccccaggatgcgcatagcgctgatatgactttccgtgtcaaaccggaatctctaattttgacgattttctttttaggtttaattccctga

SEQ ID NO: 491485 - DNA, 777 bp, Shigella sonnei
gtgataaatggggccgttaatgccgtaaaaagtaagggatttggctctgtaccgcggttctgttgtctcagggcgtgcatcagtccaccggatgctgagcaccccttcaaaccgtgtgtcgggtatgatgatgtcgtaggggccagcaacggaatattcacctggcagcgcattccttacccaggccaggaaatcactcttagtgtcaaaacggataacatcttcagacagaaaagcacgcccaaagccgaatgcgccgggtatcgccagacggccttttgtccggtcgtaaatgtcgctctgtgcttccatcgtggctgcacttttcagccccagactatcccgggacttctgttgtgccttttcgcctgctgctgcgatttcagacagatggttagccattttcagagtgccggtcagcgcagcatcaatgtcatttttggcctgttctgctgcgcgggcataacctgcggcatcctgtgcgctctgtccggctgcggctgcatttgctcctgtgcttgtcacatcttccgcagtggcctttctgtcctcagctgtgacggttgcatcctgtcgggctttctccgcaaaacgttgtgcatcatcacgggccgttgcggctgccgtcacatcctgcgccgtctgccgtgcgtttccggctgcggccccggcactctgctgcgcctgttgcgccagctcttcgaatttcttcagggattccggacgcaggtcaatatcagttgcgtccagaaaatcattcagcgaaccgtccgttga

SEQ ID NO: 491486 - DNA, 189 bp, Shigella sonnei; identical to SEQ ID NO: 463227

SEQ ID NO: 491487 - DNA, 183 bp, Shigella sonnei
atgtgtatgagcggcgtgatagcgttggtcatggcgttcgtcgaaagctggcgcgttatggtctgcctggtcgttctgttgttgcgcgtgacggtgagggccggaatggtgcaattgacggcgaatgtatacgcatcaatgctacagatgtggtgctggtggacgggcaataaaaaaccctga

SEQ ID NO: 491488 - DNA, 162 bp, Shigella sonnei
atgtgttatataatatctatgcacgccgaatccccgcttttacccatcgctaaattaatgttttataaagagtttttctcaccaatccttttagggggcaaatttcaggggcaaaaattagattttcaggggcaattattggcatttcaggggcaaaaataa

SEQ ID NO: 491489 - DNA, 468 bp, Shigella sonnei
atgaaccacaaaatgactaccactactccttttatccttctgggtctggatgcagatagctttcacaatgacaagttaatgaagatgttccgtgaacgtggttataacatcctttacaataccgatgaatcccatttctctagtgcatggtatgttttcggaagaaataaacgtcctaccatcgttgttaactgcttcaccgatgaagatcgcctgaaataccagaatctaccagcaattattgttcgtgatgatctgcctttcgaagtccggtcaggtgacattgatttaggtagcttcgttactgtctatgaactggatgaagcaatgtttaactacggcaaagaaaccgctcaggaagccccagaacaagatgaagaagacgaggaagacgaagactacgcaccaatctgtttttcttctcacaatagcttctacggctacgatgaaggcttagatatgctgtaa

SEQ ID NO: 491490 - DNA, 333 bp, Shigella sonnei
atgaaagaatttaccatcactaaatccttgtatgactggactgtagaaatcattggtaaaaccgtttctgtaagccctagccatgtagaaaatgattggggcgtttcccgtgaacctatctcacgtagtatgcatatcccgtttgaccttatgtctttaactggtattcatgcaatgctggaagttcgcgagcaattcgaagctggtaatcataatgcgactccagttagcaatcaccttcttaccaatgaagaacgtgaaatcatcgaaaactggcgttatgagtatgcgattccttactacgaagaagatcaggtagaaatcgattggtaa

SEQ ID NO: 491491 - DNA, 834 bp, Shigella sonnei
atgaatactgttactgctatgaatactgctgttaaaactgcttccgtgtctttggttgttgataacgaagttgcaaaaatgactcttcgtgaaattgccgaccttattggagttcgtttttcaaaccttgaaacttctatgaaccgactggttgaacgccaagttatccgaaaacctgcaacgcagaatttcgagaaaatcaataacttagggtttgctgttactgttaaagattatgtgtttgagggtgagcaaggtcgcttagattcgattgtcttgattgctcaaaacgtaccggaatttactcgccaactggttgaccgttggaattatctggaagagaaactgaaaaccgccaataatactcctgttaacccgtatgcggactttgaagaaaccgactggatcgaactggcgttagatgaaaaacgcaaaaataaaaaactgattgagctacacattcgtaagtctgtagacagccattctatgacgcgtctgttaggcgctaaaaagggcgctacgaaggttaaagaagcactgacggccttacgtactgctggctacattgagcgcgtctatgatgaaaataacaagccgtgtgggtatgttgctaatgactcttctctgtctttctgccgcatgaatgctcactaccaacttgagtttactgttgatgttcttccggtgctggttgaattgggcgttttggaagaagaacagaaagcaactcttaaactaccgcagccaaataacactattctgattcaaaacaaagctgctaaacagattcgtgaatcaggtaacgtaatttcccttgttgattttgggatctga

SEQ ID NO: 491492 - DNA, 225 bp, Shigella sonnei
atgactactaaagctactcgcggtcgtccttgccgttttgatcgtgaacaactggcagcgattgtaaaagcgtactatcaagcgccgaaaggtaaagccgaaaaagaacaagtattgagtgaacacggtatttcaatcgctcaattctacaaatcactccataaagttgatttgaaattctttgttcaggttgacggtgaaatggtagaagcaacaggaatttga

SEQ ID NO: 491493 - DNA, 603 bp, Shigella sonnei
atgctaattaatcagcaagaaagagatgaattagatttagccttgtcttgtaccgatcatgaatatcgtttgccagttaagcaccatcacaagaagactgattacactacatccggctttagtcgtgaggaagctaaacagattttaatcgagttgtatcgcgatcatgggtatacagatattcataacttctttaggaagcaccgcacatcacagacagagttccagagagtccgcgaatggtttgattttgacattaaacgattctatcgagtggatgacggaccaatctatcggttgcagtggacaccgatcagggaagtgatgaaacataaacgggatagtatggctatcacaatgccccgtaatatcgctttcaagaaaggctatggtgatacccgtgagttgttcgttgaactcgctaacgtgaaatatagccactattacagcgatcctaaagggttctttgaagtgctgcgcaaggttgatattagtcggggtacatactattcacggttgaggaagtacgggattaaggtagagttctttatgagcattgacgatgaagaactttttcctataaaatgtaagtcctctaaataa

SEQ ID NO: 491494 - DNA, 1905 bp, Shigella sonnei
atgaaactaatttcgaacaaaacaaaattaaaaaagattctcagaaatatctctgttgcaattcgaccgcctaaagccatgaagcctagcgaatgggtagaggctaacgtagtggctaccgatggcgttaaagccggatcactaattaaattgcatcctttccaacgtgggatgatggacgcgatcaccgaagaccgtagaaaaattgtgtttaaatgttcggcgcagttgggtaagactatgattcttaacggaattatcttccacagaatcgccagtaaccctacgaatattggggtgttgcaatcaaacgttcgagaattgaactcatggatcgcgggtaaggtgaagccagtattagaggcaacgccagaattaaaggcgatgatcaccgacaaatcagaccgtaatgccgttaacaactcatcgattattcagcttcgtaacggatcattcatgtatttcatgtcgctgaacagtccatcacacttgcgcggtaagacactgcctttgattattcttgatgaagttgatgcggctgatgaatcagacgaagggaacccgatccagctagcggaacaacgcgcaaccactttcggggaagatgcaaggatcgtaattgcttctactccaaccgctcgtgatggggcgatcaaccaacaatacgagctatcagataaacgaaaatactatgttccttgccagcattgcggacacagacacgtaatggaatggagtaacgtccattttgattggcatcaagttaatggtaaatcactgccttcgcccgacacagccgtttatcgttgccctgaatgtgaaaccgactggaccgaaggggatcgcctacgtgctgttgctaagggagaatggatcgccaccgaacctaatgcggaagtaatcggttttcatgctaaccgccttatgtctccgtttagttctatccgtgcgtgtgtggtggattttgctgatagctacgcgaatatgtcactggcaacgttctataacactgtcttaggtgaaaccttcgatgatcttaacgaagaccgcacagccgacgaactggaaacgctgaaaactgacattagcttagataatattcctgatgatgttctggctctggtaggtggagttgaccagcaaaaagaccgtctggaatctaccttgctgggtatctctcgtaaagggatatgcgtagttgatcaccgatcattctatgatgtgaactgcgaacgccacgaatcgccagcatatgaccagctttacaacttcctgaaagctaaattctatacccgatccggtcaacgaatcccgatgctatccgctttcgtggactcatcaaacggacgtgctacgcaagtgatctaccgcttttgtagtcggtggcaaaacctatcagccattaagggcgcaagcaatgttgatgctccaatccttccggtaaaagacacaagaacaggtggttttacccttaaaattctgggcgtaaacaaccttaagacgatgatccgcgaaatgattaaccggaacttgagagatggagatcctcacactgtcttccagattggtgacgttcctgatgactactgcgagcaattgctatctgaacagttgaaacggcagggtaataccacacgttgggtaaaagttggtcagcaacgaaacgaggctctcgactgcctggcttattcctatgctgcttctcgtcatgtactcaataaaatgtcatgggaaaaactcgaagccatcaaagatagtttgaaccgtgaaccagaagaatccgtagaagctcctgaatcgcaatctaacgagcaaatagaagaaactaagccaatcacacgaccacaacgtcaaaacatcgccagacgtccaaatagaggccgtagctgggtaacatcgttctaa

SEQ ID NO: 491495 - DNA, 495 bp, Shigella sonnei
atgagtttagaactaattcccttagtaattcgtaaaggcgaaaaaatcacgctggcgaatgaagagggtgtaacaattcaggtaggaaatagtaaaggtatcatttatcaggttgatgatactccggctaatcacgagattaaaaccttagattttgccgaaggtaaatataccatcgtaacaactttggaagaagaactggtatcaatgcaggaattaactgtattgccagtattcgccaaacaatccaaaaaagaatatctgcgcgaaacgatttctgtaatcgagcaagttattttcgccaggctatcgggggacgaagccgcattatctcaaatgaccgtgaaagggaatactttcgcctatgagtcattaggtgttctccagcaattaaagactgattatgaacgtcagttatctaaattaattcaagccgaacgacgtaaacagggaattagcccgattaaaaatatcaaattacgtcttacgcgataa

SEQ ID NO: 491496 - DNA, 1512 bp, Shigella sonnei
atgtttaatctttttcgacgcaataaggcggtagaaactccagttaaaactaatcaccgccagcaacaacaaaaaatctttatcgacaaacaagtagaaaaattccagaaagatttgtctaagcgttctttgggcttggtcggtgatcgcattgatggacagcttcaacaagataccattacaggaaccttcaataaggctctcaaatcgaacggtaagcgcctttatgatcagggtcgtactctggccttaaacacttccgtaggcagtcgctacacgcaatacataaccgatatggtggtaggtactggcctagatccgaagccgtcagttgttaaatcaaacggcaaacttgatagcgcactgaataagcagatcgagaatgctttctggaagtgggcgcagaatgctaaacgcttctctcgtaacggtcgctttaacttccgtgaactgctggtaatggctgaacgtgagcgcgtaatgggcggtgagtgcttcattgttttaaccaaagaaaacaatgagttaaatgtttctatcctgtctgctgataagtgcgactggacgctcaaccgtgaagtaagcaaagaacgtgctatctatcagggtattgagtatgacgtagaaacaatgcgccctgttgcattttggtttcgtaaaatcaacctactgactcagacttacacaggtgataactatcgcgtagatgcttcgcaagtatgccattattatcaaccacttgcggctgaatctctgcgtggcgtgactgacttcctgccagtgattaaggatatcgcacatcaagacgcattccgcgaagctgtactggttcagaaacgaatttcagctagtagcatggcgttcatcgagcgtccgaaagattctggtgacgattttgatactggtgaagatgatgaacaatatcaagcgccggaagttattcacgatttcgcgccgggtactattcaggaattgccggaaggggcaacgatcaagagtattcaatccacgcaaagcggcgatgatttcaattcatttaacgctggtatgttcactagcatagcaatgggtcttggcgtgttcaatcagggcttaactggcgatactagccaaataaattacagcgctgcacgctacggcgaattacttcaaagaacgcgcgttaaagcactgcaaaacaaattaattgatacagtggtattgccaattttcgaagcgtatctacgccattattccgcgcgtggtattgttccgattcgtattacggcaattccgcatattatcgagaacactactattattcgtccgcgttttgaatccgtcgatccaattaaagacgtaaacgccgagattgctttaattgataaaggacttaaatcacgtactgccgttatattagaacgtggtgacgatcctgaaaaagtattctcagagattcaagccgaaaagagcgcactaaatattatcgttgatggtgagggtgaagaaaaaaattccccagccgatccctaa

SEQ ID NO: 491497 - DNA, 2013 bp, Shigella sonnei
atgcttaaatttcgccgcgaacttaacggttacggtggagttattaacgaagggcataacgatcaatacgaatttgaaattgctttctccagtgaacagccttatcagcgccaattctgggatgagcaaaatcaagaaatggtggtattagatgaaattctggtacatacaccggaagcggttgatctgtctcgtctgaataataacgctccgttgctgtttaatcataatttcgataatcatttaggtgtcgtttgtaacgctcgaatcgatgcggataaagtaggccgtgcgaccgttagattctctaagcatggcactttggctaatgatattcgtaataaagtcattgaaggtacgatggaaaaaatttctgtcggttatgacattaaagaatatcacatcgattatgccaaaggacaattgattgttactaagtttgttcctttcgaattaagttttgttacggtcccggcggacgattcggtcggtttaaatcgctctctaaatactatcacagttaatttggaggctaaacgcgatatgaataaagaacaaattgaagaaatcaaagaagaacaagaatccgctcaggttgaagaaactccggtagaagaaaataaagaaccggaagttgaagaaactcaagagcgccaagttgaagagaataaagaagatgaaaatctcgaagacggaaaagacgctgaacatcctgaaagtgttgatgatgatagttcaactgttcgggaaacagaagaagtaaaagaagaacgtgaagctgctccggttgaagaagaaaaaatcgaagaagtggctgaacgttccgaagaagacgaattagaaattcgcgagatcgctcgtgagttaaatattaacgaagacgatgaagaatttaaacgcgcattggcaaataaagaaattacgccggaagcattccgcactaaggcactaaataacattaccaatgctcaacgtattaacgaacaacaaattaaggactctaaaatggaaaaaacttttgacctgaatgctgtatttcgctctctgatcgatggtgacactctgggtgctcatgaagctgaatattccgcgatggctgctactgcaactgtacagcgcggtcgtgctgctcgtagtggctctgtattcgttccggctgctgctctgcgtgctgctgctgctggtaacactaaagctactctggaagctgtaactgatgaaaaactgctgactgaatcctatgtagaaatgctgatgcctcagtccgttctgggtcgtctgggtgtgactgtcctgtctggcctgaatagcccgatcgcagtaccaaaaatgacatcttcttgtgttgacggtttcggtttcgtttcggagaacggcgaggcaccagaaaataaagcaggtttcgcaaacgtgaaaatggctcctaagactttcgcagggggcaacccaatttcgcgcctcagcctcaaaaccgttccgggtatcgcaaccctgatcactgatcacatgaacaaagctgttcgcatcaaactggaacaactggtgctgtctgataaagaaaacgctaacggtccgaaaggtctgattaaacatctggttgatgcaagccgtgttgaaaagaaagctgctttcacctacaaagacttcctgaaagaaatcgcagcactgactgatgctggcgttccggcacagtccatcaaatttgccatgagcggtgcaactgctgctgaactggaatctaccctgaaagataacggcgtttccggttatatcatcgaaaacggcaaactggctggttacgacgtagttacttctggtgttattccggctggccacatcgttctgggtgacttctccgcgattactatcggtgagtggggcggtcttgaggtagatctggacgattcaacctaccgagcacagggcgctatcgttccgcgtatctgggtagacctggacttcaccgtagttcagccggaagctctgaaagttcttcacatctccgctgaatga

SEQ ID NO: 491498 - DNA, 291 bp, Shigella sonnei
atgttcaaattatcagaatcacaattaaatcgaatgtttaaaagtgctcctgtatttgtggtggaaggtggtaaatcaattcgtgcttatcatgaaattactactaccgacgaatcaggggtaatgacagaaacagaatttctattctgtcgtgagggagacttaaagcaaggtgatattgtcacagtagaaaaccagcgtttcaaagttcaatacgttaagcgtaatggtgataatacaactgattgctttattactctggcagggggtacacatgctcgctatcgttaa

SEQ ID NO: 491499 - DNA, 834 bp, Shigella sonnei
atgaatattacgcatgataacttaggaatttttactggaagccatgtagagatttcaatctctgatcagcttaccaatcaggtcgactttttcgatcctagctttagttctatggagaacatcgcagcattccctacgctaaccgaatccacagagatagaaactctggaagagtacgatcaggacgctacggggaaacttgctggttatcgtagactggaaccgacaacactcacattaaaccgtgttcttgacgatgaacatcaagcaatgttgatgaaagcggtagaggataaaacacctttacgcttccgtatgttctatgttgtgaactctggctatagtgctgctaacacagggtacttttgtatattcgatgcttacgtcacatcacacaaaacccgtggcgcagataacaaagctgtaacactggaatttaaacttgaaccagatggcgggattctggatcgcggtattgcaacggagggtcgtcttctccgtcgcggggattatggcgtaggtgcaggtgtacatccattcacaggtccgattgatagtgatgctttagccggaaaccgtttcgtaacttacaagggaactgctagcggtaatccatattcaaccgacacagcattaattcaccttcaagctaatgagcatggcgcatggcaattaacctgtaatacttctggcgcaccacgtttacgcgtccgaaatattcaggaaaacggtcgctctgaatggatcaaggtatattccactaatgagaaaccaacgccagccgaaattggcgcagtggctaagactgaccggattgatttcggcgaatactaa

SEQ ID NO: 491500 - DNA, 3585 bp, Shigella sonnei
atgaaatcgatccaatttaaacgcacacaaacggctggtaaaaaaccaacgccggaacaattatcacagggtgaattggctattaaccttgctgatcacgttctgtataccaaagataaaaataacgctgtagttcaaatctctgtttctccagaaaaacatgctgaactgaacgcgaaggtcgataataacaagaaaacgaccgattctacgatctcagcgaataaaaccgaggccgctaataatctggctgctgctaaatctgaactgaatcagtctattaccactaaagacaccgcaaccaataagcgcattgatgctaccaacaccaatgttagcaacttaactaagacggtaacggcgaataaagctgatgctgatactaagatcaccagcttaactaacaccgttgcatcgaacaaatcagcgattgagactaccgtcgcgaacaataagaaagatgcagacagtaagatcactactcttactaataccgttaacaccaacaataccaatattaacgcgcgagtcgatgccaccaacaccaatgttagcaatttaactaagactgttaccgcgaataaaaccgacgctgataataaaatctctagtttaacgggtactgtctccgcgaacaagacagcgattgaaactaccgtcgcgaacaataagaaagacgcggacactaagatcaccaatcttactagtacggtctctgcgaataagacagccattgaacgaactgttgcaaataacaaggccagtgccgacgcagcgattgcagccgccaacaagcgaattgatggtattgaaggtactaacgatgctctttacatcaagaagaacacaaagacctatcacggcgcgtatttgtatagcaagactggtaactatctggaagattcaaccgcgagagatcttaattacttcggtgctttccgtaccaatggtcaagatggactcatggatctaactcttaacgttcctcactcttccggtaaagcgcacggtcgcggatttactttccgttatgcgtctggtggatctcgtgttgaaacctatggttttgatagagaaggacaaaaagcgtttagctataaaatgtatcacgaaggggataaaccgactcctgctgaaattggcgcatataccaaagccgaagttgacaagatgtttgttaaaaacgttaaaatgtctgttccggctggtgatgcgactcgcggttatttcaaaatcgcaaccgccacgatcccacaaactggtcgaatggtaatgcttcgtatcttcggtggtaacggttataacgttaactcctatgatcaggttgactttgtagaaatcgtcattcgtagcggcaacggaaacccgaaaggcgttagtattgcggcttatcgtcgaaatgctaaaaatattcatcaagtatttgcggttaatacttccggtgataactacgatatctacgttaactacggtcgttataccgataacgttattgtcgaatatggtaaaactaacgatgttacactgacggtacatgacgttcctgaaataactctcgttaagccgtctactggtgttactgatggacgtgttattacaatgttcaacaccgaaaacaaggccggaacgttgatgtttgataataacggtcagggaacatatgatattgtcagtttgaataacgattcaggtactggtaaaaaatatctgcgtaaattccgtagtaaagccgcagaaacaatctggcatgaaactgttcaaggtaacgtatatcgtttagcgactggcactaccgattctagcgaagttctacgaatcactggacgcactatgtatactggtaaagctgtttttgatgccggatctaatactattcgtatgcagcgaccaaccggacaaagtaactatctggaatattgggacactcgcaacggtgcaaataagcgtcaaggttgggttggttatggaaatgccgatactaacgctatgcagatgtataacgatagcggtactaacaatattggcttagaacaaagcggtcaaatctctctgaatactggatctactaaagtagtttatactaacggcgaatatgttgctgccaaccataacgcatttcgtatgatttacggcaattatggtgcattctggcgcaatgactccgcaaaagtttatcttctgtcaacggctgaaaatgataaatttggtggttggaatacttaccgtccattcatttatgatttaacttccggtaacgttcaattaggcggtgacggtaacggagacgcattaacgttagaacgtgcaagcaaagccgctcgattctctggaaacgctttcatcaaaggtcaacatttaacacttgatgctggtgctggacaatcccgcgactatttccgttttaaccattggggcgatagcaacaacgcccgtgataacgttttatacatcgaagacagcaaaggtcgccatttcagcaccgaacgtaatatggctacaggtgctcttaaagcaaacttcttaggcgatcttgaagttggtggtaagtttacttggggtaaaaataccggacagtcttcattcaactgtcgagtatggggcaacgactcccgtaagcaggttttagaatttgctgatgaaagcggttggcatttctatacacagcgtgctggtggtccgggtactaatgaaattaactttagtgttaatggcagtattcactcacaagggatcgcaacttcaggtaatattaagataactggtccagatattgagtttcgtcgcagtggcaataaacacatctggtttagagatccagacggcttagagttgggtctgctgtactgcgatgacgctggcgttatgcgtattcgtggcgagaaacaaaatgaagtatggaaattcgctggtaagatgattcaccttgaaactggtactgtatccggtggcggtaatggcctgattcgtggtgaagttgctggcggtagttgggctagctggcgtgaccgtgctgctggccttttggttgggtgtcctcaatcaaccaattccgctcataacatctggaaagctacacattggggtcaatatcacattgcggcaatgggtgtgcatgttcctagcggtactattaccaatgctttagctcgcctaaacgttcatgacgccaactttgactttagcgcctctggtgactttagcgcaggtcgtaacggtagctttaacgatgtgtacattcgttctgactcccgtttgaagattaacaaggaagaattacaggacggcgcattagagaaagtaaactcactgaaagtctacacttacgataaagttaaatcacttaaagaccgtagtgtgatcaaacgcgaagtaggtattattgctcaggatctggaagaagtattgccggaagcagtaggtattcaatccaccgaagatccagaacaaccggaagcaattaagactatttctaactctgctgttaatgccttgattattaaagcgattcaggaaatggacgccaaatatcaagctaagattgaagcattgactaaagagattgccgaactcaaagcaactaaataa

SEQ ID NO: 491501 - DNA, 471 bp, Shigella sonnei
atgtctcaatttaatgatatttttactggtggtttggtaagtctgttctatcacgcggataccactaataccactctcgatcactccggttacgaagaaattaaagagtgcgctggcttccctgaaactgctatcgagcgcggtactgtagaagttaaatccttctcttctcagtacaaccgtaagctggtagggaaactgaacgttcctgatctgattctgaccgttaactacatcccaggcgatgcggtacacgagaagctcattaaagctgccgaagacggcacaagagtacaaatcaaaatagagtattatgttgacgccggaaaacagactggtattcgcaccgctttcaacggctttatttctaaagttgctatgaacggtggcgatgaagaagtggtaactaaagagtttacctttgctgttgatggtgctccgctgaaacagcaaatcttcactgccggatga

SEQ ID NO: 491502 - DNA, 507 bp, Shigella sonnei
atggcaaatgtcgttaataagcccggctgggtcggatcatcggctgtttctgtgactggcaagcgatggatgaaagaagcattaacagctttaaaagttccggctccgcgtaatatgtcggcaatggctggtcgtggtatggatacggttgtagctactgcatcgtggtctacttcattgggtaataactggggtgtaactgcttcaaactatcctgtttccggtatgcaaagcaaaggatctatggagaaccccgaaaacgtgggcgtagggcgtctggttggcgttatcgttggtcaattcaatggcggtactcctactatggctgtatatctccagaacggtagagcggggaatataaccgttaatttgggtggtgctactgtcactgttccttataacagtatgcaaagtggttttcattactattggttaagcaatcctccggctgctttcctcaataacattaagaagactggcactaagcagactttgaaaatctcttaa

SEQ ID NO: 491503 - DNA, 309 bp, Shigella sonnei
atgaatattaatgaaatgctgaaagctctttctccgaaacgtgaatctctgaccatcggtggatttactttctatgctcgccctatgtcggtaaaagaatttaacgaacatgttttcaatactgataaagatgaccgtgatgaacgatctattcttcgttgtattgaagatgaagacggtaagccggtatttgaatctatggaacaagttaaggcactgtatactaacgtccgcagtgaattaatcggtttggttgctcaagcgtcattgatgcaagatgcggcagtaattgaaaacgaggtaaagtaa

SEQ ID NO: 491504 - DNA, 342 bp, Shigella sonnei
atgatgcgatcggggcttagtaaagatgaaatggataatatgccaatcactctgttttggaaattatacattttcgacacctacttagaaccacaaagccccgcgtttcatgatatgcagaatgcgatgttgcaatattccatgtatatgacgtcgcaaggaatgacacgcgaaactgcacgcaaactcaagcctagccaattccaattaattagagaagaaaaactctttaaaactaaagaagaactggaagaaattgcacgcaagaaagaagaagaacgtaaagcggcaatgctgaacatgtttgatccatctttgcttgagaaactcagaagcggttaa

SEQ ID NO: 491505 - DNA, 2430 bp, Shigella sonnei
atgacaaaacatatagtaacaatagaaggggataataaaggtctaaggagaagtaccaatgaagccgctaaccttctagatagtttgtctgaaaaggcaagtaatatcgattttggcggtggtttgtctggtttgactggatctcttcgtgggatcgctggctctgctggtttggctgctggtggtatcggcttagttgcgaccgcagtttttgcagccgctaaagctggcgcggaatacgttaaacagtattcagaagtatctaaggcgaccggactctcgattgaatcccttcaaaaattagaaaaggagttctctggtactggcttaacagttgaaaaatttggtgatatcaacaaagacaccttagataaaatgggtgatgcatgggctaacggtggtggtattgccgatgatttagaatcggttggccttaagttagaaaactatgctcacttcatgactgatccgcaaggtggtatgaaagcggcgatccaagtgttctatgacatgaagaaagccggaaaatcaatggctgaaatcaagttcatgatggaatctttagccagtgattcaagccatatgaccagccagcttgagaaatataatagtgctcaagaggcgatgatcgctattcagaatcaatctgttaacgtcaccgaagaaaacgctaaaaaatatgataaattttctcaaaatatcaataagctggaaaataacctgaaaggtgtcggtatgaccattactggtcctttggttgatagtttaaactggttattcgaatggtttaatattgattgggaaaagagttctctattcagggcattagaccgtctgaataaagaaggtaagaccgcaactggtggtattcttaacgccaaccataaagacgctcaaaagattattgacaagtacaataaagaaaagcgttggaataatctggcagattgggaaaaggccgcgatccgtggtgctggtgtcgatcctcgtactgctggctttgatgttgaaggatttaagaaacgttttggtgattcttataagaaaaatggctctctgattgttgtcgataacggggaacatctaacccgcaaggcagatcctaaccgtgatttgactatcccgactacaccaactcgaccagcttcattgggtaagtctggcaacgagaagaaagccgaggaagaagccaaaaagaaagcggaagaggcagctaaaaaggctaaggaagccgcagaaaaagcacagaaagcacgcgaggatgcaatcaagcgactgaatgcacttgatgttaaattgcaagggcaagttgcagcgtctatcacttctcaaaatagccagttgcaaaacagcttaaaagatgtgaacgacgcgttagctctgggcttaatctctcaggaagacgcagccgcgaaacgccaggcgctaatcgatcagaatactgaaaacgtttataaaatgatgttgggtgctgatccgattgatgctctgaatgctttaacacaattgcaacaaatcagggacaacgagctagaaagccataaacggttacttgatggtaaagctatctcctacgaagaatatatgcgtcgtgtgaacgataccgagcaaaactattctcagattgaaaattctttacagggaatggatggttataaaaccaatcaattaactagtggttatgattatcaagactcaaataatccgtttgctaaatttaatgcaatcgataaagagaaatcggatgctgaacaagattataagaccgataaactcaagattgatgggatcaccgatccggctaaacggatggaagcattagaaaaactcaatgaaaaccatcaaaaacggatggctgcaattgaaaagaaatatgctgatgctcgccagtcaatagccgatgatatgtatggcggttttgctgctgcaatgactcttttcgggcaggaaaacactaaagctatgcagatggctttcaatgctcataaagcattctctatcggacaagcgacggtgaacatgtggacggctgctaccgatgcatggaacgatccgaccaacgtaaccacaggtcaaaaaatcgctgctgctgcattggctgtttctcagaacatgggaaatattgccaacattaaatcaacaaatttaacaggaatgtcacatgatggtattgacagtatccccaaagaaggtacgtggttgcttgataagggtgaacgagtagttgatcagcgtaccaacggtgatttgaaagacttcctttctgctcaaaaatcaggcggtggcaactctcaaccgattgaagttaatgcgcctttgaacattaacggcaacgttaatagctcagacaagatggtcatggatgctatcaaacgtcacgctaagttagttgctcaggcggtagaagacgcacagcgccgtaagatgtaa

SEQ ID NO: 491506 - DNA, 561 bp, Shigella sonnei
atgttcaaatccaagaatattaaaatcacagattttactcttaaatcaaaacagcctttcttcaaggcgcaatctatatccggtaagttccagcgtcgctttactggcatccatttttacgaagcagaatttaccgcgaatttcatggctcaggatattaacgaagtaaaagaatttgtagcacgtcacctttttggtcgtcctttcaatgtaccactgtcttacttttcaaaatatacaggtgatgtacgccagatggtaacggctgctgctggtactgctcgcggtgggcgtaaggtgagaatctccaacttcaccggaacactgaaagcgggaactatcatccagtttgagaaccacaagaaaatctacacgatcaccgaagatgtgaaatcaggtggtgaaatgaaactcttccctaacttgcgtcagaacgtcctggcgggtgaggtgatcaagtatcagaacgtagaaggtgaatttgttctcaaaactgaaaacatcgattggaagatcgcccagatcggcaagatgaaatttgaattagtggagaatgtataa

SEQ ID NO: 491507 - DNA, 654 bp, Shigella sonnei
atggcaactattcaggaatcattcagcaaactatgcactaatctggacttcatcgaggtatacaacgaccagacaggtcagaatgtgtctagattgactctaccgcagcttttttccactggatcgatgtttcacattatcgaagtagtaaccgcgtcaggggacgttctacggcttacagacgggtacttcgatttggactataacggatttacgtatctcgcaacgggtgattttcttcaaatctcatcgaataccgaagagaaggagatcaacaacaacgggatcaacgtaactgtttctaacgtccgcgaagaatacattaccttgattcgtaacaagcaattcgataaatctgatgtgaaaatcgagatggttttcctgaaccctaacacgggcaaggttgaaactacttaccctgttttccgtggggtagtcgattccatcgggattaacatcgaacatgaagatgaagagtgtaaaaacgaatcagaatttcagcttaatagtatctgggaagttctagataaaaacgctcgtagtcatgcttccgatggtatccaccgatcctatgttggaaacgagaacgatctattcttctcccgtgccgggaagtggcaaagcgagtcgaagtggtttagctctaagaaataa

SEQ ID NO: 491508 - DNA, 420 bp, Shigella sonnei
atgctaaaaactaggcttatcaccgattacatcaattctttaataggtcaggagttcgttcagggtgagaatgattgcaatctcattgcatgtaagatcatcgatattctcgctggtactgacctatataattctctttataaaaaatattcaactaaagaagaaggcttgaaaatctgcaaagaattaagcgggtattcaaacatccttcaaccaattaagaaacatttcaaattagtcactgatgatttacaggacggcgacttactggtcacagcccacaaattaggaaaccgtaattattattccgtagttcctcattattccggttatggcctcgttgaagaagatggtatctggatgaccattcctgtttcagacattgactatgaacaagtttatagattcgggggtgaataa

SEQ ID NO: 491509 - DNA, 3780 bp, Shigella sonnei
atgggatttgaaatattggtaggcgcggttattgctggtgcgtctgctgggatggctgctgctgcaacattttctgttatgaccgcagtcgctatcggtatggctgctggtgcaatgaccttgatcgcttccactgtaggcgcaccaaaaacaccgaaagtacaaagcccagataatgcggtgacactaggaacatcaaacgatcctaagacagtattacccgttcttttcggtactacccgcacaggtgcaatctgcgtttacaaagcaatttctaagcaagaaaacaataagttagtgcaaatcttcgcaattgccgagggtgaaatcgaccattacaaagcactgtttatcgataacaaaaatgttcttgttggtaagaacatgacgatccgtgatggtgtactggacaaaggcaacattaaagaagaataccggaaagttttagaggttgagttccgcacgggtaagaatcctaacaccgctttgtcactggcaaaacgtcacttagggtcagactggaacgacaactacaaaggcaatggtattgcaaccatgtgtattgtgttacgccgtgatgataaatctcttgctgctggtgttgatattctccaaccaaatagccaggtagcggtcgatgttatgggcttaaaaatccgtaaccttgaaaccaatgctattgaggctagcactaacggcgtggaccagattttccactacctaacaaatgaaaaatatggcttatccgtaccaattgaaaacattaacgttgattcattcctgaaagtacgtaagcaagtacgtcagatggacctacattcgaacggtgcatgtgatccgaacgccagctttaaagagaacttgactagccttatgcagactttcggcggggtgatgttcgaatccttcgggcgtattactctgaaactggatgctcctgatattgttaagcatacattcaatgaagacaatatcatgatgggtaaggtatcactgaaaacaggtggcactaacggttatttcaataccattaacgcgatgtatcaagaaccatcaattgactattcagagcaaatgctacgttatccggctgatgctgaaaacgatgctactattcgtcaagatggtcgaattatcgctaaggatatcgaatatcgttttgttaagtctaaagcccagattgataaacttgcgagcattgaacgaaataaatctcgtatcactcaggttatcagctttatgactactgacgcattcactgccgaggtgtgggatgttatcagcgtaacctatgatgaattaaaactgaataattcactttggcgtattactgcaattgaccgctcgattgattctggtattgctgggatgatgacgatcaccgccacagaatataattctcaggtttatactgacctgaactatgcggcaactccagacaatagaccaagtggtttaccggattcaatgacagtacagaagcctactaatttcagaattaaggcaactggcgagacgatttacggtaaaaatgttactttgacatgggatgcaccggaagattttaaccgctacggcttccagattgattaccgtgttagtggatcgcctaactggattaagctgggacagacttcacagcaaattttcagtgtcaatgcactggcaaaagatcgttcttatgattaccgagtttgtgctttcggtatcatcgcgagatctgattgggtagaactgattaaccagaatcctactgttacctatgaattaccgactccggttattcgaatcaaaaatcagggtagcacgccaggaactttcgaaggcaatgatctgattatcgaatgggaaaatcagcaacaattagatgtgatgatcaacggtgaaactaacaagtttagtgacctgtttgaagcatacattatcaaggtgactaacaaggctggtaagtctattcagtaccgtacccgcgatcctgaatcatggacttatacacttgatatgaaccagtttaacggcctttcgcgacaacttacggtagaagtatcggctaagggctataacaactcagagagcgccccagcgcgtttagtggctattaacccacagcataaaggtattaaaggttttagtgcgcgtggtggttttaatgctgctttcgttagctggaacggtgatgttctggaacaggactatgctgggacgattgtacaatttgcaaccgatagcactttctccgatgcaagggcggtaagcacgaatagtgttagccatacatctttcgacttgacggacggggattattatcttcgcgcggcacattacgatattttcggtatggatgatgctgtttggtctgaaccgtatttcatgcaaatgaaatctaccattagctgggacgatcaggacaaagaagcactggaagacctgatcggtttacaagatcgattagatgaaactatcgcggatgctattaagcaagctggcgctaatgccgatgctaaaattgatgcaatgcataagcaaatcactactgaaacgggtaaaacagttcaagcctcagccgatactctcaagagtctgattgcttctggtgataaggcaagttcaactaagattgatcaggttaaagctgaactgaaaggcgatatcaccaaagaagttagcgcctccgctacaaccctgaaacaagctattgctaccagtgaagcagcaagcgcaagtaagattgatcaagttcgggtagaaatggatggcaagattgctggtgtgaatcaggaagcagatgtaaaaatcgatgctttgaagggaaccattaacagcaaatacaatctagcggttaatgcagatggtcgcgtggctggtattcacatgagcgcaagcaatgatccggcacaaccgactaaaatcatctttaatgctgataaaatcgcggtagctccacagaatggatcgggggtatgcccgtttggtatcgaaggtaacaaggtttatctagacaatgccatgatccgtaatgcctcaatcggaaccgcccagattagtgatgctagtatcaccacggctaaaattggcaatgctgcgatcaattcagcgaaaatccaagacggcgcgatcaccaacgccaagattgtaaatggcgcaattgataacgctaaaattggtaactatatccagtcttccgactggaacggatctaccggatggcatatcaacaagaacgggtccgctacgttcatgaacgctaccgttaaaggtaatatcacggctgattccggtactctgaacaacgtcacgattaactctagctgtgttattaagggtatgcttgaagctactcaggttaagggtgatttcgttaaggtgattggtcgtaagttcccgcaccgtgatgttaacgttgataatggttatgctggctatccacagggtacggtcactgttcgcgttgaagatgatcacaagttcgatcgtcaaatcgttattccggcaattagttttggtggattgcgagcgcgtgaagggtcgaacaataatacctattacgacacatgtcgcctgattgttcgtaagaatgggtcagagttgtataatagggcgtatggcggtaatactggtctttactcaggtgttattgatatgccagcgggtaagggtgctgtaacattgacctttgaagtacactcaagcgcaatcaacaactggacgcccagcacatggatcagtgatttaacagtaatggtaactaaaaaagccactactggtattactgtttcttaa

SEQ ID NO: 491510 - DNA, 279 bp, Shigella sonnei
atgactgaaattatatatggcggtatcggtgttatcgccttaatttgcggtggattatggagacttcaccgaaatcaattagcaactgaaaatagattgtcgaaattagaatccagcgacgcattgttaaaccagaagtttgagacgatgcagaataaccatactcagattgctgaacgtgtttaccaaatggaacaaacactacacggtatagaaaagaaagtggttgcgatggacgctaaatttgaccaagttattgatttactcagacaaaaataa

SEQ ID NO: 491511 - DNA, 171 bp, Shigella sonnei
atgaagaataaacttaagaaatattttggttatctcttgattgtcgccctcacttataacgtagctattagacctctgctaacgtcctttgggcttgaactcccggctatgaccgtggatgaacaattgctaaggacactggcgggggtcttttcgttattagggggctaa

SEQ ID NO: 491512 - DNA, 684 bp, Shigella sonnei
atggcaaccagtaccaataaacgaaacgctctaaggactaagaaagcgttgcggcaatggtctgaaaaggcaactgatacattcgaaagggcgataggggaaggggcgatctttgcttccagagcactccagaagaagattaacaagaatgttgatagacctactcgctggactcagcaagctgtaggtaataccaactacaagaaccgatcagggacgagacaccaaatcttcatcaagggcgcaagggataaggacaagaagatcggcagtcaggatgactatctgaaacactatttcgatggtggcaaaatcaataagctagtgccaatcgccaacggcaaggtcttagactcccacgggaacattaaggccattaaaggcggtaagatgatgcgtaacatcgaaaacggcaacttcatcaaggtagagaacaaggaagggacttttatcatgaagaagtacaagcctaagaaatcccgaaccaaacgcgctaggaatggatcggcggtggcaaaacgtcgcttagagaaacgcatacagaaacagagtaagcgaattgttgccgttaagtcggataaaatttctactcgttattcgacgctaggatcgtgggaaagcaacgaagcaatgatgcttgaaaacatcaataagcacattaaatcgcgcatgaaatacgtttaa

SEQ ID NO: 491513 - DNA, 348 bp, Shigella sonnei
atggctaaaaatattttcactgaatttcctacttatccggttgatcagctttccggtatttttattaatggcattagcccagaatcaatgacctatgattttgaggcgaagagagttaaacataaacaatataaagaatgtatccgtgaccatgaaaaggggaccgtgttttgtgtcgctacattggctaaacgtcctaaatatcgttttcgtgtagggcaagaagtcgatgtagttaatccttatagctttaactgtctgggtgatgcacgcgcggtgtgtgtaggcactgctccttattatatcaagggtatgcgctttattggttatatcttcgaaatgatctaa

SEQ ID NO: 491514 - DNA, 426 bp, Shigella sonnei
atgagtgaaaaaagcattgttcaggaagcgcgggatattcagctggcaatggaattgattaccctgggcgctcgtttgcagatgctggaaagcgaaacacagttaagtcgcggacgcctgataaaactttataaagaactgcgcggaagcccaccgccgaaaggcatgctgccattctcaaccgactggtttatgacctgggaacaaaacgttcatgcttcgatgttctgtaatgcatggcagtttttactgaaaaccggtttgtgtaatggcgtcgatgcggtgatcaaagcctaccgtttataccttgaacagtgcccacaagcagaagaaggaccactgctggcattaacccgtgccctttcccagaatcctgccgatattatcccacaactgctggatgaacagagagtacaggctgtttaa

SEQ ID NO: 491515 - DNA, 438 bp, Shigella sonnei
atgattaaccgtatccgcgtagtcacgctgttggtaatggtgctgggggtattcgcactgttacagcttatttccggcagtctgtttttttcttcccttcaccatagccagaagagctttgtggtttccaatcaattgcgggaacagcagggcgagctgacgtcaacctgggatttaatgctgcaaacgcgcattaacctgagtcgttcagcggtgcggatgatgatggattcctccaatcaacaaagtaacgccaaagttgaattgctcgatagcgccaggaaaacattggcgcaggcagcgacgcattataaaaaattcaaaagcatggcaccgttacctgaaatggtcgctaccagtcgtaatattgatgaaaaatataaaaactattacacagcgttaactgaactgattgattatctaaatagctgcgcttaa

SEQ ID NO: 491516 - DNA, 1308 bp, Shigella sonnei
atgctgtacttcgatacggaaatgagaaaacctggcgtgacgcgccaactgttgtggatggaatacaaggcacaggcgggtgacaaagcgatgggatactcacacttctgccgttgctaccggaagtggaaaaaaacgcgacgcctctccatgcgacaggagcatcgtgctggcgaaaagctctttatcgacttctgtggtcctacggtccctgttattaatccggacaccggagagatacgccgcgtggcaatcttcgtggctgtaatgggggcgtccaactatacctatgttgaagcgtgcgaaggtcaggacatgatgtcatggttaaatgcccacagccgttgcctgaccttcctgggcggcgtaccgaagctgctcatccccgataacctcagaagcgcagtgaaaaaagccgatcgctatgagcctgtcatcaacgacagttatcaggcgctggctgagcactatggcacggttattatcccggcccgcccgcgcaaacctaaagataaaccaaaagcagaaaacggcgtcctcatcgtcgagcgatggcttcttgcccgcatccgtaatgaaaccttccacacgctcagggcgctgaatgcacgccttcgggagttgctgacggacatgaataaccgaccaatgaagggatacggtaatcaaacccgcgcagaacgcttccgcatgctggatgcaccagcactctctccgctgcctctggagccttatgaatacacggaatacaaagccgtgaaggttggccctgactaccacgttgaatatgcccgtcactggtactccgttccacacgaactggtcggtcagcgtctgtcactgaaggtggggcagtcggtggtacagctctggcacaaggggcagtgtgtggcgcaacatccgcgcagcacacatgaatataaacacacaaccaatccgcttcacatgccagaacgccaccggcggcatgggacatggacaccggaacgccttatcgagcagggaaaccgtacaggtccgtccacaggccgggtggttgaatccatgctgaaagccaaaccccatccggagctggcttaccgtgcagtcctgggtctgctggcacttcagaaaaaatacggcccggaacggctggaaaaggcctgttacgttgccctgcactataacgccccggacagacgctttatcgacaatctgctgcgtcatcatcgggataacgttgagcttccgttatcccgccagggcgaacaacatccggcatatgcttcagagcatgaaaacctgcgtggtcctggctactatcactga

SEQ ID NO: 491517 - DNA, 675 bp, Shigella sonnei
atgagtgataatctgttaaacaaactgacccaactgaaactcccggcgatggccgggagcctgatacggcaacgggaaacgcctcagacttacgacgaactgtcgttcgaggaaaggctgacactgctggttgatgacgagcttctgagcagagaaaacagtcgtgtggcacggttgagaaaaaatgcctgcctgaaatatcaggcaacaccggaagggctgcgttatccggcctcaagaggtctgcgggctgaacagatgagggaactgctgaacggccactacataatccacaggaaaaacctactgataaccggtccgacaggatgcggtaagagctggatagccaatgcgctgggcgaacaggcatgtcgacagaaatacagcgtccggtactgtagaaccgggcgattactggaacagttggctcagggacgtgttgatggcagttggctgaaatatctgaaacagttgcaaaaaatacaggttctaataagcagcacgatagtggtaagccagttcccggtagataaatggcatggtctgatggagaacccaacaacagcagatgccatcctggacagactggtacataactcacacagagtggtccttcagggagagtccctgaggaaaaatcccccgacagtggaaagcagcgaaaaaacgagttaa

SEQ ID NO: 491518 - DNA, 204 bp, Shigella sonnei
atgaaagaaccggaaccagtagaagaaactccggtagtggaaccagtcattgaagaagttcagccagtagttgaagaagtaccggaagttaacgcagaatctccggtagccaacattttctctgacgaggcagaacatcgttctccggtacatgacacagaaacattttgcgatcttactggtttccaaaactacaataattaa

SEQ ID NO: 491519 - DNA, 999 bp, Shigella sonnei
atgaatactactttagcaaaggatatcgaatttaccgcaaaaagcaaacgtgcgacccctccggtcgaatatgaaaccagaatcattaaagtttgtcaagcgcatggatggttatacagtggttttgtgcttcctgtaaagaaaccattccagaacaccaaagtttgcatagaagttaacggaaaggttaaaacgccatgtattagtcatgttctaactggtcagtttactggcaaagatagagtatcaccgcctaagaagaagtttagatttaccgaagaagaacacttagaaaacgctcgcaagttctacaagccgatagggtgggatgtgttaggtctggctgaaccttatcagggtgttgacactaaactaattcttcgttgtaagtgccacggaaagattcacaagaaaggtgatttacacaataaccgcagacaaggcgggttaacatgccctttggttaggggggtacttaaatcaattcagaatggtagaaaacaggttatcagaaacaagtttgcacagcgccctatgcacttttatctaattcgtgttggcgagaagtttttcaaatatggaattaccactcgcaaagatccgatgcaacgggtaagagaacaccagaagcacaccagcgagaaaatcacctttgaatgctcacatttgtttaacattggatggaaagctggtgatttagaaatggggattaaaaagaatattcagggcaagaaaatcccacgtaaggtaatgaatagcggattcacagaaacgctaccgattagcaagctgaaagatgttaaatcattcatcaatgaatacatccacaccaacccatctaagccaatgtattttgatgataccaacgcaatcaatctgaacaactacattagtgatgaagacatagaacgagatttatcgcagtggatgaatgcaccgttagctgatttaataccggaagacttagaactcgatttaagcccattagagacactctaa

SEQ ID NO: 491520 - DNA, 1680 bp, Shigella sonnei
atgaaaactaaactgtattcgtatattcgcttctcgtctatgcgtcagaatgatggttcgagttatgaacgacaaatcaggatggctagagagattgcggtaaagtatgaccttgaactggtaaatgattatcaggatctgggtgtatctgcgtttaagggtgctaactccaaaacaggggcgctatctcgtttccttgatgcaataggtagatccgttcctgttggtagctggctattcatcgaaaacttggaccgtttatcccgtgccgatattgtcagtgcgcaggagttattcctttcaatcatccgtagggggataaccattgttactggcatggataacaagatctactcgcttgatactgttaccgctaacccgatggacctgatgttctccatccttttattcatccgtggtaatgaggaaagccagactaagcgcaatcgtactaactcaagcgcactgattaagattaaagctcatcaagaaaatccacaaaatccggcagtggctatcgaggaagttggaaagaatatgtggtggactgataccacttccggttatgtgtgtcccgatccggtcttcttccctattgttcaggaggttgtggaattacgcaggaatggacggtctaccgccgagatactggatcaccttaacgcgacatatacaccaccaccagccgcaagtcacaagaggcattcaaactggtcacgagcaatgattgaaaggttgttccatacccgcgctttgattggtatcaaggaaatctctgtagatggcgttaagtatgagttaaaggattattaccctcgtgtgctagatgacgctgagttttatcaccttaagaaaagcattggtgttagagcatgtaactatggagacaaagaagaagctaaaccgatccccctgcttagtggtgttaatctgctgaaatgtgaacattgcggttccgctatggttaaggtgaaaggaactaacaaacggcctaaccaatatcgttattcatgcgatgcaatgcgctctagtcgtattgcatgtgtgcatacaaactggagttttcgaggtgatcaattagagaaagctgtattgcaattgctggctgataaaatctggattgctgaggacaaggctaatccggttccggcgttgaaagtacaggttgatgaaatatcacgcaagattgataacctgattgccctttctgctatgacaggagcaacgaaggagctagccgatcagattactaccctcaatagcgagcgtgaaacactctacaatcagatcaagatggcagaagaggaaatgtattctgttgactctcaaggctgggagaagctcgcagaatttgatttagaagatgtttacaacgaggaacgactaaaggtccggtttaagattaagcaagctctaaaacggatcgggtgtagcaggattgacaaatacaaaaacttgtttgtattggaatacattgatggcaagacccagagagttgtaatagaaaattcaagaggaccgaggaaaggacaaatctttgtcgatttgaaaactatcaatgataggcagattctggagagtaacgggcttgttctgcatccatgtttagacatgctgacagataaagactggaagccagaagaggaaataccaggtccattacaggaatttggaatttaa

SEQ ID NO: 491521 - DNA, 420 bp, Shigella sonnei
atgaaaaagattatcgctggtgttgttcttgctctgggtttggttggtgctgcgaatgctaatacctatacctattatgtgtgcaattcctacttcgaatataaaggagatgatacacgctacctgagtgatggcgaccgttattatcatgcgccgtctggcaaataccgtggttttatcggtgtaaaggttcgagtgaatgatgataatagtcaatttgctttcaacgatccggtatttgataaaacaatcaaaagcccaaaactgaaagaagataagaacgagaaagaagaatattatggttccgaagatggtaaatcctacatcaaatatctgcattctgtagatggcgcgcctatatttgatgttaaaaaaggtgatacgtcttattccctgattagctgccgtgaaattctttaa

SEQ ID NO: 491522 - DNA, 387 bp, Shigella sonnei
atgttcaatatcatgattcgtaaattcggtgaaatgactttcgagaaagctggtgttgcgcgtaccgaagaagaagcaatggccttagttctggtagcactgagatcatcacctgagattatcgacgctgaatatgtagccgcagaaggtgagattaaagagattaaagcggtggctaaggaattaggtgttaaaggtttccgtaagctgaaactatcccgcgagacttatgtaattggacagcaaggacaatacctagatgagaatagcgcgattgtcctactgaataagatcacccgctatggtttccagattgagcaatataaaacgtgtttcgaattatacgaaaaaggtttgctggatactctgaccatcgttcgcgcttaa

SEQ ID NO: 491523 - DNA, 573 bp, Shigella sonnei
atgcaggcgtggcaatataacgccgtaggtgtttatcttcctcttacgttggcgggaataataagtggcgggcttactggcgcgttgaccggttctgccgtcgtgaatgccctttgtggggtgacaggcgggatgatcggctcgtttattctccaacgactgggtactcgccgacagtcgatgtatggatttgctgttgtgaccttagcattgctgtcgttaggcgcactggcaacgactaatccctggctgtctttagggttattgggatcaattattttcttccattcagcgggtcctggtgggctgggcatgaccattgccacactctcttatcctcccgctattcgccctactggggtcggatttgcccgcgctattatgcgcacaggggcaattgcaggactcattttctggccgatgctgtggggtgcgttgaaaactgaagcgttttactggttggcaatcgtgccattcctggggttcctgacctgcgtattgattaattgggaaccactgggtgcaaatgttgatgctgaggatgcagaggttctggctgaattgaagaaataa

SEQ ID NO: 491524 - DNA, 738 bp, Shigella sonnei
atggtgcaggcgaaaccctgctatgttgaagactgcgtaacggctgacgcctgcgtcattaaaatgttacgtagcccacacgctcacgcactgattactcatctggatgtcagcaaagctgaagccttaccgggcgtcgttcacgttattactcacctgaattgccctgatatctactataccccggggggtcagagcgcaccggaaccgtcaccgcttgaccgccgtatgttcggcaagaaaatgcgtcacgtcggcgatcgtgttgctgcggtcgtcgcagaaagtgaagaaattgcgctcgaagcactgaagctcatcgacgttgaatatgaagtgcttaagccggtaatgtcgatcgacgaagcaatggcggaagatgcgcctgtcgtgcacgatgaaccggtggtgtatgttgctggtgcgccagatactctggaagacgataacagccatgcagcccagcgcggcgagcatatgatcatcaacttcccgatcggttctcgccctcgcaaaaatatcgccgccagtattcatggtcatattggcgatatggacaaaggctttgccgatgccgatgtgatcattgagcgaacctataactcaacgcaggcacagcagtgcccgactgaaacacatatctgcttacccggatggacggcgatcgtctggttatccacgcctccacccaggtaccatggcacttacgccgccaggtcgcgcgcctcgtgggcatga

SEQ ID NO: 491525 - DNA, 183 bp, Shigella sonnei
atggcacgacctgttaagttcactcgtgaaatcgttttagaaatggcaaagcgttattttgaactgacgcctgatgtagtgattggtgaatggtttaaaggtgaaggtattgatcaatcaaccttccacaaactcttaaagaagtatgacattaaagtaaagataaccgcagaggtttactaa

SEQ ID NO: 491526 - DNA, 942 bp, Shigella sonnei
atgttattttccgctaactttttcactaacgaagtaaccaacgctaaagcagttatcaaatttggcaccgaagcaaacaagaagattcaaccgaaagttgttgctcatgtttcctttgcgcagcagaaatccgctttcgctggctttaaagcacatcgtgaagcattgatcgcggctggctttggtgttgacggtaaactgcctaacggcattcgtaaagcaatcgaccgtgttaaacctgctaaagacgttgcagtagaccacatcgttacttttaccgttaagaactcttctgaactgttccacctggttattgctggtgatactgctatcgtttccgctcctaacatggattttcaggataccgctgattgccagatcaccttcggtcgtcgtaaagaagttaccggaaaagctaaactgaacttcactaaatccggcaatccttactttgctgttttctttaacagccacgctaccgaaaaagaagttgtagaactggttgcttatgaaggtgaagagaaagaacgtattgaatcttgcgaagcatttctggaactggaagcacaggtgaatgctgtttctccggttgttgaagatcgctttgctgcactggaagcacagatcgcagaactgaaagctgcactggaagaaaaagaccagattatcgaagcacagaaagctgagattgaagaactgaaagctaaagaagttgctccggtagcagtagttgaaaacgcggctgatgaggccgcaaatgatgaagtagaagtgaaaatcgatgtgatgcgtgatccgatggctgcattaaacttacttcgttccttcaagggaaaatcctatttctctagtgatgtagaagacgaggaagaagaacagaaacgcaatgctgcaatgcttcatgatgaaatgtacggtactaacttttcttactgccaataa

SEQ ID NO: 491527 - DNA, 174 bp, Shigella sonnei
atggatctttttgtctactttgctactctgctgtttttgactatcgtcgctggcattaaattgatttttatatcgctggtggtgtttttcaaatttctaatcggtacgccttacggctgggtatgcttaatcctgtttattctttttagatgctgtaaaaaggatactaaataa

SEQ ID NO: 491528 - DNA, 222 bp, Shigella sonnei
atgaatttgatgtgtcttaaaatttctatactaaatatatacgtgaaggatgttgagctggtcaacgtctacgggggagaacatcccccgctaacctttttcttatttgaggatttacctatggttgaatttttgatttatctggctgtaggattaactatcgtatattcactggcacatattggcatttctactttgtgtaacgctttcaagtatcattaa

SEQ ID NO: 491529 - DNA, 555 bp, Shigella sonnei
atgaaagaagaattaacccttacagaaatttcccgtttatatggctatacattgaatggtggcggtaagcgatggatagaaaggggattgccatttaacaccaatacccgccgcgtgccagccaaagaaggaacagaatgggtcttgaaaaatattatcaacccgcttaaacaaacttctatcaaagaacaaatcgacgtagagaagttacgccgcgagagagcattagcagatgcagccgaacgagagaaccaggaaaaaatgaatctcctgattcctgtcggttatgtagaacaggaactagcggaatattgcgggaaagtgaaacagactattttgcagatcgccacaatcgacgctttagaaattcttgaatctgccactgatcagaaaacattgaagaataagctaagggagatcatcgagcgtcgtttaaatgaagtaggggacttgttcgaaaatgcagatttgggagaagacgaggaagaagaattagcattaatggatgaaccggaacaagaaccagaagaagacgatgaatttgatgtgtcttaa

SEQ ID NO: 491530 - DNA, 1065 bp, Shigella sonnei
atggagattaaatttgctcgtgagttcaccgatgttaagccgcgtcgattggaaggattgctgagagttgaatcggaagttcagattaaatgcggtgaattgaattacacatacaatggttttgttgtatcggataataggccatcttctatgcgtctctcactgacatgtaatgaacataacgagacatggaatactacagaagcaagagcattattgaagaatggtcaaagcggttgtagtgagtgttatgctcataagagatcggcaggtgggaagactacaccaaaagaaaagataatggctaagattgacgagcaatgtcagaaatataatgtggtatgtactggcgttgaatttggcgagtatgtcaatcaaaactgtatggtgaaattatcttgtgcttgttgtggggatgatttaggaacaactaagttttattcttttatagagcgcggtcgtgtgtgtcgtgaatgtagtaaagctaagacgagagctaaagaagaagccgagaagattgctagattaaatggtcgtgttgatgaggtgtataaccaaatcgtcgagcgtaacaatgagacaggatttattcttagggagattgttggtgatatgcaaggttcgaactttattatcagacaacgttgccctatccataatcataattttagcgtgacgtggcgtagttttaaaggcggtactaagggttgcaaatactgtaacactagcgcgtttaggactgacattcctgtgtatttctatatccagtcgctagatgatcgttatattaaatttggtgtgactaatcgtaaggttgagcgccggatgattgagcaacaaagagaatcggtattcacacataggctgatcaagtctttccgattcagtaaaggggaacatgcatctaagctagagaagctcataaagactaagtatgaatgcggtgttgttagtcgagatgatatgcgagacggttacactgaaacactaccatttgaagcattgccagagatcatcactatcaccaacaaaatgataagcgaaagtatcctcgtaagtaattga

SEQ ID NO: 491531 - DNA, 414 bp, Shigella sonnei
atgatcatccactttactttaaatggcgcgcctcaggagctaaccgttaatccaggcgaaaacgtgcaaaagctgttgtttaacatgggaatgcactctgtacgcaacagtgatgatggcttcgggtttgccggttctgacgcaataatctttaacggtaatatcgttaacgcgtccttgcttattgccgcacagttagagaaggcagatattcgtaccgcagaatctctgggtaaatggaacgagttaagtctggttcaacaggcaatggttgatgttggcgtggtgcagtctggttataacgatccagctgcagctctgattatcaccgatcttctcgatcgcatcgccgcacctacccgcgaagagatcgacgacgcgctttctggtttgttcagccgcgatgcaggctga

SEQ ID NO: 491532 - DNA, 489 bp, Shigella sonnei
atgtcgaaaaaaacggccggcgggaggaatacggcgcgctacctgggtcgttatctgaagaagccgccgatagcggcctcccggctggcacattacaacggaggggcgagcctgagcttccgttacctggaccacaaaacgggagaaacggcgacggaaacgctgacacagcgtgagctggtcgcgaggctgaaacagcacatcccggagaagttttttaagatggtgaggtacttcgggttccttgccaaccgggtgtgtggagagaagctgccgcaggtgtaccgtgctctggggatggataaaccggaaccagtggcgaaagtgtgctatgcacaaatggtgaaacagttcctgagtcgtgacccgttcgaatgcgtgctgtgtggcggccggatggtataccgccgggccattgcggggctgaatgtggaggggctgaagaaaaacgcgcgggatatcagtctgctgaggtatatgccggcctga

SEQ ID NO: 491533 - DNA, 276 bp, Shigella sonnei; identical to SEQ ID NO: 484087

SEQ ID NO: 491534 - DNA, 285 bp, Shigella sonnei
atgtacatgcggatgccagttgagacgacggccatacgtgtggatggcgcagaagataccgggttcctgcccccgtttccgggcggcatacagcagattctccaccgccagacggcacacgtcattcagcagccaccggttgctttcgaacaccggccacagcgtgtccggcagggtgaagaccagatgtacccagtcgcagtcaggaagacgattcagctgtgtcgctatccacaggtctgtggccttttttccgcaggacgggcaggcacggctgccgcatga

SEQ ID NO: 491535 - DNA, 252 bp, Shigella sonnei; identical to SEQ ID NO: 485878

SEQ ID NO: 491536 - DNA, 276 bp, Shigella sonnei; identical to SEQ ID NO: 487938

SEQ ID NO: 491537 - DNA, 276 bp, Shigella sonnei; identical to SEQ ID NO: 487938

SEQ ID NO: 491538 - DNA, 231 bp, Shigella sonnei
atggaaacttgttttaagatccttcagctcaagttcgataagaagctgactaaccgttgtatcggactgacgttacacatcagcgcctcaaccgtttttgaggttcttgcccgcttcaaagcctcttctctgtcatggccattacctgcggatatatcccatgacacgctggagaaactcattttcccgcccaaagacacctctgcgtcagagcttgttatgcctgactga

SEQ ID NO: 491539 - DNA, 210 bp, Shigella sonnei; identical to SEQ ID NO: 462553

SEQ ID NO: 491540 - DNA, 420 bp, Shigella sonnei
atgcttgaaaaactgacattacttgtgggactcatatggtataaagatggaaatgcattatacatatatgactctggagaattaataagcaaagttattttgctggagaatatatcacttaattatcttattcagtatctgaaggatgctaacctttatgatcacagatatcctataagaggaaatattagtgataaaacattctatatatctggtcctccggcattggttgaactggtagctaatacagcaactttgcttgataagcaggtttcttctattgggacagataaagttaattttggggttataaaattaaaaaatacatttgttagtgacagaacttataatatgagaggggaggatattgtcatcccaggggtggctactgttgtagaacgtttattggtaaggctctga

SEQ ID NO: 491541 - DNA, 1002 bp, Shigella sonnei
atgccaccctttaatattacacagaaagtatctgaggatagtaatgacttttcatttagttcagttaccaatagttctatattagaggatgtatcacttattgcatatccagaaaccaattctatattagtcaaaggtaatgatcagcaaatacagattattcgcgatattatcactcagttagatgtagccaaacgacatatagaattatcattatggataatcgatattgataaatctgaattaaataaccttggtgttaattggcaaggaacggcttcatttggtgattcgtttggtgcgtcatttaatatgagctcatcagcatcgataagcactttggacggcaataagtttattgcttcagttatggcattaaatcagaaaaagaaagcaaatgtagtttcaaggccggtgattttgacacaagagaatattccggctatatttgataataacaggactttttatgtgtcattagttggtgagcgcaattcttcgttggagcatgttacgtatggaacattgataaatgttatacctcgcttttcatctcggggacaaattgagatgtctttaacgatagaggatggaacaggaaatagtcagtcaaattacaattataataatgaaaatacatctgtccttccagaagttggaaggaccaaaatcagtacaatagcgagagttccacaaggcaaaagtttgttgataggtggttatacgcatgaaacgaactctaacgaaatagtatctattccttttctctcctctattcctgtaatcggtaatgtgttcaagtataaaacaagtaatatcagtaatattgtaagggtttttctgattcaaccccgtgagataaaggagtcaagttattataatactgcagaatataaaagcctcatatctgaaagagaaatacaaaagactacacaaataatcccatctgaaactactttgctggaagacgaaaaatcattggtttcatacttaaattactaa

SEQ ID NO: 491542 - DNA, 1293 bp, Shigella sonnei
atgagctatacaaaattgctcactcaattatcttttcctaatagaatctcggggccaatcttggaaacaagtcttagcgatgtttcgattggtgagatttgtaacattcaggctggaattgaaagtaatgaaattgttgcaagagctcaggttgtaggatttcatgatgaaaaaacaatattaagcttgattggaaattctcgtggactttcacggcaaacgttgattaagcccactgcccagtttcttcatacgcaagtcggccgtggattattgggagcagtagtcaatcctttaggggaggttactgataagtttgctgttacggataacagtgaaattctttatcgacctgtagataatgctcctccgctatatagtgaaagggctgcaattgagaagccttttttaacaggtattaaggttattgattctttactcacgtgtggtgaaggacagcgaatggggatttttgcgtcagctggttgtggcaaaacttttctcatgaatatgctcattgaacatagtggtgctgatatatatgttattgggttaattggtgagcgaggtcgagaggttacagaaacggttgattatttgaaaaactctgagaaaaaaaacaggtgtgttttagtatatgcaacttcggattactcttcggttgatcgttgtaatgctgcatatatagccactgctatagccgaattttttaggactgaaggacataaagtagcgctttttattgattcattaacaaggtatgccagagcattacgtgatgtggccttagccgctggagaatcacctgccagaagaggctatccggtttcggtttttgatagcttacccagacttcttgaaaggccaggaaagttaaaggcaggtggctctattactgcattttacactgttcttttggaggatgatgattttgctgatccattagctgaagaggtaagatccattttagatggacatatatatttgagcagaaatctagcccaaaaaggacaatttcctgcaattgattccttaaaaagtataagcagggtatttacacaggttgttgatgaaaaacatcgtattatggccgctgcatttcgggagctactttctgaaatagaagagctaaggacaattattgactttggtgaatacaaaccgggggagaatgcctctcaggataaaatctacaacaaaatatctgttgttgagagttttctgaagcaagattatcgactcggttttacttatgagcagacaatggagcttattggtgaaacaattagataa

SEQ ID NO: 491543 - DNA, 630 bp, Shigella sonnei
  misc_feature (592)..(601): n is a, c, g, or t
atggcattagataatataaacctaaattttagtagtgacaaacagatagaaaaatgtgagaaactatcttcaatagataatattgatagtctcgttttgaagaagaagaggaaggttgaaattcctgagtactctttaattgcatctaactattttactattgataagcactttgaacataagcatgataaaggagaaatttatagtggcattaaaaatgcgttcgaacttagaaacgaacgagcgacatattctgatattccagaatcaatggccattaaagaaaatattttgataccagatcaagatataaaagcaagggaaaaaataaatatcggcgatatgagggggatcttttcatataataagagtggaaatgcagacaagaacttcgaaagaagtcatacttcttctgtaaaccctgataatctgctagaatctgataatagaaatggtcaaattggtttaaaaaatcatagcttgtctattgataagaatattgctgacatcatttctttactaaatggaagtgttgctaaatcatttgagctgcctgtaatgaataaaaatactgcagacataaccccatccnnnnnnnnnnatccatgtcattgcaagaaaaatcaatag

SEQ ID NO: 491544 - DNA, 288 bp, Shigella sonnei
atgtcattgcaagaaaaatcaatagttgaaaatgataaaaatgtttttcaaaaaaatagtgaaatgacttaccactttaaacagtggggggctggacattctgttagtatttcagtggagtctggttcttttgttctaaaaccgtcagatcaatttgtaggaaataaacttgacttaattttgaaacaagatgctgagggtaattatagatttgatagcagtcaacataataaggggaataaaaataatagtacaggatataatgaacagagtgaagaagaatgctaa

SEQ ID NO: 491545 - DNA, 276 bp, Shigella sonnei; identical to SEQ ID NO: 484753

SEQ ID NO: 491546 - DNA, 267 bp, Shigella sonnei; identical to SEQ ID NO: 11114

SEQ ID NO: 491547 - DNA, 669 bp, Shigella sonnei
ttgatcaccatgctggcgcgcagtgccgttggtgcacgtttgacgggatacaacacctggctgacaggaccgcgcgaagcggggcacgttgatggtcctgaagagtttcatctggttattgtcgataacgggcgttctgaggtgctggcctctgaatttcgggatgtgctgcgctgtattcgctgcggggcttgtatgaatacttgtccggcatatcgccatattggcggtcatggatatggctctatttatccagggccaattggtgcggtgatttctccgctacttggcggctataaagattttaaagatttaccctacgcctgctctttatgcactgcttgtgacagcgtgtgtccggtgcgtattccgctgtcaaaactgattttgcgtcatcgtcgggtgatggctgaaaaagggatcaccgcaaaagcagagcaacgggcgataaaaatgttcgcttatgccaatagtcatccaggattgtggaaagtcgggatgatggccggcgctcatgcggcaagctggtttatcaatggcggcaaaacaccactcaaatttggcgcgattagcgactggatggaagcacgcgatcttcctgaagctgacggagagagtttccgtagttggtttaagaaacatcaggcgcaggagaaaaagaatggataa

SEQ ID NO: 491548 - DNA, 135 bp, Shigella sonnei; identical to SEQ ID NO: 460745

SEQ ID NO: 491549 - DNA, 252 bp, Shigella sonnei
atgagtgttacagtaccgaatgatgattggacactgagttcattatctgaaacttttgatgatggaactcaaacattacaaggtgaactaacattggcactagataaattagctaaaaatccttcgaatccacagttgctggctgaataccaaagtaaattatctgaatatacattatataggaacgcgcaatccaatacagtgaaagtgattaaggatgttgatgctgcaattattcaaaacttcagataa

SEQ ID NO: 491550 - DNA, 1116 bp, Shigella sonnei
atgtctgaggcaaagaactcaaatcttgcaccattcaggttattagtgaaactcacaaacggtgtcggggatgagtttccgttatattatgggaataacttaattgttctcggacggacgatagaaacacttgagtttggaaacgacaatttcccagaaaatattattcctgtaacagatagtaaatcggatggtataatttatttgaccataagcaaagataatatctgtcaatttagtgatgaaaaaggtgagcaaattgatatcaattcacaatttaattcatttgaatatgacgggatttcttttcaccttaaaaatatgagggaggataaatcgagaggccatatactaaacggaatgtataagaaccactcggtgttttttttctttgctgttattgttgtgttaattataattttttccctctctttaaagaaagatgaagtaaaagaaattgctgaaattatagatgataagagatatggaatagtcaacactggacagtgcaattatattcttgccgaaacacaaaatgatgcggtatgggcatctgtagctttaaataaaaccggatttaccaaatgcagatatattctggtgtcaaacaaagaaataaatagaattcaacaatatatcaatcaacgattcccatttatcaatttgtatgtgttgaatttagtgagtgataaagcggaattactggtgtttttaagtaaagaaagaaatagttcaaaagataccgaacttgataaattgaaaaatgctctgattgttgaatttccgtatatcaaaaatattaaattcaactatcttagcgatcataatgcaaggggggatgctaaaggtattttcacaaaggtaaatgtccagtataaagagatttgtgaaaataataaagttacatattctgtcagagaagaactgacagatgaaaagcttgagctcattaatagactgatttctgaacataaaaatatatatggagatcagtatattgagttttctgtacttttgatagatgatgattttaaaggtaaatcatatcttaacagcaaagacagttatgtaatgttgaatgataaacactggttttttttagataaaaataagtga

SEQ ID NO: 491551 - DNA, 459 bp, Shigella sonnei
atgtcccgtttcgtatttattttgctgtgttttatcccatatttagggagagctgattgttgggataaggctggtgaaaggtacaatattccatcaagtttgttaaaagcgattgcggaaaaagaatccggatttaataaatttgcagtcaatgttaataacaatggaagtaaagattatggtataatgcaaataaatgactttcattctaaaagacttagagaaatgggatattctgaggaaatgctaattagtcatccatgtctttctgtacattatgcagcaaagttattaaatgagtttatgatgatgtatggaagagggtgggaggctgttggagcctataatgcaggaacgtctccgaaaaagaaaaaagaaagattaaagtacgcagaggatatctatagacgctatttgcggatagcagcagagagcaagcagaataatcgaaggatataa

SEQ ID NO: 491552 - DNA, 267 bp, Shigella sonnei; identical to SEQ ID NO: 11114

SEQ ID NO: 491553 - DNA, 318 bp, Shigella sonnei
atgcagacccgggataaccttgagcgcatggtggttatccaggcgtttatagcggtacgggtgctgggcctgcggcagggaggtgtcagtgaagaaacacaaaatgacagctgtgagaaaatactgacgccgacagagtggaaactactgtgggttaagctggaaggaaagccgcttccggtgcaggcaccgaccctgaaatgggcctggggcgatggcatgacagcaaactggatttgcccctatatttccagacatctgttatcacttaacccattacaagcccgctgccgcagatattcccgtggcgagcgataa

SEQ ID NO: 491554 - DNA, 156 bp, Shigella sonnei; identical to SEQ ID NO: 461908

SEQ ID NO: 491555 - DNA, 207 bp, Shigella sonnei
atgcggtatccaacccgcgaatatcagcgtgattcaccgtcggatttactgctacgtcgccctcagggaattaaacctaaaaagaaaatcgtcaaaattagagattccggtttgacacggaaagtcatatcagcgttaaccgaatgccacattgacgattctcccgatgacagcgttacgttccatattgcgatcgtgaagccatag

SEQ ID NO: 491556 - DNA, 1188 bp, Shigella sonnei
atgcttccccgttttgccgatatctttcagcagggaaaccgctggcttaactggctggagaagcagccggaaggggcagtacgtccggtggtgattgagtcggtgaccaaaatcatggcgtgcgggaccacactgatggggtatacacagtggtgctgttcatcaccggactgttgccatacaaaaaaggtctgcttccggtgtaaaagccgctcctgcccgcactgcggggtgaaggctggcgcacagtggatacagtatctgctgagcctggtccccgactgcccgtggcagcatattgtgttcacacttccctgccagtactggtccctggtgttccacaaccggtggttactgacagagatgagccgcattgcagcggatgtgatactggaaatctgccatcaggcagatgtggagtcggggatattcacggtgatccacacatgggggcgtgaccagcagtggcatccgcatatccatttatcgacaactgccggtggtgtgacgtcgggccacacctggaaaaatcttcatttttacgcccgtaaggtgatgagcatgtggcgctaccggataacacggttgctgtcacggaaataccctgacctggtgatgccggatgcgctggcagcagaaggaagcagtaaacgggaatggaatcgcttcctggacacgcattaccgccgtggctggaatgtcaacgtatcccgggtgatggataatgccacccatgtggcggtgtactttggctcttacctgaaaaagccaccagtgccgatgagtcgtctggagcattatgccggtcaggatgaaatcggtctgcgttacaacagtcaccgaacaaaacgggaagaatacctgttgatgagtggagatgagttcatggaaaggttctcctggcatgtggcggataaggggttccgtatggtgaggtactacggttttttgagtccggcgaaacggcggttactggaagaagtggtgtacatcataacggagacagtgagaaaaacggcgatgcaaatcacctggagagggatgtatcagaggttactgaaggttgacccgctgaagtgcgtgctgtgcgggagtcagatgcgttttacggggctgaagcggggctaccgtctggcagagcaggtcctgatgcatgagctgctggcccggatgcggtggtgcggctga

SEQ ID NO: 491557 - DNA, 429 bp, Shigella sonnei
atgattcgacatggtagtaataagttgaaaatatttattttaagtatattgctattaacactgagtgggtgtgctttaaagtcatcatctaattctgaaaaagaatggcatattgttcctgtaagtaaggattatttttctattccaaatgatttattatggtcgtttaatacaaccaataaaagtataaatgtttactctaaatgtattagtggtaaggcggtttatagttttaatgcaggtaaattcatgggcaactttaatgttaaggaagtagatgggtgcttcatggatgcacaaaagatagctatagataaactattttctatgctgaaagacggggttgttttaaaaggtaataagataaatgataccatccttatagagaaggatggggaagttaaattaaaattaattcgagggatataa

SEQ ID NO: 491558 - DNA, 189 bp, Shigella sonnei; identical to SEQ ID NO: 469030

SEQ ID NO: 491559 - DNA, 468 bp, Shigella sonnei; identical to SEQ ID NO: 19402

SEQ ID NO: 491560 - DNA, 516 bp, Shigella sonnei; identical to SEQ ID NO: 474713

SEQ ID NO: 491561 - DNA, 363 bp, Shigella sonnei; identical to SEQ ID NO: 490508

SEQ ID NO: 491562 - DNA, 225 bp, Shigella sonnei; identical to SEQ ID NO: 133446

SEQ ID NO: 491563 - DNA, 195 bp, Shigella sonnei; identical to SEQ ID NO: 489869

SEQ ID NO: 491564 - DNA, 327 bp, Shigella sonnei; identical to SEQ ID NO: 486130

SEQ ID NO: 491565 - DNA, 1533 bp, Shigella sonnei; identical to SEQ ID NO: 484646

SEQ ID NO: 491566 - DNA, 480 bp, Shigella sonnei; identical to SEQ ID NO: 464934

SEQ ID NO: 491567 - DNA, 426 bp, Shigella sonnei; identical to SEQ ID NO: 236421

SEQ ID NO: 491568 - DNA, 267 bp, Shigella sonnei; identical to SEQ ID NO: 11114

SEQ ID NO: 491569 - DNA, 279 bp, Shigella sonnei; identical to SEQ ID NO: 11573

SEQ ID NO: 491570 - DNA, 267 bp, Shigella sonnei
atgttggggcttgaaccgaagagcacggcggtgcggagtccggagagtaacggaatagcagagagcttcgtgaaaacgataaagcgtgactacatcagtatcatgcccaaaccagacgggttaacggcagcaaagaaccttgcagaggcgttcgagcattataacgaatggcatccgcatagtgcgctgggttatcgctcgccacgggaatatctgcggcagcaagccagtaatgggttaagtgataacaggtgtctggaaatatag

SEQ ID NO: 491571 - DNA, 210 bp, Shigella sonnei
atgacggatggctggccgctgtatgaatcccgcctgaagggaaagctgcacgtaatcagcaagcgatatacgcagcgaattgagcggcataacctgaatctgaggcagcacctggcacggctgggacggaagtcgctgtcgttctcaaaatcggtggagctgcatgacaaagtcatcgggcattatctgaacataaaacactatcaataa

SEQ ID NO: 491572 - DNA, 210 bp, Shigella sonnei; identical to SEQ ID NO: 491571

SEQ ID NO: 491573 - DNA, 210 bp, Shigella sonnei; identical to SEQ ID NO: 491571

SEQ ID NO: 491574 - DNA, 210 bp, Shigella sonnei; identical to SEQ ID NO: 491571

SEQ ID NO: 491575 - DNA, 210 bp, Shigella sonnei; identical to SEQ ID NO: 491571

SEQ ID NO: 491576 - DNA, 210 bp, Shigella sonnei; identical to SEQ ID NO: 491571

SEQ ID NO: 491577 - DNA, 210 bp, Shigella sonnei; identical to SEQ ID NO: 491571

SEQ ID NO: 491578 - DNA, 210 bp, Shigella sonnei; identical to SEQ ID NO: 491571

SEQ ID NO: 491579 - DNA, 210 bp, Shigella sonnei; identical to SEQ ID NO: 491571

SEQ ID NO: 491580 - DNA, 210 bp, Shigella sonnei; identical to SEQ ID NO: 491571

SEQ ID NO: 491581 - DNA, 210 bp, Shigella sonnei; identical to SEQ ID NO: 491571

SEQ ID NO: 491582 - DNA, 210 bp, Shigella sonnei; identical to SEQ ID NO: 491571

SEQ ID NO: 491583 - DNA, 210 bp, Shigella sonnei; identical to SEQ ID NO: 491571

SEQ ID NO: 491584 - DNA, 210 bp, Shigella sonnei; identical to SEQ ID NO: 491571

SEQ ID NO: 491585 - DNA, 210 bp, Shigella sonnei
atgacggatggctggccgctgtatgaatcccgcctgaagggaaagctgcacgtaatcagcaagcgatatacgcagcgaattgagcggcataacctgaatctgaggcagcacctggcacggctgggacggaagtcgctgtcgttctcaaaatcggtggagctgcatgacaaagttatcgggcattatctgaacataaaacactatcaataa

SEQ ID NO: 491586 - DNA, 210 bp, Shigella sonnei; identical to SEQ ID NO: 491571

SEQ ID NO: 491587 - DNA, 210 bp, Shigella sonnei; identical to SEQ ID NO: 491571

SEQ ID NO: 491588 - DNA, 210 bp, Shigella sonnei; identical to SEQ ID NO: 491571

SEQ ID NO: 491589 - DNA, 210 bp, Shigella sonnei; identical to SEQ ID NO: 491571

SEQ ID NO: 491590 - DNA, 210 bp, Shigella sonnei; identical to SEQ ID NO: 491571

SEQ ID NO: 491591 - DNA, 861 bp, Shigella sonnei
atgatcatccactttactttaaatggcgcgcctcaggagctaaccgttaatccaggcgaaaacgtgcaaaagctgttgtttaacatgggaatgcactctgtacgcaacagtgatgatggcttcgggtttgccggttctgacgcaataatctttaacggtaatatcgttaacgcgtccttgcttattgccgcacagttagagaaggcagatattcgtaccgcagaatctctgggtaaatggaacgagttaagtctggttcaacaggcaatggttgatgttggcgtggtgcagtctggttataacgatccagctgcagctctgattatcaccgatcttctcgatcgcatcgccgcacctacccgcgaagagatcgacgacgcgctttctggtttgttcagccgcgatgcaggctggcaacaatactatcaggtcattgaactggcggttgcacgtaaaaataatccgcaggccaccattgatatcgctccgactttccgtgacgaccttgacgtcattggcaagcattatcctaaaactgatgccgcgaaaatggtgcaggcgaaaccctgctatgttgaagactgcgtaacggctgacgcctgcgtcattaaaatgttacgtagcccacacgctcacgcactgattactcatctggatgtcagcaaagctgaagccttaccgggcgtcgttcacgttattactcacctgaattgccctgatatctactataccccgggggtcagagcgcaccggaaccgtcaccgcttgaccgccgtatgttcggcaagaaaatgcgtcacgtcggcgatcgtgttgctgcggtcgtcgcagaaagtgaagaaattgcgctcgaagcactga

SEQ ID NO: 491592 - DNA, 210 bp, Shigella sonnei
atgacggatggctggccgctgtatgaatcccgcctgaagggaaagctgcacgtaatcagcaagcgatatacgcagcgaattgagcggcataacctgaatctgaggcagcacctggcacggctgggacggaagtcgctgtcgttctcaaaatcggtggaactgcatgacaaagtcatcgggcattatctgaacataaaacactatcaataa

SEQ ID NO: 491593 - DNA, 378 bp, Shigella sonnei; identical to SEQ ID NO: 476066

SEQ ID NO: 491594 - DNA, 417 bp, Shigella sonnei; identical to SEQ ID NO: 490345

SEQ ID NO: 491595 - DNA, 210 bp, Shigella sonnei; identical to SEQ ID NO: 491571

SEQ ID NO: 491596 - DNA, 210 bp, Shigella sonnei; identical to SEQ ID NO: 491571

SEQ ID NO: 491597 - DNA, 210 bp, Shigella sonnei; identical to SEQ ID NO: 491571

SEQ ID NO: 491598 - DNA, 210 bp, Shigella sonnei; identical to SEQ ID NO: 491571

SEQ ID NO: 491599 - DNA, 210 bp, Shigella sonnei; identical to SEQ ID NO: 491571

SEQ ID NO: 491600 - DNA, 210 bp, Shigella sonnei; identical to SEQ ID NO: 491571

SEQ ID NO: 491601 - DNA, 210 bp, Shigella sonnei; identical to SEQ ID NO: 491571

SEQ ID NO: 491602 - DNA, 210 bp, Shigella sonnei; identical to SEQ ID NO: 491571

SEQ ID NO: 491603 - DNA, 210 bp, Shigella sonnei; identical to SEQ ID NO: 491571

SEQ ID NO: 491604 - DNA, 210 bp, Shigella sonnei; identical to SEQ ID NO: 491571

SEQ ID NO: 491605 - DNA, 210 bp, Shigella sonnei; identical to SEQ ID NO: 491571

SEQ ID NO: 491606 - DNA, 210 bp, Shigella sonnei; identical to SEQ ID NO: 491571

SEQ ID NO: 491607 - DNA, 210 bp, Shigella sonnei; identical to SEQ ID NO: 491571

SEQ ID NO: 491608 - DNA, 210 bp, Shigella sonnei; identical to SEQ ID NO: 491571

SEQ ID NO: 491609 - DNA, 210 bp, Shigella sonnei; identical to SEQ ID NO: 491571

SEQ ID NO: 491610 - DNA, 210 bp, Shigella sonnei; identical to SEQ ID NO: 491571

SEQ ID NO: 491611 - DNA, 210 bp, Shigella sonnei; identical to SEQ ID NO: 491571

SEQ ID NO: 491612 - DNA, 210 bp, Shigella sonnei; identical to SEQ ID NO: 491571

SEQ ID NO: 491613 - DNA, 210 bp, Shigella sonnei; identical to SEQ ID NO: 491571

SEQ ID NO: 491614 - DNA, 210 bp, Shigella sonnei; identical to SEQ ID NO: 491571

SEQ ID NO: 491615 - DNA, 210 bp, Shigella sonnei; identical to SEQ ID NO: 491571

SEQ ID NO: 491616 - DNA, 210 bp, Shigella sonnei; identical to SEQ ID NO: 491571

SEQ ID NO: 491617 - DNA, 210 bp, Shigella sonnei; identical to SEQ ID NO: 491571

SEQ ID NO: 491618 - DNA, 210 bp, Shigella sonnei; identical to SEQ ID NO: 491571

SEQ ID NO: 491619 - DNA, 210 bp, Shigella sonnei; identical to SEQ ID NO: 491571

SEQ ID NO: 491620 - DNA, 210 bp, Shigella sonnei; identical to SEQ ID NO: 491571

SEQ ID NO: 491621 - DNA, 210 bp, Shigella sonnei; identical to SEQ ID NO: 491571

SEQ ID NO: 491622 - DNA, 210 bp, Shigella sonnei; identical to SEQ ID NO: 491571

SEQ ID NO: 491623 - DNA, 210 bp, Shigella sonnei; identical to SEQ ID NO: 491571

SEQ ID NO: 491624 - DNA, 210 bp, Shigella sonnei; identical to SEQ ID NO: 491571

SEQ ID NO: 491625 - DNA, 210 bp, Shigella sonnei; identical to SEQ ID NO: 491571

SEQ ID NO: 491626 - DNA, 210 bp, Shigella sonnei; identical to SEQ ID NO: 491571

SEQ ID NO: 491627 - DNA, 570 bp, Shigella sonnei; identical to SEQ ID NO: 485859

SEQ ID NO: 491628 - DNA, 210 bp, Shigella sonnei; identical to SEQ ID NO: 491571

SEQ ID NO: 491629 - DNA, 210 bp, Shigella sonnei; identical to SEQ ID NO: 491571

SEQ ID NO: 491630 - DNA, 210 bp, Shigella sonnei; identical to SEQ ID NO: 491571

SEQ ID NO: 491631 - DNA, 210 bp, Shigella sonnei; identical to SEQ ID NO: 491571

SEQ ID NO: 491632 - DNA, 210 bp, Shigella sonnei; identical to SEQ ID NO: 491571

SEQ ID NO: 491633 - DNA, 210 bp, Shigella sonnei; identical to SEQ ID NO: 9340

SEQ ID NO: 491634 - DNA, 210 bp, Shigella sonnei; identical to SEQ ID NO: 491571

SEQ ID NO: 491635 - DNA, 210 bp, Shigella sonnei; identical to SEQ ID NO: 491571

SEQ ID NO: 491636 - DNA, 474 bp, Shigella sonnei; identical to SEQ ID NO: 488161

SEQ ID NO: 491637 - DNA, 1167 bp, Shigella sonnei; identical to SEQ ID NO: 487978

SEQ ID NO: 491638 - DNA, 585 bp, Shigella sonnei
ttgtcgaacttactctcgaagaaagcctctgtttttgtctctgatttactacgcgaagctaaagccaatgaactggatgaacctctttcaacaacgaggttgaaccacctcatagataaaggttatgaaagaataacgttacagcttgatttagggggagaatccccaggttatctggaaaaagataaacattacagagaagccgatgcggctttacttaatgttatttatcctgcaaatcttgcaaagataaacaccagaagaaaagagcaggttctaaaaatagttaaaaaactagcaggtccgtatggtataaaaagatacgagaaggataattatcagtcggcaaatttttggttcaatgatattaaaaccgataccgatcaaaattcacatgcgaaaagagatggatttgcccctatatttccagacatctgttatcacttaacccattacaagcccgctgccgcagatattcccgtggcgagcgataacccagcgcactatgcggatgccattcgttataatgctcgaacgcctctgcaaggttctttgctgccgttaacccgtctggtttgggcatga

SEQ ID NO: 491639 - DNA, 486 bp, Shigella sonnei; identical to SEQ ID NO: 487387

SEQ ID NO: 491640 - DNA, 582 bp, Shigella sonnei
ttgaaacgtgaacatcttattccactggccatgctgggcggctggtgtgtattcgtactgttcatatccctggcggggttgcgtcagatgagcacatggcctgcacatgaccggatcgtcatgttgctcatgatgttcaccaccatgtgccttcccctgctgttacgcccgctgtccgcgttctttcgcaaaatatgcaggcagaacagcttttatgaccgggagctgccggacaatcacacggtccatattttcctgagtgcacacgccgacacgtcctccccggtggccatgcgtcgccactggaaagtgctgaacgaactgctgaccaccgcattacgccagggcaaacgagtctcgatgacatcacatctcctgacgcaaccccggacggacaaactggttcgtgccctgcagaagcaggggctggaggtttctgtgaaacgggatgagtgccccacaccggctttcgaacgctggaccatcaccgccagctggaccatcagccagtggaagattccccacgtaaacagacgcagcggcattgtcatcctgacgccggagagctggcgtcagccataa

SEQ ID NO: 491641 - DNA, 255 bp, Shigella sonnei; identical to SEQ ID NO: 386079

SEQ ID NO: 491642 - DNA, 696 bp, Shigella sonnei
atgaatataaattccttaccatcccccgaaataaaagacaccgatgttttcattaccgtcataaccgttctggtgatatttactgcagcattaatcccgtcgactcccccgcccccggaagtgcaggaaacatttgatgccgtttattatgcatccctgcctgcacttacgcccgtcatcctgcagggatggcagttctgctgctccgtgtttgacaagacgccggggagacaggagttatcaccagtagtgagaacagtgaatctgcatcttgcactggccccatttctgataaacgtgatatctgcgctcgtttttttcggctgcatcgcagattgcgtcgtcatttttattcacggtcatgaaccttcagcccggggaattattcttcccggcgctgttgccctttgcctgggttatatattttctgtgtacagattgtacgcctcgtcccatgtacagaacggcagacacgtgacactgctcatcatgctttgctgtctgacagcctgtttatcgctggcaattattgcaggccgacaggacattttttccggagcagaaagagaaagcctgctgcgtatcatagtctcgggattatgcttcacgttttgcctgctcatcggatacacccatctctggcttaattcatcagtcccccatctggaacaggaggatctgaaaaaccgccgataa

SEQ ID NO: 491643 - DNA, 471 bp, Shigella sonnei
atgccttttgccgtactcgcactggccatcgtgatgacattcttcacgatcctttcatacgaaaccgggaaacaggccacccgcacggaagagcgcgtgctgaaacgggaggcagatgacgtcgcctcacagatgatgtcgctgagtcaggccctgacgcactggcggtggaagaatccgtccgccaccgccttaccggctgtcagcacactcggactgccgttctccacaccggactcgcgtatagggtatgcactcagtggcggacgcctgtgggtctggtctgcagaagacagcacccccggtctggcggcccgtctcacgacactcacactcggctccggcctccttttccgattcagcaacggcaccctgaaggacatgcagggcaacaccgtcagcacctccggtctgaccctaccctctgccctgcagtccacttcaggcacccggctggttcacctcaattaa

SEQ ID NO: 491644 - DNA, 252 bp, Shigella sonnei
atggctgcgagtaatacgactgcacatagcccccatgttgctacagatatcccccagacggaacgtttccagaaaggggcgggtttctcttcgggttcaccgaagctgccggtttcatctatttctgtttcaggtttcattatggtgtctccggttgttcatcataccgacgttgcatcacagcttttctttgctccatggctgtctgcattcgtgcctgcgagcgttgttccgtctgtgatgtacgattaa

SEQ ID NO: 491645 - DNA, 813 bp, Shigella sonnei
atgaataattctattaaccataaatttcatcacattagccgggctgaataccaggaattgttagccgtttcccgtggcgacgctgttgccgattatattattgataatgtctctattctcgacctgatcaatggcggagaaatttccggcccaattgtgattaaaggacgttacattgccggtgttggcgcagaatacgctgatgctccggctttgcagcggattgatgctcgcggcgcaacggcggtgccagggtttattgatgctcacctgcatattgaatccagcatgatgacgccggtcacttttgaaaccgctaccctgccgcgcggcctgacgaccgttatttgcgaccctcatgaaatcgtcaacgtgatgggagaagccggattcgcctggtttgcccgctgtgccgaacaggcaaggcaaaaccagtacttacaggtcagctcttgcgtacccgccctggaaggctgcgatgttaacggtgccagttttacccttgaacagatgctcgcctggcgggaccatccgcaggttaccggccttgcagaaatgatggactaccctggcgtaattagcgggcagaatgcgctgctcgataaactggatgcatttcgccacctgacgctggacggtcactgcccgggtttgggtggtaaagaacttaacgcctatattactgcgggtattgaaaactgccacgaaagttatcagctggaagaaggacgccggaaattacaactcggcatgtcgttgatgatccgctgcccgcaatctcaacgcgctggcaccgttgatcaacgaatttaa

SEQ ID NO: 491646 - DNA, 873 bp, Shigella sonnei
gtggcggccctgaaccagacctcatttactgaacgcatataccgtcaggtaaagaacccgaatccggtgtttacaccccgtaaaggtgccggaacgctgaagttttgcgaaaaactgatggaaaaggcggtgggcttcacctcccgttttgatttcgccattcatgtggcgcatgcccgttcgcgtggtctgcgtcgacgcatgccaccggtgctgcgtcgacgggctattgatgcgctgctgcaggggctgtgtttccactatgacccgctggccaggcgcgtccagagttccatcaccacgttggccattgagtgcggactggcgacagagtctgctgccggaaaactctccatcacccgtgccacccgtgccctggcgttcctgtcagagctggggttgattacctaccagacggaatatgacccgcttatcgggtgctacattccgaccgatatcacgttcacaccggcactgtttgctgccctcgatgtatcagaggaggcagtggccgccgcgcgccgcagccgtgtggaatgggaaaacagacagcgcaaaaagcaggggctggataccctgggcatggatgaactgatagcgaaagcctggcgttttgtgcgcgagcgtttccgcagccgtcaggcagagctcagggcgcacggcctgaaacgtgcccgtgcacgtcgtgacgcggacaggacccgccaggacatcgtcaccctggtgaaacggcagctgacgaaggaaattgcagccggacgcttcacggcgaatcttgcggccgtgaaacgcgaaatcgatcgccgcgtgaaggagcgcatgataatgtcgcggaacagcaactacacgcgtctggccacgtcgcctccctga

SEQ ID NO: 491647 - DNA, 432 bp, Shigella sonnei
atgacggctggcgcgcttttcttccatcagttcattgacaatatcggaaacaactctgtcacatgcgccatatacaaaagcatcgtccagccgctgcatgacggtttccagctcatcgtctggcaggttccagtcctgggctatgtgacgcacatccccacgggtcagcaccacggcaaaaacgcattcactgtccggcacgtctgtatccagtacatcgcggatgatttctttaacagtacagtacatgttctcgtctcctttacaggggcggcattgccgccccgtccgttaatcagtcaagtgccgcgtaaatcgcgttgcattcggggtgaaattcgatgtggctccacaactgcgcatcacgcatcctgtacaggtgtgtcaaccctgcatccccgctgtcgtggtacagccacaactggcggttaa

SEQ ID NO: 491648 - DNA, 348 bp, Shigella sonnei
atggcaggaaagaaatttttttccgatgacgatattgaagcggcacgtcttgcactctctgaactccctgacctgaccgcaaaacgtaaaacactgcatgattttctgtccgcaatccgggatgacatcatcgtcctggtcaggacaaaaggttacaccattgctgacatcagaagtacactgaaggaagccggttatgaggtaggggaaaagacactgagggatatcatccgtgaagccgaagcgaagaaaacccgccgccgttccggcacagcttcagcgaaggtaaaggtagcactttctcatactgattcacaggatgacgtaacggtatcgccagaacagtga

SEQ ID NO: 491649 - DNA, 318 bp, Shigella sonnei
atgaaaatgtcatcaggatgtacccgtattctcattgcagcagccattatgggttgctcagccatggcatctgccgcaccacaaccggcaccgtctgccggacaattgccgccgccatgtccggaacgactggcaccaccaccggcacaaccaccgctctatgccttatcacagcagaccaccacaccggcagaaacactgagcacggtggtgaaaaatattcctgccgtggaaaaagggaagaagtatgaaatccgcgtggaagttcgtgaagtgacaccaccaccggcaccggatatggatgcaccaaatccttaa

SEQ ID NO: 491650 - DNA, 153 bp, Shigella sonnei
atgttcactgcctgcacggtgcagaaaaaagccctggcgggggatgccagggtgacaaatgtcatgtatctacacttcacagagatattttcgttcgttactcgtatcagtcagggtaatggcatcatacctgccattcatgtgccgtcttaa

SEQ ID NO: 491651 - DNA, 1008 bp, Shigella sonnei
atgggggcatacaagactcaattacagaactccacatatactccaacgataggaacgataacaactcaagatgaaagtaatgcagctaatagcacagacccacaaagtgtggtcatgaaaagtatagcgccaaccatattaaaatggacaaaccaagctgctactgaatggtcaggaacaggaacaaccagcaaccaagttaacccattaattaagatgaaaaacatcggcgattatacattgggtacaacagaaattctctggacaggatatacaactgtcagagttctcgcgacaatgggtgataactctattttcggaaaggctgttaatttgttctctggattacctaaaggatttgttgctctgctggatgctgcagctcccccaatatatttcttgttgttcctgttgttttgtgcgggtttttccttatcaatttacctaccatttataccattcattttctggatgacaggcattgggaactggatagtaagcgtattaataggatgcaccgccgggcctctgtgggcagcaacacatctaggaacatcagaggacagaggaagtcgagcagcttacggatatatatacttaattgacagcatgataagaccacctctcatggtattcggtttcttttttgcctctgtcgccatcattgccgtcggcacaatattaaactcactgtttggcgcagcactagttaacgtacaggtaaaatcattaacagggatattcagccttgccgggttcctgctaatttacgcccgtatgtgtacaacgtctgtagctgcaatatttgctttacaagcatatcttcctgaccatgttatcaatttcttgggtggtagagatggtgtaaatactcttggcaacctcacctcatcagtaaaagatatttttgcaggttctaatagaaatattagacacagccctggagttagagaggacagactaaaaaatgtcacaaaggatgataataaagatggaataaaaggataa

SEQ ID NO: 491652 - DNA, 1167 bp, Shigella sonnei; identical to SEQ ID NO: 487978

SEQ ID NO: 491653 - DNA, 300 bp, Shigella sonnei
gtgcgccagcagctgcctgtcggagtcgggcctgacgaccggatgccgccaggcagccgggagccgaaggtgtccccgcccccgggagtcagaacaacagaaacgacaaaacagaaaaatgcctcacactatgacaggcaggaagggcagcgccgcaggcgcggccctcctgcatttcaggcaggcgtcagcctgccagggctttccggcggcccggcaggccatacccccgccggagcggggagtaaatcaccgacggaacacatgaccgtcaataaaggtgaaggagtccaggaataa

SEQ ID NO: 491654 - DNA, 177 bp, Shigella sonnei; identical to SEQ ID NO: 79093

SEQ ID NO: 491655 - DNA, 147 bp, Shigella sonnei
atgtcgatggaaactggcatggcctggattcgctggcagggtagtacctgggctgtcagagaaggtcagactctgggcaatgtggtgatccagcggattgatccgacgacccggaccatcatcaccagtgcagggacgttacgctga

SEQ ID NO: 491656 - DNA, 147 bp, Shigella sonnei
atgtcgatggaaactggtatggcctggattcgctggcagggtagtacctgggctgtcagagaaggtcagacgctgggcaatgtggtgatccagcggattgatccgactacccggaccatcatcaccagtgcagggacgttacgctga

SEQ ID NO: 491657 - DNA, 207 bp, Shigella sonnei; identical to SEQ ID NO: 488007

SEQ ID NO: 491658 - DNA, 366 bp, Shigella sonnei; identical to SEQ ID NO: 10065

SEQ ID NO: 491659 - DNA, 381 bp, Shigella sonnei; identical to SEQ ID NO: 458903

SEQ ID NO: 491660 - DNA, 153 bp, Shigella sonnei; identical to SEQ ID NO: 38791

SEQ ID NO: 491661 - DNA, 468 bp, Shigella sonnei; identical to SEQ ID NO: 490364

SEQ ID NO: 491662 - DNA, 930 bp, Shigella sonnei; identical to SEQ ID NO: 490898

SEQ ID NO: 491663 - DNA, 189 bp, Shigella sonnei; identical to SEQ ID NO: 463227

SEQ ID NO: 491664 - DNA, 525 bp, Shigella sonnei; identical to SEQ ID NO: 488160

SEQ ID NO: 491665 - DNA, 336 bp, Shigella sonnei; identical to SEQ ID NO: 485290

SEQ ID NO: 491666 - DNA, 243 bp, Shigella sonnei
atgcttcccatcgataatctttggatcgttttttcccatttctgcagcatcggcaacttcgtagcccagctcgtcaagggtctccataatgactttgaaagttttacccttatcatggctcttcagatttttgacattttccagcacaaaaattgccggtttttttgctcgtataatacgtgccacgtcaaaaaaaagtgttccttgtgcttcacattcaaaaccatgcgcacgaccaagtga

SEQ ID NO: 491667 - DNA, 588 bp, Shigella sonnei; identical to SEQ ID NO: 486977

SEQ ID NO: 491668 - DNA, 303 bp, Shigella sonnei
atgacggtcagatattatatcagttctgctgatttaaccgcagagaagttcgccacagcaatccgaaaccactggcacgtggagaataagctgcactggcgtctggacgtggtaatgaatgaagacgactgcaaaataagaagaggaaatgcagcagaattattttcagggatacggcacatcgctattaatattttgacgaatgataaggtattcaaggcagggttaagacgtaagatgcgaaaagcagccatggacagaaactatctcgcgtcagtccttgcggggagcggactttcgtaa

SEQ ID NO: 491669 - DNA, 276 bp, Shigella sonnei; identical to SEQ ID NO: 487394

SEQ ID NO: 491670 - DNA, 276 bp, Shigella sonnei; identical to SEQ ID NO: 484087

SEQ ID NO: 491671 - DNA, 819 bp, Shigella sonnei
atggcgaagcccttcggcacccacgctgaagtccacggtctgcgtttccagcagttctgttttaatcagccacagcccggcgcggtgtgcctgcccccggctggtacagccaaaagcatccatcttcgtgacgttacgaccgtaacgggcaatggcctgcgtgtcctccacaagctctgtcgccgtctcccagccgttattcgggtcaatccagttcacctcaacggcattatggcggtccttcagggcgctgaagctgtagcggaacggcgcaccatcatccggcatcaccacattactgcggttataggtccacaccttatccgacggtcggtcctgcacgaacgtcagcgtctgcccgttccataccggcatacagcgcatcgcagagcagaaatcactgagcacatcccacgccttgcgctgtgtggtcaggtacgcattacaggtgatgcgcggctccgtgccgccaaaaccgtccggcaccgactgatcgcaatgctggccgatgacatacagcgcccatttgtccacatccgccgcaccaagacgtttccccatgccgtagcgcggatgggtcagcatatcccacagacaccaggccatgttgttgctgtatgctggcttaaacgttccgtcccagataccgctgtattgccgcgtctgcgggttatagttcgacggcacctgcagaatgcgcccgcgaagatgataattacggctcacctgctggctgccgaactgctccgaatccacctgtacgccgaccagtgccgtattcgggtagcactgtttcacatcgatgatttcggtgtatga

SEQ ID NO: 491672 - DNA, 201 bp, Shigella sonnei; identical to SEQ ID NO: 488102

SEQ ID NO: 491673 - DNA, 297 bp, Shigella sonnei; identical to SEQ ID NO: 488888

SEQ ID NO: 491674 - DNA, 582 bp, Shigella sonnei; identical to SEQ ID NO: 490383

SEQ ID NO: 491675 - DNA, 486 bp, Shigella sonnei
atgccgggcaactgcacgcattatgggcgttggcctcaacacgattttacgtcacttaaaaaactcaggccgcagtcggtaacctcgcgcatacagccgggcagtgacgtcatcgtctgcgcggaaatggacgaacagtggggctatgtcggggctaaatcgcgccagcgctggctgttttacgcgtatgacagtctccggaagacggttgttgcgcacgtattcggtgaacgcactatggcgacgctggggccaccctttgacgtggtgatatggatgacggatggctggccgctgtatgaatcccgcctgaagggaaagctgcacgtaatcagcaagcgatatacgcagcgaattgagcggcataacctgaatctgaggcagcacctggcacggctgggacggaagtcgctgtcgttctcaaaatcggtggagctgcatgacaaagtcatcgggcattatctgaacataaaacactatcaataa

SEQ ID NO: 491676 - DNA, 228 bp, Shigella sonnei; identical to SEQ ID NO: 488164

SEQ ID NO: 491677 - DNA, 510 bp, Shigella sonnei; identical to SEQ ID NO: 483719

SEQ ID NO: 491678 - DNA, 207 bp, Shigella sonnei
gtgaagaaattactggtaaccgcaaagctctttaatggaagaatcccgttccagattttacagcgtggtcgtgttctggctgaaggtacattcagtggtaaatgcacggaatgttattcacgaatatatgaagtggatgccacggatgaagatataaccgttgagtgtgatgccgggattgtatcggccacattgcttcatgggtga

SEQ ID NO: 491679 - DNA, 201 bp, Shigella sonnei
atgaattaccaactggcaaaactttatcgtggtaaacatttcgcagggtatgggattgcagttaatggtgagttactggaaggacagctttccgccaggacagagtcacgcggaggcgagccaccaacagtcactgtgactttcagactgacagcagaacatatcgagaatcagcctgtcattaaactgaacagggtatga

SEQ ID NO: 491680 - DNA, 183 bp, Shigella sonnei
atgtttctgataattctcgcgccactggtgggcgtgctgggtgcgcttttgctggcgtatggtgcctggctgatttatcccccggcgggttttgttgttgccggggcgctgtgcctgttctggtcgtggctggtggcgcgatatctcgaccgtacacagccgtctgtcggcggaggtaaatag

SEQ ID NO: 491681 - DNA, 1242 bp, Shigella sonnei
gtgttcttttcgggattatttcaacgaaaaagtgacgcgccggtgaccacgccagcagagctggcggatgctatcgggctgtcatacgacacctataccggaaagcagatcagcagccagcgggccatgcgactgacggcggttttttcctgcgtcagggtgctggcagagtcggtcgggatgttgccctgcaatctgtatcacctgaacggcagcctgaaacagagagccaccggcgaacgtctgcataagctgatctccacgcatcccaatggatatatgacgccgcaggagttctgggagctggtggtcacctgtctgtgcctgaggggaaacttttacgcctacaaagtgaaagcatttggcgaagtggctgaactgctgcccgtcgatcctggctgtgtggtaccgaagcttaacagtagctgggagccggtctatcaggtcacattcccggatggctccacggatgtactgagccaggaggatatctggcatgtgcgcacgctgacgctggacggactggtggggctgaatcccatcgcctatgcccgcgaggcaatatcgctggcggcagcgaccgaagagcacggggccagactgttcagcaatggtgcggtgacgtccggtgtgttgcgtacagagcagacgctgtcagatcaggcttacgagcgcctgaagaaagattttgaggagcgtcacaccgggcttggcaatgctcaccgcccgatgatccttgagatggggctggactggaagtcgatggcgctgaacgccgaggacagccagttcctggaaacccgcaagtttcagcttgaagaaatctgtcgtctgtttcgggtgccgttgcacatggtgcagaacaccgatcgcgccaccttcaacaatatcgaagagctggggctgggatttatcaactattcactggtgccgtatctgacccgcattgagcagcggatcaacaccggactggtacgaaaaagtaagcagggcgtttattacgccaaatttaacgccggggcgttactgcgcggggatatgaagtcccgttttgaagcctacgccaccgggatcaactggggaatttactctcctaatgactgccgcgacctggaagatatgaatccgcgtcccggtggtgatgtctatctcaccccgatgaacatgaccacgaaaccctccgatggcagtaaagccggtaagcagaaggataacgccaatgcagacgaaacaacgtcttga

SEQ ID NO: 491682 - DNA, 651 bp, Shigella sonnei; identical to SEQ ID NO: 4097

SEQ ID NO: 491683 - DNA, 1206 bp, Shigella sonnei
atggcggttgatattaaagatgtcgaacaggtcgcgcaggagctgcagcagaagtttgacgacttcaaagcaaagaacgacaagcgcgttgaggcgattgagcaggaaaaaggcaaacttgccgggcaggtggaaaccctgaacggaaaactcagcgagctggaaaatctcaaaagcgatcttgaaaaagagctgcttgagctgaaacgtccggcaggtggtgcgcaaaataaactggccaccgagcataaagaagcgtttgtgggcttcctgcgtaaaggccgtgaagatggtctgcgcgatctggagcgtaaggcattacaggtgggcaccgatgaagacggcggctatgccgtgccggaagaactggatcgcaacattctcaatctgctgaaagatgaagtggtgatgcgccaggaagccacggtgatcaccgttggcggttccgactacaaaaaactggtgaatctgggcggcacggcttccggatgggttggcgagactgacgcgcgctcccagactgccacctcaaaactgggactgattgaacctttcatgggggaaatctacggtaacccgcaggccacccagaaaatgctggatgatgctttcttcaacgtggaggcctggatcaacagcgagctggcaaccgaatttgccgaacaggaagaaattgcctttaccactggcgatggtaccaagaagccgaaagggttcctggcgtatgagtccacggatgaaaccgataaggtccgggcgttcggcaaacttcagcatattgtatccggcgaagcgacggcggtgaccgcagatgccattatcaaactgatttacacgctgcgtaaggcacaccgcactggcgcgaagttcatgatgaacaacaacagtctgtttgccatccgtctgctgaaagacagtgagggtaactatctgtggcgtccggggctggagctggggcagccgtcctctctggcgggttacgctatcgctgaaaacgaacagatgccggatattgccgctgatgcgaaagccattgcatttggtaacttcaaacggggttacaccatcgttgaccgtatcggtacccgcattctgcgtgacccgtacaccaataaaccgtttgtcggtttttataccaccaagcgcaccggcggcatgctggtcgattcgcaggccatcaaactgctgaagattgcagcggcgtaa

SEQ ID NO: 491684 - DNA, 189 bp, Shigella sonnei
atgatcctgaaacaagatctgaaatggtcaccggacggtatgcgtgttgagattattcgggccggtgagtatgaagataaagaattacccgaacgggtacgcgaaattgccactgcagctgggattgtctctgataagagaacacctgttgcgcggggggctgataagtctaaaaaacagcattcatag

SEQ ID NO: 491685 - DNA, 306 bp, Shigella sonnei
atgatgcccactctggaagagcttcgtgttcagtgccggattgatgatgacaatgaacaggagaattctcttcttatgatgtatctggctgctgccagggaagaggctgaaaagtttttaaaccggacgctttacgatgaaactgtttctgagcaggatacgaccgggcttgtaataacacctctgataaaactgcgtcttatgcaactggttggctactggtacgagaacagggaaatgcaggatgcagtgcctgattttttctataccggactgcggatgtatcgatttcatcccggaacatag

SEQ ID NO: 491686 - DNA, 342 bp, Shigella sonnei
atggaatttttacttatttcaatagttttgggactaattccagctattattgcgaaaagcaaaggtcgctcatttttaggatggtgggtatatggtgcgatgatctttattgttgctctggttcattcgctagtaatccaaagagatgagaaggcacatgaacaacaaatggtaagcaatggcatgaagaaatgcccttactgtgcggagttgatcaaagaagaggctattaaatgtaagcattgcggtagtgatttaatttgcaatgcagatagttccgtttcacaaaaaacggatgatgaatatcttcaggaagcaaggcgtaaggccggacttctttaa

SEQ ID NO: 491687 - DNA, 747 bp, Shigella sonnei; identical to SEQ ID NO: 107025

SEQ ID NO: 491688 - DNA, 1542 bp, Shigella sonnei; identical to SEQ ID NO: 6142

SEQ ID NO: 491689 - DNA, 273 bp, Shigella sonnei
atggcgcacaataccaaatatcacaattctgataccgaccttgccagcaggtgcgggctgtgttctcacgcattcaaatatgactggtatcagcacgatccctgcactgaagaacaggccgaatggctgattcataactaccgcagacgtgggtatgagtttaagaaagcccttagcctcgactaccgtcactggataatctacgtcaggctcccttattccgaacgcccgccgcgtccgtcccgcacattccagcaacgcatctggaggtaa

SEQ ID NO: 491690 - DNA, 771 bp, Shigella sonnei
atggagactgtttttgacgcactgaaagcgatgggaaaagccacgtcggtagagctggctgcgcgacttgatatcagtcgtgaagaagtactgaacgagctgtgggaactgaaaaaggctggcttcgttgataaaagcgtatacacctggcgtgtggctggtgaaggtgaatccggggtagccgaagagcagccagcacaatctgaagtacaggatgtgctaaccagggaggtcgaacgaaaagttaccgctgacatgatgattgggtttatcggtcaggagggcgctaaaacgtgtgaggaactggcgggtaagttcggtgtcagcactcgcaaggttgcttccacgctggcggtagtaaccgcaacggggcggctggcacgcgtaaaccagaacggtaaatttcgctactgcatgccgggcgagaatttaccagtaaagccgaaagtcgcatcggtaacggagaatgatggtaaagcctttcctcagccagccggcattgcgttaccagtacaggaagctgcaacacaggaagatattaaaacagaaactgtagcggacattgtgcagtcgctgccatcgtttactgcaacgcgagctgatgatttgattttgccatcgctgcatttggcaaaccgcgaactgcgtcgggcgaaaaatcatgtccagaagtgggagcgtgtctgcgctgcgctgcgggagctgaacaggcaccgggatattgtccgaaagattttcgattcctccagtcgtattgtgtcggaaaagtga

SEQ ID NO: 491691 - DNA, 213 bp, Shigella sonnei
atgttcaaagatgatgttctgcgctatttcaaaaaaaagcgactagtagctgaggctcttggaatttcacatgtggctgttgtgcggtggaaagcagttattcccaaacttcgcgcaatggaactggatgaaattactaacggtgaattgaaatacaacccagaactttacaagaagcaggatagcacctcgaacgaaggaaagaatgattaa

SEQ ID NO: 491692 - DNA, 717 bp, Shigella sonnei
atgtcaaccatagcaacatcacttggtagtaacattggttacatgaaaaacactatcagcgaacgtattcggaatcgtcgaaaagacgttggattaacccaacagcaggttgcgaaagcaatcggcatatctcgtgtatccgtaacaaaatgggaaaatggctcttcaaaacctgacggtgagaatttgcatctactgtcaaaattgctttccaaatctcctgaatggattctttatggaaaggactgtcacgataaaaccgatgatctgcgtctgaatcagtacccttacattagtgacaacatcgcccggttgcccgttttaacgtgggaacaggctggttattgggatatgagttgtccagtaaccgagattcctggtattaagaattgggttgatgtcatgacaaaaaccgctgaaaactcttttttattgcatgttgagggagatgcgatgacaaactctaacggcctcccaaccatccccgacggatctaccgtgctgatcacaccatgctcaagtaacattagagaactggtgggaaaaataatcttaatccaattggaaggaacgccaaacgtaacactaaaaaaagttgcgattgacggaccaaacatctatctgttgtcactgaatccgctttacaaacccatcgaactgaatggtggttacaccattaaaggtaaagtttcacaaatacatcaatacttagactga

SEQ ID NO: 491693 - DNA, 201 bp, Shigella sonnei
atgaatacaattaagttttcttgcccagaatgtggtggcgaagtctttgacacatcctttaagccgcagggctctgacagtttcgcgggagccatctgcaaaaattgtggtcaccttgtaactgaagatgagtcctcgcagttcgatgacgaaatcgttgacaatatcttcggtgcactcaccagagactttctgaagtaa

SEQ ID NO: 491694 - DNA, 375 bp, Shigella sonnei
atggaatttaaagatttaccaatgcaattccaggaaatggcagcgaatatagttcgttcccaactggcgactcttgacctgagtaccgtagaaaaagaaaccatcgatactatatccggtaacgtgcgtcgtgcctttatcggactgtacgaagagaagcaactctctgataaccaggatttacataaaaaatacttcctggaattaatggacatcattaataaggggtttggcttgttaatgaaacagaaagggattcaaatgaacccacttgaaaattacttcgcaacaagaagcattaattcctgtgatttaaagcatcccgccacagacgggagtgttacagttagccatgagatttcgattaatcattaa

SEQ ID NO: 491695 - DNA, 222 bp, Shigella sonnei; identical to SEQ ID NO: 8933

SEQ ID NO: 491696 - DNA, 192 bp, Shigella sonnei
atgaatacagcatttgcacttgttctgacattttttcttgtttccggagagccagttgatattgcagtcagtgttcacaggacaatgcaggagtgtgtgactgcagcaaccgaacagaaaattcccggtaactgttacccggtcgataaagttattcaccaggataataacgaaatcccggcaggtctttaa

SEQ ID NO: 491697 - DNA, 201 bp, Shigella sonnei
atgttccaggaattgccagtgaaattttgcgcgggcgcgacgttcatcaccggcttcaatggcagtggctacagcgactgcaccttcttcctttattgcctgttcgtccggaatggcggcgcaaataaagactttactcattttgttttacctcattacagatttaagggtgaacaaatccctgccatttctggcatataa

SEQ ID NO: 491698 - DNA, 228 bp, Shigella sonnei; identical to SEQ ID NO: 7544

SEQ ID NO: 491699 - DNA, 648 bp, Shigella sonnei
atgtgtgcgatggatactagagaaagagcactcatacgtcaatcaggcctgccggaaattattttatccgcaaaatatccagtctgtgtccgcacagagtcaggaaaattcatagactcaaactctgtttttttacacttaataaagtgtcagaatagtgattctgaaatatggttttctggtattgatattgatacgcaaattttatttcatactgcggaagttgatgctttctcgtcctcgaatggagtgagtattattaatggtgtaatattgaatgatgtatcatgggatgtggtggttgaaagtacggaagtgaataacttgaatttgtttgtctggagattctttgaaagatacgtagttagtggcttttttataaagggcaaggagtttagttgtgaacctgacaaatatcgctttaataagataataccgtatcttttgggttatagtcatgagtattcttctcagagaatggatatctctgttgaccaatctaaaaaaatatttatgaattttaaaaaacactatggtttctcagacagggatgagtggttgcgatatgctataatctctgatgtgttattttatctatatcaatacttcgctagtaatattaacagccttcactgtaaagaaatgtaa

SEQ ID NO: 491700 - DNA, 384 bp, Shigella sonnei; identical to SEQ ID NO: 7546

SEQ ID NO: 491701 - DNA, 414 bp, Shigella sonnei; identical to SEQ ID NO: 488202

SEQ ID NO: 491702 - DNA, 258 bp, Shigella sonnei
atgcattcacaccatcatcaaatatctatgatcccacttaccatgagttcacccattaaaggtttttcactgtatgtagaaagcgaagacatggctgtcgctatagctgagcttgaaaatgccttatcacagctcaagaatggagataaggcattcaaagaaagtggcacgctggttggtaacgtcagagcaagttattgctatccttaccgtcctcattgtgccgcgaaaggtctttattgggatgaaggggattaa

SEQ ID NO: 491703 - DNA, 513 bp, Shigella sonnei
atgaaactatttatggttgatcgccgaggaatatactcaacaggcgatatcgttacaccaaagcaattctccgatataactcctgttgaaatgtcatctctggtagacaaactttttccgcgcgggcttgctccacaaggcgaaggatacctcattaataatgcggcaaaaatttataataaaaacgaactcatcgactggggacttgagttttaccgaagaggagtttgcccgcaaaaaccttctcgctatacgtcactcttcgcctggggtaacctggaggaggctaaacattttcgacttacagacggaaaaccatcagataaaattttcataatacaaacagatagttatcatcgcggagatatgtcattattaagaaatgatacatcggtattggaattcacctacagaatggagctttactggtcaggaaaaacttttaaccctgatccagtctgggaatacatttgtccgttaccagtaactatcggtgaacaagtccttgcttaa

SEQ ID NO: 491704 - DNA, 198 bp, Shigella sonnei
atgctaaaacagcaggatatgaccgaaactgccagagtggtatttaatgaattaagtgtcaccgaaccagcgaccgtcggggaaattgcgcagaatacttacctttcacgtgaacgctgccagttaatactgacccagcttgttatggcgggtctggcagattatcagttcggttgttacagacgccttccgcagtga

SEQ ID NO: 491705 - DNA, 930 bp, Shigella sonnei
ttggtcgcactgctgagctgtactatcccctttttcgtcgtgctcgcatcctcaagcgccacggcggatgcaatatcctctgcccgttttgctgctgtctcggcgcgcgttgccgcggattccgccgtacttttgctctgtgctgccgctgccgcactgccagcagcctctgtcgccttcgtggatgccgtcgtggcgctgcccctcgctgctgacgcctgtctggtcgcctcatcttttgaagcagacgccgatgatgccgatgacgccgccgaactggcggacgatgcggcagccgtttttgaggattctgcgctggtttccgacgctttcgcgttcgtttcggatgtcttcgctgcggaagcagacctcgctgctgcgctggcctgttcagtggcttcgccagccttcgttgtggctgttgaagcggatgatgcggcgctttctgccgattttccggcggcggtggcactgactgctgcctcctctgccttaatggacgcctcacgggccgatgatgcagctgctgtctcagagtctgccgcagctgaggcgctctgttccgctgccgtttcagaagacctggcattcgtctcggacgtttttgccgccttcacggaatttcctgccgccgttgccgaggaggctgcactgctggcgcttgtggaggcgttcgtttctgatgattttgccgcctctttggaggccgccgcatctctggctgaagtggcggcttctgacgctttcgtcgtcgcagtggatgcagaagtggctgctgatttttgtgacgctgcagcattcgtttctgacgttttcgccgcaccggcactggtggccgccgcgctttttgaggactctgcagcggcagcactttttgatgcttcagtggcctttgttgatgccgttcctgcgctggaagacgcctcctga

SEQ ID NO: 491706 - DNA, 189 bp, Shigella sonnei; identical to SEQ ID NO: 486947

SEQ ID NO: 491707 - DNA, 474 bp, Shigella sonnei
atgccatcgggtggattaagcataaatgtaagcctggtgcaaaatggccagaaattcaggcagagatgcgcatctggaaaaaatgtcgcgaaggtgaacgcaaggaaaccggaaaatacacgtctgttgttgatctcgcccgtgccagagccaatcaacagcacactgaaaattcaacaggaaaaatcagcccggccattgctgccattcatcgcgaatacaagcagacatggaaaacactggatgacgaactggcctacgctctctggcctggtgatgtggatgccggaaacattgacggcagcatccatcgctgggcaaaaaaagaagttatcgacaacgaccgcgaagactggaagcgtatctcggcatcaatgcgcaaacagcctgatgcccttcgctacgaccgccagactatttttggccttgtccgtgaacgtccgatcgacattcacaaagaccctgtggcactga

SEQ ID NO: 491708 - DNA, 558 bp, Shigella sonnei
gtggccctgcagggcagccgtaacggagagagcctgctggctgataatatgcaggatggcgtccggattgcccgtgataatcctgacagcggtgtggtggtgagaattgccggtgaaggtcgtccgtggaatcccggtgccatcaccggtggccgcgtgtggggggatatcccggataacagcgtccagccgggggccggaaatggcgaaccggtcacggcagaggtactggcacagcggcaggctgaagaggccatccgccgtgaaacggaacgccgcgcagatgaaattgtcaggaaaatggcagagaacaaacctgacctgccggacggcaaaacagagctggctgtcagggatattgccggacaggagcgtgaccggtctgccatatctgaacgggaaaccgcactgccggagagtgtgctgcgtgaatcacaacgggagcgggaagcggtccgggaggttgcccgggaaaatctgctgcaggagcgtctgcagcagatggagcgggatatggttcgtgacctgcagaaagagaaaaccctgggcggagactga

SEQ ID NO: 491709 - DNA, 384 bp, Shigella sonnei
atgcctgaccattctctttttcgattacggattcttccgtggtgcattgcgctggcaatgtcagggagttatagcagtgtctgggctgaagacgacattcagtttgattcccgttttctggaattaaaaggcgacacaaaaattgatctgaagcgtttttccagccagggatatgttgagcccggaaaatacaatttacaggttcaactaaataaacagccattggcggaagagtacgatatttactggtatgctggtgaagatgacgcgagcaaaagctatgcttgtctgacaccggaactggtagcgcagtttggtttaaaagaagacgtggcgaaaaatctgcaatggagccacgatgctaaatgcctgaaatccggttaa

SEQ ID NO: 491710 - DNA, 1221 bp, Shigella sonnei; identical to SEQ ID NO: 7714

SEQ ID NO: 491711 - DNA, 519 bp, Shigella sonnei; identical to SEQ ID NO: 5755

SEQ ID NO: 491712 - DNA, 534 bp, Shigella sonnei
atgatgcacttaaaaaacatttctgctggtaatcctgaaacaaaagagcaataccagctaacaaagcaatttaacatcaaatggctttatacagaggatgggaaaaactggtatgaggagcaaaagaactttcagcctgatacgttgaaaatggtctatgaccacaacggcgttattatttgtattgaaaaggatgtttcagcaattaatccggaaggcgcaagcgtcgttgaggttcctgatattacagcaaatcgccgggctgatatttcaggtaaatggatgttcaaagatggcgtagtgataaagcgaacttataccggggaagagcagaggcaacaggcggaaaatgaaaagcaaagcctgctacagctcgtcagggataaaacccagctgtgggactcacagctacagctgggcatcatttccgccgggaataagcagaaattaaccgagtggatgctctacgcgcagaaggtcgaatccacagacacctccagtctgccagtaacgtttcccgcacaaccagaatga

SEQ ID NO: 491713 - DNA, 435 bp, Shigella sonnei
gtgagaacacgacatctggtcggccttatttcgggagtactgattctttcagtattgctgcctgtcggcttaagcatctggctggcccatcagcaggtagaaacatcgtttattgaagagctggatacctattcctcccgcgtcgctattcgggccaataaggtggcgacacaagggaaagatgcgctgcaagagctggaaagatggcaaggcgctgcctgtagcgaagcccatctcatggaaatgcgtcgggtatcttacagttatcgctatattcaggaagtggtttatatcgataacaacgttccccagtgttcgtctctggagcatgaaagtccgcccgataccttccccgagccaggtaaaatttcgaaagatggttatcgtgtctggttaacatcgcataacgatttaggcattagactggccccctga

SEQ ID NO: 491714 - DNA, 1242 bp, Shigella sonnei
atgaatactaaacttttggcctatttaaacaatgagttacatggagtgtgggtagatagtgaaaatcgtaatatccacataatacttaaatcaagccttcctataattaaatccgtctggtcaggagcacctatccactttttggtaggtttatctactaaaaatatactagtgattgggatgttgattgaagataatgtcgataatccatttttactagcctatccaccaagagaggcagatgaaattaaagggctggatttgttattgtcaggcgcttatgatggtattctattatcattttttgactcgcatacaatgcgtgttatggacctgaaaataaaagtttcggaaaatttaccgtgtgaatgtttaaaaaaattttgtgctaattcatattctctcaattcaggatttagggaaggtaatgaagcaatggatgaattctgcaacaatgctttgactggtaacgagaaaataattagtctgccactaagtgtaatcgataaaaaatcttacctagcaagtgttcatgaaccaaacgataccgtattaacatatgaatttagcgtcagtgaaaacggctctgagggatatgagcaggaagctcttatataccatgctttgcggcaggtcttttcaccggaggaagtgtttttttctccagatattattgagggtaataaaaaaagagaactagttgatattcttattgtagaaaatgactatgtattatctatacagtctaaagcatcatctttgattgaaatgggtttgaaatctcatgaaaagctttgtagcatgtataagaaaaaagcattgcaagggatcgatcaggttaaaggcgttatcccaattctaaataatgatgtggttattaattatgacgggagggaatgcttaataaagcgcagaaagggtatttatcatttagtgataatctcagatcttgttttagagaaagaaagtgctgaaaagatttataacgaaattagcaaccttaaagagtcaaaaggggcgaaagttttagttatgagccttgaaggtcttgtaaattttataagactatcaagattaaataaaagaatgttttgggcaatgctggaggctaaatacaagttcagcataaaaaaccgtacaattttaattagagatatcgactctagccaagagaataatctaccattacttgccactgatcaatacctatcacttcttcgaggtacgggaaaattaaaataa

SEQ ID NO: 491715 - DNA, 324 bp, Shigella sonnei; identical to SEQ ID NO: 487104

SEQ ID NO: 491716 - DNA, 306 bp, Shigella sonnei; identical to SEQ ID NO: 16899

SEQ ID NO: 491717 - DNA, 210 bp, Shigella sonnei
atgcgcgaaataaatgaagatcgtgtaatccgtgaaaaagaatgcagagagctaacaggcgtttgccgtacaactcgttatgagatggaaaaacaaggccgctttccctcccgtatcagtcttggaggtcgttcggttggctgggttaagtctgaggttatggaatgggttaaaagccgggatcgcattaattcaggaaaggcagcgtaa

SEQ ID NO: 491718 - DNA, 1239 bp, Shigella sonnei
atgagcagcgcaattcatagacttagcgacactcttttacgaaaattaagcggatcaccaaccacaaaaaacgccttttttaatgacggtggcaatcttagcgtaagacattccaccagcggcctgttaacctggtatttcacttacagggctggaactggtaggcaggtatcaccggaacgtctgagactgggcaattatcccgatctgagcctgaaagcagccagggaaaaagcggcacagtgtcgcgcttggctggctgaggggaaaaatccgcgctatgagcttaatcgtgctgtacaggatgcgttagcccccgtgacagttaaggaagcgctcacttactggcttgaatcgtatgcaaaggaaaagcgcactgactacgaatcactgaaaagccggatcaataaacacataatcagccagattggcgctatgccgttggaaaaatgcgagctacggcactggttggcatgttttgaccagatggcaaagcgaagcccagtatctgccggatttttgctacaggtatgtaaacaggcgcttaagtactgccgaaaacgacgatacgcaatcagcaacgttcttgatgatatggttgtcggtgatgtgggaaaaaaagcagaagtgagcgagcgcgtactaacaaacaaggagcttggggaattactccgcgccctggatgacaaaatattcccgccgtactacagcgccctaattcgcctcctgattgttttcggatgccgtaccaccgagctaaggcgctctgaggtgcaggagtgggattttaaagaaatgctctggacggtaccgaaggagcacagcaaaacgaaggtcgccatattcaggccaataccggaaagcattttgccgttcatcacgcagctggtggagcagaacagacacacgggcttattgcttggtgaactgaaaggacaatcttcggtagcagagtacggaagaacagcgcacagacgaattaatcaagccccctggacgttacacgatatccggcacacatttacaaccatgctgaacgatttaggcgtggatccgcatattgtcgagcagcttacagcccaccagatgccagggatgcaacgagtctataaccactcccgctatcttgatgcaaaacgtgatgctcttaatctatgggtagaccgtctcgagcttctccagaacaatgatgaaaaaatcgttgttatgaccccgcgaatttacacccaaaattcttga

SEQ ID NO: 491719 - DNA, 327 bp, Shigella sonnei
gtgaaataccgttatgagtttacggatacgctggggctggtgacgtcattcagctatgcaggagacaagaatcgccagctgacccgttacagcgatacccgctggcatgaagattccgtgcgtaaccgctggttcagcgtgatggcggggccgtctgtgcgcgtgaatgaatggttcagcgcgtatgcgatggcgggtgtggcttacagccgtgtgtcgactttttccggggattatatccgcgtaactgacaataaggggaaaacgcacgatgtgctgaccggaagtgatgacggtcgccacagcaacacgtctctggcgcactga

SEQ ID NO: 491720 - DNA, 921 bp, Shigella sonnei; identical to SEQ ID NO: 487157

SEQ ID NO: 491721 - DNA, 267 bp, Shigella sonnei; identical to SEQ ID NO: 11114

SEQ ID NO: 491722 - DNA, 327 bp, Shigella sonnei
atgactaaaaatactcgtttttcccccgaagtccgtcaacgggcagtccgtatggttctggaaagtcagggcgaatatgactcacaatgggcgacaatttgttccattgctccaaagattggctgtacgccggagactctgcgtgtccgggttcgccagcatgagcgggataccgggggcggtgatggagggctcaccaccgctgaacgtcagcgtctgaaagagctggagcgtgagaatcgtgaactgcgctgcagtaacgatatccttcgccaggcttccgcttattttgcgaaggcggagttcgaccgcctctggaaaaaataa

SEQ ID NO: 491723 - DNA, 246 bp, Shigella sonnei; identical to SEQ ID NO: 486098

SEQ ID NO: 491724 - DNA, 189 bp, Shigella sonnei; identical to SEQ ID NO: 486962

SEQ ID NO: 491725 - DNA, 189 bp, Shigella sonnei
atgtataaaattacagccactattgaaaaggaaggtggttctcctgccagctggacaagatattcaaaatctaaactaacgaaatcagaatgcgaaaaaatgctctcagggaaaaaagaagcaggcgtttccagagagcagaaagtaaaactgataaattttaattgcgagaaacttctgtcctcgtga

SEQ ID NO: 491726 - DNA, 303 bp, Shigella sonnei
atgacgttggcgttttttgcgctgataagttttctggcattgaaagaatattgtatgcttatatccgtacattttccgcggtggttatattgggttattcctcttaactatttgcttatcggttttaattgctttgagctgtttctgttatttatacctttggctgggtttctgatattagccacctggcgagtttttgtgggtgacccctccggttttctgcataccgtgagcgccattttttggggctggataatgaccgttttcgccttgagtcatgcggtgatgctgccaacttactga

SEQ ID NO: 491727 - DNA, 576 bp, Shigella sonnei
atgtcaccaaaaacaaccatctttgtgtctcctgagcctcaagagatgcctgatatttgcaagagtgaagcattatttaatcttgagcgtgaatattacccactgctaaaagaacagcgccttagattagatgacgcttacgacaatgtgaagaactttgaagagactgaaaagccaactgattttgatattgaagtggaaattagacaaaatccattcgtatattactcagttgaagataatgatggttttggtacagcaagagagaatatctcaaaagttcttcaaaacatccctgaaggattccgtttaattgatgttagaccagcttcacgcggtacaggttcatatattttactgtctgataaaacagatgaagagatttgtcagttagctgaaaagaatctacttgagcgtcatagcaaaaaattaaacagatttaagcaagagcttgctaaccagcttagagctatgaagcaactaatcagtgactatgaaacgcagaagaagattgctatgcaggctgatattgagcagttagtgaagatttcaacgaagtacgcaaaggtgctttga

SEQ ID NO: 491728 - DNA, 279 bp, Shigella sonnei; identical to SEQ ID NO: 11573

SEQ ID NO: 491729 - DNA, 225 bp, Shigella sonnei
atgacgccggttgccaccaccattatcagtatggtgctgttcgccttctccacctgggtttccaccaacggggcgaaaatgttggggccaattacctccgtcacttcaacgctgatgctgctgttaacgctctcctacattttactggcaggtacggcgctggttggcggcgtacagcctgctgacgccatcaccgttgacgcgatgatcccgaacttcaactaa

SEQ ID NO: 491730 - DNA, 174 bp, Shigella sonnei; identical to SEQ ID NO: 485589

SEQ ID NO: 491731 - DNA, 222 bp, Shigella sonnei
atggctcaggttgccatttttggtaatgactccaacttattgatagtgttttatgttcagataatgcccgatgactttgtcagtaatgactccaacttattgatagtgttttatgttcagataatgcccgatgactttgtcggtaatgactccaacttattgatagtgttttatgttcagataatgcccgatgactttgtcatgcagctccaccgattttga

SEQ ID NO: 491732 - DNA, 189 bp, Shigella sonnei; identical to SEQ ID NO: 463227

SEQ ID NO: 491733 - DNA, 189 bp, Shigella sonnei; identical to SEQ ID NO: 463227

SEQ ID NO: 491734 - DNA, 486 bp, Shigella sonnei; identical to SEQ ID NO: 487387

SEQ ID NO: 491735 - DNA, 492 bp, Shigella sonnei
atgagtggcgcaggagctatagaagtagacaaaaatttgaccttcaggattcgtggattaaataatattcatgtccttgactgctttgttaatgtcgcactggaaccagctgatggcgttgttgactttggtaaaataaattcccgaacaattaaaaataccagcgttagtgagacgtttagtgtagtcatgacaaaagatcctggtgcggcctgtactgagcaattcaatattttagggagctttttcactacggatattttgagtgattatagccatctggatatgggtaatggactgctattgaagatatttcataaagatggaacagcaacggaatttaaccgcttctcacaatttgcttctttttcatcgtctagtgcaccttcggtcaccgcaccattcagggcagaacttagtgcgaacccggcagagactgttgttgagggaccgtttagtaaagacgtaatcctcaaaatcacctataactaa

SEQ ID NO: 491736 - DNA, 318 bp, Shigella sonnei; identical to SEQ ID NO: 402007

SEQ ID NO: 491737 - DNA, 147 bp, Shigella sonnei; identical to SEQ ID NO: 488958

SEQ ID NO: 491738 - DNA, 501 bp, Shigella sonnei
atgtctgttgttgcacctgctgtatacgttggaacctggcacaaatacaactgtggaagcatcgctggccgctggtttgacctgacaacgtttgatgatgaacgcgactttttcgccgcctgccgtgcccttcaccaggatgaaaccgacccggaactgatgtttcaggattatgagggattcccggggaatatggcctctgaatgccatatcaactgggcctgggttgaaggcttccgccaggcgcgggatgaaggctgcgaagaggcttatcgtctctgggtggatgataccggtgagacggattttgacagcttccgcgatgcctggtggggcgaggctgacagtgaggaggcttttgcggttgagttcgtcagtgatgccggcctgctggctgacgtgccggagacggtggcgctctattttgactatgaggcgtatgcgcgggatttattcctggactccttcacctttattgacggtcatgtgttccgtcggtga

SEQ ID NO: 491739 - DNA, 438 bp, Shigella sonnei; identical to SEQ ID NO: 465117

SEQ ID NO: 491740 - DNA, 738 bp, Shigella sonnei; identical to SEQ ID NO: 487141

SEQ ID NO: 491741 - DNA, 480 bp, Shigella sonnei; identical to SEQ ID NO: 464883

SEQ ID NO: 491742 - DNA, 279 bp, Shigella sonnei; identical to SEQ ID NO: 11573

SEQ ID NO: 491743 - DNA, 522 bp, Shigella sonnei
  misc_feature (419)..(428): n is a, c, g, or t
atgaagtctgcattaaagaaaagtgtcgtaagtacctcgatatctttgatactggcatctggtatggctgcatttgctgctcatgcggcagatgatgtaaagctgaaagcaaccaaaacaaacgttgctttctcagattttacgccgactgaatacagtaccaaaggaaagccaaatattatcgtactaaccatggatgatcttggttatggacaacttccttttgataagggatcttttgacccaaaaacaatggaaaatcgtgaagttgtcgatacctacaaaatagggatagataaagccattgaagctgcacaaaaatcaacgccgacgctcctttcattaatggatgaaggcgtacgttttactaacggctatgtggcacacggtgtttccggcccctcccgtgccgcaataannnnnnnnnncaataatgaccggtcgagctcccgcccgctttggtgtctattccaataccgatgctcaggatggtattccgctaacagaaactttcttgcctga

SEQ ID NO: 491744 - DNA, 405 bp, Shigella sonnei
ttgttggattatcttgaatacctttcagacgagaaagagatttgctttaaggtcgagtgcaatcagcaaatctttgcggataaaattttactgcaacgaatgttatcgaatcttattgttaatgccattagatattcaccagaaaaatcgcgtattcatataaccagttttcttgataccaacggctatcttaatattgatgtcgccagtcctggaacgaaaattcatgagcctgaaaaactcttccgtagattttggcggggagataattcgcgtcattccgtaggtcagggacttggtctttctttagtcaaagcgattgccgaattacatgggggaagtgctacgtatcactatctcaataagcataatgtgttccggattatgttaccgcaaagaaattaa

SEQ ID NO: 491745 - DNA, 354 bp, Shigella sonnei; identical to SEQ ID NO: 466835

SEQ ID NO: 491746 - DNA, 324 bp, Shigella sonnei; identical to SEQ ID NO: 487104

SEQ ID NO: 491747 - DNA, 387 bp, Shigella sonnei; identical to SEQ ID NO: 485256

SEQ ID NO: 491748 - DNA, 588 bp, Shigella sonnei
  misc_feature (546)..(555): n is a, c, g, or t
atggtacaagtgaacgatgagcaaagctttgtcgaacaagctgaatggagcatgttagttcagctgttcaatcaacgtctgcaggaacgcatacagtcgggcgagttgaagactatttctggcggcactgcgcgcagcgttaaaattgcacccgattatcagtcgctgtttttccgtgtaaatgcacgagacgataatatgcaggatgctgcaaatgcattaatggcagagttggcaaccattgatcagcatggtttttctgctgaagaactcgatgatgtcaaatctacccgcctcacctggctgaaaaatgcggttgatcagcaagctgaacgtgatttacgtatgctgaccagtcgcctggcatccagctcattaaataatacgccgttcttgtcgccggaagagacatatcaactttcgaaacgtctgtggcagcaaattaccgtgcaaagtctggcggaaaaatggcagcagttaagaaagaaccaggacgcatttttcagccaggtgaggcgggtagatttgacatcatcgagttcttcnnnnnnnnnngtgccacaggttcattttgttcttttacagtaa

SEQ ID NO: 491749 - DNA, 324 bp, Shigella sonnei
atgaacgaatatgaattacagattttcattgatagcgacactgctatgatggtgcaggctttcgctgattccggtgtatcaattgaccttgataaattactaaagctaatggctgaaaactcagaagaaattgaagactttattcaggaaattgaaactggtgaaccgcgttttatgtttcctgttaccgactcaaacatgaagcgtcttattatcgaagaaacgaacaaatacagcgttagccctgaaaaatatctcaaggcggctatagcaattttgtatagcgataatattctggtgacggattcgaaggtggtgcattaa

SEQ ID NO: 491750 - DNA, 189 bp, Shigella sonnei; identical to SEQ ID NO: 486962

SEQ ID NO: 491751 - DNA, 486 bp, Shigella sonnei; identical to SEQ ID NO: 487387

SEQ ID NO: 491752 - DNA, 387 bp, Shigella sonnei; identical to SEQ ID NO: 463158

SEQ ID NO: 491753 - DNA, 267 bp, Shigella sonnei; identical to SEQ ID NO: 11114

SEQ ID NO: 491754 - DNA, 267 bp, Shigella sonnei; identical to SEQ ID NO: 11114

SEQ ID NO: 491755 - DNA, 189 bp, Shigella sonnei; identical to SEQ ID NO: 463227

SEQ ID NO: 491756 - DNA, 174 bp, Shigella sonnei; identical to SEQ ID NO: 485589

SEQ ID NO: 491757 - DNA, 312 bp, Shigella sonnei
gtggtcggtgccacagtcgcaaccgaaccggctataccttacgctctggcagctccgttgccgatgattaccgccaatacgctggcgggtggcattaccggcgtgctggtgatcgctttcggaatcaaacgtctggcacctggtttgggtatctttgacccgctgatcggcctgatgtcgccggtgggttcgttttatctggtgctagcgattggcctcgcgctgaacatttcattcattatcgtcctgaaaggattgtggttacgccgcaaagcgaaagccgcgcaacaggagcttgtccatgaacattga

SEQ ID NO: 491758 - DNA, 924 bp, Shigella sonnei
atggaactgttgatttccccaaaaagattgtgcctttataatgattctgatcgccgtgttacagctaagtttttgaactcagttgataacacccttgcgagagcatctggacaagtggttatagacttttcgacagtagaatatgcaggtgctgcagctagcgtaaggttgtttgctatcatcagtagggcttattttatggcattcggcacaagtagtcttcgatttatttggccgaaaaaagaaaataatccgtatgggcatcgatatattgttgggacggggttatcgattgctctaatggcaaatacagttgataaattagatgttcttactaaggaacgcaggtactttcagtctgctgtggaaccgtatgaacattgggctaaaacgatggaatttattgattcaaaagcaattctcacatttgagcaatatcttttggtctcctcagcccttagtgaggcaatgctgaatgtttcatatcatgcatatgaacatccagactttgctggtgctacagagcatatgcaagggaaacgatggtggcagagttgttggtacaaccctgacacagacaaggttgtctttattatttatgatcttgggcttggcatacataaatcatttacttcagcctctccgttgtttactgggtatgacgacgtgacatctgtgtcaacagccctgacaggaggacagtccagatatgttaacgctggacgtggtaatggttctgaggatataaagagacctatagggtctggctgtgcgaattcagaatcacttttggtgttcacagggaatgttaagtacagctataattcaagaaatgaggttcccaaatgcgagtggatacctgagtacatgccgggaacattgattgaatggtcattagttccgaggagaggagaagatggttaa

SEQ ID NO: 491759 - DNA, 342 bp, Shigella sonnei
atggttaacatcgtcatagcaagggatttctcaaagatgccatttggaaggttcaagtctgacagcccgaacagtgctgagcgttttcgtaaggactttctggttcctgcattaaaatctggtgagcgtgaggttgtcgtagattttacgggtataaatcatgggattggttcttcgtttctagaggaggcctttggagggcttgttaggaaggaaggtgtacctaaggctgacattaaggcaaaactaattataaaaagtgatttgccgttctataaagatcaaatttttagatatattgaaatggctaatccagaaaggaagcctttccaaaggagttga

SEQ ID NO: 491760 - DNA, 630 bp, Shigella sonnei
ttgaacaccgttgatattaaggacacccttgcaggggtgtccacttacgcatggatgtttagtgttgtgagtattatcttagtgtttattggatggtttgttacttacaataattcactgaagattgctactcgctctgaatctaaatcgattatagatgcgattgctaaaattttaaacgaaatatcagatttgtctctggattactgggttaataagtcaacaccaccagattctaatccatttaagaaaaaaagttttaagaactctaatggattgcatactcagtcggcgaaaatatatttaacggcaattcatggaaaagccatacaaataaataaatacattaatcttctcgatgagagggggataaaaataacaatttcgtatttttctaatattatagatgaagctactatggaatgtgagaaatcatattgttttaataagtcatatagggtttttcgcgctcagaatgtatctagtgcttgtgtcgatttcataatgcatttatatgattcttttcaaaaaaatcatcctccacgtaagcctgtatatgtattgaaaacattaaaacaattggattgttacttggataaatggcataatgaattatgtgggcggcaataa

SEQ ID NO: 491761 - DNA, 411 bp, Shigella sonnei
atgaaaacccgtacacaacaaattgaagaattacagaaagagtggactcaaccgcgttgggaaggcattactcgcccatacagtgcggaagatgtggtgaaattacgcggttcagtcaatcctgaatgcacgctggcgcaactgggcgcagcgaaaatgtggcgtctgctgcacggtgagtcgaaaaaaggctacatcaacagcctcggtgcactgactggcggtcaggcgctgcaacaggcgaaagcgggtattgaagcagtctatctgtcgggatggcaggtagcggcggacgctaacctggcggccagcatgtatccggatcagtcgctctatccggcaaactcggtgcgagcggatcaacaacaccttccgtcgtgccgatcagatccaatggtccgcgggcattga

SEQ ID NO: 491762 - DNA, 681 bp, Shigella sonnei; identical to SEQ ID NO: 484009

SEQ ID NO: 491763 - DNA, 267 bp, Shigella sonnei; identical to SEQ ID NO: 11114

SEQ ID NO: 491764 - DNA, 465 bp, Shigella sonnei
gtggcactggctgaggcctgcccggcacttgttgacgcggcactggcagacgacgcagccgctgtttttgagcctgccgcagccgaggcgctctgtcccgctgccgtttcagaagacctggcgtttgtctcagacgtctttgccgccttcgcggaattgcctgccgccgttgccgaggaagcggcactactggcgcttgatgatgcgttcgtttctgatgatttcgctgcctcttttgaggccgccgcatcccgggctgaggtggctgcttctgacgccttcgtggtcgcggcggatgcagaagtggctgctgattgttgtgacgctgccgcattcgtttctgacgttttcgccgcaccggcactggtagctgccgcgctttttgaggactctgcagcagcagcacttttcgatgcttcactggcctttgttgatgccgttcctgcgctggaagatgctgactga

SEQ ID NO: 491765 - DNA, 138 bp, Shigella sonnei
atggctgcgtgcgcagatgaagctgacgagcctgtgctgggcgctgaaagaactggcaaaggatatctggagcagaccatggagcgaggaaagacgcaacgactggcagagatggctgtcgctggcggccaacagtga

SEQ ID NO: 491766 - DNA, 189 bp, Shigella sonnei; identical to SEQ ID NO: 469030

SEQ ID NO: 491767 - DNA, 234 bp, Shigella sonnei
atgaaaaaacaaaagaaaatgcgatgcgtattacgctgtattcgtatcccgcacgaaatcgaccataaaataaatcagatatgtcaggacagagagatgaactactcccagtgcgtcagaatgtttatcagtcagggaattaaggccggggaaacgcaggaagaagactgcaacggacgcaatgtagcgggggatgtgtgggcctgggcaaatgaccagaaccacacgacgtaa

SEQ ID NO: 491768 - DNA, 183 bp, Shigella sonnei
atgtctttcccttgcccggcctgtggcgcttcagcccgcacccgtggtcgttcgttggaagaacacgaacaaaatatctacaaaacgtattaccagtgcaataatattgagtgtggggcctgtttttgtacgcttgagtcgtttgtacgcattactaagcgcaggaagtcgaaaacttcatag

SEQ ID NO: 491769 - DNA, 1005 bp, Shigella sonnei
atgccgatcagaaagctggatgatgggcgatggttgctcgatatcaggccatgcggacgtaaaggaaagcgcgtcagaagaatatttgacagaaaatcgatagctgtagcaactgaacggtacatcatagcgaacgccgaaaaacgcgagtttatacagggctaccgcgaccggagaaccctcagcgatttactggagttgtggtgggtttatcacggtcagcacaggcgaaaggcaggcacagataaacagcagcttggcaaaatcattaatgagcttggagctgacatgtttgcggtagagctcgacaaattaaaaatcattgcatggcgatcgcagaaaattgcggaagggctaaagccgtcctcagcaaacagatatatgaacagattatcagggatgtttacaaccctgaaaaagatcggtttgtgggatgcagaacatcctgttcgcggtattcctgttctttacgtaaagcagcgagagatggcctttttatcaaaaaacgaggtcacattgttgcttgacagactgaatggagatcaacgaagggttgcgctcttatgtctttgcaccggagctcgctggagtgaagccagcagattacacggagagcaaatagttcataacagaatcacgtttctggaaaccaaaaacggcaggaaaagaacggtgcccgtgtcgcaggagatatgcaatatcgtaaaaacaaaagaaaccgggcgactgtttgatgtgaagtacagagagttttgccgggcattaaaaaaaataaaacccgatttaccgagggggcaggctgcgcatgtattgcggcatacattcgccagtcactttgtgatgaacggtggcaacattcttgcgctacaaaaaatccttgggcatgcgacaattcagcagactatggcatacgcacattttgcaccggattatctggcagatgccatgagatttaacccggtagccaacatagtgatcaccgaagaaaaagagccagcagagtaa

SEQ ID NO: 491770 - DNA, 2670 bp, Shigella sonnei
atgaaacacaacaccagaaaagagattattaaccgtctcatccgtgattacaattttaaagaagaaaataattatcttcgctatggtgtttgtccgcaatgtggaaagaaagagctgtttaccagccttgaaaggccgtacatcgtacactgtgggcgcgaaaataaatgcggtacagacctgctgaccaaagaactttacccggatgtgttttcatcatggtcagatcgctatatcagcacgaaagacgagccatatgcagcggcggcagcttaccttcaggaggcgcgcaatattgctgtggagccactgaagggggcatttactcaggagcgataccaggacaaggaaaacggcgaacaggccgctactgtgcgttttacgctggctgacggcgtgtggtgggagcgcatcatagaccgaccggaacgcttcgctcgcaaggcgaatttttccggcagctacaaggggttgtggtgggcttatccgggagcggatttaagcaaggccaaagaaatctggatttgtgagggtatctttgatgccatcagccttaaccagaatggcattgcggccgtttctgtcatgtctgccgtaaactacccggataaggcgctggaagaactggcgaagctgtgcggtgataccccccgtccggttatcgtgtgggcgctggataacgggcgtgcgggtgagcgttacgcgaaaaaacatgcagaacgcagtgccgaagatggctggagaacggcagcggcgttaccgggtgaaaacaacaataaacgcgactggaatgatttacacatcgccggaaagctgcgtggccatgatgtgaaaagataccgctattacggtgatttattgctggcgaaatctccaagagataaggcgctaataatgttttcctttcgtgagcgaaaggaatttcattttacttttgataaccgtgttttctggttcaagctggatattgagcgccatatgaaggctgttgagcgtgtcattaatgagcgaaatgttgacgaagatgaagcgcgaaaaattgcacttaaggaatccggtgcagtaaaagaaatcgcaaactgtaacccagcgccgctttattacattcgaaacaatgacacggatgaagcatggtattacttccgcgttacgttcccggatggcgctacggtaaaaaacacctttacatcaggacaattaacatcctcatctgaatttaaaaaacgcctgttacatgtggcaaaaggcggcatttataccggaacgactacgcagcttgacgcattaataaaaaatgaccttcccgcaataaaagaggttattggtcaggattttatcggatacaacaaggccattggggcatggctgtttaatgatattgctgtttacaggggtaaaacttatgaaatcaatgacgaggattattttgaaattgatggcataaacgcaaaaccattaagcgaaaaacccacattacagattaactacaaaaaaccggatgaatttacagagtcctgggtggaagatctctggctggcttttggtgaaaagggaattattaccctagctttctggttgggctccctgttcagcgaacaaatccgggataaagaagaatccttccccttccttgaagtcaccggggagcccggaacgggtaaatcaacactgattgatttttgctggcggctgtgcggtcgtgacaactatgaaggcgttgatccaaccaaaggatcagaggcgggctggaagcgcacctttggacaggtcgccggattacctgttgttctgattgaagcggaccggggagacaatgcgcaaaaaagaggtgcgtttgacttcgataacctgaaaagtctctataacggcggtggtatcggcgttcgtggtgttaaggccaacaataacaacacctatgatccggattttaagggcgccatcgtgattgcgcagaatgcgcgggtaaacgcctctccggcaattattgagcgcctgatacgcatatacaccgataaaaaacgccattcacctgatacccgcctggcggcgagacggctggaactttaccccgtcgagaaggtatctgggtttattcaccgggcggtaagtcaggaacgggcgattatgcaaacgttcctggaagtatctccagctgaaacggaacgcctttgcggatgcgaaaatattcgccatccccgcatcgccaaaaatcacgcacaacttatcgcgctggtcagggcgctgaaatgcgttattgatatcccggatgaatggcttgatgccacatgtctggagctggaacaaatggcaacagcacaggttaaagcggcggcggctgacttgccggaagtgatggagttctgggaggcgttcgacttcctggacggcataacaaaatacggcgtaaaccactacggcaagggatgccgcgaagggattgctatcagtattccgcagctggcacaggctgccgccattcaccgcgtggagatccgaaccgatcgcgaaatgattgagttgctcggagccggacgttcccgacctttgacaggccgcaaaaccattcgtagtgaggtgtccagacaggcaaacgccggaaaaggagtagccgaagccagagaacctgaagtactgaaatgccggatattcagttacaaggagggggcttaa

SEQ ID NO: 491771 - DNA, 306 bp, Shigella sonnei
atgtctgaaaatcagaatgtccgcaatatatacaaaaaagaatacgctggctttttcacagaagattccattggcagtcttgaggatgtaataaatgttattgctcttttttcagcattgacaggtgaaattaataccaaagaacgaattactgtacaaagcgatgaaatggaatcattaactaacattctttatcgggaattacgagcgattaaatcaggaatgcatctttctggcgggattttttcatggcacaaagctgaagccgcagggattgttcggaaacaagaagtaacgagtaattaa

SEQ ID NO: 491772 - DNA, 219 bp, Shigella sonnei
atgaaaagccgttcaatatcccgtaaaaataatggcagtggtgaaaaacgtttctttgtgttgggttatgccgttaataagcgcgggttaaccaaacatgcacatgcaacggtatacggaacagggccgggcgaagccatacgccgcgcagccgaagggctggaagaactgggaatgacacatttcagggcgttgaaggtgacgcagctttccgcctga

SEQ ID NO: 491773 - DNA, 189 bp, Shigella sonnei
atgtacgagattcatattaaattgcgtaacgtggtaacaggagaggaagaaaacttctacacgatacgtaaatataaatcaaaaggaaaagcggcaagggacgctatcaggtatacggaagaaattgcaccgaaatatcaattgccagaagaagaactcacagcatcagtggtaaaggtgaagaaatga

SEQ ID NO: 491774 - DNA, 702 bp, Shigella sonnei
atgattatggcttttttactcttaaaaatcaatcactcagcgcaatcgcgccaaaataatttgcaatattgcttgactcgcttttttgtcatggcgtatcgtttgcccgcacctcataaaacaggtgccgggtttgacagcctgaataaattggcgggtagccgcttgtattccgtaatgcggtttttttgtgcccgtaataccaccctttcccgtattatggcggggcgtaatgggggagctttatgctcgctggtttcccaatttgccagtctgtcaaccctgttacgtctcgccaccacgtttgacagcgttgtagtgaggcttcttaaacttgaattgggagcctttcatatggctatatcaacacgccctgattttatctggcgctttatgcagtgccacgtaaaaatatccgccttcataccgttaccgctgccagtgagcgcgaagcgcgcgccctgcttccggcatctcgtctggtctttgttgcccgtatccgtgtccgggaggcgtgccatgtttaagctccttatcaccctgattaactaccagaacggcgacgttcgccagatgattcattcctgggaatatccgacttatgacgatgcatggcgtgatgcctgtcgtatggcatattcccgcaatgacaaacaggggcgattaacccacaaatgcgcagtaaaaatcatggaggggtaa

SEQ ID NO: 491775 - DNA, 321 bp, Shigella sonnei
atgactcaatccgcattcattccaccaactccagaacagcgccgcaccatactcgccgagtatggttttgactgcgaagaacgcatcagggaagagaagtgtaaaaaaatgaccacgctttcacgctcccggcgctgggaactggagaagatcggtgcttttcctccccgtcactctttggggcgttgctcatgtacctggctgttaagtgatgttttgtggtggctacgtaatccgccagttattgccaaagtgaataacccatacgaaaacgccaaaaagaaaagggagagggaatccggtagcgccagagttgaataa

SEQ ID NO: 491776 - DNA, 1053 bp, Shigella sonnei
atgacgttaccactaagagattactatcctattgagcgcgcggcaaagttattagactgcgatattgatgatcttattcattgggctgtgacaggctgcattcgtatttgtataaaaattgaatctgcatatggaatattaaatatcccagatgaaaaagatgtggttaatttcgattgtctgcgtaagtttctggattcagaaccatgtaaatcacggttatctgaccttgatgccatttcagaaagggcggcagaacaccatggttttaattatataaaaaccaagtcgagaattatatttgattcaatgtgcgaatctctaagtcattcatatgtagcgcccaaatttggtgacatagcaattgatactgcatttgctttgttaaattattataacagggggttatattatggggaaaattatcacatatatagtgtatatcgaatagcaacggatgaaagagctgtggcagttgtaccaccagtatttaaaggtattcaagaaaaataccataagtattttgttgaaataggcggcattttcgctttggggggaagtttttttgccaactatgattttaataagaagtttaaagccaaccgaataattaatagcaatattataattgcttctgacgttgatatacatataggagtaattgttactgaggatgtttcttttgatattggtgatttatatatcttaaagagtgattttttaaaaatacaaaatgctacaagctccaatagcgagttaagaaaagattatgttaatccattggcagacactttatatttgtgtgcgggtaacaatatattaagctctgaggatggagagaaagatatatgcaccaataaaaacaatatagaacgattatctaaaacaatgaaggatttttttcgtgcgatgcttgttattcattataaagaactcgaaaacaatccggtaaaacttgctgatatattgaccgcggaagcaaaagaggcaggactcaatatgcgctttgataaaagtactatatcaagatggattaaggcatcatctcagtaa

SEQ ID NO: 491777 - DNA, 1200 bp, Shigella sonnei
atgatgtctggaacgaataagctcagcgacaggaaactaaaggcgctgcaaggaacgcatagggatcgtgttgaaatgcttgctgacggagaggggttaggggtcaggttatcaactaaagggcatgtgagctgggttttttcatatcgccttggagggcgtgagagttcagttattcgtcttactctagggaattaccctgatattagtctgaaagatgccaggatgtggcgtgagcgttgccgtcaatggttggctaatggtcttgatccaaaaattgaactccaactttttactgaagaatcccgtgctcctgttactgttcgagatgcgttggaatattggttggtcaattatgcaagacataagcgcaaagatgaggaattgattagggcgcaattctgcaaacatgtctaccccagaataggccattatccgttatcacggtgcgatactcgccattgggtaaaatgttttgatgagattcgcgctataagttcaaaaacggcggggcgtatgtttcaactctccaagcaggcattgcggttttgcaatgttcggcgttatgccatcagtgatgcccttgttcatttaacgttaaccgatgtaggggaatctgccggacagcgcgaccgtgttttgagtgatgccgaactatcagatctttggtattttgcaaaggagaaacatcgggatatttatttttctagattaataaagttgcttattgtctttggggctagaactgtagagattcgccgttctcattggattgaatgggattttaatgaatgggtttggattgttccaagaaataacagtaaaagtaacaaaaagattattcggccaattcccgaaggtataagagactggttaaaagagctaaaacaggaaaccgggaggacgggcttacttttgggtgaggagagaacgcatagagctgtttctctgaaaggtcgcagaatgtataaaatattcggacataatgaaaaatggacgctacacgatttaagacggacattttcaactgggttaaacaacatgggggtaatgcctcatattgtcgagtcattattaggtcacgtatataatgctggctccgcagaatttaactataatcttagccagtatatcccattcaaattaaaggctctaaatgactggcttgaatgtttagaaaaaatggttaaagataaataa

SEQ ID NO: 491778 - DNA, 327 bp, Shigella sonnei
atgatcaacaccctcgccgatgcccgccgttacatcgtcgaaaacgatcttaaacatgtacagattatcggcgatttctatcacatgaatatcgaagaagataacctggcgcaggcgctgcatgacaaccgcgacctgctcggtcatgtgcatattgcggataaccatcgctaccagccgggcagcggcaccctggatttccacgcgctgtttgaacagctgcgcgcggataactatcagggctatgtagtgtacgaagggcgtatccgggcggaagatcctgcccaggcgtaccgtgattcgttggcctggttgcgtacctgctaa

SEQ ID NO: 491779 - DNA, 1863 bp, Shigella sonnei
atgaatatattcgatcactatcgccagcgatatgaagctgccaaggacgaagagttcacactgcaggagtttcttaccacttgtcggcaagatcgcagtgcttatgccaacgcggctgagcggctattgatggctatcggtgagcctgtcatggtcgatacagcccaggaacccagactttctcgactcttttctaaccgggtcattgcacgttatccggcatttgaagagttttacggcatggaagacgcgattgaacagattgtctcttatctgaaacacgcggctcaggggctggaagagaagaaacaaatcctgtatctgctggggcctgtgggtgggggtaaatcatcgcttgctgagcgactgaaatcattaatgcagctcgtaccgatttatgtattgagcgccaacggtgagcgtagcccggtcaacgatcatccgttctgtcttttcaatccgcaggaagatgcgcagattctggaaaaagagtatggcattcctcgccgctatctcggcaccatcatgtcgccgtgggcggcaaaacgcctgcatgaatttggtggcgatatcactaagttccgggtagtgaaggtctggccgtcaattctgcaacaaattgctatcgccaaaacagaacccggtgatgagaacaaccaggacatctccgcgctggtagggaaagtcgatattcgtaaactcgaacactacgcgcagaatgacccggacgcctacggctattccggtgcgctgtgccgcgccaatcaggggatcatggaatttgtcgagatgtttaaagcaccgattaaagtgctgcatccgctgttaaccgctactcaggaaggtaactacaacgggacggaaggtatctccgccctgccgttcaacgggattattctcgcccactcgaacgaatccgaatgggtcactttccgtaataacaaaaacaacgaagccttcctcgaccgtgtttacatcgtgaaggtgccgtattgcttacgcatttccgaagagatcaaaatctacgagaaattgcttaatcacagtgaattgactcacgccccatgcgcccctggcacgctggaaacactgtcacgtttttccattctttcgcgcctgaaagagccagaaaactccagcatttattcaaagatgcgggtttatgatggcgaaagtctgaaagacaccgatcccaaagccaagtcgtatcaggaatatcgtgactacgccggtgtcgatgaagggatgaaaggtctgtcgacgcgttttgcgtttaagatcctctcccgcgtgttcaacttcgatcatgtagaagtggcggcaaacccggtccatctgttctacgtcctagaacagcagatcgagcgcgagcagttcccgcaagagcaggcagaacgctatctggagttcctgaaaggttatctgatcccgaaatatgccgagtttatcggcaaagagatccagacggcctaccttgaatcctattccgaatatgggcaaaacattttcgaccgttatgttacctacgcggatttctggattcaggatcaggagtatcgcgatccggataccgggcagctgtttgaccgcgagtctcttaacgccgagctggagaaaatcgagaaaccggcggggatcagtaatccaaaagatttccgcaacgagattgttaacttcgtactgcgcgccagagcgaataacagcggacgcaatccgaactggaccagctatgaaaaactgcgcacggttatcgagaagaaaatgttctccaataccgaggagctgttgccggttatctcgtttaacgccaaaacgtcaaccgacgagcagaagaaacacgacgactttgtcgaccgtatatga

SEQ ID NO: 491780 - DNA, 372 bp, Shigella sonnei
atgggccaggatggacacgatcgcggcgcgaaagtgatcgccagcgcctattccgatctcggtttcgacgtagatttaagcccgatgttctctacacctgaagagatcgcccgcctggccgtagaaaacgacgttcacgtagtgggcgcatcctcactggctgccgatcataaaacgctgatcccggaactggtcgaagcgctgaaaaaatggggacgcgaagatatctgcgtggtcgcgggtggcgtcattccgccgcaggattacgccttcctgcaagagcgcggcgtggcggcgatttatggtccaggtacacctatgctcgacagtgtgcgcgacgtactgaatctgataagccagcatcatgattaa

SEQ ID NO: 491781 - DNA, 414 bp, Shigella sonnei
atggtgccaaaaatggcggtgctggtcgcctccattccgcaatttgtgctgggcggtgctgggctggtgatgttcggcatggtactggcgacagggattcgaattctgtcgcgctgtaactacaccaccaaccgttacaacctctatattgtggcgatcagtctcggcgttggcatgactccgacgctctctcacgatttcttttctaagttaccggccgtactgcaaccgttgctgcatagcggcattatgctcgcaacccttagcgccgttgtgctgaatgtcttctttaatggctaccagcatcatgctgacctggtgaaggaatccgtctctgataaagatttaaaagtcaggacagtacgtatgtggcttctgatgcgcaagctgaagaaaaatgagcatggagaataa

SEQ ID NO: 491782 - DNA, 228 bp, Shigella sonnei
atgggctggcaaaagtgtagcggtattaagcgcagctatttaataccgatacgtttgcagaaaccgcagcatattgtgatgcttttgaatattatgctaatggtgctatcagttatcaaaaaacctataaagataatattgaaaatatctgtcagtcatttggcggcatcatgtatgtacatgccggacaaatctgtattaccacagaccgcaaatcggtatccgtag

SEQ ID NO: 491783 - DNA, 249 bp, Shigella sonnei
atgcgcacacaggttgtattgcaaaaatggggtaatagcattgcccttcgactaacgggaaaccttaaaaccgttccgggtttttcagtgggtgatatcgtcaacgttgaaattagtgaaaaggggctttttgtagaaaagcctgcacgccgtcgcctgagtgaagccgaattactcgccgggataacgccagttacagcgcacgcggacgaaattgccaccccattcaatgaggaggttgattactga

SEQ ID NO: 491784 - DNA, 345 bp, Shigella sonnei
atgtttgtacctaagcgtggtgatatttgctggctggattttgagccgcagaaaggaaaagagatcggaaagtatcgcccggcactcatactgtcccatgagcaatataaccgactcaccgggcttgtcatatgctgccccataagtacgagcatacgaaatgctcccacagaagttccggtaacaaatctggacgcccccagcgttgtagcaaccacactcattcaaacccttgactggcgtcagcggaaagcgcgcttaatcacagaggcagaaaatggggtatttaatgatgtgcttgaaagagtcattaccctgattggcggagagcatctgcttaagtaa

SEQ ID NO: 491785 - DNA, 1272 bp, Shigella sonnei
atgggcggtctgaatactccacatttgcacggcgctgatatagtgagccgactcaggggattaatgtcccggaatcgcctgaaagcaaacacagcaagcataagcgatgagacgcgtcgcgcgctggacaatgaatatcaaaaactggagcgtgagcttgagcttcacaccctgcatactgcaagtggtgggggtaataacgacggcattgagcgttataattgcactgctgattctgttgtatcacaacgaaatcaacagtctcagatggttttcaattgcgctatcgagtcgataaccggaaaacatccgaaggatttgcacttttccggtgacactgcgcgctattcgtcagaagttgaacccgttccccgccagagtgcaacgcttgccagtggatggcaggcaaatttccttgctgaaataactcccgtgcctgttacggatatatcaggtcgggttgtgctggtagacgcttcggggccgttggcacgtacatcgccacctcacgagcgccgttcgccactacaggcgcattcactggtttcaaggggctaccgctgcgagcaggttaattttgattttgcgttgagctacgacaatgccgatgctcacgcatccgcaaacggccttgaaggaagtgcgcgggccgcttttgaacgccggaaatggctggatttgattcagattggttttaacggtacgcactatgccgatacatcagatcccggaacatatccggggcgtgatgattgcggcgtgggctggttgcagaagtttcgaaatgaagcggcgggaagggttatcagcggcctttctgtttcatcaccgaaaagtaatacacgcggtacacaccatacgatagatgcgctcgttctggatgcctggcaatccatgattgatgaacagtggcaggaaggcattgtggccgtatgcagtcacaatacgctggtccgtaagcaatggcctttgataaaccgtcttgatccatcgcagatgaatcaggaaattttgcttaacgaggaaatcattaaaaatcctgttctggggaatctcccggctgtgaccgttccatttttcccggacaatgctgtattgatcacacctcttgccaatctgtgtctgtactggcagcgtggttccgttcgtggcctggtaaaaaacgagcctcagtataatcgcctcgcgttctatgagtcctgtaaccttgactgggtggtggggcaatatgaagcagggtgcttactggatgggattgactggaaagaatag

SEQ ID NO: 491786 - DNA, 735 bp, Shigella sonnei
atgccattctatttcaggaaggagcgtccgttaaactcaggctacctcaaacatcaggtatgtaaagcacagtttgatacagccatggcaaaactcagtgaacaggaatcattaatcaccaatctggaagcgactatcgaacagacgaaaggggagctggagtctctcgatcgtgactggcagaactcaatcctgtctgcgctgggcgtaaaaacggaagcctccgcgaaattatctattcaggcgggtgtggcgcgagaaaatcttgagcgtctgcgggtattgcatgatgaagcgcgcatcaggctactggagtgtcgttataacgcggcagaggctggttgtgcttacgaaagcattgataataagttgcgggcagagatatttgcaaaagcacttcccgaactgattaacgagctgacccctgttctgttattgattcgtggtttatgtgagctacttggccagccgctgtataacgcagaaaagaaaatatgcgaaacactgaaagcggcagatactgctgaaagtgtcgggatgattcgcggccggattaacgataccgaaagcgacacctccagcccgctgcgttattgcccggagaaactcccggattcggtaagccgcgcaatcaggagcgccccttcacctgtacaatggagcgcggcgcgacagaatccagaaaaaatgcgcgaccttgcggagggcagagaactctgccgggggtggcagtaa

SEQ ID NO: 491787 - DNA, 189 bp, Shigella sonnei; identical to SEQ ID NO: 463227

SEQ ID NO: 491788 - DNA, 528 bp, Shigella sonnei
atgatgcacctgaaaaatattaaggccgggaatccgaaaacaccggaacaataccagctaactaaaaaagcgggcgtggtatggctcttttgcgaagatggcaaaaactggtatgaggaacaaaagaattttcagccagacaccataaaaattgcttacgatgagaacaacatcatcgttgctgtcagtaaagacgtttcaactattaatcctgaagggctaagcatagttgaagttcctgatattacggcaaatcgtcacgcagacaataacggaaaatggatgtttctggatggtaaagtagtaaagagggaatatacagaacaggaactgcaacaacaggccgaatcacaaaaggccgcattgctttccgaagctgaatcagtcatccagccgctggaacgcgctgtcaggctgaatatggcaacagacgaggaacgcacacgactggaagcatgggaacgctacagtgttctggtcagccgtgtggatacggcaaatcctgaatggccacaaaagcctgaataa

SEQ ID NO: 491789 - DNA, 1329 bp, Shigella sonnei
atgattggggccatttttgttttattagtggcctggttattcctgtcacaatggattcgcattaccgtttttgtggttgccatactgctatggctgaacgtacttaccctggcgggaccaagtttctccttgtggccagccggacaaccgacgaccactgtaacaacgacgggtggtaacgcagcggcaaccgttgcggcgacgggtggcgcatcggtagtgggtgatatgcccgcacaaactgcaccgccaacaacggcgaaccttaacgcctggctgaataatttctataacgcggaggcgaaacgtaaatcgaccttcccgtcttcgctgcccgctgatgctcagccatttgaactactggtgattaacatctgttcgctttcctggtcggatatagaagccgccgggttgatgtcgcatccactgtggtcgcatttcgatattgagttcaagaactttaactccgccacctcctacagtggcccggcggcgatccgtttactgcgcgccagctgcgggcagacttcgcacactaatctgtatcaaccggcaaataacgactgctatctgtttgataacctttcgaaactgggctttacccagcacctgatgatgggacataacggccagttcggcggttttttgaaagaagttcgcgaaaatggcggcatgcagactgaattgatggatcaaacaaatctgccggttattttgctgggctttgatggttcgccggtttatgacgataccgccgtgcttaaccgctggctggacgttaccgaaaaagataaaaacagccgtagtgccacgttctacaacacgcttccactgcatgacggcaaccattatccgggggtcagcaaaacagcggattacaaagcgcgggcgcagaaattctttgatgaactggacgccttctttactgaactggagaaatcgggtcgtaaagtgatggtggtcgtggtgccggaacacggcggcgcgctgaagggcgacagaatgcaggtatctggcctacgtgatatccctagcccgtctatcacagacgtccccgttggggtgaaattcttcggcatgaaggcaccacatcagggggcaccgattgtcattgaccaaccgagcagcttcctagctatctccgatctggtggttcgcgttcttgatggcaagattttcaccgaagacaatgttgactggaaaaaactcaccagtgggttgccacaaacagcaccggtctccgagaactcaaatgcagtagttattcaataccaggataaaccgtacgttcgcctgaacggcggcgactgggtgccttacccgcagtaa

SEQ ID NO: 491790 - DNA, 189 bp, Shigella sonnei; identical to SEQ ID NO: 463227

SEQ ID NO: 491791 - DNA, 456 bp, Shigella sonnei
atggtagtgtccgctattgccagtacacctcattctgttgttctactctttcgcggatatttttttctaaataatgtaaccattcattaccgccctttcgagcggtctcctgatgatttgagggtgcagaaatccctccggttaaggattaaatttttaacagtgctaaatttaattattcagttctggattttgtcgccctgcgtatccgcgctttcgcgttacgctcaatctgtatcagcttttctatatttctccgcctttcctgttcctcctggcgcaatagccttacatcatctgccagtctggtttctctttttgccacagagagcatccagtcaaacggctccacaaccgcaccgcagattttacagcggacctgacgctctttttcgtcaacccggacagaggcgtgatggcaatatggtctttccgatggttcataaagaaaattaa

SEQ ID NO: 491792 - DNA, 414 bp, Shigella sonnei; identical to SEQ ID NO: 461228

SEQ ID NO: 491793 - DNA, 366 bp, Shigella sonnei
atgtctaatgatgctatcaattttaaaattagcaatgtaaacgcctcggttcgtgctcttgcccttggtggtttcttgaaagatgcacagatgaatatcaagttagtaattctcaatccatatgatagtactgtaattgattcaatgctcatgtttacggggtttattgactatgtacaggcagtaactgatccaaatcagaagcaaaacgaaatgactatatatgtgaattctgtctataagaaattagacagacaacctgcattaattgccgccaactcagtatatcaatcttactatagaaatgatgagtactttagtctgttaggtcaagttaatcaaaatcagaactggaaatacaagtaa

SEQ ID NO: 491794 - DNA, 588 bp, Shigella sonnei; identical to SEQ ID NO: 486977

SEQ ID NO: 491795 - DNA, 729 bp, Shigella sonnei
  misc_feature (689)..(698): n is a, c, g, or t
atgtcgtcaaccctacgagaagccagtaaggacacgttgcaggccaaagataaaacttaccactactacagcctgccgcttgctgctaaatcactgggcgatatcacccgtctacccaagtcactcaaagttttgctcgaaaacctgctgcgctggcaggatggtaactcggttaccgaagaggatatccacgcgctggcaggatggctgaaaaatgcccatgctgaccgtgaaattgcctaccgcccggcaagggtgttgatgcaggactttaccggcgtacctgccgttgttgatctggcggcaatgcgcgaagcggttaaacgcctcggcggcgatactgcaaaggttaacccgctctcaccggtcgacctggtcattgaccactcggtgaccgtcgatcgttttggtgatgatgaggcatttgaagaaaacgtacgcctggaaatggagcgcaaccacgaacgttatgtgttcctgaaatggggaaagcaagcgttcagtcggtttagcgtcgtgccgccaggcacaggcatttgccatcaggttaacctcgaatatctcggcaaagcagtgtggagtgaattgcaggacggtgaatggattgcttatccggatacactcgttggtactgactcgcacaccactatgatcaacggccttggcgtgctggggtggggcgtgggtgnnnnnnnnnnggtgggatcgaagcagaagccgcaatgttag

SEQ ID NO: 491796 - DNA, 648 bp, Shigella sonnei
atggcagcgacgcacacactccctctggcgtcaccgggcatggcgcgcatctgcctttacggggatttacaacgatttggccgccgcatcgatctgcgtgtgaaaacgggggccgaagccatccgggcgctggccatgcagatcccggcgtttcgtcagaagctgagcgacggctggtatcaggtacgcattgccgggcgtgatgcaggcgaaaatgaattatctgcccgtcttaatgaaccgctggcaaatggtgccgtgatccacatcgttccgcgtctggcgggtgccaaaagtggcggtgtgtttcaggcggtgctgggtgcggcgctgattgcggtggcatggtggaaccctgttggctggctgggggccgcggctgtatcgggtatgtatgcagcaggggccagtatgatcctgggtggtgtggcgcagatgctggcaccgaaagccaggatgcccacggcagccagtacagataacggcaaacagaacacttatttctcctcactggataacatggttgcccagggcaatgttctgcccgttctgtacggtgaaatgcgcgtggggtcgcgggtggtctctcaggagatcagcacggcagacgaaggggatggtggtcaggttgtggtgattggtcgctga

SEQ ID NO: 491797 - DNA, 303 bp, Shigella sonnei
atgcagatggtgtttcaggacccgctctcttcgcttaatccgcgcttatcggtgtggcgcatcatcacagaaccgctctggatagctaagcgtagtagtgaacaacagcggcgagcgttggcaaaggagttggctgtgcaggtgggtattcgtccggagtatctcgaccgcctgcctcatgcgttctccggcgggcagcggcaacgcatcgccattgccattgccagagcactctcttcgcagcctgacgtgattgtgcttgatgagccaacctcggcgctggatatctctgaggtagcctga

SEQ ID NO: 491798 - DNA, 462 bp, Shigella sonnei; identical to SEQ ID NO: 487756

SEQ ID NO: 491799 - DNA, 342 bp, Shigella sonnei; identical to SEQ ID NO: 466452

SEQ ID NO: 491800 - DNA, 366 bp, Shigella sonnei
atgctggaagcggccagagaggccagacgtcaggaaattgaagcatggcgcacagaacaggaggcgaagccgttcacgtttgaatggaatggtcgtatctggaatgctggccccgactcactgggccgcctgtccccggtagtcatgctggcaaaatctgtcacagcacaaacgcatatggcgtggggtgatgccgataatcagcaggtgaaactgtcgatgccggaactggaagaactggcggcagcaatggtgcaggcgcaggtcgatcgcaacgatgagatttatcgccgtcagcgtgaaatgaaagaggagctgagcagtctggatgatttggcttcaattcgggcgtttgacgttaagtaa

SEQ ID NO: 491801 - DNA, 435 bp, Shigella sonnei
atggacgcctcacgggccgatgatgcagctgctgtctcagagtctgccgcagctgaggcgctctgttccgctgccgtttcagaagacttagcattcgtctcggacgtttttgccgccttcacggaatttcctgccgccgttgccgaggaggctgcactgctggcgcttgtggaggcgttcgtttctgatgattttgccgcctctttggaggccgccgcatctctggctgaagtggcggcttctgacgctttcgtcgtcgcagtggatgcagaagtggctgctgatttttgtgacgctgcagcattcgtttctgacgttttcgccgcaccggcactggtggccgccgcgctttttgaggactctgcagcggcagcacttttttccgcttcagtggcctttgttgatgccgttcctgcgctggaagacgctgactga

SEQ ID NO: 491802 - DNA, 342 bp, Shigella sonnei; identical to SEQ ID NO: 466452

SEQ ID NO: 491803 - DNA, 699 bp, Shigella sonnei
ttggcccgggcatgggcatctgcccgcgatgatttacggcatgcaaggcaacgtctgaaatcgtttcttctggttcatggggtccattatgtcgggcgagcagattggggccctgcacaccgacgctggctcagcaaatactcattcgaaagtccctggcgacaattagcttttgacgaacaccgtcgtacaatagaagatcggcaggcacaatgtgaacggctggaatccgccctgaaggaggccgttaccgaatggaggctgtatccggtagtagaggcgctgcaagccatgcgagggattcagtttattactgcggttggattaatttctgaactgggtgatctgacccgttttgaacatccacgacaactgatgtcatggtttggtatcacgccatcagaatattcatcgggtggaagcagacatcagggcagcattaccaaagccggaaacagctatgccagaaagctattggtcgaggcagcgtggagttaccgtcatccggcacgcatcagtccggcaatacaaaaaggcaggaaaatttaccccgccccgtcattgacagagcatgggatgctcaactcaggctttgtaagaggtatcgaaaacttcaggccaaaggaaagaatgtcaatattacaattgttgctgttgcacgtgagctggcgggttttatctgggatatgggccgaatag

SEQ ID NO: 491804 - DNA, 414 bp, Shigella sonnei; identical to SEQ ID NO: 461228

SEQ ID NO: 491805 - DNA, 516 bp, Shigella sonnei; identical to SEQ ID NO: 474713

SEQ ID NO: 491806 - DNA, 285 bp, Shigella sonnei; identical to SEQ ID NO: 460874

SEQ ID NO: 491807 - DNA, 123 bp, Shigella sonnei; identical to SEQ ID NO: 461109

SEQ ID NO: 491808 - DNA, 2955 bp, Shigella sonnei; identical to SEQ ID NO: 486924

SEQ ID NO: 491809 - DNA, 621 bp, Shigella sonnei; identical to SEQ ID NO: 479960

SEQ ID NO: 491810 - DNA, 189 bp, Shigella sonnei; identical to SEQ ID NO: 463227

SEQ ID NO: 491811 - DNA, 189 bp, Shigella sonnei; identical to SEQ ID NO: 463227

SEQ ID NO: 491812 - DNA, 321 bp, Shigella sonnei
atgttgttgtttttcacaaacaacgtcagcttatcgcctggttgcagattcgcagtgtcgctgttccagcgcatcacatctttgatgttcacgccgtggcgtttagcaatgcttgaaagcgaatcgcctttgcgcacacgatacgtaatgctatcgctgttgtttgccaaccgctgtgcgctactgcctgcaccaatcgtcaaactttggcctggctacagcttagatccgcgcagtttgttccactgctgcaaatctttggtgcttacgccgagacgtgaagcgatgcttgaaagcgtgtcgccagagcgtacggtgtaa

SEQ ID NO: 491813 - DNA, 156 bp, Shigella sonnei; identical to SEQ ID NO: 489386

SEQ ID NO: 491814 - DNA, 474 bp, Shigella sonnei; identical to SEQ ID NO: 488161

SEQ ID NO: 491815 - DNA, 297 bp, Shigella sonnei; identical to SEQ ID NO: 488049

SEQ ID NO: 491816 - DNA, 318 bp, Shigella sonnei
atgttaacaacatgtttatcacttggggttgcgatgacgacgaacacgcattttagaggtgaagaattgaagaaggtttggcttaaccgttatcccgcggatgttccgacggagatcaaccctgaccgttatcaatctctgatagatatgtttgagcagtcggtcgtccgctacgccgatcagcctgcgtttgtgaatatgggggaggtaatgaccttccgcaagctggaagaacgcagtcgcgcgtttgccgcttatttgcaacaagggttggggctgaagaaaggcgatcgcgttgcgttgatgatgcctaattaa

SEQ ID NO: 491817 - DNA, 288 bp, Shigella sonnei
atggcactgaatattccattcagaaatgcgtactatcgttttgcatccagttactcatttctcttttttatttcctggtcgctgtggtggtcgttatacgctatttggctgaaaggacatctagggttgacagggacggaattaggtacactttattcggtcaaccagtttaccaacattctatttatgatgttctacggcatcgttcaggataaactcggtctgaagaaaccgctcatctggtgtatgagtttcatcctggtcttgaccggaccgtttatgatttaa

SEQ ID NO: 491818 - DNA, 363 bp, Shigella sonnei; identical to SEQ ID NO: 469980

SEQ ID NO: 491819 - DNA, 276 bp, Shigella sonnei; identical to SEQ ID NO: 484087

SEQ ID NO: 491820 - DNA, 582 bp, Shigella sonnei; identical to SEQ ID NO: 490383

SEQ ID NO: 491821 - DNA, 189 bp, Shigella sonnei; identical to SEQ ID NO: 463227

SEQ ID NO: 491822 - DNA, 276 bp, Shigella sonnei; identical to SEQ ID NO: 484753

SEQ ID NO: 491823 - DNA, 261 bp, Shigella sonnei; identical to SEQ ID NO: 487260

SEQ ID NO: 491824 - DNA, 2280 bp, Shigella sonnei; identical to SEQ ID NO: 484978

SEQ ID NO: 491825 - DNA, 402 bp, Shigella sonnei
atgcagcgtgggcgtttttgcctgacaggtggttttcgcgatatgtatatcgcgaaaaataatcgcatgttttacgccttgctgattgcaatttcggtacaaagcgtgggggtttttgcgttaattcaggcgggcctactgacttacgaagccgaggcgttcccgtggcttggtactgttataggtgggtatatcttcgggctgggaattgttctggcgggtggatgtgccaccgggacctggtatcgcgcgggtgagggattgatcggcagttggatcgcgcttttcacttatatggtgatgagtgcggtgatgcgttctccacatgccagtggtttaaatcaaaccttgcagcactacatggatttgcccctatatttccagacatctgttatcacttaa

SEQ ID NO: 491826 - DNA, 1335 bp, Shigella sonnei
atgctaaatttatttgttggccttgatatatacacagggcttttgttattgcttgctctggcatttgtgttgttctacgaagcaatcaatggttttcatgacacggcgaatgcggtggcaaccgttatttatactcgtgccatgcaaccacaacttgctgtggtgatggcggcattttttaacttttttggcgtgttattgggcggacttagcgttgcctatgccattgtccatatgttgccaaccgatttgttgctgaatatggggtcaacccacggcctggcgatggtcttttccatgctgctggcggcgattatctggaacctgggaacgtggttcttcggtttaccggcctccagttcgcacaccttgattggtgcgattatcggcatcggtttaaccaacgcgctgttaaccggatcatcggtgatggatgcgttaaacctgcgtgaagtgaccaaaattttctcctcgctgattgtttccgctgcgggcgtggcgttttcgcacggcgcgaacgacggacaaaaagggatcggcctggtgatgctggtactggtggggattgcccctgctggcttcgtcgtcaatatgaacgcgtccggctatgaaattacccgtacccgcgatgccgtcaccaacttcgaacactacctgcaacagcatcctgaactgccgcagaagttgattgcgatggaacctccattgcctgcagcatcgactgatggcacgcaagtaacagagtttcactgtcatccggcaaatacctttgatgcgattgcgcgcgttaaaacgatgctgccaggcaatatggaaagttacgagccgttaagcgtgagtcagcgcagccagctgcgccgcattatgctgtgcatctctgatacctccgcgaagctggcgaaactgccaggcgtcagtaaagaagaccagaacctgctgaaaaaactgcgcagcgatatgttaagcaccattgagtacgctcctgtgtggatcatcatggcggtagcactggcgctcggcattggcaccatgattggctggcgtcgtgtagcgatgaccatcggtgagaagattggtaagcgcggcatgacgtatgcgcaaggcatggcggcacaaatgacggcggcagtgtctatcggccttgccagttatattgggatgcctgtctccacaacacacgtcctctcgtctgcggtagcagggacgatggtggtggacggcggtgggttacagcgtaaaacggtaaccagcatcctgatggcgtgggtgtttactttaccggcggcaatttttctttctggtgggctgtactggatagcattgcagttgatttaa

SEQ ID NO: 491827 - DNA, 1110 bp, Shigella sonnei
gtggttaggctagctacatttaatgacaatgtgcaggttgtacatattggtcatttattccgtaactcgggtcataaggagtggcgtatttttgtttggtttaatccaatgcaagaacggaaatggactcgatttactcatttgcctttattaagtcgagctaaggtggttaacagtacaacaaagcaaataaataaggcggatcgtgtgattgagtttgaagcatcggatcttcaacgagccaaaataatcgattttcctaatctctcgtcctttgcttccgtacgcaacaaggatggagcgcagagttcatttatttacgaagctgaaacaccatatagcaagactcgttatcacatcccacagttagagctagctcggtcattatttttaattaactcctatttctgtcgaagctgtttgagcagtaccgctttacagcaagagttcgacgttcagtatgaggttgagcgagatcatttagagataaggatcttacccagttcatcgtttcctaaaggggcgttagagcagtcggccgtagtgcagcttttggtttggttgttttcggatcaagatgttatggattcgtatgaaagtatttttaggcactatcaacaaaatagagaaattaagaacggcgttgaaagctggtgctttagctttgaccctccgcccatgcagggttggaaattacatgtaaaaggacgttcttctaacgaggataaggattatttagttgaggaaatagtaggtttagaaatcaacgctatgcttcctagcacaacagctattagccatgcctcttttcaggaaaaggaggcaggtgatggtagtacgcagcacatagcggtttcaacagagtcagttgttgatgatgagcatctacagttggacgatgaggaaacagccaatatagacacagacacacgagtcatagaggctgagccgacatggataagttttagtagacctagtcgaattgaaaaatctcgcagggcaagaaaaagtagccaaactattttagaaaaagaagaagcaacaacaagtgaaaataggggtctgacgctcagtggaacgaaaactcacgttaagggattttggtcatga

SEQ ID NO: 491828 - DNA, 201 bp, Shigella sonnei
atgaagactcttgatatccgggtcgctttcagcgccgttgacaggctgacccggcctgccgaaaacgcccgccgcctgatggggcagtttggtgactccatccagcgaacgcagggggcgatcaaaaatctcgagcgtcacgggcgcgttcatttgagcgcgcccgtgacgctgtcagtaaagcggatgcgggcatcgtga

SEQ ID NO: 491829 - DNA, 516 bp, Shigella sonnei; identical to SEQ ID NO: 289069

SEQ ID NO: 491830 - DNA, 1704 bp, Shigella sonnei; identical to SEQ ID NO: 486876

SEQ ID NO: 491831 - DNA, 231 bp, Shigella sonnei
atggcaacgttgtgtatcgatggtgggaaaaaagccaaaatgcgcccgggtgatgtattaggtgcactgacaggagatatcgggcttgatggcgcagatattggcaaaatcgccgtgcatccggcgcatgtctatgtcgcggtccgtcaggctgttgctcataaagcatggaaacagttacagggcgggaagattaaaggaaaaacgagccgggtgcggttattaaaataa

SEQ ID NO: 491832 - DNA, 189 bp, Shigella sonnei; identical to SEQ ID NO: 463227

SEQ ID NO: 491833 - DNA, 189 bp, Shigella sonnei; identical to SEQ ID NO: 486857

SEQ ID NO: 491834 - DNA, 1101 bp, Shigella sonnei
atgagcgagtccaaatcgccggatgccctgagagcaatggtagccggtacgctggctaattttcagcacccaaccctgaaacacaacttgactacgcttaaagcgttacaccatgttgcgttgatggatgacacactgcatgtcgaactaatcatgcctttcgtgtggaataagccttttgaagacctgaaagagcaatgtagtggtgatctgctccgtatcactggcgcaaaggctattgactggaagctggcgtacaacattgccacgcttaagcgcgtcaaaaaccaaccaggcattaatggcgttaagaacattatcgccgtcagctcaggcaagggcggcgtgggtaaatcctccacagcagtaaacttggcactggctttggctgctgaaggtgcgaaagttggtattttggatgccgatatctatggtccatcaattccaaccatgctgggcgcggaaaaccaacgtccaacctcaccggacggtactcacatggcacctatcatgtctcatggcctggcaaccaactctattggttatctggtcaccgatgacaatgcaatggtgtggcgtggaccgatggcgagcaaggcgctgatgcagatgttgcaggaaacactgtggcctgatctggactatctcgttctcgatatgccaccgggcactggtgatattcaattgacgctggcgcagaacattcctgtaactggtgcggttgtggtaactacgccgcaagacatcgcgctgatcgatgcgaagaaaggcattgtgatgttcgaaaaagtcgaagtgccggtactgggtatcgttgaaaacatgagtgtgcatatttgcagtaactgcggtcatcacgagccaatttttggcaccggtggagcacagaaactggccgagaaatacaacacgcagttgttaggccaaatgccacttcatatctctcttcgtgaagatctggataacggaacaccaaccgttattagtcgtccagatagcgaatttacggctatttatcgtgacctcgcagatcgcgttgctgcccaaatgtattggcaaggtgaagtaatacctggcgaaatcgcattccgcgcagtgtga

SEQ ID NO: 491835 - DNA, 390 bp, Shigella sonnei
atgggcttcccttctcctgcggcggattatgctgagagccgtatttctcttgatcagcagataattagacatccttcagcgacctacttcatgagagcggctgacagccatcatcgtgagggaatattgcagggcgcattgctggtggtcgattcctcacttaccccggttgatggttctctgcttgtatgcgctctggatggggaatatcgcgtaaaaagataccggaagtatccacgtcagcatctggaggatttaagaactggtaagaaggaagcattgccaaaggatgacgatggattcacgagcagcaatgccgtgtttggtgtgatcactcacattatcaacgacgcaagaagtggcgaatttgatgattgtcctgtgatgtag

SEQ ID NO: 491836 - DNA, 525 bp, Shigella sonnei
atgactaaatttggaaagctggaagctcatttgctaactcgtaactaccgctatgatgtgcatccatatagacagtggatcgatgaaagcgaaggagttgttacattccctctatacaggtttgatgggatgttggccgggtatcagacatacagaccaggcgctcctaagcagcatagcaatccgaagatggcccggtatttcacacgagcgcacggcagacagctactatggggaacctatcttcctttaaaagatggaccgatatggataactgagtcgatttttaaaagtgcagcagtgcacaacgcgggcggaaattcgtgggcgctgttaggttcgactttctcagcaggattacgtcgtcaactggcaatgctgccgtatgactttcgcgtaataggtgacaatgatgcggctggtgaatcacttgtgaagtctttcggaaaaggttttgtggccccggatcttgacgagctacaaccaaatgaagtgtctcatttgatttttagccatagccaataa

SEQ ID NO: 491837 - DNA, 855 bp, Shigella sonnei
atgatgcataaatcagtagccggtgagtttcagaaggaagtcgataatactaccgttctattggacgatattttaagcattctcgcgcttcttgagactggcgattggtcagaacattgcactaaaacggagttaggcggtcggcttgaaagagagattacacgacttattggtgatgcgcaggaagctacagtcactagttatgagttaatagctgaagcctggcgtttgatggatggacaagatcctaaaaccagcgattggcatagcaaggcttcgaagtatttaaattccaatagggtagaaaaagttgatgatgttaaaccgaagccagtagaccacggtttccgcgataactgcgaatgctctagttgccagaccacggcccgtatttgttccgaattgacagataagtccagcctaatctacgaagttaatgtaggcggtaatacatggggcgaatgcacaagagctgcatacgtaagagcaaaagacaatggggaattaaccagagttgttaccaatcacccaaataatgagcttaaagatcaccaaattcgagaactagtgaacgagttgcgggatattgcggttacgtatcacggaacgcagcaattgcgggagaaaattgccagagcagtgaacaactcgctcaaaggtggacaatcccaaccgaaacgtatacgaattacacatataggtgaaaacggaacagaaatcccccaattttctgttggggacatctttgatgtacatggagaagagtttggcgagcctcacatcactatgcctagttgccatgtttattggctaagagctatggagaaatatggtgataaatgggaagtgttatga

SEQ ID NO: 491838 - DNA, 222 bp, Shigella sonnei
gtgaataaagcagagttatttcagaaaatatcggctctcgcgactgaatgccacgctatagcatctgagcttgatgttggcgatgaacgaaccgagatgttcgaaatatacagtgtgctgcgcaatctctgtcggcgtggctacgccactcaagcagggcgaatgactaacccactactctcatcctgtgatgaggatgactcggatgaggatgacgaatga

SEQ ID NO: 491839 - DNA, 576 bp, Shigella sonnei
atgaccactataaccgataagaaacagtatccaggcgagcaatatcttaatgagctgatcaccaacatagagtttgctgcaagggcaccagttgaagtcgtgagagcgatggcagcagagctacagaagcggcgcgaagctgatagtgccgaacctgcaagtaatcatgaagagttgccgcttgattatctccaaggtcaaaaagatggtcttgaatgggctgcgcagcttgcagaagcaaatcacccacaaactggcgactggctttacgatgacccgctggagctggctaaagctatcagaaaaggtcctgacatgcccgaattcgatggaccaactccggtaactccggatggttggataagctgtagtgagcgaatgccgaaaaagaatcagaacgtacttatttcggtgaatttcgatagtgatctggttgagccgctaatatgctccgcacgctataccggaagcacctttcggcgcggagatgtaacgattaagccgggtaatggtattgagcaagcaactcactggatgccgctaccagaacctccgcaggagtcgaagagtgaataa

SEQ ID NO: 491840 - DNA, 501 bp, Shigella sonnei
atgaccactattaccaaagaacgtattgaattgttcattaaaaatccgcttgaaaacgggcttacccgtggtgaacaaatggaactggcacggattgcgctggcatcactggagcagaatgcactatcgggcaactctcggcttattcctggtgaagtgttgtccgcaatcctgaagttttccagagttcgtgccgatttcgatgattttgacggtgacaggcgaggtatcagtgattgtctggatgaggctgagcaagagcttatcgttaccattaacaaatatgccagtcagttggcagcagaaccgatagcgactaatgacgttcgagagcaaacagccgttccgccagttccagaaatacaggctgatgtcgcgcaagcaattgaaaatctcaagcagaagttagtggaatgcaatcgctataactactgcgcagatgcagttaagggcgtagaggatgcctgccacgctgccacgcttcagggaaaaggagagtga

SEQ ID NO: 491841 - DNA, 219 bp, Shigella sonnei
gtgcctacattattcagaaaagaatatccgcgaaaaagtagagcgacagaatttttgtttctcattctgtttatcgtgttgatgataccgatatccccgttaattctggtatggggaatcggaaaaataattgagccagttattgaattgtataacgacgtggtatgggcgtcattcaacacactgcacaataaaattaatccgtataaggaaaactga

SEQ ID NO: 491842 - DNA, 522 bp, Shigella sonnei
atgaaattttccaaattttctgagttggtgaatcgtattttgtccaacaaccacagccatcgtcgcgatatggatgtaacgatcgttgttcattcgcctggtcgcatcggttcaacaccatcagttgaggttcagtcaattcaggcgggttttgattgggatgccgggaaagtgatgatttttccagcacagccactgaccacgctaacaccggagcaggttgctgatatcactgatagtgtgcgcaaaggtcagtcttggcacgcgtatcaggaatacaagaagcataaagagcagttggaaaaattgtcgatggagttggaagccgctaaacagcgggaaaaagatctgtttatggaaaatgttcgacttaagtcaggtatagccggtctgatacacctcggtattcgatatgcggatgttgaggtcatgaaaattgctggagatgcccagctttctaccccatgcactgacagcatcataaacagcattgcaacaggcattcgcatcaaaggagagtga

SEQ ID NO: 491843 - DNA, 324 bp, Shigella sonnei
atgaccacatcgcattctgcaattacccagaaaaaagccttccacatactcgaacgattagaggcgcttgctacggaggaggagatatccccggagaaactggttgagttcagccgtgtgatattgcgtcgcaagaacgatatggagcggctgacatctggcgctccatccttatcagtcaggcgaacactttgttgcagcttctgcaacaaatcccagtacgccgtcaaaaagttaattgctggggacgccgttttcatctgcgacgagtgtgtggatgtgtgcaacagaattatccggggagagaaagagggatcagcatga

SEQ ID NO: 491844 - DNA, 489 bp, Shigella sonnei; identical to SEQ ID NO: 33681

SEQ ID NO: 491845 - DNA, 303 bp, Shigella sonnei; identical to SEQ ID NO: 36780

SEQ ID NO: 491846 - DNA, 498 bp, Shigella sonnei
atgagtaacaaaatcgaaaaccccgtagttatcattcacaagcgtgagaaccacgactcctatgcggtggcgatcaccaatgggagtcacgattattacgatggtctgctaatagcctcagtgtctcctgatgattctgaccaccctttcgctatggttggttactacatggctgccgaaattgagaagttgcgggcgcagagagacgcattagcggcggagaatgcggcgctgaagaagttctgcaaagacgctgcattcgatgccgattacgaagcagagctaggtatggagcgcggtggattcagtgatgcacttaacgatatcaaaaccccagccaccgatgctttcctggctgaaattgaacgcaaagcaatccgcaagttcattaacagcattgaacacatcctgcgtgacaagctgtcaccgtatgacaccgaagagatgcttgaggctatgcgtatttttctggaagaacagggagttgagcaaaaatga

SEQ ID NO: 491847 - DNA, 381 bp, Shigella sonnei
atgtttggcattgaagcacagcgtatagccgcttttgcaaaaagccctcttgataatcccttgtctcgtagtgagcaaatggagctggcaaggctttttcttcacattcaaaaacaggcagacattttcaataacatgcctaatcaacctattctggatggtcacatccagatggtcattaacagtcatgagaaaggctgggctgcaatcgtcccctgcacaattacatacaagttggcgaaagaggttcaagagtttcgaaaagccagtgtcgaatcggagtctaccaaagccgcaataaacactcttattcgcatggggttcacatggaccggtggagcctactggcaagcacctcaccccattttatccggcaattag

SEQ ID NO: 491848 - DNA, 705 bp, Shigella sonnei
atgaacaacctccagttagagcattttaacgtcacaggccattctgattttcctttcaagtttacattgaaaggttatgcagaggatgcggtaggccagatcattattgataaaggcatcgttaagtttgagggggattttgatgaatccgcgaaaacattcatagacttcgttgccaaacgttggagcgagcaatggaaagacctggaaaagcgcgctagtgagtttgatcggttcatggatgcaatggatacagcaaaagaggctcttgctgccgggactccgttagatctggagtcacttttcaacggcgaagtggcctctgcgatgttcgccaccatgttcgcgggtgagttcgtccgcagcggtgccaaaaactaccttgagctggattacaacgtccctgcaattggcgatttcgtcgttaccatccaacgcaaagaaggtaagacgccaggtgaacgcgtcgcagagcttgaggccgttgtggatcagcgtaacggagagtgtgaccgtttgatcaacgagcttcatgcacttcgggaagaaagaatatgcgcgggtagtaatacacgtaatgcagcggatatctacttccagttagttgaggaatgccagattccaccaggtggctctcttgtcgattacgtcagacatttaatggcggaagttaactccagccataaagatggtgaggtgcgctga

SEQ ID NO: 491849 - DNA, 1686 bp, Shigella sonnei
atgaatacagccctttccatcatggacgatgccagctcaaatactgctatcgactatcgacaggaaatgaacgtcatccacgaaattgtggccgagtgcgagaaagagatctccttcatgtatcaggtacacgacttcgtttatggcgatgaacgccacaacatgattaatcgcctgcttcgactaaaccaccgaccagatgaagatcgctcacgtttgaatcgaggttggttggataaagtcgatctggaatgggtgaaacagaatatttgggccgagtactggaggaaggtcacggacatgactaacgttttgctgatcatgccagcttcccgtcgagatgagtggcgcgagcagtttatagagggcaaacaggaagtcatcaaaactgacagaaccggctaccagatgaaggttaaagagttcgttggtgtacctgagttcaaagcagaaacggtcctacccacgatgcttaatttgctgaatgacaggcacaaatatctctctgagcgcgtgtatggcttgtttaaggcgctgagtcctgcgcacaagacaaataagacaaacggtttcagcgagcgtctgataatcgctgactgcatttctgatttctggcgggacagcgttagcgtgaactatcgcaaagaggactacatcgacgatctgcgtgtcttgcttcatttcttcgcgcacaaagaatttattaccatcaaccgcactgctgaggtgctatcagctgcgtatcgggcaaacgactgccagaccggtgactggatgaatgtcgatggaaatctgatgcgcgtgaagatgttcaagaacggcaacgttcactttgaaatacatcctgacgtggcctggaagttgaatgaggtgctggcttacagtatgcctgctgcaatccccgcgccatgtcgcaccgcgccaaaaacacgggcaccaaagcagttcgggttaatccagaagacgatctccgtgccggttcgcactgcgcttcgtgacgggcgattgagcaaagacaaaggcgtatggtacttctctgattcagctctccagaagtcgcaggtggaagagcttgagcgcacactgagcttcattggcggcgtgcaggagaaaaagcactggcagttcccgtatgacatcggccatacgctaaatacgattgtggctaccggtttaataccggatacaaaatcacaccagttctaccctaccccacgcttgattgctgagtacgttgccagagccactgaattgaagcctggtgagaagctgctggagcctcaagccggacgtggggagcttctggcctatattaacgccgatctggaagatgttacctgcatagaaatcgcacctctcttcgctgatatcctgcgtggaaaagggtatacgaacacgatttgctgcgacttcataaagtggtctgaggacaacgcaggttatcagttcgacaaaatcgttatgaacccgccgtactcgcttggtcgtcatagagagcacacgctggctgcgctggggcatctgaaagtcggcgggcgtcttgtagcagtattgccgggcactgcgccaatactggactggatgacgatggataattacgtttatgccagagggaagtcgtttaccaacgagtttgaagacacagggatcacagtcagcgtatacgttttcaaacgcgttaaatga

SEQ ID NO: 491850 - DNA, 615 bp, Shigella sonnei
atgttcgggatgtcaattactcagtcaaatggtaatgtgtggatgagtccagaatttacaccgcaaaatttgattaatagggggacaatgtccacgtctaaaggttctgtttttaagacttcaataccgtcgaacaaatcatgttttttctttataaaaagcagtaataaggcgaatatgatgttcgttcatgaatttagagatgggtataatgctctcagactgaatcaggttggaggaaaccccgggacgataacagtttatgctttttctgatatggtgttaccacattcaggatatggtattgccatgtataatagcgcaggtaaaatggtatatcacggtgagatgatgccccttgatgcagagattatcactattacaaatcctcaatttaccataaatatgggatacccgtgtgcgataatgcctgcaatggttggagtatataactatagacgaacaccttacgacagacctgtatacgtaacaatgacaggcgcaacgggaaaccaaatatataatggtgaatggtattcaagtaatgttacatggaatgtaaaaaaactatatacaaataaagtcctggttataaatacatccaagtatgattag

SEQ ID NO: 491851 - DNA, 282 bp, Shigella sonnei; identical to SEQ ID NO: 32041

SEQ ID NO: 491852 - DNA, 570 bp, Shigella sonnei
atgtgcgagaaatgcaaagcaatagctgatgaacaaaacgccctattcgaagaaatggatgctaatgaacttgtcaaaatgttagccattcttcgaggaatagaagacgtttccatttttgagagagtggttacagcacttaattttgagtccacctttgaagagccaactcaggttgtagctttagcacatcatttcggtgttcattatcttgctgaaaaacagagagctgataagttgcaagagactttggatatggtgatcgagactcaaggaactcatgacagtaacaaaagtgagacgattattgccagcaaagatcgtgaaattgccgggcttaaatcctctctaacgatgttgatgtcagcattcaatctgatgtcttctcaggcgggttataaaatgccatcactaaacagcgacgatccgatggtagttcgtcagcttttaggagcaatggctgaccaactcgacgacacaaagagtcgccttgaagacatgatgcgtgagttaagccatcgacataacctcgcaacacagccacacaaagcctttcaaagctctaattga

SEQ ID NO: 491853 - DNA, 159 bp, Shigella sonnei; identical to SEQ ID NO: 12171

SEQ ID NO: 491854 - DNA, 426 bp, Shigella sonnei
atgttaggtttcttcaaaaagaaaactcgtaaagcagttatcgaagtcaaaaaaatggagaaccgtgatgcggttgaagccaccgtgtggggtgggtacatgatctcctatgccaacggtacatgcgatgcaaaagaaatttccattcttgagaaaacaattgcagctctgcctgcattttctccttttgctggtgagattgcccagatgagcgccaatatccgcgctcaatacgaagcctcaccgcaccgtgctaatgcccaggctttacgtgagctggcggatgtggccgggactgatgatgcagtagatgtactttgtctgtgccttgatattgccgaccaagacggcattgatgaaccagaagagcaggcgctgaaaaagatcgcccaggcgcttcagttgtcactggatgcttatctctaa

SEQ ID NO: 491855 - DNA, 189 bp, Shigella sonnei
atgaactggttttcaaatcactttggaaaaatttggctggcaattcttgccctcatggccgccggttgggtatcgaacattataaaacttgtttgctctggcgatctccagtttcaggctggcatgaccttggctcgtgtagttgggatttttatttttccagtcggttcggtacttggttatttctga

SEQ ID NO: 491856 - DNA, 495 bp, Shigella sonnei
atggcacgtcaaacctatttcacttctgcaactaaacgtcctcgttcactacgtcaaattttggccgaattatttagcggtcgtgttctgtcacgtcttgatgaactggagactaccgttcggttgctgaatgaacgtttagataatcaagcgtcagttgttgcgaacgtgggggtgattgttgcctctggttcttcacgcgaagcgaaaagtacacggcctttagtgaaggagaaaaacaacaaggacagttcgaatggaaaattttcaaagaaagaggctgaaaccaatggcctacgttctcattatagtttcactggcgacggtagccgttccagccggccagagccttttgatgccggattcatccatcaccacacctccgtcgacgacaattaccaccactccagtagagcgacctgtcactctggatgggatggcggtggatgcgatacctcaagttcatccagttactcaggatcatgctgtgactaa

SEQ ID NO: 491857 - DNA, 594 bp, Shigella sonnei
atgacaacgaagacaccagcccgaccgcaagcaaaaactcgcaaaaaagacaaaaacaaaaattctccccgcaccaatcccacaacgcctgtcgtagagttcaatccccagcttaaaaccgtgaaaatctttagtgatggctcttgccttaaaaatccgggtggcccgggcggttacggtatcgttctccagtatcgtggcgaggaacgcgagttctcagatggttttcatagcaccaccaataaccgcatggagatgatgggggcacttatcgggctggagcgtttgaaatatccatgcaacgttattttgcactctgatagccagtatctgaaaaacggcatgacacagtggatgaaatggtggaaacgcaatggatggatgacttctgacaaaaaaccggtaaagaatgttgatctgtggaagcgtctggatgaggccgcaagtcgacataatgttcgctggaagtgggttaaaggtcacgccgggcatcgtgaaaatgaaatatgtgatcgactcgcgaagatcgcagctttttcagcagcagatatgcctcacaagaaagatattggttttgtttataacaaacagtaa

SEQ ID NO: 491858 - DNA, 231 bp, Shigella sonnei
atgccatacccgaccaatgttgttgcgctcgtagagagcgattttctggctaaggctcgtgaaatgatgaaagatcgcgagcaggctttcaacttgtacgaatgggcaattaagtgcttgcatcttggggagcatcgcgaacttgttgaacagcttttaggtgagttgatcaacgaggtgtttgccttgaatgttcaactacatggtcgagaaaataatcaatcgaaatga

SEQ ID NO: 491859 - DNA, 594 bp, Shigella sonnei
atgattgcagccgaaaaaatcaaacagcgaaagcgcgacaactctcttcgtgatctctggagaacacctgattggctgttttctgccattcaacgttatcttggagtgacatttgatgttgacgttgcctgcaacaaggacaatgcaaagctgcctattttcataggcgttgagcgcgatgctttgaaatctgaatgggggcagccaggtacaattgccttcctcaatccaccctactccaaaatctccccctggattgatgcggctatacgtgagcaggctcgcggagttacaacagtgatgctaattcctcaatccctcgatacaaagtggtatgagcgtgcaacagagtatgcgaatgagacgattattctgtctggtggccgcgtagcgtttgtcgagcctgacgtcaatttgggtcaggtagaagtaaatatcaaccccggtggcagtatgctcgttgtttttcgaggattctgtcaggacgctgggcactctataagcaagatccctttggacgtcatgaaaagtctgggagggtatgatcctgcgaatgtgatcaggaaaaaaagaccatcaaagaaggctgcttag

SEQ ID NO: 491860 - DNA, 810 bp, Shigella sonnei
atgagttcggttgaaaatgtaatgacaaatgatgatctggatgagctgacagccatgttgcaatcacttgatgaaccagtaaaaaaagctgcacaggttgaaaatactgatgatattgacgatctgcttctcggcctcgatgctggcgtagccatgagttctgatgatgttgccgaagaactgttcaatgaagaaaaagcaggtgatttcagctctgctttaaatgagttggagttagcgcatgagcctataaacgtaattaacgctgaaagtgttgaagctgccgaaaacgagccagaacaattgggatttattgaggttgaagagtgtgttgaggttaatgatgaattaaaagttcaacagtcaaatgatagcaatacaaataaaaaagctcgtgttgcaagaggtcctcgttttactttaagtgataaagatgattcgtttttcaataaagcaggcttagaaaaagatattttcttagacgcttacgaaaacgcgcctgtcaaagcgaaggataagatattaaatcttcttaattggtttagcggaggtccagatattagtgtttacacggtaatttccatgagacaccttctcacagaaaagaaggctacaagtaatagtattaagattgctttaatgagcaatccagaaaaaccgtatccgcttaacactgcgtcaactcaggctgggcaaatgatggctgtatttccagctacaggaattgctgttagagacggtggaaatctaacattgaacgaagaatcaccgatcgttaagaagtttgtcgcggagtacactattggatga

SEQ ID NO: 491861 - DNA, 558 bp, Shigella sonnei
atgacaacgattgttgcaggcatcgatatcgagtctacgggactggatttccttgctggtcataaaattattgaaatcgcaattacccgctatgaactggagacacagagacatattgatagtctggagatgcgttttaaccctcgcagaaacatagatccgaaagctcaagccgttcatggcatttcattagaacagctcgcagctgaacctttgttgtcaaatcatgccagcgaaattggcgcttatatgggggcatgtagtgcgtggattgctcataacggcgaagcgtttgatataccatttattcgacacgagttttcagggtatggagtaagactgccagacgttcccgttatagatactatgttatcgggattgtgggccacagaagacggtaaacgtcctcgccttgaagaattggccttctctcttggctttatatacgatcatgccaaagcacatagtgccttatatgacacaaacttaatgatgcaatgcttctttaaggcacgtaataaatacggattttttaaattaccctctgaaattgtgtaa

SEQ ID NO: 491862 - DNA, 420 bp, Shigella sonnei
atgtttagtgaaatgttgcttgaagatgaactggatcggaaaacaacagaggctttgattcgtgtagcggacgaacattcccggtcgcttatgagcgatcgagaggctcgtctggctattcgtgccatattcgaaactgcgcaggggcttgttggtacacaagtgggtgaagccattaacatcgccatgtctcagttcagtgaaggcagtaaaaagtctctgtttcctatgcatttgatgctggctggtggcacggtgctttatatctctgtttgtctggatagcaaccaaatcaatattctcaacactgtgtcaggtaagtggaaagatccgattgtctgtgaaaccagtgaagaaactttgaaaaaagcggctcaatttgtacgtagcgcactacttaagggcgctaagaagttgtaa

SEQ ID NO: 491863 - DNA, 645 bp, Shigella sonnei
atggattaccggattgggatcactggtgctcagggcagtgggaaaacaaccctggctaaatatatcgacaaacattacggaatcccttacgtggatgctggtgtcggaagtttgatgagccgcctcggtgttcgagtaggtgattctatgcctctatatgagcggcttcagattcaaatggaaatagcaaagcatatagagctacttacgcgtggtgctgaaggctttgttatcgatcgcacacctgctgatgttatggcctacacgttggatttggtcggccatacaaatgaagatcggtgtattgagttagccctcgatatcgaaaagttttgccacaaaactgctatttcaaactttaacgccattgctggcctacgcccgggggtcgctctctcagagcgagattacttgcggtcacaacgagcatcattagaccgtctgtatgtcgctcgtattgatgcgttgatgtgcggggaactgacaaaaattcacctgcatccgcaaaggggagatctgcaaaccttcgtcgtttccaaccggtatcgcacagttgaagcaagagccagatcagtgatgagaatgctagataacgcggtagaaaagatagaaaaccggttctgtggccgagtgaccgttcattag

SEQ ID NO: 491864 - DNA, 477 bp, Shigella sonnei
atgaagatgatagctgctgttggccgtaactatgagatcggcatagcgaacgaactgccctggcgttgttctaccgatctgaagctatttaagagactcaccaaaaacgccactgtcgttatggggcgtaaaacgatggaaagtctcaaacgccctcttccagagcgtcataacctcgttttgacgcgctctcatggttttgtgccaaatggattctaccctgctggtgtggatgatgtgttgcgattaccagagcctgtgtgggtgattggcggggaacaagtttactcgctattcatgccgcatgttgaagagatttggctctcccacatcggcgttgatgtaccaaacgccgatgcattcttcccggcaagcatgatgcgtaacttatgctttgtgcctgttgaaacagcttatacccaacgagcctgcgaggaagagcctggcttttcgcagatcgtatacagaaggtcgtaa

SEQ ID NO: 491865 - DNA, 414 bp, Shigella sonnei
atggcaagaggtatgtatgtcttatgcgaaattgaaggtgtgctggcaaataccagccatcgtaaatctgtacctgacacggatgcaggccagctcattgccggtgatgaactcattttccccaccagccgtatgttgcgtggttttgctcgctcaggggctgaagtggtgcttatcagtagccgctctgaaactcttgaagcgcccactaaacgatggctgaaagattttggcgttgattacgactggcttcatctcgtaccgaatagcaccagttatgagaagcatattaagcgcacattagcggagcataaaggcgatctgcttatcgctgcgctggtgcacgatcctcgactccgtgccgctttagctgactcacatcatagaccggtcatctatgaggtgagcaaatga

SEQ ID NO: 491866 - DNA, 1104 bp, Shigella sonnei
atgtcactccttttgaatcgtgagcatacgaacggtcaggtaacaaacgcatcgtatgcaaaagttattgagacggtgcttaaaagcggcgtgcagactgatgatcgcacaggcactggtactttaagcacctgctacgttccctcttactacatgcttactggtgggactgtgccgcttatttctggaaaggcggtaaatcttaagccactacttgtcgaacttgagtggtatctgaaaggcgcgggcaacatccaatttctcaaggataacggcgttaagatttgggatgcatgggccgatgagaatggcgatttggggccggtttacggtaagcagtggcgtcgatgggaagatacccgcatcgtgagccatagtgaatatctgagcaagatcgatactttccgtgaacgcgggtacaaagtcgagggatacctgggcatcagtgaagatcgcgtagtgctgtcccgtgaaatcgatcagctacagcgtattgtcgacacactgcgcacgaaccctaccgatcgtcgcatcatgcttaacgcatggaacgtaggcgagcttgaggatatgaaactgccaccttgccactttgtcttctctttgtggagtcgtgagcttgattttgaaacccgtttaacgatggcaactgacattggtcttcaacacagtcgcctcggttatgagtctatctacaccaagatgctatacgatctggagatggacggcagtgttactgaaactgaactggatgaacttggaatccccaaacgcatcctcaactcctgcctcgtacagcgtagcgtagacacttttgttggtatgccattcaatattgctggctatggcattctcactcattttctcgcgaagattacgggtcacatggccggtgcatttgtacattttggctttgacgtgcatttgtacaacaaccacatggaaggtgtgtgtgagctaatgaaacgacaggctccagagcattcagatccggtcgttattttccctcatgaatggtctgagctggatgatttcaaatgggacgatattctgattcttggctatgaccctctaccgtggatcaaggttccagtggcggtgtga

SEQ ID NO: 491867 - DNA, 870 bp, Shigella sonnei
atgaactttaccaaactgactgaccacctgaaacttgccaccgatcgtctcattggatttaagccagaaccatatgagttgcatgaaggtcatggtgtagctactgaaagtatttacaagatggtcgatcagtttcatgaactcttccagcatccgagacgcgttatgccgacaccagagctgcttcgtctccgtgcaagcctgattcatgaagaagctgtagtggaaggtattccagccgcaatgaatggggatattgagcaactgctggatgcaatggccgactttttatacgttggtgttggtacgatggtcgccatcaaaggtggtatttctaccggcatgacctattacacgcaggaacagagcattgatcgctttatgcagacaatttttgtgcccggtaacactgttttcgatgatgtggcaatgccatttcaggaagctcgtgaggcgtcatgtatgctcgaagagctggcagataaacttgagaacaagactgttaaggattctgagctgattcaggaactgcgccgtgtcatgaacaaaatctatgtggcgtgcatgatgacctatcgactggctgatttcctcggtatcaatgtagtcgagctggttggcgaaattcatcggtctaacatgacaaaattatggcctgctgatgtagaggaacgtcgccaggctgtggccaactgcaaatacgactcttcagacctgggatttcgccatgctgatggtaccgataagatgatcggttttcgaatttccgatggaaagattctgaagtctccaacctatagtgatgtcgatttatcctcctttgttgagcaagctaaagcctcagcaatgtacggaatgatcaaaaaataa

SEQ ID NO: 491868 - DNA, 1143 bp, Shigella sonnei
atgtcatattcaacgttccgtttgggtgctaatgatgcaaccaaagagcctatgttcctcggacaatctgtcaacgtggcacgttacgatcagcaaaaataccgtgattttgaaaagttgattgaacgtcaattgtctttcttctggcggccggaagaagttgatatttcgagcgatcgtatcgacttcaacacgaagctgcgggaccacgaacgtcacatttttctgagcaatctccgttatcaaacgttactcgattcagttcagggacgtagtccaaatgcaacgctgctgccgcttatctctattcctgaactggaaacgtgggttgaaacgtggtctttctctgagactatccatagccgcagctacacccacattattcgtggcatggtggacgatccgagcattgtttttgacggtattgttacggatgcagaaatcatcaaccgagcgatcagtatctctgctgaatatgacaggctttatgagatgacctgcgatcgccagtcgttaggcgagaaggaatttgagcgtctgtacgtaaatgaatatggctgggagccatatcctttgcaccgtcagcttttccgcacgttggtgtccattaatgcgcttgaggcgatccgtttctatgtaagttttgcatgtacgtttgcctttggcgaacggaagttgcttgagggtaacaccaaaattatgcgctttattgcccgtgatgaagctctgcattgcgaaggaactgaacgcatgatccgcttcatgcgtaccggtcgcgaaggtttattgtggaaagagattgctgctgatgaagaaaacgtcatttacgacaccatgaaatcagtcgccgaacaagaaatgaactgggccgagtatctcttcaaagacggttcgatgattggtttaaacgcggatattttgaagacctatgtaaaataccgcaccaatctggctatgaatcgtcttggcctgaaggctttatttccagaggttaccaccgatccgctggtctggatgaacaagtggttgttaaccgacatactgcaaattgcaccacaagaggcagagcaaagcacatatctggtaggtcagatcgattctaccgtggacaaggcttctctaagccagtttgcagacctgtaa

SEQ ID NO: 491869 - DNA, 2316 bp, Shigella sonnei
atgataagcatcgtaaaacgtaacggccaaacagagccgttatccgaagaaaaatacaaccgcgtcgtaatgtatggcgtagaaggcattcgtggtgtaagcgcatccgctgtagcaatgggagctgcggccagcatttttgatgggattaccaccagccagttgcatgaggctttggttaaatctgccgctgatttgatctcaccagatgcaccaaattactcgcaggtggctgcccgcctgaacatttttaaaatccgcaaagatgccttcggtcgttacgactatccgaacttctaccaacacattgtcaagaacgttaacaagggcgtttatgacaaggatttgctgacacattattcgtttgaagagatcgaagaactcggcaattacattaagccgaaacgtgacgatctttttggctatgcagctacggcgcagttgcaaagcaaatacctcgttcaaaaccgtgttactggtgagattcatgaggggccgcaacatatctatatgctggtgggcatgtgtctgttccagaattgggaagacgactgcgctggcaaaacacgtatggagatggtcaaaggtttctatgacgttacaagtacgttcaaactgtctctgcccacaccaatcatggccggcgtccgtactccaacccgtcagttctccagttgtgtgctgattgagtctggcgatagtctgaaaggtattagtgcagcttcagccgcaattatcgactacgtttcacgtcgtgctggaattggtattggttttggccgtatccgtgcgctgggcagtgagatccgcaacggtgaagccacccataccggagttattccattcctgaagcatttccagactgctgttaaatcttgctcgcaaggtggtgttcgtggtggcgcagcaacagcgttttacccgatctggcatcttgaagttgaaagtctgctggtggtgaaaaataaccgtggtattgatgaaaaccgcgttcgccatcttgattacggcgtcatgagtaaccgtctgatgtaccgtcgactcgtcagaagcgagaacatcactctgttcagcccgcatgatgtgcctgatatgtacgaagcctttttcacagaccaagatctgtttgaaaagctgtaccataaatacgaagccgatgattcaattcgcaagaagtcagtgcctgccattgagctgttttcatctctgatgcaggaacgagcgtccactggccgaatttatattgcgaacgtcgatcatattaatgagcatggcgctttcattcctgctcttgcacctgttcgccagtcaaacctgtgcatggagatcactctacccactcgtccactggcatttaccgacgacccgaacggtgagatcgcgctttgcactttatccgcttttaacctcggagccatacgttcactggagtctcttaaagaggtggcgttctatgccgttgctgcactggattcgttactggattatcaagactatccgatggaggcagctgaagtgcctgccaaagctcgtcgtagcctggggatcggtgtaaccaactttgcttattacctggcaaagaatggcattcgttattctgataccgctggtaataaactggtgcatgaaacgttcgaagctatccagtattaccttcttgatgccagctgccaacttgctgaagcaaaaggtgagtgtgactggtttgagcagaccaagtacgcaattggtcagttgccgatcgaccattaccgttcttcattagacgaaagtggcgaaaccaactttgagttaaagatgccgtgggaagagctgcgtgaacgtattgcaaaatacggtcttcgcaactccacactgacggcacaaatgccatgcgagacttccagccagatcactaattccacaaacggcatcgaaccgcctcgtggaccggtgtcggtgaaatcttctaaggacggcatcgttaagatggtcgtgcctgagtttgaaaaactgaaggaacagtatgaatacctgtgggatatgccggacaaccgcggctatctgacaaaggtggcgatcatccagaagttctttgaccaggctatttcggccaataccaactatgacccttctcgctttgaaggcgataaagtcccaatgatgacgctactgtcagatttgcttctcgcctacaagatgggggttaaaacgctttactaccacaacaccagagatggtgcaggaaagcgtgatgacgacgaaccgcagaatccactggcgcaagctgtagccgtcgagccagaagatgagtgcgacggagcctgcaaaatctga

SEQ ID NO: 491870 - DNA, 570 bp, Shigella sonnei
atgagtaaaaaaatcagcgtagttggtgttgatccctcaatgagcaactttgggcttgctgtgggcactttagaccttgagacggacgaacttgagattcacggccttactcttgttgagactaaagcggggagtaacaaaaagaccgttcgtgtgaacagtgacgatctgcgccgagccagtgaaatatggcgtgttgcgaagccaatcattgataaggcaaatatggttttttgtgagctaccggttgggagccaaagctctcgttcgcagacgtcttacggtatttgtatcggtgtacttgcgtgtgtggataagccattgatccatgttactccaaacgaaattaagcattttgtcggcaataaacttactacatcgaaagaagagattatccagtgggctacgaaaaaacaccctaaagcaccgtggctgcgtcgtaagcaatctggacaggatgttctcgtgaacaaaaacgaacatttggctgatgcggtggctgccatccataccggtatgcaaacagatcagttccgccaggtgcgcgatgttcttaagtctctcatttga

SEQ ID NO: 491871 - DNA, 744 bp, Shigella sonnei
atgtcgtttaaattaagccgctcgcagtttttgcaggtatttgcagtgatgcagtcgataaaactgatcaatgggcatacttccaatggtgcggctccacgtattctgtggggcagcaacaatattgacggagtacaatttgccgcgttgcttggtctaatatccgagacgccattgatgcaaagtttgaaatcactaccacctggatgtattgcgccgatcctgattaatccttttgttgaggggggatatcttcccaacgtcgggcctgggtttattgcatcccatgaaaatgaagatcttaacattaatagcgaagggttctttgggggaatgggtgcgcatcactgtatggctttcaccaaccttattcgacttgccaataagcgggtggatagtttggcatcgccaggtgatgcttttactggtttccttatccaaaggagggataaaaagtacagtgcggacaaactacagtttgttggtaagtatggagaaatggtagaaatcgaacttcagctcccgcatgttttagcaaacgatagtgcagacagtcggaggctgttgggcatcatgcgtcatttcatagcaagtggcgttaaacatgccgtagataaacgtgtcacgcaggaaaatgagtattcagactttgcaaactctccccaaccaacgttgcaaacggcaatagtaaccaattcgttggaggcgagattattggaaaaccctatatggggaacatggtaa

SEQ ID NO: 491872 - DNA, 1917 bp, Shigella sonnei
atgaagtttttaaagctccaggttgagaattttatggctatcgccagcgcggaggtcgagttagatcagcgtggtttagtgctcattcagggtgttaatagtgatgatagttccgcatcaagtaatggctctggaaagtcaactctaatgaatagcctgatgtggtgtctttatggcgaaacagctcatggtgtgaagggtgacgatgtgttgtctaccgaccatgaaaagaactgtcgtgttgcagtaaccatcgaggatgaaggcaagagatacgcaatcattcgtcaccgtaaacacaaagagttcaaaaatcgtcttatcgttcgtggtgaagatggcgatatgacgaaaggcaaagatgcgctgacgcaggagttcgttgagcgtctgatcggtgcatctaaagaggttttcatggcttccatctatgcgagccaagaagctatgccagatttacctggaatgtccgacaaaaacctcaaaaccatcgtagaagaagccgctggcgttgacagactgacacgcgcctacgctattgctcgtgagcgagctaatgcagctgccgcacgtatggatgtggttaaaaccaaattggagtcgacaatctcgaccattgaggcaacacagtcagaaattgagtcagcgaaagcctcctctgaatcatgggagcaagagcgttctaaacgttatgacgatgccctggctgggctggccagtgccgaagttgagttaacggaagttgaacttgagatccgcactcttcccgaacagatccgtgataccgagaaggcaatcgaaagtgagcgcaaaaagttagcctcaaaagaagaacatgacgccaagttgctcaaagttcgtggtgcgataactgatattcgggcaagcatcaaagctacagaaaatagtcaggctgatgcaatgaaccgcgcgcgtaattttaagaccaaagcagaagaggttggtactaaagtgggatcaccatgccctacttgtggcaaagcctactgcgaagaagatctatcaacggtgaaggagaatttcattgaacaagcacgtcaggaaattggtcaggcgaagacacttgcagaggcaatggctaaacacaaaacgaatcttgagaaagcgttaagcattgagtctgcccttgttaaaacgacacctgatgtaacggctatcattgcccggattgaagagcttacgaaacaactctcatctttgcgtcatcgtgagaaggagattgttgctattgagtctcttgtgactcgtgctcgtactgaggtcgatcgtatatcaaaagagattaatccgtttattgctcttatcgccagacacgaagataacctggtatccagtaagtctaccttcaagtccttaaaagatgagttgaaggctattcaggaacaaacgttgctattggaaaaagctcgtcaggtctactctcctgccggggtgcgttctcatattttgacgtctgttacgcctttcctgaatacacgcactgccgagtatctcaatacgttgtctgacgggaatattactgctgagtggtcgacgatggatgtcaccaaaaaaggtgagtatcgcgacaaattcaacattagtgtgcagaagaaaggttcaagtaagtcgttccagaccctctctggtggtgagaagcggaaggttcgcattgcgtgttctttggcattgcaggatctggttagtaaccgggcgagtaaaaacatcgatttgtttatcggcgacgaaattgacgatgcactcgatacagccggtcttgaacgcctcatgggtattctggagtccaaagctcgcgagcgaggtactgtgctgattatctcccataaagagatgaagtcatggttccgggaaactattacgctggaagttaaagaggggcgcagctatgtcgtttaa

SEQ ID NO: 491873 - DNA, 1086 bp, Shigella sonnei
atgactttgccatacggcgtcatttctgactgccactaccacaaatgggatgcgttctccacgacgaacgcagaggggcttaactccagacttgaaatacagttggaagcaacgaaagaagcagccatcgccatgaagaaggccggttgtaagtacatgttggttgccggtgatacatttcacgtccgaggaactgtgtccccttctgttttgcattacgtaactgaaacgtacaagtggattatcaacgagcttgatctgacagtagtaatgctggccggtaatcacgatcttgaaaccaacgattcagtatatagcgccaacgcagcagcatcgctgagttctatcggcgtggtaatcgtatgtggcaaacgcccacactcaataaaaattggtgatgtgactgtccacctgattagctggcgtaacaatcatgcggagcttatcagcgatctgaaagcattacgtaagagcgtagaaggtgataatcatgacgttgttatccatacatccattaacaaagccattccaacaatgcctgacgtcggtatcgatgcgcaggagttaaaggatatcggctttcgtctcgtgcttagtgggcattaccacaaccacaaagaggtcattcctggagttatcagtgtcggtgcactgacccatcaaaattggggagatgttggatctctggctggttacatgatcgtaaacccggacggcagtttcagtcactacgaaaccagtgcgcctaaattcattaacctggaagatgatgttgctgatgaccaaattcgcggcaactacgtgcgtttccgcgccgtaattgagaacgatgaagaaggcattaagtaccagaacatcctcaaaacaatgggcgcaaaaggtgtcgtgtgcaacttcatccgtaagtcatcaatgatggaagggacagccagcacaactgaaaccagcaaaatcgatagcctgggagagtcggtatctgcttattgcaagattgtccacgatactgacggcggatttgatctgagcaaattggatattttgtgtcaggaaatcctcaccgaagcggagagttcggaggctgtgtga

SEQ ID NO: 491874 - DNA, 645 bp, Shigella sonnei
atggatctaaaacgcacgcgctgggttcgtcgtcttgaagacggctcctacactatagaatcaaattccaacctgaataagcagaagttgctttgtgacatctgcggtatagcggcgaagtgcccgatctacgaaaccagaattaaacttgataaggctggtgtgaattttcatttaaacagttgcatcaggtacgttccattactcgcatttcgtaaaccgatcatcggattggatgccccctacttcaacacactccgttcaggtgtgacgtggcgagatcgtttatcaccagacaagctgatttgcctcgtatccgcagacacaggaaaaatcatccgttttgggaaagtagacaaggtttactcaggcccagtagacgaaatgttgcggaaacacagccggtttaatcatctctgtatgggtggtgagaaaatcgagaaggtagaagaagtgatccgcaaatcctacggacactttctgaccaaagatagcctgctcaccgcaatctacatcagacatgtaaaacgtgagttcgacctcgaataccacagcgaagaagagcttaaccttgttgacccacgtccaaaagctggcgtcataagcataaacgcagcgcgtaaaaagcccactgacgcgctgtaa

SEQ ID NO: 491875 - DNA, 1095 bp, Shigella sonnei
atgtccacaaaaaataaaaaaggtaaaaataacaaagaagtagaagataacatcgacaactttgaagaaggttcccttgaattgtacacaggggaacttgtccctaatagcaacaatacagtccaaccaattgcgttgatgcgactggggttgttcgtccccacgcttaagggaacaaaatacagtaaacgtaacaagccaaatgagatcgatgcttcaaaggagcttgtccagctcgaagtagcccgttctgaaggctattccgatatcaagataaccggtcctcgtctcgacatggatcatgatttcaaaacgtgggtgggcgttgtgcgttcgctggcagaatacggcgaacctaacggtcgtgtcgagttaagcatcacgaaatttgctaagttttgtggctatccatcgtcacagatccgcaaaacactccgcgaccggcttacaaacagtcttttgaagatcatgcgtacaactctgtctttccagagaacgtatgaagaaaagaacgtcgacggctctaacaagatctcgcttctgatggtgcacctcatcaatagcgtggactacaacgagcagaaagatacggtggtgttctatgcagaaccgaagctggccgaactatatcgctttgaccataaggttcttttgcagttaaaggttatcaataagctaccacgcaaagaaacagcacaggctctgtacaccttcatcgaaagtcttccaaccaagcctgcgccggtatcgcttgctcgattgcgtgcgcgactcaatttgagtagcaggaatgtcagctcgcagaatcagactatacgtaacggcttaaaagctctccaagatttgggctatctcgaatacagcgagattaagcgtgggcggtcgatctatatccagattcacagccgcaatccaaaactcaaagtcgcaccgccaaaacctgaagacatcgaacccaaaaaaccagatgagaaagctggggaaattgatgccaaacagaacattatcaacaagataaccgaactttcgcagaatttgacgcctgaaaatatcaagatgattgagatcctttccaatagtctcaaactgctttga

SEQ ID NO: 491876 - DNA, 213 bp, Shigella sonnei; identical to SEQ ID NO: 12148

SEQ ID NO: 491877 - DNA, 336 bp, Shigella sonnei
atgaagaccatcccattcgcgctgttgtttctttcttcgatcgttgtggccgacaccactgtttatcagtgtgaaatgtctgtagccgacgttaagaatggcgctcttaccgacgtcataaaagcaccatatggagcgatggtcgtagacagcggcgaccagttctatgttgtgcgtgacgatcgagtgttgtcatccccatatctcacaaatcgtaatggcaaattaaccggcgtcggagaagaccacttcgtatacaacaaatacaagggcttctatggcgttcacgcttctcagcaaagctaccttttcgatgactgcaaggaggttgggtaa

SEQ ID NO: 491878 - DNA, 276 bp, Shigella sonnei
atgagagttttagttcgaatcgttaccagcactgtctatgacgtgtttccgctttttatggtcaaagtcgatggccttaacgatgaagaaactgacgcgctgatccagcgtactcttgttgaatatacaggtcatgacgctgattcagtgatggttgatgatgatggtgtttgttggcataacggcaactgttggtacgtagaagagactcaacaaatcagtaatgaagatgctgaacatcttgagcgtattttaagcatcagcacttttgagtga

SEQ ID NO: 491879 - DNA, 426 bp, Shigella sonnei
atggcagcaattaagaaactctacgatgccgcaaacgtggctctggatgttattgatgatgaagtagcaaaaggctttcctgaacctgattgggcgcatcagctacgaaacgctatcgcagaaatgaccccaccagatccaacccccgacgagacagactggcagcgattcatccgtatgtacgctcaggaaataggtccaacgccaacggcagagcaggcaatgctgctgaaatacttcaaagaggcgggagaggatttaccaattgatgactcagcatattggttccactgcgcatggcgtaagtatgacgtgatattcacacaaggcatgggaagcaaagatatggttgtgtggcatctactccatatagacacagccgttgacagagttattgaacagtttttccctaaccaagaagattga

SEQ ID NO: 491880 - DNA, 390 bp, Shigella sonnei
atgcttttaattcaacctgggttcggtttaaagataaaaaaagggcatatgtttggtgagcgagattccaaacgaaaaattctgtctattcgattaccatttatcaccattcattggttaaacagagagtcaaccgattattggtataaatgcgcaagagcagcatttaacgaccctgactggtttgtagaaaatcaccacgcggttcgtcaggcaaaaagaaaggctaatacgacatatatgaaggcatatcaggatgcctgggaagaacatcgtggccgataccaaaaaaacattgaaaaacttgaatcagaaaatatggacctaagaagaaaactcggtgaagcacgtcgagacatcgaagcatataaacgtcttgtatcggagtga

SEQ ID NO: 491881 - DNA, 741 bp, Shigella sonnei
atgaaaagaaaaattgaagaaccaaaaacgactcttaataaacatggggaaaaaattcaaacacatccagcgttcggtcttgtgaaaacaagccgtgttagcacaactggcattcgcctatttgattcagaactggaacatagagactatattgaaataggcgtttacgaggcggaactgtccttagacaatgaacgaacccgcccacaaagaagttgcaatagacggcctttagttgaaattagacttagccaggcacaatgggctgctatggttagcagttttggagtgggcgaaggtgtgccatgcactatttcatataaaaccattggagactcaattagagttcatgatattgccgagcaaaaaagtattcggcaaaaattcaacgatcaaataaaggccgctacgaatagtgagattgatcgacttaatcagcaagtttcagagctaggtgaacttgtgaaaaaaggaagagctggaaaacgtgaccttgaagaactatatagaaaactagcatctgctgtagctaaccttcctgaaaatctgtgctttgctaccgaattaatgcaggaacaaatggatgaaattgtctcatctggaaaggcggagattgaggcgtatgttgcgggcacggttatgcgtaaagggttagcagcattaggcacagaatcatgcattaacgatgctcctactgtctctatcaccaaaatggaaagcggtaaagaattactgccataa

SEQ ID NO: 491882 - DNA, 825 bp, Shigella sonnei
atgcccaaccacattacaaacgaaatccgagtcataggtggtacaaataaacaacgcttagatttcatacgtgccataactaacaaaaaaggtctaattgactttaataccatttgcagacgtccgaaaagtatagaaatggaagaaaacaatcatatcaggcgcatggcctctgcaatggcgggcgaaacagtttacgaccacatgttcggtgaattaaagactccagaacaggtcgaattagctatgcgtgaatcaggaatgacacgcaaggaaattcgcaaaatcaaagagcaggctcttatgcggcttgagaattatcgtcgctatggctattactcatggtttgactggtcgcgagctaattggggaacaaaatggaatgcctacaacatcgaaatgcccgtaaaacgtatccctacacgtattaagtacggccataatttccgccatacacacgttcgagcatatgcaaaacgaatctataaaaaacgtcttgcaagacatgccgcaactggtggtgagttggtgattcgctttgaaacagcctggtctatgccaaaaccaatttatcaagcgatggctagaaagttcccgcaccttgagtttgtaatacgttatgcagacgaagacttcggcaataactgcggattcattttacttcgcaacggcaaatgggaatatgactacattgcaccggcgaataacaaacaatcgtcagaagaaaaaatcaaatggcgcaagttcgcctttgagttatgttgtcctggtatcactccacaagaatacggtctaaatgaagaatacgaatacgccggatattaa

SEQ ID NO: 491883 - DNA, 831 bp, Shigella sonnei
atgaagaaaggtttacttgcagttgctctggcggctatttgcacaatgggtcttactggctgtgatcgcgtggagcctggatacgttggcatcaaagtaaacaaattaggtgaagacaaagggattggtgaagtggttggcgttggtcgccaatggacaggtcttaacaccgaactttacgtattcccgaccttcaaacaaatgaagacctacgacgaaccgttcacattccagatgagtgacggtactgctattggtcacaaaattggcgttgcgtatctggttaatcgtgacaaggtaacgacggtgttccagacctatcgcaaaggcgtagacgatatcaccgaatcagatctgcgtcagaaaattgccgactctctaaaccgtttggccagccgtatgaccactgactcatttatcgacggtggtaaggcgcaattgctggacaacgcactgaaagatattcagaaagagatgtctccggttggtattgaggtactgagcctgtcatgggttggaaagcctgattacccaaaaaccgtcattgaatctatcaacgccaaagtaacggctaaccagcgtactctgcaacgtcagcaggaagttgaacagcgtaaagctgaggcgaatatgctacgtgaacaggctaatggtgaagctgatgctatccgtgctcgtgcgcaagcagaagccgacgccattcgtctgcgcggtgaagctctgcgtcaaaacccgaacgttatggagctggaagccatcaataaatggaatggccagttaccgcagtacatggctcaaggggctaacactcctttcattacagtgaaataa

SEQ ID NO: 491884 - DNA, 201 bp, Shigella sonnei
atgatcaaaatctatctattggcagtagccacaggcctttcagtggctctcatctacggattactggttccgtcgctgatttctgcaaagagtgatttggccgtcatgcttggagttattgttggttttggcgctccagtattcggtcttattggtggtcgtaagtttattaactcattaatcaaagcaaaggggaaataa

SEQ ID NO: 491885 - DNA, 1074 bp, Shigella sonnei
atggcaaaaggaaaatccgcactggcacttgctctgaaaaagaaaatcggtagcaacgacgaaattcagaaagtaactcattggattgacacaggctttcctccgttaaacaaagcgatttccggtcgttacgatggcggtttcccatgtggtcgtatcgtagaagtattcgggccaccaagcgcggggaaaacctttttggcaacggcagcaatgatctccgcacagaaacaagatggtctggcggtattcctcgatcatgagaacagttttgacgttggcctggctgtagccaatggtttgaatgcagatgaggatgacggtcagtgggtatacaagcagcctgataccttcgaagactctgtagagttgatcggcacaattcttaaattggtacgtgatgaagagcttattcctgaatcagcacctatctgtatcgtggctgactcacttgcgtctatggttccgaactccaaagccgagaagttcgaaaagatggctgaaggcactgccaaagacaaagatcagctaaacatgaacgacaatacggcgctggctcgtgcgacgagtgcgaacttccccactctggctttgtgggcacgcaaatacaacgcctgcatcatcttcttgaatcaggttcgcacaaaaatcggtgtaatgtttggcgaccctactacgtctccaggcggcgattcaccgaagttttacgcttctgtgcgcatccgtctcggtgcatcggtgatgaaggatgggaaagagaagatcggtcaggacgtaggcgcagagtgcatcaaaaacaaagttgcaccaccgtatggcaaatgcacctggaaattctacttcgatcctactcgtggcctcgacgttatcgagtcgctcgtcgagtacatgctggaagaaggatacctgccaaagaacgccagcggtcgagtagaaattggtgacaagaaatacaccaaatcacagatcgtcgagatgtatcgggagaagccactagctgaaatcattgcggctttacaggcaatcgacgaccggagatcaaaagacaatcccaccgagtcagtagaagagtaa

SEQ ID NO: 491886 - DNA, 267 bp, Shigella sonnei
atgcttaaatcgattattaatggcgctacaaccacccctacccaactggcaaaagagattgtcttttatcacggtgagtacgctgtcatcgcactgccgtcaattctaggcgctgccggaatgaaagcgacagatcgcgagtttggattagtcagcgagcaggtcgtaaaaatcctcgctcgtgtatccagactccttaaccacgatgcgattgtattcgacgaatccgccgctttaaaacgaatcaacgaaacaaaaggagcctga

SEQ ID NO: 491887 - DNA, 945 bp, Shigella sonnei
gtgaattatctcttcgtagatggcaatagcctgggttattaccaccaacaatctgacaaattgcacaacggcgaaatggaagtacaggctgctttcggctttgttaagaacgtccgtcgttatgcctccatcctccatgcccgacctatgattctttgggatggatttagtgacaagcgtcgcgacttttacccggactacaaagcaaatcgcgacgacgatcctgatatgaaaaagatgaaggaaggctttgctatccagaagccatacatcctcaaaatgatgaccgcgcttggagttacccaactcattgcaaaagatgcagaagcggatgatctggccgggctgctggtagccagcattgcaccgcagccaattgttgaacacatctatctgttaacaggcgatagcgactggcttcagttagttcgcgaaaacgtaagctgggtaagcctgcgcgaagacgccaaaaacaagcaggttaattttgagcaatttgcggagctgacaggattcgctactcctcgcgcatttttggaagcaaaagcattacaaggcgataaatcggacaacattagcggtgttggtggcattggtgctggcggtgcgaaagagctgctgcatgaatggggaagtgtcgcaacgatggtacgcggcatcaacgacggctcaatcgtggttgacaaaggacgccataagaccgccttcaacaaactagcgaagaatgccttcaacgagaaaacaggctgtcgaatgctcgaagcgttcaagagaaacatcacgctaatgaacctgattgagacgaagtttccgcctaccgaaatcgaaacaatcaaaggcaatcgtgacgtgaaagcattcgagcaactgtgctacgagctgaatttccgttcgttccttgaagaccttgaagtgtttgttcttccattcgaaaggtattgctaa

SEQ ID NO: 491888 - DNA, 1029 bp, Shigella sonnei
atgtctaagacattacttgatttgcttaacaaaactcgtgaagacattgccgccaaacgtggtaacaacgttgatctgactcgcttaaaagacggcgtcaactatatccgcatcttcccgaataaagacgacccaaacggtaagttcttccagactttcggtatgcactacgttaagtatcagaacgaggaaggtaaagaagcaaccaacgcttatatttgtgagcaacatactcacggtcgcgcttgtcagctatgcgaaatggtgatggaaggtcgcgctcgtcacaagggtaacaaagcaatggaagaacgcatcggtcaaatgcgtgccactcctcgctatctggtcaacggcattctttctgctcgtgaggatttcgcagatgctgagaaatgccagttaatcgagctgccgtctactgtattcgatgatatctgcaaagcaatcaccgaagacatcgctgatgatatcggcaatccactgagcaaagaggaaggctacgcattcctgattaaacgtactggctctggtcgcgataccaaatatgacgtctcgcctaagcgtaaagtctacaaaggcgatatcgaagataaattctggaatacccagcatgatctgatcgcatacgcaaatcaggctgatgaaactcgtcttctctcgacagttcgcactatgggtcgtctgattggcatcgcagcaccaactgcctctgcatcggcaccagcaatttcctctaccgcgaaaacatcggccgcggcactgcctggatttggctctgtcactggtcatacggagggtgcgactgctgtagctaccgctcacaccccagcttctgaaccaaccagtctggttgatgaagaaatcctccgtgccgttgaaactgaatttaaaccagaagcaagttccgctgccgttgcagtatcagtcaaagagtctgaagcagtcgcagcgacatctgtagcagccgcatctgcgacggaagatgaaggtctggatgacctactgagagagctggactctctgtaa

SEQ ID NO: 491889 - DNA, 432 bp, Shigella sonnei
atgatcaccgatatttacgagaaaataatgtctgatctcgagtttgaccgagacaatctggaggaagtctggcgtagacaaccccgccttttaatggagtatggatcaaaactcgctcatgcagaaagaagtgtcgcagaggcaaaacttaaccttgaagctgttgaagcaaagctatacgacacagagcgtaagaacttgagtatgaacggcattaagttcaacgagtctgtactggacgctaaggttaaaacaaacccacagtatctgtctaaacggcagaagttggatgaagcacggcacatcgcagacatatacaaacatgctgtcgccgccttttcgcatcgccgagacatgatcgttcaggcgtcaaagatggccatcgttgaattagagcgattaggctctgaacgctttattactccccgttga

SEQ ID NO: 491890 - DNA, 3519 bp, Shigella sonnei
atgaaggctctgatggttcgaactgacttctctcttggggagtcggctctaaaagcagaaaacgcggtgaagattgccagagaagctggctacaccgctgtaatttcggcagatagcatgaatattgcgagtgttattccactacaacgtgccgctggtgacgacatggcggttatttgtggtgtgaaactaaacattgttgatgatcccacatacgagtaccgggctaaaattgctaaagagtctaagggatgtatggaatcattagagcgaggacgtaactactcgtttaccgctctaattaaaaatgagcaaggatatcgcgacatctgcgaactaatgacggtggccaacacacgagaacagttctactttgtaccgcgtctctcgctcgaacagttggtttctacatatgccaaaggcaacatcatcctgctcacttccgacatcggtagcgtgttccaacgcaacgattttgcaaaaatcataagctcactgattacagcgggtggaaaagacaacttctatagtgtggtttatccgcaccctaccccattctacgaccagattaacgtccgggcgatgaaagtcgccagcgcattgaaaatagagccagtggcgttctatcccgcttattacgaatcgatcgacgatgcagacattaaagacattgcgcacatggttacgaacaacatcaaaatcgaccagccgcatcgtctgcgtatcccccaccagcgagataacgccgtcaatggtcgccgccatctccttgaggctcttaaagccttctccgttcgcatggatgtgccggtaacagctgcaatggcctcaacaacgcaggataccattatcgatgcctgcacatggcgctggcatgaattgccgccagcactgccaaagatggcagacgacgagcctgcaacgcttatgaaactggctgttgcagggctgcgtaaacgtcttaccacaaaagagtttggctacacaccacctgcttctgagaacagggtttatgttgagcggctaaagtacgaaatggacacgctgactcgcctgggattttgtggttacttcctgatggtacgcgatctgatgaatcacagccgtgaaactggcattcctgtcgggcctggtcgtggttcctctgccggttctctggtggcgtggtgcataggcataaccaacgtcgacccaatccgtcacggtcttctgtttgagcgtttcatcaaccctgagcgtctcgacttgccggatgcggacttggacttcagccaggcacgtcgccatgaggtgatcgagtatctgaatgaacgctacggcgaagattacgttgcaggcattccgaacttcacctacctgggcgcagcctcagcactacgtgataccgctcgtatttatggtgtggagtccgcagatatggcggtatcaaaagagctgaagaacgtcgaggatgatagccttccattggaggagctgcgcgaacaactggcaagtctcgacaaatacgcgacaaaataccctgatgcattcaatgctgcctgcaagttacaaagtcttatgcgtggctttggtagacatgcggcagggatgatcgtagcaggtgttcctctgacagaacgtacaccggttgaacgccgtggtgacgcgcgttgtatcgcatttgacaagcgttactgcgaggctatgggcctaattaagctggacgtacttggtctggcaactctcgatttgctcgatagtgcaaaacgctacataaaagagaacacaggtgaagatatcaatcttgatgccatttctcttgaagatcgcaaggtgctggatggttttgctgctgggtacactcaaggtgttttccagcttgaatcaggcccaatgcgcaagctgcttaaagatttaggtggtggaattgagccaatgagctttaaaacggttgttgctacgactgcgctcttccggccggggccaattcagtcaggcatgttggatgactatgtttctgtagccaaaggctttatgacgccggaatcattacaccccgttcttgatgaacttaccgcagaaacaaatggcgtgattctctatcaggaacagacgatgaacgcgactcgattgcttgctggcttcacaatggctgaagctgacggcgttcgtaaagcgatcggcaaaaaagacatggaaaaaatgaagagcatgggcgagaagttcatcgttcaggctcaagctggctggatagacgttgagctggaagatggcactacacagcgcattcaccgtgcggaacattttaaatgcgaagacggaactctgaaaactgtcgaagaggcacttgagtacggcgcaaaactacctataaacgcagtacgcgttacagcgtcacatccagggctatcagagatgaaagcgaaggagatctggaccgcattcgaaaagaatggtgcctaccagttcaacaaatcacactctgttgcttactccttaatcagttatcaatctatgtggttgaaaactcattatcccgcggagttcttcgctgctgctctcactattcttggcgaagataaacaccaggggctggttaaagatgcgctgacctatggtattcgcgtattgccaccagacgttaacgtgtcatctaaccgaatcgagatccgcacgcttgaagatggcagccaggtgctgtatgcgcccttctctgctgtgaaagggtgttctgagaatggctgccaagccatcatgagagcgcgagaaaaagttggcggcaaattcgagtcactggcgcaattcgaagaagctgtcgagaaacgtgcctgtaatagtcgagtgcgcgaatcactgcaaaaagtaggtgcgtttgcatccatcgagccaggtagtctgccagcaactgatccagagcgtctccgcgaccaggctgaattgatgggaaaccttgtcatagacgcagttaaagcctcacgtccgtttgagatgaaccccaaacgttcggctgagattaacgtgctcatgacacggatggcggctgaaatgggattaggtgatgaactaatccgccctagcattggcattaagccgaaaatcatgatcattctggacaatgcgaacggcaatgatgctcgaaccggttactttatggagaacggatacgacgactttaaggccaagctattgacggctggagatttacgcatgggcgatctctatgtcacaggcgtttgcaagaaggttaaagacaaagaaaaagactacactaaagacgagatcggccagttcaccgactttatacgtgaagagatcaatctggtgcgtccgacctatgtgctgacgtgtggcagccgggcaacggcattgtttaacaacaaaaacaagccatccgatttggtcggcaggaaggagtaccttccagaccttgacgttactgtcttttacgggtttaaccccaacattctttacttcagacctgaagagggagaacgactagaagcgatattagccgacgtagcagaaaccattaagacgtga

SEQ ID NO: 491891 - DNA, 1236 bp, Shigella sonnei
atgacgactactgcactgcaaaatgaaaaaaatccttctgattaccttgtttgcaagtggtgcggcaaatcatttcactattttaagtcccatgtagccaatggtaattgcgagggcattcctgagtcagtaaaagatgccgatcctgacaccgtactgaaaatgtacacaacgcagtttccagatgaaccaacgctatcgaaaaaggcacttgatgcaattcaagctaaacgtgccgagcaaaaaagcgaaatggccaaatcttctggcttgaccagtagccctggctacacaggcacagttgagtacaagacagatctggtcgcagctcacgaactgctaaacgtaacggtggaagaactcggaacaaaacgtgggacgccgctcatggttagcgtcaacgtcaatacgccgtttccagagttcgttccagaagtgaagaagggatacgtatatggcgacttcgaactgatcaaagacattttcatgatgcttgaacttggcataccaggctatttgtggggtcatgcaggaacaggcaaatcttcattgcctacacaactatgtgctttgctcaatcgtccgttaatccgtgcccaacatacagcatcaatggaagaggctcatgttacgggacaaattctggcgcgtgatggctctacgtatttcgagcctggcttgcttgcgctcgcaatgaagcatggctgggtttacctcgcggatgaatacgactttgcgtttccacagattcttggcgtgtatcagccagtgctggaaggtgaagcgttggtcatcaaagaggcgactccagaatggcgtcgcattactccgcatgaacggtttgctttcattggcactggcaacacgaacggatctggtgatgaaaccggcttgtaccagggtacaaacatccagaacgccgctaacttttcgcgttttggcatcgtttcgaatgtgaaatacatgagcaaagaggcagagatcagcatgttgataaatgctggcatcgtggatgaatacgctgaaaagatggttaagtttgccggtatcgttcgcgatggatacgaagaacacctgatcagtcagccgattggccctcgtgaacttttgttgtcggccaagattggaatgatgcgaggcgactttgtgacaggtattgagcgttctttcattaacaaactcccttcagcttctgcgcaagcggcacgtgaagttgttcaaaaaatatttggttaa

SEQ ID NO: 491892 - DNA, 2109 bp, Shigella sonnei
atgtctaaaaaacgttccatcaaagaggttcaggacttccgtgacagtgtaaaacgagtagtcgctctcctttcaggtaaaaacatccctgttgcagaacgaggagacgacgcttatgtacgctataacgatgatggagagccaattctcgtaaacatcccatcaattccggataacgcaacaccggcattgatgaatgctgtgcgcggatttctcgatcatgaggttgctcacattttgtttaccgatattcgtgtgtccaacaaaatgagagaaaaaggacgcgttccttcccggtcactatggaatgcattagaagacgtgttcatcgagcgaaaaatggggcaggtctttaacggaacgagacgtaatctgatggcaactcagcgccttataatcgaaaaagtctttaaaccaaaggcttcagaggctattgcttattgtggcaaagatcagcgcgcgctttttctaaacttctttctctgtccggttgtaagagcctgggatggccaagcaccgttcgtagatttcatggatgaatactggcctgtcattgagaaaccaatttcattattaaaagaacatggtatcgatgtggccgtgcgtaacatgtcctgcaccgaggattgtgtaaaggtggctgcgaccatagctaagatcctcaaagacactgaaagtgaaagcaaaggtaaggagtcagctccgggaaaaacacccgatccttcagacgctgaccagacggatgcctctggagaaaacaatgaagacaacggagatcatgagacacccgaagcgttagatagccacaaatctatcaaatctgaatcacacagtaagcacaaacatgatattaacgacagtgatgattcagataattctgaatcatcagaaacaatattcgatgatacagaaaatgataaagaggtatcagattctgatgcttctgataacgcggcgtcagaatcattaaccgctgaccacgaaaaaagaaaaacgacagaagacggctcttcagatattccaactccgtcaaaaataagtctggaagaggctttagaggagctggatagcatagaagatgaagtcggaggcatgacagaagatgctctatccgaaacgattaaaagcgagttaacagaaagctcgaaaagcgaatacaggccatacaatcgctcatacgacttcatcggctcgattgatcaggcagaagcccatatcaaacggcttattaaaacattctccgatattgatttaggaggatatccaatcagccgctatcgcatcgttcctgaaggcaaccagctcttcgacaaatatattgaaaagcatctttcgtcaggtgtttcgtcgacgctggcaaaagacctggagcgagcaatagcaagcagaaacagagttcagtttataccgggccagcgtcgggggcgcattcatggttctagtatctacagattagcaatgaatgatgatcgcgtgtttcgtaaaaaagaagaatctaaagccgttaacgcctgtgttcaacaagttattgatttatcaggttcaatgagtggtataacgatacaattggctcttgcaagtgcatataccatcgccgatgctcttgatcgaataaatgttcccaacattatcaccggcttcactacatttggtagtcatatggcggcaggagaacttaaggctgtcaagtatgagttctctcgctttgaatctttaatgctacctatcatcaaaaattggaatgaaaaggtaaattctcgcgaagttcgctcacgtatggggtgcgtaggctacacattcccacttcttaataacgtggatggtgaaagcatagccagccttgcatcgttattttccggtcgcttggaggacaggaagatcatgcttgttctgagcgatggcgcgccgtgggctgttgggagagattttgacgctcatttgcgttcggttgcgaagcaaattgaaacgcagactgacattgatttgatggcaattggcatcatgactgacgcaccggagagattttactcaaatcatgccctggtaacgagcgttgatagtcttggttcatctgtagttactgaactatctcgtatcattttgaagtga

SEQ ID NO: 491893 - DNA, 213 bp, Shigella sonnei; identical to SEQ ID NO: 32040

SEQ ID NO: 491894 - DNA, 387 bp, Shigella sonnei
atgtctgacaaaaacattgaatttatagaaagtcgctatgctgcttttatcgcagggctgattgaatcctcacctatgagtcaggcccaaatagccagacttattggttataaaaatgccaacaacctttctttaattaaaagtggtaaaattcctttgcctatcgataaggttcgtccgctggcgttggcgctgggtattgagccaagtcgtcttatgatgatggtgctggaagaacgccaacctgaactcgcagcatttttatacaaagaaggcaccgctcctcttaacgaggacgaaaaacaggttcttgctgcatataacgagcgattcggtaaagagaaaggcgcatcacaaaaggttgttgaggccataaagtctctatga

SEQ ID NO: 491895 - DNA, 1104 bp, Shigella sonnei
atgaaaaatagctttgacagagcacgcgcagcagaaaacacctcaaaagaggcaattgagtatctcgaaagagcatctcaaatgcaggccattatgatctcacagatcaacaataacatgatattctcggacgcattcatgttattcactcgcttatctctgctgataaccagacgtcggccagagatcgctgttcattgtattttgatacatgttttgccgcacattgctgatgtaaaagtaagtgacattaataggttcatggttaaccaactggtcaaccctctaatattggatggcaaaattgttatgggccgccgcgttttctctctgatgaagcagttccttagctggtgcgccttccaggggatgatagacgtgtcaccgttaaacgatatgtcactaaacaaagttgccggtggcgcaaagcccacacctcgcgagcggaagctgaccgacgcagaggtatgggtgttctggaatatatgggactacttcaatgtgtgcgctggtacaaaatgggcggccaggctgtgtcttgtatcagcaagacgacctgacgaagtactgagggctaaaaaaagtgagttcaatcttaagcgtggagtttggaatcaaggcaagagaaacaagtcagcacgtgagcattcgctgcctttaagcacattaatgcgcacatgcattgaagagttgttcgaatacggtaaagacagccagtggctcgtgccttcgaataaaaaaatcgggaaagaccttcctatgtctaaagtggcaatagcccaggcattacgtcgtattctggaacgaccagaactgatggagcttgcgccatttacacctcgagatttgcgtcgtactgcgcgtagttacttcccagcattaggtataagccaggaggtatcacgcaaaataatgaaccacagtcttgaggggatagatcgggtctacgaccggcacgattatatggacgagatgcgagacgccttagaaagtttctcaacgtacatcgcatcaatcgtagagcaaccggatttagacgaaattgaccacaaattcaagggagatcgtctatcaacagagcttattcgtctaaatttttcatag

SEQ ID NO: 491896 - DNA, 1914 bp, Shigella sonnei
atgtcattcattgactatgatattttgtcagcatcatcaagcaaagagcttagagaaaaacttgcgaagaaaatcgcagagggttggcaacctttcgagtcaccaaacattgttgaaccaagtaagggcggaccaaatgcgtacaatcaagcaattgtgcgatctggtgatttatcacaattgcccacaccggtatcaaatgaagatgaagagcctgactattattatgtagttactatcgcaggtcaatccaactcaatgtcatacggcgaaggactgcctatgccaaaaacttttgatcggccacatcctcgcgtaaaacagttagctcgacgcagcaatattaaacctggtggttttgcctgtaagtacaatgaaataattcccgctgatcactgtcttcatgatgtacaagacatgactaaattcaagcatccaaaagcaaacgactctgaatatggatgtgttggtcagggactacacattggcaaaaaactattaccattcattccagcaaacgcaggtattttgctcgttccttgcggaagaggtggttctggtttcactgttacaggctctgaaggccaatattatgaagagtcaggtgcaatcgaatcatctttaaaatggggattaaatactcctttgtataaggatattgtagccagaacaaaagcggccttaagtaaaaacaaaaagaatgtatttcttggtgttgtctggatgcaaggcgaagctgatttggcaactggtaagtactcgcagcataacgaactgttcctcaagatggtcgaaggtttcagaaaagagctatctcaatacgacgcacaatgtgttttcggaagtgctgcaaatgtaccctggatttgtggcgatacgacccactggtggaaaaacaaatatccaaaacagtacgaaattgtttatggtggttataagggaaaaacctcacaagcaatttatttcgttccattcatgaaagatgagaatgataataacgtattaaccaatagccctacagatgatccagacatcacatctattggctattatggttccggtcatcgcaaggataataaaacatggacttccgagagtagagagagtcattttggttcatggcagcgacgcggaataatatctgatcgtctcgcaactgcgctgcttgcacattcagcgaaatcatctgcttttgtgaatggcgttacaggtgagattattaaacaagaacaacctactcaacctaaaaatgacaacattgtcacaactccaaccccgcgaacggttatttccttaactggagctggtggtgatgtcgctactgaacaaggatggactgtaactggtgcaaatattcagtcagttgaaaacggaaaagcaattgctttaactaaagcggtttccaacgaaacttggacgatcagtaaagctactgacatagcacagactcttcttgagaatggaggtaaattactttgtaagtttaaattatctggaaaccctgatccaaaaaaagctaagtttggctttggtatatattacaaaaccagtaaacctgttgctgacgatatatcattcgacggtactgggagcctgtttctggctaacttcttccttcaaacaattggaggcaagttgaacattatgatgcacaggacaggcaataatcgaaatgttcagatagactcatatggtgactacgacaacaattggcacactcttgagttgcaatatgagaaaggcacaggaactgtaattcccgttctcgatggcaaggcggggagtaaattcaagctggttaaagacaatattgctcttggtgatgaggcttttgttttaacagatataacaaacaaccaaactcatgatcttgctatcgaaacacttaccattagcatcaacaacccaacctaa

SEQ ID NO: 491897 - DNA, 291 bp, Shigella sonnei
atgagcaatttaacttcttgggaatggtggttggccacctatttcttagcggccggagtcacattcgccttttacgtaggtcagttagtcgtaaaactgttgctgattaaatttgctagtcataaacgtatcgatgatggtctgtggcgtcttggcaccctggtggaaactcgctacgggcaacttaaggagaacgaaaccattactatccaagcgaaacgattcactgccaccattacaagaacacctagtcgtagagtggccttgatcaaaaaagtcacaaccgaataa

SEQ ID NO: 491898 - DNA, 153 bp, Shigella sonnei
atgattccatacatctcattagcttttatgggtggcttccttatcggcttcggcatctgtcgtgatttaattaagcaggaacttaaaaccaaaacactgtgcatcggaaagcgtgtgtatcgggtagttcatgaaacaaaggtgaaaaaatga

SEQ ID NO: 491899 - DNA, 216 bp, Shigella sonnei
atgatcgtattaagtaaacgggagaaggaaacgcttcatgaaatcagtaagtggccggagttccctgagtactggaagcctaaaacgcgagctaagttagagcgtttagggttggttgcaaacgtttctgaaacgtggtgttcggccaactaccagttaactgataaagggaaagtattgctacagcaattagtagaatcaggagtgttaaaatga

SEQ ID NO: 491900 - DNA, 1323 bp, Shigella sonnei
atgaaaaagttgatcgcacttaagcataagctggacgaaatgaaagctatgggaaccaatgcaaaaaaagaggcattggccaacatggatgacttcgagcaaagcatggtttcattgatgctcaaccctttcatccgttttggggtaaagaaatacaaagtggcagagccgcttagtgagcccatcccaagtgacgaaaaagccattgatgtactgaataagctggcctctcgcgagctaacggggaacgcagcaatagcagctgttgagtctatcgtggcgtcaatgtgcgccgatgggcaggacgtgttccgtcgtttcctcttaaaagacccgaaagcaggtgttgggattagcctatgcaacaaggtttttgaaaatcccattccgaaattcgaggtgcagctggcgtcaccgtataaagaaaaaggcgacaaataccccttcaagccaaatcctaaagcaaaatggccgatgattggcagtcttaagctcgatggtttgcgagtaatttgcgaggttattgttgacgaggaagaggttaacttcctttctcgtactggtaatccaatcacgtctctcgatcacctaaagccagcaatgctcgaattaggcaaactttcaggccacaaacacatcttcttcgatggtgaaggaactgccggttcatttaaccagtccgtatctgcattgcgcaaaaagaacgtgcaggcaattggcgctatttatcatgttttcgacttcttcctaccggaatggcgggcacaggctaaatccaaagagtatgcaaagacaggtatgaagctgaaagagcgcctggctattctcgtggcgttgttcaaaaacgatcgcagtgaaggctacacacaagacattcacctgcatccgttctatatcatccatagccacgaagacttcatcgaacgcttcatgaaacgcctggacgataacgaagaaggggagatgggcaaagatccaaactctgtttacgagtttaaacgtacccgcagctggtggaagttaaaagacgaagattcagaagatggtgaaattatcgactttgagccgggcgacccggactctggttttgccaacacacttggaaaaattgttattcgtcttgaaaacggcgtcatcgttcgtgcgagcggcattaagcataaatatctggacgagatctggaacaacaaagagaagtaccgtggtcgtattgtcgaggttcattgtcacgagaaaacacctgatggcagcttacgccacccacgactgaaatggccgcgttgcttacgcgataccgaagatcgaatcggagataaagaatga

SEQ ID NO: 491901 - DNA, 258 bp, Shigella sonnei
atgatggttgaagagattcgtaaaggagaatctctgtatttcgaagatatgaccgcgctcattaaggaggttgaagaacggaataaacaagccagaactttaaaacgaaaacgtgacagtgtaacgattaatagcatggttaagaagagcaccacatcacaaacagcgatcactgacgtgtatgcggcgttgcttgaagaaacaacaaaagaaacacatgagcaaatcgatcaacatatggaggtaaaacaacaatga

SEQ ID NO: 491902 - DNA, 783 bp, Shigella sonnei
atgaaagacgaaattcagaaattagcctgcgacatcattgataaaactggtttagaaatcagcgagagcaatcggctagacatcattgaaaaagccgtaaaaacagcaatggatcatatcgccactcgtttggtcgagatcccgctaccggggctaccttatctgaaggttaagttgtgcgtatggggcgaacctgcacatgcacgacgttctgcattagttgtttttgtacgcaaagaaaacttacgtactctaaaagtgcaggttggggcgtggtttgatggcagagtcatctatacagataccattatctgtcatccaggtgacgaacatattgaagccgtcattcgagaatctattcgggctatgcgcagtttagctttgctggaagacaagcaaaactttgaagattacttgcagtcggtaaaagctgaaccaacattgtctctgaaagccgatttcgtcaccccgacaaatctgttggaggttttgattaataaaggggctaatgatgctgtaaacctaatcagagagagcgaatattcgactctttgggacatgtgcaaaagccagttggatctggtgcatatcgttgttgatgcggggaaggcatgtgatggagtaatggcggaatttgctgggaagatggtcaggattgctaacgaattaccgatgatagagcaagaggctaaatcatacgccaccaatcatgtcacagagcttcttgccctctatcgcttagaaagcgatcagcgcaagatgattagctggggaagttggtaa

SEQ ID NO: 491903 - DNA, 1116 bp, Shigella sonnei
gtgagcgagctgaaagagctaattaccgaattagattttgaacaatggttggatactgaaggtatcgtttatcgacgtggaggcgtgagtactcgcggtcgtgaagtgaatatcaaggagtgtccggtatgcggcagctccaactggaaggtatatttcaatctgaccagtggcgtcggtaaatgcttcgctggtgatcatcccgaagagattcagttcaataagctggtcttcctcaagcactacagcggtaaatcacgacgacagttcgaggaatatgtgcagaacgcccttctttcccaggggtgggcaccaaagaaagaagagctagtgcttgcaagcacagtcgagttagaggggccagttgcactccctcgtcattacgagcttcctatagatggccgtcttccagactatctggttgaacgaaacatatcgcctgaaatggcaaagtattttgacctacgatactgcgtcgaaggcaagcacgcttatgtagatccgtatacagatcaggtaaaagggcagatattcgatatgcgaatactgataccggtttacgatctggatggggtaatgaagacatttcagggacgagacattaccggtacagcagaacgccgctacctctttcctatgcagcttccagcttcaggtaaatttctctacaacggccataatgcagtcggcaaacagactgtagttgtctgtgagggtgcgttcgatgttatgggggtcaaacgagctattttcgacgaagaaacattacgtgattacgtggagccaataggaacgttcgggatgcatctatctggcaacaccactcaggatgcagaagatcagttgggcgcgttcctgacgctcaaggcgcgtgggttacgtaatgtgatcatgatgtgggatagtgaaaagcaagctatacgcaacactatggccgcagctaggcgactgaccagtatcggtcttaatgtcaaagttgcgtgtttgggtgaggaaggactcgacccgggcggtgcaacgccagaacaaattatcaaagcctattatcgggcaaaaccgtataccaagcagttggagttacaaagcaaggttttgggcattaaggctctatcataa

SEQ ID NO: 491904 - DNA, 1341 bp, Shigella sonnei
atgaccgaactttgccatacaggacgcgggctgtccgaagagtttgatgaagatttccagaacagactgacggcatatttttgtcgtgatcacgagtttcttactcgtgcgggagatctggttgtgcctagccagtttgccaatgcggccaatgccatattggttaatatggtttcgggctattaccgtatgtacaagagcgcgccctcttcatctgcaattctggatatgcttaagcgtgcgaaacgcgataagactatccgtgaggaactattcgccgatgttgttgctgcgtttaagcgcattcttgcagaaaaattgtccgatacctcgtacatggttgaccaggtatcaaccttcgcaaaaagtgtagcgtttgatgatgctctgattaaggctgctgaactgaaagagaaaggcgactttcagggggcgatggcaatcatggccaaggttcagcagattggatcgaacgaagcgaccggaatctatgactactacacctccgcaagtgagcgattgaaagcgcgtgaatatgaggcttcagaggagtatgtaccaaacagtattacaactggactccctctgctcgataggttgctgtaccaaaaaggctgggcgaagcgtgaaatggtgctcttcatggggttcgctaaatccggtaaatcgaccgcaatgggtgagttttccataaacgcaacgcttgctggctacaatgttctgtatctctcgctggaggttcacaccaccattttatccgaccgttttgatgcaagattgtcggagacagaaatgtccaagctggtggaacggcgcgatgaggttcatcgtaagttggcagagttgggagccacgaaggggattggtagtttgtgggtggttgagcgtccgtcaggaagtatgtcaccggcagatctggaccgtatgcttaacagtatgaaagccaatggcatggtgcctgacatggttgttgtcgactacgcagatttgatgcgtgccagttatgaccttcgtgatgatcgcgccaacattcgtagtatctacaccgatttacgtgctctttatgacaagcataacgttgctgggatcacggcatcgcagacaaaccgtgaaggtggcgcgtcagaagttgccacaatgatgcacgctgccgacaacatcgaaaaagtacgtattgctgacctggtaataacgatcaacaaaaccgaagaagaagaagcgaaaggagaggctcgtctctactttgctggttcacgtaaccagcagggagggatcagcattcgcgttaaacaaaacctcgaacaaatgcgcttcattgagcgaatcttagacgttacctaa

SEQ ID NO: 491905 - DNA, 741 bp, Shigella sonnei
atgagccaaatctttttcgataccatcgacaacgaccagtacgacttcatgacagagtggaataccgctgttatggacaagtgggtcgctgaaaacattggtttgtcgcgctgtaaagatgaggctgaactcttcgagacgaagtggtttgattaccgcgacatgcatcctcttatggccacctgtctgtttacggaggcatacaaacgtcagtactcaaatatcatgctgacgcacggtcgcgaacactttgaaacagctccgttcaccaccgggttaaaacgcctgccttatcaggagttgtcgactgccaataaaacgtctctatggaaagcacgccagtttgctgaccgctattgctgctcatacgactactttatctccaccgttctttccgcagctgcacgacggctgtgggacaagctgccgcgcccacagcatttatggcagccagaactgattgagatatttgaagagaaattagccagacgcgcaacaacccgtctggatgactctctggttagctttaagtatatgggagacatgcagttcaacccgattcaggaaagctattttgagtggattctggagcgtttgcgcaccatccctcgcagtaagcgcatacgcgcaattttctccgctatctggctaatggaaatcgttccagagcgccttatttccgcccactttccagaagaactggaagaagcacggcgatttattgatcccctatctaattaa

SEQ ID NO: 491906 - DNA, 1059 bp, Shigella sonnei
atgcgcatgaatagacttccaggatatggccttcccgaactggctttttggcctcagcctaaatatgaacggaataaatggtcgatgttctgtctgaaactccgtaatgatggaacccttgcttggtatcggcgatatgttgatcgtggtatgccaaaccacgcttttgatgacgactacgataactatcctgaagcaagaaaagcggcattagagctgaataaaaacgtgagctttgacattgaaaaacttcctctatctatgtttcaaaagaagtcattgcgtttgaaagttgacaaagcactcaaagccaaatcacgtctcatggatgaagagcatataatgctcaacgaagcaattaaggcacacgccaacgatccgcgagtgacattaaatgagttaataattaacccagattacgaaactttgcgtcaacccctttttgacgtgctaagcgagatgccttacttacattttgtttttcttcccaaattccaagtttcacttcaactcgttgctcctaacacttgggaatgttcatataacaacaaagctaagacagcgaagatctgctaccaagaacgcatagccagaggttttggtttatcaggtgctgcacattggggaaaaacaaaagcgactattcgctcaatgcttctgccgcgtgctaaccggttactgcaactcgccagcgtaaaaagaatgctggatgaagctctcaggaatgggcaaaaggtactggttgttggcaactttgttttctggtttgaggacaaaaatcaggtaggttggagtgttaaagttgctagcgaaagcgaaaccacctcaagaggcaatacgctctggaaagaaggaactatcatttcaaaaaatcacggtcgaattgtcgtgctgccgtatacaaaagaaaacggtaaacatgtaaaaggttataccaagaatgcccctaacgacggcaacgcaattccgagacataaggatgagtatgtcgagttgccctttgaaattttggatggtgacttgatgttcagtctgttcggtgagcttaactacgaatag

SEQ ID NO: 491907 - DNA, 360 bp, Shigella sonnei
atgtccatgaaaatgggtgacctagcaaagcgcaaagagcctgatgcaccggctaagaacacaactcctttgcgccaaccagtcagaccacagggacgcccgactcgtggcaaagagaaaattaaaagccgcacaatgtcactggaggacgaatacttcgaactgctggagatgatgaagttcatccctcgcttcgagaagttcactcgttctgacgtgattcgagcagccattttccatctggcagagaagtcaccgcaggaaatcgaggacatcgtgaaattgaatgaggcgatcaccgctgccgatgtcacgatgcgtactgatgaaattaaacgcgagttaatgaagaaaggttga

SEQ ID NO: 491908 - DNA, 669 bp, Shigella sonnei
atgaccaagatctttgtggttggcggcacaaagggcgggcctggcaaatccaccgttgcccagcaaattgccgtttgcctgaaagtcaaaaagaagaagaaggtttatatcactgatatagatattcagcgcacgacaacaagctggtgtgaagaccgtcgacagaacgaagaccttgagctgattccttttgcatacgttcaggatgacatcattaagcacctaaaatcgcttcagggtagagctgagtttgtagtggtagatgctggtggcttcgactccgaaattcagcgacaagcgatgctgatggctgacgttatcattatcccgctgcgtcctaagcgtcgtgatttgaaatctttacgtgacatcgatcctattatcgacaatgttcgcaatgtaaacgataaagtgaaggtccgcgcggtcatgaaccagtgcccggctttgccatcacaagtgtctcgcattctggcggctaaagagattgttgagacgtttggcatcgagtctgcgccagtcaatctatataaccgcaacgtctatgatgatgcggaagagtctggtcgttctatctttgaaatgaccggtagcgagcgcgacaaaaaggcggaagccgagtttgaagaatttgtagattatctgttgagtctggaggaagaagaataa

SEQ ID NO: 491909 - DNA, 753 bp, Shigella sonnei
atggctcctacactagatagcgcatattcaaaagatctaagcgagtttcctcataaaggggagactcgtgttgttcgttttggctttcttatcaatgaagcctccctctataaaatctcagaaattgaaatcattgaaccagaagatgacatttgcctgtatgtctctatggaacttgtaggtgcgcgcgaccaaggcgacctgagcgaattcatcttagatcgagcggatgaagatgcccctgaagaagagattatcaaagaggtgctccagtccgggcttctggacgaaaacaaaaatacgatcgctggtaggatagctctgcgtgaatatagttttgttgaagacggtaatgagatcgaatgttaccaggtagccggtgtcgaaactgtcagagagcgtcgtcagcgaggattgtgtcaccgtacctatctctttcttcttcattggtatgagcatttagtctgcgacgatacacaaaccattcctggtgctaagatctgggcagggcctctcatgcgaaccggcgatgtgcgtatatacaatgccaaaacagaaacgttcgaggatgtgttaggtgagtacgggatggggaaagaaaccggatttttgccgtggaacagaggattgttgcttgatgcagagttaagctcttggctcccaaacaaagtgcaagttaacgttcagaaatttatcgtacttatcatctcccgcaaaacaagaactccagtaggtttatacctaaaagattaa

SEQ ID NO: 491910 - DNA, 384 bp, Shigella sonnei; identical to SEQ ID NO: 22745

SEQ ID NO: 491911 - DNA, 252 bp, Shigella sonnei
atgctaggcagcctgatgacaaagctaaaagttgctttgattacgctggctgccgttcttttcgttcttgtcggcgcttacacgatgggcgggaatgcggcgcgacgagcaatggaagagaaggcaaaacaggaagacagaaaacgacttcaaagcacagtggatgtcaaaaatgaaacggttaatgaagtgcggcaaaaagatgcctctggtgttcatcgcgagctgtttgataaatgggtgcgtgattaa

SEQ ID NO: 491912 - DNA, 693 bp, Shigella sonnei
atgaagactccgagaggcattcgtaataataaccccggtaatcttgataaaggatcaccgtggcaaggtctggttgcgaatccagacgaaccgcgcttttgcacgtttaaagaccctgtttgggggattcgtgcgctggcggtgactctaattacctaccacgacaaacgtcgcgcaaaagacggctcaagtatcgataccattcgtgaagttattgaacgttgggcaccgccgaatgaaaacaatactgacgcctacattaatgaggtgtctaaagccgttggtgtaaccgcagacatgatcatcgatctgcatgattacgacatccttcgacctttggttgaggcaatcattcgccacgagaatggccgaggcccgctaaaaacgctgaacacctggtatgcggcagaagttattgaggaaggtctgcgtcgagctggcgttgttaagccggtgaaaaccgtgaaggctgttcctgtaactaaagaaaccgcaggcgcaactgttacagcaggtattggtctggcgcagctggccgatgttatgccgcaggtttccgctgctatggataaagcacaaggtcatatctctagcggggatacagtacgcatcatcttcggtattgccactattgttgtggcaggattcattgcctggtcgcaggtaagaaaacaccagaaagggatggtctaa

SEQ ID NO: 491913 - DNA, 324 bp, Shigella sonnei
atggctaatgacgtaggaggcgtcactcatgatcaggttgagagaatagctaaaattgtcgccagagaagttgttggtaaattaggaaaagaaatcagagaggagatagttcatgaggttcatgagcagttgaaaaactattttggtgacatgactccggctcaacacagtattcaacattccaatctggataaactacttaataggttagattccatctcaagtgggttctttggcggcattgtttctaaaataacgtcgttcattattaccgcactgcttttggggttagccgcgtatggcgtaaaaagtggactgcaataa

SEQ ID NO: 491914 - DNA, 513 bp, Shigella sonnei; identical to SEQ ID NO: 32037

SEQ ID NO: 491915 - DNA, 3372 bp, Shigella sonnei; identical to SEQ ID NO: 32036

SEQ ID NO: 491916 - DNA, 4707 bp, Shigella sonnei
atggaacagttcaagaagaaaaagttacctctattaattgcaggttctggtggcaaaaaaagtagcaaaagctctagtcgcacaccagttgaagcagacgataccgtaaattctcgtgctatggcctctattctcgatcttcttggagaaggcgtaattggcggcttggtaaatggcgcaagatctatttttgtcgacgatttgcccatagtaaatgaagacggctcttcaaactttagcggaatttcatgggattttcgagacggctcgcaagaccagacaccaatgtctggctttgatttcgtcgaaacacctaaatcgatcaatatccaactaaagaaatcgcattatgtgacggtttcaatagataacgatgaggccgatcgtgttcgagtcatcatgaagttcccttctctgcgaagaatagaccaaaaaacgggtgatacaaacggcactaccgttgagtataagttccagatctcaaatggagattcaacatttgtagatgtggtcgcagaaggtgaaaaaaacgttggtattaagttaacagcgaagaaaaccggtgcttattatcgtagttatgagctgaagttacccaagccaggtcgggcatacagtgttcgagtagttcgtattactgatgataacagcggtcagtatctttataacgatacatgggtggactcaatcggtgagatcgttgatacaccgatgaactacccaaactctgcgttggtgggactgaaggttaattctgagcagtttggcggctctatgccttctcgttcctatctggtgcggggattaaaaattcgcgtaccatcaaactacaacgaggctagtaacacttatgatggcgtatgggatggctcttttaagctgttgtcatcttcaaaccctgcgtggattctcttcgacttgcttaccaattctcgatatgggcttggtcagtatgtgtcggaatctatgattgatctcggccaactgtaccagatcggtcgatattgtgacgaagaggttgatgatggctttggtggtaaagagaaacgctttgcaatcaatacgcagatcaccagtagacaggatgcataccgactaattcaggatattgccggtgcattccgcggcatggtgttttgggctggtggcatggttaacatcatgcaggatagcccatcagatccagtaatgatgtttaccaactcgaacgtcaaagatggattgtttacctataaaggttctgcgcgtaaagatcgcccatccgttgcgctcgtgacctacaacaacaaggaggacggttataagcaaaacattgagtacgttgaagatcaggacgcaatgcgccgttatggtgagcgtaaaacagaagtcgtagcatttggatgtacaagtcgaggccaagctcaccgagttggtttgtggcttttgtataccgccagaatggagtcggatgtaattacatttactgccggtttagacgcctcatttctgatgcccggtgaaaccgttctgattcagaacaaatatcgtgcaggtaaacgtaactccggtcgaattgtggagtttaccaaaaacagcatcactctcgatgcgcctgtgtcgttagctaaaagcggcagctttattcggatattgaatcaggaaggcaaaatcgttgaacgcgatgttcttgaaactggcgaaaacataacaaaggttacgttttcaaaagctctgtcgtcagcggaaacgcctgttttgaacggtgtatggacaatcacagaaccagatctcgaacctatgcgcgttcgcatcgttaacatcgctcagggggaaacgtcgggtagctttgacatcaccgctgttgagaacaatccgtctaaatatgaggcaatcgacaatggtgcaacgcttatcccgcagaatacgacggtattggacccgacttactccaagccatctaatttgcaaatcactgaagggacttatctctcaagccctggcaacctgtcagtaaaactgactgcaacatgggaagggaaatctccagagtattggatcagttggcgacgttctgatgaaaacaatgtatcgaactggcaatcggcacgtgtaaccgaagagcaatacgaaatcgttaatgtcgcggagaatggacgctacgacttccaactgtatgcggtttcattcaacggtaaaaaaacagagattatcagtaccgtttatcaggtgctgggcacaatgacaccgccggatgcaccaacgtcattaacggcagttggggactatcgtaatgtgatactgaattgggtcaatccagattcggtagaccttgatcacattaatgtttacgcatcccagaccaacaatctggatacggcgaaactgatcgcagagtctgcaagcaccacctttacacatgctggtcttggggatagtgaaacttggtattactgggttagatcagcaaataagcgtggcatgttgagtcgcccaaactcaaatcttggtacagaggccacaacgcgagatgttctttcatttttagccaataaaattacctcgtcagaacttggccaggctttaaatgaggaaattgacagtaaggcttctcaacaagctgttgatgaaatcaataatcatatcgatcagagtgtcgaatctctggaaggtgaaatttccgcattaaataaggagctaacgagtagtatcgatgagttcaaaacatcgtttactgaacgcagcgagacactggagaatgcgcaaagcgagcttagaacggaagtttctagcactcgggaaaaagtagatgatgcattacgacaagttgaaaattcaaatgcagcacttattgaactacgtaatacagtatcaaaacaaggtgattctgttgctggtgtcgtagaagcagcaaatgcggcacttgaaaatgcatcatctttaattgccgaagagcgtaaagttcgtgcacaagcagatctagcgaatgctaaaaagatagaaacgatgagatcatcggttgatgaaagtgttgcggctgtagaagaaatgcggagaacggttgctgaggtaggaagagtaagttcagaaatcacaactaatcttgaagccatttctaagacaaatatcgatcttgcgttgcggcaggacgaagatcagcacaggcagctggtaaataacgcgaaaattgccacgactcaaaagattcttgtcgatgatgtgtcagcaatggcgtctaaggttgaagagatacgagccgagattggtgacaacattcgagcatctattctcgaagaagcgacagccagaactgatggtgataatgcgttagccaatcgtgtgacacaattacagagtaaatttgaaggtgatatcagtgccgcaataaggaccgaacaatctgcaagagcatcggccaatgagactctttcaaagcagatcacacaactggagtctaaagtaaatactgatatttcaaccgctattagagaagagcaacaaacaagagcaacgcaagatgaagcattatcaaggcaaataactcaacttcaaacaaaagttaataacgatatatctgctgctattaaaagtgagcaacaagcgcgagttagcggcgattcagcgttatccacacaaattaatcaattgcaggcaaaagtagatgatgacatatcagctgctattaatgaggaaagagaagccagagcatcaggcgatagtgcactatcaagagaagttagtagtttaaaaacaaaaacaggtaaagacattgcagcggcggtagcagttgaaaccaaagcaagaactgacgctaacgatgcattatccagacaaatttcttctcttactacgagggctaataatcttcagtcctcgatagagcgagaatcgacatctcgtacaagtcaggattctgccattgcaaaagacttggcaagttttaaaacaaaaactgctaaggatataagtgcagctgttgcggttgaaactcaagcaagagctgccgctgataccgcattgacgtcgcagattaactcactaaagacacaaacaggtaaagatataaaggctgctgtagcagaagagacgaaagccagaactgatgctgatgcagcgctttcgacaagggtaactaatctccagtcgcaaacaacaaattatatcaatgcagcgattacgtcagagtcaaaggccagaacaagtgcagacaacgctctaggaaaacgaattgatacactgaaagcgtctgtagatggaaatgttgccgttattcagcagcaggcttctgctatagctgacgctaatagaaaagtatcaacctcgtacacattgaagatggaaacttcaacgagtggtgggcagaagtatgtagcgggcattgcgctgggtattgatacaacggggctttctcagtttttggtgcgggcagatcgatttggtttggtcaacaatgttaatgggaagatcacaacgccatttgttatcgaaaacagcgttgcgtatatgaacggtgcttatatcaaagatggcactatcacaaacgcaaaggtaggtgacttacaatcaacaaacttcgtaagaggacgagccggatggagatttggcaaaaacggaacgcttgagattaacggtaacagtggaggaaatgggagattagttatcaatgggcagagaatcgacgtttacgacgacaataatgtactcagggtaagaattggtcgactttga

SEQ ID NO: 491917 - DNA, 591 bp, Shigella sonnei
gtgtctgagttagttcatgtgcagcttggcggccctatggccaaacattttggccgccactggcatctaaaggtgcgcaatacaaaacaggctctggatttaattgaggccaataagcctggttttaaagcatggatgaagcgcaatatcaaaacctatgacagataccacatccagatcaccaataaacagggccacaagtggtctgtggacgagagtgaatatcagatgatggggcagtctgacaacattgccaaaatccgcattacccctgttccgcgaggaagcggtggatctgcttttgggtggtttcagacggttgttggagcagtgttaatggttgcctcgatatgggtgcccgctcttgcgcctctcggtttgtcactgatgatgggcggtatagcgcaaatcatatctccacaagccactaacgaaagtgtgagacaggctgataattcgaactctttttactttgatgggcctcaaaatacaacaaaccagggcaaccctgtacagcttatctatggtgaggaaattttggttggctcacaggtcgtgagttcttctatcaccatcgaccagcttatgtaa

SEQ ID NO: 491918 - DNA, 798 bp, Shigella sonnei
atgggtaataaagcaatccctgagcttggctctgacgttatgcagcaaatctatctctgcgccataaatcgctaccctaatgaagcgtgtggctttctggttagaactaatggcgacaaatatcgctttatggaagcgcggaatgtttcggagaacccgcagaacacttttgtaatgcacgttgacgacattatggcggctgaggatgcgggtgatgttatcgcaatctggcattcacatactgatgaatcagcagaagcatctgatgccgatcgtgcaggctgcgaagcgacggaagttccgtggatgattctggctattcgcaagaatgttgagggagatgcccctttccattttagcgagatgaatgtgatcacacctgatggtttcgaaatgccatacctgggtagaccgtatgtatttggcgtattcgattgctggatgttgtgtcgggactatttgaagcgtgagtttaacgtcgaactaaacccgaacgcacacctgcatattccatcgtggtacaccggcgataacgacattctcgaccagaactaccgaaacgaaggattggtacggcttgcgcccggaacagaacctcaacgtggggacgtcttctttatccaatacggaaaaatgcctgaccactgcgcggtttatatcggcgatggaatgattcttcatcaccagatcgaccgccttagttgtcgtgcttattacggcgggatgtatcagaaacatacgacgcatcacttgcgtcacagagacttgctcaagggagatgaggcgtgtctgagttag

SEQ ID NO: 491919 - DNA, 699 bp, Shigella sonnei
atgggaattaaagctgatattcagagcttatctccctctgcactcattgagttgttcgtactggatatgtcgaatacaacttcaggggggaagctattcttccacgccggaacaaacgaactgatgcaaccggtcgtctggcaaggagtgacatacgagccgtggccaatcaaagcatcaggttttgacaaaacgggccagggaacgttgccacgtccaaaaattcaggtatcgaactttgccggaaccgtctctgcggaagttcaggcaaacgacgatcttgttggctgccgcattattcgcaagatgacgctggctcgcttcctcgatgccgttaattttaaagacggcaacccaacagcagatccaaaccaacatttccccgatgaaatgtggtttatcgaacagaaaactctcgaaactcatcaggttgtcgagtttgaattgtccagtgtgttcgatttgatgggggtgcaactgccgtatcgtcagatcattaaaaacacctgcccgtggaaatatcgagggccagaatgcggctataccggtccatatttcgacaaaaataaccagcagacgtctatgtctggtgcggactactgcacaaaacgttatgacgcctgtaatgcgcgtcggaattattttgccgacggtgtgatccattttggcggatttattggagctacgcggtatgggtaa

SEQ ID NO: 491920 - DNA, 336 bp, Shigella sonnei
atggaaagacaaacgtttaattggtatccagattacgaatctgaaaaaagcgtaaaaccgaatgtaacggtacttaattttggtgatgactacgagcagcgacaggctcaaggtcttaatcgtattaaagaagaatggtcgttaacctttaccagatcatacaacgaaattaatgcaatcgatgacttcctgactgagcgatcaggcgttgaatcgttctattgggttaatccaagaggcaagcagattgtagttgtatgtgacagtcatacggtcaagcgatatcaggggtactgtgtcttaactgctacattcagacaagtatttgaggtttaa

SEQ ID NO: 491921 - DNA, 4563 bp, Shigella sonnei
atgtcacaaaacgtagagtttatcctgtcgctggaagacaaacagtttacagcgtcaatcgatcgtgcgggaaaactgcttactcgatttggtgagcaggtaacaaagcctgctcaaaaaatccaaacctttgaacgctctttgggttcggtcgcccgtatcattggcgttctggaaagcaagctcgattctacggcagataaactacaggatgtagctgccggttttgagcttgcttcagatgctacgcgtaaaatgcgtggcaacatcaccagcctcaattctggtcttaaagccctgattgagcgcgtcgatacgacaacttcttcagtagataaactcaccgcgtcattacgtaaagtgcaatcagagctaaatgatttctctgattgggcgacctatgcaagcaaaaacgcaagccgttttggtacggaggtcaaagaagcctctgcgtccgtgagtggcatgaatacgcgccttaataccacgacgaagcgactcagtaattggggtgtgacaacaagccaggctgccgagggactaaaaaaagttcgtgagcagatggatgaagttatcggacgtcagcaactgattaacaagcctgtacgcgttcgcacatcaggaagcggaaatggtgggggtagcggtggacgtggtggttactcttggcatatcggtaaaaataacgaaggcagtatgttctctggccttcgtggcaacattttcctgcttggtgagatcggagatgctgcaagaaccgtcaccagtatcatgtttggttggcagaagcctattattgaagctgcggccgaaatggaacgtatgcgggtgatgcttcgagggttgaataaggagaagtccaacccgggccaggctgccgctgatgatatgaagtacatcgtagacatggctcaaaatgcgccgttcgcgatgcaggcgttaacagactccttcgtgaagtttcgttctgctggcttagatccaaccgatggttctctgaaggcgctggtggactccgttgctcgttttggtggtaatagtgagctgttgaaacgtgcggctgtggccgttcagcagatgtccggtaagggcgtcgtgtcaatggaagagctacgtcagcaattaggtgaagccgttcctaacgcgatgcaggcaatggcggacgcagcaggcatcactatgggggaactgactaaagccgttgccagcggtacggttgaggcaaaacaggcgttgtctctgatgtttgttggtctgcgtgcggagaatgagaacgcagcgaaagacatgatgcaaacctacacaggtgcgctggcgcaacttcagacgtcattcacgttatttgctgatcgggttggtcaggccggatatctggattctctatcgaaggggatgaaagaactggcttcaatcatgaatagcgccgaagggatttcgtttgccaattctttaggttcggggttaacaacggcaatcgatgggttgcgtcagcttgctcaatggttagcaaagaaccaagagctggtaattaatctcggtaaggtcgtggccgcgatggttgcgttcaaactgatgcgagcagggatcatgggggtagttggcgcaggcagccagatggttagcacctttgccacgatggcgaccgccatacagactccatttaacctcggcgctacagcagtaactcgattcaatcgtgcggcacgtatggggctggctccgatcccctctcttattttcgccatccgtggggcgattacggggcttaaaggcgcttttgctggattaacggcgttcattgcagcaaatcctataggggcagcatttacagttgccactgtagctgttgctggcctaatcacgtacatgaccatgctccgcagcgaaacttcaaaggtcgttgacgagattaggaaaataccagaggcgatgacggcggccaaacgtgcacagatggcggagtataaagcgcgtcttgagcaacaaatcacgcaaaaggaacaagagttaaaatctggcgaaaaggtggtttatgggccgggtatggccggaactacagtaaagattaatcaggatgaacgtaagcgtatagaaaatgagctaaatgaccttcgtaagaaacgcgataaaactactggggcaattgaacgcggagacattgctgtagccaaacgtcttgcaaaagatgcggcagaatcacagatagagaaaatacgggaagagaatagagactttgcggcaacattcgtgaaagcccggcaggaggctctggataagatccagaaaatcaatgatgacggttcactttcagatgacgaaaagaacaagctattggcaccgttacgtgaaacggtaaacaaaagctatctggagcctgcgcaaaaactggttgattcactttcttctcgtaagaatgctgtcgaggggcaaatagccactcttaatgatcagcttgaaaaagcgaaaaaggaaggaaacaccgagcagatcaagaaactgcaaggaagtattcgtggttatcaggagaatttggaagtcgtcgctcaggaactgactcaggcagagttcgagagagataacgctgccaaaactggtaagggcgtaatgtcaaaccaggggactgttcttgggttaggtacaactgataaagctgcccagaaggcgttggcgcaatatatgcgaaaccagatggattctgcgacttatcagcgtactttgcctgacggcactccgatgatggacttcgaaggtaagccgattattgggcctaaacaactcaagacgcagcttaatttgcagaaagcatccagtgccagctctctggagaaaatgagcgatgaagagcgtgccgcagccattgccgcactgactaaagctcgtgaacaggatgccgcagccgccgagaaagcagcccaacgatcagctaatgcctcgcagcgtgcggccaagaaagaacaggcagcgcaacagaaactggcagccggataccagaaggctctggacaaagccgatcagcttatggggcaaatgggtgaaagctctaaggctacggtatcgtttgatcagtctcttcgcgatacaacgaaatcgctgacagatttggctaatgcggttcctaacgagttcatcactcaagagatgatcgacaaggcgaaaaaacgtcttgaagacctcaaaaatgcgacacctgaatatcgcgagatgtttaatcgccgcaatgttgagcagatgatctccacctgggcaccggagtcggattccattattagtgctggctatacgccgtctcgtgaagagaaagttgctgatttcgaagacacctacaaccgcaatctcaaagcgttgatagaacttcgtgataaggcgtctgatcctaaagttgtggcgctttatacaaagaaaatcaatcaactgattgctgctggcaataccgcgcttattaaagagacggggactgcgacgcagaagttggcactggaatacgaaaacctggcagagcagatcgaaagcacctggactgatttgtttagtggcttaactgatgtcctgactgatttcgttattaacgggaagatgagtttctccagcctatctcagtctattttgaaagatatcaccaatatggtcgtgaagtcgcagatcacgctgcctctaatgaacatgttggggatgggaaccaccgcagctggtagttcacagagtggtaatttgctgaccggggttgcttccgccgttgccaatcaaggggtacgaattggcaacactgttaacggcgacaagtctgtaggagaagccacgaaggagacgtccagttcggtaactggattggggcaaacaacacagcagaccaccagcgcaattggcactgcaacaaatgcgattggtagctgggtatcagggctatttgatagcactgaagccaaagatgccgagacaaaagccgtgaaggactccatcttctcgatgcagaacctcagctctgttaccggcgcgctgtctgccgcgtttgcaatgcttggagctaatgcttccggctctggtaataagtggttgagttttggagcaacggttgcatctggtcttgtttcagcttgggctggcggtggtttcgacagcgtgacatcaagctctgctaaaaccgcaaccagcagtgtggctgacggaactaaaggcattcctgcaatcccgaagtttgcaaatggaggaatattcggaaaagacggcgtgatcccgctcggggcataccagaaaggcggtattgctaactcgcctcaattagcgttgtttggggaaggttctatgaatgaggcgtatgttccattgcctgatggccgaacaatccctgtaacgctcagtaccgatggtatgagtggaggaggaaatgttctttctccggtatcaattgagatcaacgtccatagtgacggtagcacaactgaatccggcgatacagaaagcatatggaacaatgccgctcaacggatgaaagcaatcgcgcttgagactatcgctcaagagaaacgccctggcggatcactcaacccaaacactcaacgtaactaa

SEQ ID NO: 491922 - DNA, 270 bp, Shigella sonnei
gtgtcgccgttagaactactgaacatccctctcacgatgttctggatgctcagtcgcaacatcgaccgtctacgtgcggaagaggatgtccgcaacctgcaagtcgctcgcgctgctcaggcagatggcgagagcgtgaaggcgttcatggagggtttgcaactcaggattggaagaccagtcgtaacagataaagtctacgatccaagccaggatagggcagaccctgacgccaaagagcaactgatgcaaatatttggcagaggatga

SEQ ID NO: 491923 - DNA, 318 bp, Shigella sonnei
atgacaaaattactcgatctcgactccatcctacctcctaaaaaaagtgtcaaatttggcggccaggaatatcccatcgttgaaatgacggtaggtctgttcgtttccattaagcagatggaaggtaaagatctgaccaatatgtctcctgttgagcaagtgacagcttatgcagatctggttcgcaaggttatcccttcagtgcccgacgaagttcttgaaaaactgactgttccgcaacttcagcagatcttcaccttcgctatggaagtgattgatgaagaaaacgaaaaagcggctggcgaaggggcaaagtaa

SEQ ID NO: 491924 - DNA, 738 bp, Shigella sonnei; identical to SEQ ID NO: 32034

SEQ ID NO: 491925 - DNA, 384 bp, Shigella sonnei
gtgtttattgaagcatttgcaaatttgatgcagaaggcaaagattggcacggtagggacagacattttctgtcattacttacctgcctatgtcaaatccggtgtcctgcttattaacccaaataccggtatcagtatcgatcatgagttacagggcttttatcatgagtcgttcacaatcattgtgcgtggctcgtcaattacaacgactattgagaaagcgcgtaagatcattgatatgtttcccgtagaggaaacggaatctggagaggtctattttcgacttgtacggcctatggctatgcctgtcgtttatccgaaaaatgatggatcgttaatagaagccggtattccagttgaatttgctggctatttattgaattaa

SEQ ID NO: 491926 - DNA, 474 bp, Shigella sonnei
atgggtctgaaatacgatgcgcatcagttcaaacgtgcggggaatagactcaacaacagccagaaagcatttaagcgatatcttattcgggacatggaaaagctggcgcgtttggttgagcgcctcagccgtgcaatggccccgctggaaaccggatctctggagacagccatctttgctagggtgattaaagaaggttattcagggctgcgcattgagctttctgtgtctggggcaaagccacgtcaggggcatcctggcgtagaagtaggtgactatgctaagtacatggagctgggcaaataccgtctcggttatctttctcgaatgaagaacgtgacaaacccaccaattgaaggtgtaaaacctcgtgttggtccacactttctggaaagagcggtggaaattagcgagaagcagttctccgaagcgattcttgaggctgccaaaaaagccgggtttacgagaggttaa

SEQ ID NO: 491927 - DNA, 345 bp, Shigella sonnei
gtgaatatttcatggcaaacagaaattgcgatctaccgctttggcacaaagaacgtctacggtgaagcgcaattgcagttcgtcaggaagacgaatgtaggtgtagttaaattcgaacagagtaatgagaaatcgtcagttcgtgctgatagctctggtagtcgtggcaaggcgagtctggagctgtttgatgctgtgttagttgtccctttggaatcggctgtacaacttgatgatgtactgatccttgaaggtcaaaaattaaaggtgtcaagtgttcatcgccgctgggggctacgaggaagacctgggcatcttgaagtagaggcgaatatatgggtctga

SEQ ID NO: 491928 - DNA, 834 bp, Shigella sonnei
atggcgcagatcgactcgtatcgtagcggtgaagctgtttctctttcatttgccttcaacgtgctggatatcgaatctgccacctacacagtaaaggacagcaccggggctattctcgttgatggcgagccgctagaaattaccagcggtcaaatgtcgattccggttgtcgtgtcggctgaatataaccagctctctgagaaagagcgagatctgcggtacgtcattgtgaaggctgttgcatcgggcctgacgcatgaagagcgtcaaatgtatgttctgctgaatacttttgaactgtcgataccagaacagtcgtttgcaactgtcgctgatgctcaaatgcaggcgatcgatatgctgaatggggacactttgctgtcggatggtgaaggcttaatgcgcaagcgtctcattgaggctacaagacgtattaaaactttaccgttctcaatccgcaaaattctacgtatcgactttgaccgatacgatcgccctcaaaatatgctgaatgtgtatgacattccgtggggagcagatggagcgtaccggcatgatttagtcgattgggaaaagattactcaggagaagtttgaagagttccctgactacttcaaagaagcgttaatgctagccgttgttaatgaagcgtgtgagatagcaaatggcaatgatatcgtcgcagcacgagaggatggcattttgtcagaatctatcggtgaaacgaccaacatgtatcgtaccggtaaatcagcaaacgtgcatgttgctcgcagcacctggcgtttactgatccgttatatagacaatcgtatgattgtccgacgttcgtaa

SEQ ID NO: 491929 - DNA, 435 bp, Shigella sonnei; identical to SEQ ID NO: 32033

SEQ ID NO: 491930 - DNA, 921 bp, Shigella sonnei; identical to SEQ ID NO: 32032

SEQ ID NO: 491931 - DNA, 888 bp, Shigella sonnei
atgaatttgtggcaaatgcttatggcccgtcgtggtctgatgaatgttgctgaagcgcatgagcgtgggggcgctggcggtgtagctgctgataatgagcagagtacacaagatcctgacaagcagggtgaacaaaaagagcagccgaagggtgatggcgaatacgctggcatgactcatgaagagttactggccgaacttcgcaaaaccaagaaagctggtgctgaactgctgaaagagaacatgaagcgcaaagagaaagagcgcacattggccgatcagcttgctcagtacggtgatatcgacccggcgcgtgctcgccagcttttagaggctgaacaggccgcagaaaacacacgtcgtgaggcggagcaagctgaactggagcgtcgtggtgagttcgatgctgttaaaaaacagatgatcgaagcacaccaggcagagctggcacagcgtgacgaacgttatgcagcactggaaagtgaaaacgcatcactgaaatctcaattagttgagatgaccgttggcgcgtcatttagtaattctgccttccttcgtgacaaagttctaatgactcccgcgaaagctcgcgtgatctacggttctcattttgaagtcggtgatgacggtagcgtagtgggttatgacaaaccggcaggccacaaagatcgagctgttctggttgacggtgaaggaaacacgttgtcatttgaatctgcgattgaacgcattgtgcgggcagatccagaggctgacgcagtcatgcgcagcgaagccaaacagggtgctggttctaatagcaaaccaacccataaggtagtccaacagaagtctaagtcgacgatggataagttgacctctggtcttgggaaaattggacttaagtaa

SEQ ID NO: 491932 - DNA, 1533 bp, Shigella sonnei
atggaattgaacgacaaacaaattaaggatctggtggcgcgacgccacccggaatacgaaaagaaaaaagaacattgggactttctcgctagcacctatgctggcgggcgtggttggtttagcgaaaatatatttaggtactttaaagagggcgaccaggaatttaaggagcgagttgagcgtgcttatcgattcaaccacacacgtgaagtggtaaatctcattaacaagtatctttttaaagaagatattcatcgaaatattgaagaatcgccagagcagatccgcaatttctggaaacgagcgactcgccagaatgcctctattgattcatttatggccgcgattgatttgcaatcgtctatatacggtcgtatctgggttgttgtcgatagcacgatgagtggtgatgttgaatcagtcgctgacgagaaaaagaaagatgctcgtgcctacgcctactggatttcaccgcagcaaatgctggatgtggcatgggacgacgacgggaatatgttatgggcgttaattgtggaagtcgctcgtgatgacgcagatccttttacttctacaggtcaggaataccaacgttatcgtctttggacacaaaacgagtggtatctgttccgtgaggaagtgaagaagggcgctagtggagcagctcgtcgtcaggcaaaagttattttagaggatagcgacgagcataatctgggcgtagttcctgtgtttcctgttgattgtattggagaaagtgaatcaccgtatttcagcccatcgttgatcgatgatatcgcttatcttgatcgtgcggttgcaaactatctgtcaaaccttgatgccattattcaggatcagacatttagccagttggccataccggtgcagtcacttttacctggtgatgataatcacactaaagttcttgaaatggggacaaaacgtgtctttacctacgattctgaaggtggaaaccagccgttttatttatcaccagaccctaaacaagctcagatgatcatcactacgattaagacggtgattaacgaaatctaccattcagttggtgtagctggcgagcgaacgaagcaggacaacgcacagggaatagataattcatctggtgctgcaaaaatgtatgacttccagcgtgtaaatagcttgcttgtcacaaaagcagatcgtcttgaaagggctgaacgccaaatcatgcaactggttgctaaatggatgggggtagatctggacgaagatcactctctaatagcatatccagaaagttttgatattcgcgggcttactgatgaattttctgttgcggagaaactatcgttacttcaggcaccggactctgtacgtcgtcagcagatggaaatgctgattgagaagattttccctaatattaccgaagcgatgaaaaaggaatttgataaagatctcttgaaatttccgccaaaaaatgatcttaatgctcttgaaaataagtctgtacttacctatgatcgcagtgctgtccaagaaagcggacaaaattaa

SEQ ID NO: 491933 - DNA, 1257 bp, Shigella sonnei
atggcaatcccgtcctcgctcagtcttgtgcaactgcattctggacagatgaaagtcttccagtctccccatcgatttaaagttgtttgtgctggtcgacgctggggaaaatcccggttgtcgatctccactattattcgtgcggcggcaaaggaaaaaaagcaaagggtctggtatgtcgctcctacttatcagatggctcgccagattttgtgggacgatctacaggaagttctgcctcgtaagtgggttaggaaaaagaacgacaccacgatgacaatcgtgttgaagaacggttcggagatcgccctcaaaggtgctgataagcctgacactctgcgcggcgtagcgttgcattttgtagttcttgatgaatttcaggatatgaaggctgacacctggtacaaggtgttacgacctactctttcatcgacacgtggcggtgcactgatcattggtacgccaaaaggcttctcggaatttcacaaactgtggactataggccagaacgtagagctgcaaagaaagggacagtggaaaagctggcagtttgtaactgccgattctccgttcgtacctacggcggaaattgaagctgctaagaacgatatggacccgaaatcgttcgctcaggagtacctggccagctttgagaacatgtccgggcgcgtttactacccgttcgatcgtaacgtgcatgtaaaaccacttcagttcaaccctcggttgcctatatgggtagggcaggacttcaacattgacccgatgtcttccgtaattttgcaacctcagccaaacggtgagctatgggcaattgatgaattggtgctcttttcctctaacacggcagaagtgtgtgatgagctggagagacgtttctggcgatggaaatcacagataacggtatttcctgatccggctggtgcttatcgtcaacatgctcgcggtgagtctgacgtcgacatattcaaagagaagggattcttgcgtgtcgattattcaaaaaaacacccgccaattgcggatcgtgttaatgcagttaaccgaatgctgatgaccgcatctggggatatcaggctgtatatcgatccgaaatgcaagcatttgattgattcgctggaaaaggtcatctacaagcctggaacacgagatatggataagacaggtggcattgagcatagtgcagacgcattgggctacccagtacatcgtaggtatccagtaaaaaaccgtgttattcttggtggttcaagatag

SEQ ID NO: 491934 - DNA, 633 bp, Shigella sonnei
atgactgtcgaaaaagacgaggtaaaaactcgcctgacaccagcggagtgggccgaagctgaagccaaatggacgtcaggcgaatatacactctcaaagctggaggaagagtacggcattcgtcgtgaaacactctccagacatttcaaaaagcgaggattagagaaaggcgcggactctgttgggaagatggttcgtgagtctcttaaatctgacgcagagcttcgcgctaaagcccgtgcggaaaagatagaagaacgtcgtacacgttatgacggctgggcgtatgcgttggggcagatggtgatggtcgaagtcactacggccaaacgtgagggtaagcctttaggggtgattgaggattctctcaagagcttacagagagcaagtaatacccttgcaaaatgctttgaagtttcgtccaaagcgttgggcatggatcatgcggaaaatgacgaggaagaaattccgaacctggtatttggcgaacttacgccttcccaggtggcgaaattacgtcaggaagacgacgagcctgaaatcatcgatgacgaattgcttgagacgttggaagaagaagctctaagcgaatttgatgcgacagatgatggaagtgaaggggaggacgaataa

SEQ ID NO: 491935 - DNA, 267 bp, Shigella sonnei
atgacgttaaccaataaacaaaaggacatcatcaaaacgctcaatctcggttatgagcgaggtcatctacttgatctggacgaattgcttgaagttttgccgtacaagacaacaaagcaaagtatccagttctcaattcgcgctctgataaaaagggggctggtggagaaagggcatacgcgccaacgcagtgacaatcgctatcaccgccgaactcttgggttaaccactttaggtcgagccaaagcgaagttactggtgatgtaa

SEQ ID NO: 491936 - DNA, 891 bp, Shigella sonnei
atgacggacatcatcattaaacgctaccgccctgaagagtttccgcgtcatctggactttctggagcgaatgactgttacaaagggaactgtagaggactggcacgctcttaagtcccttcactacaaaacagacggcaaacctttcgcgccaacttactatcgctgcgaacttgatgatcgtctggtgggcgtcgtggttatggcttacccgaaactactgttggcacctcgccaccgcatgtttcctaagttgaaaccaaccactaataccaccgtggctaaccagtactggggtcggtacgtgaataacaactttgcggtgatcagtcgctcagttgtggatactcagtatcgtggcgtaggcgtctcttatcgaatgattaacctggttagcaggatgcatgaccggccaatcattgagatccagtcctcgatgagcaaatacaatcccttcgccatgaaagcagggtttaagttcatccgccctgagcgaccgaagagctatgaaagtgcactgcgtgtattccagcgccatttccgttccgacacgggtgataacgaggcgatcgtcaaagagttgttcgcaatgagcgagtctcgtcgtcgccgtgcactgcgtgatctggtggcggactaccacaagaacagttccctggcaaaagctgggcggaatcgtggcacgacgattcaggacattgccgacagtctggtggacgaggccagcattgtgaagctgctcaaggacattcacaacctgagctttacgtctccgttgtatggtgtgtaccgaaaccctgactttggtcgtcgactgcctgacacgctgccactgctggcattcgacaaacaacctttggataaaccgttagaaattgctttaccggcataa

SEQ ID NO: 491937 - DNA, 666 bp, Shigella sonnei
atgagcaaatacaacatcaacgtatcgtttcagacacgcgtaaataaaaccacgcgcacgttggaaatcgctgagtcgttcgggcttggcctggacgaaaaagagtggacgctttacgacaatctggagctggaagtgaagcagggcgatgtggtgtacatcaccggccaatccggttccggcaaatccgttgtgctgcgcgagttgcaacgacagatgaaggatgaagggctgtctgtagcctccatcgatgattttaccttcgataatgaggttaacgtcatcgatcagttgggcaaaacgaccagcgatgcgcttgggttgttatctatggctggtctgaacgatgcatatctgtttgttcgcaagccttctgaaatgtcagacggccagaaatatcgtctcaagattgccaaactgattgagtcaggcgctaaagtgtgggctgctgacgagttcggtgctgttctagaccgtgtaaccgctcaggttgtggcatctaacctccagcgtgccggtcgaaaggttggtgcgacggtaatggtggcgacgactcacgaagacctgaagaacgcgctgcgcccggatatgcagatcaccaagcactacaaagaacgcgtgaaggtggaatatcacaatggtagtcatgatgaggtccatttatga

SEQ ID NO: 491938 - DNA, 669 bp, Shigella sonnei
atgaccaaaaagtttgaaatcgtatatcgcgacccggcagatcttattccctatgagatgaatgccaaaaagcatgatgaacagcagatccgagatctggccgcagccattaaaaagcgcggatttgaccagccaattacggtcgataagaacgacgtaattattactggccatggccgtcgtgaggctgcaatttttgctggacttgagcgtgtaccggttattgttcgcgatgatctcagtgatgacgaggttcgtgcgaagcgccttgaagataaccgacttgccagcattgattacgatgcaattaagctacagaaagagcttgagtcgcttgttctggacgatatcgaggttttcggctttgaagagcgtgagttgaatgttctcgttggcagtatgacagaagatatggacaccgactcgctagttatcgatcttggcgaagaaactaaacgacagaaggatgaacacaccgagatcagtcgtgaagttgcagcggaagaagtacgtgttgtcgacgtattgggctttaaaactctccctgctggctctgccattgttgttggtgatttgcttgcccatatggaagaaatgacgggagaaagcggggtagacgcatttgtggcatatgcggagaagatctcttccggggagatggctgcatga

SEQ ID NO: 491939 - DNA, 681 bp, Shigella sonnei
atggacgtaaaaatcacgattttgcaggttgatgttgccaaccttcgcccgaatacctggaacaccaattcggttggtgcgcagaatttcgaaaaactgaaaggttctatcgaaaaattgggcttttttaagccaattttggctcgtgaacttgaagatggattttttgaaatcctcggcggcgaacatcgctggcgtgccgctattgagcaaggaatttcaacggttccagtgctttctgtgggcaaaattagcgatgtcgtagctaaacagatgtcactggtggacaacgagcgatacggtgaagacgaccaaatcgcattgcaacgcttcattgaagaaattcagtcagaacttgactatcaactgtctgaaatcgccccgtatgacgacgaaatctcgatggttttagcaaaagaggcggcaatcgaccttgaagcactggaggcgttgtctcgtggtagtgatgagcctgtcgataccgacaaacgagagaaaaccgaacgtgtgggggcggaacatcagaccatgcgcttcaaagtaactttcgatgcgtcagatcgtgttgcagaaaccataaaaaacatcatcaaagagcagactattaacaccggtaatgaaatggagaacgctggtgaggctctggtgtggctggtcgactactacaaggagcgtatgtaa

SEQ ID NO: 491940 - DNA, 1560 bp, Shigella sonnei
atgactgttcggattgtatctaacgcagtaaatgcgcttatttctggcgcagatgacaaggtaaagcaactggtgcagcaaatgttgagctacgaagtcgaggctggcgactggaagggcacaagcacaatgttcaactggagcaaaaactcgttccctgctggctttgccaagcccgtggcggctaatttgaacaaggcgggcatcaaatgtgttcatatccgcaaagacaaagccccggcgcttggtaaaccaaatccggcggttaacccattcccatacaatcctgattatgcgtatcaggatcagactgtggaaacactggttcgagagggaatgatgattgcgcagatcgctactggtggcgggaaatctaacgttgcctgcaaagcagctgcacgtatcggtcgaatgacattatttttaacaacccgctctgttctgatgtttcagatggccgaaaacttccagagatccatcgactaccgcgccgaaaatggcgaaccgtggttaaaagaccaaaaggttggagtcattggctcgggtgagttccaggtatcacgacatatcaacgtcgctacagttcaaactctggcaagtttccttgaagaaccaccacgcgatgcaactccagataagaagagctaccacctcaaacgtcgggacttggtgaaacgcttcctttcaagtgtgtctcttcttattctggaagaggcgcatgagtcttcaggctctaatttctatgacatcgccagattatgtgcgaacgcagactatcgcctggcgcttacggcaacgccgttcatgaaggattctacggaagccaacatgcgtctgatggcagtggccgggcgaattgaaataaaagtcacggaaaagtatctgattgatagaggcattctggcaaagccatacttcctttatcataaagttgcctacaagccggacgaggccagaatcaaggcagaacttgccaacaaacacctcaattttagagtaggtatgagcactgcctaccaaaaggcttatcagttggggatcgtgtataatttgggacgtaatgaggccattgttcgcgaagcattgctctataagcaacattctctcaattgtatgactctggttcgtcttaaacgccacgggcaaatcctgatggaaatgatgaaagagtccggccttagagttgacttcatttatggggaatcgaaccagtcgacaaggcaagcaaagctgaacagtttagcgtctggcgacatagatgttttaataggctcgactattctggatgtcggtgttgatgtgccaagcgttggtgcggtcattcttgctggtggtgggaaagcagaagttgaaatgagacaacgtgtcggtcgtggcttacgagccaagaagaatcaggcaaacgtgtgttttatcactgatttcattgacattagcaacaaatacctgttgtctcactcttatgagcgaaaacacatcatcgacaccacacctggctttgcagaaggtgtattgcctgttgatggcgcattcgattttggagttctgaaacgagattag

SEQ ID NO: 491941 - DNA, 279 bp, Shigella sonnei
atgagcgaaaagaaaacaacttattgccaagtggcattgtctgataaggccaatgaaaaacttggaaaatttcaaataaaactcaaagagaaaaaaatcaagatgtctaaggctgaagttatcaatgccattctggagacgatgactatggctgaatttgacaaagtcacatctgccgttggggtttccgctaagacgcgtgagaaaatcatgcgcatctatgagaactccaatatgacaaaaaaagatctagaggaaatactgagcaggttgccgtaa

SEQ ID NO: 491942 - DNA, 567 bp, Shigella sonnei
atgagttggttaaaagaattatcatttgttgacaccactggcgctaagaaaaatcattctttctggaaagtcagcgatccttctgattttcttgttggtgctaatgctgcttttgaattgcttaacttttatcaacgttatcctgaaatgaaacacagtccactcctgtacagaataacaaacgatatgaataggtctggtttattatcaagtgagtcagcgaaaggcttttttagcaaaataacgccacacatatcattcgatgctgcaaacgaaattgattatctatccacgaaacctcaagaacaattatctgtaccacctgagaaaaaagaaagacgaattgccagcattgaaaatatatcgaaagagcttcgcacaacaacgttgaggctgctgaactttcttacgctactgaattggatagatgatcaaacattgattccatcaaccgaagcgttggataacagagtccttcgtctaaacaaaaaatcgcaatttggttttgtgttcaccaaaaaaggtgaagatttaatcaaaagaaaatatagattattgaataattaa

SEQ ID NO: 491943 - DNA, 489 bp, Shigella sonnei
atgagtatttctataaacaaaataattaactctttacgacataaaatatcacatggaaaagatgttctttttaaagacaaatattatctattcaacttagagccgtacaaatgtacaaaattttatatcactcgcaaccgtaaatattcagtttcaatcacaaaagacatgaagaaaatctcttcagaagagtacttcatatcacatatttatatctacccatttaaattagaaccattaaatataattcttccaacaataaaaggggttgaacttgaaggttatactttaagctctaactttaatgatatgggtgtacaaaaaccagggacaaggtcatactacgcctacaaagtaaaatgcaataactacaacgcacttaacatgctaatcagcaaacttgaaacggagatagtcgaaggaaatctaaatgacgatcatgaaaaattagaacaaatagaaaaacttagaaagtgtgatattaaataa

SEQ ID NO: 491944 - DNA, 600 bp, Shigella sonnei
atgaaaatgaaactttcgttactccttgcttgtatatacctcccggcgttttccgccaacgcattatcagatttcgtctctgacatgcaaaaaacgtacagcatgtttacctccgaagacgtagtagaatacaaatcacgaggtctgaatcagccagtttggttcagattctcagacaacgcagaagaaacaatacttaatggaggaaaagaaagattacggttgcaaattaacgggaccgctgtaccagaaaacgttaatgtaagctctgacgaagccatgaagccatctggaattgttttagaagttcaagacggcacactttactgtgatgaaatggctacaacaggttgccaagtaaacattagggttggcaatgaataccctatcgttacttacgccaaggctgaagggaatacaagtggaaagatattgtttatcgatgaaaatacctcaaaacgtatcgttcgtgacatacagaaaacagcgaactctaaatccgtcgataaaaaaatctatgttgaggttcccttctttgtcgttggtaacaaagaatttaaatttgggttgctgaaaacacctctaagagtatcagaatga

SEQ ID NO: 491945 - DNA, 525 bp, Shigella sonnei; identical to SEQ ID NO: 32030

SEQ ID NO: 491946 - DNA, 651 bp, Shigella sonnei
atggctaacattatcatttctaaaaagtctatcattgaagctgcatctattgtatccgacgagctgcgcgaaaaagcagatctggcaactcaaacatataacgaacattataaaaatggcacgcacactaaagcagacaaagcaaatatgcaagctgcgaccactaaacttgcttacttcatcaacaacgtcgtaaacgcagtagaagacgaaaaattatgctctgttttctactatgcgattaaagcaagcaaacaagcgccagaagtatttttccgtgatgctatgactaatagttattcactggaaaaactggtttatctggttaaatccattaaagctggaaaatgtgtttattccgtcgctgatatgtctggatctcgtgtatttgctttaatcgatatgattaacgacgagatcgacacgttcaccaatggcgctgttttcgatttaatgaatgaagctaaaaaagcgtgtgagattaaattggacgctggctatactcaagccaaccagttgatcaatctttgcgaacgtcttggacttgttgaaaaagtcaaaggagctgggatcgcaaaagctggtactcagcaatatcgcttcattaaaaatgatttctacaattatttagctgacgctttcaaagcgtaa

SEQ ID NO: 491947 - DNA, 204 bp, Shigella sonnei
atggtcagctatgacaagatccgcgcggaatatcgcgcaaagtatcgcgcttataaactagaattaatcgatgatttgatcgcgcaacgcgaccaattaaattttacgttttctgatttgcttaacagcaaacgagattgcaagcgtaaacgtgaatacttacgtttaagcgcattaatcggaaaacttcataattctatttaa

SEQ ID NO: 491948 - DNA, 228 bp, Shigella sonnei
atggttattttcatctctgacgtaaatatcaataatcatactcttgtttatgatattgctggtttagctggatatgctctaagttctgaagtggttgatgaaacaacgtttaaaataaacatcaatgacgtagaacatagagcgcgtgcagaaatcaatgaagcagatgttactttaatgcttcaagaatttttaaacgctggttttaatattcacttagaaaaataa

SEQ ID NO: 491949 - DNA, 483 bp, Shigella sonnei; identical to SEQ ID NO: 469687

SEQ ID NO: 491950 - DNA, 375 bp, Shigella sonnei
atgggacttgatatctacattgagacgcaaccaaaaaacgatctgaataacgatgcatccagaaagaaggttgcttacttccgtaagttcaatgctctctttgggtggatggaacgcaacgtaggtgaagtcaaaaattgtgagcttttagaattaacgatgaatgacatttgtgctctgaaagctcatttgatgcacatgaacgaaagtaactgcgaagagtacttacctacccgggaaggttttttcttcggcagtcaggagtacgatgaagggtactggcatgacgtgggggagttgaaaaaacttgtggaagagctgattaagaaccacgactttcacaataacagactgaccttctgcgcctggtggtaa

SEQ ID NO: 491951 - DNA, 396 bp, Shigella sonnei
atgagcgttaaacgagaaaacctgacagttgatgtctactatgcttcagaaagcgccgaaggtaagaatgtagctaaaatcaccgtcgttacgtacaacaccgaaactggaactgaagttcaggcaagtactattgtgcgtaaaggagatacatcaggcggggaatatgaggcgcaatatcagtccatttttgatgcaacggacccgttgttgttgaaaattgaaagttacttccgtaaggtgaataaagaggtgtttgaaaccatgatgaatatggttaacaccgtattcgcttccagtctgaacactaacactacctggattggtcagtatggtctgcgcattacctccggcattcctgctgacaccttaatccctgaaagcgtattcgcttaa

SEQ ID NO: 491952 - DNA, 312 bp, Shigella sonnei
atgaaaaaatcattggttcttggtctggacaaagaccagaagagaaaagagaagcctgcgctggttgctcaattaactttgctggacatcgttgccaatggaacctctattcgtctgttccgtgaaacagcggtgtctttcgataaaaacacctttactcgttatgtaatgaatgttcgtcgccagcgtggaaaaggctggatggcatttcaaagaatgtggccggaacatcagctcgaactggctttgatggaagttaaccgcgtggcccagcaagagattcagagagcatcagtgatggcaatagcctga

SEQ ID NO: 491953 - DNA, 330 bp, Shigella sonnei
atgtttgcaaatatcgacatcaaccaaatcaagaaaatgactcaaaaagagtttgaccagttttatgagttagaaggttggtcttccactctgatcaattcgcggtgggtgcttgagctgatgactcgtgatgacgcacctgctttgatgatttgcgacatgggtgaagatgctgactttatggatatgagcgaattttgtgtggacacatacaaccgcagccagaagtactacttcacatgcgatagcgaaaatgacgtgatttctaaggtctatcttcaccttgtccagcattgggacgttcaggagtttcttgaggtattcgcgtaa

SEQ ID NO: 491954 - DNA, 219 bp, Shigella sonnei
atgattaagatgcctgtgacggttgaggtgtggggcgtggattccctggctgagtgtctggatgcagtggggccggagttgtaccgcaagttgtggtcgttcgtcccggcagaaggggaatcgcccaaagggaaggatatctggcacctgctgagtgaagatgaaaagcgggagctggtggacgcggtacacagcgagttcccgggtgacgaagattaa

SEQ ID NO: 491955 - DNA, 186 bp, Shigella sonnei
atgcttaaagaagactcatatctactaaaggcgcttgaaatgcgtggcgttgaacctacagtgaaaaacgctcacgatatctaccttcagttttcgacagagctgaaacagctcataaataaatatggagtgaacgactccagcgtcaaagccatgatagatgatgaattagaccatctcatctaa

SEQ ID NO: 491956 - DNA, 300 bp, Shigella sonnei
atgttgaacattacccaagcctaccaggtggcattgatcagttcatctcatacatcagaggaagatgctcgccgattcatgatcgcaagcaatgagctggattgggtttcacaaattgagtacggttgcattgtccacgccgggttacaggacgatgactggaaagatgagttgcgtcgatatggtatatccgagggtgcgattgcgaacattcagaaagtacttgatgtaggctttaactctgtacattttgattgtggcgcaccggtcgttgaagggcttgagtgctggcaatggtaa

SEQ ID NO: 491957 - DNA, 1251 bp, Shigella sonnei
atgggttctttcaagaatctgtgcgacaagcgcggcgacagcgtaagcttcgacgaatactggaagaaagactccaccgccgagctgtaccacttcatcggcaaagatatcgtttacttccacagtctgttctggcctgccatgctggaaggcagcaacttccgcaagccgaccaacctgtttgttcacggctatgtgacggtgaacggcgcgaagatgtccaagtctcgcggcacctttattaaagccagcacctggctgaatcattttgacgctgacagcctgcgttactactacactgcgaaactctcttcgcgcattgatgatatcgatctcaacctggaagatttcgttcagcgcgtgaatgccgatatcgtgaacaaagtggttaacctggcctcccgtaatgcaggctttatcaacaagcgttttgacggcgtgctgacaagcgaactggctgacccgcaactgtacaaaacctttactgatgccgctgaagtgattggcgaagcatgggaaagccgcgaatttggtaaagctatccgtgaaatcatggcattggctgacctggctaatcgctatgtcgatgaacaggctccgtgggtggtggcgaagcaggaaggtcgcgatgcagatctgcaggcgatttgctctatgggcattaacctgttccgcgtgctgatgacgtacctgaaaccggtactgccgaaactgactgaacgtgcagaagcattcctgaatacagaactgacctgggatggtatccagcaaccgcttctgggccataaagtgaatccgttcaaggcactgtataaccgtatcgatatgaaacaggtggaagcactggtggaagcatccaaagaagaagtgaaagccacagctgcaccggtaactggcccactggctgacgacccgattcaggaaaccatcacctttgacgacttcgccaaagttgacctgcgtgtggcgctgattgaaaacgcggagtttgtcgaaggttctgacaaactgcttcgcctgacgctggatctcggtggtgaaaagcgtaatgtcttctcaggcatccgttccgcttatccagatccacaggcactgattggtcgtcacaccattatggtggctaacctggcaccacgtaaaatgcgcttcggtatctctgaaggcatggtgatggctgccggtcctggcgggaaagatatcttcctgttaagcccggatgctggtgctaaacctggccaccaggttaagtaa

SEQ ID NO: 491958 - DNA, 192 bp, Shigella sonnei; identical to SEQ ID NO: 484083

SEQ ID NO: 491959 - DNA, 342 bp, Shigella sonnei; identical to SEQ ID NO: 466452

SEQ ID NO: 491960 - DNA, 936 bp, Shigella sonnei; identical to SEQ ID NO: 490132

SEQ ID NO: 491961 - DNA, 240 bp, Shigella sonnei
gtgcgtcgagtgatagttgtcatagctgatgttaaagcctgcgaaatcagtctgatgctcctgactcatttcgccaatcatctgctccggggtgataccaagctgctgagctttcagcatgatcggtgtaccgtgggcatcgtcggcgcagatgaagttgacctcgtggccgcgcattcgctggtaacggacccagacatcagcctggatgtgctccagcatatggccgaggtggattga

SEQ ID NO: 491962 - DNA, 225 bp, Shigella sonnei; identical to SEQ ID NO: 133446

SEQ ID NO: 491963 - DNA, 489 bp, Shigella sonnei; identical to SEQ ID NO: 490109

SEQ ID NO: 491964 - DNA, 225 bp, Shigella sonnei; identical to SEQ ID NO: 133446

SEQ ID NO: 491965 - DNA, 543 bp, Shigella sonnei; identical to SEQ ID NO: 487148

SEQ ID NO: 491966 - DNA, 336 bp, Shigella sonnei
atgggcgctggtctggcaaggcgtcatcaccagcgacatttgggcaccgttacgcgccctcacccgcagcagttccaacgcacgcacctcaactcgccgcagtcaccgggctcgtcgtggacgtcctgtctatgcgcaacccgtctcgccgctggtatcttacaacacaccaaatctggctggatgctggcgctggcggaaaatatgctcgaccgctacggcatcatcagtcgtcaggcggtgatagccgaaaatatccctggcgggtttccatcgatgcaaacgctttgtcgaagtatggaaactccgggcgaattatgcgaggtcgttttgtag

SEQ ID NO: 491967 - DNA, 276 bp, Shigella sonnei; identical to SEQ ID NO: 484087

SEQ ID NO: 491968 - DNA, 183 bp, Shigella sonnei
atgagagatgataattatcttgatggattaattgccggaggtactgttgcaatttcttttgcgggactgattctgttaatcgtgagtaatttgaaaaacgaagctgagacagaaaaaactgcattttatgaatgggccgattcacactgtgaaaaaattgaaaaaaaatttaaatgttactga

SEQ ID NO: 491969 - DNA, 258 bp, Shigella sonnei
atgaaagtcatattcacgtcgaaccgttttattgattttcttatccggcttttgattacagcgtttgtcatttccccggtaattatctggtcgtgggatacggtaaaagaaaccacggcagacgggatgcttgccgctgctttcgttatcctttactccggtgtgctcctgtttattctgtatttttgtttttctgccctgactgacctgcagaaaaccgatgaaagaaaaaatgatgaaaggaatgaagatgaataa

SEQ ID NO: 491970 - DNA, 1185 bp, Shigella sonnei
atggtggaaatcctccgcggcctgatgcgcgactcgcggattctgatcctcgatgaacctaccgcctcgcttacccctgcggaaaccgaacgcttgtttcgtcgcttgcaagagctgcttgctactggcgtgggtattgtttttatctcgcataagctgccggaaattcgccagattgccgatcgaattagcgtgatgcgcgacggaaccatcgccttaagcggcaaaaccagcgaactgtctaccgatgacattattcaggccatcacgccagtggtacgggaaaaatcgctctctgccagccaaaaattatggctggagttacctggcaaccgcccacaacatgccgccggaacgtcggtgctgacactagaaaatctgaccggcgaaggtttcaggaatgtcagcctgacgctcaatgccggagaaattctgggtctggccgggctggtgggggccggacgcacagaactggccgagacgctctatggtctgcgtactttgcgtggcggacgcattatgctgaatggtaaagagatcaataaattatccactggagaacgtttactgcgcggtctggtttatctgccggaagatcgccagtcatccggactgaatctcgatgcttcgctggcctggaacgtctgcgcccttactcataaccttcgtggattctgggcgaaaaccgcgaaagataatgccaccctggaacgttatcgtcgggcgctgaatattaaatttaaccaaccggaacaagctgcacggacattatccggtggcaaccagcaaaaaatcctgattgccaaatgcctggaagcttcgccgcaagcattgattgtcgatgagccgacgcgcggcgtggatgtctcggcccgtaatgatatctaccagctgttgcgcagcatcgccgcacagaatgtggcagtgctgcttatctcctctgatctggaagagatcgaactgatggcagatcgtgtgtatgtgatgcatcagggcgaaattacccactctgcactgaccgggcgcgatattaatgtcgagactattatgcgcgttgccttcggcgatagtcagcgtcaggaggcgtcatgctggtgtttattcagaacaaccgtgaaatcacggcactgctggcggtggtgctgctgtttgtattacccggttttctcgaccgccagtatttaa

SEQ ID NO: 491971 - DNA, 528 bp, Shigella sonnei
atgaaaatacgttcgcaagtcggcatggtgcttaacctcgacaaatgtatcggttgccatacctgttcggtgacctgtaaaaacgtctggaccggacgcgaaggcatggagtacgcatggtttaacaacgtcgaaaccaaaccgggcattggttatccgaaaaactgggaagatcaggaagagtggcaaggcggctgggtccgcgatgtgaatggcaagatacgcccgcgtctgggcagcaagatgggcgtaataaccaaaatcttcgccaacccggtggtgccgcagattgatgattactacgaacctttcaccttcgactacgaacatttgcatagcgcaccggaaggcaaacatatccctactgctcgcccgcgttcgctgattgacggtaagcggatggacaaagtgatctgggggccaaactgggaagaactgctgggcggcgagtttgaaaaacgtgcccgcgaccgcaacttcgaggccatgcaaaaggagatgtacgggcagtttaaaacaccttcatga

SEQ ID NO: 491972 - DNA, 198 bp, Shigella sonnei; identical to SEQ ID NO: 36905

SEQ ID NO: 491973 - DNA, 423 bp, Shigella sonnei
atgtatgattttgtgattattggcggcggcatcatcggcatgtcgaccgccatgcaactgattgatgtttatccggatgcccgcattgcgttgctggaaaaagagtccggcccggcctgtcaccagacgggccacaacagcggcgtgatccatgccggggtctattacacgcccggcagcctgaaggcgcagttttgcctggcggggaaccgcgccaccaaagccttttgcgatcaaaacggcattcgctatgacaactgcggcaagatgctggtcgccacgtctcagctcgaaatggaacggatgcgcgccttatgggaacgcacagcggcgaacggtatcgagcgcgagtggataaacgccgtggaactgcgcgagcgcgaaccgaatatcaccgggcttggtggaatgccgatcagttaa

SEQ ID NO: 491974 - DNA, 543 bp, Shigella sonnei; identical to SEQ ID NO: 490258

SEQ ID NO: 491975 - DNA, 543 bp, Shigella sonnei
gtgaaagaaagtaatcagcgatggtgctctgacgggttcgagttccgctgtgataacggagaaaaactgcgagtcacgttcgcgctggactgctgtgaccgtgaggcactgcactgggcggtcactacgggcggcttcaacagtgaaacagtacaggacgtcatgctgggagcggtggaacgccgcttcggcaacgagcttccggcgtctccagtagagtggctgacggataatggttcatgctaccgggctaatgaaacacggcagtttgcccggatgttggggcttgaaccgaagaacacggcggtgcggagtccggagagtaacggaatagcagagagcttcgtgaaaacgataaagcgtgactacatcagtatcatgcccaaaccagacgggttaacggcagcaaagaaccttgcagaggcgttcgagcattataacgaatggcatccgcatagtgcgctgggttatcgctcgccacgggaatatctgcggcagcgggcttgtaatgggttaagtgataacagatgtctggaaatatag

SEQ ID NO: 491976 - DNA, 501 bp, Shigella sonnei
gtgaatgcgaacgccgggacgctcaacaatgtcacaattaatgagaactgtcagattaaggggaaactgtcagccaaccagattgaaggcgatatagtcaaaacagtgggtaaggcttttccgcgggactcccgggcaccggagcggtggccatcagggaccattaccgtcaggatttatgacgatcagccttttgacaggcaaattgttattccggcggtggcattcagcggcgctaaacatgagcgggagaataacgatatttattcgtcatgccgcctgatagtacggaaaaacggtgctgaaatttataaccgtaccgcgctggataatacgctgatttacagtggtgttattgatatgccagctggtcgcggccacatgacgctggagttttcggtgtcagcatggctggtgaataactggtatcccacagcaagtatcagcgatttgctggttgtggtgatgaagaaagccaccgcaggcatcagtatcagctga

SEQ ID NO: 491977 - DNA, 486 bp, Shigella sonnei
atgccgggcaactgcacgcattatgggcgttggcctcaacacgattttacgtcacttaaaaaactcaggccgcagtcggtaacctcgcgcatacagccgggcagtgacgtcatcgtctgcgcggaaatggacgaacagtggggctatgtcggggctaaatcgcgccagcgctggctgttttacgcgtatgacagtctccggaagacggttgttgcgcacgtgttcggtgaacgcactatggcgacgctggggccaccctttgacgtggtgatatggatgacggatggctggccgctgtatgaatcccgcctgaagggaaagctgcacgtaatcagcaagcgatatacgcagcgaattgagcggcataacctgaatctgaggcagcacctggcacggctgggacggaagtcgctgtcgttctcaaaatcggtggagctgcatgacaaagtcatcgggcattatctgaacataaaacactatcaataa

SEQ ID NO: 491978 - DNA, 528 bp, Shigella sonnei; identical to SEQ ID NO: 491971

SEQ ID NO: 491979 - DNA, 528 bp, Shigella sonnei
atgagtgcacgtggtatcaacaaggtcatcctcgtcgggcgtctgggcaatgatccggaagtccgttacatccccaacgggggcgcagtggcaaacctgcaggtggctacgtcagaaagctggcgcgacaaacagacgggggagatgcgggagcagacggaatggcaccgcgtggtgctgttcggcaagctcgcggaagtggctggtgaatatctgcgcaagggcgcgcaggtctacatcgaggggcaactccgtacccgtagctgggaagataacggtatcacccgttacgtcactgaaattcttgttaagaccacgggcactgtgcagatgctgggacgtgcaccacagcagaacgctcaggcgcaaccgaagcctcagcagaatgggcagccacagagtgctgacgcgacgaaaaaaggtggcgcgaaaacgaaaggccgtggacgtaaggccgcgcagccagagcctcagccgcaaccgccggagggggaggattacgggttttcagacgacatcccgttctga

SEQ ID NO: 491980 - DNA, 891 bp, Shigella sonnei
gtgaatttccaacaactaaagataatccgcgaggctgcacgtcaggattacaacctgacagaggttgcgaatatgctttttacctcacagtccggcgtcagccgtcatattcgggaactggaggatgaacttggcatcgaaatatttgttcgacgaggtaagcgactgctgggcatgactgaaccgggcaaagcattactggtcattgcagaacgtattctgaatgaagccagtaatgttcgtcggcttgcagacctgtttaccaacgatacgtctggcgttctcactattgcaacgacgcatactcaggcacgttatagcttgccagaggtcattaaagcttttcgcgaacttttcccggaggttcggctcgagctaatccaggggacgccacaggaaattgcgacgttgttgcaaaatggcgaagctgatattggtatcgccagcgagcgtttgagtaatgacccgcagctcgtcgccttcccgtggtttcgttggcaccatagtttgcttgttccactcgatcatcccttaacgcaaattacaccattgacgctggaatcaatagcgaagtggccgttaatcacttaccgacaggggattacggggcgctcacgtattgatgacgcatttgcccgcaaaggtttgctggcagatattgtattaagtgcgcaggattctgatgtcattaaaacctatgttgctcttgggcttgggatcggattagttgccgaacaatccagcggcgaacaagaggaagagaatttaatccgtctggatacgcggcatcttttcgatgctaatactgtctggttgggactgaagcgtgagactcgattaagcgcacgaaacacagaaatcaaaaaacccggtcacttttttacaaggtaa

SEQ ID NO: 491981 - DNA, 576 bp, Shigella sonnei; identical to SEQ ID NO: 488203

SEQ ID NO: 491982 - DNA, 1779 bp, Shigella sonnei
gtgagtatccgtgagaacgacgacggcacgtatgccatcaccgccgtgcagcatgtaccggaaaaagaggccatcgtggataacggggcgcactttgacggcgaccagagcggcacggtaaatggtgtcacgccgccagcggtgcagcacctgactgccgaagtcaccgcagacagcggggaatatcaggtgctggcgcgctgggacacgccgaaggtggtgaagggcgtgagcttcctgcttcgcctgaccgtggcagcggatgacggccgtgagcggctggtcagcacggcccggacgacggaaaccacttaccgcttcacacaactggcgctggggaactacaggctgacagtccgggcagtaaatgcgtgggggcagcagggcgatccggcgtcggtatcgttccggattgccgcaccggcagcgccgtcgcggattgagctgacgccgggctattttcagataaccgccacgccgcatcttgcggtttatgacccgacggtacagtttgagttctggttctcggaaaagcggattgcggatatcaggcaggttgaaaccagcgcccgctatcttggcacggcgctgtactggatagccgccagtatcaatatcaaaccgggccatgattattatttttacgttcgcagtgtgaacaccgttggcaaatcggcattcgtggaggctgtcggtcagccgagtgatgatgcatcaggctatctggattttttcaaaggcgagatagggaaaacccatctggctcaggagctgtggacgcagattgataacggtcagcttgcgcctgacctggctgaaatcaggacgtccattacggatgtcagcaatgaaataacacagaccgtcaataagaaactggaagaccagagtgcagcgatccagcagatacagaaggttcaggttgatacaaataataacctgaacagcatgtgggcagtgaagctgcagcagatgcaggacggacgcctttatattgcgggtatcggtgccggtattgagaacacccctgacggcatgcagagtcaggtgctgctggcagcagacaggattgcgatgattaatcctgcgaatggcaacacaaagccgatgtttgttggtcagggcgatcagatattcatgaatgaagtgttcctgaaacgcctgacggcccccaccattaccagcggcggtaatcctccggcattttccctgacatcagacgggagactgacggcgaaaaatgcggatatcagtggcagtgtgaatgcgaactcaggaacgctcaacaatgtcacgattaaccagaactgtacgattaagggcatgctggaggcgacccaggtcagaggagatttcgttaaagctgtatcaaaagccttcccgaaaaaagtcggtacgtggggtaacacggaaacaccaaacggtacggttacagtcaccatcagcgatgatcataactttgaccgccagattattattccgcccattatttttaacggtatagcgtatgacgatccggggagcggaaataacccgggaggcacgcgatacacgggttatggttttgaagttcgcaaaaacggcgtattaatcgcatccagagaaactaaaggggccattcccggtagttacagtgcagttattgatatgcctagtggtggtggtagcgtcactctggagtttaagattttccagaaaggcaatcagggggcaggcaatatcaccgactgtacggtgattgtgaccaaaaaagcggcttccggcatcagtattcgttga

SEQ ID NO: 491983 - DNA, 483 bp, Shigella sonnei
atgcgtaaagtttgtgccgccattttgtccgcagccatttgtctggccgtatccggtgcgcctgcatgggcgtctgaacatcagtccacgctgagcgcggggtatcttcatgcccggaccaacgttcccggcagtgatgatctgaacgggattaacgtgaaataccgttatgagtttacggatacgctggggctggtgacgtcattcagctatgcaggagacaagaatcgccagctgacccattacagcgatactcgctggcatgaagattccgttcgtaaccgctggttcagcgtaatggcggggccgtctgtgcgcgtgaatgaatggttcagcgcgtatgcgatggcgggtgtggcttacagccgtgtgtcgactttctccggggattatctccgcgtaactgacaacaaggggaaaacgcacgatgtgctgaccggaagtgatgacggtcgccacagcaacacgtctctggcgcactga

SEQ ID NO: 491984 - DNA, 276 bp, Shigella sonnei; identical to SEQ ID NO: 484087

SEQ ID NO: 491985 - DNA, 276 bp, Shigella sonnei; identical to SEQ ID NO: 484087

SEQ ID NO: 491986 - DNA, 276 bp, Shigella sonnei; identical to SEQ ID NO: 484087

SEQ ID NO: 491987 - DNA, 201 bp, Shigella sonnei; identical to SEQ ID NO: 488102

SEQ ID NO: 491988 - DNA, 276 bp, Shigella sonnei
gtggcttctgtttctatcagctgtccctcctgttcagctactgacggggtggtgcgtaacggcaaaagcactgccggacatcagcgctatctctgctctcactgccgtaaaacatggcaactgcagttcacttacaccgcttctcaacccggtacgcaccagaaaatcattgatatggccatgaatggcgttggatgccgggcaactgcacgcattatgggcgttggcctcaacacgattttacgtcacttaaaaaacgcaggccgcagtcggtaa

SEQ ID NO: 491989 - DNA, 204 bp, Shigella sonnei; identical to SEQ ID NO: 486608

SEQ ID NO: 491990 - DNA, 603 bp, Shigella sonnei
  misc_feature (473)..(482): n is a, c, g, or t
atgattatcaataacgtcaaattggtgctggaaaacgaagtggtacacggttcactggaggtgcaggacggcgaaatccgcgcctttgctgaaagccagagccgcctgccggaggcgatggacggcgaaggcggctggctgctgccggggctgattgagctgcataccgataatctggataaattcttcaccccgcgcccgaaagttgactggcctgcccactcggcgatgagcagccacgacgcgctgatggtggcgagcggcatcaccaccgtactggatgccgtggcaattggcgacgtgcgcgacggcggcgatcggctggtgaatctggagaagatgatcaacgccatcgaagagacgcagaaacgcggcgtcaaccgcgccgagcaccgtctgcatctgcgctgcgaactgccgcatcacaccacgctgccgctgtttgaaaaactggtgcagcgcagatgcagacnnnnnnnnnnaactggtgcagcgggagccggtgacgctggtgtcgctgatggaccactcgccgggccagcgccagttcgccaatcgcgagaagtatcgcgaatattatcagggcaaatactccctcactga

SEQ ID NO: 491991 - DNA, 528 bp, Shigella sonnei; identical to SEQ ID NO: 491971

SEQ ID NO: 491992 - DNA, 672 bp, Shigella sonnei; identical to SEQ ID NO: 490007

SEQ ID NO: 491993 - DNA, 276 bp, Shigella sonnei; identical to SEQ ID NO: 484087

SEQ ID NO: 491994 - DNA, 216 bp, Shigella sonnei
atggagatcatcaataacgtgagcgaaaaccgccaggtgaccgtccctgctgaactgctggcgtccctgattcagaccgccgaacaggcactgtggaaacgtgagtgggccgcccgtgataacggcctcgccgtcccggaatgcgtcacccgccgacaggcggtggttaatcaggcccgcgccctgctgaaaaacaacacacgcgaaaacgactga

SEQ ID NO: 491995 - DNA, 258 bp, Shigella sonnei; identical to SEQ ID NO: 491969

SEQ ID NO: 491996 - DNA, 360 bp, Shigella sonnei
atggacgaacagtggggctatgtcggggctaaatcgcgccagcgctggctgttttacgcgtatgacagtctccggaagacggttgttgcgcacgtattcggtgaacgcactatggcgacgctggggccaccctttgacgtggtgatatggatgacggatggctggccgctgtatgaatcccgcctgaagggaaagctgcacgtaatcagcaagcgatatacgcagcgaattgagcggcataacctgaatctgaggcagcacctggcacggctgggacggaagtcgctgtcgttctcaaaatcggtggagctgcatgacaaagtcatcgggcattatctgaacataaaacactatcaataa

SEQ ID NO: 491997 - DNA, 327 bp, Shigella sonnei
gtgtggctgacgcacgacccggaatacccggagaatttacctgccgcgccgctggtgcgctatggctggacgccgcgcggcgaactggcggcagtgtatgaccgcagtggcaaacaggtgcgcagctttacttacgatgataaataccggggccggatggtggcgcaccgtcacacgggccggccggaaatccgttaccgttacgacagcgacgggcgggtgacagaacagctaaacccggcaggcttaagctacacgtatcagtatgagaaggaccgcatcaccatcaccgacagcctgaaccgccgtgaagtgctgcacacgtag

SEQ ID NO: 491998 - DNA, 192 bp, Shigella sonnei
atgaatatcagcacagaaacccgcgaaattctgcgtaattacagggccgtgattaatgcgcggcgtcgtgaaatggggcagaaaccgctcaccaccgcgcagattgttgatgaaatctgcgattttgtggcgaatcagcaggcggttttccagggcggtcactacatcttacagggcagcagaaacaggtga

SEQ ID NO: 491999 - DNA, 561 bp, Shigella sonnei; identical to SEQ ID NO: 486860

SEQ ID NO: 492000 - DNA, 366 bp, Shigella sonnei; identical to SEQ ID NO: 487772

SEQ ID NO: 492001 - DNA, 258 bp, Shigella sonnei; identical to SEQ ID NO: 491969

SEQ ID NO: 492002 - DNA, 474 bp, Shigella sonnei; identical to SEQ ID NO: 488161

SEQ ID NO: 492003 - DNA, 528 bp, Shigella sonnei; identical to SEQ ID NO: 491971

SEQ ID NO: 492004 - DNA, 366 bp, Shigella sonnei
atgctggaagcggccagagaggccagacgtcagggaattgaagcatggcgcacagaacaggaggcgaagccgttcacgtttgaatggaacggtcgtatctggaatgctggccccaactcactgggccgcctgtccccggtagtcatgctggcaaaatctgtcacagcacaaacgcatatggcgtggggtgatgccgataatcagcaggtgaaactgtcgatgccggaactggaagaactggcggcagcaatggctcaggcacaggttgagcgcaatgacgagatttatcgccgtcagcgggagctgaaggaagagctgaatagtctgaaggatttgaattcggttaggaattttatcgtggaataa

SEQ ID NO: 492005 - DNA, 285 bp, Shigella sonnei
gtgtccgttaaactcaggctacctcactgtctggtggtgactcccggtgcaacagcatggttgttaaccgatcgttttccccgcctgctcataattgctgtaactattggcagtgtaaccagtttcctcggcgcgtgggtcagttactttctggacggcgcgacaggtggaatcatcgtggtggcgcagacactgctgtttcttttagcatttgtatttgcgcccacccatggacttttggcaaatcgtcggcgtgcgcataaagcgctggaggatcgctcatga

SEQ ID NO: 492006 - DNA, 378 bp, Shigella sonnei; identical to SEQ ID NO: 487974

SEQ ID NO: 492007 - DNA, 504 bp, Shigella sonnei; identical to SEQ ID NO: 485763

SEQ ID NO: 492008 - DNA, 504 bp, Shigella sonnei; identical to SEQ ID NO: 485763

SEQ ID NO: 492009 - DNA, 522 bp, Shigella sonnei
gtgccccttcagaggagcgaaagctcctcctgccgtccacttcacaggggtttctccccgcagtggacctttccgatgggggcccgtttaccgcctcacggggcagctgtccgggggcggacgcaaaattttttgccgggttcatggctaaaaattttgtggccggtgcatctcaccctggacagatggaacgggagggggttacgtctgccccccggaaagtccacagcggggaaacaggccgcagggggggcggcaggagggaggactgctgcgccatcaggcgcagtttcctcacacaccgtcaggtgtgcagggagcgcaggtcacggcgcgacaggggcggcgcgaccggaacggtcgctgcaagcccgggttttcacgcatcggaccgtagcggcagcccgaaaccgcgccagcgggttcggcggagactggcgggtgcgccagcagctgcctgtcggagtcgggcctgacgaccggatgccgccaggcagccgggagccgaagtgggcgcaataa

SEQ ID NO: 492010 - DNA, 234 bp, Shigella sonnei; identical to SEQ ID NO: 8563

SEQ ID NO: 492011 - DNA, 543 bp, Shigella sonnei; identical to SEQ ID NO: 464540

SEQ ID NO: 492012 - DNA, 234 bp, Shigella sonnei
atgactgccgttgagcatgcgcaacttcatctcttcataaggcagcacatcactaaccagttcggctcccgctttttcccattctggacgtccggcaacaaagttatcttctattacccactggcggaaaggttcacaggcaacgcccgcaggatcgcccacaccggtaagttgttcgattttcgccagcgtatcctctgtcactgcgggcacaatacggtccaccattgttga

SEQ ID NO: 492013 - DNA, 480 bp, Shigella sonnei; identical to SEQ ID NO: 464934

SEQ ID NO: 492014 - DNA, 279 bp, Shigella sonnei; identical to SEQ ID NO: 11573

SEQ ID NO: 492015 - DNA, 288 bp, Shigella sonnei; identical to SEQ ID NO: 27151

SEQ ID NO: 492016 - DNA, 396 bp, Shigella sonnei; identical to SEQ ID NO: 27152

SEQ ID NO: 492017 - DNA, 192 bp, Shigella sonnei; identical to SEQ ID NO: 27148

SEQ ID NO: 492018 - DNA, 711 bp, Shigella sonnei; identical to SEQ ID NO: 33874

SEQ ID NO: 492019 - DNA, 291 bp, Shigella sonnei; identical to SEQ ID NO: 14496

SEQ ID NO: 492020 - DNA, 675 bp, Shigella sonnei; identical to SEQ ID NO: 488299

SEQ ID NO: 492021 - DNA, 327 bp, Shigella sonnei; identical to SEQ ID NO: 27158

SEQ ID NO: 492022 - DNA, 585 bp, Shigella sonnei; identical to SEQ ID NO: 6032

SEQ ID NO: 492023 - DNA, 1239 bp, Shigella sonnei; identical to SEQ ID NO: 6033

SEQ ID NO: 492024 - DNA, 906 bp, Shigella sonnei; identical to SEQ ID NO: 6034

SEQ ID NO: 492025 - DNA, 753 bp, Shigella sonnei
atgcgtttttctcctgatgtttctttatgcttaacggaacttgtgacgttgaataataaggtccctcagggtgggtgctgttctagttatattgcaaatcttttattttttaatagtgagtataatctctataatagattgaagtctatgggactttcatattcaaggcttttagatgatattactatatcctctgataaggatctttcatcagaggaaaaaacaaaagtaataaaactcgttcacggaatggtgaatcagtacagactttcaataaatgaaagtaagacaacgatagagcactcaaaagattcgtcttctaaacttagtgtcactgggttgtgggtaaagcatggtgttcctaagttaacaaaagaaaatagacgttatatcaggtacttagtttatatatgtaaaaaacaaggtgcttatgaacgtcatacgaaagagtaccatgatttatggaatagatgctctggcaaggttgctcaaatgtcgaggcttgggcatgtccaggcggttgaattgagggcgattctttctgagataatgccagtttatgatgattacaagatatctaaattaaagttgatggctaagcactatctaaataagtttacgccgcctttaactgatgatcagattaggaaaatagataggatgctctatgattttgatatagtagggcggactaataagaatcttgcaaaactatatagacgtaagctcgtggcattacttccagataggtga

SEQ ID NO: 492026 - DNA, 204 bp, Shigella sonnei; identical to SEQ ID NO: 17671

SEQ ID NO: 492027 - DNA, 261 bp, Shigella sonnei; identical to SEQ ID NO: 487260

SEQ ID NO: 492028 - DNA, 681 bp, Shigella sonnei; identical to SEQ ID NO: 484009

SEQ ID NO: 492029 - DNA, 1086 bp, Shigella sonnei
atgggaaataatttgttatcagcaaaagcgacactccctgtttatgatcgtaataacctggccccaagaattattcatttaggctttggtgcatttcaccgtgcgcatcagggcgtgtatgccgatattcttgctacagaacatttcagtgactggggatattatgaggtcaacttaatcggcggcgaacagcaaattgccgatttacaacagcaagataatctttataccgttgcggaaatgtcggccgatgcgtggacggctcgcgtcgttggcgtcgttaagaaagccttgcacgtacagatggatggcttagaaaccgtgttggctgcgatgtgtgaaccgcaaatcgcgattgtctctctgacaatcaccgaaaaagggtatttccactctccggcgaccggacagttaatgctcgatcacccgatggtcgctgccgacgtgcaaaatccccaccagccgaaaacagcaacaggggtgattgttgaggcgctggcccgccgtaaagcggcaggacttcccgcatttaccgtcatgtcatgtgacaacatgccagaaaacggtcatgttatgcgtgacgttgtcacttcatacgcgaaagctgttgatgtaaaactggcacaatggatcgaagataacgtgactttcccatcaacaatggtggaccgtattgtgcccgcagtgacagaggatacgctggcgaaaatcgaacaacttaccggtgtgggcgatcctgcgggcgttgcctgtgaacctttccgccagtgggtaatagaagataactttgttgccggacgtccagaatgggaaaaagcgggagccgaactggttagtgatgtgctgccttatgaagagatgaagttgcgcatgctcaacggcagtcattcattcctggcgtatttgggttatcttgctggatatcagcacattaatgactgcatggaagatgaacattatcgttatgcaaaatggcatctgaatcgatcgcagtttggcattcgaatcgatcatgatttggcatccatctccgatcacagtttggcatcacaatcgatcacgatttggcatacttccgatcattga

SEQ ID NO: 492030 - DNA, 402 bp, Shigella sonnei; identical to SEQ ID NO: 223637

SEQ ID NO: 492031 - DNA, 765 bp, Shigella sonnei
gtgcaggatcaagactctgtcatcacggtacgcagactctataatgggtatttcggtaatggcacagtcaatatttccaataatggtctgattaataacaaagaatattcattggtgggcgttcaggacggttcccacggtgtcgtcaacgtgaccgataaagggcattggagtttcctcggaacaggcgaagctttccgctatatctatatcggtgatgctggtgacggtgaacttaatgtctcgcgtgaaggtaaagtagattcgggaattatcactgcggggatgaaagaaacaggcacaggcaacattactgttaaggataagaactccgttatcactaatctcggaactaatcttggttatgacggccacggcgaaatgaatatcagtaatgaggggcttgttgtcagcaacggaggaagctcactcggttatggagaaaacggcgtcgggaatgtcagcatcaccacgggggggatgtgggaggtcaataagaatgtctataccaccattggtgttgcgggcgtcggaaacctcaatattagcgatggcggtaagtttgtatcgcaaaatattacttttttgggcgataaagcaagcggtatcggcacactgaacctgatggatgcgacatcatcgttcgatactgtgggtatcaatgtcggtaattttggtagcggtatcgtaaatgtcagtaatggtgccacccttaattcaacgggctatggatttatcggaggaaatgcctccggtaaggggtaa

SEQ ID NO: 492032 - DNA, 375 bp, Shigella sonnei
atgatggctgaaatgggagctgcttatcgcaaagaagaaggtggtatctattcctggatgaataatagtgtcggaccacgttttgccttcattggtacgtttatgtggttttcctcttatatcatctggatggtgagtacctccgcgaaagtttgggtaccgttctcaacattcctctatggtagcgacatgacccagcactggcgtattgccggactggagcctacgcaggtggttggtctgctggcagtagcatggatgattctggtcaccgtcgttgcttcaaaggggattaataaaattgcccgcattactgcggtgggcggtattgcagtaatgtgtctgaatttagggaaggtgcgaacaagttcctga

SEQ ID NO: 492033 - DNA, 264 bp, Shigella sonnei
atgccagaaagaggatggacagaggatgatatcaaaaataccgtatctaacggtgcaactggtacatcttttgataagcgtagtccgaagaaaacacctccagactatttaggtcgaaatgatccagcaacagtgtatggttctcctggtaaatatgttgttgtcaatgatcgtactggtgaggttactcagattagtgataagacagatccgggttgggtggacgattcgagaattcaatggggaaataaaaatgaccaataa

SEQ ID NO: 492034 - DNA, 327 bp, Shigella sonnei; identical to SEQ ID NO: 486130

SEQ ID NO: 492035 - DNA, 2952 bp, Shigella sonnei
gtggtgaaaaaggaacacgcggacggcagcgtcacgcagagtcagtttgatgcggtgggcaggctcaggacacagacggatgccgcaggccggacaacagaatacagcccggatgtggtgacgggcctcatcacgcgcatcaccacgccggatggcagggcatcggcgttttactataaccaccacagccagttaacgtcagccaccgggcctgacgggctggaaatgcgccgcaaatatgatgaatccggccgtctgattcaggaaaccgcccctgacggcgatatcacccgctaccgttatgataatccacacagtgacttaccctgcgcaacggaagatgccaccggcagccggaaaaccatgacatggagccgttacggtcagttgctgaccgtcactgactgttccggttatgtaacccgttatgaccatgaccgttttggtcaggtgacggcggtgcaccgcgaggaagggctgagccagtaccgcgcatacgacagccgtggacagttaattgcggtgaaagacacgcagggccatgaaatgcggtatgaatacaacgccgccggtgacctgaccgccgtcattgccccggacggcagcagaaacgggacacagtacgatgcgtggggaaaagccatctgtaccacgcagggcgggctgacgcgcagtatggaatacgatgctgccggacgggtcatccgtctgaccagtgaaaacggcagccacaccaccttccgttacgatgtactcgaccggctgatacaggaaaccggctttgacggccgcacacagcgttatcaccacgacctgaccggcaaacttatccgcagcgaggatgaggggctggtcacccactggcactatgacgaagcagaccgcctcacgcaccgcaccgtgaagggtgaaaccgcagagcggtggcggtacgacgaacgcggctggctgacagacatcagccatctcagcgaagggcaccgggtgacggtgcattacgggtatgatgagaaaggccggctgaccggtgagcgtcagacggtgcatcacccgcagacggaagcactgctctggcagcatgagaccagacatgcgtacaacgcgcaggggctggcgaaccgctgtataccggacagcctgtccgccgtggaatggctgacctacggcagcggctggctgtcaggcatgaaactcggcgacacaccgctggtggagtacacccgcgaccgcctgcaccgggaaacgctgcgcagcttcggccgttatgaactcaccatcgcttatacccctgccgggcagttacagagccagcacctgaacagcctgctgtctgaccgcgattacacctggaacgacaacggcgaactcatccgcatcagcagcccgcgccagacccggagttacagctacagcaccaccggcaggctgaccggcgttcacaccaccgcagcgaatctggatatccgcatcccgtatgccacagacccggcggggaaccgcctgcccgacccggagctgcacccggacagcaccctcagcatgtggccggataaccgtatcgcccgtgacgcgcactatctttaccggtatgaccatcacggcagactgacagagaaaaccgacctcatcccggaaggggttatccgcacggatgatgagcgcacccaccggtaccattacgacagtcagcaccggctggtgcactacacgcggacacaatatgcagagccgctggtcgaaagtcgctatctttacgacccgctgggccgcagggtggcaaaacgggtatggcggcgtgaacgggacctgacgggctggatgtcgctgtcacggaaaccgcaagtgacctggtacggctgggacggcgaccggctgaccacaatacagaacgacagaacccgcatccagacgatttatcagccggggagcttcacgccactcatcagggtcgaaactgccaccggtgagctggcgaaaacgcagcgccgcagcctggcggatgcccttcagcagtccggcggcgaagacggtggcagtgtggtgttcccgccggtgctggtgcagatgctcgaccggctggaaagtgaaatcctggctgaccgggtgagtgaggaaagccgccgctggctggcatcgtgcggcctgacggtggagcagatgcaaaaccagatggacccggtgtacacgccggcgcgaaaaatccacctgtaccactgcgaccatcgcggcctgccgctggtgcttatcagcacggaaggggcaacagaatggtgcgcagaatacgatgagtggggcaacctgctgaatgaagagaacccgcatcagctgcagcagcttatccgcctgccggggcagcagtatgatgaggagtccggcctgtattacaaccgccaccgctattatgacccgctgcaggggcgatatatcactcaggatccgattggactgaaggggggatggaatttttatcagtatccgttgaatccgataactgatattgacccgttgggattagcgacctgtttatacagcataactttaagtatgctttcatgcgtttcagatacgcaaaatgatgataactcttatgatgtgcttactattcctgtcgcctctggtaataatggtaataatatgcaatgtaaaaataatcctggttgtacacacttacaaaatagaggtccaatacctcaaggggtatggagctggaatgttaatggtcctggagcaaccaatagaaaacctaatggtatacgtttaataccgtcagcaaatacagaaacatataatcgtgatggatttttaacacaaagttgtttaaacgctttcggtccgtctttaggacctcgattctgttccgagggttgtataactggttcatctaatgacatgcaaaaattaaatgagttaatattttcagagccagatagcacattaacagttacggactaa

SEQ ID NO: 492036 - DNA, 276 bp, Shigella sonnei; identical to SEQ ID NO: 484087

SEQ ID NO: 492037 - DNA, 162 bp, Shigella sonnei
atgatcgattcgaatgccaaactgcgatcgattcagatgccattttgcacagtaatacgggaatacattgagattttctacaatcgtcagcgtcgtcactctcgtctggggaatatctccccggcagccttcagggaaaaatatcatcagatggctgcttaa

SEQ ID NO: 492038 - DNA, 1491 bp, Shigella sonnei
atgagatcgaaaagatttgaagcactggcaaaacgcccggtcaaccaggacggtttcgttaaagagtggattgaagaaggctttattgcgatggaaagcccgaacgatcctaaaccgtcaatcaaaattgttaacggcgtcgttaccgaactggatggaaaacccgccagccagtttgacctgatcgaccactttatcgcccgctacggcatcaatctcgcgcgcgccgaagaagtcatcgcgatggattcggtaaaacttgccaatatgttgtgcgatccaaatgtcaaacgtagcgatatcgttccccttaccacagcaatgacgcctgcaaaaatcgtcgaagtggtttcgcagatgaacgtggtagagatgatgatggcgatgcagaaaatgcgcgcccgtcgaacaccatcacaacaggctcacgtcaccaacgtcaaagataacccagtacaaattgccgccgacgcagctgaaggcgcatggcgcgggtttgatgaacaggaaaccaccgttgccgttgctcgctatgcaccgttcaacgccatcgccctgctggtcggctcacaggtgggacgtccgggcgtcttgacccagtgttcactggaagaagccaccgaactgaaactcggtatgttaggccacacctgttacgccgaaacaatttctgtctatggtacagaacctgttttcaccgatggtgatgataccccgtggtcaaaagggtttctcgcgtcatcctatgcttctcgtggcttaaaaatgcgctttacttccggctccggctctgaagtacagatgggttacgcggaaggcaaatcaatgctttacctcgaggctcgttgcatttacatcaccaaagccgcaggcgttcagggtctgcagaatggttcggtaagctgcatcggtgttccatcagctgtgccatcaggcatccgcgcagtattagcggaaaacttaatttgctcatcgctggatctggaatgcgcctccagtaatgaccagacctttacccactcggatatgcgccgtaccgcacgtttcctgatgcaatttctgccaggcaccgactttatctcttccggtttttccgctgtgccgaactacgacaacatgtttgctggttcaaacgaagatgctgaagacttcgatgattacaacgtcattcagcgtgacctgaaggttgatggtgggctgcgaccagtacgcgaagaagatgttatcgctatccgcaataaagccgctcgcgctttacaggctgtctttgccggtatgggactaccgcacatgctcaacatgcaaaaagcaaaactgaccggcgattatctccatacctcagccatcatcgtcgatgacggacaagtgctctctgcggtcaatgacgtcaatgattacgccggaccggctacaggttaccgcctgcaaggggaacgctgggaagagatcaaaaatattcccggtgcacttgatcccaacgaaattgactaa

SEQ ID NO: 492039 - DNA, 678 bp, Shigella sonnei
atgaagtgggactggattttctttgatgccgatgaaacgctgtttacctttgactcattcaccggcctgcagcggatgtttcttgattacagcgtcacctttaccgctgaagattttcaggactatcaggccgttaacaagccactgtgggtggattatcaaaacggcgcgatcacttcattacagcttcagcacgggcgttttgagagctgggccgaacggctgaaagttgaagcaggcttgcttaacgatgcctttattaatgcgatggcggaaatctgcacgccgctgccgggcgcggtttctctgcttaacgccattcgtggcaacgccaaaatcggcatcatcaccaacggctttagcgccttgcagcaagtgcgtctggaacgcacgggcctgcgtgattacttcgatttgctggtgatttccgaagaagttggcgttgccaaaccgaataagaaaattttcgattatgcgctggaacaggcgggcaatcctgaccgttcacgcgtgctgatggttggcgacactgccgagtccgatattctcggtggcatcaacgccgggcttgagacctgctggctgaatgcgcacaatcgcgagcaaccagaaggcatcgcgcccacctggaccgtttcttcgttgcacgaactggagcagctcctgtgtaaacactga

SEQ ID NO: 492040 - DNA, 594 bp, Shigella sonnei
atgcctgacgctaaaaaacaggggcggtcaaacaaggcaatgacgtttttcgtctgcttccttgccgctctggcgggattactctttggcctggatatcggtgtaattgctggcgcactgccgtttattgcagatgaattccagattacttcgcacacgcaagaatgggtcgtaagctccatgatgttcggtgcggcagtcggtgcggtgggcagcggctggctctcctttaaactcgggcgcaaaaagagcctgatgatcggcgcaattttgtttgttgccggttcgctgttctctgcggctgcgccaaacgttgaagtactgattctttcccgcgttctactggggctggcggtgggtgtggcctcttataccgcaccgctgtacctctctgaaattgcgccggaaaaaattcgtggcagtatgatctcgatgtatcagttgatgatcactatcgggatcctcggtgcttatctttctgataccgccttcagctacaccggtgcatggcgctggatgctgggtgtgattatcatcccggcaattttgctgctgattggtggatgccgaacgcgtgctgctacgcctgcgtga

SEQ ID NO: 492041 - DNA, 951 bp, Shigella sonnei; identical to SEQ ID NO: 485807

SEQ ID NO: 492042 - DNA, 189 bp, Shigella sonnei; identical to SEQ ID NO: 463227

SEQ ID NO: 492043 - DNA, 189 bp, Shigella sonnei; identical to SEQ ID NO: 463227

SEQ ID NO: 492044 - DNA, 483 bp, Shigella sonnei
atgcgtaaagtttgtgcagccattttgtccgcagccatttgtctggccgtatccggtgcgcctgcatgggcgtctgaacatcagtccacgctgagcgcggggtatcttcatgcccggaccaacgttcccggcagtgatgatctgaacgggattaacgtgaaataccgttatgagtttacggatacgctggggctggtgacgtcattcagctatgcaggagacaagaatcgccagctgacccgttacagcgatacccgctggcatgaagattccgtgcgtaaccgctggttcagcgtgatggcggggccgtctgtgcgcgtgaatgaatggttcagcgcgtatgcgatggcgggtgtggcttacagccgtgtgtcgactttctccggggattatctccgcgtaactgacaacaaggggaaaacgcacgatgtgctgaccggaagtgatgacggtcgccacagcaacacgtctctggcgcactga

SEQ ID NO: 492045 - DNA, 483 bp, Shigella sonnei; identical to SEQ ID NO: 492044

SEQ ID NO: 492046 - DNA, 225 bp, Shigella sonnei; identical to SEQ ID NO: 486969

SEQ ID NO: 492047 - DNA, 543 bp, Shigella sonnei; identical to SEQ ID NO: 490571

SEQ ID NO: 492048 - DNA, 327 bp, Shigella sonnei; identical to SEQ ID NO: 488592

SEQ ID NO: 492049 - DNA, 1839 bp, Shigella sonnei
atggatgccctgcaattattaacctggtcgctgatcctctatctgtttgccagtctggcttcgctgtttttactcggtctggacagactggctattaagctttccggcatcacatcgctggtgggcggcgtgattggcatcatcagcggaattacgcaattacatgcaggcgtaactttagtcgcccgttttgccacgccttttgaatttgccgatttaaccctgcgaatggatagcctctcggcatttatggtgctggttatctccttgctggtggtggtttgttctctctattcattgacttatatgcgcgaatacgagggcaaaggcgcggcggcgatgggcttctttatgaatattttcatcgcatcgatggttgccctgctggtgatggacaacgctttttggttcatcgtgctgtttgaaatgatgtcgctgtcttcctggtttctggtcattgccaggcaggataaaacgtcgatcaacgctggcatgctctacttttttatcgcccacgccggatcggtgctgataatgatcgccttcttgctgatggggcgcgaaagcggcagcctcgattttgccagtttccgcacgctttcactttctccggggctggcgtcggcggtgttcctgctggcctttttcggttttggcgcgaaagccgggatgatgccgttgcacagctggttgccgcgcgctcaccctgccgcaccatcgcacgcttcagcgttgatgtctggcgtaatggtcaaaatcggtattttcggcatcctgaaagtggcgatggtcggtctgtcactgcacgacccgctgctcaccgtggttggactgctcggcgcactgtttcatctgctcaaccatgcgcttttcaaagggctgctatttctcggcgcgggtgcgattatttcgcgtttgcatacccacgacatggaaaaaatgggggcactggcgaaacggatgccgtggacagccgcagcatgcctgattggttgcctggcgatatcagccattcctccgctgaatggttttatcagcgaatggtacacctggcagtcgctattctcactaagtcgtgtggaagccgtagcgctacaacttgcgggtcctattgctatggtaatgctggcagtcactggtgggctggcagtaatgtgcttcgtcaaaatgtacggtattactttctgtggtgcgccgcgcagcacacacgctgaagaggcacaggaagtgccaaatacgatgatcgtcgccatgctactgctcgcggcactctgcgtattaattgcgcttagtgccagttggctggcaccgaagataatgcacattgcccatgcgtttaccaatacccctcccgtcactgtcgccagcggaatagcacttgtacccggcacgtttcatacacgggtcactccttcattactgttgctgttactactggcgatgcctttgctgcctggcctttactggctgtggtgtcgttcgcgccgcgcagcgtttcgtcgcacaggagatgcctgggcatgcggctacggctgggaaaatgcgatggccccgtcaggcaatggcgtgatgcagccgctgcgtgtggtcttttctgcgctatttcgtctacgacaacagctcgaccctacgctgaggctaaataaaggtcttgcgcacgtcaccgccagggctcagagcacagaacccttctgggatgagcgggtgatccgccccatcgtgagcgccacccaacggctggccaaagaaatacagcatctgcaaagcggcgactttcgtctctattgcctgtatgtggtcgccgcactggttgtgctgctaatcgctattgccgtctaa

SEQ ID NO: 492050 - DNA, 540 bp, Shigella sonnei
gtgggaaggcgcgtttggtttgaaggcttaaccgctggggtgaactggcgtatttccggatatcgtaacgatgtcagtgacttgatcgattatgatgatcacaccctgaaatattacaacgaagggaaagcgcggattaagggcgtcgaggcgaccgccaattttgataccggaccactgacgcatactgtgagttatgattatgtcgatgcgcgcaatgcgattaccgacacgccgttgttacgccgtgctaaacagcaggtgaaataccagctcgactggcagttgtatgacttcgactggggtattacttatcagtatttaggcactcgctatgataaggattactcatcttatccttatcaaaccgttaaaatgggcggtgtgagcttgtgggatcttgcggttgcgtatccggtcacctctcacctgacagttcgtggtaaaatagccaacctgttcgacaaagattatgagacagtctatggctaccaaactgcaggacgggaatacaccttgtctggcagctacaccttctga

SEQ ID NO: 492051 - DNA, 219 bp, Shigella sonnei
atgaaccagatagtccagaccgccagcaacctgcatggcagaaatagcggcgataaccgccatgataatggaaatgacatcgaacgggatgttaccgggtttaacgccaatagcggcaagaaccagcacccccaatccgcctgcaaaaccaatacctattccccccaatctggcgcccaagaagatcgccagcaaaactatgatgagttctacaactag

SEQ ID NO: 492052 - DNA, 567 bp, Shigella sonnei
atggggcgcacctaccaccaggaaaaccgcccccccggcagcctgccgggaacaaagacgcagatgaccatccgctccaaaacgtacatgggcagcggatttaatgagctgaagtttgatgatgcgacagggagagaacaggtctacatccacgcgcagaagaacatggataccgaagtgctcaacgaccgtaccaccaccgtaaaacacgatcaccgcgaaaccgtaaaaaatgaccagacggtcacgatccaggaaggtaaccgccttcttacggtggaaaaaggccacaagatcaccggagtactgaaagggtctttatctgaggatgtctttcaggacagaggcacgattgccggttcggtgcatgttgacgctgtaaacaatggtggcgaaggcgacggtatacaggcttatacggcgattaaggaaattttgctggccgtggaggaaagcaaaattgcgctgacgccggatagcattcagctacaggtcggggaatcgacggtaatcaggctgtcgaaggatggcatcaccatcgtgggcggttctgttttcatcaactga

SEQ ID NO: 492053 - DNA, 951 bp, Shigella sonnei; identical to SEQ ID NO: 485807

SEQ ID NO: 492054 - DNA, 951 bp, Shigella sonnei; identical to SEQ ID NO: 485807

SEQ ID NO: 492055 - DNA, 279 bp, Shigella sonnei; identical to SEQ ID NO: 11573

SEQ ID NO: 492056 - DNA, 369 bp, Shigella sonnei; identical to SEQ ID NO: 487152

SEQ ID NO: 492057 - DNA, 441 bp, Shigella sonnei
gtggcgggtctttctggctggcggttcagggtatttgaggtagcgtctgaccgtccgttcagagcaaccaatctgagtcgcaatatcgacgatgtacgcgccctgctggcgcatttgctttatcatgtaaaagtcctctctgctcagcatgttgatgtcctttctggtgtgagaaccttaaggaaacaacatggtgtagcagccagccagttatttctctggcgtaagcaataccaggaaggaagtcttactgctgtcgccgccggagaacaggttgttcctgcctctgaacttgctgccgccatgaagcagattaaagaactccagcgcctgctcggcaagaaaacgatggaaaatgaactcctcaaagaagccgttgaatatggacgggcaaaaaagtggatagcgcacgcgcccttattgcccggggatggggagtaa

SEQ ID NO: 492058 - DNA, 303 bp, Shigella sonnei
gtgtggtcagccggtatcgatacctctaaagagttcaaagccgaagctgtcagaacggttcttgaaaatcaactttcgatcagtgaaggcgcttcccgattatctcttcctgaaggcactttaggacaatgggttaccgccgccagaaaagggctcggtactcctggttcccgcacggtggctgaactggaatctgaaattctgcaactacgtaaggcgttaaatgaagctcgccttgagcgagatatattaaaaaaagcaacagcgtattttgcacaggagtcgctgaaaaatacgcgttaa

SEQ ID NO: 492059 - DNA, 396 bp, Shigella sonnei
gtgtgccacttcaacgtaaccatcaaagaagaagacggtagcgaacaacgattcacccaaccttatgcttcattagcgattcttaaacgtgaaggtcagacagatgttgatgtcagcgtgggtgaattgcgcgatgaagacggatttacaccggacgtccttcaggcgcaaatacttcatggtttttcccacgggatcactttatatggaggtatgcaggctgctgaaaattatggttctgcagctctgggtgtcggtaaagatcttggcgctttgggcgcaatttctttcgatgtgacacatgctcgtgcgaattttagccatgatgatacagaaacgggtcagtcatatcgctttctctattcaaaacgatttgacgacacagacactaaatag

SEQ ID NO: 492060 - DNA, 225 bp, Shigella sonnei; identical to SEQ ID NO: 133446

SEQ ID NO: 492061 - DNA, 738 bp, Shigella sonnei; identical to SEQ ID NO: 487826

SEQ ID NO: 492062 - DNA, 267 bp, Shigella sonnei; identical to SEQ ID NO: 462029

SEQ ID NO: 492063 - DNA, 303 bp, Shigella sonnei
atgttccaggttaattttgttagttcaacacaaaacgccacaatctcctgggattatttactaaaaataacgcctgttttaataagcattagcgatatgtattctgaagaaaaaatcaagtttgtcgaaagttgtttaaatgagcttggagacattaccgaagaacaattaaaaattcttacagataaattagaaaatgaattaacaaaagaaatatataaaagctcatcgaaactcaacaattgcttgaacagaattaaattaccagagatgaaagaattctcatcagaaaaaaatatatga

SEQ ID NO: 492064 - DNA, 126 bp, Shigella sonnei
atgcgtaaaatcataatcttcactttcttatacaccctgtatatttatacatgcaaagagattatacacacaaaagcaaaatcagtaagtgcccttcttattcggatttacactaaacttccgtaa

SEQ ID NO: 492065 - DNA, 435 bp, Shigella sonnei
atgctcgcgcagggcatcaattccccgaccttcggttgctgcggtgataaacagttttgcctcagcaaaaccgtattcccgcagcacctcctttacctggcgttcaacctcatcaacacgcgcttcgtccacgcgatcggctttggtcagcgccactgtcagcatcgggttaccggtcagctgcaaaatcgccagatgctcacgggtctgcgccatcacgccgtcatcgcacgccaccaccaacagcgcgtgatcgataccaccaacgcccgccagcatgttggaaagaaacttttcatgaccgggtacgtcgataaaactaggcacgcgaccatccggctgcggccagtaggcatagccgagatcgatggtcatgccgcgctttttttcttccggcagacggtcagcatttacgccagtaatcacctgcaataa

SEQ ID NO: 492066 - DNA, 291 bp, Shigella sonnei
gtgaacgctcactggagttcgaaaaagagtaattttttcaggaaaaaaataaaattactgactaaatatttattttttgaatcgcagggcattccggataaggttgatatcgtgtcacggctgaagacctatggatacagtatttctggtgtggagacggatgacggatataaggcgcttgtccgcgcttttcagcttcatttccggcagaaaaattatgacggcataatggatgctgaaaccgctgccatcctgtatgcattgctggagaagtatttcccgggtaaataa

SEQ ID NO: 492067 - DNA, 189 bp, Shigella sonnei; identical to SEQ ID NO: 463227

SEQ ID NO: 492068 - DNA, 207 bp, Shigella sonnei; identical to SEQ ID NO: 490145

SEQ ID NO: 492069 - DNA, 273 bp, Shigella sonnei; identical to SEQ ID NO: 490965

SEQ ID NO: 492070 - DNA, 189 bp, Shigella sonnei; identical to SEQ ID NO: 463227

SEQ ID NO: 492071 - DNA, 261 bp, Shigella sonnei
atgattaaaatggcggaacatctgaaaggttactggccgaatcaactgagtttctcagaatcatgcggaatggtgatgagaatgctgatgacattgcagggcgcttcaccgggacgtataccggagctgatgcgcgatcttgcaagtatgggacaacttgtgaaattaccgacgagaagggaaagggccttcccgagagtggtaaaggagaggccctggaaataccccacagccccgaaaaagagccagtcagttgcttaa

SEQ ID NO: 492072 - DNA, 279 bp, Shigella sonnei
atgaataaacacactttgacccgtatttcagaagaagcttttcacgagcttacccgaattaaacagacaactaacctgcctcatcaaactattatgcagcttgcaattgctaaagaggtcactgagtcggatttactgaaatatccagtttctaaaggtcgcagacacatcagaattactaagaacgctctggctactctgaaggaactgaacaactttaaaattgatattgcccgactattgagcatcaagattcacaagctatcgatgggggtttaa

SEQ ID NO: 492073 - DNA, 381 bp, Shigella sonnei
atgccagtacgcaaaacaacgaagaataacttgaaacctttcttgatgagttttgacagctacaagcaactaccatcaaaaattgaagatttaattatcggcacttgtcgcagctttggaagagataattatcaccgaaaagttttctatttactacgaaatattgacaagattagctcaagcacaataacaagttatctacagcgtcaagcgacccgattaagccatgagctaccaagtgataaatattgcgctaacttagccaccatttgcatgaaagttattgagacaattaatcatcatgtggaagtgggcaatattagccttacaaccagtgaaccagattttgaatttgacccctatattttggaggaattttaa

SEQ ID NO: 492074 - DNA, 225 bp, Shigella sonnei; identical to SEQ ID NO: 133446

SEQ ID NO: 492075 - DNA, 225 bp, Shigella sonnei; identical to SEQ ID NO: 133446

SEQ ID NO: 492076 - DNA, 225 bp, Shigella sonnei; identical to SEQ ID NO: 133446

SEQ ID NO: 492077 - DNA, 363 bp, Shigella sonnei; identical to SEQ ID NO: 490508

SEQ ID NO: 492078 - DNA, 225 bp, Shigella sonnei; identical to SEQ ID NO: 133446

SEQ ID NO: 492079 - DNA, 279 bp, Shigella sonnei; identical to SEQ ID NO: 11573

SEQ ID NO: 492080 - DNA, 225 bp, Shigella sonnei; identical to SEQ ID NO: 133446

SEQ ID NO: 492081 - DNA, 225 bp, Shigella sonnei; identical to SEQ ID NO: 133446

SEQ ID NO: 492082 - DNA, 123 bp, Shigella sonnei
atggataaactacttgagcgatttttgaactacgtatctctggatacccaatcaaaagcaggggtgagacaggttcccagcacggaaggccaatggaagttattgcatctgctgaaagagtag

SEQ ID NO: 492083 - DNA, 912 bp, Shigella sonnei
atgtttcatgttgataataattccggcgtggcgaatatgcctgcgctggcaccggcgcagagtaataccaccacctggtttaccgaaggtgacggacaaaaaggtatcagctggattggtcaggactggctgaatattctccaggccgaactgctgaatattctggctgaagccagtattcagccggataaggcgcagttaaaccagcttacgctgtccattaaagccattatcgctgcgaatgccttttcccggaaaaataacctgaaagaaattgctgatgccggtgcggaggcccagcgtctggcccgtggttatcttggtctggggacgcttgccataaaaaacagtcttggtcccggtgacgttaatgccctggcgaaggatcagaatctcgccgacctggagaataagggaaccgcccgtaataatctggatgtttacagcaaaagcgaaggtgataaccgttacctgcgcagggagcagaacggcgcagacattccggataaaggggcttttatcgataacgtcggtttacgggaaacggtgaataaggcggcgaatgctctgccatcggacggcaccgccgttgccgcgaataaactctccaccccaagaaatattaatggcgttccttttgacgggacgcaggacatatacattacctccggtatgactgaagctactgctgataacaaatacgttagcaacgttcagcttggtgcccagagttaccattcacccggaggtaatgaaatgtcctggagttatggtgcaccttctggttgtatgctttcaggtattaacgtgcaggataccgggaaaagttcagccgataatatcggaggcgtttattaccgtccggtgcagatatatatcggtaatgcctggcgcacagtttcatccgtctga

SEQ ID NO: 492084 - DNA, 789 bp, Shigella sonnei
atgaatcaacaactctcctggcgcaccatcgtcggctacagcctcggtgacgtcgccaataacttcgccttcgcaatgggggtgctcttcctgttgagttactacaccgacgtcgctggcgtcggtgccgctgcggcgggcaccatgctgttactggtgcgggtattcgatgccttcgccgacgtctttgccggacgagtggtggacagtgtgaatacccgctggggaaaattccgcccgtttttactcttcggtactgcgccgttaatgatcttcagcgtgctggtattctgggtaccgaccgactggagccatagccgcaaagtagtgtatgcatatttgacctacatgggcctcgggctttgctacagcctggtgaatattccttatggttcacttgctaccgcgatgacccaacaaccacaatcccgcgcccgtctgggcgcggctcgtgggattgccgcttcattgacctttgtctgcctggcatttctgatagggccgagcattaagaactccagcccggaagagatggtgtcggtataccatttctggacgattgtgctggcgattgccggaatggtgctttacttcatctgcttcaaatcgacgcgtgagaatgtggtacgtatcgttgcgcagccgtcattgaagatcagtttgcaaaccctgaaacggaatcgcccgctgtttatgttgtgcatcggtgcgctgtgtgtgctgatttcgacctttgcggtcagcgcctcgtcgttgttctacgtgcgctatgtgttaaatgatatataa

SEQ ID NO: 492085 - DNA, 1233 bp, Shigella sonnei
atgactaaaaaaccatgggaaagaagacttaaagatttatcgcacttgctcaaatgctgcattgatacatattttgaccctgaattattccgcttgaatttgaatcaattcctccaaaccgcaagaacagtaacatttattattcaaaaaaacaaaaaccagattataggatatgacatttggtataacaataatgttattgaaaaatggaaaaatgatccattaatggcttgggctaaaaattctcgcaatacgatagaaaaacaaggcgatttagaaatgtatagcgaggcaaaggctactcttatttcatcttacattgaagaaaatgacattgagtttattacaaatgaaagtatgttaaacattggtataaaaaagttagtcagacttgcacaaaagaaattaccttcatatttaactgaatcatctattattaaatcagaaagacgatgggtcgctaatacgctaaaagattacgaattattacatgccttagctataatctatggcagaatgtataactgctgtaactctcttggcatacaaataaacaatccaatgggtgacgatgtgatttcgccaacatcattcgactctttatttgatgaagccaggagaataacttatttaaaattaaaagattactccataagcaaattgtcatttagcatgatacaatatgataataaaataattcctgaagatattaaagagcgtctaaaactggtagataagcctaaaaatatcacttcgacagaagagttagttgactatacagccaagcttgcagaaacgacttttttaaaggacggttatcacattcaaacattaattttttatgataaacaattccatccaattgatttaatcaatacaacatttgaagatcaagcagataaatatattttttggcgttatgcagctgacagagccaaaataacaaatgcctatggcttcatttggatatcagagctatggctcagaaaagcaagcatcaactccaataaaccaatacatacaatgccaattatagatgaaagacttcaggtaattggaattgattcaaataataatcaaaaatgtatttcatggaaaatagttagagaaaatgaagaaaaaaaaccgactttagaaatattaacagcagactcaaaacatgacgaaaaaccatatttcatgcgttcagtcttaaaagcaattggcggtgatgtaaacactatgaacaattga

SEQ ID NO: 492086 - DNA, 186 bp, Shigella sonnei
atgaatgtaatagcatttaatgaaatagaatcgagcatcgccgccaatgatcaggttgattctatctgcattgaattaacaacatttaatcaagataatgtcatttcatttgaaagtaaaaagaaaaataaagaaattcttgatgcattttttgaaataataaatactgatatagttttcgactag

SEQ ID NO: 492087 - DNA, 1608 bp, Shigella sonnei
atggctgaagcagcaaaaaaaactccacaaaagctgaatgaaaaaaaaggctcaacatcggcatcatcacttgagattgtgaattcacgacaatcaaaagatatttatcttggattgtgtggatatgttggatgtggcatgagaacgataaacaaaattatcgaagagatatccaaagaatgggggtataatgttgtacacatccgcataagtgcgcttatggaaaacccattatattttgagccagcagcactgaaggtatccgaaagcacacaagctaatagacatttaaaactccaggatattgccaataaacttcgtaaacattacaaaaaaaatgagttgcttgcagaagctgctattgcagcaatcgcagcagagaaaaataatattgattataataatgattataataatgatgaatataaaggtactgtcttcatcattgatcaattcaaaaggccggaagaaatagagttattcagagttatatatcagcataatttctatttgttaggagttttgcgcgatttagattaccgaattcagaatctcattgatgacgaatcgacaaagaacgaccttcatttaattatcaatattgataataaatcctctgatccgtatggacaaagaaccggggaaaccattcttgattcagatttttttattaaaaataacttcagccaaaaaagtgaattaaagaagaagattgatcggtttttcggtcttattcatggcaaaaatggtttaacaccaacttttaacgagaaaggtatgtatgctgccttttcaacatcattacaatcagcttgtttatcacgtcaagtaggggctgcactgtttgatgatgaagggaatttgcttgccgtgggtaagaacgacgtacctaaagctggtggcgggttgtatagcagtgatgattttgataacgatcatcgatgcgttcacaaaagtggtaagtgttataatgatgcaaacaagctaaaaattaaagaccgtataaaaagcatattatcaaccgaagtaagaactgtattaggtatttccgcaggacaaactgttgccgatattaatataacacgacttctaaacaaattagataatattgcagaaggcatttacaaagacagcaaaatatcaagtgtaatggagtactccagatcaattcatgctgaaatggacgtcattacatcaatggctagaaaacaaaacggcgatactaaagataaaattctttttacgacaacctatccctgccacaactgtgcaaggcatattgtcgcagctggaataaaaaaagtagtatatatagagccatttgataaaagtcttgctcttgatctgcataatgatgcaataacaaagaacgaagaatcttccaaagtaatattttgtgattttgagggggtatcaccccgccgctaccataaatttttcagaccaacggatgaacgtaaagatgataaaacaggggctgcaaataaatttaatgctcgctacgaaaatcatatagatgttcaatatcttgatgattatagaaagtatgagactgttgtagctaagaaatttataaacgagattgctaaaccagagtctcagccataa

SEQ ID NO: 492088 - DNA, 330 bp, Shigella sonnei; identical to SEQ ID NO: 490755

SEQ ID NO: 492089 - DNA, 273 bp, Shigella sonnei
atggcaaccattgcatttctcgggctggggcagatgggtagcccaatggctaacaatctattgcaaaaagggcattcattgcaggtatttgatgtcaatgcacaggccgtcgatgcgctagttacgcaggggccactgcggcacaaaccccagcggaagcagcagcaggcgctgaatttatcatcactatgcttcccaatggtgacattgttcgacaggttctgttgggggaaaaaggcgtctgtgaggctgtttcatctgacgcgttattga

SEQ ID NO: 492090 - DNA, 1095 bp, Shigella sonnei; identical to SEQ ID NO: 484487

SEQ ID NO: 492091 - DNA, 510 bp, Shigella sonnei; identical to SEQ ID NO: 145444

SEQ ID NO: 492092 - DNA, 174 bp, Shigella sonnei
atgatcttagaaggaaaaaatgacagagcgcgagcaagtgcctttattgaaatcgccagaataatagaaacagtacaagtacattgctgtattgtgttttccttgaatattgaatcgcggtgcccatgtactacgattcctttcgtgttgtttatcattgcacattttccctga

SEQ ID NO: 492093 - DNA, 396 bp, Shigella sonnei; identical to SEQ ID NO: 10457

SEQ ID NO: 492094 - DNA, 429 bp, Shigella sonnei
atgggttttcgtagcgcatcaattcttacgttgattattagtgggattattatcgggtgcactgatgctgtatcgacaaattatcatgaccgtacatcatattactccgataaagcaatagagacacagtatgtgagttcatctgaacgtacttctgatgttagtgaggatatccgtctgtatgcccatcaaatcaagagcgccatcgaaaaacagttcggggatgcgagtaagtattcaggaaaagagtgtacactgagaatgcatatggccccgaatggccttctactggaggttaaaagagaaagtggagacctcgatttatgtcgtgaagcgatgaatgcgataaagaatgctgatatacctgcccccccttcgccggaagtatataaagtatttcaaaatggggtgctggattttaaaccctga

SEQ ID NO: 492095 - DNA, 138 bp, Shigella sonnei; identical to SEQ ID NO: 31951

SEQ ID NO: 492096 - DNA, 543 bp, Shigella sonnei
atgatttacccaacgaatacaggaaaaagcggagaacaccttcgcctcaccacgctggaaagtgtctggattcagggaaaactacgtatgtgggggcgctggtcgtatattggcggtggcaggtcagggaatatgttcaatcagttgttggcatccaaaaaactgacgaaaacagccattaatgaagccctgcgcagaatgaaaaaagcgggaatagagaaagctgagctggaagcgtttttgcgagagatgatcaacggcaagcaaaagagctggctggcgcattgtactgatgcagaggcgttatgtattgatcgagtcataagtgaggtgctggcagagcatccaggattgatttgcattctccggcaacgctatgaagggcgggggatgactaagcgcaaaatggctgaattgctaaatgatgcacacccagagtggtgttttagcacatgcgaaaaacggattgctaattggttagctgttgctgagtatgccctatatattcccatgcgtgaatcatttgctgagaaaatggcttga

SEQ ID NO: 492097 - DNA, 600 bp, Shigella sonnei
atggcgcatatacaactggtcaaacaaacctcttctggtttacttctcccggcgacgccggagagttgcgattttctgcatcaaatcaaaataggtgagtggatacacgcagactttaagcgtgtgcgtaactacgcattccacaagcgttttttcaaactcctgcaactgggattcgattactggactccggtcggtggggcgatcacgcctcgcgaacgagaactgctgtctggtttcgttgattacctgtgcgaatcagttggtcgggaacacacgccagccctgagtgatgccgcagagcaataccttaacaccgttgcgactcgtagaacccgggatacggcgttgctaaagtcgtttgaggctttccgcgagtgggtaaccattcaggccggattttacaccgagcatatttatccggacggtagccgtgggcgtcgggcaaaatccatcgcttttgcgaatatggacgaagtcgagtttcagcaggtttataaatctgtactgaatgtgctgtggaactggattctgttccgtaaattctcctctcaggaggaagttgaaaatgtggccgcacaactactggagtttgcgtaa

SEQ ID NO: 492098 - DNA, 339 bp, Shigella sonnei; identical to SEQ ID NO: 477979

SEQ ID NO: 492099 - DNA, 1002 bp, Shigella sonnei; identical to SEQ ID NO: 4952

SEQ ID NO: 492100 - DNA, 1023 bp, Shigella sonnei; identical to SEQ ID NO: 4951

SEQ ID NO: 492101 - DNA, 417 bp, Shigella sonnei; identical to SEQ ID NO: 477550

SEQ ID NO: 492102 - DNA, 762 bp, Shigella sonnei
atggagactgtttttgacgcactgaaagcaatgggaaaagccacatccatagaacttgctgcgcgacttgatatcagtcgtgaagaagtgctgaacgaactatgggaactgaaaaaagctggtttcgttgataaaagcgcgtacacctggcgtgtggctgataacaacgttcagcaggaacagccaatgcaggcagaactgccggaagaaaccaccacggcaactgtagtgaaaatctcagagtgcgatttaaccgcgacgattgaacaacgcggaccacaaacggcggatgaactggctacgctgttcggtacaacatcccgcaaagttgcttcaacgctggcaatggcaatcagcaaaggacgcctgattcgcgtaaaccagaacagtaaatttcgttactgcatgccgggcgataatttaccagcagagccgaaagctgcatcggtagcggaaactgatggtaaagcctttcctcagccagccggtgttgcgttaccagtacaggaagcggcaacacaggaagatattaaaacagaaactgtggcggacattgtgcagtcgctgccatcgtttactgaaacgcaagcggatgacctagttttaccatcgctgcatatggcaaaccgcgaactgcgtcgggcgaaaaatcatgtccagaagtgggagcgagtctgcgccgcgctgcgggagctgaacaagcaccgggatattgtccgacagattgtcgattcctccagtcgtattgtgtcggaaaagtga

SEQ ID NO: 492103 - DNA, 747 bp, Shigella sonnei
atgaaaaatattgcgacaggcgacgttcttgaacgtatccgcagactggccccgtcacatgtaaccgcgccattcaagacggtagcggagtggcgcgagtggcaactttccgaaggccagaaacgttgtgaggagatcaaccgtcagaatcgtcagttgcgggtggaaaaaattctgaatcgctctggcatccagccattgcaccgcaaatgctcgttttcgaattaccaggtgcagaacgaagcgcagcgatacgcgttgagtcaggcgaaatccatcgctgatgaactgatgaccgggtgtacaaattttgcgttcagcggaaaacctggtaccgggaagaaccacttagcggcagctatcgggaatcgcctgctgaaagacggtcagacagtgattgtggttaccgtggctgatgttatgagtgccctgcacgccagctatgacgatgggcagtcaggcgaaaaatttttgcgggaactatgcgaagtggatctgctggttcttgatgaaattggcattcagcgcgagacgaaaaacgagcaggtggtgctgcaccagattgttgatcgccggacagcgtcgatgcgcagcgtggggatgctgacaaacctgaactatgaggccatgaaaacattgctcggcgagcggattatggatcgcatgaccatgaacggcgggcgatgggtgaattttaactgggagagctggcgtccgaatgtcgtccagccaggaattgagaagtaa

SEQ ID NO: 492104 - DNA, 255 bp, Shigella sonnei; identical to SEQ ID NO: 477546

SEQ ID NO: 492105 - DNA, 420 bp, Shigella sonnei; identical to SEQ ID NO: 477545

SEQ ID NO: 492106 - DNA, 135 bp, Shigella sonnei
atggtgcattacgaagtagttcagtatttgatggattgttgcggtatcacttacaaccaggctgtgcaggctttacgcagcaacgactgggatctctggcaggcagaagtcgctatacacagcaacaagatgtga

SEQ ID NO: 492107 - DNA, 156 bp, Shigella sonnei; identical to SEQ ID NO: 21060

SEQ ID NO: 492108 - DNA, 612 bp, Shigella sonnei; identical to SEQ ID NO: 477542

SEQ ID NO: 492109 - DNA, 222 bp, Shigella sonnei
atgattgcacatcacttcggaactgatgaaataccacgtcagtgtgtgactcctggcgattatgttcttcatgaaggccggacatatattgcctcggcaaacaatattaaaaagcgaaaactatatattcgtaacctgaccacaaaaacatgcattactgaccgcatgattaaagtcttcctcggtcgtgatggtttacctgtaaaggcggagtcatggtga

SEQ ID NO: 492110 - DNA, 171 bp, Shigella sonnei; identical to SEQ ID NO: 477541

SEQ ID NO: 492111 - DNA, 2601 bp, Shigella sonnei
atgagcacaaaaccactcttcctgttacggaaagcgaaaaaatcatccggtgaacctgacgtcgtcctgtgggcaagcaacgattttgaatcgacctgtgccactctggactacctgatcgttaagtcaggtaaaaaactgagcagctattttaaagctgttgccacgaattttcctgtcgttaatgacctgcccgctgaaggtgagatcgattttacctggagtgaacgctatcaactcagcaaagactccatgacatgggaactaaaaccgggagcagcaccagacaacgctcactatcaaggcaataccaacgtcaacggcgaagacatgactgagattgaggagaatatgctactcccaatttctggccaggaactgcccattcgttggcttgctcaacacggcagcgaaaaaccggtaacgcacgtttcacgcgacggactccaggcattacacattgctcgggctgaagaactaccggctgttactgccctggctgtttcccacaaaaccagcctgctcgacccgctggaaattcgcgaactccacaaactggttcgtgacactgacaaagttttccctaatcctggtaattcaaacctgggactgataactgcttttttcgaagcatacctgaacgctgactacaccgatcgaggactgctgacaaaagagtggatgaagggtaatcgtgtttcacacatcactcgcacggcttccggtgctaatgctggcggcggaaacctcaccgatcgcggcgaaggtttcgtacacgatctgacgtcactggcgcgggacgtagccactggcgtactggcccgttcaatggatctggacatctataaccttcatccggcacacgctaaacgcattgaggaaattatcgctgaaaataaaccgcccttttctgttttccgcgacaaattcatcaccatgcctggcgggctggattattcccgcgccatcgtggttgcgtccgtaaaagaagcaccaattgggatcgaggtcatccccgcgcacgtcactgaatatctgaacaaagtactgactgaaaccgatcatgccaaccctgatccggaaatcgtggatattgcctgcggtcgctcctctgccccgatgccgcagcgagtaacagaagaaggaaaacaggatgatgaagaaaaaccgcaaccatctggaacaacggcagttgaacagggagaggctgaaacaatggaaccggacgcaactgaacatcatcaggacacgcagccgctggatgctcagtcacaggtaaattctgttgatgcgaaatatcaggaactgcgggcagaactccatgaagcccggaaaaacattccatcaaaaaatcctgtcgatgccgataaattgcttgctgcatcacgtggtgaatttgttgacggaattagcgacccgaacgatccgaaatgggtaaaggggatccagactcgcgattgtgtgtaccagaaccagccagaaacggaaaaaaccagcccggatatgaatcaacctgagccagtagtgcaacaggaaccggaaatagcctgcaatgcctgcggccagactggcggggataactgccctgactgtggtgcggtgatgggcgacgcaacataccaggaaacattcgatgaagagagtcaggttgaagctaaggaaaatgatccggaggaaatggaaggcgctgaacatccgcacaatgagaatgctggcagcgatccgcatcgcgattgcagtgatgaaactggcgaagtcgcagatcccgtaatcgtagaagacatagagccaggtatttattacggaatttcgaatgagaattaccacgcgggtcccggtgtcagtaagtctcagctcgatgacattgctgatactccggcactgtatttgtggcgtaaaaatgcccccgtggacaccacaaagacaaaaacgctcgatttaggaaccgctttccactgccgggtacttgagccggaagaattcagtaaccgctttatcgtagcacctgaatttaaccgccggacaaactccggaaaagaagaagagaaagcgtttctgagggaatgcgcaagcacaggaaaaacggttatcactgccgaagaaggccggaaaattgaactcatgtatcagagcgttatggctttgccgctggggcaatggcttgttgaaagcgccggacacgctgaatcatcaatttactgggaagatcctgaaacagcaattttgtgtcggtgccgtccggacaaaattatccctgaatttcactggatcatggacgtgaaaactacggcggatattcaacgattcaaaaccgcttattacgactaccgctatcacgttcaggatgcattctacagtgacggttatgaagcacagtttggagtgcagccaactttcgtttttctggttgccagcacaactattgaatgcggacgttatccggttgaaattttcatgatgggcgaagaagcaaaactggcaggtcagctggaatatcaccgcaatctgcgaaccctggctgactgcctcaataccgatgaatggccagctattaagacgttatcactgccccgctgggctaaggaatatgcaaatgactaa

SEQ ID NO: 492112 - DNA, 810 bp, Shigella sonnei; identical to SEQ ID NO: 477540

SEQ ID NO: 492113 - DNA, 264 bp, Shigella sonnei
atgagtcaggtactgattacaggcgcaacggggctggtgggcggtcacctgctgcggatgttgattaacgaaccgaaagttaacgccatagccgcgccgacgcgacgtccgttgggcgatatgcccggggtgtttaatccccatgatccgcaactgagtgacgcgttggcgcaggtcaccgaacccatcgacattgtgttttgttgtctcggcaccacgcggcgagaagcggggagcaaagaggcgtttattcatgccgattag

SEQ ID NO: 492114 - DNA, 186 bp, Shigella sonnei
atgcgaaagctgaaaatgatgctctgcgtgatgatgttgccgctggtcgtcgtcggttgcacatcaaagcagtctgtcagtcagtgcgtgaagccaccaccgcctccggcgtggataatgcagcctccccccgactggcagacaccgctgaacgggattatttcaccctccgggaacgactggtaa

SEQ ID NO: 492115 - DNA, 1425 bp, Shigella sonnei
atgtgtgggttcctggtttggctctatagtctttcaatgttgccaccaatggttgtagcattgttttataaagaaaaaagcctgttcgttttctttataactttcgttatatttttttgcattggtggcggagcgtggtatacaactaagaaatctggcattcaattacgtacccgtgatgggtttattataattgtaatgttttggattttgttttctgttattagtgcattccctttatggattgactcagaacttaatttaacgttcattgatgctctgtttgaaggggtttctggaataacaacaacaggagcaactgtaattgatgatgttagttcattacctcgggcatatttgtactatcggtcacagttaaattttataggtggtttaggagttattgttctggcggttgcagtattgccattattgggtattggtggtgcaaagctttatcagtcagaaatgccggggccatttaaggatgacaaactcactccccgcctggccgatacgtcacggacactgtggataacttattctttattaggtattgcttgtattgtctgttatagacttgcaggaatgcctttgtttgatgctatttgtcacgggatttccacagtttcgcttggtggtttctcaactcatagcgagagtatcggatattttaataactatttggttgagctggtggctggttctttttccctgctatcggctttcaacttcactctttggtatattgttattagcagaaaaacgataaaacctttaatcagagatattgaacttcgtttctttctgttaatagccttaggggtgatcattgttacctctttccaggtctggcatataggtatgtatgacttgcatggaagttttattcattcgttttttcttgccagctccatgctcactgataatggtttagctacgcaggattatgcaaactggcccacgcacacgatagtgtttttgctgttgtcaagtttctttgggggatgtataggttcaacctgtggtggaattaagtcacttcgatttcttatacttttcaaacaaagcaaacacgagataaatcagctttctcatcccagagcgttgttgagtgtaaatgtaggagggaagatagttacagatcgtgtaatgaggtctgtatggagtttcttttttctttatactctcttcacggtgttttttatactggtgttaaatggtatgggatatgattttcttacatcatttgcaacagtggctgcatgtattaataatatgggattaggttttggggctactgcatcgtcattcggagtgcttaatgacattgcaaaatatttaatgtgcatagctatgattcttggtcgccttgaaatttatcctgttattatattgttttcaggttttttttggcgctcctaa

SEQ ID NO: 492116 - DNA, 789 bp, Shigella sonnei
atgagcgagaaattaaagatagtctatcgcccattacaagaattgtcaccgtatgcgcacaacgccaggacgcacagtactgagcaggtggcacaactggtagaaagtattaagcaattcggctggactaatccggtgctgattgacgaaaagggcgaaattattgcgggtcacggtcgtgttatggcggctgaaatgctcaaaatggattctgttccggtcattgttctgtctggcctgacggatgagcagaaaaaggcgtaccgcctggcagataatcgcctgccgatgaatgctggctgggatgaagatctgttgcggatggagctgtcggacctaatcaatgctgattttgatgtctccctgacaggcttcatcccggcagaaattgatgaactgttgacggatgttttgcccggtacaggaaatgaggaggagccgtatacgacgaaaattgatacgcctgtttatgagccgtcaggcggtaaaccggatatcagtgaactgtacgacgatacgaaaactcaggagctgatcagccggatacgttcggcgtcccttgatcctgatattgagaaattcctcctgtgtgcagcagaacgtcacacggtgtttaatttcagcagaattgcggactattacgctcatgcccccgctgaaattcagtgccttttcgaggagtcggcgctggtgatcattgattatcagcaggctattgaaaatggatttgtccgaatgacgcagcgcatggtggagatcatgcatggcggggaggaggaatatgcgtga

SEQ ID NO: 492117 - DNA, 933 bp, Shigella sonnei
atgcgtgatgatttttgcgcctttattctgactcacgggcgaccggacaaagttctgacttaccggacgttgcgtcgtgctggctataccgggaaaatttttatcgttgttgatgatgaagataagacacggcatcagtacatggctgaatttggtgaacaggtgctggtattttccaaagccgatattgctagtcgttttgacgaagccgataattttagtgaccgccgctcaattttttacgcccgtaatgcctgtttcgaccaggcaaaactggtcgggtgtaaatacttcattcagctcgatgatgattatcacgagttccagtttcgggtggatcgcaactatgaccaggcctatttcccgataaggaaactggatgagatcctttctgaaatgcttgcgtactacgaatcaatacctgctctttccatcgctatgtcgcagggcggggattttcttggtgacaatggcggccatgcttcgtgggtgaaacgcaaggcaatgaacagctttatctgttcggttgatcgaccgttctcattcatggggcgcattaacgaggatgtgaatacgtacacgaatctcggtcgctgtggtgaattgtttatgacgatcggtgctgtccagttagggcagaaacagacgcagaaaaacagcggcggaatgaccgagctgtatctggattccggaacctacgttaaaagtttttactccgtcatgtatgcgccgtcgtgcgtaaaaatctcacttatgggtgccagtcataaacgcattcaccatcaggtcacctggaacaacgctgcagtaaaaatccttcacgaaaaatacaggaagaagacaccctgcatatcaatgggggtgacaaatgattccgtattcgaaagtcgagtctctggcagcgtgccggatgactgcacaacaaatcgctga

SEQ ID NO: 492118 - DNA, 210 bp, Shigella sonnei; identical to SEQ ID NO: 9836

SEQ ID NO: 492119 - DNA, 1095 bp, Shigella sonnei
atgagcagaccggactggggggcgttgcagcaggagtatattgctgaatacacccgctccggtatatctccggtggcatggtgtgaagcaaggggactgaattacgcaacagcccgtcgttacatcaaaaaaactccgaaaaatgcgcagacagaaatgtgcaaaactgcgcaaaaaagtgcgcagaaaaaatctgcgcagactgcacaaaagcggaacgaaaaatctcaggaaaaaaagccagtattcgatgcgggcctgaatgagggcgacgcggaggaattttcgttctgtcccgatgaattcggcatttctgaccagcaggctaagtttgcgatgcttgttgctcagggtaaaaagccgacagaggcgtaccgactagccggttatgaggggcaaggtgcgacagctaacagcaacgccagtcgtatgcttagaaatgccagggtttttcgcgctatcagctacttccgcaatcagtaccagaaacgctataccgcagacctggatttactagtgagtcagttgatggctattgtcctggccgaccccaatcagcttgcacaatttcgccgtgttaactgccgttattgctggggcgagaatcatctctaccagtggcgcgatatagcagaattcgacaaggcagcggcgcaggcttccagagatggcaaacccgaaccggaatatggaggcctcggctttgttgataacgccatacccaatccggactgcccgaagtgctgcggtgagggaacgggacagctttatatggctgataccactctgcttgatggggatgcgcggcaattatatgcaggggcaaaattcggaaaattcggcgttgagatcctgctggaggataaggctgccgcccggcgtgaattgttgcgtttgttttctgctggcggggctttatgtgcagataagcggctacgggaactggaaattgaacggcgcagaatggaaaaccagaagctgcgcaaagagatcgaaacggtggaagataatgaacatccccagcctgtggcgatcaatattaatgtggttgatgccagagtaaggagtgatgaagatgatctctccgacgcttaa

SEQ ID NO: 492120 - DNA, 1302 bp, Shigella sonnei; identical to SEQ ID NO: 32629

SEQ ID NO: 492121 - DNA, 1407 bp, Shigella sonnei
atggctgatatatcaacacccaacctcgactataacgatatgctggaggcgtgggatattaacgacgcactgatgggcggtacgcttgaaatgcgcaggcagggggaaaattatctcccaaaatggcctaacgaagatgaagacgcttataaaaaacgcctgtctgtggctacgctacttcctgtgtatgaagaaagcatcaagcaaaatattgggcgcatatttgcagagccgacagtattgagtgaggaaacgccggcaaaaatcagggaatatgcagaaaatatcgacatggaggggagccgactggatgtgtgggcgcagcaatttttcagcctcgcatttcagtatggtgtggcacatgcgctggtggactatccacgaacggatatgaaagagattcggacaaaagccgatgaaaacgcgaccggtggtcgtccgtacgttacgatgctgaatccacgccaggttattggatggaaatcgaaagttgaaaaagggaaagttgttctcactgatttgcgtataaaagaggtcatcattattgatggtgatgatttcgggcagaagaaggtggagcagatccgccatattatgccccgtcgagttgaaatttatcgacgtagcgaaggcactaatggcgaatctgtctggacgcttcatgagtcatggaataccagccgtgatgatattcctctggtaacactgtacacgaagaaaacaggatttatgcgtggtacaccgccattgcttaatcttggcttgctgaatatcaagcactggcaaagccagagcgagcaggacaatattcttcatgttgcccgcgttccattgctggtggcctacgggctggacaggaatgaagaactgacggttggtgcatccaccgctacgatttttgaggacagaacaaaaaatggcctcgaatatgttgaacatagtggcgcagcgatagaatctggcgaaacatcacttgagaagctggaaaatcagatgcgtcatgccggcgctaaacttctgcgtgctgaaaatacatccaccaaatctgttgatcagactaatgaagagcgaatgcaggaaaactcgccgctttatacaatggcgaactccctcgaagatgccctcgataatattctccagataatggcggaatggatcggagagagttgcggtggcaatgtggatgtgcgcactgaactggatgtatctgcccaggtgtttgactcatcctccgcgctggctgttcagtcattgcgtcagggcggtgatatacgtcagattgatgcggttcgggtgttgcaggcgttgaaatttatcgatcaggattcccgtccagaggaagtgatcgatgaattaaaaaatcagagtgtaatgctgatggaaatcaatgatgcaaaccgtgaatga

SEQ ID NO: 492122 - DNA, 1116 bp, Shigella sonnei
atgatgcaaaccgtgaatgaacggctgcgtgatgaatcaattgctcatgcagtctggatatcccgctatagcactggcgtggctgccagaatggtgaaaatactgaatgacagcgatgcggaacttactgctcgcctgctgatagcactggacagcctcgatccaggtagttttaccgttaagcgcctggagtcacttctggcgagcgtcagagaggttaaccgcactgctattaacagcatgtttaccagtctctccggagagctgaacgagctggcaatttatgaggctggttatcagttaagtctgtttgattctatgctacctgattttgttgctgatgttcaccctctggttggtatctctcctgatgcactttatgccgctgcaatggcgcgaccattccagggacgactgctcagtgagtgggcctcagatcttgaggcggatcggctcagacgcataacaaatacagtgcgtcagggttttttgctgggggataccaatgagcagatcgcaagaaaaattcggggacatgtcagtaagggatttcaggatggtgcattgcagatgagccgggctaatgcggccagcattgcaaaaacagcggttggacatcttgctgctactgcccgtgagagttttgccagcgcgaataatgatttgattaagggtaagcaatggttatcaacgcttgataatcgtactacgccacaatgtcgaatcagggatcgcctcaaatatacgctgaataataaacctgtaggtcacagcgtgccttatttgcaggggccgggaaaaattcatttctgctgccgctcaacggaaacgttcattctgaaatcagcgaaggaactgggtattgatgttcgcgatatttccccggctgagcgggccagcatggatggcgtggtggccggagatacaacctacagggaatggtttttgcgtcagccttacaccagacaaaaacagattgtgggggaaagccgagcaaagctgattcgggatggtggtatgtcgccagatgaattttacaccgataaaggcgaatggctgacgctgaagcagctccgtgagcgtgatgcacaggtattcagaaaagcagggatttaa

SEQ ID NO: 492123 - DNA, 765 bp, Shigella sonnei; identical to SEQ ID NO: 24441

SEQ ID NO: 492124 - DNA, 1140 bp, Shigella sonnei
atggctggaaataccctgaccgggttgatcccgactatttataccgccctggatgttgtatcccgtgagcaggtaggttttatccctgcggtagcaaaaaacgcaaaagctgacgccgcagcaaaagatcagacggtaaccgcgccagttgcgcctgaggcgaaaaccgaagatatcgtaccggggccgtcagctccgaataccggtgatcaaaatattggcactgttgatgtaaaaattactaaatccaaaatggcaccggttaaatggaatggtgaagaacaactggctcttggcccttcagggacttacaacaccattctggctgatcagttcaagcaggcttttcgcgcccttgcaaacgaggttgaggctgatcttggtgcgttgtatttcggtgcttcccgcgccgtgggaaccgcagggacaacgccgtttggtgttaaagatgatctttctgatgctgctctggctcgtcaggttctggaggataacggcgcaccgacaaccgatctgcagatggtgcttggctccactgccattgctaatttgcgcggaaaacagtctgtattgtttaaagtgaatgaatccggcactgaacagctactgcgtgagggcgtgttggggcgtctggagggattcaatattcacagttcggcaggtgtgaaacgagcgccaaaggttgctgcaactggttatctcgtgaatggagagaaaaaagaaggcgatgttcttatttccattgatactggttcggggagtatttctgcaggtcagattgttacgttcgctggtgatccgaatcagtatgttgtggcagcagcgaccagcaatctgattactcttgcagcgcccggactgcgtcaggatctggccgatgatactgccatcacagttgttggggcctttactgcaaatatggcgtttgatcgcaacgcgtttctgctggcatcccgtactccggcaatgccggaaggtggcgataatgctgatgatgtaatgaatgttacggacccgatttcagggattacgttccagattgcactgtatcgtcagtatcgccaggtgcgctatgaagttggactggcatggggtgtttcatcagtgaagccggcacatggttgtctgattcttggttaa

SEQ ID NO: 492125 - DNA, 177 bp, Shigella sonnei; identical to SEQ ID NO: 9843

SEQ ID NO: 492126 - DNA, 396 bp, Shigella sonnei
atgatcacttacgtgacctgtgatgacgttgataatgcgtttgggaacgcctggacgagtgagaacgctaaaaataaagctgttttaatggctaatgcctggcttaatggcttcaacctgaaaattaacccatcccgtattccggaagaggtaaaacttgcgggagcatatgcagccagaattgcctcattcggtaagttgtttcagcagaaaaatgattctggcgttgttatcagtaaagccgtgtcggctgacggggtcagtgtatcgaaatcattttctgagttgccagcaaacagcactgcattgcttgaacccgatttacagcttgcgatagcactgctgaaaccgtacggacttagtcgctcacaagtcagggttgtgagggggggataa

SEQ ID NO: 492127 - DNA, 384 bp, Shigella sonnei
atggggcttcgtgaagagattcagtcagaggttgccgctgcttttgatgaggatttagcggacgccgtgagtgatttttctggttcttacgttacgcaccggcactgggatcctgtgacggaaactggcggcgaatccaccgcaatctataccgggcgaggcgtgttgacacgttataagctgggcagaattgatgggattaatattttgcatggtgaccttaaattaaccgctctggtatgcgaggttacggataaaccagctgtcgaccatattattgagatttatgatcctgtatcaaggcagttacaacgatacgaggtaattacagcaagtgtagatccttccgcatcagtttactctatccagttaaggagagcgtaa

SEQ ID NO: 492128 - DNA, 381 bp, Shigella sonnei
atggcaaaggcatgggatatagaaccgtcaatatttgccgggatgattgaggaagatgtagggctgaagattcgctacatcgctatgcagattcttactgctattgatattgctgctccggttgataccggacgtttcagaaataacaacctggtgtcgttacagcatcccgattttggtatatctgataacgtggatccgaacggtacgattgctgttcagcgtgggatcggggttatttcgaaagctgcaaattacggggttatttatatccagaataaccttccttatgcagaggctcttgaaaacggtcattcacaacaagcgccaactggcgtgtatgccaacgcttttcatggtgttttacaggcttacaaatga

SEQ ID NO: 492129 - DNA, 393 bp, Shigella sonnei
atgaagtttactgaaatcagaaatacggttatttccagaatgacggcacagacgattattgatggaaaagacgtattgtatccgaacgggccaacgttcgatccttccggtaagttaatctgggcgcggttaagtaatattcccgggcaggctggagttaatgaaattggcgcggggccggttgtttatcgcacggggataatcattattcagttatttgtccccgcaggttctggttcaaaactcattactgagacagccgataaattgcgggaactgtttgagtttcaggatgacgatcgtctcagttaccaggctgtttcctcaatagccgttggcgaaaagaatggctggttccagcttaatcttcaaattccatatcgcgcgctctag

SEQ ID NO: 492130 - DNA, 963 bp, Shigella sonnei
gtgagttcaggtgcaaaggttatctcggcatttatccgggagacggttgcaggcactacgccagcaagtggtgactggagtttattaaaacgcacaagctggggagtaaaacccacccagaataaaggcgaaaataatgagattggtggctcccggatggctcagggggcgacgcctggcactgtggatgtcggcggtgatgttggtaccaaatttcgctggggtcaacatgatgattttcttgcatcctgtttcggcgcggaatggtcaggcgattctctgacaatggggaatgagcgaataacattttctctggcgacctatgcgtccgatgtcggaattgcctctgtcgtcagaggagcgcaggttggctcatggaaaatgcagatccctaacgacggcgatattacagcgaccgtaacctttgccggactggactgggaatcaaaggccgatgatacgaattttatcaaaggcgaacctgtggatagtgcaggaaagctacgttattcgtttaaggaggtttcagcagtaagcctgaatggtgttgccggaggtaacggtttttgtatcgacagttttgatattcagttcgataacaaactccagacacagcgttgtatcgggactggctcgccttatgcaggagcaaatattccgactacttttacaccgtccggtacggtgacgctttcatggtctaaagccgcgtgggaaatctggagtaaaacactgactggagaaacagttccgttcagcttcacgctttcgaatggagagggggcatacactttcagtttcccgaaggttcaggtgtcaggtgaatggcctgatgggggtaatagcgacattatccaggttcaattgagcattaccgcagcagatgaagcacctacgataaccagaaaaaaaaattccccggctgccgtgatcgcaaaagccagtgctgaggcgattagttga

SEQ ID NO: 492131 - DNA, 450 bp, Shigella sonnei
atgtttattcttaatcagaaaattatcattggtggagaacgctggtttacgccaatgaaggacttaaaacctgtagacgggttaaaactgttggtggcaagcagcgataacgatcagtatcgctcccgtaatgcattaatccgtcgccacattgagaaaatggatgccagtttgcacgtcggaacgaaggagtttgatatttcaaaggtttccgaggtggattctgttgatgatttactcattgataatgccgctcgttatctgctgaaagactggaaaggggttggtgaactggttaatggtgttgaggttgcactggaatatacggcagaacgagggatcgcgctgcttaagcagaatccagagttgtactggcagatccttgcagaagcagccagcatcgcccagggtaaagagcagcagaagcaggatacgataaaaaagccatag

SEQ ID NO: 492132 - DNA, 3234 bp, Shigella sonnei
atggcagagcaaacctcgcgtctcgcaataattattgatagcactggagcgaaaaataatgctgacaatctgacctcctcattagtcaaaatgacgcaggctggggaaactgctgcaaatagcgcagggaaagtgactaaggcaacagaagatgagaagaacgcgctcgcaaaattaaaagcagctattgatccagttggtgccgcaattgatactgtcggtcgacgctattctgaattaaagaaatttttcgataaagggcttattgataaagaagaatatgaatttcttgtccgtaaacttaatgaaaccacagaggaattgagcggggttgcgcaagcgcagagagaagccgagaaggccggaaaacttgctgccgcccagcaggaagcgcaggctcaggcctttcaaagaatgctggacaagatcgaccctctggctgcggcgctaagaaatcttgaacaacagcatgatgaacttaatgctgcgtttgcatccgggaaaataaatggttctcagtttgagaattatagccgaaaaatacaggaaacacggcgagagcttaccggagaggctcaggcagagcgagaagcagcaaaagcgcatgatgaacaggttgttgctttgcaacgtctgattgctcaacttgatcctgtcggaactgcttttaatcgtctggtagaacaacagaaacagctcaatgaagcaaaagctaaggggatgctttctcctgaaatgtatgaggagctttctggaaaacttcgtgctatgcggagtgagcttgaggttactcaatcacaattaagcaaaaccggaatgtcggcaaaacaaacggcttttgctatgcgcatgttgcctgtacaaatgacggatattgttgttgggttgtccactggtcagtcgccatttatggtgttaatgcagcagggcggccagctaaaagatatgttcggtgggattggcccggcgatcaaaggtgtaggttcttatgtgctgggattaattaatccttttaccctggccgcagcagccgttggggtcttaggactggcttactataaaggctctcaggagcaggacgaatttaataaatctcttattcttaccggaaatcagttggggacaaccagcgggcaattgggcgatatagctcaacgtgccgggaatgcggctgattcgacaactggtgctgcggcggcagtattaaatcagcttgtgcgttcgggaaaggtagcgagcagttcgctggagcaagtgacgacagcgatagtaaaaacgagcgaagtaacaggaatatcaaccgaacaactggttaatgacttcaatgaaattgcaaaggatcctgtcagtgccatatcaaaacttaatgatcagtaccattttctgacacttgcgacttataaccagattaaggcgctacaggatgaagggaaccagcaggaggccgcccgcattgcgacagaagaatactcatcctcaatgatccagcgcaccaaccagattaaagaaaatcttggttatcttgagactgcatggaaagctgtcgcagactccgcaaaatgggcatgggattccatgctggatattggccgtgaggcctcccttgatcaaaaaatctcagatgttctccgtcaaattgatgaaatagaaaaaaatacccgacccggagttttcgggttaggtggcattggagatggcggagctcaaaataaaaggctggcacgattaaagcagcaattgggcgtacttcaagcagaaaaaattgctcaggacgtactaaattcatcaataaacgattacaacaagcgacaacaggaaggaattgaactcagacagagagcagatgccttttcaaaacaatatcagacccgggagcagcagagagctagtgaacttgcaaaactggaaaagctaaagaatcagtattcaaaggaagaatataataatcttatcgctcaaataaatgagcgttataaagatccaaagcaaccaaaggcgaaaggttattctgatgatgcagcccaacgaatgattgatcatctgaatcaacagaatgcgttactaagttcacaagctgagttgaccgttaaattaagttcctctgaacaggaactggttaagtggcgtcagcggattgccgacctagagtcacgaccatcatcgaaattaacccaggatcagaaatcgcttctcttacaccgggaagaaataaccacgttgatggagaaaaatgttgcgattgaaaaaaataacaggctaatcaaggaatccgccgaaataacagcatggcgtgattcattgcaggcttcgattgataatcgtcagcaggggtatgatattcagattgctggttatggggttggcgataaaaatcagcaacgccagcaggaattactgcggattgaacatggatataacaatcagcgtctgcaacttgaacgtgactatgcagataaatcccgtggaatgtcagatcatgtttttcaagagaaaatgcaggctctgaatgatgctctggaacgggaaaaagaaattgtcagacagaaaaacgagcagctcgatattcaggcaggagactgggttagtggtgcctcccagggattcaataactggctggatgacactaaggatatcagtgagcagataaaatcaaccacgactcagatgtttgatgggatgaccgatgcgctgggtgattttgtcacgacaggcaaggcaaattttcgttctttcgctacttccgtgatttcggatcttagtcgaatagcattaaaggcttcaattactgggattttcgacagcattagtaacagttcttctggggggattttaggaactatcgggagtgctattagtaaatttattccgaatgcaaagggcggtgtttatgagtctccgtcattgagcacgtattcgaacggtatttatgattccccgcaattttttgcttttgcaaaaggggctggtgtttttggtgaggctggaccggaagccattatgccattaacacgaacttccgatggttctcttggtgtcagagctattaatagtaaaagtggtaatggaggcggagatattacctatgcccctgtataccaaatcactattcaaaatgacggccagaatggagagattggccctcaggcaataaaagcacttatggggatggttgatcagcgggtgcagggcaatctgttaaatatgcgacgtgatgggggaatgttaagtggctaa

SEQ ID NO: 492133 - DNA, 297 bp, Shigella sonnei
atgaaaacagaaaataaaccatcgataaaaactgtaagatttggtgatggttatgagcaacgaagtccaaatggacttaatcattctctgcgcgttttcacctgtgatttcaaagttgaggcgaatgaacgtgattcatttgaaaaatttttagcccggcatgaaggctataaatcttttttttggcgcccgccgggtattaacagaaaaatcagagtggtgtgtcgaacgtggtcagcgacagaacatatcacctataccgatttttcgtgtcagtttgacgaagtggtgatctga

SEQ ID NO: 492134 - DNA, 585 bp, Shigella sonnei
atggcattcagaatgagtgaacaaccacggaccataaaaatttataatctgctggccggaactaatgaatttattggtgaaggtgatgcatatattccgcctcatacaggtctgccagcaaacagtaccgatattgcaccgccagatattccggctggcttcgtggctgttttcaacagtgatgagtcatcgtggcatctcgttgaagatcatcggggtaaaacggtttatgacgtggcttccggcgacgcgttatttatttctgaactcggtccgttaccggaaaatgttacctggttatcgccggaaggggagtttcagaagtggaacggcacagcctgggtgaaggatacggaagcagaaaaactgttccggatccgggaggcggaagaaacaaaaaacaacctgatgcaggtagccagtgagcatattgcgccgcttcaggatgctgcagatctggaaattgcaacggaggaagaaatctcgttgctggaagcatggaaaaagtatcgggtattgctgaaccgtgttgatacgtcaactgcacctgatattgagtggcctacgaaccctgtcagggagtaa

SEQ ID NO: 492135 - DNA, 1233 bp, Shigella sonnei
gtgaaagcagctaatgacaatgcgaatggtcgggtaccttctgcccgtaaggtgaatggtaaggcgctttcagcggatataacactgacgccgaaagatattggtacgcttaactcaacaacaatgtcattcagcggtggtgctggttggttcaaattagcaacggtaaccatgccacaggcgagttctgttgtttcaattacgttgattggtggcgctggatttaacgtggggtcacctcaacaggcaggtatatctgaacttgttttacgtgcaggtaatggtaatccgaaggggattactggtgctttatggcagcgcacattgacagggtttacaaattttgcctgggttaatacatctggtgatacttacgatatttacgttgcaatcggaaattatgcgactggtgtaaatattcaatgggattataccagtaatgccagcgtgacgattcatacgtcaccagcatattctgctaataagccggaagggttaacggacggtacagtttattcactctatacgccatcagagcagttttatccgcctggcgcaccaatcccgtggccatcagataccgttccgtctggctatgccctgatgcaggggcaggcttttgacaaatctgcatacccgaaacttgcagcggcttatccgtcaggcgtgatccctgatatgcgtggctggacgattaagggcaaacctgccagtggtcgggccgtattgtctcaggaacaggacggcattaaatcgcatacccacagcgccagcgcatccagtacggatttggggacgaaaaccacatcgtcgtttgattacggcactaaatccacgaataacactggtgcgcatacccatagtttaagtggcagcacgaatgcagctggtaatcacagccatagagatggccgtcgatttaaccccagtgtttttaaagatacttatcaatatggttatacaagctcaggtcaaaatacctggggtgtacaaggctcagtaggtatgtctacggggtggttagcgaataccagtatagatggtaatcatagccattcactgtccggcacagcagcatctgcaggtgcacacgcgcatactgtcggtattggtgctcatacgcactccgttgcgattggttcacatggacacaccatcaccgttaacgctgctggtaacgcggaaaacaccgtcaaaaacatcgcatttaactatattgtgaggcttgcataa

SEQ ID NO: 492136 - DNA, 258 bp, Shigella sonnei; identical to SEQ ID NO: 14370

SEQ ID NO: 492137 - DNA, 1686 bp, Shigella sonnei
atgagtggcggagacggacgaggtccgggtaattcaggtctgggacacaatggtggtcaggccagtgggaatgtgaacggtacatcaggtaaaggtggcccttcatcaggtggtggtacggatccaaacagcgggccgggctggggtacgacgcatacacctaacggggatattcataactataacccgggggagtttggtaacggcgggagtaaacccggtggtaatggcggtaacagcggcaatcatagcgggagctctggtggcggacagtcttcggccaccgcgatggccttcggtctgcctgccttggccactccgggggctgaaggactggctttatccgtttccggcgatgcgttgtcggccgctgttgctgatgtgctggctgccctgaaaggtccgtttaagtttggtctgtgggggattgcgatttacggagtgctgccttctgagatagcaaaagatgatccgaaaatgatgtcaaaaatcgtgacgtcattgccggcagacacggtaacggagacgccggtcagctccctgccgctggaccaggcgacggtcagcgtcactaaacgtgtggcggatattgtgaaggacgagcggcagcatattgcggttgtcaccggccggccaatgagtgttcctgtggtggatgcgaaaccgacaaaacgtccgggggtattcagtgtgtcgattccgggtctcccgtctctgcaggtgagcgtacctaaaggtgttccggccgcgaaagccccgccaaaaggcattattgctgaaaaaggtgattcacgtccggctggttttacggccggtggtaactcccgtgaagccgttattcgtttcccgaaagagagcggacagaaaccggtctatgtgtcggtgacggatgttcttactccggcacaggtaaaacagcgtctggaggaagaaaagcgtcgccagcaggcatgggacgctgctcacccggaagaggggctgaaaagagagtatgataaagcgaaagctgagctggatgctgaagataaaaatattgcgaccttaaacagtcgcattgcatcgacagagaaggcgatccccggagcaagggctgctgttcaggaagccgataaaaaggtaaaagaggcagaggcaaataaagatgattttgtgacttataacccgcctcatgaatatggctccgggtggcaggatcaggttcgctatcttgataaggatattcagaatcagaatgagaaattaaaagctgcccagacatctttaaacgaaatgaatgaatccttatccagggataaggctgcgctttccggggcgatggagagccggaaacaaaaggagaaaaaagcgaaggatgcagaaaataaattaaatgaggaaaagaaaaaacctcgtaagggaactaaagattacggccatgattattttcctgatcccaagactgaagatattaaggggttgggagagttgaaagagggtaaacctaaaacccctaaacaaggtggtggtggtaagcgggcccgatggtatggtgataaaaagcgtaaaatttatgaatgggattcccagcacggtgagcttgaagggtaccgcgccagtgatggcgaacacctcggggcattcgatccaaaaacgggtaagcaggttaaagggccggatccaaaacgaaacattaaaaaatatctttaa

SEQ ID NO: 492138 - DNA, 420 bp, Shigella sonnei; identical to SEQ ID NO: 14372

SEQ ID NO: 492139 - DNA, 264 bp, Shigella sonnei; identical to SEQ ID NO: 14373

SEQ ID NO: 492140 - DNA, 300 bp, Shigella sonnei; identical to SEQ ID NO: 14374

SEQ ID NO: 492141 - DNA, 378 bp, Shigella sonnei; identical to SEQ ID NO: 14375

SEQ ID NO: 492142 - DNA, 180 bp, Shigella sonnei; identical to SEQ ID NO: 14376

SEQ ID NO: 492143 - DNA, 531 bp, Shigella sonnei; identical to SEQ ID NO: 14377

SEQ ID NO: 492144 - DNA, 732 bp, Shigella sonnei; identical to SEQ ID NO: 75878

SEQ ID NO: 492145 - DNA, 1965 bp, Shigella sonnei; identical to SEQ ID NO: 14368

SEQ ID NO: 492146 - DNA, 129 bp, Shigella sonnei; identical to SEQ ID NO: 14369

SEQ ID NO: 492147 - DNA, 216 bp, Shigella sonnei; identical to SEQ ID NO: 485262

SEQ ID NO: 492148 - DNA, 171 bp, Shigella sonnei
atgtctaaagccccaattggtacaacagcttcaaccggacaaaaatgccctgaaagcggtgtttggaaagtggtaggaacgccttcaactacagcaccaattgccaaaggcaatgtaatgcctccgtataacggaaaagccgtaacttggaaattaacccaatacgcttga

SEQ ID NO: 492149 - DNA, 237 bp, Shigella sonnei; identical to SEQ ID NO: 246057

SEQ ID NO: 492150 - DNA, 690 bp, Shigella sonnei; identical to SEQ ID NO: 29609

SEQ ID NO: 492151 - DNA, 192 bp, Shigella sonnei; identical to SEQ ID NO: 20122

SEQ ID NO: 492152 - DNA, 1644 bp, Shigella sonnei
atggataaaaaattactggctcttttgatcctggcgagtctcagcccggcagaggcgacattaaccgaaattcccgcagggtttgaggttattgctcagggacagcaggagtatatcgaggtttatttttcagggaaaagtctcggtaaatattatgcaatggttaatcttgataccgtaacatttcttgatccagcaagtctatataacaagctggaactggatgtagacgatcagaaaatcgcgcatatagtgaaagaaaaattatcgcagccgctagctcaccacggtgaattggcttgcggttatgtacgtactgactcagggtgtggttttctgaataccgatacgctggaaataatctataatgatgaagaaagttcggcaacgttgtttattaatccgcaatggaattcagctttcgatgcgaagtcattatatttaaatccagacaaaaatactgttaatgcttttatacatcagcaagacatcaatgttctggcacaggatgattaccaatcgttgtctattcagggaaacggtgcgctgggaataacagaaaatagttatattggtgcacactggaatttcaacggttatgatgcagatgatgtcagtgacagtaatgctgacgtcagcgatctctattatcgttatgattttttacgtcgttattatgtgcaggcgggtcgcatggacaaccgcacactatttaatgcacaaggcgggaactttacctttaactttctgccactcggtgcaattgatgggatgcgtatcgggtcgacactgagctatttaaaccaggcgcaaagccagcaaggaaccccagtaatggttctgctttcgcgcaattctcgtgttgacgcttatcgtaatgagcaacttttgggatcgttttatctcaatagtggttcgcaatttattgataccagttcctttccgccaggcagctacagcgtggcattaaaagtctacgaaaataaccaactcacccgcaccgagcttgtgccgtttaccaaaaccggcggtctgactgacggaaatgcgcaatggttcttacaggcaggtaaaactacatcacaggtttctgatgatgaaagttcagcttatcagctaggagtacgcctgccattacatccgcaatatgagctctacgcagggctggcgaatgccgatgatgtgagtgctttcgagttaggtaataactggacggcagatttaggcggggtggggaatcttgcaatcagcgccagcgtgttccgtaacgatgacggcggcaaaggtgatatgcaacaggccaactggagtaatccgggatggccgacgttgggcttttatcggaccaactctgacggcgatgcttgtacaaccgacagcagagagagctataacgccttaagctgttatgaaagtatttccgcgacggtttcacagaattttgtcggctggaatatgatgctgggttatacccgcacacaaaataacactgatgatagtttgcgttgggataaacagcagagctttgaaaataactatcttcgccagacaacagcgcaaagtatctctgaaactgtacaacttagcgcttcccgcgcttttgtgatgcgtgactggattttgagtacgtcagtcggtgtttag

SEQ ID NO: 492153 - DNA, 288 bp, Shigella sonnei; identical to SEQ ID NO: 28764

SEQ ID NO: 492154 - DNA, 585 bp, Shigella sonnei; identical to SEQ ID NO: 14851

SEQ ID NO: 492155 - DNA, 480 bp, Shigella sonnei; identical to SEQ ID NO: 12357

SEQ ID NO: 492156 - DNA, 798 bp, Shigella sonnei; identical to SEQ ID NO: 489788

SEQ ID NO: 492157 - DNA, 276 bp, Shigella sonnei; identical to SEQ ID NO: 487938

SEQ ID NO: 492158 - DNA, 216 bp, Shigella sonnei; identical to SEQ ID NO: 485679

SEQ ID NO: 492159 - DNA, 633 bp, Shigella sonnei
atggcacgcatctgcctttacggggatttgcaacgatttggccgccgcatcgaccttcgtgtgaaaacgggtgccgaagccatccgggcgatggccacacagctccctgcgtttcgtcagaagctgagcgacggctggtatcaggtgcgtattgccgggcaggatgttagcacgtccggattaacggcacagttacatgaggctctgcctgacggcgctgtgattcatattgttcccagagtcgccggggccaagtcaggtggtgtattccagattgtcctgggagcagccgccattgccggatcattctttaccgccggagccacccttgcagcatggggggctgccattggtgccggtggtatgaccggcattctgttttctctcggtgccagtatggtgctcggcggtgtggctcagatgctggcaccgaaagccagaactccccgcacacagacaacggataacggtaagcagaacacctatttctcctcactggataacatggttgcccagggcaatgttatgcctgttctgtatggtgaaatgcgcgtggggtcacgtgtggtatctcaggagatcagcacggcagacgaaggggacggtggtcaggttgtggtgattggtcgctga

SEQ ID NO: 492160 - DNA, 126 bp, Shigella sonnei; identical to SEQ ID NO: 485754

SEQ ID NO: 492161 - DNA, 348 bp, Shigella sonnei; identical to SEQ ID NO: 485869

SEQ ID NO: 492162 - DNA, 579 bp, Shigella sonnei
gtgataaccgcactcatcaccgcgataggtccaggtgcaggtattagcaagcatgatgcgccccggaaaaacagcgccgtccgtttccgtcggcgtggacagtacaaaggaggcactgaccgcgctcagttcgctgcactgctcaatacgccagcggctgatcacctcctgctccggatcggcgtcactgtttccgttgacgaagttcaccgcatccagaaaacgggcgtaaaccttacgcctgaccaccgttccgccgaccagactctgcaggtcttccgccatcccggtgaccatgccgtgcagattagagactttcagcgttggccttgcactggcacctttgccgttcatctcaaatccactcccctgaatgggataggcctgatactgccgactctgccaggtgacagactctcctttctcgttctgctcattgcagaaaaagtagcgatccccgcctacctcggtcaggtcgatttcccagagcaccacgctggccgactgctccgcacgaatgcattcattcagcgtttcctgttgtatgtcctgcatcagatcaccacttcgtcaaactga

SEQ ID NO: 492163 - DNA, 465 bp, Shigella sonnei
atgaacagagtaaccgcgattatctccgctctggttatctgcatcatcgtctgcctgtcatgggctgttaatcattaccgtgataacgccattacctacaaagcccagcgcgacaaaaatgccagagaactgaagctggcgaacgcggcaattactgacatgcagatgcgtcagcgtgatgttgctgcgctcgatgcaaaatacacgaaggagttagctgatgcgaaagctgaaaatgatgctctgcgtgatgatgttgccgctggtcgtcgtcggttgcacatcaaagcagtctgtcagtcagtgcgtgaagccaccaccgcctccggcgtggataatgcagcctccccccgactggcagacaccgctgaacgggattatttcaccctccgggaacgactggtaatgatgcaggcccaacttgaaggtgctcagcaatacataaccgagcagtgtttaaagtaa

SEQ ID NO: 492164 - DNA, 498 bp, Shigella sonnei
atgcctccatcattacgaaaagtcgttgctgctgctattggtggcggagcaattgctatagcatcagtgttaatcactggcccaagtggtaacgatggtctggaaggtgtcagctacataccatacaaagatattgttggtgtatggactgtatgtcacgggcatacaggaaaagacatcatgctcggtaaaacgtataccaaagcagaatgcaaaacactcttgaataaagaccttgccactgtcgccagacaaattaacccgtacatcaaagtcgatataccggaaacaacgcgcggcgctctttactcattcgtttacaacgtgggtgctggcaatttcagaacatcgacgcttcttcgcaaaataaaccagggcgatatcaaaggcgcatgtgatcagctacgtcgctggacatatgctggcggtaagcaatggaaaggtctcatgactcgtcgtgagattgagcgtgaaatctgtttgtggggtcagcaatga

SEQ ID NO: 492165 - DNA, 1053 bp, Shigella sonnei
  misc_feature (1040)..(1049): n is a, c, g, or t
atgacaacaatgaatcctttccttgtgcaaagcacactaccgtatctggctccccattttgatcaaattgccaatcatcactatcgcccggcattcgatgagggaatgcagcaaaagcgggcagaaattgctgccatcgcgcttaacccgcaaacgcctgatttcaacaatactattctggcactggaacaaagcggagaattacttacccgcgttaccagcgtcttttttgcgatgactgcggcgcataccaatgatgaattacagcgtcttgatgaacagttttccgctgaactggcggaactggctaatgatatctatctgaacggtgaattattcgcgcgggtagatgctgtctggcagcgccgtgaatccctggggcttgatagtgaatccatccgcctggtggaggtgattcatcaacgttttgtccttgccggagccaaacttgcgcaagctgataaagcaaaattaaaagtactgaatacagaagctgcgaccctgaccagccagtttaaccagcgattactggcagcaaataaatccggcggtctggttgtgaacgatatcgcgcagctggcaggaatgagtgagcaagagattgcgctggcggcagaggcggctcgcgagaaaggtctggataacaaatggctgattccgctgctgaataccacccaacaaccggcgcttgccgaaatgcgcgatcgtgcgacgcgtgaaaaactgtttattgcgggctggacgcgagcggaaaaaaatgatggcaatgatacccgcgctatcattcaacgtctggtagagattcgcgcacagcaggcgaaactgcttggttttcctcattatgccgcatggaaaatcgccgatcagatggcaaaaacgccagaagcagcactcaactttatgcgggaaattgttccagcggcgcgtcaacgtgcgagcgatgaattagcctccatacaggcggttatcgataagcagcagggcgggtttagcgcgcagccgtgggactgggcattttatgcggaacaggtacggcgggnnnnnnnnnnatga

SEQ ID NO: 492166 - DNA, 936 bp, Shigella sonnei
gtgctgttagtcgcactactgagctgtactatcccctttttcgtcgtgctcgcatcctcaagcgccacggcggatgcaatatcctctgcccgttttgctgctgtctcggcgcgcgttgccgcggattccgccgtacttttgctctgtgctgccgctgccgcactgccagcagcctctgtcgccttcgtggatgccgtcgtggcgctgcccctcgctgctgacgcctgtctggtcgcctcatcttttgaagcagacgccgatgatgccgatgacgccgccgaactggcggacgatgcggcagccgtttttgaggattctgcgctggtttccgacgctttcgcgttcgtttcggatgtcttcgctgcggaagcagacctcgctgctgcgctggcctgttcagtggcttcgccagccttcgttgtggctgttgaagcggatgatgcggcgctttctgccgattttccggcggcggtggcactgactgctgcctcctctgccttaatggacgcctcacgggccgatgatgcagctgctgtctcagagtctgccgcagctgaggcgctctgttccgctgccgtttcagaagacttagcattcgtctcggacgtttttgccgccttcacggaatttcctgccgccgttgccgaggaggctgcactgctggcgcttgtggaggcgttcgtttctgatgattttgccgcctctttggaggccgccgcatctctggctgaagtggcggcttctgacgctttcgttgtcgcagtggatgcagaagtggctgctgatttttgtgacgctgcagcattcgtttctgacgttttcgccgcaccggcactggtggccgccgcgctttttgaggactctgcagcggcagcactttttgatgcttcagtggcctttgttgatgccgttcctgcgctggaagacgcctcctga

SEQ ID NO: 492167 - DNA, 264 bp, Shigella sonnei
gtgtccgttaaactcaggctacctcaggttattcgcttctgggcatgggcggatcaacaaatgatagacggtaatgcagattgtaacgctcgcggcgttacaaaaagtgcaatagatcgcatcacttttatgtctggttttgctgatgcgttaattcaggttggatggctggtcgaaaatgacggagggctttctctacctaactttgaacgtcataacggaaaaagctctaaaaaaaacgggcggttacaaacgagcgagtaa

SEQ ID NO: 492168 - DNA, 480 bp, Shigella sonnei; identical to SEQ ID NO: 12357

SEQ ID NO: 492169 - DNA, 219 bp, Shigella sonnei
atgaatccgatccgtttcttcagccattcgatgttgctgatgcgcatgttcgtgatgctccctggtgtttttttgcggtgtgttgtggtcgtgcagtatatcgcttgcggtcggcgggtgcagggggtatcttccgtgctaattcgtaaaattagaaggaagcgcacttatatgtttctctccttcgtcgagaaacagtgcgctcctgcggagggctga

SEQ ID NO: 492170 - DNA, 315 bp, Shigella sonnei
gtggaggagtttgcgttcctgttctgtgagtcctgcttcgttgtcgagcaggtcaataatctgtctctgtcgtgcggtctgttctccgagcttcctgatgaatccgatccgtttcttcagccattcgatgttgctgatgcgcatgttcgtggtgctccctggtgttttttgctgtgtgttgtggtcgtgcagtatatcgcttgcggtcggtgggtgcagggggtatcttccgtgctaattcgtaaaattagaaggaagcgcacttatatgtttctctccttcgtcgagaaacagtgcgctcctgcggagggctga

SEQ ID NO: 492171 - DNA, 219 bp, Shigella sonnei
atgaatccgatccgtttcttcagccattcgatgttgctgatgcgcatgttcgtggtgctccctggtgtttttttgctgtgtgttgtggtcgtgcagtatatcgcttgcggtcggtgggtgcagggggtatcttccgtgctaattcgtaaaattagaaggaagcgcacttatatgtttctctccttcgtcgagaaacagtgcgctcctgcggagggctga

SEQ ID NO: 492172 - DNA, 210 bp, Shigella sonnei
atggcaaaattaggtgaaaacaccccacatattatcgatgctactgtagattttatggcatcaagccaggcatttcgtgagtatctgaaaaaacttccccctgataacacaataccgccagctcttactgatgagcacgtaccgttatatatacgaaggctggaatactatcgactgctttatcgaccaaagcagacagaatcatattga

SEQ ID NO: 492173 - DNA, 267 bp, Shigella sonnei; identical to SEQ ID NO: 38419

SEQ ID NO: 492174 - DNA, 612 bp, Shigella sonnei
atggataaggcagaaaaaaccgtatccagtgcggaacggtttattgatatggaaggaataaaccgattttcagaacgcttagctatggctatgggaaacatgacaaacgtcgaactggcgaccctttgtggactatctgaagccacagtaagaaattacaggaaggggaaaaacttccctcctttggataaactggccttaatagctaaagcctgtaattgttcactcgaatggttggccacaggcaagaacgaagatgaatgcgggaaaatcgaaaataattgcgattcaggttcgggtattgatcaggcgcttagctctctaagcccccaagagaagcaattaatccttacattcatcaggcgagaaggtactaacaaccttgtcaggctggcagcaatgaatacatctacaatcagccaggatgcggtagaaagcatcattgatgccttgccattacgtcccgtactaaaaaatgcaataaagataggaatggcgggaagtgaagaaacagacaaagagattttgcgcgttattgagaagtacaactcgagcaataacgccacccaggaatcaggggcagtgacagtaaagaaaaatgttgttggttaa

SEQ ID NO: 492175 - DNA, 531 bp, Shigella sonnei; identical to SEQ ID NO: 486644

SEQ ID NO: 492176 - DNA, 336 bp, Shigella sonnei; identical to SEQ ID NO: 485290

SEQ ID NO: 492177 - DNA, 507 bp, Shigella sonnei
atgagtcaggctaaatcgaacaaaatgggcgtcgttcagttaaccatactgacgatggtcaacatgatgggctccggtatcatcatgctgccgacaaagcttgccgaagttgggacaatttcaattatctcctggctggtgacagccgtaggctcaatggcactggcatgggcattcgcaaaatgcggtatgttcagccgtaaatcaggtggtatgggcggttatgccgagtatgctttcggtaaatccggtaactttatggcgaactatacctacggcgtctcactgctgattgctaacgtcgcgattgctatttcggcggttggttacggcaccgaactgctcggcgcgagtttgtcgccagtgcagattggtcttgcgaccatcggggtgctgtggatttgtaccgtggctaactttggtggtgcgcgcattaccgggcaaatcagtagcattaccgtgtggggggtcattattccggtggtaggcctgtgcattatcgggtga

SEQ ID NO: 492178 - DNA, 489 bp, Shigella sonnei
atgggctggcaaaagtgtagcggtattaagcgcagctatttagggatggtgctgggaaatatgctaagtggcaggatttcaggacgttattcaccactgcgcattgcagcagtgactgactttatcattgtactggcactgctgatgctctttttctgcggcggcatgaaaacaacgtcgcttatttttgcttttatttgttgcgcgggattatttgccctttcagcacctctgcaaatattgttactgcaaaacgccaaaggcggagagttattaggtgccgcaggtgggcaaatagcgtttaacctcggtagcgccgtcggcgcatattgcggaggtatgatgctgacgctggggctggcatataattacgtggcgctgcctgccgccctgctttcgtttgctgcgatgtcatcgttgctgctgtatggtcgctataagcgccagcaagcggcggatagtccggtgctggcgaaaccactggggtag

SEQ ID NO: 492179 - DNA, 147 bp, Shigella sonnei
atggtggtttatccccgctggcgcggggaacactctaaacataacctattattaattaatgattttttaagccagtcacaatctaccaactttacagtatcacacaaacaacacatccattatgttaaagagtacttaattcattga

SEQ ID NO: 492180 - DNA, 717 bp, Shigella sonnei
atggtagtgtccgctattgccagtacacctcagtattacgaagcaaaaaatgacaaagtaagaaaacgcctcggtattaaaggcggtttttactgggctgaagcgaaaaaattatccattgccatctcccgtggtgctgttgcgattgacgatgctggctacgatgaagatgactttaaaaaacctgttcgcgtcaatttgcccgttgttggtgacctcccaccagaaggcgtgtttgatacggaattctgcaaccgttacgaaaaaggcggggaagatggcatcacaatggtatttatcgcatcttctccctctgttcaggacaaaccagccagcactgacaataccaacgtcaacggcgaagacatgacagaaattgaggagaacatgctcctgccagtttccggtcaggaactgcccattcgctggcttgctcaacacggcagcgaaaaaccggtaacgcacgtttcacgcgacggactccaggcattacacattgctcgggctgaagaactaccggctgttactgccctggctgtttcccacaaaaccagcctgctcgacccgctggaaattcgcgatctccacaaactggttcgtgacactgacaaagttttccctaatcctggtaattcaagcctgggactgataactgcttttttcgaagcatacctgaacgctgactacaccgatcgaggactgctgacaaaagagtag

SEQ ID NO: 492181 - DNA, 381 bp, Shigella sonnei; identical to SEQ ID NO: 35582

SEQ ID NO: 492182 - DNA, 189 bp, Shigella sonnei; identical to SEQ ID NO: 463227

SEQ ID NO: 492183 - DNA, 561 bp, Shigella sonnei
atgacagagcagaagcgaccggtactgacactgaagcggaaaacggaaggggagacgcctgtccgcagccggaaaaccatcatcaatgtcaccacgccaccaaagtggaaggtgaaaaagcagaagctggccgagaaagcagcccgggaagcagagctggcggcaaaaaaagcgcaggccagacaggcactgtccatttatctgaacctgcccacgctggatgaggccgtgaataccctgaaaccctggtggccgggattatttgacggtgacaccccccggcttctggcctgcggtatccgggacgtgttactggaagacgtggcgcagcggaatatcccgctctcgcataaaaaactgcgcagggcgctgaaggccatcacccgttcagaaagctatctgtgtgccatgaaagccggtgcctgccggtatgacacggaagggtatgtgacggagcatatttctcaggaggaagaagtgtatgcggcagagcgtctggataaaatccgccgccagaaccggataaaggcagaacttcaggccgtgcttgatgagaaataa

SEQ ID NO: 492184 - DNA, 189 bp, Shigella sonnei; identical to SEQ ID NO: 463227

SEQ ID NO: 492185 - DNA, 837 bp, Shigella sonnei
atgctgaccttgcaattccatgacatccttcccggctcatgtatttcaagagtttatcatgaaactgaaaaggaatatcttaaactagaagcaaaaaccgagaaaattatttctgatgcgcagtctactttattaagtaaaattgacacttcttcttataaagatccgcacattttgtttaataccacctgttttgctcgtaacgaatggatcaatataaacaacaactggctcaaagcacgagtaaactcttatggttatgctgtgattgttccaaagaataagatcgtaaatggtctgaaggcagaatctcaaagtattgaaaataattacattaaacttcttttttcagaaagcggtgatttaatttcgctatatgataaaagatatggtaaagaatacattactgaaaatatgcacagtgagatccgtgcataccacgaagatgcaggttttttcgcggcctgggattttgcttcaaattatcgtgatggggaatcatatgttttactcgctgaaaaaatgacaactgtgatcagcgggcctaaaactacgatgacgctgatttatcactacaattcctcttatcttcgtttagcctttaccctgacacaggatagtccacgcgttgatgtccaaacgtttattgattggcacgaacctaatgtttctctcaaagtaaaattcccggtgtcagtacaaacatctcttgcacaatgtcaaattcagttcggtgtaattgacagaccaacgcatagcgatgattcgttcgcttttgccaaagatgaaataccagcacatcactgggtcggtgatgctgccaacttactgatttag

SEQ ID NO: 492186 - DNA, 303 bp, Shigella sonnei; identical to SEQ ID NO: 21213

SEQ ID NO: 492187 - DNA, 597 bp, Shigella sonnei; identical to SEQ ID NO: 488513

SEQ ID NO: 492188 - DNA, 471 bp, Shigella sonnei
atgtggcaacggatggaacaatcccactggatcctcgacggtaaaaaagatgcgccggtcattgtctacgtcttcgccgatccgttctgcccatattgtaaacagttctggcagcaggcgcgcccgtgggtagattctggcaaagtgcaattaagaacattgttggttggggttatcaagccagaaagcccggcgacagcagcggcaattcttgcctccaaagatcccgcaaaaacctggcaacaatatgaagcctctggtggcaagcttaagctaaacgtgcctgcaaacgtaagtacagagcaaatgaaagtgttaagtgacaatgagaaactgatggacgatctgggggcaaatgtcacgccggctatctattacatgagtaaggaaaatacgctgcaacaggccgtggggttgcccgatcagaaaacgcttaatatcattatgggggtaatgactccaacttattga

SEQ ID NO: 492189 - DNA, 492 bp, Shigella sonnei; identical to SEQ ID NO: 476094

SEQ ID NO: 492190 - DNA, 381 bp, Shigella sonnei; identical to SEQ ID NO: 458903

SEQ ID NO: 492191 - DNA, 510 bp, Shigella sonnei
atggctataacctttcaccctaaaaaaaagcagatcttgatatgtgattttaaaggttcggtatctccagaaattaaccaatgccgaccagtgttgattttaagagaagagattgttggcagtcagaagctcgttgttgttgttcctattagcaatactgaacctaatcccctttgcagctttcatcatgagttagatgatgcttcacttagcggccacatgatggggaaaaagcattgggctaaatgtgatctggtatcaacagtgtctgttgaccgtttagatcgaattagaagccgggatccgagaacgggtaaaaattactttcatgtaggagtcatgactgatgatgactttgacgcagtaagagataaagtcatgtacggtatcggatttgatgactttttggatgtaaaaaatgaaggtgttcctgatggggcagcagcttcagtggtaattgctgccgaagtgaacgttgctgaagtagaaaaacaaaaaaaagccatctga

SEQ ID NO: 492192 - DNA, 261 bp, Shigella sonnei; identical to SEQ ID NO: 382478

SEQ ID NO: 492193 - DNA, 432 bp, Shigella sonnei; identical to SEQ ID NO: 382479

SEQ ID NO: 492194 - DNA, 519 bp, Shigella sonnei
atgagcaatcttttacagacgggcgcggagttcgagaaaaagctgaaagagagagccgaatctacagagacaatgctgaacgacgagttcagcaagctcgaaaaatctgtaagcaaggctgtgacatcaaacgagacgaaaatcaaagacgctatagccctgttcacagcttcgacagaggaatcactgaaaaaacaccgggaaggggtgaaagaggcgatgatgcagcacaggaaggacgtgttaaagctggcagggaatacgggcatgatgttactggggatggtcattttcctgtttaccgtgagtggcgggacgctctggtatcttggcgggcggatacaggcgaacctggaagaaatcaggatacaggaagaaacattgcagaaactgaacgcgaagacatggggcgtggagtttgtgcaggacgggagaaggaaatttctggtcatcccgcaggggaaatcggcaacggtgattccctatcaggggaaggactgggtacaactgacggagtga

SEQ ID NO: 492195 - DNA, 342 bp, Shigella sonnei; identical to SEQ ID NO: 466452

SEQ ID NO: 492196 - DNA, 342 bp, Shigella sonnei; identical to SEQ ID NO: 466452

SEQ ID NO: 492197 - DNA, 303 bp, Shigella sonnei; identical to SEQ ID NO: 484410

SEQ ID NO: 492198 - DNA, 303 bp, Shigella sonnei; identical to SEQ ID NO: 21213

SEQ ID NO: 492199 - DNA, 630 bp, Shigella sonnei
atgccgcgtcgcttgatcctctcggccacggagcgggacaccctgcttgcgctgccggaaagccaggatgacctgatccgctactacaccttcaacgactccgacctgtcgctgatccgccagcgacgcggcgacgccaaccgcctcggcttcgccgtgcagctctgcctgctgcgctaccccggttacgcgctgggaaccgacagcgagctgcccgagccggtcatcctgtgggtggcgaagcaagtccaggccgagccggcgagctgggcaaagtacggcgagcgcgacgtgacccgtcgcgagcatgcccaggaactgcgcacctacctgcaactggccccgttcggcctgtccgacttccgcgccctggtgcgcgagctaaccgagctggcccagcagaccgacaaaggcttgctgctggccggtcaggccctggagagcctacggcagaaacgacgcatcctgccggcgctgagcgtgattgaccgggcctgctcggaagccattgcgcgagccaatcggcgggtctaccgcgccctggtcgaaccactcacggactcgcatcgggccaagctggacgagctgttgaaggggtctgacgctcagtggaacgaaaactcacgttaa

SEQ ID NO: 492200 - DNA, 1098 bp, Shigella sonnei
atgaccttaattgaacaccttacccttgttgaagaaacccgctctgatatcaatcgtaaacatgatcttgttgatgtcatgtttcttgtcatcagcgccatcattagtggcgccgagggctggcgggacatagagacctatggcaattcaaaggccgattggctccgtcagtatcgcccctttgccaatggcatcccgcgccgtcacaccattgctcgcattctgcgctgcattgtcatcgataccctgcttgaagcattgctgtgctgggtcaatgaacagcgcactcatcagggaaaacccataattgcctttgatggcaaggtgttacgcggctcctttcggggaaatgccaaggatgctctgcagttggtcacggcctacgataccgaaaatgggctggtgctaagccagaaagcaaccccgaacaagaagggggaaatcgaaaccgtcaaagagatgctggacattcttgaactcaagggggccgttgtcacgcttgatgccctgcattgtcagcgagaaacattgcagaaaatcagcgagaagaaggctcatgtggtggtacaggtaaagaagaatcagccaaagttgtaccaagccgttcagtcacaattccaggcactgtttgacgctcagaaagagaagattgtcgtcgagcacaaagagagtgggcatggtcgtcaagaagaacgctatgtgtttcaattaaaagcaaaattaccgccagagttagcagagaaatggccgacaatccgcagcatcattgccgttgagcgccaccgtagtgcctacgggaaaggaacggtagatacctcctactatgtcagctcgttatcccccaagcacaagttgctcgggcactatatacggcagcactggcggatagagaacagccagcattacattcttgatgtggtgttcaacgaggatgcatcaaggattgcgatggaggatgcggtcgagaatatggcgctattccgacggtttgttctgaacatcgtaaaacagagtgattgcggcgcgccgagccagagaaacaagctaaaaaaagcaagttgggatgacaattatcgggcacagctattctttggttaa

SEQ ID NO: 492201 - DNA, 348 bp, Shigella sonnei
gtgtattacttctgtagcagacacggcaaaatcgttgcattacaggtgcatctgctggggcgtctgtttatcgatgcatcagatttaatgtctgacagttacttttctgtatcacccacactctctgctttttcattgctactgtcatatttatgtctgttgcgcggttttatctgtgtatataaaatacatctgtattcattgttttctaaaaatttgcgtatgttgataaaaaatccgatttcttatttccatattggcacgtttttattttcaggaaaaaaacgtcatcttctggaatactgcagggcgggagcacactttgttgaacttttaaccaaagaatag

SEQ ID NO: 492202 - DNA, 1371 bp, Shigella sonnei; identical to SEQ ID NO: 83601

SEQ ID NO: 492203 - DNA, 1137 bp, Shigella sonnei; identical to SEQ ID NO: 83602

SEQ ID NO: 492204 - DNA, 228 bp, Shigella sonnei; identical to SEQ ID NO: 6111

SEQ ID NO: 492205 - DNA, 543 bp, Shigella sonnei; identical to SEQ ID NO: 84324

SEQ ID NO: 492206 - DNA, 861 bp, Shigella sonnei; identical to SEQ ID NO: 6162

SEQ ID NO: 492207 - DNA, 852 bp, Shigella sonnei
atggataaacttaaaattaagtttgattcattagcctctcacgatattacctttgttggtattgtacagaccgctaaagcgtccggaatggaacgtttcccgctgccgtatgtgctgaccaactgccataactcactctgcgccgtcggcggcaccattaacggtgatgaccatgtttttggtttatcggcagctcagcgttatggcggtatttttgtgcctccgcatattgcggtcatccatcaatatatgcgtgagatgatggcaggcgggggcaaaatgatcctcgggtcagacagccacacccgttacggtgcattagggacaatggcagtcggtgagggtggcggtgagttggtaaaacagctgcttaatgacacctgggatatcgactatccgggcgtggttgcggtgcatctgaccggaaaacctgcgccgtatgtggggccacaggatgtggcgctggctatcattggcgcggtgttcaaaaacggttacgtcaaaaacaaagtcatggagttcgttggaccgggcgttagcgcgctctctaccgatttccgtaacagcgttgacgtgatgaccacggaaaccacctgtttaagctccgtctggcaaactgatgaagaagtgcataactggctggcgctgcacggtcgcggccaggattactgccagcttaaccctcaaccgatggcgtactacgatggctgcatcagcgttgatttaagcgccatcaaaccaatgattgcgctgccgttccacccgagcaacgtgtatgaaatcgacacactgaaccagaacctgaccgacattctgcgtgagattgaaattgagtccgatgtaaccaggtga

SEQ ID NO: 492208 - DNA, 435 bp, Shigella sonnei
atgcgcgatctgttgaaggtggttctaagcctcgtacttgcgatggcatcggggcaggcacttgctgacctgccaattgttttagtggatgaagctcgtcttccctatgactactccccatccaactacgacatttctccaagcaactacgacaactccataagcaattacgacaatagtcgcaacggaaatcgtaggcttatatatagcgcaaatgggtctcgcactttcgccggctactacgtcattgccaacaatgggacaacgaacttcttttccacatctggcaaaaggatgttctacaccccaaaaggggggcgcggcgtctatggcggcaaagatgggagcttctgcggggcattggtcgtcataaatggccaattttcgcttgccctgacagataacggcctgaagatcatgtatctaagcaactag

SEQ ID NO: 492209 - DNA, 225 bp, Shigella sonnei; identical to SEQ ID NO: 133446

SEQ ID NO: 492210 - DNA, 225 bp, Shigella sonnei; identical to SEQ ID NO: 133446

SEQ ID NO: 492211 - DNA, 438 bp, Shigella sonnei; identical to SEQ ID NO: 30755

SEQ ID NO: 492212 - DNA, 546 bp, Shigella sonnei; identical to SEQ ID NO: 30756

SEQ ID NO: 492213 - DNA, 204 bp, Shigella sonnei; identical to SEQ ID NO: 30757

SEQ ID NO: 492214 - DNA, 1077 bp, Shigella sonnei; identical to SEQ ID NO: 30758

SEQ ID NO: 492215 - DNA, 270 bp, Shigella sonnei; identical to SEQ ID NO: 30759

SEQ ID NO: 492216 - DNA, 759 bp, Shigella sonnei
atgaagaaacgcattatatcggcggtgctcgcttcgctctcggttatttccgtcgctcaggcggggatacctgttgccattgatgccaatccggaatgggcggttgaagccggacgatggacagaacgtctgaagcaatgggcagaaacggtgaaacattacgaaaatcagataaatgcgtacaaacaggagctgctgtcaaaaacgggtatccgtgatgtgcagggactggtgcagtccgcacagtcagtgagtcaggaactgatgcagatttatgatcaggggaatgcttttattgacgattacattaaaaatcctgaaagtgcgttatcggaacaggccaaatcgttattgtcagattacagggtaacggatacctgccagaacctgggatattctggtgaccaggtacggggatgtgaagcgacgttcctttctcaactggcaagcgtggaatacggtaacaagctggagagcaagcttcgtcaggacaatcagacaatgaaagaccttatcgagcaggttaaaaatgcgaaggatacgaaagccacgcaggatgcaacaaacgccgttgcacttgaacaactgaagtttgagaagctcaaatttcagtatcaaatgtacatcgataaacaaaaacaactgtctgaatataaaaaggaaatggcgaaagcttcttttcgtcatgaacaaattaatgcaaaactaattgattacagagaagcattttcaacacaagactttgatttgatcaaataa

SEQ ID NO: 492217 - DNA, 276 bp, Shigella sonnei; identical to SEQ ID NO: 30761

SEQ ID NO: 492218 - DNA, 732 bp, Shigella sonnei; identical to SEQ ID NO: 30762

SEQ ID NO: 492219 - DNA, 915 bp, Shigella sonnei
atgagcgccgcgcttcaatacttcgaagaaaatttaccccaccgtccctatcacacggatgatctcgctttcggccttcgtatctccggcaaagggcgcgcgcttcttgcacggtatatccagcagaaccagcctcatgcacagttctggctggtttttgacgttgaccgcgagggggctgcgattgactggagcgaccggaacgctcccgcgccgaacatcaccgttaaaaatcctgtgaacggacacgctcacctgctctacgcactcaacatcgccgtgagaaccgcgcctgatgcctcggttaaggcgctgaaatatgccgcagcggttgaacgttcgctgtgtgagaaactttgtgcggatgtgaactacagcggcctgatttgcaaaaatccgttccacctggaatggctggtgatggagtggcgcgaggaagcctataccctcgatgaactggctgattatctcgatttgagcgcctcagagcgtcgtagcatcgataaacattacgggatggggcgaaactgccacctgttcgaaatgacgcgcaaatgggcttacagggcgattcgtcagggctggccagcgttctcacagtggcttgaagcggtgatccagcgtgtcgaaatgtacaatgcatcgcttcccgttccgctttcactggctgaatgtcgggctattggcaagagcattgcgaaatacacgcacaggaacttcacgccggaaactttcgcacagtatgtggctgatacgcacacgccagaaattcaggctgcacgcggtcgcaagggcggttctaagtctaagcgcagcacagtagctacatctgcacgcacgctgaaaccgtgggaggcattagggatcagtcgcgcctggtattaccaactgaaaaaacgaggtctcgtagagtag

SEQ ID NO: 492220 - DNA, 936 bp, Shigella sonnei; identical to SEQ ID NO: 490132

SEQ ID NO: 492221 - DNA, 1146 bp, Shigella sonnei; identical to SEQ ID NO: 483149

SEQ ID NO: 492222 - DNA, 225 bp, Shigella sonnei; identical to SEQ ID NO: 133446

SEQ ID NO: 492223 - DNA, 225 bp, Shigella sonnei; identical to SEQ ID NO: 133446

SEQ ID NO: 492224 - DNA, 498 bp, Shigella sonnei; identical to SEQ ID NO: 15298

SEQ ID NO: 492225 - DNA, 225 bp, Shigella sonnei; identical to SEQ ID NO: 133446

SEQ ID NO: 492226 - DNA, 630 bp, Shigella sonnei; identical to SEQ ID NO: 490110

SEQ ID NO: 492227 - DNA, 225 bp, Shigella sonnei; identical to SEQ ID NO: 133446

SEQ ID NO: 492228 - DNA, 225 bp, Shigella sonnei; identical to SEQ ID NO: 133446

SEQ ID NO: 492229 - DNA, 504 bp, Shigella sonnei
atgccgggcaacagcacgcattatgggcgttggcctcaacacgattttacgtcacttaaaaaactcaggccgcagtcggtaacctcgcgcatacagccgggcagtgacgtcatcgtctgcgcggaaatggacgaacagtggggctatgtcggggctaaatcgcgccagcgctggctgttttacgcgtatgacagtctccggaagacggttgttgcgcacgtattcggtgaacgcactatggcgacgctggggcgtcttatgagcctgctgtcaccctttgacgtggtgatatggatgacggatggctggccgctgtatgaatcccgcctgaagggaaagctgcacgtaatcagcaagcgatatacgcagcgaattgagcggcataacctgaatttgaggcagcacctggcacggctgggacggaagtcgctgtcgttctcaaaatcggtggagctgcatgacaaagtcatcgggcattatctgaacataaaacactatcaataa

SEQ ID NO: 492230 - DNA, 420 bp, Shigella sonnei
atgaattacgaattactgaccactgaaaatgccccggtaaaaatgtggaccaaaggcgtgccggtagaagccgatgcgcgtcagcaacttattaatacggcgaagatgccgtttattttcaaacatattgcggtaatgcctgatgtacacctgggtaaaggttccaccattggtagcgtgatcccgaccaaaggggcgattattccggcggcggtgggcgtggatattggctgtggaatgaacgcgctgcgtaccgcgttaacggcggcagacctgcctgaaaacctggcggagctgcgtcaagcgattgaaacggccgtaccaccgggcgttgtaaacgtgataaaggcgcatgggaaaacccgccttttaacgtcgatgcgaaatgggctgagctggaggccggttatcagtggttaa

SEQ ID NO: 492231 - DNA, 327 bp, Shigella sonnei; identical to SEQ ID NO: 490100

SEQ ID NO: 492232 - DNA, 642 bp, Shigella sonnei; identical to SEQ ID NO: 489892

SEQ ID NO: 492233 - DNA, 198 bp, Shigella sonnei
atgttgggtggagcggacaatccaaatggcgaattaccgtcttatatcactggcgctgacactgtttcactgttgaagccgccgatagtcaccgcccagtgcagtgcctcacgatcacagcagtccagcgcgaacgtgacacgcagtctctctccgttatcacagcagaactcgaacccgtcagagcaccatcgctga

SEQ ID NO: 492234 - DNA, 381 bp, Shigella sonnei; identical to SEQ ID NO: 458903

SEQ ID NO: 492235 - DNA, 225 bp, Shigella sonnei; identical to SEQ ID NO: 133446

SEQ ID NO: 492236 - DNA, 411 bp, Shigella sonnei
atggcaattaacaatacaggctcgcgacgattactcgtcacgctaacagccctttttgcagcgctttgcgggctgtatctactcattggcggaggctggctggtcgcgattggcggctcctggtactaccctatcgctggccttgtgatgctcggcgtcgcctggatgctgtggtgcagtaaacgcgccgcgctttggctatacgcagccctgctgctcggcaccatgatttggggcgtctgggaagttggtttcgacttctgggcgctgactccgcgcagcgatattctggtcttcttcggcatctggctgatcctgccgtttgtctggcgtcgcctggtcattcctgccagcggcgcagttgccgcactggtggtggcactgctgattagcggtagtatcctgacctag

SEQ ID NO: 492237 - DNA, 333 bp, Shigella sonnei; identical to SEQ ID NO: 475379

SEQ ID NO: 492238 - DNA, 333 bp, Shigella sonnei
atgtgtctggcgggggaaggctgcatcgttctctggtgtatccggtgtgcgccagaacacaccatcgatggccagcagggtcaggccgcaccagtgcggatgtggcgtggcgttatgccagagctgcgctgttttcgtgaacacgcggcggacagcctcacttcccaggcgctggcgggcctgaataacggcactgggggcaacgaaggggcgattgcccggcagcatgatgtccaggcgattcacaatctggtgaagaggttctttacgctcaagcgccatgccaacaatacaccagaccatcatttcgaggggaagacggcgcttgcgtag

SEQ ID NO: 492239 - DNA, 333 bp, Shigella sonnei; identical to SEQ ID NO: 475379

SEQ ID NO: 492240 - DNA, 267 bp, Shigella sonnei; identical to SEQ ID NO: 489886

SEQ ID NO: 492241 - DNA, 333 bp, Shigella sonnei; identical to SEQ ID NO: 475379

SEQ ID NO: 492242 - DNA, 228 bp, Shigella sonnei
ttgatccacgtcgcagttgcttctcgcatgactgcgtcggtgggcagtatccagaactttgccagcttcatctgcgcctcttttgcgccgatcattactggttttattgttgataccacccactcattccgtctggcactaatcatctgcggttgcgtcaccgcagcgggggcactggcgtacatcttcctggttcgtcagccgatcaacgacccacgtaaagattaa

SEQ ID NO: 492243 - DNA, 333 bp, Shigella sonnei; identical to SEQ ID NO: 475379

SEQ ID NO: 492244 - DNA, 153 bp, Shigella sonnei
atgaaagcattgacttatcacggcccacatcacgttcaggtagaaaatgttcccgatccgggcattgaacaggctgatgatattattctgcgtattacggcaacggcgatctgtggctctgacctccatctttatcgaggcaaaataccctag

SEQ ID NO: 492245 - DNA, 333 bp, Shigella sonnei; identical to SEQ ID NO: 475379

SEQ ID NO: 492246 - DNA, 333 bp, Shigella sonnei; identical to SEQ ID NO: 475379

SEQ ID NO: 492247 - DNA, 303 bp, Shigella sonnei
atgccgggcaaaatgcagttcggttccggctggtggtttaacgatcagaaagacggtatggaacgtcagatgacccaactggcgcagctcggtctgctgagccgctttgtcggtatgctgactgacagccgtagcttcctgtcatacacccgtcacgaatacttccgccgcattctgtgccagatgatcggtcgctgggtggaagcgggcgaagcaccggcggacatcaacctgctgggcgagatggtgaaaaatatttgctttaacaatgcgcgtgactacttcgccattgaactgaactaa

SEQ ID NO: 492248 - DNA, 333 bp, Shigella sonnei
atgtgtctggcgggggaaggctgcatcgttctctggtgtatccggtgtgcgccagaacacaccatcgatggccagcagggtcaggccgcaccagtgcggatgcggcgtggcgttatgccagagctgtgctgttttcgtgaacacgcggcggacagcctcacttcccaggcgctggcgggcctgaataacggcactgggggcaacgaaggggcgattgcccggcagcatgatgtccaggcgattcacaatctggtgaagaggttctttacgctcaagcgccatgccaacaatacaccagaccatcatttcgaggggaagacggcgcttgcgtag

SEQ ID NO: 492249 - DNA, 333 bp, Shigella sonnei; identical to SEQ ID NO: 492238

SEQ ID NO: 492250 - DNA, 333 bp, Shigella sonnei; identical to SEQ ID NO: 475379

SEQ ID NO: 492251 - DNA, 333 bp, Shigella sonnei; identical to SEQ ID NO: 475379

SEQ ID NO: 492252 - DNA, 333 bp, Shigella sonnei; identical to SEQ ID NO: 475379

SEQ ID NO: 492253 - DNA, 333 bp, Shigella sonnei; identical to SEQ ID NO: 475379

SEQ ID NO: 492254 - DNA, 333 bp, Shigella sonnei; identical to SEQ ID NO: 475379

SEQ ID NO: 492255 - DNA, 126 bp, Shigella sonnei
atgtttaccttctataaaccgttctttgtttcgattgaaattgtttgtcaaacgctggcgctatgttccgtacaaatcagccagcagctctgttgtcatgacaggaagatggttatgcgtaagtga

SEQ ID NO: 492256 - DNA, 333 bp, Shigella sonnei; identical to SEQ ID NO: 475379

SEQ ID NO: 492257 - DNA, 333 bp, Shigella sonnei
atgtgtctggcgggggaaggctgcatcgttctctggtgtatccggtgtgcgccagaacacaccatcgatggccagcagggtcaggccgcaccagtgcggatgcggcgtggcgttatgccagagctgtgctgttttcgtgaacacgcggcggacagcctcacttcccaggcgctggcgggcctgaataacggcactgggggcaacgaaggggcgattgtccggcagcatgatgtccaggcgattcacaatctggtgaagaggttctttacgctcaagcgccatgccaacaatacaccagaccatcatttcgaggggaagacggcgcttgcgtag

SEQ ID NO: 492258 - DNA, 381 bp, Shigella sonnei; identical to SEQ ID NO: 458903

SEQ ID NO: 492259 - DNA, 333 bp, Shigella sonnei; identical to SEQ ID NO: 475379

SEQ ID NO: 492260 - DNA, 333 bp, Shigella sonnei; identical to SEQ ID NO: 475379

SEQ ID NO: 492261 - DNA, 333 bp, Shigella sonnei; identical to SEQ ID NO: 475379

SEQ ID NO: 492262 - DNA, 267 bp, Shigella sonnei; identical to SEQ ID NO: 11114

SEQ ID NO: 492263 - DNA, 441 bp, Shigella sonnei; identical to SEQ ID NO: 478325

SEQ ID NO: 492264 - DNA, 441 bp, Shigella sonnei; identical to SEQ ID NO: 478325

SEQ ID NO: 492265 - DNA, 267 bp, Shigella sonnei; identical to SEQ ID NO: 11114

SEQ ID NO: 492266 - DNA, 885 bp, Shigella sonnei
ttgctggcgctgattccttttttagtttttccccttctggcacacaatctgagcagttataacgctgactattctttgtatgtcgtcgactactgtccggacaaccatactgcgacctggggaatcaactatacaaaaatattggtttgtctgtgggcatttttactgttctttattatcatgcgtacacgattagccagcgaactatggccgttaatagcattattatgtctggcatcgctatgctgcaacttacttctactgactctggatgagtataattacaccatctggtatatcagtcgcgggattgaagtttccagtaaactgtttgttgtgtcttttctgatttataacatttttcagaaactgcaactctccagcaaactggcagttcatgatgtgctgaccaatatttataatcggcgctactttttcaacagcgtagagtcattattgtcgagacctgttgttaaggacttctgtgtcatgctggttgatattaatcagttcaaacgcatcaatgcccaatggggacatcgtgtgggtgataaagtgctggtttcaattgtcgatattatccagcaaagcatccgccccgatgatattttagcgcgactggagggtgaggtgtttggcttgctatttaccgaactcaatagtgcccaggcaaaaatcattgcggaacgtatgcgtaaaaatgtcgaactcctgaccggctttagtaacagatatgatgttcctgaacaaatgaccatcagtattggcacggttttttcaacgggtgacacgcgtaatatctcgcttgtcatgacggaagcagataaagccttacgcgaagcgaaaagcgaggggggcaacaaagtgattattcatcatatttaa

SEQ ID NO: 492267 - DNA, 441 bp, Shigella sonnei; identical to SEQ ID NO: 478325

SEQ ID NO: 492268 - DNA, 441 bp, Shigella sonnei; identical to SEQ ID NO: 478283

SEQ ID NO: 492269 - DNA, 441 bp, Shigella sonnei; identical to SEQ ID NO: 478283

SEQ ID NO: 492270 - DNA, 441 bp, Shigella sonnei; identical to SEQ ID NO: 478325

SEQ ID NO: 492271 - DNA, 441 bp, Shigella sonnei; identical to SEQ ID NO: 478325

SEQ ID NO: 492272 - DNA, 441 bp, Shigella sonnei; identical to SEQ ID NO: 478283

SEQ ID NO: 492273 - DNA, 381 bp, Shigella sonnei
atgctgggagcggtggaacgccgcttcggcaacgatcttccgtcgtctccagtggagtggctgacggataatggttcatgctaccgggctaatgaaacacgccagttcgcccggatgttgggacttgaaccgaagaacacggcggtgcggagtccggagagtaacggcatagcagagagcttcgtgaaaacgataaagcgtgactacatcagtgtcatgcccaaaccagacgggttaacggcagcaaagaaccttgcagaggcgttcgagcattataacgaatggcatccgcatagtgcactgggttatcgctcgccacgggaatatctacggcagcaagccagtaatgggttaagtgataacaggtgtctggaaatatag

SEQ ID NO: 492274 - DNA, 408 bp, Shigella sonnei
atgaacgatcaaaaccatcacgcaccaaaagacattgagcggattaaattcataaatgacatagacggcggagacaaacccggcgaggcatggtgtgattcgcttgctgatatcgtgtctcattcagtggctgagcttacccgtaatggcatggagcagtctgaagccttcagaatcgccaagcaggttgttgctgcaatcgccttctatgctggtgggcgaagtctttaccttccaacaggcagatcactttttgtagcattgcgcgaatacgagatttaccacaggtgggataacggcgaaaaattacaggaattacgcaaagagtacgcaatatcagaaacccatatttacgacatcatccggcgactaagaaagaagcacgccaataaaatcacgcaagactaa

SEQ ID NO: 492275 - DNA, 273 bp, Shigella sonnei
atggtacatgaccgcatagtggaagaactggagtcgaaaggcttttaccggagagcggcggcgcgatgggccgaagttatgatgctggtggagacagacagggaacgcgaacgggtggcaatgcgcagggcagagtgttacgggaaggcacagaggccaccggagccgccagaggagaactacgcagacctgaggaaagcagtaaaccgcacttacgcagaaatggggataggagggagatgtaaaaaaatctggcgtagctaccagaagtaa

SEQ ID NO: 492276 - DNA, 411 bp, Shigella sonnei
atgacagcacagatagcagcttacgggcggctggtagacgacccgcaggtaaaacagaccagcaagggaacaccgatgacgctggcgcgtatgacggtatcgctgccatgcagtcaggcgcaggacgggcaggcgacgttatggctgtcggtcctggcatttggcaaacaagccgaccaactggcaggacatgagaaaggcaacgtaatcagtgtatccggtgtgatgcaggtaagccagtggaccggacagaacggggaaacgcggcagggttatcaggtcattgcagacagcgtaatcagtgcgaaaacggcgcgaccaggtggcaacagacgcaggaccacaggcacacagggtaatcagccaccagcgggaggcgatgacccttatggtgatgatattccgttctga

SEQ ID NO: 492277 - DNA, 1401 bp, Shigella sonnei
atgaaaagcgcaccgaacttaaaaaaacagccttacgacaaaatgaccgaggtcattatttttgcgggtggtgatgcctgggcacacgcgaagcagtggcaggagcaggaggggcgacttgctggcgataatgtgccacctgtatggcttggggagcagcaacttgcagaactgacagacatgagaatcatcgacgagggccgctattgcgtccggctgtacaaagcaggccatatcagaccatcaaatattaatgccattgcgcacaagctggcagcggcaggtgtacaggatgcgaattattaccccgatgggatgcacagccagaagcgggagaactggcgcgaatatctggaacgggagcgcggtaataagccagtggaagaaaaaagccaccagcgaaacaccacgctaccgatgagcgttggatctgccggatatgacacgcaactggattacgtggttaaggggattattccggcggtatcgctgtgcagcatatacggggcgagcggttcctataaatcgttccttgcgggttcgtgggcgtgtcacgtttccacgggccgccagtggggaggccgcagggttgcgcatggtgcggttctctatgtggttggtgaaggcggtatcggcgttccgcgtcgtgtaaaagcctgggaggttgtgcacggtgagcaggtgaaaaatctgtatctggtaaaccgtcccatctttcctgccgcctcgcttgatgttgatgaaatggttatcgctgcccgccaggtggaacgggaaacgggtaaaccggttcgaatgattattctggatacgctggcgcgttgctttggcggcaatgatgaaaatgattcccgtgatatgggggcgtttatccgtgggtgtgacgaactgaaacggcgcacaggggcaacggtgctggtggttcatcattccggcaaggatgaaacaaagggggcgcgtggttccagtgcattccgtgcatcactggacgccgaataccggatacgcagggaggacgcaggaagcgaatcgctggttatctcatgtaccaaaatgaaggacgcggaggaactcaaagaagctgcctacgatttgcgggtagttgagctttttaacgacgctgacggggagttaatcacgtctctggtggtggtggatgagccgcgccatcccgttgaaccggagcgcatcgaggaggcagggaacaagacggaaaaccataccgcgctatgggggtgcatccgttcgcgcacacagaacggcgacaggtgcacgatcccgctgttacgtgatgacatgaaaaaactggggtacgaaatgaaaaacttccggcgctggctgtacaagctggaaaaagacagggttatccgtatcgatggggatgatgtaacgccgctataa

SEQ ID NO: 492278 - DNA, 300 bp, Shigella sonnei
atgaacatgaaaaaaactggcttaactgccagcggcaaacctcgccctgaatttaagcgcggtgatatttaccgcgaccagtacggtggcacggtaatgattaagggcgtggcggggcggtgcgtcaactaccgccgtaaaggctacgaatatgattgcgtgatgcctgtttatcagttttcccgtgatttttctctggtgcaggcggtaccgcgtaacgtgcccaccagcaacgtaaaggcactggcaaaaatacagaagatgaaaaagatgattaacgcattcaggggcaagaaatga

SEQ ID NO: 492279 - DNA, 315 bp, Shigella sonnei
atgcgtgatgtgtgtaacaccagaatacttgaacaactggttacaaccataaaagcagctgacgcacgggaagcgagagcgatgtttgatgatgctgacttctacgcccgcaaattgcttgatgggctggctatcacagggcgcttactttctggcatgagtgacagcattgatcctgacatggacgaactacgcagccttggcgattccatcgctgttacggctgagctgatatctgcattcagtgaggttgtggaggtgtacaactggcgttgccgtaacggagatatcagggctgattatcgccattcgtga

SEQ ID NO: 492280 - DNA, 465 bp, Shigella sonnei
atgcttaaaaacatgttgctcgcctcttctttcgggctgtatgatgccggagtcgtccacatggcgaccgggtttgacagcctgaatactacagcggacagccgcttacattccgatatgcggtttttttgtgtccgtaagcctacccatacccgcattatggcggggcgtaacgggggagcctttgcgctcgctggttcctgtagtgccagtctgtcaaccctgttacgtctcgccaccatgtttgacagcgtagtagcgagactccttaatttcactacaggagcctttcacatggctgtatccgcacgcccttactttgtctggcgctttatgcagtgccaccacagcaacatcgatgtattcaccgttaccgctgccactgagcacgaagcacgcgcccagctgccgcacgcacatcttgtttttgtcgcccgtatccgtcagggggtacgtcatgcgtga

SEQ ID NO: 492281 - DNA, 546 bp, Shigella sonnei
atgtgtattgtatacagtcgtgtgcatattgtcacaggcaacaggcatccgcgccaaatacccgccagagaaaatcagttgatcgccagtatcaaaaatggctatgattcccgcacaccttataaaacgggtgtcgggattaggaccccgctgacaatcgaggcgatacagacgccgaacgcgtctttttttgtatcggcgcacacgcacaccttatcaatggtgggctgtatggggctgacttcggtcaggctggttcccttgattgccagtagtcctaaccctgtacagtccaccgccagcgagtttaggacctccggcggtggttacattccatcaatcaaggaggctgccatcatggctactacccctgccctcgtacattctcagacagcctttatctggcgttttatcacctttggcacgtcagaacgtcaaatcatccacgtaaccgcctggacggaacgcgaagcgcgtaaccgttgcccgtccggttttgtcgctgtattcgctgcccgtatccgtcagggggtgagtcatgcttaa

SEQ ID NO: 492282 - DNA, 204 bp, Shigella sonnei
atgaacatcacagaaaagaaaatccttacaaaacgagaagtcgcaaatcttcttcgccttagtacaacaagcattgacacaatggttaaggctggtgagtttattcctggctttaagcgtggattgcgtcgcgttggctggtttgaggatgaggtgaaatcatggcttgagaagaaagtagaggagcgttatcagcaggaataa

SEQ ID NO: 492283 - DNA, 897 bp, Shigella sonnei
atgacaaacaaaaagataaaccttcctgaaagggattattacccgttagacaaggcagccagaaggcttgggtgtgacgttgatgatttgattcacttcatcgctacagggaagatgtgtttttggtaccgtcatcacatagacgaggttttgacattacataattataaaaacgcatttaatagtgtatcagcatcagattattattatgaaaatgatgaaggcgtattcatcagagcaaccgacatattaaaattacttgaatcctcatcttttggtgaaaaaataataaccgatgaagaacagctaacggaaaagatattttttaattgctgtggcggttattctgaaacagatatttttatatacaactatcatggatataaacaaagaaaaatcagaacacagttaccacataaaatcagggttgtggcttcaggacttttacaggtatttaatacaagcattgatatagagaatctatcaaatgacgtcacagattgttatgtgcgacgcatcgttatagcagataaaggaaaagaaccaaagataacaataaatttatatggcaaaacaataaatattagtgacattttcatctcaaaagaagagataaaaatagtaatgaacggcggcagacaaccaggagatatggtaaaggatttttcagataaacacgccttgtcgcattcgcagagtaagaaaacaaccaatcttcaggccagagttatcaaaagactaatcaccgccatagccggagaagaagaggcagcaaacccaagaagagcgcttgagaacggtcacagcaagttaagccgcgcactaaccaaagcaggggttgaaattggcgcaaccccttcatctgttggtaagtggcttgcagacgttgacgactga

SEQ ID NO: 492284 - DNA, 1266 bp, Shigella sonnei
gtgaccaaaaaaactaagtccttatcaccagcagcgataaaaagcctccagcgaaaagccagcaacgaaaaaaaggaccttttcatcactgacggcgaagggctggaactggtgattaagcacaaaagcgcctcttgcttgtggcgttaccgctactacaagccacacacaaaaaaacgggccatgttaagcattggcgcatatccagaaataagcattgcgggcgcgcgaaagataaaagacgaatacagggcgcttctttctggtggcattgacccaaaagagcacagagagaaacagcgccttagtgaagtgatgaagagagagaacaccttcaggcatgtagctacgctttggtttgaacttaaaaaagggcaaggactcgcagaaggcacactacgcgatacatggcgctcgctggagcgtaatgtattcccgtcagtcggcaacagaccagtagcagacctgatcgcaagcaacttcatcgaagcattaaaaccattagccgcccaggggaaattagataccgtcagaagaacggcgcagcgaatcaatgaggtcatgtattacgccgttaataccggaatgattaccgcgaatgcggcatcacagataaacaaggcatttaacgcgccgagcgctaagaacatgccagcaatacgccctgaagaactccccgattttatgcagaagctggcaacggcacgagtggaacgacaaacgcgactggttattgagtggcagttactgacaatttgccgaccaggtgaagcagctggcgcgcgctggtgtgagattgattttgaggcgaaggaatggcgcataccagagcacagacttaaacaacgcagggaacacgtaataccactctcgaagcaggcgttagccattctggatgtcatgaagccaataagcggtcatcgtgagtttatatttccacacaacagcgacccgcagcgccctatgtgcacacaaacagcaaacgcagcaataaaacgcatgggttttggtcggcggctggttgctcatggcttgcgctcaatagcaagtaccgcacttaacgagcaaggttttgactctgacgtaatcgaggcggcattgtcacacatagacaaaaacgaggttcgccgcgcgtacaaccgctcaacctatctcgagcagcgacgcccgttaatggcgtggtgggggaattttgtagaggcagccgcaagcgggagcgtaagcgccacaggtggctatcgtgggttaaaaatggttaacggttaa

SEQ ID NO: 492285 - DNA, 225 bp, Shigella sonnei; identical to SEQ ID NO: 133446

SEQ ID NO: 492286 - DNA, 714 bp, Shigella sonnei; identical to SEQ ID NO: 10781

SEQ ID NO: 492287 - DNA, 999 bp, Shigella sonnei
atgtctggtttctttgaaaagtttaatagcgaagttgttagtaaaatcgaagagatgaccaaaccacttcaaagtcaattaggtcaggatatgttatctcttctaagtgcaggtattagcgtttatatcctctgggttggctatcaaatattggcagggaaacgccagaccccattacaagatctcgtctgggatctatcaaaatttgccattattttaacattcgtaagcaatgctgatggctatctgacggcagcaatggatgctattaaatctatgaaggatgggttccttggtaaacctgtatgggcaacgctagataccatgtggagtacaactcagcttttggctgacaaagtttatgctatggatcaatccaaatatgtgtcagttgaaggtggaatcgggtcaatgttggtttggggaggaagtatcctgattatgtctgtagcggctgttatttacatgcttgccgatgtaacaatgcagttagctattcttgtagctccgatatttatcggttgttatatgtttggattcactagagtaatgtttaataactggcttggtatattattttctagtgtatttactgttatttttgctggagttctcgtcaagattggtaccgagtttcaaactgatatgcttagtcagatatcgagagatgctaactcaacaaatattttaacaatgggcgcaatggcatttgtaattggagttctgattgctgtctttgtctggaaatcatcgagtttcgcgcagcagcttgccggtgcaggtgttgaaggtactcttcagggaatggctcttttagggattggggctgctggaatggccgtagagaaaacgagaaaccagatgaaacgtggaacgcgaacagccgccgaatgggcaggtgaaaaaggggagcagaaacgggcttcaataggcgcattgggaatggaagcaagaagacgagcatccctggaaaaagcacgtgcgaggaattcagcatga

SEQ ID NO: 492288 - DNA, 264 bp, Shigella sonnei; identical to SEQ ID NO: 10779

SEQ ID NO: 492289 - DNA, 291 bp, Shigella sonnei
atgactaaacatgatgctatacgcatttctcaacttcatcaaattttttacgatgatgatggattaattgattcagaaaagaacgtgactattttatacagtataggatttacagttgatgaaatagctcattttagaaattcaacaccaaacacagttgcggctcagctattaaatgcaagggttaaattaggttgcgcctcggtttcatctttaaagccaatgatcttattaagattgcttttgaacataaaagagattcgttttggattcgaaactgattgcaaataa

SEQ ID NO: 492290 - DNA, 516 bp, Shigella sonnei; identical to SEQ ID NO: 10777

SEQ ID NO: 492291 - DNA, 285 bp, Shigella sonnei
atgttgccacacaggagggatggttgtacctcgcaggagcagtctggtctgaaaacatcaatgtcgcgtaaaggtaactgttacgacaacgctccgatggaaagcttctggggaacgctgaaaaatgagagcctgagccactatcgttttaataaccgggatgaagccatctcagtaatacgggaatacattgagattttctacaatcgtcagcgtcgtcactctcgtctggggaatatctccccggcagccttcagggaaaaatatcatcagatggctgcttaa

SEQ ID NO: 492292 - DNA, 537 bp, Shigella sonnei; identical to SEQ ID NO: 18455

SEQ ID NO: 492293 - DNA, 336 bp, Shigella sonnei; identical to SEQ ID NO: 485874

SEQ ID NO: 492294 - DNA, 198 bp, Shigella sonnei; identical to SEQ ID NO: 492233

SEQ ID NO: 492295 - DNA, 195 bp, Shigella sonnei; identical to SEQ ID NO: 489869

SEQ ID NO: 492296 - DNA, 303 bp, Shigella sonnei
atgtacccccggaaagtccgtctgcggagaacgggccgcagtgcggcggcagacaggcagagacagctgcgccatcaggcgcagtggccttacacaccgtcaggtgtgcagggagcgccgcatccggcgcgaccggagaaaaccgacggcacaacaacggcatgcgctggtcactggtacaccactcccgcacaggtgaaaacagagaaaaccgcacgacatctgcaaccagaaaaagtgaaatttcttcactttttcacacttatttatcgcgctgatttggtgattatgatgataaaataa

SEQ ID NO: 492297 - DNA, 309 bp, Shigella sonnei; identical to SEQ ID NO: 131576

SEQ ID NO: 492298 - DNA, 636 bp, Shigella sonnei; identical to SEQ ID NO: 131577

SEQ ID NO: 492299 - DNA, 219 bp, Shigella sonnei
atgacaaaacatttcctgtccgctgctttaacctttgtaatccaggaacgtcaggtgacgtcactttgcggcgttagccctatcctgcatcgtattaaaaaatgcagcactggcgcgtacggtgccgaagataagtccggggatattccgcttcctcgctcactgactcgctacgctcggtcgttcggctgcggcgagcggagggaacggagacattaa

SEQ ID NO: 492300 - DNA, 936 bp, Shigella sonnei; identical to SEQ ID NO: 490132

SEQ ID NO: 492301 - DNA, 327 bp, Shigella sonnei; identical to SEQ ID NO: 490100

SEQ ID NO: 492302 - DNA, 153 bp, Shigella sonnei; identical to SEQ ID NO: 38610

SEQ ID NO: 492303 - DNA, 672 bp, Shigella sonnei
atggcagcgacgcacacactccctctggcgtcaccgggcatggcacgcatctgcctttacggggatttgcaacgatttggccgccgcatcgaccttcgtgtgaaaacgggtgccgaagccatccgggcgatggccacacagctccctgcgtttcgtcagaagctgagcgacggctggtatcaggtgcgtattgccgggcaggatgttagcacgtccggattaacggcacagttacatgaggctctgcctgacggcgctgtgattcatattgttcccagagtcgccggggccaagtcaggtggtgtattccagattgtcctgggagcagccgccattgccggatcattctttaccgccggagccacccttgcagcatggggggctgccattggtgccggtggtatgaccggcattctgttttctctcggtgccagtatggtgctcggcggtgtggctcagatgctggcaccgaaagccagaactccccgcacacagacaacggataacggtaagcagaacacctatttctcctcactggataacatggttgcccagggcaatgttatgcctgttctgtatggtgaaatgcgcgtggggtcacgtgtggtatctcaggagatcagcacggcagacgaaggggacggtggtcaggttgtggtgattggtcgctga

SEQ ID NO: 492304 - DNA, 642 bp, Shigella sonnei; identical to SEQ ID NO: 489892

SEQ ID NO: 492305 - DNA, 489 bp, Shigella sonnei; identical to SEQ ID NO: 490109

SEQ ID NO: 492306 - DNA, 381 bp, Shigella sonnei
atgctgggagcggtggaacgccgcttcggcaacgagcttccggcgtctccagtagagtggctgacggataatggttcatgctaccgggctaatgaaacacgccagttcgcccggatgttgggacttgaaccgaagaacacggcggtgcggagtccggagagtaacggaatagcagagagcttcgtgaaaacgataaagcgtgactacatcagtatcatgcccaaaccagacgggttaacggcagcaaagaaccttgcagaggcgttcgagcattataacgaatggcatccgcatagtgcgctgggttatcgctcgccacgggaatatctgcggcagcaagccagtaatgggttaagtgataacaggtgtctggaaatatag

SEQ ID NO: 492307 - DNA, 237 bp, Shigella sonnei
atgcgcttcgattcgcgtgataaaatcgtggcccagattaaactgctgacgccgcaaaaactggccgatttcttccatcaggcggtagtcgagccgcaaggcatggctatcctgtcgcagatttccggcagccaaaacgggaaagccgaatatgtgcatcctgaaggctggaaagtgtgggagaacgtcagcgcgttgcagcaaacaatgcccctgatgagtgaaaagaatgagtga

SEQ ID NO: 492308 - DNA, 381 bp, Shigella sonnei; identical to SEQ ID NO: 486772

SEQ ID NO: 492309 - DNA, 537 bp, Shigella sonnei; identical to SEQ ID NO: 486773

SEQ ID NO: 492310 - DNA, 246 bp, Shigella sonnei
atgaaatccgcagcatggtggatgctctggcaaaaatcaggggctgatgatggcggggaaaatccccgctttttttctgccggtccccggaaagagcaaaaggatgtcgccgcaggctccgctttacccggccatgcggggcatggccttgtggattttcagttatgtggcctcagcgtcgtgtgcgggctgtgccgtgcctccatcgtagccgggcttctgcgggcgggttgcaaggtaaggtga

SEQ ID NO: 492311 - DNA, 1275 bp, Shigella sonnei
atgcaggcactgtggctgctggctctggaacccgtatccgagaccactgctgaccacaacagctatggtttcagaccaatgcgcagcacgcatgacgccattgagtccatttttctgcggatgagccagaaagtatcgcccaaatggatactggagggcgatattaaagggtgtttcgataacatcagccatgactggctgctttcccatattccgctggacaggaaacttcttaaaaaatggttgaaagcaggttacatggaaagaggcgtgtttaaccatacgaacagcgggacaccgcagggaggcatcatatcccctgttctcgccaacatggctctggacggactggagaaggaactgatgcaaacgttcaggaaaagtggttatcacagtgcaaagcaccaggtgaattatgtgagatatgctgatgatttcatctgttcaggcagctcccgtgaattgctggaaaatgaggtcagaccactgattgcagctttcatgcgcgaacgagggctggaactgtcggaagaaaaaaccgcgatcacacatatagataaaggcttcgactttttagggcagaacgtcaggaagtacaacggtaaaatgctgattaaaccgtcgaagaaaaacctgaagaacttcctctgtaaagtcagagaaataattaaacgcaatccgacgctcccggcatggaaactgataggccagctaaacccggtgatccggggatgggctacctatcaccgacacgtcgtggcgaaagaaacatttaattatgtcgacacccaaatctggcgagctatatggcgatggtgtgtaagaaggcacccccgaaaaggattgcggtggatcgccggacgatacttctcctttgaaggcaggcgctggatctttaaagccataaccccggaagggaaaattctgactctcttccgggcaatggaaacaccgataaagcgccatataaaaatcaaaggcgaagcaacaccatacacccccggaatggaaatctactttgaacgtcgtctggatctaatctggaaaggcaaatcaaagaagatgaagacagtagttcaactctggaagaggcaggggaaacactgtccgcagtgcggacaacccataaccaaccagaccggatggaatatacatcaccggatcaggaaagttatgggcggcagtgacgaactgaccaatctcgagttgttacatccgaactgccaccgacagttacacagcagggaagccggtgctcaccgaaagcacttataa

SEQ ID NO: 492312 - DNA, 444 bp, Shigella sonnei
gtgctcaccgaaagcacttataaaggcttgagcggagtgcggggaaactcgcacgctccgttcttagggggcggcggcgcagcaatgtgtcgctgctacccgacccggcagacagaacaacactgcagtagtcagaatcagagcaggaagaaaaagagaataatcacgggaaaggtaatgtcatttctgacaactggccataaacagagagggcggggaaaagaacgggcgccgcaggcgcgcgttcttccccgttcccggagggaaacggccttcctggcagtctggttgttcatgcccgcacaatgccagcaaggagaaaggggccaccggcgaaccagcagcccctttataaaggcgcttcagtgcagtcagaccagcatcatccctgaaaaggcgggcctgcgcccgcctccaggttgctacttaccgccggattcgtaa

SEQ ID NO: 492313 - DNA, 1275 bp, Shigella sonnei; identical to SEQ ID NO: 492311

SEQ ID NO: 492314 - DNA, 690 bp, Shigella sonnei
atgtatccgatggatcgtattcaacaaaaacatgctcgtcaaatagatctgctggaaaatctgacggcagttattcaggattatccaaatccagcctgtatcagggacgaaactggaaaatttattttttgcaatacgctgtttcatgagtcatttcttacacaagatcaaagtgctgaaaaatggcttctgtcgcagagagatttttgtgaattgatctctgtcacagagatggaagcatacaggaatgagcatacgcatcttaatcttgtagaggatgtttttattcagaacagattctggacaatatctattcagtcatttcttaatggacacagaaatatcattctgtggcaattttatgatgctgctcatgttcgtcataaagacagttataatcaaaaaacgattgtcagtgatgatatcagaaatataatcagaagaatgagtgatgattcttctgtatcatcatatgtaaatgatgtcttttacttatatagcaccggaatcagtcataatgctatagcaagaatattaaacatatccatctccacatcaaagaaacacgcgtctctgatatgcgactacttctctgtttctaataaagatgagttaatcatcttactctacaataaaaagtttattcattatttgtacgagaaggctatgtgtatcataaatacgcgttaa

SEQ ID NO: 492315 - DNA, 396 bp, Shigella sonnei
ttgaaaagatttggtacacgttctgcaacaggtaagatggtaaaactaaaattacctgtagatgtggaaggtctattaattgaggcaagtaacagaagcggaagaagtcgatcgtttgaggcagtaataagacttaaagatcatcttcaccgctatccaaagtttaacagggcagggaatatctatggtaagtcgctggttaagtatctgacaatgcgtctggatgatgaaactaaccagctacttattgcagcaaaaaatcgtagtggatggtgtaaaacagatgaggctgcagacagagttattgatcatttgatcaagtttcctgatttttataactcggagatattcagggaggcagataaagaggaagatataacatttaatacactctag

SEQ ID NO: 492316 - DNA, 261 bp, Shigella sonnei; identical to SEQ ID NO: 12476

SEQ ID NO: 492317 - DNA, 984 bp, Shigella sonnei
atggtccgcgagggggtatttgatgatgtggatgcggcactcacctggcacccggaagcctttgccggtatgttcaatacccgcacgctggcaaacattcaggcatcatggcgctttaaagggatcgcagcacatgccgcgaattcccctcatttgggacgcagcgcccttgatgccgtaacgttgatgaccactggcaccaacttcctcaacgaacatattattgaaaaagcgcgcgtacactatgccatcacaaatagcggcgggatctcgcccaacgtggtccaggcgcaggcagaagtgctttatcttatccgcgcccccgaaatgaccgacgtgcagcatatttatgatcgggtcgccaaaatcgccgaaggtgcggcattgatgaccgaaaccacggttgaatgccgcttcgacaaagcctgttccagttatctcccgaatcgcaccttagaaaatgccatgtaccatgccctatcccattttggtaccccggaatggaactccgaagaactggcttttgcgaaacaaattcaggctacgctcacccccaacgatcggcaaaacagtctgaataatatcgccgcaaccggtggcgaaaacggcaaggcttttgcactacgtcatcgtgaaacggtactggcgaatgaggtcgctccatatgccgccaccgataacgtgcttgcggcatcgactgatgtcggcgacgttagttggaaactgcctgttgcccagtgtttcagcccctgttttgccgtcggtacaccgctacatacgtggcaactggttagccaggggcgaacatctattgctcataaaggaatgctgctggcggcgaaaactatggcagcaaccacagtcaatctcttcattgattcagggctattgcaagaatgccaacaagagcatcagcaagtaacggacacgcaaccgtatcactgccctatcccgaaaaacgtgacaccgtcacctttaaaataa

SEQ ID NO: 492318 - DNA, 681 bp, Shigella sonnei
atgctgattggcgggctggtcggcttctcgatgattggtattgagtggtcgaaattgcagtggctggtcgccgcgctcggtgttggtctcggttttggtttgcaggaaattttcgccaactttatctctggtctgattatcctgttcgaaaaaccgattcgcattggcgatacggtgacaattcgcgatctcaccggtagcgtgacgaaaattaacacccgcgccaccaccatcagcgactgggaccgtaaagagataatcgtgccgaacaaggcgtttattaccgagcagtttatcaactggtcgctctctgactcggtcacgcgcgtagtgttgacgattccggcccctgctgatgccaacagtgaagaagtgacggaaatcctgctcaccgcagcgcgtcgctgctcgctggtgatcgacaacccggcaccggaagtcttcctggtggatctgcaacaagggattcagattttcgagctgcgtatttatgccgctgagatgggtcaccgtatgccgctacgccatgagatccaccagctgattctggctggcttccatgcccacggtatcgatatgccattcccgcccttccagatgcgtctggaaagcctcaacggtaaacaaacggggagaacgctgacgtctgcgggcaaaggtcgtcaggcgggaagtttgtaa

SEQ ID NO: 492319 - DNA, 1383 bp, Shigella sonnei
ttgtctcttgcggctatcctggcgctggaaaaagagtacgccaacaaaaagctggcggcttacatcttcccaggcagaaatttatcgttaacagtagacgctgacccacaggcggaaattagcagcaaagaaacgctggctgagaatctgacatcattaacactttccaatggtgccagggttattctggcaaaatccgcgggtgaagagcaaaagctacaaattactgccgtatctaataaaggcgatttaagtttccctgcgcagcaaaaatcacttatcgcgctggcaaataaagcagtaagcggaagcggcgttggtgagctctcctcttccagcctgaaacgctggagtgcggaaaattcggtaaccatgagcagtaaagtcagtggcatgaatacgttgctctccgttagcgcgcggactaataaccctgaacctggttttcagttgattaaccagcgaatcacccacagcacgattaacgacaatatttgggcatcgctacaaaatgctcaaattcaggcgttgaaaacgctcgaccagcgtccagcggagaaattcgcccagcagatgtatgagacgcgctatgctgatgaccgcacgaaattactgcaagaaaatcagattgtacagtttactgccgcagatgcgctggctgccgatcgccagttgttttcatctccagcggatatcacgtttgtcattgtcggtaatgtctcagaagacaaactcgtggcgttaattacgcgttacttaggatcaatcaaacactctgattcgccattagccgcaggtaaaccattaactcgcgcgacggacaacgcatcggttactgtaaaagaacaaaatgaacctgtggcacaggtttcacagtggaagcgttatgattcccggacacctgttaatctggcgacgcgtatggcgctcgatgcttttaacgtcgcactggcaaaagatctacgcgttaatattcgtgaacaggcatctggagcatacagcgtttcttctcgcctctcggttgatcctcaggccaaagatatcagtcatttgctggcttttacttgtcaaccagaacgacatgatgaactgttaacgttagcgaatgaagtgatggttaagcgtctggctaaagggatcagtgagcaagaactgaatgaataccagcaaaacgttcagcgcagcctcgatatccaacagcgtagcgttcaacaattagcgaacactattgtaaatagtcttattcaatatgacgatcctgcagcatggactgagcaggagcaattgttgaaacaaatgacggtagagaatgttaacactgccgttaaacaatatctttctcatccggtaaatacttatactggagtattattgccaaaataa

SEQ ID NO: 492320 - DNA, 279 bp, Shigella sonnei; identical to SEQ ID NO: 463003

SEQ ID NO: 492321 - DNA, 279 bp, Shigella sonnei; identical to SEQ ID NO: 11573

SEQ ID NO: 492322 - DNA, 189 bp, Shigella sonnei; identical to SEQ ID NO: 463227

SEQ ID NO: 492323 - DNA, 405 bp, Shigella sonnei
atgaacgcgcagatgaaagcggaacgtaccaaacgcgcttacattcttgaagcggaagggatccgtcaggcggaaatcctcaaagccgaaggtgaaaaacagtcgcaaatcctgaaagcggaaggcgaacgtcagtcggcgtttttacaggctgaagcgcgtgaacgttccgccgaagcagaagcccgcgccaccaaaatggtgtctgaagctatcgcctccggtgatattcaggcggtgaactacttcgtagcgcagaaatacaccgaagcgttacagcagatcggtacctccagtaacagcaaagtagtgatgatgccattagaggccagcagcctgatggggtcgattgccgggattgccgagctggtgaaagacagcgccaacaaacggactcagccatga

SEQ ID NO: 492324 - DNA, 153 bp, Shigella sonnei; identical to SEQ ID NO: 492244

SEQ ID NO: 492325 - DNA, 237 bp, Shigella sonnei
atgcgtccaagcctcacggccgcgctcggcctctctggcggccttctggcgctcctgctgcggcgtccgctcgtgggccgtggcgcgggtccgcgcgccggcctcgtgcgcctggcgctcgcgggcgaggtccagggcggccgtcttcacgttctgccttgcgcagatgagatagatctagcgtggactcaaggctctcgcgaatggctcgcgttggaaactttcattgacacttga

SEQ ID NO: 492326 - DNA, 492 bp, Shigella sonnei; identical to SEQ ID NO: 489864

SEQ ID NO: 492327 - DNA, 369 bp, Shigella sonnei; identical to SEQ ID NO: 487152

SEQ ID NO: 492328 - DNA, 330 bp, Shigella sonnei; identical to SEQ ID NO: 489863

SEQ ID NO: 492329 - DNA, 234 bp, Shigella sonnei; identical to SEQ ID NO: 30885

SEQ ID NO: 492330 - DNA, 510 bp, Shigella sonnei; identical to SEQ ID NO: 483719

SEQ ID NO: 492331 - DNA, 168 bp, Shigella sonnei
atgatgctaagcgaggaaacgtccgccgtacgcccacaaaaacaaacgcgatttaacggtgcaaaactggtatggatggaaaggcagtccgctcaccgtgaccggcgcagtcatcattgtattaatgctattgatgatgattttttcaccgtggcttgcgacgcatga

SEQ ID NO: 492332 - DNA, 174 bp, Shigella sonnei; identical to SEQ ID NO: 10355

SEQ ID NO: 492333 - DNA, 387 bp, Shigella sonnei; identical to SEQ ID NO: 10354

SEQ ID NO: 492334 - DNA, 624 bp, Shigella sonnei; identical to SEQ ID NO: 10353

SEQ ID NO: 492335 - DNA, 624 bp, Shigella sonnei; identical to SEQ ID NO: 10352

SEQ ID NO: 492336 - DNA, 1206 bp, Shigella sonnei; identical to SEQ ID NO: 10351

SEQ ID NO: 492337 - DNA, 594 bp, Shigella sonnei; identical to SEQ ID NO: 10350

SEQ ID NO: 492338 - DNA, 417 bp, Shigella sonnei; identical to SEQ ID NO: 10349

SEQ ID NO: 492339 - DNA, 888 bp, Shigella sonnei; identical to SEQ ID NO: 10348

SEQ ID NO: 492340 - DNA, 513 bp, Shigella sonnei; identical to SEQ ID NO: 479226

SEQ ID NO: 492341 - DNA, 807 bp, Shigella sonnei
ttgtgcaactctccagagtttgcatccttacctccaaatgtgatcgtaccaactctggcagacaggggtatttatattgcttctgaatcaagcttttatcgtgtactgaaatcagccaaccagttgaagaaacgatcccgtgaatgtcagtataaacggcctgatgtactcagggccgttgcaccgaatcaagtctggagttgggatatcagctatttgccgtccggggtcagaggtcagcatttttacctctatatgatcgtcgatatttacagtcgcaagattattgctgcagaggtatttgccagcgaatctggaaaacatgcagcagaactactccagcgggcaatatggaatgaaaaatgttcatccagcaatctggtactccattctgataatggtgctcccatgcgcagttacacgttgttggcgaaaatgtatgcgcttggtgtgctaagttcttattcccggccaagagtcagcaatgataatccttactcagaatctttgttccggactctcaaatattgtccctggtggcctgagaacggttttcgcactattaatgatgccagaatatgggtaaaccgttttgtaaactggtacaactttgaacataagcacagcgggatcaaatacgtcacgccagccgagcgtcatcaaggtaatgatatgaaaatactggcggccagaaaagcagtataccagctggcacgcgaacagcatcctgaacgttggggaaagcatctacgtaactgggactacatatcagaagtctacctgaatccagaaaaagaggctgcataa

SEQ ID NO: 492342 - DNA, 279 bp, Shigella sonnei
atggaacttaaaaaattgatggaacatatttctattatccccgattacagacaagcctggaaagtggaacataaattatcggatattctactgttgactatttgtgccgttatttctggtgcagagggttgggaagatatagaggattttggggaaacacatctcgattttttgaagcaatatggtgattttgaaaatggcattcctgttcacgataccattgccagagttgtatcctgtatcagtcctgcaaaatttcatgagtgctttattaactga

SEQ ID NO: 492343 - DNA, 276 bp, Shigella sonnei; identical to SEQ ID NO: 484753

SEQ ID NO: 492344 - DNA, 303 bp, Shigella sonnei; identical to SEQ ID NO: 458125

SEQ ID NO: 492345 - DNA, 303 bp, Shigella sonnei; identical to SEQ ID NO: 458125

SEQ ID NO: 492346 - DNA, 483 bp, Shigella sonnei; identical to SEQ ID NO: 376336

SEQ ID NO: 492347 - DNA, 234 bp, Shigella sonnei; identical to SEQ ID NO: 30885

SEQ ID NO: 492348 - DNA, 951 bp, Shigella sonnei; identical to SEQ ID NO: 485807

SEQ ID NO: 492349 - DNA, 1146 bp, Shigella sonnei
atgaaaacatggttttccattaaggctatggctgatgttgtacatgtacgcatttatgacgagatcggcggggacggtgtaaaagcatcggcacttactgacgagatcaacgcgtgcggtaatgtgcctgaaatccatcttcgcatccattcacctggtggcgacatctttgaagggctggctatctataacgccctgaaaaatcatccggcaaagaaaattgtacacattgaaggcatggcggcttctatggcctcgtttattgccatgtgtggcgatcacatcgttatgcctgaaaacgcgatgatgatgatacatgccccccgtggtgttactgccggagtgtcgggcgacgttcgccgctttgctgacctgatggacaagctgggcgacacgatggcggaaacctacgccggaagaacgggcaggagcaaacaggaaatcaccgccatgatggaggcggaaacctggatggatggcaatgagtgtaaggctaatggcttcgcagatgaggttatacccgcgattacagcaatggccagaattgaatcaaaacgaatcggagatttttcgaatatgccggaaaatattaaaagcatgatcagccagaaaactggcagcggagaacaggaacgactcaacgggatacgtgaattgtttggcacgttcaatggaagatataacgacctggctataagttgtcttgctgattcaggctgtagcgttgaggatgcacgcgaacgccttttactcactatgggtaaagaatcgacaccgacaaacaaaaccacccccgcaaatctttactacgcgtacacggataacggcaacataaccggcgatgcaatgcgtcaggggcttaatgcgcgtctgggacatgaacaggcagaacgcggcaacccttacgccatgatgagccttttcgatatggcacaggcatcattaacccatcgcggcataagcacaggcagctacagcacacgctcgcagatagtaaacgcggcattcacccacagcagcagcgattttacttatatccttgctggtggtgctgaaaaatccgtgaacacagcggcgaaacgttccgccagtggacgaaaaaaggttcattgtcaaacttccatgaggcacgtcgtgttggcctga

SEQ ID NO: 492350 - DNA, 267 bp, Shigella sonnei; identical to SEQ ID NO: 11114

SEQ ID NO: 492351 - DNA, 2214 bp, Shigella sonnei; identical to SEQ ID NO: 485713

SEQ ID NO: 492352 - DNA, 303 bp, Shigella sonnei; identical to SEQ ID NO: 458125

SEQ ID NO: 492353 - DNA, 687 bp, Shigella sonnei; identical to SEQ ID NO: 482234

SEQ ID NO: 492354 - DNA, 1101 bp, Shigella sonnei; identical to SEQ ID NO: 484701

SEQ ID NO: 492355 - DNA, 306 bp, Shigella sonnei; identical to SEQ ID NO: 15095

SEQ ID NO: 492356 - DNA, 357 bp, Shigella sonnei
gtggcgttgacagaaccttataatgttacccgcgcactgttattaatggtgatacttacagcaactcgctcgggcgaagccaggggaatgcgctgggctgaaattgattttcataagcgggtatggactatacctgcagaaagaatgaaagctaggctacagcatcgtgttcctttatcccggcaggctatttacattctggaaaatatacgtggcctgcatgatgaactggtgttcccttcacccagaaagcagcagatcctttccgatatggtgttgacaagttttctgcgtaaaaagaaagccgtcagtgacattccggggcgagttgccacggcacatggtgaggtagcctga

SEQ ID NO: 492357 - DNA, 171 bp, Shigella sonnei; identical to SEQ ID NO: 485478

SEQ ID NO: 492358 - DNA, 303 bp, Shigella sonnei; identical to SEQ ID NO: 458125

SEQ ID NO: 492359 - DNA, 249 bp, Shigella sonnei
atgcgatatatagcaggcattgatatcggcaactcatcaacagaggttgcgctggcaacgctcagtgcaactggagagttgtcgttcgtgagtagcgccctggaggaaaccaccggaatcaaaggtacgttgcgtaacgtccatggtattcaggaggcgctcgcacaggcaacgaaaaaagtcggcatcaatgttagcgatatttcgcttattcgtatcaacgaagcggtgatgctgccaacttactga

SEQ ID NO: 492360 - DNA, 537 bp, Shigella sonnei
gtgtgccacttcaacgtaaccatcaaagaagaagacggtagcgaacaacgattcacccaaccttatgcttcattagcgattcttaaacgtgaaggtcagacagatgttgatgtcagcgtgggtgaattgcgcgatgaagacggatttacaccggacgtccttcaggcgcaaatacttcatggtttttcccacgggatcactttatatggaggtatgcaggctgctgaaaattatggttctgcagctctgggtgtcggtaaagatcttggcgctttgggcgcaatttctttcgatgtgacacatgctcgtgcgaattttagccatgatgatacagaaacgggtcagtcatatcgctttctctattcaaaacgatttgacgacacagacactagcttgcgcttggttggctatcgttactccaccgagggctactataccctcaatgagtgggcatcgcggcgcaacagccctgaagacttttgggaaacaggtaaccgacgtagttttatctgttcctttattgggctggtggggtaa

SEQ ID NO: 492361 - DNA, 291 bp, Shigella sonnei
atggccgcgataggtagcacaccatttgagcgtggtgacgaagccgaaggatttttaattgtcactgctgcagcagaccagggtctggtagacattcatgaccgccgcccgctggttctgtcgccagaagctgcacaggaatggatgcggcaagagattggcggtaaagaagcatcagaaattgctaccaacggctgtgtgccagcaaaccagttcacctggcacccggtatcgcgcgcggtaggtaatgtcaaaaaccagggcgcggagttaattcaacctgtttgttga

SEQ ID NO: 492362 - DNA, 537 bp, Shigella sonnei; identical to SEQ ID NO: 492360

SEQ ID NO: 492363 - DNA, 807 bp, Shigella sonnei
ttgaggcacatcttaacggcgaaaaatcttttgtcaaacccgatttttaaattccccaactgtttgccgtttctatcaacagtttgttgcatttgcagacaatttgttggcgaaaatctttgcagctttgctgattctccctcattatttgaaatgtggtttcactttctgcaattaaggtcggctttgaatatctcctctgctttacgccaggttgttcacggcactcgctggcacgctaaacgcaagagctacaaagtgttgttctggcgcgagataaccccgcttgctgttcctatcttcatggagaatgcctgtgtcctgttgatgggggttctgagcacttttctggtcagctggctgggaaaagatgcgatggccggcgtgggattggcggacagcttcaatatggtcattatggctttttttgctgctatcgatcttggtactactgtcgttgtggcatttagtctcggtaagcgggatcgacgacgagcgagggtggcgacgcggcagtcattggtgatcatgacgttgtttgccgtactgttggcaacgcttattcatcattttggcgaacaaattattgatttcgtcgcgggtgatgccacgacagaagttaaagcactggcgttgacttatctggagctgacggtactcagttatccagcagctgccatcactcttattggtagcggggcacttcgtggtgcagggaatacgaaaataccgctattgattaacggtagcctgaatattcttaatattattattagcggcatattgatttacggccttttctcctag

SEQ ID NO: 492364 - DNA, 291 bp, Shigella sonnei; identical to SEQ ID NO: 492361

SEQ ID NO: 492365 - DNA, 381 bp, Shigella sonnei; identical to SEQ ID NO: 458903

SEQ ID NO: 492366 - DNA, 348 bp, Shigella sonnei; identical to SEQ ID NO: 485869

SEQ ID NO: 492367 - DNA, 417 bp, Shigella sonnei; identical to SEQ ID NO: 490345

SEQ ID NO: 492368 - DNA, 258 bp, Shigella sonnei
atggggcttaaattacatattaattggtttgataagacgaccgaggaatttaaaggtggtgagtattcaaaagatttcggtgatgatggctcggtcattgaacgtcttggaatgcctttaaaagataatatcaataatggttggtttgatgttatagctgaatgggtacctttgctacaaccatactttaatcatcaaattgatatttccggtaatgagtattttgtttcatttgattatcgtgatggtgattggtga

SEQ ID NO: 492369 - DNA, 144 bp, Shigella sonnei
atgaaaaaaataacagggattattttattgcttcttgcagtcattattctggctgcatgtcaggcaaactatatccgggatgttcagggctggactgtatccccgtcatcaacagctgaactgaccggattagcaacgcagtaa

SEQ ID NO: 492370 - DNA, 252 bp, Shigella sonnei
atgcgcttttttttgaaatgtcacaaaaattccatgtgggagatgggatctaaaattctcgtgcagaactttccatccagggggagaaaacttgtcgttttgagccgttcggtgttcagaacgcacgaaaccgatcgtgtatcgctttcgtgcatagttatgcaacgcgctaaaaacgattctgacgcattttttatgtttaccctggtgtttccttgtctttttgtgttttttgcgtcagaaagcgattga

SEQ ID NO: 492371 - DNA, 492 bp, Shigella sonnei; identical to SEQ ID NO: 489864

SEQ ID NO: 492372 - DNA, 327 bp, Shigella sonnei
atgaaccaagacgcattaaagatcctcgctaaggagctaacgggcgagcaatttaaagttctaatgctcatgctcgctgatctggattacgagaatttcatccaaattgcacaggctgatatagcggatgcattggagatgcaaaagacccacgtaagccgcgctgttcgtgctcttcttgatgtaggcgtgatctttgaaggtccgaaagtaggtagatccaaaacctatcggttgaacgagcaattcggctggaaaggaacagtaagcaatcacaaaaaagcccttaaaaacggcctcagcgttatacagggcggcagaacctga

SEQ ID NO: 492373 - DNA, 810 bp, Shigella sonnei; identical to SEQ ID NO: 19157

SEQ ID NO: 492374 - DNA, 264 bp, Shigella sonnei; identical to SEQ ID NO: 490106

SEQ ID NO: 492375 - DNA, 153 bp, Shigella sonnei; identical to SEQ ID NO: 492244

SEQ ID NO: 492376 - DNA, 378 bp, Shigella sonnei; identical to SEQ ID NO: 476066

SEQ ID NO: 492377 - DNA, 327 bp, Shigella sonnei; identical to SEQ ID NO: 490100

SEQ ID NO: 492378 - DNA, 495 bp, Shigella sonnei
atgagaaatcgattgattgcggcgatattgggcttgtttggcacgctcactggcgttcaggcagctcctgacgtgaccagtgaaattacgtatgatttggcatctggtagagcggattattacttctggaaggatgaagcgtcggcaggaaataatggatatatgtggtatgaatgttcgtatcctgacctccaacaaacctgtacagctaatggaaatatatcgacagtacaaatctatttaactgaacaacgcagtgggatgcgttggccggtaaaactcaaaggatttaaaacagccattgtaagtagcgatgaagcgccgccaggatgcaaggggggcaaagggcttcagacgaatcttaaggattctaatagatcttcatgtacagaagatggtcaacattattatatatacgatacaaagtttcttacgctctaccttgagcagacagtggatttgcccctatatttccagacatctgttatcacttaa

SEQ ID NO: 492379 - DNA, 195 bp, Shigella sonnei; identical to SEQ ID NO: 35541

SEQ ID NO: 492380 - DNA, 711 bp, Shigella sonnei; identical to SEQ ID NO: 400714

SEQ ID NO: 492381 - DNA, 126 bp, Shigella sonnei; identical to SEQ ID NO: 35539

SEQ ID NO: 492382 - DNA, 393 bp, Shigella sonnei; identical to SEQ ID NO: 490721

SEQ ID NO: 492383 - DNA, 378 bp, Shigella sonnei; identical to SEQ ID NO: 476066

SEQ ID NO: 492384 - DNA, 378 bp, Shigella sonnei; identical to SEQ ID NO: 476066

SEQ ID NO: 492385 - DNA, 906 bp, Shigella sonnei
atggttaacttctggcgaaccacactttcctgcattctgggcacgcttttctggctgtggacgggctggacttccggcagtggtgcaatggtgatgattgcggtcgtgacgtcactggcaatgcgtttgccgaatccacgcatggtggcgatcgactttatctatgggacgctggccgcgctgccgttagggctgctctactttttggtgattatccctaatacccaacagagcatgttgctgctgtgtattagcctggcagtgctgggattcttcctcggtatagaagtacagaaacggcgactgggctcgatgggggcactggccagcaccataaatattatcgtgctggataacccgatgactttccatttcagtcagtttctcgacagcgcattagggcaaatcgtcggctgtgtgctcgcgttcaccgttattttgctggtgcgggataaatcgcgcgacaggactggacgtgtactgcttaatcagtttgtttttgccgctgtttccgcgatgactaccaatgtggcacgtcgtaaagagaaccacctcccggcactttatcagcagctgtttttgctgatgaataagttcccaggggatttgccgaaatttcgcctggcgctgacgatgattatcgcgcaccagcgcctgcgtgatgcgccgatcccggttaacgaggatttatcggcgtttcaccgacaaatgcgccgcacagcagaccatgtgatatctgcccgtagcgatgataaacgtcgtcggtactttggccagttgctggaagaactggaaatctaccaggaaaagctacgcatctggcaagcgccaccgcaggtgacggaaccggttcatcggctggcggggatgctccataagtatcaacatgcgttgaccgatagttaa

SEQ ID NO: 492386 - DNA, 2466 bp, Shigella sonnei
atgcagcacagcgaactgcgcggcggcgtgttgctgctggccctgctgcattcgccgctgcgttatataccgcctgctgccgcccggctgttgaccggcattaaccgtgaccgtctgcaacaggactttgtgcagtggacacaggagtcggcggaatcagtcgtgccggatgcagacggtaaaggcgcaggcacaatgacggacgcctctgacaccctgcttgcccgctatgccaaaaacatgaccgcagacgcccgtaacggcaggcttgacccggtactgtgccgcgaccacgaaatcgacctgatgatcgacattctctgccgccgccgtaaaaacaacccagtggtggtgggcgaagcgggcgtgggcaaaagcgcactgattgaagggctggcgctgcgcatcgtggcaggccaggtgccggacaagctgaaaaacaccgatatcatgacccttgacttgggcgcattgcaggccggggcgtcggtgaagggtgaattcgaaaaacgtttcaaagggctgatggcggaggtcatttcctccccggtgccggtcattctgtttatcgacgaagcacataccctgattggcgcgggcaaccagcagggcgggctggatatctccaacctgctcaaaccggcgctggcgcgcggcgagctgaaaaccatcgccgccaccacctggagcgagtacaaaaaatacttcgaaaaagatgccgccctgtcgcgccgcttccagttggtgaaggtcagcgaacccaacgctgccgaagccaccattattctgcgcggtctgtcggcggtctatgaacagtctcacggcgtgctgattgatgatgacgccttgcaggccgctgcgacattaagcgagcgttatctctccgggcgtcagttaccggacaaagcgattgatgtgctggataccgcctgcgcccgtgtggccatcaacctgtcgtcgccgccgaagcaaatctcggcgctgaccactctgagccaccagcaggaggcggaaattcgccagcttgagcgcgagcttcgcatcggactgcgtaccgacacatcacggatgaccgaggtgctggtgcagtatgatgaaacgctgacggcgctggatgaactggaagcggcctggcaccagcagcagacgctggtccgggagattatcgcgctgcgccagcagttactgggcgtggcagaggacgatgcggcgccgttgccggacgcagataccgtggaggatacgcagccagagtcagagtcagagtcagagtcagagtcagagcaggataataccggtgccgaaccggctgatgaggccgacagagaacaaccggaagagaccgctgaaacagtttccccggtacagcggctggcccagctcactgccgaactggacgccctgcataacgaccggttgctggtctccccgcacgtcgataaaaaacagattgcggcggtgattgccgaatggaccggcgtgccgctcaaccgcctgtcgcagaatgaaatgtcggtcatcaccgacctgacgaaatggctgggtgacaccatcaaaggccaggacctggcgattgccagcctgcataagcatctactgaccgcacgcgccgacctgcgtcgtccgggacgcccgctcggtgcgttcctgctggctggccccagcggtgtgggtaaaaccgaaaccgtcctgcaactggcagagctgctctacggcggtcgccagtacctgaccaccatcaatatgtccgaattccaggagaaacacaccgtctcgcggctgattggttcgcctccgggctacgttggctacggtgaaggcggcgtactgaccgaagcgattcgccagaaaccctactcggtagtactgctcgatgaagtggaaaaagcgcacccggatgtgctcaacctgttctaccaggcgttcgataagggcgaaatggcagacggtgaaggccgcctgattgactgcaaaaatatcgtcttcttcctgacgtccaacctcggctaccaggtaatagtcgagcatgccgatgacccggaaaccatgcaggaagtacagtatccggtgctggccgacttcttcaaacctgccctgctggcgcgtatggaagtggtgccgtatctgccgctgtcgaaagagacgctcgccaccattatcgccggaaaactggcccgtctggataacgtgctgcgcagtcgctttggtgtagaagtggtcattgaaccggaagtgacggacgaaatcatgagccgcgtcacccgcgcggaaaacggcgcgaggatgctggaatcggtcatcgatggcgacatgctaccgccgctctcgctgctgctgttgcagaaaatggcggctaacacggcgattgcccggattcggttgtcggcagtggacggcgcatttacggcagacgtggaagatgctcagaacgacgagtccgtcacaaaggatgaaacggttttatga

SEQ ID NO: 492387 - DNA, 153 bp, Shigella sonnei; identical to SEQ ID NO: 492244

SEQ ID NO: 492388 - DNA, 303 bp, Shigella sonnei; identical to SEQ ID NO: 492247

SEQ ID NO: 492389 - DNA, 480 bp, Shigella sonnei; identical to SEQ ID NO: 464934

SEQ ID NO: 492390 - DNA, 537 bp, Shigella sonnei; identical to SEQ ID NO: 16554

SEQ ID NO: 492391 - DNA, 867 bp, Shigella sonnei
atgaattatcagaatgaaaaagagagttatattgtcacgtttaaccagtatcttgaatcattaaggttaaatacatacgtaagtttggctcgtaatacttactgggacgccagcagtaatgtgaattattcattatcacttagccgcgattttgatatcgggccattaaaaaacgtctccgcttctctaacatttagccgaataaactgggaagaagacaaccaggatcaactgtacctaaatatttcgattccctggggaaccagtagaacattgagctatggtatgcaacgaaatcaggataacaagatttcgcatactgcttcgtggtatgactcttccgatcgaaataattcctggagcgtttctgcttcaggcgacaatgatgaattcaaagatatgaaagcgtcactacgcgccagttatcagcataataccgagaacggtcgtctctatctctccgggacatcacagcgagacagttattattctctgaatgccagttggaatggttcattcacggcgactcgtcacggagccgctttccatgactatagtggtagtgctgactcgcgttttatgatcgacgcagatggtgcagaagatattccgttgaacaataaacgcgcggtaactaatcggtatggcatcggagttattccatcagtcagcagttacataacaacatcattaagcgttgatacccgaaatcttccagaaaatgtggatatcgaaaactcggttatcaccaccaccttaaccgaaggtgctattggctacgccaaacttgataccccaagggctatcaaatcatgggggttattcgcctggcagatggtagtcacccaccactggggattagcgtaa

SEQ ID NO: 492392 - DNA, 372 bp, Shigella sonnei
atgcaagtcactatgcagcacgcattgaaactattctggcgaccaaaagctattgaattagaagatgatggggtaatgtcttacgaaaaagttgaaatcatccgtagaaatgatggttcgatccgctttaacaataagatgccttatcacgttacgctgggttatatcggaacaaacggaatcacaatgttgccacaaacgcaaagtttaatggtaaccccttatagccatgcagatacgcagtttaaaaatgttccgtcagcttttcaggttggttatatcaatgattttggtggattaagtttttatgaaataaactgcccgacggttaataactcttgtaatgtttccgtagccaaacgagataaataa

SEQ ID NO: 492393 - DNA, 126 bp, Shigella sonnei
atgcgcaaatatcgtctaagtgaagaacagcgagcctttagttatcaggaagatggcactaaaaaaagtgtgttattacggcagatggatttgcccctatatttccagacatctgttatcacttaa

SEQ ID NO: 492394 - DNA, 375 bp, Shigella sonnei; identical to SEQ ID NO: 475895

SEQ ID NO: 492395 - DNA, 375 bp, Shigella sonnei; identical to SEQ ID NO: 485586

SEQ ID NO: 492396 - DNA, 615 bp, Shigella sonnei
atgactgagtttgatgacaatgggaaaattatatttaacattaatgccttaaagtatacaaaagcaagttactttgaaatacttggagagaaatatataaaaatcacaacatccagcccctggcttttagaaaagctcggtaaatatattttctcttcacgagcgcctcaagttctggaactcgctattggctggcgaggagctttatctgaatcaataaaaggagttaagttctgtatctggttttcagtagcctggagaaccatagaatttattatgagttcagagcgagatctggttaattttcttggcgatttttcaatggatgtggccaaagcagttatagccggtggtgttgcaaccgctattggaagcctggcttcttttgcctgtgttagctttggctttccagtaattcttgtcggaggagcaattttactgacagggatagtgtgtacagttgttttaaatgaaatcgatgctcaatgccatttatcagaaaaattaaaatatgcaattagagatggactaaaacggcaacaggaacttgataaatggaaaagggaaaacatgactccatttatgtatgttcttaacactccacccgtgatatga

SEQ ID NO: 492397 - DNA, 375 bp, Shigella sonnei; identical to SEQ ID NO: 475895

SEQ ID NO: 492398 - DNA, 906 bp, Shigella sonnei; identical to SEQ ID NO: 491312

SEQ ID NO: 492399 - DNA, 276 bp, Shigella sonnei; identical to SEQ ID NO: 484087

SEQ ID NO: 492400 - DNA, 519 bp, Shigella sonnei
atggcccggtttgatattgatactggcggctatccagtacagcgccgtgccaagatagcgtgctgtggtttcaacctgcctgatatcggtaatccgcttttccgagaaccagaactcaaactgtaccgtcgggtcatacaccgcaagacgcgggaccgccgttatctgaaaatagcccggcgtcagctcaatccgcgacggtgctgccggtgcggcaatccggaatgtggtggtggcaggttcaccctgctggccatagctgtttatcgcccgcaccgtcagggtgtattccccgagcggcaggccgctgaaacggtgctccgtgtctgcggtgatggcggtggtcaccagtctggcatccgttcccttaccactggtcaggcgcagactgaagcgcacacccttcaccacccgcggcgtgtcccatttcgcctgcgccagatactgtccgtcagctgcgctcacctccaccgtcaggtgctgcactgccggtgggatgacgctgttcagggaacctga

SEQ ID NO: 492401 - DNA, 876 bp, Shigella sonnei
gtgttcggtgatgtccacactcaccggcttaccgctgccgttaatcaggttcaccgtggcggcaccggtctccggaagtgtcacttcacgatccagcgtcagggtgcgggtggcagcatcaatggacaggacacgtccgccggtcagggtcccggcatagtcgttatcacagatttcaatgatgtcaccgggtgtgtgccgcagcccctgagacccgagcgtgaaatccaccgtctgcgtttccagcagttcggtctttatcacccacagtccggcacggtgggcctgaccgcggctggtacagccgaacgcgtccatcttcagcaggttgcgtccgtagcgcagtatggcttccgggtcttccaccagttccgtggaggtctgccagccgttctgcgggtcggtgtaattcacctccaccgccgtgtgccggtccttcagggcactgaagctgtagcggaatcccacgccgttatcatccaccaccacatcgctgttggtgtacggccacaccacatccgacgggcggtcctgaacgaacgtcagcgtctgaccgttccataccggcatacagcgcatcgcagagcagaaatcactgagaacgtcccacgccttacgctgttgtgccaggtacgcattaaaggtcatccgcggctcggtccccccgaaaccatccgggaccgtctggtcgcagtactgcccgatggcatacagcgcccacttgtccacatccgccgcccccagacgttttcccatgccgtagcgcgggtgagtcagcatgtcccacaggcaccaggccgggttgttgctgtatgccggtttcagactgccgtcccagataccactgtacgtgcgtttttccgggtcatagtttga

SEQ ID NO: 492402 - DNA, 534 bp, Shigella sonnei; identical to SEQ ID NO: 462283

SEQ ID NO: 492403 - DNA, 354 bp, Shigella sonnei
atgcgtgattttcagaatgcctttgatgctgccctcgccggggtagacagtacgatcgttgaagtgatggggctctgtgcgcagttcacctcgggggcacagtgtggcagcgaagttcagggggtttttgacgatccggagtcgctggggtttgccggtggcggggtccgtattgaaggaagcagcccgtcattatttgtgcggacggatacggttcgtgccgtgcggcgtggtgacacgctgaccattaatggtgagatattctgggtggatcgtgtttctccggatgacgggggcagctgttatctctggctcaaccgtggtcaaccacccgcagttaaccggcgacgataa

SEQ ID NO: 492404 - DNA, 384 bp, Shigella sonnei; identical to SEQ ID NO: 11526

SEQ ID NO: 492405 - DNA, 549 bp, Shigella sonnei; identical to SEQ ID NO: 7953

SEQ ID NO: 492406 - DNA, 204 bp, Shigella sonnei
gtggcgacagattgccagcgtgagcaactgagctatgtcattggcactgaagttccggttccgggcggtgaggccagcgccattcagtcagtacacatcacccatgttgaagatgccgccaatactttacgtacgcatcaaaaggcctttattgcccgtgggctgacagaggcgttaacacgcgtgattgccatcgtggtgtag

SEQ ID NO: 492407 - DNA, 741 bp, Shigella sonnei
  misc_feature (687)..(696): n is a, c, g, or t
atgaagtttttaccctatatttttcttctctgttgtggtctttggtcgaccataagtttcgcagacgaagattacatcgaatatcgtggcatcagtagtaacaaccgtgtcatacttgatccagtacgtctgagcaacaaggaattacgttggttagcgagcaaaaaaaatcttgtgattgcagtacataagtcccaaacggctacgttgttgcataccgattcgcagcaacgagttcgtggtattaatgctgattatttaaatcttttaaaaagaacgttaaatatcaaattaacactccgggaatacgccgatcatcaaaaagcaatggacgcgctggaagaaggtgaagtcgatatagtgttatcacatttagtagcttcgccgcctcttaatgatgacattgctgcaaccaaaccactgataattacctttccggcgctggtaaccacccttcacgattcaatgcgaccgcttacctcatcaaaaccagtaaatattgctcgagtagcaaattatccccctgacgaggtaattcatcaatcatttccaaaagcaacaattatctcttttacaaatttatatcaggcattagcatccgtctcagccggacagaatgattactttattggtagtaacatcattaccagcagtatgatttcccgctatttcactcactccttaaannnnnnnnnnctgtcgttcttaatgaagtactcaatcgatttgttgatgctttga

SEQ ID NO: 492408 - DNA, 279 bp, Shigella sonnei
atggataaaaagcaaattgaggccctgcaatctattattgaaaaacaagatgaagctatcaggattctttcatatcgcactgatatgatactaaatatgctttctgcattaacggctgcgcttggtggtacaaaaacaaacgtataccgcgaagttgttattcaacagatagataaatttgaaaaaaccataccaggtattaatgctcatcttgcagaacaagagaaagaccatgctcttatggcaatttcttcagtagctctcccgaaagttgagtag

SEQ ID NO: 492409 - DNA, 402 bp, Shigella sonnei
atggaatttaaagatttaccagtaccattccaggaaatggcatcgaatgtggttcgctctcaactggcgactcttgacctgagtaccgtagaaaaagaaaccatcgatactatatccggtaacgtgcgtcgtgcctttataggtctgtatgaagagaagcgcctattcggcggacagaattcgcctgaaaacaagaatcaagcaaatgatgagaagctgaaacacattatcgccttacttttggaagacgcaaaacgtctacagcaactggaaccaaatgcaggcacagaggcccgcatttggattgccatgaaatcactcaaatgtgaaagcagtgattatttcaaaacaacaattaaaactactcaactttcgggagagctactgaagaaattgccataa

SEQ ID NO: 492410 - DNA, 408 bp, Shigella sonnei
atgaacgagaaaactttaggtcaacgaattagagaaagacgcaaacaggttggtttaagtcaaaacgatttaagcaaagccgctggcgtatctggctcatcaatttcactatgggaaagcgaccatacagccccgcgcgggcaaaatttgcatcgcctggctgaggtattgcaatgttcaccaacttggatactgtttggtgacgaggataaaacaccagatccaccagtagcactcaacagcgccttagacttatcggaagatgagttggagatgttgcgattgtatcgcgcacttccaaaatcagagcagcaagcacaaatcagcgaactccgtgcccgcgttgagaattttaatcgcctattcaccgagctactagaagctcgcaaacgtaacaaacatcagtaa

SEQ ID NO: 492411 - DNA, 228 bp, Shigella sonnei
atgtttaaatcagacgtaattaatttttatgggacgaaagccaaagtagcgaaagctgctggtgttgatccatctgctgtttctcaatggggggaactggttcctgaaggtcgcgcgatgcgcctgcaagaggcatccggcggggaacttcagtacgaccccaaagtttatgacgaatatcgtaaggcaaagcgggcggggcggttgaacaatgaaaatcacccctga

SEQ ID NO: 492412 - DNA, 552 bp, Shigella sonnei; identical to SEQ ID NO: 23128

SEQ ID NO: 492413 - DNA, 1041 bp, Shigella sonnei; identical to SEQ ID NO: 464142

SEQ ID NO: 492414 - DNA, 771 bp, Shigella sonnei
atggaaaccgtatttgacgcactgaaagcaatgggaaaagccacatcggtagaactggccgcgcgacttgatatcagtcgtgaagaggttctcaacgagctgtgggaactcaaaagaaatgacgtcgttgataaaactggtcacacctggtttctggctggcgaaggtgaatcccgggtaaccgaagagcggccagtaaaatctgaagcacaggatatgctgaccggagaggtcgaacaaaaagttaccgcagacatgatgattgagtttatcggtcaggatggtgctaaaacgtgtgaggaactggcgggtaagttcggcgtcagtactcgcaaggttgcctccacgctggcggtggtaaccgcaacggggcggctggcacgcgttaatcagaacggtaaatttcgttactgcatgccgggcgataatttaccagcagagccgaaagccgcgctggtaacggaaagtgatggtaaggcctttcctcagccagcaggtgctgcgttaccagtccgggaagccgcaacacaggaagaaattaaaacagaaactgtggcggacattgtgcagccgttgccatcgtttaccgaaacgcaagcagatgagctgatttttccgtcccttcgcagggcaaacctggcgctgcgcagggcgaaaagtgatgttcagaagtgggagcgagtctgcgccgcgctgcgggagctgaacaagcaccgggatattgttcgacagattactgattcttcccgccgtgttgtatcggaaaagtga

SEQ ID NO: 492415 - DNA, 393 bp, Shigella sonnei; identical to SEQ ID NO: 8063

SEQ ID NO: 492416 - DNA, 462 bp, Shigella sonnei; identical to SEQ ID NO: 8065

SEQ ID NO: 492417 - DNA, 180 bp, Shigella sonnei; identical to SEQ ID NO: 18953

SEQ ID NO: 492418 - DNA, 252 bp, Shigella sonnei; identical to SEQ ID NO: 18948

SEQ ID NO: 492419 - DNA, 279 bp, Shigella sonnei
atggcacgcaacgcaaaatattacaaacatgataattcgaccgttcttgcccacacgcacgagcggtattctcacgcatttaagtcagactggtaccagcatcccccatgcactgaagaacaggccgaatggctcattcagtgttaccgcaggcgcggatgcgaggttaaaaaagcccttagcctcgactaccgtcactggataatctccgtcaggcttccttactctgaacgcccaccgcgtccgtcccgcacattccagcaacgcatctggaggtaa

SEQ ID NO: 492420 - DNA, 375 bp, Shigella sonnei; identical to SEQ ID NO: 4955

SEQ ID NO: 492421 - DNA, 291 bp, Shigella sonnei
atgagtagaacactcgaacagaagattgccgatgctgaggccagattgcagcgtctgaaggcgaagagcaggagcctggacacagcgcagaaggtcattgtgggagcggcattgctggcaaaggtcaggaagcctggggaaacacaactacgagcctggttgcttcatctcctgaagacagaggtaacacggcaggctgatgtgagcaggatacagccgttgattgacgaactgaacgcgttaccaaaaccagtccccaaagaagtgtcagaaaacgaccaacaggcgtga

SEQ ID NO: 492422 - DNA, 2190 bp, Shigella sonnei
gtgcgccctgcggggctaaaagaaaacggcaacaacgacacgatggcaatttatcatctcagcatgaagattctttccagaagcaagggctacagcgccgttgcttctgctgcctatcgtgccggagaaaaaatactggatgagcgcaccggagtgattcacgactacacccgcaaaaacggtgtagccagcgcagtgattctgacgccagcaaacgccccagcatggtgtgcgaaccgcgccgaactctggaatgctgttgaaaaagccgagcggcggaaaaactcacaacttgcgcgggagttcgaactcgccatcccccgtgaactggcgcaggatgccgcacgggaaacagttctcaacttcgtaagggaaaactttgtcagtcgcggcatgatcgccgacgtggcctttcacaatctgggcgggtcaaacccacacgcgcacatcatgctatccatgagggcaatcacgcctgacggcttcggggagaaagtccgtgagtggaatgactggactcacgccgaaacatggcggggatcatgggcagaccatgcgaacagggcgctggcgaacgccggttatcaggaagagatagaccatcgttcatacgagcgacagggggttgagaaaacgcctggcattcacctcggaaagtcggcctgtgcgatggaaaagtggggcatcgaaacagaacgcggcgaacagaatcgcctgattaacaggcttaacctggaaatacaggtttcccgcgacgaactcaggaacagtgagctgacagagcccgcacgccgtatggctgaccttctgaatattgagcttcctgacaacgcaacttcgtacatactgcatgacatcatcgaagcgttgccgacggacagtaacgcagcatggaaactcaccagtaaagccatgtcgatgatggcagatatgcaggcgacgcgcagacgctgggaagatctgaacaccgaacgaaaggaagcgatgagccatgctgccagcctgaaaaaatcatcgccgttttcgtccggtttttcccgtattcccctgatgcaatgggttgcaccggaatacggccgcgaacaggaaaaaatccagtcgttgagccagcgcatggaaaaattgcggcagcatcactggaaggttgagaaacaggacattcccgcgagtcaaaaagcatttgaaacacagtggcagcagtggggtgcatctggccttgcagatctccgagaacagttgcgtaaacgtgaagaggaattgcgccggaaggagcaggaggaaacagaacgtcgtcgggcggagcagctcaggagaaatgacaatgccgttatggattcaggggtactgaaagcagtcgttacggggtatggcgaggcccccatgccaggtaacggggaaatgacctgttaccttctgcttcacaaccggaacggagaatatacgctctgggggaacgaactggagaaataccgcgccagaatttttgagagtgttgatttaatgcgtgacaggagtggttatatctgtgagcgaagcgaaatcggtcaacgtccaccactgcaacatgtttattcctctgcgacctttgagcaactgctgacgcaggtttgccagacatggccgcaacatacccgcgatctccgccagccgaagacatggccggagtctttctgtcttggagaagaccgccagccagccatgccatcactggcggcaaggaaggtggattttacgcagggacgtctgccaccgactctgatgccggtaatgagttctgtcgaccgtgaaacccgccagcttcagcttttgctggtcatgggtgtggatgactctatgggcggtgttgtccggcttaatggtacgctgtatcccgcgtttgccgtccccacagccgacaacagccagctggtaatcaatgcactgaccgacaaaggtttacgctttgcaggctatggtgaagcggtaaaccacgatgctgacagtccggcacgtcctgcgccggaacttatgcagtttcatctgaaaacctggagcgaaccgctttttgctatcgtcaacacgccagaaaaacagccggatcatctgttccgctcgctgggctttgagcgcacctgggatgaatggaaacgtgatgaatatgcccgaacacacgccaccgagaggagacatgatcgcggttggtcacagtga

SEQ ID NO: 492423 - DNA, 1419 bp, Shigella sonnei
atggcccggcctgatattgatactggcggctatccagtacagcgccgtgccaagatagcgggcgctggtttcaacctgcctgatatccgcaatccgcttttccgaaaaccagaactcaaactgcaccgtcgggtcatatacagccagtttcgggaccgccgttatctgaaaataccccggtatcagttcaatagtgacaggcgctgccggtgccgcaatccggaacgataccgacgccggatcgccctgctgcccccgggcatttaccgcccggactgtcagactgtaattccccagcgccagctgcctgaagcggtatgtggtttccgtcgtcctggctgtgctgaccagccgctcactgccgtcgtccgctgccacggtcaggcgaagcaggaagctcacacccttcaccaccttcggcgtgtcccatcgcgccagcacctgatattccccgctgtctgcggtgacttcggcggtcagatgctgcaccgctggcggcgtgacaccattcaccgtgccgcgccggtcaccgtcaaagtgtgccccgttatccacgatggcctctttttccggcacatgctgcacggcggtgatggcatacgtgccgtcgtcgttctcacggatactcacgcagcggaacagacgctggcgcagcgtcggcagcttcagcccccacacgctgtattcagcaacaccgtcaggaacacggctcacttttaccttcacgccgtcggtgacggactggacctccacgctgaccggattgccacttccgtcaaccaggcttatcagcgtggtaccggaggacggcagcgtgatttcacggtcgagcgtcagcgtccgggtctggctgttcaccgccagtacgcgaccaccggtgctgataccggcataatcatcatcgcagatttcaatgacatcacccggtacatggcgaagcccttctgcgcccacgctgaagtccacggtctgcgtttccagcagttccgttttaatcagccacagcccggctcggtgtgcctgcccccggctggtacagccaaaggcatccatcttcgtgacattacgaccgtaacgggcaatggcctgcgtatcctccacaagctctgtcgccgtctcccagccgttatctgggtcaatccagttcacctcaacggcattatggcggtccttcagggcgctgaagctgtagcggaacggcgcgccatcgtccggcatcaccacattactgcggttataggtccacaccttatccgacggtcggtcctgcacgaacgtcagcatctgtccgttccataccggcatacagcgcatcgccgagcagaaatcactgagaacatcccacgccttacgctgtgtggtcaggtaagagttacaggtgatgcgcggctccgtgccgccaaatccgtccgtcactga

SEQ ID NO: 492424 - DNA, 330 bp, Shigella sonnei; identical to SEQ ID NO: 489863

SEQ ID NO: 492425 - DNA, 369 bp, Shigella sonnei; identical to SEQ ID NO: 487152

SEQ ID NO: 492426 - DNA, 225 bp, Shigella sonnei; identical to SEQ ID NO: 133446

SEQ ID NO: 492427 - DNA, 225 bp, Shigella sonnei; identical to SEQ ID NO: 133446

SEQ ID NO: 492428 - DNA, 303 bp, Shigella sonnei
atggttctggaaaaccagtacaaccgactgaatgagctggactcactgatagaggatattgaaaaacagcttaccagcgtggcgaggcagaatgaaacctgtaagcggttgctggatattcctggcgttggaccacttattgcgacggcagcggtggccaccatgggggaagcatcagcgtttaaatcggggcgagagttcgccgcatatgttggtctggttccaaaacaaactggctccggagggaaagtacgtgtgaggtgtactggcaatagcggacactaccatttgttctttttttaa

SEQ ID NO: 492429 - DNA, 225 bp, Shigella sonnei; identical to SEQ ID NO: 133446

SEQ ID NO: 492430 - DNA, 189 bp, Shigella sonnei
atgctgcagcagataatcagcgctagcagtcgtccgggtgacctgattgcagattttttcatggggttgggttcgacagtgaaagcggcactggcgctcgggcgtcgtgcaattggcgttgagctggagactgaacgttttgagcagacggttcgggaagtacaggatttagtcagccagaacggatga

SEQ ID NO: 492431 - DNA, 252 bp, Shigella sonnei
atggactataagcctgtcattcagtcgctgatgaatgacgtgtgctcaacgtctcagaatgtatcagtttgcatgtatcaattttcggcagccgtaaaagcaggaaaagcgataggcgagaatgtggaactgtgtaagaaagtggcaaatgaagaacgggcaatgttggattgcgaatctagcgagtcatcggcacagttcgttgatgcgctatttgacaccaatcgtaaggctgtagagtctgttcaataa

SEQ ID NO: 492432 - DNA, 525 bp, Shigella sonnei
atgacaaccaaagatattacctacggtatccaagctgaactctggccgcgagattacactaacgttgaaaaactactgatgttctggcgcagagaacaaattcctgtaagggtcactctcgaagatggccaggcgttttgcatgcacgtttatggcctcatgccatctcgtaacaaagttgacctttgcccagccccttttgacaaagaaaatcgtataaggctcccacttgaacgcattagtacaattgaatcaggtgtggttgacagtatcgctcacgatttcaaaggtcgactaacagttcaccctgattatgtcgataatcggccatcacgccgcgatttttttgcaatttgcaaccaagcctacaaagcaaacaaatctataagggtgtacatggcggatggccgtgaaattgagggggtgtcagcaggtgcagatgcttgtcaggttacactacgtgtcgagaacggtagaaaaatagttgttttgttcgattgggttgaacgaattttgcctttttga

SEQ ID NO: 492433 - DNA, 465 bp, Shigella sonnei; identical to SEQ ID NO: 469693

SEQ ID NO: 492434 - DNA, 279 bp, Shigella sonnei
atgagtgaaaagaaaacaacttactgtcaggtagcattgtctgataaggccaatgacaaacttggaaagtttcaagtgaaactaaaagaaaaaaatatcaaaatgtctaaggctgaagtcataaataccattctggaacaattgacaatggccgactttgacaaggttatatcttctgtcggggcttccgctaagactcgtgagaaaatcatgcgtatctatgagaactctaatatgacaaaggaagatctcgaaacgctattaagcagattaaaataa

SEQ ID NO: 492435 - DNA, 255 bp, Shigella sonnei; identical to SEQ ID NO: 19704

SEQ ID NO: 492436 - DNA, 879 bp, Shigella sonnei
atgccattactgcgtgaagaagctgaaaagctgtctaacaacgaactcgaacagggtgtgatcgaaaccatcattgatcgcgatgacctgtttgccatcctgccttttatgaaaattaattcaaaggcatatctgtacaaccgtgaaaaaacgctgagcgaagctactttcattgatgtgaacgacaccatcaccgaaggtgcagcaaccttcgaagagaaagttgcgaagctgcgcattctggctggcgacgttgacgtcgacaaattcctggctaccactatggctgataccaacaaccagctggctatccaggttcgtcagaaagtcaaaggtctggctcgtgccttccgtcgcaatctgattgttggcgactccaccactaacaacaaagccttcgacggtattccgaagctgatgcatgacgatcagaagatcgacatctccggcgcatccatgactttctctatgttcgacgaactggtcgacgcagttaaagatctgggcgcagactgcatcatgatgcgttctgagcatcttcgcgcatatcgtgcgctgctgcgaactgtaaacgtaggcccgtccgaaatcatgatggaaaacttcggtcgaccaatgctgtgccataacggcgttccgtttatcgtaaacgacttcattccggttgtggactccaccaaagcggatatctactgtctgcacctttctgaagagaacggcgttactggtctgtatggcggcgacaacgcaggtatcgttgttgaaaacattggtactgtacagaacaaagacgcagtacgtacccgtgtgaagtggtactgctctctggcgaataagcacgataaggctatcgctgcactgaccaatgtaaaaatttaa

SEQ ID NO: 492437 - DNA, 921 bp, Shigella sonnei
atgccagaacaaaagatgaagattacggaagaggcattttcggattttacggggcatatgtgccgcgccggatttaccaattctatctccgatgaacctttaaccgagcggcaacaaagtcagctatctgcttgtttgcaggcggttcccttctcccaatccgtaaacataactccggcttcaccatcagttttggttgggaaaactgttcaacttagtgcaggtattagtatgggtaagagtgccagttcatttacctggaagtcagccaatgatcaaattgcaaccgttaacggcactggattagtaactggcgtagccccaggcaaagtgaaaattaccgcaactgatcaggaaacccagctttccgcgtcagtggaagtcaccgtaaatccggtagccgttaaatccgtaacggtaacgccagactcaacctctgttgagaaagggaaatcagtcagtctgaaagcgaatgttcagccgtcaaatgcgacgaataaggcagttacctggtcttccaaaaatgaagacaaggcaacggtagaccagagcgggaacgttactggtgtagaagttggcactgcgacgattgagatcgtttcccaagatggcagcaaaaaggcaactgcaacggtggaagtaactgcgcctgttgtggctgttaccggcgtcgaaatcgacccaaatagcacaaccgttgaggcaaacaaaactgttcagctgaccgcaaatgtcgagccggcaggagccacaaataaaaccgttacttgggaatctaaaaataccgagtttgcaacggtggacagcgaaaccggtgttgtaactggtgttgcggctggtactgccacaatcgaggttactacccaagatggtagccacaaagcgacagcgaccgtagaggtcactgccgcacaggaataa

SEQ ID NO: 492438 - DNA, 435 bp, Shigella sonnei
atgaaaccagcaaaaattgttttattagaaccgcaattttccggttattcgggaatgctgtgcggcgttcagttcgagaacggggtatccgtagcggagttgccttttatcgatcagcagaggatttgtgcttcaatgcgagcgtcaacagtagagggcaaaaatgtttctccgtctgccgcatacagtgatcgtggtgaattgacagcagacctgattaccgagccagcagcgcctgacattgtgccaatgaaacgtggaacaccagatgaaccggccaaacagatccaggctttcacacgagaagagctggagtccattgcagacaacgaaggtattgccggtctacgagttattggtaatcaggttggtgtcaaagcgaaaggaattgtcgagatgattgaaggcatcctgaaagcacaaggcggtgagtaa

SEQ ID NO: 492439 - DNA, 747 bp, Shigella sonnei
atgtctaatacccatgtaaaaaacatcaaacttggtgcctgtaaggtgtcgtttggtggtgtggatttgggttacaccaaaggtggtgttcaggttgaagtagccactgaaacgctgaaagtcaccgtcgatcagttggggcagaccgtaatttccgaattagttcaggggcgcaacattaccatcaccgcgcctctggctgagtctgtactccaaaacatggttgacctgatgcctggttctactctgagcgaagatgacagctctgtcacgatcacatctgcacagggcgttaacctgattgatgtggcgaaggagctggttctgactccgcaggacaccaccgactatgtgttgaccatcccgaaagcggcaaccgcgggcaacttcaccatgacttaccagtctgatgatgttcgtgtgttctctgttcagttcagcgcataccctgatgacgaaggcgttctgggaagaatgagcggccctaaaccggtaaaaaccgtgtcgatcaaaccggaatctccaactgtaaaagcaggggagactgtgcaactgacagccgaaatcactccagctgatgccgcagacaaaaccggtgtttgggaatccgaagaccaggaaaaggccacggtagatcaaacgggtctggtacgtggtgtggcgcagggttctacaaatatctccttcaccagcaatagcggtggtaagaaggcaactaagtcagtaacgattaaccccgcagattaa

SEQ ID NO: 492440 - DNA, 4728 bp, Shigella sonnei
atggaacagttcaagaagaaaaagctaccgctgtttattgccggtgcgggtggtaaaaaaagcagcaaaagctccagccgtacaccggttgaagccgacgataccgtaaattctcgtgcaatggccgctatcctcgatcttcttggggaaggggtaattggcggcttagtaaatggcgcaagatctatttttatcgacgatctgccgattgtaaatgaagacggttcctccaacttcagcggaatcacatgggattttcgcgacggttcgcaagaccaaactccaatgtctggctttgatttcgttgaaacacctaaatccgtcaatatccagttaaaaaaaacacattatgtaacggtttcaatcgataacgatgaagctgatcgggttcgtgtcatcatgaagtttccttctttgcgaagcatagataaaaaaactggtgacacgaacggtacgactgttgagtacaagttccagatagcaaatggcgactcaacatttgtagatgtggtcgcggaaggtgaaaaaagcgttggcattaagctaacagcaaagaagaccggcgtttattaccgtagctacgagctgaagctgcctaagcctggacgcgcatacaaggttcgtgtagtccgtattaccgatgataacagtagccagtatctctataacgatacatgggtggattcaatcggggaaattgtcgatacaccgatgaactatccaaactctgttttagttggattgaaggtaaactctgagcaattcggcagcaccatgccatctcgctcttatctggtgcgtggcctaaaaattcgagtaccttcaaactataacgagtccagtaacacttacgctggggtatgggatggcacttttaagctgttgtcttcttcgaaccccgcgtggattctctttgatttgctgaccaatgctcgatatggccttggtcagtatgtgtcggaatctatgattgaccttggccagttgtaccagattggtcgatattgtgacgaagaggtcgatgatggctttggtggcaaagagaaacgctttgcaatcaatacgcagatcaccagtcgacaggacgcataccgactaattcaggatattgccggtgcattccgcggcatggtgttttgggctggtgggatggttaacatcatgcaggatagcccatcagatccggtaatgatgtttaccaactctaacgtcaaagatggattgtttacctataaaggttctgcgcgtaaagatcgcccatccgttgcgctcgtaacctacaacaacaaggaggacggttataagcaaaacatcgagtacgttgaagatcaggacgcaatgcgccgttatggtgagcgtaagacagaagtcgtagcatttggctgtacaagccgagggcaggctcaccgagttggtttgtggcttttatataccgccagaatggagtcggatgtaattacatttactgccggcttagacgcgtcatttctgatgcctggtgaaaccgttctgattcagaacaaatatcgcgcaggcaaacgtaactcaggtcgaattgtggcgtttaccaaaaacagcgtcacactcgatgcgccggtgtcgttagccaaaggcggctgctttattcgaatactgaatcaggaaggcaaaatcgttgaacgcgatgttcttgaaactggcgaaaacataacaaaggttacgttttcaaaagccctgtcgtcagcggaaacgcctgttttgaacggtgtctggacaattacagaaccagatctcgaacctatgcgcgttcgcatcgttaacatcgctcagggggaaacgtcgggtagctttgacatcaccgctgttgaaaacaatccgtctaaatatgaggcgatcgacaatggtgcaacgcttatcccgcagaatacgacggtattggacccgacttactccaagccgtctaatttgcaaatcactgaagggacttatctctcaagcccgggcaacctgtcagtaaaactgactgcaacatgggaagggaaatctccagagtattggatcagttggcgacgttctgatgaaaacaatgtatcgaactggcaatcggcgcgtgtaaccgaagagcaatacgaaatcgttaatgtcgcggagaatggacgctacgacttccagctgtatgcggtttcattcaacggtaaaaaaacagagattatcagtaccgtttatcaggtgttgggcacaatgacaccgccggattccccaacgtcattaacggccgttggagactatcgtaatgtgatactgaattgggttaatccagattcggtagaccttgatcacattaatgtttacgcatcccagaccaacaatctggatacggcgaaactgatcgcagagtctgcaagcaccacctttacacatgctggtcttggggatagcgaaacgtggtattactgggttcgagcatcgaacaagcgaggtatgttaagtcctccgaactcaaacttgggtacagaggcgacaactcgcgatgtactgtcgttcctgactggcaaaattacatcttccgagcttggtcaggctctgcttgaggacatcaacagcaaagcctctcaagaagcagttgacgagttaaatgagcatatcaaccagagcgtcgaatctttggagggggcggtaaacgacgttaaggaagatatagctgaattagataagcagttcagcgataacctcgcggattttgaaataaaattcaacgagcgtagcgatgctttggagaacgcacaaaccgagcttaaaggtgaggtttcggcaacgattgacaaggtcaatgaagcgtttgaaaaaattgatgctactgatgctgcaattgttgaaatcgaaaacaccgtatctgaacacgataaagctctcgctaatacagtcgaggcaataaaggctgcaagagatgaagcggcggctcttattgctaaggaaagcgaggctcgtgttgaaggcgatgctgcaaacgctaaacaactggaagtgttgcagtcaacggtagaggaaagctccgctgccgttgaagaaatgaaaaagacggttgcagaggtcgatcgtgccagtgcagaactgactacgaacattgaggcgttagccaaaacaaatattgacctggctcttcgtcaagatgaagaccagcacaagcagatggtcaataacgcgaagatcgcaacaacacagaaaacctttgctgatgatatgtctgcaatggccacgaaggttgaggaaattcgcgtagaaattggcgaagacattaaggccagtattctggaagagtccaccgctcgtgccgatggcgatgaagcgttggcaaagcgtgtcactcagctgcaatctaagtttgaaggagatatcagcgcggcgattagtacagagcaggaggctcgtacatctgccgatgaagctctgacgacacagatcactcagcttgagtcgaaagtaagcaacgatatcgtcgcagctattaaggaagagcaagaagcccgagcaacggaagattcggctctggcaagccagatcacccaacttcaggcaaaggttgatgatgatatttctgctgcaatacgtagtgagcaggaggctcgagcaagcggggactctgcgttagccaaacaaataaaccagcttcagtcaaaggttgacggtgatatatccgctgccatcactcaggagcaggaggccagggcaagtgctgaccaggcgctctcacgagaaattaacagcctgcgagcacaaaccggaactgatattgccgcagcggttgctgtagagacaaaagcaaggactgatgccgatagtgcattgtctacccagattacgtctcttacagcaaaagctaatgatctcgaggcgtctcttgccagagaaacaacggctcgtgcagatggtgataccgctttaacaaaagaggtttcaagtttaaaagcacagacagcgaaagatattagtgcggccgttgcagttgaaacgcaggctcgaactgatgctgactcggcgttgtcgtctcagatcaccaagctgacctctcaatacaaagaggatattaaagcggctgtagcaaccgaaacgaaaacgcgtacagagcaagatgctgcattggcgactcaaatcacaaacttagagtctcaaacggcagccaacatttccgcggcggtcacaactgaaacgacagcgagaacgcaggcagataatgctctgagtgggcgaatcgatactctgaaagcagaggtgaatggaaataccgcgacaattcaacagcaggcaacagctattgctgataccaacaaaaaagtgtcaaccgcgtggacgttgaaaatggaaacttcaacgagcggagggcagaagtatgttgctggtattgcgcttggtatcgacaccactggcctttctcagtttttggtgcaggctgacaggtttggtttggtcaactctgttaacgggaagatcacaacgccatttgttatcgaaaacagtatcgcctatatgaatggagcgtatatcaaggatggcacaatcaccaatgcaaaagtaggcgatctgcaatctaccaattttgttagcggtagatctggatggcggttcggcaaaaatggaacgcttgagatcaacggtaatagcggcggcaatgggcgattggttataaatggtcagcggattgacgtttatgacgataacaacgtcctacgagtaagaattggccgtctgtga

SEQ ID NO: 492441 - DNA, 4731 bp, Shigella sonnei
atgtggtacagggaaggtactatcacatttacacagggtagcaatactctggttggggcagggacagcctggaacgtaacagctaatggtgtgttgccggggatgatcgtcattggccccgacaataagctgtatgagatcaagcgcgtaaccagtgatacgaacattgttctctcagaaccttataccggcgaaactcagtctgaagttccgtgccgaatcattacgacctatgaaggcgacttaacacagtttagcgcgcgctttacagcactaatgtcgcgtatgtcggctgattccaagtccatgcgcagttggttgactgcgctggatgaggtgacaatcgagcgtgaagacggtacagaagtgaccgttaagccgctgatacagattgtcaacgagcacaacgaaaacgttgagtggtataaaaataacaccgacgcgattgacgctgctggcgacaaagctcgtgaggcggcggccagtgctgccgaagcagcagaaagcgccaataccgctggagaaaaagcctctcaagcgtctcaaagtgcatccgctgcagagtcctcaaaaagcgcggcggccaccagtgccggtgccgcgaaaacgtctgaaacgaatgctgcagcgtcacaaaaatctgcagccacttctgcatccaccgcgaccacgaaggcgtcagaagctgccacctcagcccgggatgcggcggcctcaaaagaggcagcgaaatcatcagaaacgagcgcagcctcgagcgccagtaatgccgcttcctcggcaacggcggcaggaaattccgcgaaggcggcaaaaacgtccgagacgaacgccaggtcttctgaaacggcagcgggacagagcgcctcagctgcggcaggctcaaaaacagcggctgcgtcgtctgccagtgccgcgtcaacaagtgccgggcaggcctcagccagtgccaccgccgccggaaaatcggcagaaagcgccgcatcatccgcttcaacagccacaacgaaggctggcgaagccactgaacaggccagcgcagcagcgatgtcagcttccgcagcgaagacatctgaaacgaacgcgaaagcgtcggaaacccgtgcagaatcctcaaaaacggcagccgcatcgtccgccagttcggcagcgtcatcggcatcatcggcgtctgcttcaaaagatgaggcgaccagacaggcgtcagcagcgaagggcagcgccacgacggcatccacgaaagcaacagaggcagctggcagtgcgacggcagcagctcagagcaaaagtacggcggaatctgcagcaacgcgcgctgagacagcggcaaaacgggcagaggatattgcatccgccgtggcgcttgaggatgcgagcacgacgaaaaagggggtagtacagctcagcagtgcgaccaacagcacgtctgaaacgctggccgcaacgccaaaagcagttaaagcagccaatgacaatgcgaatagcagggtgccatctaaccgaaaagttaacggaaaagcactgactgcggatataacattaacgccgaaagatattggtactttaaattcagtaacgatgtctttctctggcggggctgggtggttcaaactggctacggttaccatgccacaagcgagttccatcgtttacatcgcattgattggtggcgctggttacaacgtcggttccccacatcaggcaggcatttcagaactggttctacgagcaggcaatggaaaccccaaaggaattaccggggctttgtggaagcgtacagctgtcggattagcgaatttcgcctggatcaacacatccggcgatacatatgatatttacgttgaaattggcaattatgcgacgagtgtaaatatccattgggattgtactgcaaatgcgtcagtttctatttatacatcgccaacatattcagcgagtaagccttccagcgttaccgatggtgttgtttatacgatgtatagcacacatcagaaaccgacgccgttagatattggagcactgccaacaaccggaggaacagtttcaggtccgttgtctgttactggtgggatcaccggaacattaaatggtaatgcaagtacagcaacgaaattgcagacggcaagatctatcggtggagttggtttcgacggttctgcaaatatcaaccttccaggtgtaaatactacgggtaatcagaacaccactggtaatgctgcaactgctacaaaacttcagactgcaagaaaaatatccggtgttccatttgatggttctactgatatcactttaaccgctgcgcatgttgccgctttcgcaagaagggcaacagggtcatatgcggatgctgatggtggcgtgccgtggaatgctgaatctggtgcttacaatgtaactagaacaggctacagttatattcttgccaacttttataccggtgtaggtagttgccgtacgcttcaaattaaagctcactataaaaatggtggtctgttctaccgttcctcaagagatggctatggttttgaaagtggttgggagcaggtttacacgactggatttatgcctcagccggctgatataaacgcaccaaccgctgccgctggatggttaaatagtggtaacggaacggcatttacgactgctcaatttataacttggctaaataatcagggggcatttacaaacaaacattggatcgcacggtgctcatgggcttacgccaacaataattatatagacgacactggttgcggtaggatcgatctatctggttccgtgattgaggtgtttagtaataaggcaacaagccactacactattcgtgttacaacgacaacaacatcaggtcatggtggtgttaataatgcggaatttatttatgtgtacaatgggagtgattatgcgccaggctggcgtcgttcttataacactagaaacaaaccaacagcttctgatgtaggagcattatcgctttctggaggagcgttaactggcggattaactgctgctggcgagattatttcaaaatcggcgaatggtctgcgcattgcctatggcaactatggattctttatccgtaatgatggatcgaacacatatttcatgctaacagcatcaggagacacattaggttcatggaacggtttgcgacctattataattaataataccagcggtgctgttacgatcggtaatggactcaatgttactggcggcatcaatggtagtttgaacggtaatgctgcaactgcaacaaaactgcaaacagcacgcacaataggcggcgtgtcattcgatggctccgccaatatcaacctgccgggtgtaaacattgctggtaaccagaacacaaccggtaatgcagcgacagcgaccaagttacaaaccgctagaactataaatggagtgtcgtttgacggttctaaaaacattgagctaactccaaggtctataggcacgatcaactcagcaacaatgtcttttagtggtggtaccggatggttcaagctggcaactgtaaccatgccacaagccagttccgtggtttacataagcctgattggtggcgcagggtttaacgttggctccccgcagcaagcaggcatctctgagctggttctgcgtgcaggaaatgggaaccccaaaggtattactggtgcattatggcgacggacctcggttggatttactaattttgcatgggtgaatacatccggtgatacctatgacatttatgtagaaataggtaattacgccacaggtgttaatatccagtgggattataccagtaacgccagcgtaacgattcatacatcaccaacttatacagcgaataaaccaacaggcctgacagatggaactgtatatgtaatttacagttcgcacattaaaccgactgctgctgatgttggggcgttatcattatctggaggtcaattgaatggtgcactgggcatcggtacatccagtgctcttggcggtaattccattgttctgggtgacaatgacaccggctttaaacagaacggagatggcattctggatgtttacgccaatagcgcccatgtttttaggttcgttaatggcacgctgcaaagccttaagccgttgagtgtaacgggtgacatcacgtcaagtgcgtgggtttacgccaaccgtttttccatcaacagcggctctggcgcgtggatagatatgcgtaaccagaacgtcatcttcgggaggaacgctgtaagtacaagctctgcacaagcgttgttgagacaagaccacgcggatcgcaaattcttcttgggtggcttgggaaacagtcagtttggtttttacatgatcaacaactcacgtaccgcaaacggcacggatgcgaacgcatacctccagaatgatggtacttgggtttgtggcggtaatggcagctttaatgacgtttatatccgctctgaccgtcgtagcaaacgcaatattcgcaagattgaacgagcgctcgacaagctggatcggatcgaaggtgttctgtacgagattcaggtctgtgaccggtatgagcagtctggcggcctcatcgctcaggacgtccagaatgttcagcctgaactggtaacggtcgaccataacgatcagtcaggagagcctcgtctgcgtcttaactacaacggcgttatcggcatgttggttgaggctgtcaaagagctgcgcgaggaagtgcgcgaactgaaggcaaaaatgtaa

SEQ ID NO: 492442 - DNA, 783 bp, Shigella sonnei
gtgccaattgtcggtgttcccggttggattgggtcttcggctgtcagtgtgacaggccagagatggatgagtgcggctcgaacggcggtgcaactgccagcggctggttcaatgtctcaaatggccgggcgatctaaagaagttcagtacagcatcggtgcgaatcataactacaacaaagacacactgatcaactatttaaaatcccagggggcgacgccagtcgttgttaccattacaggggatctggtgtcgtccagtagcggcgtgccatgtttagatttcccgagttcacttaccaactcttatatcagccttgtaatcaacgcaggtgtgactgtctatggacgcggtggcaatggtggtagtaacgctgccggtgctgctggtggtaacgcaattaataatggcatcggtacacgcttgcgtattacgaataatggtgcaatcgctggaggtggtggcggcggtggcggcggtaacaggggtaaactaatatttggtggtggcggtggtcgcccattcggtgctggtgggtcttcctctcatatgagttccggtgcaactgctggtactatttccgctcctggtaaaggatctgttggtgaggggtctcttagtgcatatacaggcggttcgggtggtaatgtcggtgctgctggaggaagatgtaatactcaaggtaacggtacagaatataacggcggggcagctggtaaagccgtaactggcaacgcgcctacatggactaaagctggggcaatttacggcgctcatgtgtaa

SEQ ID NO: 492443 - DNA, 324 bp, Shigella sonnei; identical to SEQ ID NO: 469594

SEQ ID NO: 492444 - DNA, 252 bp, Shigella sonnei; identical to SEQ ID NO: 469596

SEQ ID NO: 492445 - DNA, 522 bp, Shigella sonnei
gtgagcaatacaacgatagagattttctctggagagaaagattatgatctaaacggttttgattgcggcgaagagtcactaaacgcctttttagccaaccacttaaaaaggcagcatgagggaaaaattcttcgtgcttatgtgctttgcgctcaagaagaaaggccaaaagtgttaggatattacactttgtcaggtagttgttttgaaaaggagtccttaccttcaagaagcaaacaaaagaaggttccttatcggaatgttccaagtgttactttgggtaggctggctttggacaagtcccttcaaggtcaaggatttggctcaatgcttgtaacacatgcaatgcgcgttgtgtacaatgcatctcttgctgtaggcattcatggacttttcgttgaggcgttaaatgacaaagccaaggcgttttataaaagtttaggctttatccagctggttggtaacaacgagcgttctttgttctatcctacaaaatctatcgaaaaattgttcgaagaataa

SEQ ID NO: 492446 - DNA, 306 bp, Shigella sonnei; identical to SEQ ID NO: 12113

SEQ ID NO: 492447 - DNA, 768 bp, Shigella sonnei
atggacgatttatcggtatacgcgagatcattggataaggctaaatactatgtttactgtctctatgatacagaagacaagatgaaaagaccgttttacataggaaaaggcaaatcgactcgttgtctcgatcacatcaagtatcccgatgactctcccaaatccatgcggatcaaagaacttttggctaataaaaaattaggcatagatatacttcgtcatggtatggatgaaaccacagccaaacttgttgaggcgacatgcatcgaccttatgggggtcggagagcttacgaataaggtacgaggaagtggttccatgatgggcagaatatcactggacgcctaccatcacttagtgctgcaagaggaaactgaaattgctcctgagcacgccggtcttgccttcctgctaaacagcacctacaagtcaggaatgtccgctctggcattatatgaagctacgcgtggcgtatgggcaaaggttccaagagacgagaatctcaaatatgcctacgctacatatggtgggctgataatggaagtttatcggattgaatgctgggtcaaagccggttctcagcagtactttacaagggatatagctcttggccccgacacaaaacgttatgaatttgttggcagaatagccgatgagcatattagaaaactgtatgtaggcaaattaatcaagaagccaccaagctacggtagcccttttgtgaaggttggggtggttaggactgaacatagtgttagcgcggcataa

SEQ ID NO: 492448 - DNA, 783 bp, Shigella sonnei
atgaaagacgaaattcagaaattagcctgcgacatcattgataaaactggtttagaaatcagcgagagcaatcggctagacatcattgaaaaagccgtaaaaacagcaatggatcatatcgccactcgtttggtcgagatcccgctaccggggctaccttatctgaaggttaagttacacgtatggggtgaaccttcttgtgcacggcgttctgcattagttgtttttattagcaaagaaaacccgattagtcttaaagtgcaggttggggcatggatggatggcaaagtgatctacacaaataccgttttttgtgcgtcaaatgacagtattattgaagaggctattcaagaatcacttctaactatgcatagcttatttttgctggaagacaagcaaaactacgaagagtacttacggtcgataaaaggtgagagaacattgtcacttaaagccgatttcgttaccccgacaaacctgttggaggtcttgcttaataaaggggctaatgatgccgtaaatgtaatcagagagagtgagtatgcgtctctttgcgacatgtgcaaaagccagttggatctggtgcatatcgttattgatgctgggaaggcatgtgatggcgtaatggcggagtttgctgggaagatggtcaggattgctaacgaattaccgatgatagagcaagaggctaaatcatacgccaccaatcatgtcacagagcttcttgtcccctatcgcttagaaagcgatcagcgcaagatgattagctggggaagttggtaa

SEQ ID NO: 492449 - DNA, 180 bp, Shigella sonnei
atgatgctcggctggatgattgcatttttagcagttggttttttcataggtattgtggtgatgtccagttgcatcaatgactacattaaaagcggtgttatagaaagacgcggtcgtatttatcgcattgtagaaataaccaacaccctgaaggagattaaggatgatcgtattaagtaa

SEQ ID NO: 492450 - DNA, 351 bp, Shigella sonnei; identical to SEQ ID NO: 476662

SEQ ID NO: 492451 - DNA, 246 bp, Shigella sonnei
atgacgatcactatctacggacgagataactgctcatactgcaaacgtgcggtcgagctggcgaagcaactaaagggacatggctacggtgattatgagtacatcgacatcaccactgccggtatcgacaaggaaaaactaagtgaaattgttggtaaaccggtagagactatcccccaagtgctgatcgatggccaaccgattggcggatacacagaactggctgcatacgtcagcaccctctga

SEQ ID NO: 492452 - DNA, 213 bp, Shigella sonnei
atgaacaccactatttccagcctaatcgctcttgagatcggacacgtacagaaattagctgatgagtgtgtagctgacatcctcaccgatctaccgaatgagcagattcaggttggtgtgaatgacacaactggctttatattcgaatttaacaacaaacgcttcacgcttctcaataccggctccgggtctttagccgtcagaatctgttaa

SEQ ID NO: 492453 - DNA, 1056 bp, Shigella sonnei
atgagcgaaaacggcaataaaaacatagcgatcgttgaagcattttcagaaacagataaaaagacaggcgaagttgttacgttggttcctaacactaataacactgttcagcctgttgctttgatgcgtctgggcctcttcgttccgacgctgaaatcgacatccagaggaagaaaggggcaaatggtctctatggatgcctctgctgaacttaaacagctgtctctggcaaaagccgaagggtacgaagacataaggatctctggccttcggcttgatatggataacgactttaaaacgtgggtgggaataatccacgcgtttgccaaacacaaggtcgttggcgatactgtcacgttgccgttcgttgagtttgtaaggctgtgtggcattccgaccgccaggtcatcagcgaagttacgcaaacgcctggacagttcgctaagccgtattgccacaaataccatctcgttccgtagcaaaggctctgatgagttttacgtaacgcatcttgtgcaaacggcaaaatatagtgtcaagcacgatacggtcgaactgaaagcagatcccaagattttcgaactctaccagttcgacaaaaaggttcttctgcaactccgggctataaacgaactctcaagaaaagaatccgctcaggcgctttatacttttattgaaagtttgccgcctgatccggcaccaatatcactagcccgtttacgcgccagacttaatctgacaagtcgcactattactcagaatgcgacggtaagaaaggctatggaacagctgcgagagataggatatctcgattacacggaagttaagcgcggaaactcggtctacttcgtcatccactataggcggccaaagttacgccaggcacaaatatcaacaaaaatcgataatgatgagacggaatatagcctcccagatgagaatcaagatgacattatcgacgttgtgcctgacgaaaaagaaggcaaaatggtcatgttgagtaaagaagaactggcgcttctcgaagagttgcgcaaggcaaagactcgcaaatag

SEQ ID NO: 492454 - DNA, 282 bp, Shigella sonnei
atgtcatacggtacagggatttacaacaataaaggaattaacgttactggcttccttacacctattttttttcttgatcgatttacggcgtcatcaggctctaagacgtactctaatccgccaccgggtaaatcactacatgccgtgtggtcattaatgcctcttaacaacgacaactacatcaatttacctgttccaaatgttactattaatggaaatacggttagttggtcaaatttatatacggggcttggttcttacatatacacatactggggataa

SEQ ID NO: 492455 - DNA, 438 bp, Shigella sonnei
atgatgtttattcatgagcatagtaacggatacaatgctctcagattgcatcaggtaaatggtagccccggaacaataacagtttatgctttttctgatatggtgttaccacattctggctatggcattgccatgtataacagcgcaggcgcaatggtgtatcacggtgagatgatgccccttgatgcgaaacttatcactatttctgaccctcaatttacaatagatatggggtatccatgtgcggtaatgcctgctatggttggagtatataactatagacgaaccgattacgacagacctgtctatgtaacaatgacaggtgcaactggaaaccaagtatataacggtcaatggtattccggtaatgtcacatgggatattaagaagatttatacaaacaaaattctggtgataaatacctccaagtatgattag

SEQ ID NO: 492456 - DNA, 501 bp, Shigella sonnei
atgagtaacaaaatcgaaaatcccgtagttctcattcacaagcgcgagaaccacgactcctatgcggtggcgatcaccaatgggagtcacgatttttacgatggcctgctaatggcctcagtgtcgcctgatgaggcagataactcttttgccgtcttcgctatggttggttactacatggctgccgaaattgagaagttgctggcgcaaagagacgcattagcggcggagaatgcagccctgaaagaatctgagcgagcattcgatgcgatgtgtgccgaggaacacggagataattgggttagcgaattgacggagactccagccaccgatgcttttctggctgaagtacgtgcgcagggcgtggatatggctcgtaacgcgatgattgattttgttgatggtgaagttgggccaaacaagaacgttccggggctgattagaggcgcagagatatgcgtaagtattgctgaacagcttcgtaaaggagtcatccagtga

SEQ ID NO: 492457 - DNA, 402 bp, Shigella sonnei
gtgagcaagattgactatcaggcactgcgtgaggcggcagagcgtgcaattccggcaatggaacgcctgttaatgttgccagttgatgatgatctgatatgcgaacaggaacttaaagatagcggtgttgatattgatgccctcaacgccttcaaatttctggccggaccagaaaccgtgctggcactactggatgagatcaacgcattagaggaaacgcgtatcaacgatgtttgccgtattgcggaactaacaaaacaactggagttggcaaaatcaaaactcaacgagcagcgtgagtattacgagggcgttatctcggatggaagtaagcgcatagccgctcttcttcgcaaggacaatcgtgccagcgccacgaacattgaaggtgaaagaaaatga

SEQ ID NO: 492458 - DNA, 186 bp, Shigella sonnei; identical to SEQ ID NO: 12181

SEQ ID NO: 492459 - DNA, 654 bp, Shigella sonnei
atgaccaccgttaacaataagaaatgctacccaagcgagaaatatcttaatgagctgatcaccaacattgagtttgctgcaagagcaccagttgaagtcgtgagagcgattgcagcagagctacagaagcaccgtaaggcctatgccaatacagccgcatctaaggatggttggataagctgtagtgagcgaatgcctgtaattggcgagctaaattggagaactagttttcctttactggttacgtgtgagatcggcgttatacctgcttattacggctttgtgagcgttaatggtgataggcattatggctttatggagagtcttaaatacggagacgctaacggcaaccatcctcaaactaatgaatatggtctgattagcaatgtcacacactggatgtcactaccagaacgccgcaggagtcgaacagtgaataatgcagagttatttcagaaaatatcggctctcgcgactgaatgccacgctatagcatctgagcttgatgttggcgatgaacgaaccgagatgttcgaaatatacagtgtgctgcgcaatctctgtcggcgtggctacgccactcaagtagggcgaatgactaacccactactctcatcctgtgatgaggatgactcggatgaggatgacgaatga

SEQ ID NO: 492460 - DNA, 633 bp, Shigella sonnei
atgagcacggtagcgaaagatctcacagaagatattctcaatgaaattattgctggtgcaaatacctcgcttgagcaacttcttgcgttagcactgagagccgaacgtcgagacagaaatcgtttttatgagcgattaccagggaagcgaccagatagatcggatgaagaaggttgcgatatagactacatggagccttcagagatttatcaacttggtaaagatgacggctggaacgcttatcacgatgctgtgatgaagttggatgaaaaagttaaacctctttctcgaccggtagatcacggtttccgcgataactgcgaatgctctagttgccagaccacggcccgtatttgttccgaattgacagataagtccagcctaatctacgaagttaatgtaggcggtaatacatgggtcgaatgcacaagagctgcatacgtaagagcaaaagacaagggtgaattaaccagagttgttacccatcacccaaataatgagcttaaagatcaccagattagagaactggtgaacgagttgcgggatattgcggttcagtaccacggagcgcagcaattgcgggagaagattgccagagcagtgaacaactcaattagatcagaaagtatgtag

SEQ ID NO: 492461 - DNA, 735 bp, Shigella sonnei
atgaaaaagttgaaaagtttagaaatccctgggactggttataaattctttatggacaacgcggagtgtgcgcctaacgcgttggaaaaaatacaaagtcttatcaacagccttactgaagaagcgaaagaactgaagagcgaggcgacaaaggacaatacagctaaaatccaatgcttaaatctcgtttcttattgtttatatcaagtgtccaaaacactgattaaaggcaatatctattacgacgatgaagacacctcgacacctgaagaaaaagatagcgatgaagaactctatgaagatatctctaccagtgcgggtcacgctgccttcgatgctatgggtgaatcgtcaggcatcagatcgtttgttgaacagaacaattcgacaataatgattgagtactgtgaacaaacaagccccaaggccatacatgttcttcacgatgttgctgcaggggttcgctgtgaggctgaagcggtcagaaaagatgtatttggtgcagacagtaataccgtgaaagcgtttatcaacagtgctctgctaaattcttactcaaaccttatcgtcaatgcggcactatgcgcaaattcaggtgaagaacacattgtcataactgaaaccaaacatgagcatcaacagtcaccaaccatagaagaggtaactgcattggctataaaacaggcgagtgaaattagtgatgaaattctctctctgctaaacaaaactatgtaa

SEQ ID NO: 492462 - DNA, 231 bp, Shigella sonnei
atgtttgttcttatcgctggcgttaacgtccataatgaatattatgttaatcgcatcgctgggatcgctggttacgctgggcgcgtagtcgagcttatagatgaaacgacgcgcaaaattgacttattgagcgaccaggagcgaaaaaaagcagacgtgaacgacgctgatctatttttaatgttaaaagcgtttgtagaaatgggatttgaaatcagtttacataaataa

SEQ ID NO: 492463 - DNA, 303 bp, Shigella sonnei; identical to SEQ ID NO: 492247

SEQ ID NO: 492464 - DNA, 1425 bp, Shigella sonnei
atgcaacataagttactgattaacggagaactggttagcggcgaaggggaaaaacagcctgtctataatccggcaacgggggacgttttactggaaattgccgaggcatccgcagagcaggtcgatgctgctgtgcgcgcggcagatgcagcatttgccgaatgggggcaaaccacgccgaaagtgcgtgcggaatgtctgctgaaactggctgatgttatcgaagaaaatggtcaggtttttgccgaactggagtcccgtaattgtggcaaaccgctgcatagtgcgttcaatgatgaaatcccggcgattgtcgatgtttttcgctttttcgcgggtgcggcgcgctgtctgaatggtctggcggcaggtgaatatcttgaaggtcatacttcgatgatccgtcgcgatccgttgggggtcgtggcttctatcgcaccgtggaattatccgctgatgatggccgcgtggaaacttgctccggcgctggcggcagggaactgcgtagtgcttaaaccatcagaaattaccccgctgaccgcgttgaagttggcagagctggcgaaagatatcttcccggcaggcgtgattaacatactgtttggcagaggcaaaacggtgggtgatccgctgaccggtcatcccaaagtgcggatggtgtcgctgacgggctctatcgccaccggcgagcacatcatcagccatgccgcgtcgtccattaagcgtactcatatggaacttggtggcaaagcgccagtgattgtttttgatgatgcggatattgaagcagtggtcgaaggtgtacgtacatttggctattacaatgctggacaggattgtactgcggcttgtcggatctacgcgcaaaaaggcatttacgatacgctggtggaaaaactgggtgctgcggtggcaacgttaaaatctggtgcgccggatgacgagtctacggagcttggacctttaagctcgctggcgcatctcgaacgcgtcagcaaggcagtagaagaggcgaaagcgacagggcacatcaaagtgatcactggcggtgaaaagcgcaagggtaatggctattactatgcgccgacgctgctggctggcgcattacaggacgatgccatcgtgcaaaaagaggtatttggtccagtagtgagtgttacgcccttcgacaacgaagaacaggtggtgaactgggcgaatgacagccagtacggacttgcatcttcggtatggacgaaagatgtgggcagggcgcatcgcgtcagcgcacggctgcaatatggttgtacctgggtcaatacccatttcatgctggtaagtgaaatgccgcacggtgggcagaaactttctggttacggcaaggatatgtcactttatgggctggaggattacaccgtcgtccgccacgtcatggttaaacattaa

SEQ ID NO: 492465 - DNA, 543 bp, Shigella sonnei
gtgctggctgcgcttgatgaaaaacggccgggccccgtgctgacgcgggacctggaacgggtgctggagcgaagcggggaagccccggtctacgggccaaacctgcgcgcctcctgccgtcgtctggaggatgccggctggctgcgtaccctgcgcgccccgaacctacagctggcagtggagctgacggacgccggccgggccgtggcacagcctctgctgctggcagaacaggaccgcctccgggcagaacagcgtgcggcagaagtcgtcgtactgccgctggtcccggcagcaggtctgcccgcagacggcacttctgccactgatctggcggtggagctgaacggcataacgtatcaggcctgccgcggggattttgtggtgcgtctcgacggcagcacctgtctgcagttatggaataaagaaggcagggtggtacgccgggagggcgatccgctggaagtggcgcagtggctgcaggcctgtcatgacgcaggaatagaggttcgcgtacagataaatgaaagtgccgctccgtaa

SEQ ID NO: 492466 - DNA, 786 bp, Shigella sonnei; identical to SEQ ID NO: 491404

SEQ ID NO: 492467 - DNA, 240 bp, Shigella sonnei; identical to SEQ ID NO: 485662

SEQ ID NO: 492468 - DNA, 255 bp, Shigella sonnei
  misc_feature (144)..(153): n is a, c, g, or t
atgttactcagtagcatcggcaatttacataacttacacgttgttttttatatctcgaaaaaacagatagatagtgtgcgcactcgaaatgatattggtaacataaatagctttattcgtgataaacatctcaaaagatttccnnnnnnnnnngatcaaggttatcaccttatggagacgttacgtagaatgactatatttgttatcggcacattaggggtattaattttagtattgatggaaggtgattattga

SEQ ID NO: 492469 - DNA, 264 bp, Shigella sonnei; identical to SEQ ID NO: 490106

SEQ ID NO: 492470 - DNA, 3858 bp, Shigella sonnei; identical to SEQ ID NO: 484798

SEQ ID NO: 492471 - DNA, 2952 bp, Shigella sonnei
gtggtgaaaaaggaacacgcggacggcagcgtcacgcagagtcagtttgatgcggtgggcaggctcagggcacagacggatgccgcaggccggacgactgagtacagcccggatgtggtgacgggcctcatcacgcgcatcaccacgccggatggcagggcatcggcgttttactataaccaccacagccagttaacgtcagccaccgggcctgacgggctggaaatgcgccgcaaatatgatgaatccggccgtctgattcaggaaaccgcccctgacggcgatatcacccgctaccgttatgataatccacacagtgacttaccctgcgcaacggaagatgccaccggcagccggaaaaccatgacatggagccgttacggtcagttgctgaccgtcactgactgttccggttatgtaacccgttatgaccatgaccgcttcgggcagatgacggcggtgcaccgcgaggaagggctgagtcagtaccgcgcatacgacagccgtggacagttaattgcggtgaaagacacgcagggccatgaaatgcggtatgaatacaacgccgccggtgacctgaccaccgtcattgccccggacggcagcagaaacgggacacagtacgatgcgtggggaaaagctatctgtaccacgcagggcggtctgacgcgcagtatggaatacgatgctgccggacgggtcatccgtctgaccagtgaaaacggcagccacaccaccttccgttacgatgtactcgacctgctgatacaggaaaccggctttgacggccgcacacagcgttatcaccacgacctgaccggcaaacttatccgcagcgaggatgaggggctggtcacccactggcactatgacgaagcagaccgcctcacgcaccgcaccgtgaagggtgaaaccgcagagcggtggcggtacgacgaacgcggctggctgacagacatcagccatctcagcgaagggcaccgggtgacggtgcattacgggtatgatgagaaaggccggctgaccggtgagcgtcagacggtgcatcacccgcagacggaagcactgctctggcagcatgagaccagacatgcgtacaacgcgcaggggctggcgaaccgctgtataccggacagcctgtccgccgtggaatggctgacctacggcagcggctggctgtcaggcatgaaactcggcgacacaccgctggtggagtacacccgcgaccgcctgcaccgggaaacgctgcgcagcttcggccgttatgaactcaccaccgcttatacccctgccgggcagttacagagccagcacctgaacagcctgctgtctgaccgcgattacacctggaacgacaacggcgaactcatccgcatcagcagcccgcgccagacccggagttacagctacagcaccaccggcaggctgaccggcgttcacaccaccgcagcgaatctggatatccgcatcccgtatgccacagacccggcggggaaccgcctgcccgacccggagctgcacccggacagcaccctcagcatgtggccggataaccgtatcgcccgtgacgcgcactatctttaccggtatgaccatcacggcagactgacagagaaaaccgacctcatcccggaaggggttatccgcacggatgatgagcgcacccaccggtaccattacgacagtcagcaccggctggtgcactacacgcggacacaatatgcagagccgctggtcgaaagtcgctatctttacgacccgctgggccgcagggtggcaaaacgggtatggcggcgtgaacgggacctgacgggctggatgtcgctgtcacggaaaccgcaagtgacctggtacggctgggacggcgaccggctgaccacaatacagaacgacagaacccgcatccagacgatttatcagccggggagcttcacgccactcatcagggtcgaaactgccaccggtgagctggcgaaaacgcagcgccgcagcctggcggatgcccttcagcagtccggcggcgaagacggtggcagtgtggtgttcccgccggtgctggtgcagatgctcgaccggctggaaagtgaaatcctggctgaccgggtgagtgaggaaagccgccgctggctggcatcgtgcggcctgacggtggagcagatgcaaaaccagatggacccggtgtacacgccggcgcgaaaaatccacctgtaccactgcgaccatcgcggcctgccgctggtgcttatcagcacggaaggggcaacagaatggtgcgcagaatacgatgagtggggcaacctgctgaatgaagagaacccgcatcagctgcagcagcttatccgcctgccggggcagcagtatgatgaggagtccggcctgtattacaaccgccaccgctattatgacccgctgcaggggcgatatatcactcaggatccgattggactgaaggggggatggaatttttatcagtatccgttgaatccgataactgatattgacccgttgggattagcgacctgtttatacagcataactttaagtatgctttcatgcgtttcagatacgcaaaatgatgataactcttatgatgtgcttactattcctgtcgcctctggtaataatggtaataatatgcaatgtaaaaataatcctggttgtacacacttacaaaatagaggtccaatacctcaaggggtatggagctggaatgttaatggtcctggagcaaccaatagaaaacctaatggtatacgtttagtaccgtcagcaaatacagaaacatataatcgtgatggatttttaacacaaagttgtttaaacgctttcggtccgtctttaggacctcgattctgttccgagggttgtataactggttcatctaatgacatgcaaaaattaaatgagttaatattttcagagccagatagcacattaacagttacggactaa

SEQ ID NO: 492472 - DNA, 363 bp, Shigella sonnei
atgtgcgcacgagtcagcggggtaaaaagtggcggcatttacgccggacatgataatcatttctatgggcatcggaaaatcctcaagccagaacatttagactggcaagaatatgcattattgctgctcaatagcatgccggaaaaaacagctgagcattaccgcaataaaatcgccatttatttgcactggtatcagaaaaaaggcatcgaggttccacaaacccagcaaggggacattggcgcgaaagatatcccctcctggcggcggatatgcaaagttttactcaataacgattactggtgtcgggcattatcatttagtcctacgaaagcgaagaactatcagcgtgaggtagcctga

SEQ ID NO: 492473 - DNA, 738 bp, Shigella sonnei; identical to SEQ ID NO: 487826

SEQ ID NO: 492474 - DNA, 195 bp, Shigella sonnei; identical to SEQ ID NO: 5251

SEQ ID NO: 492475 - DNA, 381 bp, Shigella sonnei; identical to SEQ ID NO: 458903

SEQ ID NO: 492476 - DNA, 777 bp, Shigella sonnei
  misc_feature (697)..(706): n is a, c, g, or t
atgtcgtcaaccctacgagaagccagtaaggacacgttgcaggccaaagataaaacttaccactactacagcctgccgcttgctgctaaatcactgggcgatatcacccgtctacccaagtcactcaaagttttgctcgaaaacctgctgcgctggcaggatggtaactcggttaccgaagaggatatccacgcgctggcaggatggctgaaaaatgcccatgctgaccgtgaaattgcctaccgcccggcaagggtgttgatgcaggactttaccggcgtacctgccgttgttgatctggcggcaatgcgcgaagcggttaaacgcctcggcggcgatactgcaaaggttaacccgctctcaccggtcgacctggtcattgaccactcggtgaccgtcgatcgttttggtgatgatgaggcatttgaagaaaacgtacgcctggaaatggagcgcaaccacgaacgttatgtgttcctgaaatggggaaagcaagcgttcagtcggtttagcgtcgtgccgccaggcacaggcatttgccatcaggttaacctcgaatatctcggcaaagcagtgtggagtgaattgcaggacggtgaatggattgcttatccggatacactcgttggtactgactcgcacaccactatgatcaacggccttggcgtgctggggtggggcgtgggtgggatcgaannnnnnnnnngggatcgaagcagaagccgcaatgttaggccagccggtttccatgcttatcccggacgtagtgggctttaa

SEQ ID NO: 492477 - DNA, 153 bp, Shigella sonnei; identical to SEQ ID NO: 492244

SEQ ID NO: 492478 - DNA, 378 bp, Shigella sonnei; identical to SEQ ID NO: 476066

SEQ ID NO: 492479 - DNA, 309 bp, Shigella sonnei; identical to SEQ ID NO: 487355

SEQ ID NO: 492480 - DNA, 525 bp, Shigella sonnei
  misc_feature (466)..(475): n is a, c, g, or t
atgaatgaatttataaaagaacggttttcgtatttagcagataataaaaaagaaaacgccccagaactaaatgtttcctacggtatcgataagaattttttgtatggtgctggcgtttcaatttcttccgttttgattaataattcagatattaattttgtctttcatgttttcactgattatgtggatgatgattatttaaagtcatttaatgaaacagcaaaacaatttaatacctcaattattgtatatttaattgacccaaaatactttgctgatctgccgacgtcacagttttggtcgtacgcgacatacttcagggtattgtcctttgaatatctgagtgaaagtatttccacactgctgtatctggatgccgatgtcgtttgtaaaggaagtctgaagcctctcacagaaattatatttaaagatgagtttgctgcggtcattcctgacaatgttagtnnnnnnnnnntgttagtactcaggcggcatgtgcaaaacgcctcaacattcccgagatga

SEQ ID NO: 492481 - DNA, 378 bp, Shigella sonnei; identical to SEQ ID NO: 476066

SEQ ID NO: 492482 - DNA, 447 bp, Shigella sonnei
gtgaaagatcgagaagctggacaaattcgtcaggcggctgcaggtgttggcttaaactgggatgaaaacctgcgcctctggcagcgtgacaaagaactgtggttgttcccggtgggcattgaagccctgatcggtaaagtccgattttctcgcttggggattaaacttgccgaaacgcacaacaaaggttatcgctggcagcatgaagcagttattgcccttgccacccccgacaatgtgaacgcttttgaactgacaccgcaggaagcggaggagtggtatcgcgggcgcgatgtttacccgcaagccgcgccagtggcggatgacgtgttggttactttccagcatcaaccgattggtttagccaaacggattggttcgcgattgaaaaacagctatccgcgtgaactggtgcgcgatgggaaactttttaccggtaacgcctga

SEQ ID NO: 492483 - DNA, 285 bp, Shigella sonnei
atgacagaatctgaattgctgggattaatccgccgcgttaccggaatcaaacaaccatcaagcaaacaggaggccacgcagccggacagcgtgatagccgaaaattacgcgcgtgtggtggctgagatgatgcgccgtgacggtatcgagcttaacggcgtggatatgcgcgacatacggatcagagtccttgagttgctggcataccgtcgccgttctcaacaacggagggagagcgcgaaaaatacttaccagtggaggaagccggagcacttacggcggtaa

SEQ ID NO: 492484 - DNA, 597 bp, Shigella sonnei; identical to SEQ ID NO: 489824

SEQ ID NO: 492485 - DNA, 390 bp, Shigella sonnei; identical to SEQ ID NO: 458419

SEQ ID NO: 492486 - DNA, 1095 bp, Shigella sonnei; identical to SEQ ID NO: 483008

SEQ ID NO: 492487 - DNA, 1203 bp, Shigella sonnei; identical to SEQ ID NO: 483009

SEQ ID NO: 492488 - DNA, 1179 bp, Shigella sonnei; identical to SEQ ID NO: 483010

SEQ ID NO: 492489 - DNA, 1326 bp, Shigella sonnei; identical to SEQ ID NO: 483011

SEQ ID NO: 492490 - DNA, 579 bp, Shigella sonnei; identical to SEQ ID NO: 483012

SEQ ID NO: 492491 - DNA, 330 bp, Shigella sonnei; identical to SEQ ID NO: 29270

SEQ ID NO: 492492 - DNA, 603 bp, Shigella sonnei; identical to SEQ ID NO: 483014

SEQ ID NO: 492493 - DNA, 171 bp, Shigella sonnei
atgcatgagaaaaatcaacaccagacttttcagccaggtccaagagacgcgctaccaaaggtgggggggtatagtaagcccccaattccgaacggtaagcggatggcagcattaccgtataaattgacccaatcagatatccagcgtcctccgccggaaattgagcaataa

SEQ ID NO: 492494 - DNA, 294 bp, Shigella sonnei
atggcagaatcatttgcaacaggttccgatcatcaggttgtaaacgagctcaacggggaaagactgagagaacctaacgaagtttttaaacgtttaggtcgagcaataagatataattttcaagtggacgatgcaaaatttagacgcgacaatgtaaaagaaataatttctaatttattcgctaacaaagttgacgttgaccatcctgaaaataaatacaaagactttaaggcgaaatatcaaaatgaaattaatcaactatctgcgccaggtgttaattttgatgatatttaa

SEQ ID NO: 492495 - DNA, 492 bp, Shigella sonnei; identical to SEQ ID NO: 489864

SEQ ID NO: 492496 - DNA, 480 bp, Shigella sonnei; identical to SEQ ID NO: 464934

SEQ ID NO: 492497 - DNA, 381 bp, Shigella sonnei; identical to SEQ ID NO: 458903

SEQ ID NO: 492498 - DNA, 579 bp, Shigella sonnei
atgctgctggcggtcttcgatcgggcagcgttaatgcttatctgcctgttctttctcatccgtatccgcctgtttcgcgaactgttgcacaagtcggcgcactccccaaaagaattgctcgccgttaccgccattttctcgctgttcgccctgttcagcacctggtccggcgttcccgtagaaggctcgctggtgaacgtacgtattatcgcggtgatgtccgacgggattctgtttggcccgtgggtaggcatcattaccggcgtgattgcgggtattcaccggtatttaattgatatcggcggcgtgacggcgatcccctgctttatcaccagcattctggcgggttgtatatcaggctggataaacctgaaaatccccaaagcacagcgctggcgcgtcagtattctcggcggcatgttgtgtgagacgttgaccatgattctggtaattgtctgggcaccaactaccgcgttggggatcgatatcgtctctaaaatcggcattccaatgatcctcggtagcgtctgtatcggctttattgtgcttctgggtgatgctgccaacttactgatttag

SEQ ID NO: 492499 - DNA, 294 bp, Shigella sonnei
gtgattgctagtagtgaccataaaaacacacagtgccccgccactgatgatgaattaccggatgttgaccttgatgatgaagaagaccctgaagaggaattgaaacgtgaacagcgtaaagcagaaattaaagaaagattcagaaatgcgaagctaaagaacaaggttagtgacctcgatgactttgatgatagtgacgatgattttacttttacaccaaaaaagaaaactcacaccgagccaaagaaagaaaaagttaaagtcagacgtgtttatggtggaggaatgttttaa

SEQ ID NO: 492500 - DNA, 291 bp, Shigella sonnei; identical to SEQ ID NO: 486393

SEQ ID NO: 492501 - DNA, 243 bp, Shigella sonnei
atgatattgaatgagttgcatcaacatgtttttttaaaggacgatgcgataaccccttgtatcttccttggggatcatacaggcgatagatttagtactatttttggtgataaatatatccttactttgctaaattctatgcgaaatatggatggtaataaagatagccgtattaataaaaatgtcatcgttctggctggaaatcatgaaatcaattttaatgtaactatactgcacgactag

SEQ ID NO: 492502 - DNA, 213 bp, Shigella sonnei
atgctggcaccgaaagccagaactccccgcacacagacaacggataacggtaagcagaacacctatttctcctcactggataacatggttgcccagggcaatgttatgcctgttctgtatggtgaaatgcgcgtggggtcacgtgtggtatctcaggagatcagcacggcagacgaaggggacggtggtcaggttgtggtgattggtcgctga

SEQ ID NO: 492503 - DNA, 381 bp, Shigella sonnei
gtgtctgacgagagcgacgacaaaacagaagcccccacacctcaccgactagaaaaagcgcgggaagaggggcaaatcccgcgttcccgtgaactgacctcgttgctgattttgttagtgggcgtgtgtgttatctggtttggcggtgtgtcgctggcccgtcgattgtcgggcatgctctccgctgggctgcattttgatcacagtatttatatgaacgcatcccgtttgcaaggcatccattgttttgacatgacgggtaggttgcagctttatatccggctttattgcagccgtaacgctgcgagcccctatgtaattcgccgactccccccttattttcacggcggacttcaagcccaaaatactgttcaggtttag

SEQ ID NO: 492504 - DNA, 225 bp, Shigella sonnei
atggaaacagctgtagcgtactataaagatggtgttccttatgatgataaggggcaggtaatcattactcttttgaatggtaatccagacgggagtggctctggcggtggtggtggaactggaggtagcaaaagtgaaagttctgcagccattcatgccacagctaaatggtctactgctcaattgaagaaaacgcaggcagaactgtcagcgccagtgatataa

SEQ ID NO: 492505 - DNA, 225 bp, Shigella sonnei; identical to SEQ ID NO: 133446

SEQ ID NO: 492506 - DNA, 327 bp, Shigella sonnei; identical to SEQ ID NO: 490100

SEQ ID NO: 492507 - DNA, 225 bp, Shigella sonnei; identical to SEQ ID NO: 133446

SEQ ID NO: 492508 - DNA, 480 bp, Shigella sonnei; identical to SEQ ID NO: 464934

SEQ ID NO: 492509 - DNA, 600 bp, Shigella sonnei
atgcgtaaagtttgtgcagccattttgtccgcagccatttgcctggccgtatccggtgcgcctgcatgggcgtctgaacatcagtccacgctgagcgcggggtatcttcagacccatactgatatgccaggcagcgatgacctgaagggcattaacgtgaaataccgttatgagtttacggacacgctggggctgattacgtcattcagttatgccaacgctgaagatgagcaaaaaacgcattacagcgatacccgctggcatgaagattccgtgcgtaaccgctggttcagcgtgatggcggggccgtctgtgcgcgtgaatgaatggttcagcgcgtatgcgatggcgggtgtggcttacagccgtgtgtcgactttctccggggattatctccgcgtaactgacaacaaggggaaaacgcacgatgtgctgaccggaagtgatgacggtcgccacagcaacacgtctctggcgtggggggctggcgtgcagtttaacccgaccgaatccgtggccattgaccttgcttatgaaggttccggcagtggtgactggcgcactgacggtttcatcgtgggtgtcggttataagttctga

SEQ ID NO: 492510 - DNA, 1572 bp, Shigella sonnei
gtgctggcgcgatgggacacgccgaaggtggtgaagggtgtgagcttcctgcttcgcctgaccgtggcagcggacgacggcagtgagcggctggtcagcacagccaggacgacggaaaccacataccgcttcaggcagctggcgctggggaattacagtctgacagtccgggcggtaaatgcccgggggcagcagggcgatccggcgtcggtatcgttccggattgcggcaccggcagcgcctgtcactattgaactgataccggggtattttcagataacggcggtcccgaaactggctgtatatgacccgacggtgcagtttgagttctggttttcggaaaagcggattgcggatatcaggcaggttgaaaccagcgcccgctatcttggcacggcgctgtactggatagccgccagtatcaatatcaggccgggccatgattattatttttacgttcgcagtgtgaacaccgttggcaaatcggcatttgtggaggctgttggtcagccgagtgatgatgcatccggttatctggattttttcaaaggcgagatagggaaaacccatctggctcaggagctgtggacgcagattgataacggtcagcttgcgcctgacctgactgaaatcaggacgtccattacgaatgtcagcaatgaaatcacgcaaaccgtcaataaaaaactggaaaatcagagtgctgcaatccagcagatacagaaagttcaggttgatacaaataataacctgaacagcatgtgggctgtgaagctgcaacagatgaaggacggacgcctttatattgcgggtatcggtgccggtattgagaatacgccagcaggaatgcagagtcaggtgctgctggcggcagacaggattgcgatgattaatcctgcgaatggcaacacaaagccgatgtttgttggtcagggcgatcagatattcatgaacgacgtgttcctgaaatgcctgacggctccgaccattaccagcggcggtaatcctccggcattttccctgacacctggcggacggctgacggcgaaaaatgccgatatcagcggtaacgtgaacgcgaactccgggacgctcaacaacgtcacgattaataagaactgtcgggttctgggaaaattgtccgcgaaccagattgaaggcgatctcgttaaaacagtgggcaaacctttcccacgggactcccgggcaccggagaggtggccatcagggaccattaccgtcagggtttatgacgatcagccgtttgatcggcaaattgttattcccgcggtggcgtttcgcggtgctaaacatgagcggaagaataacaatatttattcgtcatgccgcctgatagtgaagaaaaacggtgctgaaatttataaccgaacgaccctggataatacgctgatatatacgggtgttattgatatgcctgccggtcacggtcacatgacgctggagttttctgtatcggcatggctggtaaatggctggtatcccacagcaagtatcagcgatttgctggttgtggtgatgaagaaagccactgcaggcatcacgattagctga

SEQ ID NO: 492511 - DNA, 276 bp, Shigella sonnei; identical to SEQ ID NO: 486783

SEQ ID NO: 492512 - DNA, 225 bp, Shigella sonnei; identical to SEQ ID NO: 133446

SEQ ID NO: 492513 - DNA, 594 bp, Shigella sonnei
atgcccgatgtggaactgatgcagaagacgctgggggaaatgaacggtgacgcggaactacgcggtagcggtaactcggtggcggcgcttttaggcaacagtaacggcaacctgaaactgttgatgaatgacgggctggtgagccgcaacctgatggagattgttgggctgaatgtcggcaactacattgtcggtgcgatatttggtgacgatgaggtgcgggtgaactgcgcggcggcgaatctgaatattgccaacggcgtggcgcgcccgcagatttttgctttcgatactgagaacgcgttgattaatgttaccggcacggcaagttttgcttcagaacagctggatttgactattgatccggagagtaaagggattcggattatcacactgcgttcgccgctgtatgtgcgtgggacgtttaaaaatccgcaggctggggtgaaagccggaccgctgattgcccgtggtgctgttgctgcggcactggcaacgctggtaacaccgacggcggcgttactggcactgatctcaccttccgaaggggaggctaatcagtgtcggacgatattgtcgcagatgaagaagtga

SEQ ID NO: 492514 - DNA, 246 bp, Shigella sonnei; identical to SEQ ID NO: 486098

SEQ ID NO: 492515 - DNA, 138 bp, Shigella sonnei; identical to SEQ ID NO: 484796

SEQ ID NO: 492516 - DNA, 378 bp, Shigella sonnei; identical to SEQ ID NO: 476066

SEQ ID NO: 492517 - DNA, 165 bp, Shigella sonnei
atggcgaattaccgtcttatatcactggcgctgacagaatctctggtgtacggcgtgttccccaaccaggacggcacattcaccgccatgacgtataccaaaagcaaaacgtttaaaaccgaagctggcgcacgtcgttggttgggaagacattcaggtgagtaa

SEQ ID NO: 492518 - DNA, 378 bp, Shigella sonnei; identical to SEQ ID NO: 476066

SEQ ID NO: 492519 - DNA, 486 bp, Shigella sonnei
gtgatctactattccgcgcagctatttagaccagttccggcgctggtaattacagcgtttgtcgcccgtcgcttactgcgctttcgtcatatgcttgcctgtcgtcgtcgcgggttaattgttctaaccgaccgttatcctcaggaccaaattcctggcgcttacgatggtacggtgttcccacctaacgttgaaggtggtcgttttgtctcatggctggcaagccaggaacgtaaagcgtttcactggatggcgagccataagcctgatctggtcatcaaactcaatgttgaccttgaagttgcctgtgcacgtaaacccgaccataaacgggaatcgctggcgaggaagattgccataacgccacagttaacctttggtggtgcacaactggttgatatcgatgccaatcagccactggaacaggtgttggttgatgcagaaaaagcgattacggattttatgaccgcgcgtggttatcactaa

SEQ ID NO: 492520 - DNA, 225 bp, Shigella sonnei; identical to SEQ ID NO: 133446

SEQ ID NO: 492521 - DNA, 963 bp, Shigella sonnei
atgagcagcaagcttcatggtcttgtctgggaagggtgcgccttcaccggcatgatcttatccagggtggcggttatggcccgtcttgcagactacagcaatgacgagggtgtgtcatggcctgccattgaaactatccggcgtcagatcggtgcaagaagtgaatccacagtgaaatcggctattgcagaactggcgaaagagggctggctgacgaaggaagagcgtaaggtcggtgggcgtaatgtaagcaatatctatcggcttaatgtggaaaaactcgaagcagctgcggcggcggcgcgtgagtcatataaaccgaaaagaaaaattagcccggcaaaaaatgacccgttaacagttgacccgtcaaatattgacccctccatggttgacccgtcaaattttgatggatcaactgttgataaaaaactgccgattaggggggcgatgattgaccccgatccgtcagtattaaaacctgatccgtcagataaaagatcttcttgtccggacgcttcgcaaccggacccgcagacggctgaacaggattttttaacccgacaccctgacgcggttgtgttcagtgcgaaaaaacgccagtggggaagtcaggaagatttggtgtgcgcacagtggatctggggacgaatcgtgagtctttacgagcaggcggccagctatgatggcgagatcactagaccgaaagaacccaactggacagcatgggccaatgacgttcgcacaatgcggatgctggatggcagaactcacagacaaatttgtgaaatgtttgggcgtctccagcgggattcgttctgggtaaaaaacatcatgagtccggcaaaactccgggaaaaatgggatgaactggttatccgcctggggcgttcgcctgcgcagcgttgcgtgaatcacatttctgaaccggacactgaaataccgccgggattcagggggtga

SEQ ID NO: 492522 - DNA, 426 bp, Shigella sonnei
atgaaaatcaagcatgaacacatccgcatggcgatgaatgtctgggcgcatccggacggcgaaaaagtgccggctgcgaaaattaccaaagcgtatttcgagctgggaatgacgttcccggaactgtatgacgacagccatccggaagccctggcccgtaatacccagaaaattttccgttggctggataaagacacccctgatgctgttgaaaaaatgcaggctctgttaccggcgatcgaaaaggcgatgccgcctttgctggtggcccgtatgcgcagccacagttctgaatattaccgtgagatcgtcgaacggagggatcggctggtgaaggatgtcgatgattttgttgcgtcagcggttgttttgtatgaccagatgaatcgcggcggcccggcagggaatgctgtggtgatgcactaa

SEQ ID NO: 492523 - DNA, 189 bp, Shigella sonnei; identical to SEQ ID NO: 17693

SEQ ID NO: 492524 - DNA, 189 bp, Shigella sonnei; identical to SEQ ID NO: 23121

SEQ ID NO: 492525 - DNA, 582 bp, Shigella sonnei
atgatcgatctctatttcgccccgacacccaatggtcacaaaattacgctgtttctcgaagaagcagagcttgattatcgcttgattaaggtagacctggggaaaggcggtcagtttcgtccggaatttttgcgcatttcgcccaacaacaaaattccggcaattgttctgactgagaaaacaggactctttttgagtcatgaaacgcgtgagcgcgccgccacattacagtggttattctggcaggtaggcggactggggccgatgcttgggcaaaatcatcattttaatcacgcagccccccaaaccattccttacgctattgaacgttatcaggttgaaactcagcgtctttaccatgtactaaacaagcggctggaaaactcgccctggctgggaggcgagaactacagcattgcggatattgcctgctggccgtgggttaatgcctggactcgccagcgaattgacctcgcaatgtatccggcagtcaagaactggcatgagcggatccgttcgcgccctgccaccgggcaggcactgctaaaagcacaactcggtgatgagcgttcggatagttaa

SEQ ID NO: 492526 - DNA, 468 bp, Shigella sonnei
atgaaccgtgttctgtgtgtggtgattattgtcatgctggtggcctgtggtgcgcttagtctggggctgaatcattaccgtgataacgccattacctacaaagcccagcgcgacaaaaatgtcagagaactgaagctggcgaacgcggcaattactgacatgcagatgcgtcagcgtgatgttgctgcgctcgatgcaaaatactcgagggaattagccgatgcgagagctgaaaatgaaactcttcgcgctgacgttgccgctggtcgtaagcgcctgcgtatcaacgccacctgtccaggtcccgtgcgtgaagccaccggcaccgcccgcgtggataatgcaaccggcccccgactggcagacaccgctgaacgggattatttcaccctcagagagcggctgatgacgatgcacaagcaactggaaggggcgcaggaatatatccgcactcagtgcctgaaataa

SEQ ID NO: 492527 - DNA, 132 bp, Shigella sonnei; identical to SEQ ID NO: 7576

SEQ ID NO: 492528 - DNA, 255 bp, Shigella sonnei; identical to SEQ ID NO: 5325

SEQ ID NO: 492529 - DNA, 423 bp, Shigella sonnei
atggcaaaagtatttacacaagaagagcgggaaaaaattaaagggctgatcgtggaattcgtacgccttaacggacgaggcacgattcggcagttatcggatgaaattggtgtcagtcatgcgtctgtcggtcgtttatgcatggagctggccgccagtggtgatgtttacaattccggttacggagtattcccgtctgagcaggcgcgcaaggactggcaaaacgcccgcaaaaaactctcaagggcaaagctgaagaaaccatctgtggttgatccggaccttatctggctattaccagacggcgaaatacgccgctacgacaggcgcctaaacataatctgtcgcgagtgccggaagagtgaagctatgcagcgtgtactggctttctatcagggtaattttcaggagacggtactgtga

SEQ ID NO: 492530 - DNA, 663 bp, Shigella sonnei; identical to SEQ ID NO: 491295

SEQ ID NO: 492531 - DNA, 300 bp, Shigella sonnei
atgacatttgaagtcatcattacccccgaggccgaacagcagataataaacctgcacggatatataacggagaaagcaggaagcgtcattgctgacaattatgccaatgcgcttcttgattatcttgatgggttttctacattcccacatcggggcaataaacgcgatgatattcgccagggaatgcgagtaactcacttccgccacagaacgattattgcttttgccgttgatggcaataaagtctttatcgctggcgtttaccatggagggcaaagttatgaatctgactttttatag

SEQ ID NO: 492532 - DNA, 354 bp, Shigella sonnei
atgaataaaacaatttgttttctattggtttttgcaatttcaggatgcgtcaacccttataactacagagaagaacaaaatgttattatctcgttcaaaacaaattctccaccacaagaaatacaagaatgcattctcagtgagtggcagcgtacacctctcttagccactatcacgtctcaaaaaattggcaagtattacagcgtattagcggttgcagataatgccgacatttataagttggcagatggttctactatcattgatttttattcccttcgagggggcttagaccccaccaatgggaaaagcaagaggattcagggaattaaatcatgtattagcactaaataa

SEQ ID NO: 492533 - DNA, 195 bp, Shigella sonnei; identical to SEQ ID NO: 489869

SEQ ID NO: 492534 - DNA, 303 bp, Shigella sonnei; identical to SEQ ID NO: 492247

SEQ ID NO: 492535 - DNA, 3858 bp, Shigella sonnei; identical to SEQ ID NO: 484798

SEQ ID NO: 492536 - DNA, 867 bp, Shigella sonnei; identical to SEQ ID NO: 492391

SEQ ID NO: 492537 - DNA, 480 bp, Shigella sonnei; identical to SEQ ID NO: 464883

SEQ ID NO: 492538 - DNA, 438 bp, Shigella sonnei
atgcagacccggcgaggtggtaacgatatccgcacgctgggctttatgactgaaagcattgcgcaggcagtggaaagccggacgggaacgccaccggcccgcctgctggcgatgagcggtaaaaatgtgctccatgcagacagtgtgaaacatcagaatgacggcatcgccctgatgccagaggacttcgggcgcttaccggcaatgctggcaaagccaaaagcggtgctgtgggacaaacggcacaaaaatctgatgtatatcgtggaaaataaggatggcagtgtgcagattgccgttaatgcaccgtacagtctgaaacgtcagcccgacaaactggatgtgattgtgaatgcttaccgggttatcaatatggataagctgaaatcggatatccggggcggaatgcttgaggtgctggaaggacaaattgattaa

SEQ ID NO: 492539 - DNA, 207 bp, Shigella sonnei; identical to SEQ ID NO: 480544

SEQ ID NO: 492540 - DNA, 210 bp, Shigella sonnei; identical to SEQ ID NO: 480543

SEQ ID NO: 492541 - DNA, 237 bp, Shigella sonnei; identical to SEQ ID NO: 480542

SEQ ID NO: 492542 - DNA, 558 bp, Shigella sonnei
atgaggaaatcagtgttagagcaggatgttagctctttgattgagaaaataaaagaaagtgattatgaaataccaaaaaactctgatgtaatgaaaattatattaaaaagaatgcaagtggtaataattattcagttggtaatgattttatgtcacttcatcatctacagatacgatcatgaggcattaattggtataagcattttgtctgcaggtggaattttgtttttctcagccgtgtttgtcccttctttatatcaacctgtcagcataatgttgttgattaatgaggtggataaaggtgattccctaattgtaaaattgttaatgagaaagcttaaacagtactggaaatttcttgtggttataaacctgattataggtgtaggtttactactctctggtgaaggggttatttcggggcttggtttttcatggtttgttacatatctcatctgcatgatgtcgtttcaaatgtcgttatccagatatatgaccccagcagtggtcagtagtttatcgaaaattaaagagcttatttcggcatccccgaaataa

SEQ ID NO: 492543 - DNA, 168 bp, Shigella sonnei; identical to SEQ ID NO: 34182

SEQ ID NO: 492544 - DNA, 282 bp, Shigella sonnei; identical to SEQ ID NO: 34183

SEQ ID NO: 492545 - DNA, 387 bp, Shigella sonnei; identical to SEQ ID NO: 480539

SEQ ID NO: 492546 - DNA, 453 bp, Shigella sonnei; identical to SEQ ID NO: 480571

SEQ ID NO: 492547 - DNA, 294 bp, Shigella sonnei
atgttatgccgcgacagcagcatggaaggccagttgatgaatttgaggcataacagacaacacagcaatgccgcaatgccgcaatgccgcaatgccgcaatgccgcagcggaaacataaaggtcgaatattggtgaaggaagactacatcgcattcatgccgaaacaaaatttaagaacggcattgcataaccttgcattggcgatcgaatattacaatgaaaaccatccgcatagtgcgttttgttatctctctccgcgagaatatcgacatcagcgggtaacgttaacttaa

SEQ ID NO: 492548 - DNA, 261 bp, Shigella sonnei; identical to SEQ ID NO: 480572

SEQ ID NO: 492549 - DNA, 243 bp, Shigella sonnei; identical to SEQ ID NO: 480573

SEQ ID NO: 492550 - DNA, 567 bp, Shigella sonnei; identical to SEQ ID NO: 480547

SEQ ID NO: 492551 - DNA, 558 bp, Shigella sonnei; identical to SEQ ID NO: 18850

SEQ ID NO: 492552 - DNA, 291 bp, Shigella sonnei; identical to SEQ ID NO: 75692

SEQ ID NO: 492553 - DNA, 927 bp, Shigella sonnei; identical to SEQ ID NO: 18852

SEQ ID NO: 492554 - DNA, 759 bp, Shigella sonnei; identical to SEQ ID NO: 480551

SEQ ID NO: 492555 - DNA, 528 bp, Shigella sonnei; identical to SEQ ID NO: 75695

SEQ ID NO: 492556 - DNA, 363 bp, Shigella sonnei; identical to SEQ ID NO: 480553

SEQ ID NO: 492557 - DNA, 732 bp, Shigella sonnei
atgtcccgaatggcagaacagcagctttatatacatggtggttatacctccgccaccagcggtcgcaccttcgagaccattaacccggccaacggtaacgtgctggcgaccgtgcaggccgccgggcgtgaggatgtcgatcgcgccgtgaagagtgcccaacaggggcaaaaaatctgggcggcgatgaccgctatggagcgctcgcgtattctgcgtcgggccgttgatattctgcgtgaacgcaatgacgaactcgcaaaactggaaaccctcgataccggaaaagcatattcggaaacctcaaccgtcgatatcgttaccggtgcggacgtgctggagtactacgccgggctgatcccggcgctggaaggcagccagatcccgttgcgtgagacgtcatttgtttatacccgccgcgaaccgctgggtgtggtggcggggattggcgcatggaactacccgattcagattgccctgtggaaatccgccccggcgctggcggcaggcaacgcaatgattttcaaaccgagcgaagtcaccccgcttaccgcgttaaagctggctgaaatttacagcgaagcgggcctgccggacggcgtatttaacgtgttgccgggggtgggcgcggagaccgggcaatatctgaccgagcatccgggcattgccaaagtgtcatttaccggcggtgtcgccagcggcaaaaaagtgatggctaatatgactaggtaa

SEQ ID NO: 492558 - DNA, 204 bp, Shigella sonnei; identical to SEQ ID NO: 486608

SEQ ID NO: 492559 - DNA, 1182 bp, Shigella sonnei; identical to SEQ ID NO: 33608

SEQ ID NO: 492560 - DNA, 468 bp, Shigella sonnei
atgcttccccgttttgccgatatttttcagcagggtaaccgctggcttaactggctggagaaacagccggaaggttcagtgcgtccggtggtgactgagtcagtgacaaaaatcatggcatgcgggaccacgctgatgggctacacacaatggtgctgttcgtcaccggactgttgccacaccaaaaaggtctgcttccggtgtaaaagccgctcctgtccgcactgcggggtgaaggctggcgcacagtggatacagtatctgctgagcctggtccccgactgcccgtggcagcatattgtgttcacacttccctgcctgtactggtccctggtgttccacaaccggtggttactggcagagatgagccgcattgcagctgatgtgatactggaaatctgccatcaggcagatgttgagccggggatattcacggtgatccacacatgggggcgtgaccagcagtag

SEQ ID NO: 492561 - DNA, 1143 bp, Shigella sonnei
atgacgaatgccagttacgcccagcagccagcagcatttcttgcaatggtacagcagttccgtgctgaccttgccgggctggcggcgcagtgtcacggtggaagtccggcatcagtcccctggatttgtggcgacacgacatacgcgtggaaacaagaacacggtacgcaatatgaagtggtatatggtgcatataaaggtaaagaatcccagcagatttattttgttccctttatgaccgatggtagcggagttaatacaccgacaaacaacccgtcagaagatcctgatattgccgggtctggttattacggttcggcatcccgaacgaacaaaaactgggtatcatcaaatcgcccgacgcatttcagctcatgggcgcgtcgtggcattattcccgatcgtatggcaactgctattctgaacgtagccggtcgcaccttagccttcattagtggtaaggcaccggaaatcaaaccctcgcccggcggcgacacgccatcggggccgtctgaagatgcatccatacgcacaatctccctgttgccgacagccggagacgctgctgcgcagggctggagcattaagaatggcggagttcagttgtcagatggtgtatttaagatcaccaagcagagcaataaagcctggtccctgacgcgcccggtggatgacgcagtctccctgctgacacggggtggcagactgagctgtaagtttcgactgtcaggcgcactgaccaacaaccagttcggtctgggaatttatctgtataccgatgtagcgttacctgacgtcgtggcgatgaccgggactggtaacccgttcctgatgtcgttcttcacccagaccacagacggcaaactgaatctgatgcatcacaagaaagcaggaaacacaaagttgggcgagttcgggaattacagtaacgactggctgacgctggagctggtgttcaccgccggcagtgccacggttactccgaaactgaatggagtggctggcccggcattccaggtcataaaagacagtctgacactggggctgaatgcgctgacgctgacggatattaccaaaaatgcagcgtatggcgttgagatagaaagtctggtgctggagataaatgcaccggcatcatcataa

SEQ ID NO: 492562 - DNA, 270 bp, Shigella sonnei
atgagccagaaattaaaagtcgtcactattggtggcgggagcagctataccccggagttactggaaggatttattaagcgttatcacgaattgccggtcagcgaattatggctggtggatgtcgaagatggtaaagagaaactggatatcatttttgaactctgccaacggatgattgataacgctggcggtaatgactccaacttattgatagtgttttatgttcagataatgcccgatgactttgtcatgcagctccaccgattttga

SEQ ID NO: 492563 - DNA, 189 bp, Shigella sonnei; identical to SEQ ID NO: 463227

SEQ ID NO: 492564 - DNA, 303 bp, Shigella sonnei; identical to SEQ ID NO: 21213

SEQ ID NO: 492565 - DNA, 189 bp, Shigella sonnei; identical to SEQ ID NO: 463227

SEQ ID NO: 492566 - DNA, 1314 bp, Shigella sonnei
gtggatatcctcaaggagggcgggaatgccgttgatgccgccgtggcggtgggctacgcgctggcggtaacgcatccgcaggcagggaatctgggcggtggtggttttatgttaatccgctcgaaaaatggcaataccacggctatcgatttccgcgaaatggcacccgccaaagcgacccgcgatatgttcctcgatgatcagggcaacccggacagcaaaaaatcactcacttcgcatctggcttccggcacaccgggtacggtagcaggtttctcgctggcgctggataaatacggcaccatgccgctgaacaaagtcgtgcagcccgcgtttaaactggcacgcgatggttttatcgttaacgacgcgctggctgacgatctcaaaacctacggtagcgaagtgttgccgaatcacgaaaacagtaaagctatcttctggaaagagggcgagccgctgaaaaagggcgacacgctggtgcaggcgaacctggcaaagagcctggagatgattgctgaaaacggcccggacgaattctataaaggcacgattgcggaacagatcgcccaggagatgcagaaaaacggtggcttgatcactaaagaagatttagcggcctataaagcggtcgaacgcactccgataagcggcgattatcgcgggtatcaggtttactccatgccaccgccatcctccggcgggatccatatcgtacaaatcctcaatattctggaaaacttcgatatgaagaaatacggctttggcagcgccgatgcgatgcaaatcatggcagaagcggagaaatacgcctacgccgaccgctcggaatatcttggcgacccggattttgtcaaagtcccgtggcaggcactgaccaataaagcctatgccaaatccattgccgatcaaattgatatcaacaaagcgaagccgtccagtgagattcgccctggcaagcttgcgccttatgagagtaatcaaactacccattactctgtagtggataaagacggtaacgcggtggcggtgacctatacgctgaacaccaccttcggtatgggcattgtcgcgggcgagagcggtattctgcttaataatcagatggatgatttctccgccaaaccgggcgtaccgaacatttacgggctggtgggcggtgatgccaacgccgtcgggccgaataaacgtccgctgtcatcgatgtcaccaaccattgtggtgaaagacggtaaaacttggctggttaccggtagtcctggcgggagtcggattattaccaccgtgctgcaggtaatgactccaacttattga

SEQ ID NO: 492567 - DNA, 276 bp, Shigella sonnei; identical to SEQ ID NO: 484087

SEQ ID NO: 492568 - DNA, 1146 bp, Shigella sonnei; identical to SEQ ID NO: 483149

SEQ ID NO: 492569 - DNA, 537 bp, Shigella sonnei; identical to SEQ ID NO: 492360

SEQ ID NO: 492570 - DNA, 414 bp, Shigella sonnei
  misc_feature (351)..(360): n is a, c, g, or t
atgagaaactttcctgttccgtactcgaatgagctgatttatagcactattgcacgggcaggcgtttatcaagggattgttagtcctaagcagctgttggatgaggtgtatggcaaccgcaaggtggtcgctaccttaggtctgccctcgcatttaggtgtgatagcaagacatctacatcaaacaggacgttacgctgttcagcagcttatttatgagcataccttattccctttatatgctccgtttgtaggcaaggagcgccgagacgaagctattcggttaatggagtaccaagcgcaaggtgcggtgcatttaatgctaggagtcgctgcttctagagttaagagnnnnnnnnnngtatttgcccgctttgccatattgtccaaaacacggtgctttagtcttctttga

SEQ ID NO: 492571 - DNA, 1095 bp, Shigella sonnei; identical to SEQ ID NO: 484487

SEQ ID NO: 492572 - DNA, 945 bp, Shigella sonnei
atggcgctacttctggaaactgcaaagttctggattagccgcgcggtgagggttaacgaccgtctggaaattcatgatgttattgggcctgacgaatataccgaacatgtcaataataacgccttcaccagctatatggcgtattacaacgtccagcaggcgctgagtattgcccgccagtttggctgtagcgacgacgcgtttattcatcgtgccgaaatgttccttaaagaactgcggctgccagaaattcagcccgacggcgttttgccgcaggatgattcgtttatggctaagccggcgattaatcttgcgaaatacaaagcggcggcggggaagcaaaccattctgctggattattcacgcgcagaagtgaacgagatgcaaatcctcaaacaagctgatgtggtgatgctcaattacatgctgccggagcagttctcagcggcatcgtgtcttgccaatctgcaattttatgaaccgcgcactattcacgactcgtcattaagtaaagcaatccacggcattgttgccgcacgctgtggcctgctgacccaaagttatcagttctggcgcgaggggactgaaatcgatcttggtgctgatccgcatagttgtgatgatggtatccatgctgccgcaactggcgctatctggctgggggcgattcagggttttgccggggtgagcgtgcgtgacggtgaattgcatctcaatccggcgttacctgagcagtggcaacagttgtctttccctctgttctggcagggctgcgaattacaggtcactcttgacgcgcagcgtattgcgattcgaacttctgcccccgtttcactgcgtttgaacggtcagcttatatccgtggctgaagaatctgttttctgtttgggtgattttattttgcccttcaatgggaccgctgccacacatcaggaggatgaatga

SEQ ID NO: 492573 - DNA, 318 bp, Shigella sonnei
atgacaatatcgacaacttccacgccgcatgatgcggtatttaaatcttttttacgccatccagacaccgcgcgggattttattgatattcatcttcccgcgccgctgcgcaaactgtgtgatttaacgacgcttaaactagaatcaaacagttttattgatgaagacctgcggcaatattattccgacctcttgtggtctgtgaaaacgcaggagggagtgggttatatttatgtagtgatagagcaccaaagtaagctggaagaattaatggcttttcgcatgatgcgttattcggtaatgactccaacttattga

SEQ ID NO: 492574 - DNA, 336 bp, Shigella sonnei
gtgctgtttggattttcgcgtatccagtgccgccacatcccgggatttcagcgagacgtcttccccgacggcctcccggatagtgtgcgagcgtccggaaaagacctccaccggtacgcccggcatttcccacataccgtgcttaccgaccacttcagtttcatagcccagcgcctcaacctgctctttcagtttttcccggtagagcctgccaaaggcaatctgattagcgtacacattctcaatgaaccccgttttccccactttgtcactgctcagtgtcttccattcgccgttatgctgcgtaacattagtcaccaccgcatgcgtgtgtaa

SEQ ID NO: 492575 - DNA, 678 bp, Shigella sonnei
atgtcacgcattaaacctcttctggttctttgtgccgctttactgacggtcacacccgcagcgtcagcggatgtgaacagcgacatgaatcagttctttaataagctggggtttgcttccaataccacacagccgggcgtctggcaggggcaggctgccggctatgcttacggcggctccctgtatgcccgtactcaggtcaaaaatgttcagctgatttccatgacgctgccggatatcaatgccggatgtggcggcatcgacgcctatctcggctcgttcagttttattaatggcgagcagctgcagcgttttgttaagcagattatgagcaacgctgccggttacttttttgaccttgccctgcagacgacggtgccggaaatcaaaaccgcaaaagattatctgcagaagctggcaagcgacattaacagcatgaacctcagctcctgtcaggtggctcaggggcttgtgggtggcctgttccctcagacacaggaatctcagcggaaagtctgccaggacattggcagtgaaagcaatatcttcgccgactgggccgcttcgcgtcaggggtgcactgtcggaggacagtcctcctctgttcgtgacaaggccagtgataaggataaggaacgggtgctgaaaaaccagaatatcatatgggaggcacactga

SEQ ID NO: 492576 - DNA, 483 bp, Shigella sonnei
atgcaccaggctgttgttcagtatgcagagcgggccgcagagaaactacgtggggagcgtcagtattgccggcaggtgacgacatttgtacggacatccccctttgcagtaaaagaaccctgttacagcaatgccgctgtggaaaagcttccattgcccacacaggacagccgggacattattgccgcagcatgcagagcgttaaaccatgtctggcgtgaagggtaccgctatatgaaggcaggtgtcatgctggctgatttcacaccatcgggtatagcgcagccgggattatttgatgaaatccagccccgtaaaaacagtgaaaagttaatgaaaacactcgatgaactgaaccagtcgggaaaagggaaagtgtggtttgcggggcgaggaaccgcccctgaatggcaaatgaaacgggaaatgctttctcctgcgtataccaccagatggacagatttgccagtagcccagttatga

SEQ ID NO: 492577 - DNA, 705 bp, Shigella sonnei; identical to SEQ ID NO: 8686

SEQ ID NO: 492578 - DNA, 474 bp, Shigella sonnei; identical to SEQ ID NO: 5003

SEQ ID NO: 492579 - DNA, 618 bp, Shigella sonnei
atgggatgccagaaagatattgcagagaagatacaaaaacagggcggtgattatttattcgcggtaaaaggaaaccaggggcggcttaataaagcctttgaggaaaaatttccgctgaaagaattaaataatccagagcatgacagttacgcaatcagtgaaaagagtcacggcagagaagaaatccgtcttcatattgtttgcgatgtccctgatgaacttattgatttcacgtttgaatggaaagggctgaagaaattatgcgtggcagtctcctttcggtccataatagcagaacaaaagaaagagccagaaatgacggtcagatattatatcagttctgctgatttaaccgcagagaagttcgccacagcaatccgaaaccactggcacgtggagaataagctgcactggcgtctggacgtggtaatgaatgaagacgactgcaaaataagaagaggaaatgcagcagaattattttcagggatacggcacatcgctattaatattttgacgaatgataaggtattcaaggcagggttaagacgtaagatgcgaaaagcagctatggacagaaactatctggcgtcagtccttgcggagagcgggctttcgtag

SEQ ID NO: 492580 - DNA, 543 bp, Shigella sonnei; identical to SEQ ID NO: 489047

SEQ ID NO: 492581 - DNA, 294 bp, Shigella sonnei
atgagcgaatatttcagaatacttcaggggctgcctgacggctcctttacccgcaaacatgccgaagccgttgccgtacagtaccggaacgtctttatcgaggatgaccacggggaacattttcgcctggttgtccgtaataacggtgcaatggtctggcgtacctggaattttgaggacgatgccgggtactggatgaaccatgccatccgggatttcggcattcttaagtcagagaggtgccggacgggaacgcgtccggcagacaatcattattaccgttttgggaggtaa

SEQ ID NO: 492582 - DNA, 141 bp, Shigella sonnei
atgcaacaaaaaatgattcaatttagtggcgatgtctcactgccagccatagggcagggaacatggtatatgggcgaagatgccagtcagcgcaaaacagaagttgctgcactacgcgcgtgtcaacgccacgatgtttga

SEQ ID NO: 492583 - DNA, 576 bp, Shigella sonnei
atggaacttaaaaaattgatggaacatatttctattatccccgattacagacaagcctggaaagtggaacataaattatcggatattctactgttgactatttgtgccgttatttctggtgcagagggttgggaagatatagaggattttggggaaacacatctcgattttttgaagcaatatggtgattttgaaaatggtattcctgttcacgataccattgccagagttgtatcctgtatcagtcctgcaaaatttcacgagtgctttattaactggatgcgtgactgccattcttcagatgataaagacgtcattgcaattgatggaaaaacgctccggcactcttatgacaagagtcgccgcaggggagcgattcatgtcattagtgcgttctcaacaatgcacagtctggtcatcggacagatcaagacggatgagaaatctaatgagattacagctatcccagaacttcttaacatgctggatattaaaggaaaaatcatcacaactgatgcgatgggttgccagaaagatattgcagagaagggtgatgctgccaacttactgatttag

SEQ ID NO: 492584 - DNA, 1845 bp, Shigella sonnei
atgagacacgatcgcggctattttaatgtctccaacggcggcaaaatccatgttaagggcaccagccgtctgacctatttgcagggaaatgtcagtggtgaaggcagccaggtaaattctaaaaccttctttatgggcgtttacggcagttacggtggtaatcagtacctgtcagttaataacggcggtgaagttaatgccagtgagaaaattagcctgggttattatgatcaaaactccgatacaacacttgctgtttcggaaggtggtaaaatctctgcgccgactattagtttaagcaccaactctgagttagcgttaggtgcacaggaaggaagcgcagcgaaggctgcagggattattgatgccgaaaaaattgagtttgtgtgggcaaagacatccgagaagaaaatcaccttaaaccacacggataaaaacgcgactatttccgcggatattgtcagtgacagcgagggcctgggctatatcaatgcgctcaatggtacgacttacttaaccggggataactccgcctttagcggtaaagtcaaaattgagcaaaatggcgctttagggatcacccaaaatataggtaccgcagaaatcaacaaccgcgggaaattacacctgaaggctgacgatagcatgacctttgccaataagatttccggcaacggtacaataagtatcgacagtgggacagtggcgctgaccggcaataactatgcattcagcggatatattgatgtcgcttctggtgctgtcgcggttatttctgaagacaagaacatcggccgtgcggacctggatgttgatggcaaactgcaaatcaatgccaataaagattgggtatttgataacgatcttcaaggtagaggtattgttgaaataaacatggggaatcacgaattctccttcgatgagtttgcttatacagactggttccagggttcactggcgttccagaacacgacatttaacctggaaaagaatgctgagtttctgcagagaggcgggatcactgcgggtcagggaagcctggtaacagtgggtaagggcgctcactccattagcactttgggattctccggcggaaccgttgattttggtgccctgacagcaggtgcacagatgacagaagggacggtcaacgttagtaaaacgctggatttgcgcggcgagggtgtgattcaggtttctgacagtgacgttgtccgctcagtatctcgtgatattgactctgcgttatcgctcactgaagtcgatgatggtaacagcgccattaagctggttgatgcgcaaggtgcggaagttctgggcgatgcgggcaatctgcaattgcaggataaaaatgggcaaatcctctccagcagtgcccaacgtgatattcagcagaatgggcaaaaagcggccgtcggcacttacgactatcgtctgacgagtggggtaaacaatgacggtctgtatatcggttacggcctgacccagcttgatttacacgctaccgacagcgatgctctggtgctgagctctaacggtaaaagcgagaatgccgccgatctcagcgcaaagattaccggcagtggtgacctggcattcagcagccagaagggtcagaccgtatcgctttctaacaaagacaacgactataccggtgttaccgatctgcgcagtgggacgcttttgttgaataacgataacgtgttgggtaatacccatgaactgcgtctggcggcagagactgaactggatatgaatggtcacagccagaccgtgggcacgctcaatggcagcgccgattcactgctgagtgaagtggtcaacaaaaactggccaccgagttag

SEQ ID NO: 492585 - DNA, 951 bp, Shigella sonnei
ttgcttgcccgcgtgttaacgggaaaatactgcgaacatctgccactgtaccgtcagagtgaaatctttgcccgtcagggcgtcgagctgagccgtgcattactctccaactgggttgacgcatgctgccagttaatgacgccgctgaatgatgccctgtaccgctatgtgatgaatacccgcaagcttcacactgacgacacaccggtaaaagtgctggcaccgggcagaaaaaaggcaaaaacaggacgcatctggacatatgtccgggatgagcggaatgcgggctcgtcagagccaccggcggtctggttcgcctactcaccggacaggcagggaaaacatccggtacaacaccttcgtcccttccggggtatcctgcaggcggatgcgttcagcggttacgatcggctgttcagtgccggacgtgaaggcggtgcactgacagaagttgcgtgctgggcccatgcccggcgaaaaatccacgatgtatacatcagcagcaaaagtacgacggcagaagaagccctgaaacgcatcagtgaactgtacgccatcgaggatgaaatacggggcttaccagagtctgaacgtcttgccgtcaggcagcagcgaagcaaagcgttactgacgtcgctgaatgaatggatggtggagaagaatggtacgctgtcgaaaaaatccagactgggcgaagcgttcagctatgtactgaatcagtgggatgccctctgttattacagtgatgacggtctggcggaggcggacaataacacagcagaaagagcgcttcgtgccgtctgtctcgggaaaaagaattacatgttcttcggcagcgatcatggaggcgatcgcggagctctgctgtacggactaatcgggagctgtcggttgaacggtatcgatccagaagcgtatctgcgccatatcctgagcgtactgccggaatga

SEQ ID NO: 492586 - DNA, 618 bp, Shigella sonnei
atgggttgccagaaagatattgcagagaagatacaaaaacagggaggtgattatttattcgctgtaaaaggaaaccaggggcggctaaataaagcctttgaggaaaaatttccgctgaaagaattaaataatccagagcatgacagttacgcaatgagtgaaaagagtcacggcagagaagaaatccgtcttcatattgtttgcgatgtccctgatgaacttattgatttcacgtttgaatggaaaggactgaagaaattatgcgtggcagtctcctttcggtcaataatagcagaacaaaagaaagagccagaaatgacggtcagatattatatcagttctgctgatttaaccgcagaaaagttcgccacagcaatccgaaaccactggcacgtggagaataagctgcactggcgtctggacgtggtaatgaatgaagacgactgcaaaataagaagaggaaatgcagcagaattattttcagggatacggcacattactattaatattttgacgaatgataaggtattcaaggcagggttaagacgtaagatgcgaaaagcagccatggacagaaactatctggcgtcagtccttgcggggagcgggctttcgtaa

SEQ ID NO: 492587 - DNA, 744 bp, Shigella sonnei
atgcagcacaacacactatcgaaacacaatcagaaattgccgtttacacgctacgacttcggctgggttttattatgcataggcatggcgattggtgccggaaccgtgctgatgccagtacaaattggcttgaagggaatttgggtatttattaccgcagcgatcattgcttatcctgccacctgggtagtgcaggacatttatttaaaaaccctttctgaaagcgattcctgtaatgactacaccgatattatcagtcattacctggggaagaactggggaattttcctcggggttatctactttttgatgattatccacgggatttttatctactctctctccgtggttttcgacagcgcctcgtacctgaaaaccttcggtttaaccgatgccgatctttcacaatctctactttataaagtcgctattttcgccgtactggtggcgattgcgtctggtggtgaacgattactgtttaagatttccgggccaatggtggtggtcaaagtagggattattgtcgtgttcggttttgcgatgatcccgcactggaatttcgccaatataaccgccttcccgcaagcctccgtctttttccgcgatgtcttgcttaccattccattttgcttcttttctgcagtatttattcaggtacttaacccaatgaatattgcctatcgtaaacgggaagcggataaagtactggcaacccggctcgcgctgcgtacccaccgaaggtga

SEQ ID NO: 492588 - DNA, 1311 bp, Shigella sonnei
atggcggaaacgctgggtgagcaatatgacccggtactgccatccgccctgcgccagtcttcagcccgtaaaccgttaccgacctcacttccccgtgaaacccgggtcatccggccggaagaggaatgctgtccggcctgtggtggtgacctcagtcctctggggtgtgatgtgtcagagcaactggagcttatcagcagcgcttttaaggttatcgaaacacaacgtccgaaactggcctgttgccggtgcgaccatatcgtgcaggcaccagtaccttcaaaacccattgcacgcagttatgccggagcggggcttctggctcatatcgtcaccgggaagtatgcagaccatctgccgttataccgccagtcagaaatataccgtcgtcagggcgtggaactgagccgcgccacgctggggcgctggaccggtgccgttgctgaactgctggagccgctgtatgacgtgctgcgccagtatgtactgatgcccggtaaagtccatgcggatgatatccccgttccggtccaggagccgggcagtggtaaaacaagaactgcccggctgtgggtctatgtccgtgatgaccgtaacgccggttcacagatgcccccggcggtctggttcgcgtacagcccggaccggaaaggtatccatccacagaatcacctggccggttacagcggtgtgcttcaggcagatgcttacggtggttaccgggcgttatacgaatccggcagaataacggaagccgcgtgtatggcccatgcccggagaaaaatccacgatgtgcatgcaagagtgccaaccgacatcaccacggaagccctgcagcgtatcggtgaactgtatgtcatcgaggcagaagtccggggatgttcagcagaacagcgtctggcagcaagaaaagccagagcggctccactgatgcagtcactgtatgactggatacagcaacagatgaaaacactgtcgcgtcactcggatacggcaaaagcgttcacatacctgctgaaacagtgggaggccctgaacgtgtactgcagtaatggctgggtggaaatcgacaacaacatcgcagagaacgccttacggggagtggccgtaggccggaaaaactggctcttcgcgggttccgacagcggtggcgaacatgcggcggtgttgtactcgctgatcggcacatgccgtctgaacaatgtagagccagaaaaatggctgcgttacgttattgagcatatccaggactggccggcaaaccgggtacgcgatctgttgccctggaaagttgatctgacttctcagtaa

SEQ ID NO: 492589 - DNA, 189 bp, Shigella sonnei; identical to SEQ ID NO: 463227

SEQ ID NO: 492590 - DNA, 225 bp, Shigella sonnei
atgactgtgtacattggaattgatattgccagaaagaagtttgatgcagctgaactctgtgacggggcttacaggtgtaagacatttgaaaacacccctgctggatttacagcgctatacgactggcttaaagcgggcagcattccggacattcatgtatgtcttgaagcaacaggcaactatggtactgccctcgctacttttctgtactgtcagcgccagtga

SEQ ID NO: 492591 - DNA, 456 bp, Shigella sonnei
atgccattaccgttaaaactctatattaccccagttggggcggccggtggagttgtcataaaagcgggggaagtcattgcccgtattcatatgtataaaattgcaacattaggaagcggaaatccgcgtaattttacgtggaatattatttcaaataacagtgttgttatgccaacaggcggctgcaccgttgatagtcgtaatgtcactgtggatctcccggactttcctggaagcgcagaaataccccttggcgtatattgctcaagcgaacaaaagctctcattttatctttcgggtgccaccactgacagtagccgacaagtgtttgctaacacagcacctgatgcaacaaaagcatcgggagtgggtgtcactctaatgcgtaatggaaaaatactggctacgggagaaaatgtctccctggggactaatgccagtcagttaagcaactga

SEQ ID NO: 492592 - DNA, 189 bp, Shigella sonnei; identical to SEQ ID NO: 463227

SEQ ID NO: 492593 - DNA, 189 bp, Shigella sonnei; identical to SEQ ID NO: 463227

SEQ ID NO: 492594 - DNA, 189 bp, Shigella sonnei; identical to SEQ ID NO: 463227

SEQ ID NO: 492595 - DNA, 189 bp, Shigella sonnei; identical to SEQ ID NO: 463227

SEQ ID NO: 492596 - DNA, 156 bp, Shigella sonnei
atgctggatagcaccgtcaagctaaattccgtactgaacggtcccctcgcccctttggggagagggttagggtggggggaacgtacgggatgtaaaattcaacgcgccagcatcgccggatgcgatgctggcgcatcttatccggcctacggttaa

SEQ ID NO: 492597 - DNA, 234 bp, Shigella sonnei
atgctgctgttgcaactgagtttgcgttttcagttgctgattcagcatccctttttgctggatttgctgagtctgcatctgggtttgcatccgctgctggctgggtatctgataccccggctggttagggttgttcagagtattaatgggctgtgcaaagccgacaaacggcaggagtgccgtaagaatcagaagtcgtttcatcgcgtatcctcctctgaagatatcctttaa

SEQ ID NO: 492598 - DNA, 1974 bp, Shigella sonnei
atgcagtatttagatgaaggccgcttagttagaactgatgacccttatgtacatcttgatttagaagagccgtctgtagattctgtcagcttccagaagcgcgaggaggattatcgaaaaattcttcctattattaatagtaaggatcgtttcgaccctaaagtcagaagcgaactcgttgagcatgtggtccaagaacataaggttactaaggctacagtttataagttgttacgccgttactggcagcgtggtcaaacgcctaatgcattaattcctgactacaaaaacagcggtgcaccaggggaaagacgttcagcgacaggaacagcaaagattggccgagccagagaatatggtaagggtgaaggaaccaaggtaacgcccgagattgaacgcctttttaggttgaccatagaaaagcacctgttaaatcaaaaaggtacaaagaccaccgttgcctatagacgatttgtggacttgtttgctcagtattttcctcgcattccccaagaggattacccaacactacgtcagtttcgttatttttatgatcgagaataccctaaagctcagcgcttaaagtctagagttaaagcaggggtatataaaaaagacgtacgacccttaagtagtacagccacttctcaggcgttaggccctgggagtcgttatgagattgatgccacgattgctgatatttatttagtggatcatcatgatcgccaaaaaatcataggaagaccaacgctttacattgtgattgatgtgtttagtcggatgatcacgggcttttatatcggctttgaaaatccgtcttatgtggtggcgatgcaggcttttgtaaatgcttgctctgacaaaacggccatttgtgcccagcatgatattgagattagtagctcagactggccgtgtgtaggtttgccagatgtgttgctagcggaccgtggcgaattaatgagtcatcaggtcgaagccttagtttctagttttaatgtgcgagtggaaagtgctccacctagacgtggcgatgctaaaggcatagtggaaagcacttttagaacactacaagccgagtttaagtcctttgcacctggcattgtagagggcagtcggatcaaaagccatggtgaaacagactataggttagatgcatctctgtcggtatttgagttcacacaaattattttgcgtacgatcttattcagaaataaccatctggtgatggataaatacgatcgagatgctgattttcctacagatttaccgtctattcctgtccagctatggcaatggggtatgcagcatcgtacaggtagtttaagggctgtggagcaagagcagttgcgagtagcgttactgcctcgccgaaaggtctctatttcttcatttggcgttaatttgtggggtttgtattactcggggtcagagattctgcgtgagggttggttgcagcggagcactgatatagctagacctcaacatttagaagcggcttatgacccagtgctggttgatacgatttatttgtttccgcaagttggcagccgtgtattttggcgctgtaatctgacggaacgtagtcggcagtttaaaggtctctcattttgggaggtttgggatatacaagcacaagaaaaacacaataaagccaatgcgaagcaggatgagttaactaaacgcagggagcttgaggcgtttattcagcaaaccattcagaaagcgaataagttaacgcccagtactactgagcccaaatcaacacgcattaagcagattaaaactaataaaaaagaagccgtgacctcggagcgtaaaaaacgtgcggagcatttgaagccaagctcttcaggtgatgaggctaaagttattcctttcaacgcagtggaagcggatgatcaagaagattacagcctacccacatacgtgcctgaattatttcaggatccaccagaaaaggatgagtcatga

SEQ ID NO: 492599 - DNA, 492 bp, Shigella sonnei; identical to SEQ ID NO: 489864

SEQ ID NO: 492600 - DNA, 1446 bp, Shigella sonnei
atgtatcaattcatccacgttgaaagttattcaaaagtttcagcaaagaagaaattaaattatagcaatgaaacaaaaggaagaaatgtcagcgacattataggagaagttacgagaaaacagggttattgcgatcatgttgaagagccggaggctccgaatcttctttatggtgttcatccagaagaactggaagcattaacagaaaattattttaataatacacaattaaccaattctaaaggggttaaaaggggattgaggaaagatagtcatatcctattggcgggggttgtaagtcttaacagagaatgtgagggcttctgggaagactacaaaaatgactcaatcgaatggttgaaagaaaagtacggagatcgcctaaaatgcgttgtagaacatacagatgaggcaaatccacacctacatttttactgtgttcaaaacccaggagaagactttaacttattgcacgaaggaaaaagagcttttcaagcagaagataaaaaatacaaaaaagaaatagcgtttaaagaagcaatgaggacttttcaagaaaatttttatatttcagtatctgcgaaatatggactaatgaaaactggtccaaaaaggcgaaggcttacaaatgaagaatataaaaggcaacagcaggaagttagattaataaatttatttagaaacaaaacaacagaagaaatgaatatattaataaccgagaccgaaaaagaaattaaaagacaaaaagaaaaatcagaaaaagaaatattttctttaaaagaagatgctaccgcacttgggaaaaggatcggtaaaagtttaggttttaaatcagccataagtgaatttaacgataaaaattactttaataaagtgatattttcaagaatattcagcgttaacatgattgaaaaattagaaaaaagaaataaggatttattagataaaaataaaaaattattcgaaagaaaagaacattataaaaaattatcagtagatagtaacaagtacaaaaataaatatgaagaagaaaaaaagaaaaatgattatttatcattgataaatgattttattgataatgatttagaaaaacaagaaaacaaggagaatgaaaatgatattagaagagaaattattaaagaaattgacagaattgagatacaacaacaatcaaatggtgaaagaattaaaaacattggaattagaaacgatagaaacagagcggaggttaatggaagtagagaaaaattcgaaagatcttttagagttttattctcaaatgtcaggagctttattagagatttcttctcagttgaattatttaaaagaatgttcgaaaaagaaaaagatgggacagggacaatcgaaatcgagaaatacaaagaaccagaacaaaaacaaaaagatatcagcattaaaaaagatagaaaacttatcattaagtga

SEQ ID NO: 492601 - DNA, 549 bp, Shigella sonnei
atgaaaaacaacacagaaaacaaatcaaggcgagggctaacaaaatatagagaaaacccatttatcatgattgccagtgataacacaaagggaggagtgagaaggatcacaggtaaaaccgacgataggttaatggttgtatctgaggaaacgggcgaaaaagttggaggtgcgggattttttcaataccaagaagtagataaaacccaatttataaagctatatataaatggcgtaaaagctctcacagagcttacgagtgctggaacaaaggtttttgaagttttatatagaacagttcagcagaataaagacaatgacaaagtttttcttgcttttgaccttgtagaacaagatattgttaaaatagccagaactaccttttttaaaggaatgcgagaattaataaagaaaaattttattgcagaaacaacagttgcaaatctttattatataaatccagattatttatttaatggtgatcgcttatcatttgttaaaacatttatacaaacaaaaacagaagaaataaaaacaatagaaaaataa

SEQ ID NO: 492602 - DNA, 168 bp, Shigella sonnei
atgcgcttatggtgtatggtgtatggtgtcggtgatggcggcgctggccccggtgaggaacatatagaacgattaacacgtatacgcaatattgatggcttacctcatgttgatttcagccgtgttgataagttcttcacttacgcggtgatgctgccaacttactga

SEQ ID NO: 492603 - DNA, 963 bp, Shigella sonnei; identical to SEQ ID NO: 487358

SEQ ID NO: 492604 - DNA, 207 bp, Shigella sonnei
atgttccccgtggtcatcctcgataaagacgttccggtactgtacggcaacggcttcggcatgtttgcgggtaaaggagccgtcaggcagcccctgaagtattctgaaatattcgctcatcctcatctctccggtgatgccccgcacagggcggggcggttgtcacagtcagtcgttcagaacgggatatcgtctgaaaacccgtaa

SEQ ID NO: 492605 - DNA, 543 bp, Shigella sonnei
atggcagtttgtggcattaacaaggtcattctcgtaggacgcctgggaaaagatccggaagtccgttacatccccaacgggggcgcagtggcaaacctgcaggtggccacgtcagaaagctggcgtgacaaacagacgggggaaatgcgggagctgacggaatggcatcgcgtggtgctgttcggcaagctcgcggaagtggcaggtgaatatctgcgcaagggcgcgcaggtctacatcgaggggcagcttcgcacccgtagctgggacgacgacaacggcgtcacccgttacatcactgaaatccttgttaaaaacacgggcaccatgcagatgctgggacgtaccgcaggtgctcagactcagccgggagaggcgcaacagttcagcggtcagcctcagccggaaccacaggcggagtccggtacgaaaaaaagaggcgcgaaagcgaaaggccgtggacgtaaggccgcgcagccggagcctcagccgcaaccgccagagggtgaggattacgggttttcagacgatatcccgttctga

SEQ ID NO: 492606 - DNA, 657 bp, Shigella sonnei; identical to SEQ ID NO: 463703

SEQ ID NO: 492607 - DNA, 195 bp, Shigella sonnei
atggaacacggtgcccgtttaagtaccagtcgtgtaatggccatcgcctttatatttatgtcagtgcttattgttctcagcctctctgttaacgtcattcagggggtgaataactaccgtcttcagaatgagcaacgcactgccgtgaccccaatgggatttaatgtgccctttgccgtgtcacacctaccgtaa

SEQ ID NO: 492608 - DNA, 312 bp, Shigella sonnei
atgttgggagacgagaataaacttaagaaatatcgtttcccggaaacactgaccaaccagagccgctggtttggcctgccactggatgaactgatccccgcagcaatctgtgttggctggggtatcacaacatcgaaatatctgttcggtattggtgcagcggttctggtttatttcgggattaaaaaactgaaaaaggggcggggcagttcctggttacgtgacctgatttactggtatatgccaacagccctgctgcgcggtatttttcataatgttcccgattcgtgtttccggcagtggattaaatag

SEQ ID NO: 492609 - DNA, 129 bp, Shigella sonnei
atgttggtaggcgtgatgcagttttggaagggatgctttgccattatgaaaaaggcattaggagccattcatctccaaaagagagcattgttattaaagaaaagcaaagaaaaaaatttgaattggtaa

SEQ ID NO: 492610 - DNA, 123 bp, Shigella sonnei
atgagcagaaaaacccaacgttactctaaagagttcaagccgaagctgtcagaacggttcttgaaaatcaactttcgatcagtgaaggcgcttcccgattatctcttcctgaaggcactttag

SEQ ID NO: 492611 - DNA, 738 bp, Shigella sonnei; identical to SEQ ID NO: 487826

SEQ ID NO: 492612 - DNA, 1272 bp, Shigella sonnei
atggcaaaggcgaggctaacggatatccagataagggcatggataaaggccggagaacactttgagggacgcgccgatggcaacggtctgtatttgtgcttccctgaaaaatacggcgccccattctggcgttatcgctaccggatggccgggaaacaacgcacgatgcacatcggctcatattccgacctgtcactaagtaaagcccgtgccaccgtcaaagaactggccgcccgtgttgcgctgggtcatgacgtggccggagaaaagcaggcccggaaagcggcggcactggcacggattgaggaagaaaaaaacgcccttcgcgtgtcagaactggcagccgaatactacgaacggcaaatactaccccgctggaaacatcccgatattctccgccgccgcataaacaaagatatcaaccctcagattggcagcctgaaagtcgaagatgttaaaccgcgccatattgatgcaatgctacagcgcattattgaccgtggagcaccaacagttgccaacgatgttttgcgatggactaaacggatattcgactacgccatcaaacgccacgcactggaaacaaaccccgccgctgcttttgaattatcagatgctggtggggctgaaaaaagccgcgaccgatggctaacccgtgatgaactcattcgtttttttcaggccatgcgcacagctaaaggattcagccgtgagaatgaactcaccatgaaactgatactttgcctttgctgccgaaaaatggagttgtgcgccgcgcagtgggatgaatttgatttagatagtgctgtatggcgacttcctgccgaacgcgctaaaaacggggatgccattgatatcccactaccgccaccagcggtggcatggttgcgcgaattacacagcatttcaggcggtagccgctgggtgcttccagcccgcaaaatgcaacagcgcatgattccacacatacaggaaagcactctgcccgttgcgctagctaaggttcgccgggaaatgcctggcgtgccgggttttaccgttcacgatttccgacgcacggccagaactcaccttgccgcgcttggggtagaccctgtagtggcggaacgctgcctgaaccaccgaattaaaggcgttgagggtatctataaccgccatcagtatttcaatgaacgccgccacgctctggaattatggtccgacctgctggtggctctggaacagggggatgaatacaacgtaacccccatcacaaaagcgattgcaaaataa

SEQ ID NO: 492613 - DNA, 921 bp, Shigella sonnei
atgtatgaaaacacataccctattgatacagccgccagtatactggggtgtactcaaaaaaaaatactgactgaatgggctaaagggacaataaaaatcgcacttgattttggcccggaaagttccataaaccgccaaagctacacggattacgataagtggggatatccggccaaacagtggaacattgcgagtatttcagcaccagcaacaaacgattattttccacctgaattgctgcaaccatctaagctttttcacgatgacgacgaaccggaatcaatttaccatcaatactcacaatctggctttttctttgatagcgactatagtgccgctcaggtgcgtgacgggaaacttatggttgtctcgaatgttctcctgtatggcttatggacagtaccttacgccgagttctcgcgcgttcatattcaggacacattcacattaaatccatatacaaacaacccatcactgtccaaagttacagctacctttacaccacgtggcggctcacgccggataaataccccggaaaaaaagaatttgcgcattaccgactcagaaatgacggtcatgaaaaaaatacttgcgcaaagacccggccaccaacgaacagaacaaccgacagatgacaggaatcaggaaaagcaggatacacatggcggtgtggaacgattcgcgctggaacgtgaaaaggttctcgcggctgccctgtacgtggcgtatcacttcccgaaagatgttggcaagacacttaaatcacatgccgaagccatagagaaacacggctatctgttctgggatggtaatcccaccctaacacctgacgctggacgaatagcaaaaatgttatctgatgccagacgcttacccaatgaatggaaaattttgggcggaaacgcaaaagcaaaaagataa

SEQ ID NO: 492614 - DNA, 207 bp, Shigella sonnei
atggataccttacccaaatccggctatatgcgcccggcacaggtgataaaccattttcagattagcgaatcaacgctatggaactgggttaaaaaaggtaaattccccagcccggataagctgggcgatggcgtaagccgctttgatgtttccgctatccgtaagtggcttgcagaccgcaaagacacaaccagcacgcgtaattaa

SEQ ID NO: 492615 - DNA, 837 bp, Shigella sonnei
atgaaaatgccaaaaaggcccgcaacagggtcggggcgttctcacgcccaaaacaaccagacacccatttcatcaggtgaacttgccgacctgattcctgttatttcggggcaaattggccgccatcaaactaacgctgtaagtgcacgtgcgctacatgctgcgctgaatatcgggaaggatttttcgacatggataaccaacagaataagtgaatatggttttgttattggcaatgattacgccgtgcataaaatgatttccccaaaaatggggaaaagcccgaatgatgtggcctgtagccatatttcacgtactggacgccccggcaaagattatttactcacactgaacaccgccaaagaaatagcaatggtggaacgtaacgaccgtggccgggccattcgttgttatttcatccgttgcgaagaagaactggcacacgtagggccgcaatccatacagaaaattcgccaccagctaaaaagccggataatggcagccagttatcacagtcccatgtgcgccgcactggctttacagcgtgccgctgccgggaaaccctcctaccctcataactacgcaacagaggccaatatgatagcccggcttgtactggatggaatgacagccagacagtgggctgcggccaaaggtttaaccggagatccacgcgagcacatgagtagcgaacagcctgaactcatggcctaccttgagcaaagcaacacaaccctgattgatacggggatggactaccacaagcgcaaaacgcatcttgcccggcttattcctcaatggcgaatgagacaacagaggaacaccagccatgcgtaa

SEQ ID NO: 492616 - DNA, 522 bp, Shigella sonnei
atgcgtaaatattgcttgcctgccatcgctggtgggcgttatatttcccccgctggtgtaaatccaccagccgggcgtgagaacccgtttaatgagcaaaaggcgacacagacgcgcccagcgtctttttttgtgtcatgccatcgcgcaaccatacccagcggcaaagcccgcacagtatctatggtggcgctggtggggcagccgaaaggctggccggtttccttttgcgccggttttctcacccctgccagcgtcaccgccccttatgagcgtgagaactcaggcggtgactccttaaatttgcaaaaggaggctgccagaatggctacgaccccaaccccgttacaccatgaatttacctttcactttctggtcgttcgccgttccgacctgaacgaccgcccacaccgcaaatccgtcaacgcacccgatgaaacaaccgtccgccgtatgctggcacgtgattttgtgttgctgtttgctggccgcgttccggctcaggaggtgcgccatgcgtga

SEQ ID NO: 492617 - DNA, 315 bp, Shigella sonnei
atgcgtgatatgtataacacccggatacctgaactactggttacagccatcaaaaacgcagacgcacaggaagcccgcgccctgtttgatgatgcggattactgcgcccgcaaactgcttgaaggactgattagcacaggccgcctgctttccggcatgggcgacaatctcgaccccggcatggacgaactacgcagtctgggcgattccatcgctgttacagctgaacttgtggccggattcagtgaggttgtggaggcgtataactggcgctgccgcaccggggaaatcagggagggcgggcaatatgcgtga

SEQ ID NO: 492618 - DNA, 1044 bp, Shigella sonnei
atgcgtgacatagccacgattaacgcaatccgcagcgttgccgccgtggcggcacaacatgcggaaatcctcgttcctgaatggctgcccgaaggtaaacggcaggccgctgaatgggtgtgtcgtaaccccacacgtgcagaccgtcacgcgggcagtttttccgtctcgctggtggacggatgctggcacgacttcgccaccggggacagcggcggcgaccttgtggcgctgggggcttatttgtggaatgtgcgtcagactgatgccgcccgtattgtggcggacaggctggggctgtgcctgcccgcgctgggtaaacctgatgtaatgacccgcgaacaacgggaggcgcaacgggtgcgggtacagaccgcagaacaggaggcggccagactccgccagcaggagcagcaacaacgccaccagcgccagaaactgaccgcctgccgggcctttgagttgcttggccgggcggaggtggcaatcccttctcatccctatctcatgaaaaaacggctacagcccggcaatctgtatcagtcgggtaatgatttgcttgtccccctgtacaacgtatgcggcgaagtggtgaacgtgcagattatcagcccggacggtcgaaaaatgtttctccgtgatggtcaggtgcagggggctttccatgttatggggagctttgacctgatggcccctgaagcgccggaacatgacgtttacgtgtgtgaggggtgggccaccggggccgcccttctccagtactggaatgtcatggccgtggtgtgtgccatgaatgcgggaaaccttaaacatgtggctatggcgctgcgtgagcggtacggctcgcgcatatctctcgttattgccggggatgatgaccggacatcaaaagataaccccggttccagagcggccaacgaagccgcattgctggccgggtgttacgtcacattcccggaatggccgcccggtgcatcaccagacctttccgactttaacgatttgatgctatgggaaatggagcatgacccggacaaccactaa

SEQ ID NO: 492619 - DNA, 1839 bp, Shigella sonnei
atgacccggacaaccactaaaaccccggtcacatccgggaagcgaaaaccaccacgcaagaaacaccccaaagtcagcccggcgcgtccgggctacgccacttattcgcagcatgtgcaggtggacggcggccagatactgaaacccggcctttactggcacggcgtgcgcgactcaaccaacacagacacgtttatatgttccccgctggaggtcatcgccatgaccagcgacagcaaagacgaaaactacgggcgattacttcgttttctcacgccgtcaggccagtggcgggaatgggccgcaccaatggaaatgctcgccggagacggcggagaactccggcaggaactgctacgcatgggcgttaccattccctacaaacaacggcaggcactgaccgaatacatcatggagtcagcacccaaacgccgggcgctcgcggccacggccaccgggtggcacaccccgaccctgtttgtcatgccgggtggggttatcggtgatggtgatgtggtgtttcagtcaacagaagcaggctcacaggagtacgccaccgcaggaacgccagagggctggcgcgacaacgtggccgcattatgccggggaaacccggtagccatgctggccgtgtgtgcatcgctcgccgggccgttgctgtggctgcttgatgtggacagcggcggatttcatttcatgggcgacagttccagcgggaaaagcgtgggggcgctggtggcctgtagcgtatggggagaaccccgcaactttaaacgcaactggaacgccaccagcaccgggcttgaagggctggcgaccatgcggaacgataccgcgctgatactggatgaaattggcgaagccccggccagagatattggcgggctgatttatcagcttggcaacggaacaggccgccagcgtggcaaggtgtccggcatggcccgcccggtcaacacatggcgcaccatgattatttccacaggggaaatgaccgtgggtaaacacatggaaagcggcggtcagcgcatcaaggccgggcaggaaatgcggttactggatattccggcacagcggctttacggggcgtttgattgcctccacggaatggcactaccccacaaccccgacaacgacacagaacgccgtggagcaggccggaaatttgccgaaacgctgcgcggtaatgcggccacccattacggccacgccgggccggagtttgtgcgctggctgatttcccgcaatgaaagtgacaccaccagcaccgacagcaacggccagacgctggcggatatgtacgccatactgcgcgaacaattccccgcaagcaccgggcaggaggcgcgcgccgccgcgcgtttcacactgtgcgcactggccggggaaatggcgataactgccgggattctgccgtggaaacagggcgaagcactggaggcggtgaaagcgatgtttgatgcatggtcggactatcgtggccgggggcaatcggaggacgtgaaaatactccgggccgtcgccgggtttatcgcccgccatgcctcacgctttgaagggggcaacacatacagcgaaccagtaagcaaccgcgccggatggtggcgaccggggagcaatggcgaccgggtttactggtttttaccggaagcactatgtgaggcggccagcggctacgacctgaaacgcatagcggccagtcttgacgatgctggcgcgattgttgaccgcgacacggacgggaaacgccgatacacaaaacgcgtttccgttaacggggaaaaacaccgcgtttacgtcatcggccagaatgcattgttattcgcaattgatgaataa

SEQ ID NO: 492620 - DNA, 291 bp, Shigella sonnei
atgcataagttattcatcctgccggatgcattgtgtgagtttatccgggcattacctgccccggatttaccggaagcgcaccagcccgaaacatggacggaagacaacaccgacagcaacggccagacgcaggcggatatgtgcgccccgtctgcggcgtggctggctgcccgtgatgcgtatatcagccacgtcatgacctgcccgcattgcgttaccagcggcgttaaaaaaccgcgtcattgcgctgagggggaacgactacggcaaaactacgaccacaccagataa

SEQ ID NO: 492621 - DNA, 285 bp, Shigella sonnei
atgggcgaaaaagttcatttctggcatggcctgaaatgccatgcagcccgcgccgcgtgtgctctggtcgggggagaacggcgcggaataatgacagccaccccaccttatggcgggcagtcccacgaaatcccggttatttccgtttattcccggattaatcccgccttttcccgcattctcccggctgttcccggaattaatcgccggggtgtggtggttatctggtgtggtcgtagttttgccgtagtcgttccccctcagcgcaatgacgcggttttttaa

SEQ ID NO: 492622 - DNA, 270 bp, Shigella sonnei
atggtacatgaccgcatagcggaagaattggagtcgaaaggcttttaccggagagcggcggcgcgatgggccgaagtgatgatgcaggtggagacagacagggaacgcgaacgggtggcaatgcgcagggcagagtgttacgggaaggcacagaggacaccggagcaaccggatgatttcggcgacctgaaacggtcacttaaacgcactgaaaaagaaatggggatagacgggagaggcaaaaaaatctggcgtagctaccagaagtaa

SEQ ID NO: 492623 - DNA, 510 bp, Shigella sonnei; identical to SEQ ID NO: 483719

SEQ ID NO: 492624 - DNA, 207 bp, Shigella sonnei
atgggtgtcggcattcgacgaaataaacagccagccgtttttctgatcttcccggacaccccgcatccagtcacggatggtgaagggctcaccgttatgctcaatcccctgcaggtaacggatagctttcacgtagttggtcagcacagcacggatggaaattgccgttttctcaattttctcttccaccaggttggccgccggtga

SEQ ID NO: 492625 - DNA, 705 bp, Shigella sonnei; identical to SEQ ID NO: 8686

SEQ ID NO: 492626 - DNA, 705 bp, Shigella sonnei; identical to SEQ ID NO: 8686

SEQ ID NO: 492627 - DNA, 669 bp, Shigella sonnei; identical to SEQ ID NO: 491547

SEQ ID NO: 492628 - DNA, 465 bp, Shigella sonnei
atggtcatgactgctgatgagttttgccatattcagatccagcgattcagcccgccacatcgtcagatatttctgcgactgtgcgatggtcttttccgccttgcgcaaatcagcttcgatttttttgatacgacgccagcgaacgtccggacgttctttatacttcgcgtgaagcagtgccgaccgcgcccgctcttcccagtattccgcacgttcaaagagcatcacagcacgtttcataccgttttcaatacgctgtgcatcacgacgggcgcggcgttcgctgtgatgccccacaagaatgggctgaccgggcgggatcatcgcggccagtctttccacttcatcaagtgcctgtgcggattcactggcccgctttccgctgtatccggtaaaccgctccgcccgtgcttcctgacgttcagcgagcgtgctgtcttcatcctcaatctctccggcaagtga

SEQ ID NO: 492629 - DNA, 204 bp, Shigella sonnei
atgacggagacgggcgggcaaccgcccgtttcttttccggtaaaggatgtcgccgtgctcctctttttactgcgccggctgacgcggcgcggcataaacgctgcctgtggtcagtgtccgcgtccggcgggcacgggacgggcgcttttaccgctcccggctggcgtcggtgacagtgtacgccagcccgtcgcccttttctga

SEQ ID NO: 492630 - DNA, 156 bp, Shigella sonnei
atgctggacgaaagcggcggcgtggttacccggacacaggattttgagccgggcggacaggttttcagccggggcgagtggctgaccatcatccgcgtgaacaaaagcaacggggcggtgagttcagtcacaacgccgaattgtcagcgccagtga

SEQ ID NO: 492631 - DNA, 357 bp, Shigella sonnei
gtggtgctgttcggcaagctcgcggaagtggctggtgaatatctgcgcaagggcgcgcaggtctacatcgaggggcaactccgtacccgtagctgggaagataacggtatcacccgttacgtcactgaaattcttgttaagaccacgggcaccatgcagatgctgggacgtgccgcaggtactcagactcagccggaagaggcgcaacagttcagcggtcagcctcagccggaatcacagccggaaccgaaaaaaggtggcgcgaaaacgaaaggccgtggacgtaaggccgcgcagccggagcctcagcagccgtctgaacccgcgtatgacttcgatgacgacattccgttctaa

SEQ ID NO: 492632 - DNA, 321 bp, Shigella sonnei
atgcgttccctgatcatcctcgataaagacgttccggtactgtgcggcaacggcttcagcctgttcgcgggtaaaggagccgtcaggcagcccctgaaatattctgaaatattcgctcatcctcatatctccggtgatgccccgcactggacggggcggttgtcactgtctttcgttagaacggaatgtcgtcatcgaagtcatacgcgggttcagacggctgctgaggctccggctgcgcggccttacgtccacggcctttcgttttcgcgccaccttttttcggttccggctgtgattccggctgaggctgaccgctga

SEQ ID NO: 492633 - DNA, 177 bp, Shigella sonnei
atggcgggacaacagcggttttggtgtccgaaatcgtacaattctgtacatctacgcaagggaatgtacggaagtaagccaaacggttatcggatggccggaacatttcgtacagcctttacgttcagtgagttagctggcctggatgtaaccactcgttcaactcaattctcttag

SEQ ID NO: 492634 - DNA, 480 bp, Shigella sonnei; identical to SEQ ID NO: 464883

SEQ ID NO: 492635 - DNA, 363 bp, Shigella sonnei; identical to SEQ ID NO: 488257

SEQ ID NO: 492636 - DNA, 480 bp, Shigella sonnei; identical to SEQ ID NO: 464934

SEQ ID NO: 492637 - DNA, 366 bp, Shigella sonnei; identical to SEQ ID NO: 10065

SEQ ID NO: 492638 - DNA, 378 bp, Shigella sonnei; identical to SEQ ID NO: 490564

SEQ ID NO: 492639 - DNA, 774 bp, Shigella sonnei
atgaaaaatattctcgctatccagtctcacgttgtttatggtcatgcgggtaacagtgcggcagagtttccgatgcgccgcctgggcgcgaacgtctggccgctgaacaccgttcaattttctaatcacacccaatacggcaaatggactggctgcgtgatgccgcccagccatttaaccgaaattgtgcaaggcattgccgctattgataaattacacacctgtgatgccgtgttaagtggctatctgggatcggcggagcagggtgaacatatcctcggtatcgtccgtcaggtgaaagcagcgaatccgcaggcgaaatatttttgcgatccggtaatggggcatccggaaaaaggctgtatcgttgcaccgggtgtcgcagagtttcatgtgcggcacggtttgcctgccagcgatatcattgcgcaagggccacaaattgtgttggttaaacacctggcgcgagctggctacagccgtgaccgttttgaaatgctgctggtcaccgccgatgaagcctggcatatcagccgtccactggtggattttggtatgcgccagccggtaggtgttggtgatgtgacgagcggtttactgctggtgaaactgcttcagggggcaacgctgcaggaggtcctggaacatgtgaccgctgcagtctacgaaatcatggtgaccaccaaagcaatgcaggaatatgagctgcaagtggtggctgctcaggatcgtattgccaaaccagaacattacttcagcgcaacaaagctctga

SEQ ID NO: 492640 - DNA, 501 bp, Shigella sonnei
atgcaaatcggtatcaaaaaaatcgccgcgctatacgatatgtggatcaccggacgtacccatatggcgaaagcaatcattatcggtatggcggtgagtgccatcgggatcttcagttacgtacagttaggcgttgaacccaaaatcatgtgggcgggaccaaacgcggtaattggtggtttactgtttggttttggcatcgtgctggcaggcggctgcgaaaccggctggatgtaccgcgcggtagaaggccaggtgcactactggtgggtcggtctgggcaatgtgatcggctcgacgattctggcgtattactgggatgatttcgctccggcgctggccaccgactgggacaaaatcaacctgctgaaaacctttggcccgatgggtggcctgctggtgacatatttgctgttgtttactgcgctgatgttgattatcggctgggaaaaacgcttcttccgccgtgcggcaccgcagactgctaaggagatcgcatga

SEQ ID NO: 492641 - DNA, 174 bp, Shigella sonnei; identical to SEQ ID NO: 464844

SEQ ID NO: 492642 - DNA, 126 bp, Shigella sonnei
atgtcgcaacattattcagtgtcatggaaaaaaggactggctgcactctgcttactggctgttgccgggcttagcggctgcgatcaaaaagagaatgcggcggcaaaagtggaatacgacggatga

SEQ ID NO: 492643 - DNA, 381 bp, Shigella sonnei; identical to SEQ ID NO: 458903

SEQ ID NO: 492644 - DNA, 465 bp, Shigella sonnei
gtgcgcattgccgggcgtgatgcaggcgaaaatgaattatctgcccgtcttaatgagccgctggaaaatggtgccgtgattcacatcgtgccgcgtatggcgggagctaaaagtggcggtgtgtttcaggtggtgctgggggcggcgctgattgcggtggcatggtggaaccctgtgggctggctgggtgctgcggctgtatcgggcatgtatgcggcaggggccagtatgatcctgggtggtgtggcccagatgctggcaccgaaagccaggacgcccacggcagccagtacagataacggcaaacagaacacctatttctcctcactggataacatggttgctcagggcaatgttctgcctgttctgtacggtgaaatgcgtgtggggtcgcgggtggtttctcaggagatcagcacggcagacgaaggtgacggtggtcaggttgtggtgattggtcgctga

SEQ ID NO: 492645 - DNA, 711 bp, Stenotrophomonas maltophilia
atgaaggcactggtctttgccgccggcctcggcgagcgcatgcgccctttgaccctgcacacgcccaagccgctgctggaagtggctggcaagccgttgatcgtctggcacctggaacgcctggccgcactcggcgtgcgcgaggtggtggtcaacaccgcatggctggccgaacagttcccggcgacgcttggcgatggcagccagtggggcctgcgcctgcatttcctgtacgaagggcagaccccgctggaaaccggcggcggcatcctcaacgccctgccggtgctgggcgatgccccgttcctggtagtgaacggcgacatctggaccgatttcgatttcgccacgctgccgcgcgagccgcagggccaggcgcacctggtgctggtcgacaatccggttcagcacccgaatggtgactaccgcctggatgcacaggggttcctgcaccacgaccgcgaaggaccatgcctgacctatgccggcatcggcgtgtaccgtccttcgatcgtggccgactggcgcgcggtgatcggcgatgcgccgggcagcgagcgactgccaccgaagttctcggtggtgccgctgcagaagcacttcatggcgcaggggttgatgaccgggcagcaccatcgcgggcgctggaccgacgtcggcaccgtggatcgcctgcgcgcgctggatgcggagttggcggcgaacggctga

SEQ ID NO: 492646 - DNA, 1026 bp, Stenotrophomonas maltophilia
atgaccgaacccgcctccgatccccagcgcagcgcgcagcgcctgcagtgggcccgtacccagctcgatgatgccaacgcggtggtcgaacgcgcttcggttgacgccggcatgcgcagctactggcgcaccaccagcacgcgcggcagccacatcgtgatggacgccccgccggggctggaagatccgcggccgtggctgcgcatgcgcggcctgctgcacgacaacggtctgcgcgtgcccatgctgctcgcgcaggacctggatgccggcttcctgctgctggaagatctcggcggcccgaccctggccaggatcctcgacgagcgcaacgctgacgaatggttcggtcgttcgatcgagcagctgctgcgcctgcaggcgatcccggtgccggccgacttcggccagttcggcgaagcactgctgcagcgcgatgccggcctgttcgacgaatggttcctgcagcgccacctgaaccttgaactggactgcggcgagatcgaaggcctgcagctggtgcatcgccgcctgatggacaacgcgctgggccaggcccagctgatgacccaccgcgactacatgccgcgcaacctgatgccggtcgacgacggccccgcagtgctggatttccaggacctggtgcgcggcccgatcgcctacgatgcggtgagcctgttcaaggacgccttcctgagctggccactgcaacgcgtggacgaatggctggcgcagtatcacgagcgcgcccgcgacaccggcctgccggtgcccgaccgcgccaccttcctgcgcgatgccgactggatgggcatccagcgccacgtgaagatcctgggcctgttctgccggctgcgttaccgcgacaacaagggccattacctcgacgacgcaccgcgcttcatcacctatctggatgaagtgctgccgcgctaccgcgagctggcaccgctgcagcagctgctggacgaccgcatcaagccggcgctggccgagctgggtgcaccgatgcgcgtagcccgatga

SEQ ID NO: 492647 - DNA, 270 bp, Stenotrophomonas maltophilia
atgaatggtctgttcggcagcagcagctggctgtacatcctgctggtcggcttcttcgtcggcctgctcgggcgtttcttcatgcccggcaacaaccgcatgggctgcctgctgaccatcgtgctgggcatccttggtgccctgctggccggttggttcggccagtacatgggctggtacgcccccggcgaaccggccggtttcctcggcgcggtggtgggcgcggtggccgtgctggccgtcctgcgcctgttcagcggtcgccgctga

SEQ ID NO: 492648 - DNA, 1494 bp, Stenotrophomonas maltophilia
atggacagcgccaagctcggccaattcgtcaatgacaagtgggacagcgaaatcgtcccgcagttggtcgactacatccgcattcccaacaagtcgccgatgttcgacgccaattgggtgcagaacggctacatggaacaggcggtcaccctgatggagaactgggccaaggcccagcagctgcccggcctgaaggttgaggtggtgcgcctggaaggccgtaccccgctgatcttcctggaaattccggctaccggcgccgaaaccggcgacgacaccatcctgctctatggccacctggacaagcagccggaaatgaccggctgggacgacgacctcggcccgtggaccccggtcctgcgcggcgacaagctgtacggccgcggcggtgcggacgacggctacgcgatcttcggctcgctggctgcggtactggcactgcaggcccagggcctgccgcacgcccgctgcgtggtgctgatcgaagcgtgtgaagagtccggcagctatgacctgccggcctacgtcgaccacctggccgaccgcatcggcaagccgtcgctggtggtctgcctggattcgggctgcgccaactacgaccagctgtggtgcaccacctcgctgcgcggcctgaccggcggcaatttcaccgtgaaggtgctcaacgaaggcgtgcattccggcgatgcctccggcgtgatcccgtccagcttccgcctgctgcgccagatcctttcgcgcatcgaagaccaggacaccggccgcatcctgatcgacggcatgaacgtggagatcccggccgagcgcctggaacaggccaagcgtgccgccgaagtggtggataccgagatcttcgagaagttcccgatggtcgacggcctgcgccccatgaacgaggacctgaccgagctggtgctcaaccgcacctggcgcccggcgctgtcggtcaccggcgtcggtggcatgccgccgctggaatcggccggcaacgtgctgcgtccgcagacctcggtgaagctgtcgctgcgcctgccgccgaccgccgatggcaagacctgcggcgagctgctgaaggaagcactgctgcgcgacccgccgaacggcgcgcaggtcaccctggacctggaaaaggcctccaccggctggaatgccccggcgatggcgccgtggctgacccaggccatcgacgacgccagccaggccttcttcggcaagccggcgatgtacatgggcgaaggcggctcgatcccgttcatgggcatgctgggcgagaagttcccgggcgcgcagttcatgatcaccggcgtgctcggcccgcactccaatgcgcatggcccgaacgagttcctgcacatcccgatgggcaagaaggtcaccgcctgcgtgtccaaggtgatcagcgagcactacgccgccagcctgcgcggcgagaccagcggctcgccggtggctgccgacagcggcacccgccacggcgaccacggctgctgctga

SEQ ID NO: 492649 - DNA, 327 bp, Stenotrophomonas maltophilia
gtgccttggtttgtcgtgttgagggcgctggtgctggtaatggggatcgctggggcgcatgccgccgaaccgatcgacatcaaccgcgccgatgcccaggcgctgcagcagggattgacgatggtcggagccgccaaggccgaggcgatcgtcgagcaccggcgcagacacggcccatttcatcgcgtcgaggacctgacgcaggtgaaggggatagggaaagcgatcgtcgaacggaatcgacagcggatcaccgtaggcaacaggttgttgccggcggatccggtacccggatcggtaccggtgcggaccgtacccaggcgctga

SEQ ID NO: 492650 - DNA, 1083 bp, Stenotrophomonas maltophilia
atgcttgtgcaccgccccacgaccctgatgctcgccctggcactgaccctgccactgctggcccatgccgctgcgccgacgccgacagccaagcctgcggccgaagccagcaccgccgacgtgcgcgggccgaccgacctgaaaccgggcgagtacctgtggcatccggaaatctcgccgaccggcccgatcgtgctggtggtcagcctcgatgagcagcgtgcctacgtttaccgcaacggcatcgccatcggcctgaccacgatcagctcgggcaaggccgggcacgagacgccgaccggcgtgttcaccatcctgcagaaggacaaggaccacaggtccaacctctacaacagcgcgccgatgccctacatgcagcggctgacctgggatggcatcgccctgcatggcggcagcctgcccgggcatccggcctcgcatggctgcgtgcgcctgccgcaggcgttcgcgcagaagctgttcagcgaaacccagcgcggcgatacggtggtggtggccgacgccaagagttcgccgatgaccctggcctatccttcggtgctggccccggtcaacgcgcgcggccaggctttgccggaaaccgagggcggggccccggcgcaggcctggtgggacgacagcgcagccccggccgggcaggtcggcatcctggtcagcctgcatgaccagcgcctgtacgtgctgcgcgatggcgtgatgatcggcgagtcgccgctgaaggccgacgccctgccggcattccagggcaccacgctgttcgtgatggggcagggctacagcgatacgcccagcccgctggacgtgaaccagcgcctgcaccagtggacggcctatccgctgctgggccaggatcgtgcccaggccaccccggacctgctggccacgccctcgttgccaatggcgctgccggccgattttgcccgccagctgtaccaggtgctggtgccgggcacgaccctgctggtgacctcgttgccggcggtccgcccaagcccggctgaatccggaatgcagccggtcttggaatccgagccgccagggtccaccctcaaaggcaactga

SEQ ID NO: 492651 - DNA, 726 bp, Stenotrophomonas maltophilia
atgactgcatcccgcctgtgccggctggccgcgttcggcctgctggcgacctcggccagcgccccggcgctggcacagacgcccgcccttgccaccagcgctgatgatctggctgccttgctgtcgcgcagtgcgcccaaggctgaccgccacgtgttgcagctggcggcgcacgccatgcgctgtgcgttgcagcgtccggagctgggcatcaacggtgatcgtctcagcgtgatcgattattcgcggccgtccaccgagccgcgcctgtgggtgttcgacctggcccaccagcgcctgctgttcgaggaatgggtggcgcatggccgcaacagcggcgagaaccgcacccagcacttctccaaccgcgatgggagtttcatgtccagcctcggcgcgttcaccgcgcaggagacctacatgggcggtaatggatattcgctgcgcctggccgggctggagccgggcttcaacgaccgtgcgcgcgaacgcgcgatcgtcatccatggtgcgccgtacgtgaacccggccaccgctcagctgcaggggcgcttgggtcgcagcctgggttgcccggcggtgcgcctttcggtggccaagccgctgatcgatgcgttgcgtggcggcacgatggtgtttgcttactaccctgaccaggattggctgaagcactcgcagctgctggccggcggatgcggtggccagggcacgctcgctacgcggtga

SEQ ID NO: 492652 - DNA, 609 bp, Stenotrophomonas maltophilia
atgaacgtcgactccctgttgcacactccgagccaggtgatctcccacctggactatcgccgcgaacgctggcggaatggacttggctggacccgcgagatcctgcgccttcctgcgcagggtgatgactgggcgctgcgcctgtcggtggccgagatcgagcaggacgctgcgttctccaccttccccggcgtggagcgcgaactggtgctgctgcagggcaatggcgtgcgcctgcgtttcgaggatggccgcgtggcccaggtgctgccgccacacgggcgggcgcgctttgccggtgaggaaacgctgcacggtgaactggtcgatggcaccacccacgacttcaacctgatgtggaagcgcgagctgctgcaggccgaactgctgcaccggccgctggtggggtcgatgttcttcttctgcgaaccgggcgttgcgtgggcgctgcatctgctggccggacaggcgcagttcggtgccgatagtggcctgccggcgctgcaggcgggggacaccgcgtggttggcggggggcgagaggcaacggcatgcgctcagcggtggtggcgagttgttggcgatacgggtgagcgcggcgggggcatga

SEQ ID NO: 492653 - DNA, 1605 bp, Stenotrophomonas maltophilia
atgagcactcggccatcgcgtgcgtggctcggcaacacacttgtactgatcgtactggcgctgatcgcctgggcgctgctgcgcctgcacctcggcgacgcctggtggcagggcgcaccgccggcacggcaatcgcagatcgccatcatcgccaccgcgctgtacgcgctggcctgcgcggccctgtggtggcgcactcgtccgcgcgatgatgcggcgtccgccgataccgcaccgctcctgctggtctggtccagccagaccggctttgcccgcgaactggccgaacgcagtgccgaggccctgcgtggtgccggcgtgccggtgcgtgtgcgcgggctgcatgaggtcgacgccgcattgctggccgacagccagcgcgcgctgttcattgccagcaccaccggcgaaggcgatccgcccgaccacgccctgccgttcctgcgcggggtgatggccgcgccgcctccgttgcagcatctgcagtacggcgtgctagcgctgggcgaccgcagctatggccacttctgcggattcggccaccagctggaccagtggctgcgccagcacggcgcgcacccgctgttcgatgcgatcgaggtcgacaatgccgatccggcggcgctgcgacattggcagcagctgctgggacaacttggcggaggcgccaccgaactgcccgactggagcccggccgagtatcagccgtggacgttgctgcaacgccagcatctgaatccgggcagccccggcggcccggtgtaccgggtgcgcctgcagccaccgcctggcgtcgatgtgcagtggcaggccggcgacatcgccgagatcggcccgcagcacccacgccacagcgcgcgcgcctggctcgatgcacagggcttcaatgcagacaccatgctggatgacgggcaggcgttgctggcccgtatcgagcgctcgcatctgccatcgctggttcccccgggtgatctgcccgcattgctggcaaccctgcaaccgctgccgcatcgcgagtactcgatcgcctcggtgatggccgacggcgcggtggagctgctggtgcgccgccaactgcgcgccgacggtacacccggcatcggcagcggctggctgtgcgaccacgcggccatcggcgaaccggtgcaactgcggctgcgccgcaacgacaatttccatggcgtgcccgccgatgtaccgctgctgctgatcggcaacggcaccggcatcgccggcctgcgcgcgcacctgcacgaacgtgcccagcgtggcgcgcgccgcacctggctgctgttcggcgagcgcaccgccgcgcacgacttccatttcggcgaagaactgcaggcgatgctggccagtggcacgctggcacggctggatgcagtgttcagccgcgacggcggcgcgcatcgctatgtgcaggaccggctgcaggccgaagcggcgacgctgcggcagtgggtcgatgaaggcgcgacgatcctggtctgcggcagcctgcagggcatggccccgggcgtggatgcagtgatcgagcgggtgctgggtaccgcaggcaaggaagcgctgctgctggccggtcgttaccggcgcgatgtgtattga

SEQ ID NO: 492654 - DNA, 972 bp, Stenotrophomonas maltophilia
atgaccgattcccatctcgacatcgcccgcctcggtggcaccaccatgggcaccacctggagcgtgtcgctggtcgcgtcgcgccagcgcgacctgcacccgctgcacgccggcatccaggcgcggttggacgacgtggtcgcgcagatgagcacctgggagcccggctcggatctgagccgctacaaccgcgccgacgctggccaatggtgcgtgctgccggcggagacccgccacgttctggcctctgcacaggccatcgctgccgccagtgacggcgccttcgatcccaccatcggtccgctggttgcactgtggggcttcggtgcacatgccggcgaacgccgccagcccgacgccgctaccctgcaggccacccgtgagcgttgcggttggcagcgcctgcagtggcaggatgatgcgctgctgcaaccgggccggctggaactggatctctctgcgatcgccaagggcttcggcgtcgatcacgtagccgcctggttgcgtggacaaggcattgctgcagcgctgatcgaagtgggtggcgaactggccggctacggcagaaaaccggacggccaaccgtggcgcgtgctggtggaatccgcaccggaagaggatgtgcacaccgaaaccccgccacgggtgctggcgctggacggcaaggcggtggccacttcgggcgatcgctggcaccagtaccaggccgatggcgaggcctacagccacagcctcgacccgcgtacgggcaggccggtgcagcaggtcgccgcagcggtcaccgtcgtggccgacgacgccatgcacgccgatgcctgggctaccgcactgaccgtgctgggtcgcgaacagggcatggcgctggccgagcgcgaaggactggccgcgcgctacctgcaacgcaccgcagacggcccgcaggaatttctcagcagcgccttccagcgcctgctcgacgggcaggacgcatga

SEQ ID NO: 492655 - DNA, 804 bp, Stenotrophomonas maltophilia
atgaagcgcacgctcgtcctcgccgccgccctggccgctgcccttcccttctccgccctggcccacaaggcctggctgctgccctcgcagaccgtgatcgccggcaacgcgccgtggatcaccgtcgacggtgcggtctccaacgatctgttctacttcaaccacgtgccgctgcgcctggaatcgctggtgatcaccgcgccggacggcagcaccgtgcagccgcagaacgcgtcgaccggcaagtaccgcagcgtgttcgacatcgaactgaagcagtcgggcacttaccgcatcgcgtcggtcaatgacggcctgttcgccacgtacgagcagaacggcgagcgcaagcgctggcgcggcagcgcggctaccttcggtgaattgccgaaggacgcgaagaagctggaagtgagccagtcgatcggccgcgtggagacctttgtcaccaacggtgcgccgaacgacaccgcgctgaagccgaccaaccgtggcatcgagctggtcgccgtcggccacccgaatgacctgttcgccggcgaggaagccacgttccgcgtgctggtcgatggcaagccgaccgccggcctgcagttcgagatcgtgcgtggcgccacccgctaccgcaacgcgcaggacgagctgaagctgaccagcgatgccaagggcgagatcaaggtgacctggccggaagccggcatgtactggctggagaccggcaccgaggacaacaagacgtcggtgaagcaggccgccaagcgccgcctgagctacgtcgccacgctggaagtgctgccgcagtaa

SEQ ID NO: 492656 - DNA, 519 bp, Stenotrophomonas maltophilia
atgcgcgtcaccctgaccatcgccctcagcggcctgctggccacctcgccggcgtacgccaccaccctcgacatcaacgtcgaagtgcccaagctcaacgtggccgagtaccaccgcccgtacgtggcggtgtggctggaaggcgccgaccagaaggtcgcggccaacctgtcggtctggtaccagcagaccagcaacagcgaaggccacggcaccaaatggctgccggacctgcgccagtggtggcgcaagagcggccgcaccctgcaggtgccggtggacggcgtgaccggcccgacccgcccggccggcaagcacgcgctgtcgttcaacgacaggcagccggcactgaagcagctgcccccaggcaactacaccctggtggtggaagcggtgcgcgaagtcggtggccgcgaactgctgaagatccccttcacctggccggccaccgccgcgcagaacggcaaggcgcagggcgccaccgaactgggccaggtcaccctcgccgtcaaaccataa

SEQ ID NO: 492657 - DNA, 639 bp, Stenotrophomonas maltophilia
gtgagccgtcctgcctcttccaccgtggcgcagcaacagaaccgtggcttctggctgcggacgctgcaccagtggcactggatcagctcggcggtgtgcctgatcggcatgctgctgttcgcggtgaccggcctgaccctcaaccacgcggcgaagatcgaagccaaaccccaggtgcagaaccagcatctggaactgccggccgatctgctcggccagctcggcacgcgcgaaaacggcaatgcaccgattccgcgcccggcccggcactggctggacacgcagctgggcatcgccatcggcgggcgcccggccgagtggtcggccgaggagatctacctgtcgctgccgcgccccggcggcgacgcctggctgagcatcgatcgcgggaccggcgcggtggagtacgaatcaacctcgcgcggcgcggtgtcctacctcaacgacctgcacaagggccgcaacgcgggcccggcgtggggctggttcctggacctgttcgccgtggcctgcctggtgttctgcatcaccggcctgttcctgctgcacctgcatgcacggcagcggcgcatgacctggccgctggtcggcctgggcctgatgattccgctgctgatcgccctgctgctgatccactga

SEQ ID NO: 492658 - DNA, 2421 bp, Stenotrophomonas maltophilia
atggcccagcgccatcgtgtccgttcgtccctgtcccgtaccctgctgaccagcgccgtgctggcggctttcgccagccccgccttcgcccacggtgacgccgcaggcgcgccgcagacgctggacaaggtggtggtcaccgccgccggcttcgagcagaaggtgatcgatgccccggccagcatcagcgtggtcagccgcgaggaactgagcaagcgcccgtacaccagcctggtcgatgcgctgcgcgacgtcgaaggcatcgacgtcggcctggaagcgaccgacaagaacggccgcgccaccgtgtcgatgcgcggcctgccgtccgagtacaccctggtgctgatcgacggccgccgccagagcaatgtcggccagatctatccgaacaacttcggtggcggccagttcgcctacctgcccccgctggacgcgatcgaacgcatcgaagtcgtgcgcgggccgatgtccacgctgtacggttcggacgcgatgggcggtgtcatcaacatcatcacccgccgcgaccaggacagctggcacggttcggtcagccagggcttcaccgtgcagcaggacgaccagttcggcgatgcacgcaccaccgacctctacctcagcggccctttgctgaaggagcgcctcagcctggcagtacgcggcagctactacgacgcgaaggcttccaacccggaatgggatgcgttgtccctgcccgacggcaccctgtgggagcgcagcatcggcttcggcggtggtggcaagtcggtggccaacaccaactggaacagcggcgtgcggttggacgtccgcatcaacgacgatcacgaactgtggctggactacgacgtgtcgcggcagaagttcgacaacagcgaaggccagaccggcaccctcgacagcctggccagcctgtggcgcgtcggcaatgccgtcattcccaacccgaacggcagcggtaccgtcacccgtcgcgtggtgcagccgcgcgtgggctacaccgcctaccagcgctacgaacgcgaccagttgtcgctgacccatcagggccgctacagcttcggtacctggcagacctcgctgacccacagcaagagcagcaacctgggccgttcgctgccgctgaccctggaagagcgcgccaacctgcagacgctttggaatgacgtctgccgccgcaccggtgctgccaacaactgtgcggccggccgcggcaacgccctggttgccctcaacccgagcgagatggcgcgcctgcaggcgttcctgccgcgcccgctgcgcaccatggaactggaaggctacgtgctcgacacgatgctcgacctggacttcggcgcgcacacgctgaccgtgggcggccagtacaacgacactgacatggtcgacggtgtgttcggcatggatggcgccggctaccgcagcaacgtcaagcagacgcaccgcatgtgggcgctgttcgccgaggacaactgggcgctgaccgacaccctcaccgccaccttcggcctgcgctacgacaaccacaacgtattcggcagccatgtcagtccgcgtggctacctggtgtggaatgccagcgatgcgtggaccttcaagggcggcgtcagcaccggctacaagaccccgcgtccggaccagctgttcccgggcatcaccggcttcggtggccagggcgtgctgccactggtcggttcgccgaacctcaagccggaaaccagcaccaactacgagctggccgcttactacgaaggccagcgctggggcttcaacgtcaccggcttcttcaacacgttcgaggacaagatcgccagcggcggcacctttgcgaactgcgaagtggcccgcgccggcagcggctactgcgtggacatcggcccgggctgggcggcactgggctacagcacgttcacccagagcgtgaacatcgacaaggccgagacccgcggtgccgaactggccgcgcatgtcgacctgctcgacaccctgcagctgcgcggcaactacacctggaccaggagcgagcagaccagcggcgcgcagaagggcctgccgatcagcggcacgatgccggccaggcacatggccaatgcaagcctcaactggcaggtcaacgaagcgatcagcctgtcgctgatcggcgaaggccgctacgaccgctaccgcgacacgctgctggacgccaacggcgccagccacacccgctactacgaggactacaccatcttccatctcggtggcagctggaaggccacgccatggctgacggtgaacgcgcgggtcaacaacctgttcgacaaggacttcgtttcgcagtcgtgcctcctgatcagccagagcgagttcaactgcgtggacgactacgcgaccaaggaccagcgccgcagctactggatctcgttgaacgcgaagttctga

SEQ ID NO: 492659 - DNA, 402 bp, Stenotrophomonas maltophilia
atgggcaccgccatgcgcggccagcgtcccgcgctggccagcctgctggcgtgggtggcgatgctggcgttgctgctgggcaccctgccgctgctgccacaggcccaggccggaatggccgtgcagatgccactggaagaacgtggcggcgaaacacccctgcaggaagaggcgccggccaagctgcgccgctgcgcctccgctccggtgaagtcggccgagaaggcacgcccgccgttgctgctggccagccactggctgcgcactgagctcgacctcgtacccgccatgccggccatgcccggcgtgcgcgcggactggccgctggccgctccggacacgccctgggccgatgcgcccgggcgccgtcagcaacgcggccaggcgccgccgctcgcctga

SEQ ID NO: 492660 - DNA, 678 bp, Stenotrophomonas maltophilia
atgctgctgcacatccccgacattctcagcgccgaccaggtcgccgacttccgccgccgcctcgacgccgccgactggaccgatggccgcgaaaccgtggggcatctgggcgcacaggccaagcacaaccagcagctgcccgaggcttcgccgctgcgccgcgaactgggcgagatcatcctcgtcgcgctggcccggcacccgctgttcttcagtgccgcgctgccgctgaagtacctgccaccacgcttcaaccgctacagcggtggcggcacctatggctaccacgtcgatggtgcggtgatgaacctggccaatggcgagcagctgcgctcggacatctcctgcaccctgttcctgtccgcgcccgaggagtacgaaggcggcgagctgatcatcagcgacacctacggcgagcacgaagtgaagctgccggccggcgacctggtcgtgtacccgtccagcagcctgcaccaggtgcggccggtcacccgcggcgcgcgcgtggcctcgttcttctgggtacagagcatgatccgcgacgatgtgcagcgccgcctgctgtgggaaatggatggcgcgatcgagcgcctgcggcagaccggcggcgacgccgaggcgatcctgcagctgaccggcgtgtaccacaacctgctgcggcgctggagcgaagtctga

SEQ ID NO: 492661 - DNA, 720 bp, Stenotrophomonas maltophilia
atggcaacccgtacccccatcgacagcgacgccctggccgagctgctgcagcacgatccgcaggccgcgttcgcacgcgtgcgcgacgctgcgcaggctgggcaggtcgatgcacagctgctgctcgcgcagatgcacatggaaggcaaaggcaccgcacaggacgcctcggcggcgctgctctggtacgaaaccgccgccaacaacggcgcgccgatggcgatgaacatgctcggccgctgccatgagctgggccacggcacggcggtcaacctggcgctggcggcggtgtggtaccggcgcgcggccgacaccggcctggactggggcctgtacaacctggccaacctgctggccaccggccgcggcattgcgcaggaccgcgcgcaggcactggccctgtacacccgtgccgcgcacctgggccacgccaaatcgatgaacctgctggcccgccacctcgaagacgggctggataccgcacccgatccgcaggcggcgctggcctggtaccagcgcgcggccgaggccggtgatttccgcggccaggccaactacgcctcgatcctgctgcaggccggccaggtcgagcaggccgtgcactggctgcggctcgcactggcccacggcagccccgcgttcatggcgcacatcgtgccggagctggccgcgtcaccgcatccacaggtgcgcgccctggtcgcaccgccgtccctctga

SEQ ID NO: 492662 - DNA, 2295 bp, Stenotrophomonas maltophilia
atgacccacatcacgtcccgcaagcgcgccccgcgcgtttccctgctcgccaccgccaccctggccgccggcttcgcgccgttggccgcacaggcggccgacagcgctgacgcagcctcctcccgcaaggccaccgacctggacaaggtgcaggtgcgcggcagctggttcaatccgtcctcgccgaagttcaccgctgaactgctggacaccccgaagtcggtgtcgatcgtctcggagaagctgatcgccgaaaccggtgcgaccaacctgcaggatgcgctgcgcatggtgccgggcatcaccttcggtgccggcgaaggcggcaaccccaccggcgaccgtcccttcatccgtggcttcgattcgcagagcaacgtcttcgtcgatggcctgcgcgacgtcggctcgcagacccgcgagatcttcgacctggagcaggtggaagtggtcaagggcccgagctcggcctacggcggccgtgattccggcggtggcagcctgaacttggtcagcaagacgccgaagctgaagaacgagaccagcgccagcatgggcatcggcaccgacagctacgcgcgcggcaccgtggacgccaactacgtgctgggcgatggcatcgccgcgcgcttgaacctgatgaagcacgaatcggacatcgctggccgtgacgccgccaatgtcagccgctggggtatcgcgccgtcgatcgcgttcggcctgaacggcccggcccagctgatcgccagccactaccacatgcagagcgatgacctgccggacgcgggtggcttcccgtatggcaacccgaacggtgcgccggcctcgaagtgggtcgacggccgcccgatggtgccggaccgcaacaactactacggcctggtcgaccgtgacttccagcgtacccgcgccgacatcagcaccctggatgccagctacgacttcggcggccacaagctgcgcaacatcgcgcgcctgggcaacaccagcaacgactacctgtggacccagccggacgacagccagggcaacccgaacaactacggcaccctgtggcgccggaccaacagccgtgccgtcgacgtcaagagcttcgccgaccagctgggcctgaccggtgccttccagaccggtgcgctcaagcacagctacagcgcgggcgtggaatacagcgacgagaagatgacccgcggcagctatctgatgaccccgggcaccagcaacccgctcaccggcaacagcaagtgcccgaccaccggcgcggccaccggctacaactgcaccgatttcgccaatccgaacccgcgcgatccgtgggcggccacccattcagtgtaccgcagcgacaaggcactggacgtagagcagcgcaccaggaccacctcggcctacgtgttcgacaccattgagttcaatgagcagtggatgatcaacctcggcctgcgctacgacgacttccgcaccaccctgaccaccccggtggccggcaaggcaccgacccgcctgcgcaacagcaacgacttcctgaactaccaggccggcgtggtgttcaagccggccgccaacggcagcatctacctgtcgtggggcacctcctcgactccgccgggcatggacggtggtgatggttcggacggcctgagcgccgccgtggccgacctcaagccgcaggatacgaagaacctcgagctgggcaccaagtgggacctgttcgaccagcgcctgaacctcaccgcggcgatcttccacacggtgatgaacaacgcgcgcgtgacggtcgacaacggcaccagccagaatgccggcaagaaggaaatcaacggcttcgagctgggcttcaccggccagctgaccgacgcctggagcctgtacggcggctacacctacctggactcggaactgaaggacaacggcttcgtctgtggtgcaccggtcggccgcacctgcccgtccaacgtctacgtgccctcgccgtacaacggcaacgtattcccgaacaccgccaagcacagcgccaacctgtggaccacctaccgcttccccatcggcctgaccgtcggtgccggtgcgttctactcggacaagcagtacggtgacgtcgccaacaccaagtggatcgccagctacacccgcttcgacgcgatggccagctacgcgatccaggacaacatcagcctgcagctcaacgtgcagaacctgaccgacaagacctacttcaccaaggcctatgcctcgcactacgcgagcatcgccccgggtcgctcgaccaccctggcactgaacgtgaagttctga

SEQ ID NO: 492663 - DNA, 402 bp, Stenotrophomonas maltophilia
atggcttcgcccgcgcccaccgccacgctgtgccagctcgcccgccaagggtggccgctgctcgcggccgcgctgctgacgctgctgctgggctggtcggccctgcacgaagggcgcgatggacccgccacctacggctggcaggcacacgctgaagatcttcagcaggccatgccgatgccggccccgccggcggacgagtgcccgcgccatgcggtgccagtaccggagccgccgctggatggcgagggcacaacgccctgtaccggactggctcccccgcgcgccgccctggtcgcgcatgttccgctgtggcgctctgatgccctgcactggcagctgcacgatcccgcactgcggttgaaccccggccacgcaccgcccgcaccgcacgccagctga

SEQ ID NO: 492664 - DNA, 333 bp, Stenotrophomonas maltophilia
gtgagcgatacctggaccttcgtgtgtaccggcaacgagctgctgcccggtgaaatgaagagcgtgttcgacgaagtgaccggcacgccgatcgtggtgttcaacctcgacggcgagctgtacgcgctggaagaccagtgcacgcatgaggagttcgagctgtcctcgggcgagttcaacaccgacgaaggcagtgtggaatgcgtgctgcacggcgcgcgcttcgacgtgcgcgatggccgcgccctgtgcgccccggcctataccccggtacccaagttcccggtgaagcgcgaacacgacgccgtctggacccgcgacgaccgcgattga

SEQ ID NO: 492665 - DNA, 540 bp, Stenotrophomonas maltophilia
atgagcaccctgaccttccgcgccgccacgccggccgacatccccgccctgatcgccctcgtcacctcggcctaccgtggcgacgccagccgcgttggctggaccaccgaagccgacctgctggatggcgcccgcatcgacgccgaaggcatccaggccgacctcgaccgcccgcgctccacgatcctgctggccgagcgcgagggccagctggtggcctgcgcccacgttgccgacgtcgacggcaacggctacttcggcatgttctcggtcgatccggcccagcagggcggcggcgtcggcaagcagctgatggacgccgccgaagcgcacgccgcacgcgaatggaaggtgccggtgatgcagatgacggtgatcgacgtacgcgacgaactgatcgccttctacgagcgccgcggctaccagcgtaccggcatcaagaagccgttcccgtatggcgacgaacgcttcggaatccccaagcgcgacgacctgcgcttcgaggtcctggaaaagccactggccggagccgccgcgtga

SEQ ID NO: 492666 - DNA, 486 bp, Stenotrophomonas maltophilia
atgccaaggccacggcgcatcgatgcgcccggatatccgcaacatgtcgtccagcgcggcaacaatcgccagcccgtgttcttcacggatgacgaccgcgtggcctacctgcgtctgctgtgtcatcacgcagaccagcagcactgccgggtccacgcttatgtgctgatggacaatcacgtccatcttctggcaacgcctgatctctgcggcgggctgtcgcggatgatgcaggccgtgaaccggacctacgtacgtcgggtgaatgatcggcagggccgcaccggcacgttatgggaagggcgcttccactccacggtggtggatacggatcgctatctgctggcctgccagcgctacatcgagctcaacccggttcgggcggggaaggtggcgcatcccggtgactatcgctggtcgagctatcgtgcaatgcgcgtggcaggcccaatgcgctgctcgagccgcattcggcatttgagctga

SEQ ID NO: 492667 - DNA, 165 bp, Stenotrophomonas maltophilia
atgggttctgatgcggatgaacggtgcaggcgctatgtggagttcatcgaggcgggtattccggcgggggatctgctggcgatccggcgggcattgcagtcgcaacggcggctgtcgggaatgctggtggggtcagatccctttcgcgtggcgaaagggatctga

SEQ ID NO: 492668 - DNA, 1257 bp, Stenotrophomonas maltophilia
atgaacctgtccacgccacgcccgatcgaagaacgcaccggcgccccggactgggatcgcgtccgcctcgacttcccgctgctgatgcgtgaagtgcacggcaagccgctggtctatttcgacaacgccaacaccggccagaagccggtacaggtgatcggcgcggtggatgagttctaccgccgctacaacgccaacgtcagccgcgcggtgcatgcactgggcagcgaagcgaccgacgcctacgaaggcgcacgcaacaagctggcacgcttcctcaacgtgcgcgccagcgacctggtgctgtgcagcggcaccaccttcgccatcaacctggtggcctactcgtgggcgctgccgcgattgaaggccggcgacgtgatcctgatcacgcgcatggaacaccatgccaacatcgtgccgtggcagctggtcgcgcaacgtaccggcgccaccatccgcgtggccgagatcacgcccgatggcgcgctggacctggatgcgctgcgcgcggcgatgaccccggaggtcaagctgctggcggtcacccatgtctccaacgtgctgggcacggtcaatccggtgcgcgagatctgccgtgaagcgcgcaagcgcggcatcatcaccgtggtcgatggctcgcaggcggtgccgcaccgcaaggtcgacgtcgccgcgatcggctgcgacttctacgccatcaccggccacaagatgtgcggtccgaccggcactggtgcgctgtgggcgcgccgcgagcacctggacgcgatgccgccgttcctcggcggcggcgagatgatcaaggaagtcagcttcgacggcaccgtgttcaacgatgccccgcacaagttcgaagccggcaccccgaacatcgccggtttcatcggcctgggcgtggctgccgactacctgcagcagctcggccaggagaacgtggaagcccgcgaagccgaactgctggcgcacttcaccgaggagctgcgccgcgtcgacggcctgcgcatcatcggcgaagcgccggagaaggccgccgtggtctcgttcctgatcgatggcgcgcatgcgcacgatctggccaccctgctcgacctggaaggggtggccgtgcgctcggggcagcactgcgcacacccgctgctgcagtacttcggcgtcgccgccacctgccgtgcctcgctggcgttctacaacacgcacgccgagatcgagcgcttcatgaccgcgctgaccaaggtgcgcaagcttctgggctga

SEQ ID NO: 492669 - DNA, 1263 bp, Stenotrophomonas maltophilia
atgagcgccctgcttgactccatggcccaggccttctgtggcagcgatgcgcgccgcgaagtgctggatgcggccctgcgcgacggcctgcccgccgcccgcaatgaagcctggaagtacacctcgctgcgccagctggaacgccgtgcgttcgctgcagcgccgctgcagggcccggcgctggacgccgcgctgctggacgacatcccggcgccgcgcctggtgttcgtcaacggccgcctggatgccgcgctgagcgatgtgcaggccctgccgtccggcgtgcagctgcagccgctgtcggccgcgctggccgctggcgaagacgccgtgcgtttccttggccgtcgctacgagcgcagcgaagagatcttcgcccggctcaacgccgcgctggccgatgaaggcgtggtgctgcgcgtggatgaaggcgtgcaggtcgaaacgccgctgcagctggtattcgccagcgtcgccggggaagccgacctggcctggcaccatcgccacctgatcgaactgcgcgccggcgccagcctcggcgtggtcgagcatcgcttcagcgtgggtgactccgcccacctggacaacaccgtgctgcatgcccacgtcgcccgcgatggcgtactcaagcacgcccgcgtgcaggccggcagcgcccgccagaccagcttcctgcgtacggacgcggtgctggcccgcgacgcgcagtaccaccgcgtggacctggaactgggcgccgcgctcagccgccacgaactgaacgtgcgcctggaaggcgacaacgcccggctgaccgccaacggcgtgctgctcggcaatggccgccgccacgtcgagacccgcctgggcatcgaccacatcgcgcgcgataccgcctgcgagctgctgtggcgcggcgttgccgccaaccgcagccgcgtggtgttccatggcggcatccagatccgcgaaggcgccgacggcaccgacgcgaacctgtccaacaagaacctgctgctgtcggccgatgccgagatcgatacccagccgacgctggtgatcgacgccgatgaagtgaaggccgcgcacggcgcgaccgtcggccagctcgatgccaatgcgctgttctacctgcgctcgcgtggcctgccccaggtccaggcgcaggcactgctgagcgctgcgttctgccatgaaccgctgaagatcctgccggacgcgttgcgcgagcagctggcacgccgcctggacaaggccctggccgaggcgggtgtggcatga

SEQ ID NO: 492670 - DNA, 765 bp, Stenotrophomonas maltophilia
atgctgaagatcgaaaacctccacgcccgcatcggcgacaaggaaatcctcaagggcctgtcgctggatgtgaagcccggccaggtgcacgccatcatgggcccgaacggcgccggcaagtccaccctgggtaacgtcctggccggccgcgacggctacgaagtgaccgaaggcagcgtgcagttcgacggcgtcgacctgctggagcaggacccggaagcacgtgccgccgccggcctgttcctggcgttccagtacccggtggaaatcccgggcgtgaacaacacctacttcctgcgcgcggcactgaacgcccagcgcaaggcgcgcggcgaagaagaactcgattccatgcagttcctcaagctggtgcggcagaagctggccgtgctgcacctgaaggacgaactgctgcaccgtggcgtcaacgaaggcttctccggcggcgagaagaagcgcaacgagatcttccagctggccgtgctggaaccgaagctggcgatcctggacgagaccgactcgggcctggacatcgacgcgctgaagagcgtggccgacggcgtcaacgcactgcgcggcgccgagcgttcgttcctggtcatcacccactaccagcgcctgctggactacatcaagccggacgtggtgcacgtgctggccgatggtcgcatcgtcaagagcggcggccccgagctggcgctggagctggaagcgcacggctacgatttcctgaaggaccgggtcgtgcccgaggcggcggtctga

SEQ ID NO: 492671 - DNA, 1476 bp, Stenotrophomonas maltophilia
atggccaccgaaaccatcgaaaacgtcgcccacgacgacacccccaaccgcgagatccacgagcagctcggccgcaagtattcggccggcttcatcaccgagatcgagtcggactccctgccgccgggcctggacgaggacaccatccgtgccctgtcggccaagaaggacgagccggagtggatgacgcagtggcgcctggatgcctaccgccacttcctgaccctgccgatgccggactgggccaagctggagatcgcgccgatcgacctgcaggcgctcagctactactccgcgccgaagggcccgaagtacgcctcgctggatgatgtgccgaaggaactgctcgacacctacgacaagctgggcgtgccgctgcacgagcgcgccaagctggccggcgtggcggtggatgcggtgttcgactcggtatccgtgggcaccaccttccgcaaggaactggccgagaagggcgtgatcttctgctcgatgtccgaggccatcaaggaacacccggcgctggtgcgccagtacctgggcaccgtggtgccggtcggtgacaactacttcgccgcgctcaactcggcggtgttctccgatggcagcttcgtgttcattcccaagggcgtgcgctgcccgatggaactgagcacctatttccgcatcaacgccggccacaccggccagttcgagcgcaccctgatcgtgtgcgaggacaaggcctacgtctcctacctggaaggctgcaccgcgccgatgcgcgatgagaaccagctgcacgccgcggtggtcgagctggtcgcgctggaagatgcggagatcaagtactccacggtgcagaactggtacccgggcgacgagaacggcgtcggtggcatctacaacttcgtgaccaagcgtgccgaatgccgtggcgcgcgcagcaaggtcacctggacccaggtcgagaccggctcggcgatcacctggaagtacccgtcctgcgtgctgctgggcgacgattcggtcggtgagttccactcggtcgcgctgacccatcaccgccagcaggccgacaccggcaccaagatgatccatgtcggcaagcgcaccaagagcaagatcgtcagcaagggcatcagcgccggccgtggccagaacacctaccgcggcctggtgcgggtggaccgcaacgccgagggcgcgcgcaactacacccagtgcgactcgctgctgatcggcaagcagtgcggcgcgcacaccttcccctacatcgaggtgaagaacccgggcgccaccgtcgagcacgaggcgaccacttccaagatctccgatgaccagctgttctactgccgcgcccgtggcatcagccaggaagacgcggtgtcgatgatcgtcgacggcttctgcaagcaggtgttccgcgaactgccgatggagttcgcggtggaagccaagaagctgctggaagtctcgctggaaggttcggtgggctga

SEQ ID NO: 492672 - DNA, 456 bp, Stenotrophomonas maltophilia
atgttgcgcgtcaccaaactcaccgattacgccaccgtcgtgctgaccgtgctcgccgcccgtccgggcgaagtgctcagtgccaccgagctggccgaattcaccggtctggagccgcccaccgtcagcaaggtgctcaagccactggcccaggccggcctggtcgaaggcctgcgtggcgtccgtggcggctaccgcctgacccgcccggccatcgagatctcgctgttcgaagtggtcgaagcgatggaagggccactggccctgaccgaatgcagccacgaccaccaccagtgcggcatggcgcccaagtgcggcgcgcgcagcagctggcggctgatcaacgacgtggtctccgaggccctgcgcgatgtcaccctcgcgcagatcctgccccctctcccccttgccgatgacgaacagcgccgcaccatcgctgtcgacgtcgtctcctga

SEQ ID NO: 492673 - DNA, 468 bp, Stenotrophomonas maltophilia
atgccgaagaagatccaagcccgcaagtccgccatccatggcaacggcgtgttcgccgtggccccgatcaagcagggcgagcgcgtgatccagtacaagggcctgctgcgcagccacggtgatgtcgatgccgatgacagcggcgacgtcgaaagtggccataccttcctgttcaccctcaacgatgactgggtgatcgacgccaactacaagggcaacgacgcgcggtggataaaccacagctgcgacccgaactgcgaggcggtgatcgaggaggacgaggacggcgacagccggggcgacaaggtgttcatcgaggcactgcgtgatatcaaggccggcgaggagctgacctacaactacggcatcaccctggccgagcgccacaccgccaagctgaagaagatctgggagtgccgttgcggctcgcccaagtgcaccggcacgatgctgcagcccaagcgctga

SEQ ID NO: 492674 - DNA, 543 bp, Stenotrophomonas maltophilia
atggcagagcgattgaagggcaagcagattgccatccttgccacccacggcttcgaacagtctgaactgatcgaacccaagcgtttgctggaagcggaaggggcgcgcgtcagcgtggtctcgcccgcaaaggaagcgacgatcaagggctggaaggagaagaactggggcgacgccgtcgcggtggatatcccgttggatgaggcggatcctgcacgcttcgatgcggtggttctgcccggcggggtcatcaatccggacacactgcgcaccgatgatgccgtactggccttcatccgttcagtggatgaagccggcaagcccgtggcggcgatctgccatggcccgtggctgctgatcaacagcggcctggccgatggccgcgagctgacctcctggccttccctgcagcaggatctggcgaacgcgggtgcgacatggcgcgatgccgaggtggtggtcgacggcaacgtcatcaccagccgcaagccggatgacattccggctttcagcgaggcggtggtaaaagcgcttgccgcctga

SEQ ID NO: 492675 - DNA, 597 bp, Stenotrophomonas maltophilia
atgcgcctgcgttccctgatgacccgcctcgcggcctccaccgtgctgatcgccgctgcgatcggtgcacaggcggctccctccatttccggccgcgaactgtcggtgggcgccagcgacgtgcagcagtacctcgatggcagcttcccgcgcacccaggacgccctcggcggcctgatcgccctgaccatgagccacccgcagctgagccttccggccggcgaacggttgaacctgggcatggacgtcgcgctggccaccgccggcggcaacccggcccgactgggcacggtgaagctcagcagcggcctgcgctacgacgcgcagacccagggcttccacctgcagcagccgagcgtggatgacttcaccccggccaaccagggcggccgcctcgactcgcgcacccgtggcctgctcaatgcgtggctgagcgactacgcccagcgcgaaccgatctacaagctggacccggccgtggccggggtgctcggcgccctgcaggtgcagtcggcacaggtgaagaacggcaagctggtggtcactttcaaccagaacctgggcaacctggtaccggcaggcgtgctgggcaaatga

SEQ ID NO: 492676 - DNA, 534 bp, Stenotrophomonas maltophilia
atgcgcaggatcctgttcctgatcgcaccactggtgctgctgggttgttcacgcccggcggcacagacgaatgatcacatcacggcagcgtccgctcccgtcgccgcagcagcggacaccggtcccggtcccgttcccgcagcattgcaggcgagcgatatgacgctgctgtccgccgtcgacgacggcgcagagccgccgtcgacgatgctcaaccgctacgtcgccgcactgctcaaccgcgaccgcgccgccagcgatgctgcctggacgatcccacccggcgacccgcggcatgcagacgacgccgcgctgcggcagctgcaggacctgcgcacgctgcgcctgcacagcgataccccgatcgcccgagatgaccggcagccaccgcggctgcttgaagtccctgtgcagatccgtgcggccaccgccaatggcacgttccgcttcggcggctggtaccgcgtgcagcccagcagcgatggcagcgcctggcagatccagtcggcacagctgcgtccaacgctggactga

SEQ ID NO: 492677 - DNA, 309 bp, Stenotrophomonas maltophilia
atggccagcccctccacccgctaccggatctcggtaaccccgatcgaaaaggacgggctgcagtgcaccgggcgctgcaccatcgaactggaacaccgcgccggccgcgacctgatgcgcctgctggaagcggccccgcgtaccgccggcatcagtggcgacgagcgcgcgaccctggtgatcgccacccagctgctgcgcgacatcgtacagcgccacgccgagaccgacggccacgcactggctgccatcgccggccaggtcctgccggcgctggacgcgctggagcagctgccctcctcccgctga

SEQ ID NO: 492678 - DNA, 399 bp, Stenotrophomonas maltophilia
atggcaaagaccgctaagaaggctgccccgaagaaggcagtgaagaaagtcgcgacgaaggcagccgccaagccggccgctccgaagccgatcaaggaagtgctgaccaagtccggcctggttgcacacatcgctgaagcctccggcgtcatcgccaaggacgtccgcgctgtgctggcctcgctggaaagcgccgtcgcctcctcggtgcacaagaagggcgctggctcgttcaccctgccgggcctgctgaagatcaccaccgtcaatgtgccggccaagccgaagcgcaagggcatcaacccgttcaccaaggaagagcagtggttcgctgccaagccggccaccaccaagctgaaggtgcgtccgctgaagaagctgaaggacgccgcgctgtaa

SEQ ID NO: 492679 - DNA, 432 bp, Stenotrophomonas maltophilia
atgggaatctcgcgacacgccaccgcgcactgggaaggcgatctgaagtcgggcaagggacagctgagcacgccgcagagcgggctgctggacaagacccgctacggtttcaacagccgcttcggcgacgagaagggcaccaatccggaggagctgatcgccgccgcgcacgccggctgtttcaccatggcgctgtcggccaagcttggtgaggccggcttcaccccgacctcgctggacaccgaggccaaggtcgatctgtccctggagggcgggccgcagctgtcgcagatccggctgaaggtgaaggccgtggtgccgggcatcgacgccgcacagttccgtgccattgccgatgacgccaagcagaactgcccggtgtccaaggcgctgagcgcggtgccgatcagcctggaagccgaactgggctga

SEQ ID NO: 492680 - DNA, 879 bp, Stenotrophomonas maltophilia
atgtccacccgccgtttcctgcagctggatgtgttctccccgcgcgccggtgccggcaatccgctggccgtggtgcttgatgccgaaggcctggacgatgccagcatgcaggccattgcgcgctggacgcgcctgccagagaccaccttcgtgttcccgccgcaggtcgcaggcgccagctaccggctgcgcatgttcagcccgcagaaggaggtcccgttcgccggccatcccagcgtcggcaccgcgcatgcggtgctgcaggcgggcctggccgcgccagtcgacggcgtgctcgtgcaggacggcattgccggtgcgctgccgctgcgcgtgaacggtgagggcgcgcagcagcgcattgccatccgcaccccgcgcgcgcagctggcggagatcgccgaggccaccgacccgcgcctgcaggcggcgctgaaggattggccgctgggctcgctgccgccggcgcgcatgcagggcgggcgcagctggtgggtggtgcaggtggccgatgaagcggcactgcgcgcactgcgcccggactgggacgcggtcgcggctctggccgaatccaccgacagcatgggcgtgtttgcctacgccttcagcgatggcagcgagggcttcgatcttgcagtacgtgccttcgtcggcaatggacgccgcttcgaggacgccgcctccggcgcggctaatgccgtgctggccgcgtggctggacctgcgcgatgcgctgccccgaggccgtgcaccgttcgaagtcagccagggccgcgaagtcggccatgacgcgcgcctgaccctgcgggtcgatgaagacggcgaggtctggtcgggcgggcaggtgcagacggtgattaccggcacccttgattggtga

SEQ ID NO: 492681 - DNA, 873 bp, Stenotrophomonas maltophilia
atggccctcctccgttacctgcagctcgatgtcttcgcctcccgccccggaaccgggaatccactgggtgccctcctggacgccgatgcgctctccggcgagcagatgcaggccctggccgcctggctgaacctgtccgagacggtgttcttcctgcgccccagcgcgcccggcgccgactaccacatccgcatcttcaccccgacccgtgagctggccttcgccggccacccgagcgtcggcgcggcctgggcggcggtgagctgcggcctggcccagcctcgcgacggcgccctgctgcagcagtgcgcggcgggggtgctgcccgtgcgggtgagcggcccggccgaggcactccagatccagctggccagcccaccggcgcggcagctggcgactggcgcagatgcggcacccgaaacactgctggccctcgccgccaacgggcacgtgcccgaactctgggacaacggcgcgcgctggtggctgctgccgctgcgcgatgccgccgctgtgcgcggcctggcgccggacatggccgccctgcgtgactggagccttgccaccgaggccaccggcgtggccgtattcgccgacgaagccggtaccgaccacacccgtgtggtgcgcgcattctgccccgccgatgcggccagcgtgccggaagatccggtcaccggcagcgccaatgccctgatcgctgcctggctgcggcagcgcaacgccctgcccggccgcgagggccactacgtggccagccagggccgcgaagtcggccgcgatggccacgtgcaggtgcaggtcgacgcgcagggcacggtctggatcggcggccaggtgcagccggtcatcgacggccaccttcgctggtag

SEQ ID NO: 492682 - DNA, 2595 bp, Stenotrophomonas maltophilia
atgtcagcttccccccttgtcgatcgttggatcgtactgaagttcggcggcacttcggtgtcgcgtcgtcaccgctgggacacgatcgggaagctggcgaaaaaacgcgcggaagagaccggctcgcgcgtgctggtggtggtgtcggcgctgtccggggtcaccaacgaactgaccgcgatcgccgatggcgcgccggacagccgtgatcgcgtggccgcgctggtcgaacgccatgaaggcttcctggccgaactgggcctgggccgcgaagtactggccgagcgcctggcggcactgcagggcctgctcgacgacccgcgtgcggccacccgtccgctgcagtggcaggccgaagtgctgggccagggcgaactgttgtcgtccacgctgggcgcggcctacctgcacgcctcgggcctggacatgggctggatggatgcccgccagtggctggacgcgatgccgccgcagccgaaccagagcgactggtcacagcgcctgtcggtgaactgccagtggcgtgccgacgcggagtggatgcagcgcttccgcgcgcagccgacccgcctgctgatcacccagggtttcatctcgcggcatgccgatggcggtaccgccatcctcggccgtggtggctcggatacctcggcggcgtacttcggcgcgctgctcggcgccagccgcgtggaaatctggaccgatgtgccgggcatgttcagtgccaacccgaaggatgtgccggacgcgcgcctgctgacccgcctggactactacgaggcgcaggaaatcgccaccactggtgccaaggtgctgcatccgcgctcgatcaagccgtgccgcgatgcaggcgtgccgatggccatcctcgataccgagcgtccggaactgccgggcaccagcattgacggcagtgctgcaccggtaccaggcgtcaaggcgatcagccgccgcaacggcatcgtgctggtgtcgatggaaggcatcggcatgtggcagcaggtcggcttcctggccgatgtgttcaacctgttcaagaagcatggcctgtcggtggacctgatcggttcggccgagaccaacgtcaccgtgtcgctggatccgtccgagaacctggtcaacaccgatgtgctggccgcgctgtcggccgacctgtcgcagatctgcaaggtgaaggtgatcgtgccgtgcgcggcgatcaccctggtcggccgtggcatgcgttctctgctgcacaagctgtcggacgtgtgggccaccttcggccgcgagcgcgtgcacatgatttcgcagtcgtccaacgacctgaacctgaccttcgtcatcgacgaggccgatgccgatggcctgctgccgatcctgcatgccgagctgatcgacagcggcgcgatgccggtggaagaaaccgaagtgttcggcccgcgctggcgcgagattgccggcaccgtgcgcccgcgcggcacgccgtggtggcgcggccagcgtgcgcacctgctgcagctggccgatgccggtacgccgcgctatgtctaccacctgccgacggtgcgcgcccgcgcccgcgcgctggccgcgatcaagccgatcgaccagcgttactacgcgatcaaggccaacagccacccggccatcctgcagctgctggaagccgagggcttcgggctggagtgcgtctcgtacggcgagctgaagcatgtgttccagcacctgccggagctgtcgccgcggcgcgtgctgttcactcccagcttctgcccgcgcagcgagtacgaggcggcgttcgcccttggcgtgaccgtcaccgtcgacaacgtcgaagcgctgcagcgctggccggacctgttccgcaaccgcgagctgtggctgcgcgtcgacctggggcgtggcgaaggccaccatgccaaggtccgcaccggcggcaaggagtccaagttcggcctgccgatcgcccgcgtggacgagttcgtgcgcgcggccaccgagctgggcagccgcgtggtcggcctgcatgcgcacctgggcagtggcgtggaaaccgcgcagcactggcgcctgatgtgcgatgagctggccggcttcgcccgccgcatcggcagcgtgcacaccatcgacatcggtggcggcctgccgattccgtacagcgacgaagacgagccgttcgacctggacgcctgggccgagggcctggccgaggtcaaggcgctgcacccggcattccgcctggcgatcgagccgggccgctacctggtggccgaatcgggcgtgctgctgacccatgccacccaggtggtggaaaaggacggcgtgcgccgcgtgggcctggatgccggcatgaacacgctgatgcgcccggcgctgtacgacgcctggcacgacatcgagaacctcagccgccagggtggttatgccgaagcggcgttcgatgtggtcggcccgatctgcgaatccagcgatgtgttcggcaagcgccgcaagctgccggtgtcaactgcgccggacgacgtgatgctgatcgccgacgccggcgcgtacggctatgtgatggccaacacctacaaccagcggatgctgccgcgcgaagacgtgatcgaatga

SEQ ID NO: 492683 - DNA, 1353 bp, Stenotrophomonas maltophilia
atgactgctttcgacaaacaccaggtttcccgcttccgcttcgtccgctgcgaattcgccgcggataccggcgtggccaggctggtctacgccttcgatgacggcccggagatggtggaaaccatcaccgtgcccggcgccccgttcgtgctggacgaagcgcgtagcgccgccgtgcagcgcgcgctgcagctgctgcacctgatcgccggtgtcagctactacaaggccggcgtaccggatacggtcagcatcgacagctacagcatcgatgccgataccgccgcgctggtggagaccatttacctcaacggcctgggcgaattcgcctaccgcaacggcctgaacctgcgcggccgcttccggttgccggtgcagggcgaggccgtgcaggcgccggcgctgggcctgcagccgcatgcgctggtggccatcggcggcggcaaggattcgctggtcagcatcgaagcgctgcgccgtgccggcgtggacgagaccgtgacctggatcggtggctcgcagctgatccgtgcgtgcgccgagcgcactggcctgccgaccttgaacctgggccgcacgctggcaccggaactgttcgagttgaaccgccagggcgcctggaacggccatatcccggtgacggtggtgaactcggcgatcatggtgctggccgcgttgctgcacggcgtggaccaggtcgtgttctccaacgagcgctcggccagctacggcagccagattccaggcaccggcgaagtgaaccaccagtggtccaaggggtgggcctgcgagcaggccttcggtagccatgtgcagaagtacgtggcggcggacctgcagtactactcgctgctgcgcccgatgtccgagctggcggtggcccgccagttcgccaagagtgacttctacgacgcgcatttctccagttgcaaccgcaacttccacatcctcggcgagcgcccggtgaaccgctggtgcggcgtctgcccgaaatgccatttcgtgttcctggcgctggccccgttcatgcccaagacgcgcctggtgcgcatcttcggccgcaacctgctggacgatgccgagcaggccgctggcttcgatgcgctgcttgaattccaggaccacaagccgttcgagtgcgtgggcgaaggccgcgaatcgcgtgcggcgatggcgaccctggcacagcgcccggagtggaaggaagacgtgctggtgaagcgcttctgcaacgagatccagccgcagctggatgccgccgaactggaactggcaccgctgctgcagctgcagggcgagcaccgtgttccagctgcgctgtgggaacgggtgcgtgaagatttcgaagcttga

SEQ ID NO: 492684 - DNA, 1440 bp, Stenotrophomonas maltophilia
gtgttccagctgcgctgtgggaacgggtgcgtgaagatttcgaagcttgaaggaaagcgcgtcgcgctgtggggctggggccgtgagggccgcgccgcgtttgcggtgctgcgcgcgcgcctgcccacgctggcattgagcctgttctgcccggcgtccgaggtcgaggcggcgcgtgcggaaacgaagggcgcgctggacgtgcgtggcgagccttccgctgaagcgctggccgcgttcgacgtggtgatcaaatcgcccggcatcagcccctaccagccgatcgcgctggcggctgcagggcagggcaccagcttcattggtggcaccgcgctgtggttcgccgaacacgcggccgacgatggcatcgtgcacgacaccgtgtgcgtgaccggtaccaagggcaagagcaccaccaccgcgctggttgcgcacctgctgcgtgccgccggccatcgcaccggcctggtcggcaacatcggcctgccgctgctggaagtgctggatccgcagcccgcgccggagtactgggcggtggaactgtccagctaccagaccggtgaggtggcacgcagtggcagccgcccgcaggtggcggtggtgctgaacctgttcccggaacacctggactggcacggcagcgaacagcgttacatcgaagacaagctgcggctggtgactgaagccgcaccgcgcatcgccgtgctcaatgccgccgatccgcacctggccgcgctgtcgctgcccgacagcgaagtggtctggttcaaccagccgcagggctggcacatgcgcggcgacatcgtgcatcgcggtgagcaggccgtgtttgatacccgcaacacgccgctgccgggccgccacaaccgtggcaacctgtgcgcggtgctggccgcgctggaagcgctggggctggatgccgcggcgcttgcgccggcggtgcaggacttccgtccgctgccgaaccgcctgcagcgcatcggcgtggccgatggcctgacctacgtcaacgattcgatcagcaccacgccgcatgccagcctggccgcgctggagtgcttcgccggccagcgaatcgcgctgctggtgggggggcatgaccgtggcctggactggaccgatttcatgcagcacatggcgcacgatgtgccgccggtggagatcgtgaccatgggcagcaacggcccgcgcatccacgcgatgctgcagccgctggccgacgccggtcgcttcggcctgcatgcggcgggcgatctcgccgaggcgatggccttggcgcgcgccgcgctgggcgaacagggcggggtggtgctgctgtcgccgggtgcaccgagctttggtgcataccgcgactacgtggcgcgcggacgtcatttcgccgagctggccggcttcgatccggacagcatcagcgcgatttccgggctgggtatcgggtga

SEQ ID NO: 492685 - DNA, 594 bp, Stenotrophomonas maltophilia
atgaacgttgttgaccgctttctgtctggcctgaacccgcgcctgcctgctgatgacgcctcgcaatggatccacgtccagggcgccagcgccgaagacctgcagcgcctgcgtgtgcagtggccgcaggtgccggacagcctggtcgaactgctgtcgcgcgtggatggcacccacttccgcgagtaccccggcggcgaggtctgcgtgctgatgctcggctcggacgtggaggacggcggctatccgtactacctgcgctcggtcgcacagatcttcgaggaccagcggcagtgggacgacagcatccgttccatctatgaagaatggctggatgacgaaccggagatcctcggcgagggcatcgacgcggatctgccgatgagccgtcggctgtgcttctcgcactgcatgaacaatggcggcacctcgatgctgtacctggatttcgatcccgcaccgggtggcacggttggacaggtggtgcgctacctgcatgatccggacagctacgcggtgatcgcgcccagcttcgacgcctacctgcagcagctgattgacggcgattacgcgttcatcgacgaagatctgtag

SEQ ID NO: 492686 - DNA, 792 bp, Stenotrophomonas maltophilia
atgaatcgttggcgatgcggtgtggcggtgatcctggggctggcggcgatgccggcgtgggcggcgatgaagacccagccggtggaatggaaacaccagggcacgaccttcagtggcgtgctggtctatgacgacggcgacaacgacaagcgcccgggcctggtgatggtgccgaactggaagggcgtgaacgaatcggcggtcgaaaaggccaagcagctggccggcgatgattacgtggtgctggtggccgatgtctacggaaagggcgtgcggccgaagaccgatgccgaggccgggccggtggcaaccaagctgcgcaatgacaggccgctgctgcgcgcacgtgcgctggaggcggtgaacgtgctcagggcgcaggcgggcaaggtgccgctcgatgccggccggattggcgcggtgggcttctgtttcggcggcaccacggtgctggaactggcccgtgccggtgcgccgctggccggtgtggtcagcctgcacggtgggttgggttcaccgctgccggcgcaggccggtggcagccatccgtcggtgctggtgctcaacggcgcagacgacaggagcgtgactgccgaggacatcgctggcttccagaaggaaatggacgcggccaaggtcgattgggagttcaccaactacagcggtgcggtgcactgcttcgccgagcgcgatgccaacagtccgccggggtgccagtacaacgagcgggcggcgaagcgcgcatggaaggcgctggatgagttcttcgaggaacgcttcgagaaacgttga

SEQ ID NO: 492687 - DNA, 999 bp, Stenotrophomonas maltophilia
atgaccatcaccgaagacacccgtcccgccctgggcctgccccagatccagtcgcttgccgcggccgacatggccgccgtcgacgccctgatccggcgccggctgtcctcggacgtcgtgctgatcaaccagatcgctgaccacatcatttccgccggcggcaaacgcctgcgcccgatgctggtgatgctggccggccatgcggtcggccaggccggtccggagcaccaccagctggcggcgatcatcgagttcatccacacctccaccctgctgcacgacgacgtggtggacgaatccagcctgcgccgcggccgcagcaccgccaacgcactgtggggcaacgcgcccagcgtgctggtcggcgacttcctgtactcgcgcagcttccagctgatggtcgagctggagcgcatgccggtgatgcagatcctggccgacgccaccaaccgcatcgccgagggtgaagtgctgcagctgctgcacgtacacaacccggataccgacgaagccgcctacctgcgcgtgatcgagcgcaagaccgcggtgctgttcgccgccggcacccgcctgggcgcgctggccagcggcgtggatgaagcgacccagcaggccctgttcgactacggcatgcacctgggctacgcgttccagatcgccgacgacgtgctggactactcggccaacgccgaggagctgggcaagaacctgggcgacgacctcgccgagggcaaggccacgctgccgctgatccacgcgatggcccactccgacaacgccacccgcgagcgcctgcgcaccatcgtgcaggacggtgacgcctcggcgatgccggaagtgctggccgcgatccgcgccaccggcggcctggagtacagccgcgcgcgtgcagaggaatatgccgaagccgccgagcgcgcgctcgatggcctgggcgacaacgatgccgtggccgccctgcgcggcctggcccgctacgcggtgcagcgctcgcattga

SEQ ID NO: 492688 - DNA, 1614 bp, Stenotrophomonas maltophilia
atgtcgcactatccatggtggcgcggagccgtcatctaccagatctacccgcgcagttacctcgatgccaatggcgatggcgtgggcgatctgcccggcatcatccagcgcctggaccacattgccgcgctgggcgtggatgcgatctggatctcgccgttcttcaggtcgccgatggccgacttcggctacgacatcgccgattaccgcgatgtcgacccgctgttcggcagcctggacgactttgaccgcctgttggccaaggcccacggcctgggcctgaaggtgatgatcgaccaagtgctgagccacacttcgatcgagcatgcgtggttccgtgagagccgccaggaccgcagcaatccgaaggccgactggtacgtctgggccgacccgcgcgaggatggcaccccgcccaacaactggctgtcgctgttcggcggctgcgcctggcagtgggagccgcgccgtgagcagtactacctgcacaacttcctggtcgaccagccggacctgaatttccatcacccggacgtgcagcaggcgaccctggacaacttgcgcttctggctcgaccgcggcgtggatggcttccgcctggatgcgatcaacttctgcttccacgacgcacagttgcgtgacaacccggccaagcccgccgacaagcgggtggggcgcggcttcagcccggacaacccgtacgcctaccagtaccactactacaacaacacgcagccggagaacctgccgttcctggagcgcctgcgcgcgctgctggacgaatacccgggggcggtcagcctgggcgagatctcttcggaagactcgctggccaccacggccgagtacacccgcgatggccgcctgcacatgggctacagcttcgagctgctggtggacgactacagtgcggcctacatccgcgatacggtctcgcgcctggaagcagcgatgaccgaaggctggccgtgctgggcggtgtccaaccacgatgtggagcgcgcggtcagccgctggggcggccaccccgccgacccgcgcctggcgcggatgctggtggcgatgctgtgctcgctgcgcggttcggtctgcctgtaccagggcgaggagctgggcctggccgaggccgaggtgccgttcgaggccctgcaggacccctatggcatcaccttctggccgaatttcaagggccgtgacggctgccgtaccccgctgccgtggaccgatgcaccgctggccggcttcaccactggccagccctggctgccgatcccggccgaacaccgggccgcggcggtcgccgtgcaggagcgcgacccgcattcggtgctggcggcgttccgcgcgtttctggcctggcggcatacccagccggccctcctgcatggcagcatcagatttcttgaaagcgccgagcccgtgctgctgttcgagcgtatgcttgcagatgaaaccctcctgctggccttcaacctgtcggccgaagcggtgagccatccgctgccgccgggcaactggcagcaggtggtggtaccgggcccggatgcgggcacggtgcagggcaatgaactccagctgccgccacgcgcggtgtattgcgcccgacgcagctga

SEQ ID NO: 492689 - DNA, 2754 bp, Stenotrophomonas maltophilia
atgttgaaccacaagcgcagcgcgctgagcatcgcgctggccgttgtcctggcgccgacgctggcgtcggcacagtccacgcagaacaccaccacgccggccggcaccgccgccaccaacctggatacggtgcaggtcaccggcatccgccgcggcatcgagagcgcgatcgcggtcaagcaggacgccacctcggtggtcgaggcaatctccgctgaagacatcggcaagctgcccgacgtcagcatcgccgaatccatctcgcgcctgcccggcctggccgcccagcgcgtggccggccgtgcgcaggtgatcagcgtgcgcggcctgtcgccggacttcgccaccaccctgctcaatggtcgcgaagtggtcagcaccggcgacaaccgcggcgtcgagttcgaccagtacccgtccgagctggtcaacggcgtgacggtgtacaagaccccggacgcggcgctggtcggccagggcctgtcaggcaccatcgacatgcagaccgcgcgcccgctcagcttcggcgagcgcgtgatcgcggtcagtggccgctaccagaagagctcgctgggccgcgccgccaacaccgatccgtacggcaaccgcttcagcgccagctacatcgaccagttcctggacaagaccctgggcatcgccatcggctatgcgcacagcgacatgccgatccaggagaaccaggtcggcctgtacgagccgtggaccaccgagcacaccgacaagggcgaccgcccgggcgtgggtgccggcacctacttctccgatggcatcaaggcgctgcgccgcaccggcaacaacaagcgcgacggcgtgatggccacgatccagttccgcccgaacaacagctggaccagcaccttcgatgccttccacaccgaagccgagcagatcgacaccgccaaccagttcgagctgaacctcagcaactacaacggcaactacaccccgggcctgctggtcagcaacccgcaggtcaacgccaacggctcgttcaccggcggcaccgccagcggcgtgtatccgctggtgcgcggcatgtacaacaagcgcaaggacaagatcgatgcgttcggctggaacaacgagttcaacttcggcggcgtcaagctggtcgccgacctgaactactccaaggccacgcgcgacgagctgaacctggaaaacaacctgcagctgaccccgatgccgcagctggacacggtcggcgtgtcgatccgccaggacggcttctcgcagatcaccccgggcctgaactactccaaccccgatgcgctgttcctgaccaacacgatctacggctccggctacggcaaggtgccgcaggtggaagaccgcctgaagggcggcaagctggctgccaccatcgcccttcctgatgccatcgcctcgtgggcaccggacatcgacatcggcgtgaactatgccgaccgccgcaaggtgaagacccagtccgaaggcaacatcctgctcggcgcacagggcgatgccaacatcgcctcggacctgcagtaccgtccggtggacctgggcttcgccggcctcggcaccatcccggcctggaacgtaccggccgctgtgggtcgttacatgaccttcaacccggtcgacaacctggactacttgatccccaagtcgtggacggtcgaagagaagatcaccaccgcctgggcgcgcctgaacatcaacaccgacatcggtgaagtgggcgtgcgcggcaacatcggcgtgcagatgcagcacaccgaccagagctcggattcgcgctactttgaccgctcccgcccagcgggcgagaacgttcttcctatcgccagcgggaaaacttataacgattggttgccgagcctgaacctggccttcctgttcccgcaccagcagacccttcgcttcgccgtcgccaagcaggtcgcacgcccgcgcgtggatcagatgcgcgccggtctggattttggtgttgcccgagaaaccggcaagcccggggccagcggcggcaaccccctgctggatccctggcgtgcaaccgcggtcgacttgtcttacgagaagtacttcggcgagaaggcctacgtagcggcggcgatcttctacaaggacctgaagagttacgtctatacgcagacaattgatggttatgatttcagcgaccaagtggccaactgggtttctcaaccaggtgatgcgccggtgctgaccaccggcaccttctccgcgccgcagaacggcaagggcggcacgctgaagggcctggaactgaccgcatcgttcccgctggacatgctgaccgacagcctgcgtggcttcggcctgcaggccagcgcgaccttcaacaagagcgacatcaccatcctggatccggagagcgcctccagcgtgggcagtgaaccgatcagcctgccgggcctgtccaagcgcgtgtacaacttcactgcctattacgagcgcagcggttttgaagcacgcgtcagccagcgccggcggtcggacttcatcggtgagatcggcaacttcaacggcaaccgcagcctgcgctatgtcgtcggcgaaaacgtgaccgatgcgcaggtcagctacaccttcagcgacagcagcgccctgcgtggcctgaccctgctgctgcagggcagcaacctgaccaacgagccgtaccgcacctacgccggcagcaaggaccgcccgctggagtacatcgaatggggccgcacctacatgctgggcgtgaactacaagttctga

SEQ ID NO: 492690 - DNA, 2049 bp, Stenotrophomonas maltophilia
atgtcatccactgctgtacgcgcggtgttcgcgcacatgcttgggctggccctgatcgggtgggccacgctggtacaggccacgccgcaggtggccagcgtcgaatcgccgggcaaggtattgaaggtcagtctgctgctggacggcggcaccgcccgctaccgtgtcgagcgcctgggcgacaccgtggtggaggattcgaagctgggctttgccctgcgcgacggtcgcctggaccgcgatttcgccctgctgggccagcagcggcgcagcgtcgatgacacctgggagcagccgtggggcgagcgccggctcacccgcaaccacttcaacgagctgaccgtgcagctggctgaaaccaccggccgcaagcggcggctggatgtggtgttccgcgtctacgatgatggccttggcttccggtatgtgttccctgagcaaccgaacctgcgcgaagccatcatcgatgacgaactgaccgagttcgccatcgcgcccgaatcaaccgcctggtggattcccgccggcgaaccgatccactacgaatacctgtatcagcgcacgccgctgcgcgaagtgccgctggtgcatacgccgatgaccctgcgcagccgcgatggcctgcacgtggcgatccacgaggcagcgctggtggactatgccggcatgtggctgcggcgcaccgaggggcagcgcctgcgcgcgcagctgtcgccctcggccgaaggctggaaggtacgccgcaccctgcccttcgccacgccgtggcgcacgctgcagatcgccgatcgtgccggtggcctggtcgaatcggacctgatcctcaacctcaatgaacccaacgcgctgggcgatgtcagctgggtgaagccggccaagtacctgggcgtgtggtggtcgatgcacctggacaacgagagctgggcaaccggaccgaagcacgcggccaccaccgccaagaccaggaaggtgatcgacttcgccgccgcgcatggcttccgtggcgtgctggtggaaggctggaacccgggctgggacggcaactgggtgggcaatggctacgacttcgatttcacccgtgccacgcccgatttcgatatcgaagcgctgtcggcgtatggcctgaaaaagggtgtgcacctgatcggccaccatgaaaccggctgcgccatcgagcactacgaggaccagctgggcgccgcgctggacctgtacgcacggctgggcgtggaccagttcaagaccggctacgtctgcgacgatggccaggtcgaccgccgcaaccccgcggggggcccactgtggcgcgagtggcacgacgggcagttcatggcccgccaccacctgaaggtggtgcaggaagctgcgcgccggcatctgtcggtcaacccgcatgagccgataaaggataccggcctgcgccgcacctatcccaactggatctcacgcgaaggcgcgcgcggcatggaatacaacgcctggggccagccgccgaacccgcccgagcacgaggtcaacctggtgttcacccgcatgctggccgggccaatggattacacccccggcatcctcagcctgaagggccgccacggccaggccattcccagcacgctggcccgccagcttgccctgtacgtggtgctgtacagcccgatccagatggccgcggacctgcccgaacactacctgcagcatcgcgaggcgttccgtttcatcgaggacgtggcggtggactgggagcagagccgcgtgctcgatggcgaagtgggtgactacgtgacgatcgtgcgccgcgaccgcaacagccgcgactggttcctcggcagcatcaccgacgaacacggccgcgtgctgccggtaccgctgggcttcctggagccaggcgtgcgctatcgcgccgagatctaccgcgatggtgaaggcgctgatttccgcagcaacccgttcgcgttcgcacgcgaaacccgcgaggtgaccagtgccgatgcactgacgctggtgctggcaccgggcggtgggcaggccattcgcttcacgcccatccactga

SEQ ID NO: 492691 - DNA, 2193 bp, Stenotrophomonas maltophilia
atgctgaagatcatttgcctgaccgctgccctgggggcagcgctgggatcgaccgcgcaggcggccgacctgcaattcgacggtcgccatgcgcgcgccgaagccgctgccaagggcagcttcgtgctgcatgcgccgaagggcgcagtgcagatcgcagccgcaccgatgcgcagccagaccggcagcgtgatgttcgatgccctgttcgcgctcgcccagcaggagatgtcccaggaccgcgtggacgcgatccgtgatccggcgttcgacgagggccggccggtcccgtgcgagtgcttccagaccggtgcacgctggccctatgtgtggacccgtgatgtcagcttcgccgccgacctggcgctggcgcggctggacccgcagcgcacccggcagtcgctgcagttcaagctgtcggcagcccgtgacgggcgtacgcccggcctgttcgtggcgcaggacaccggttccggcggcagctggccgatcagcagtgatcgcgtggtgtggttcctggcggcacgccacctgctgaaggaccgagcgtttgccgatcaggtctggcaggcgctgcagggcacgctggcgcaggaccgcgcgatggtgttcgacgcgcagatgggcctgtaccgcggcgagacctccttcctggactggcgcgagcagacctatccagactggacccgcgaggacgtgcgtttcatcggtgattcctacgcattgtccaccaacgtgctgcactaccaggcactgcgcctggccgaacgcctggccgggcagcacggcgatgcccgcgcggccgactacagggcatgggccgatgcattggcgcagcagatcgatgcgcgcttctggcgcgaggatatcggccagtacatgagctacatcggcgaggccgcgcacccggtgccgtacgccaaggtcgatctgcttggcctgtcgctgggcatcctggccgaagtgctgccacccgagcgggcgcgccgtgcattggccgcctatccgatggggccggccggcagcccggtggtgtggccgcaggaggcgcagcagccgatctaccacaaccgcgcgatctggccgttcgtcagtgcctattcgctgcgcgcggcgcgccagctggacgatgcaccgcgcatcgccgccgagatccgctcgctgatgcagggcgccgcgctggccggttccaacatggagaactacgagctggtcagccaggcggtgcatgttgacgagggcgtgctgagcggcccggtggtcaactccgaacgccagctgtggtcggtggccggctatctgtcgatggtggtcgagggcgtattcggcgtgcaggacgatggccgcgtgcagcccaagctgccggccgtgctggtgcccgaactgttcggcaatcagcgccgcatctccctggaggccgatggcaggcgttatgtgctggagcgaccgaagcaggtgggtgatggcctgctggtggcgggcaaggtgaagacccgtggcgccaccaccaccgtgcagctggtgcccgccgcagccgcgccacgcagcgcggcgacgacggccgacgcagatgcgcgcgcaccggccacgccggccgcaccgcaggtgcaacgcaagggcaggggctggaatgtcgtggtcgctgccggccaggtgctgtggcaggacggccgggcgctcgccgccagcaatggcctggcacgcatcggtgacgatggcctgcagcattgcctcagcctgacccggcgcgacggtgcaattgaatcgctgcacagcccgatggtctgcgtcggtccgcagcagcgactgaagggtacgcagcgctggcagttcacctccgccagggccgggcaggtgcgcctgcgcctgcagtaccgcaatccgaacgggccgatcaacaccggcgtcaccgctgcggtgaagcagctggtgctgcagtgcccgggccagccgttgcagcggcacaccgtcaccctgccgcacagcgtggccgtgcaggactcgacctcggcgacattcacggtgcccaagggccgatgcacggtcacgcttgaagaaggcttcaacatgagcgcgctgcagcacttcgcgcactacaccgggggcaagggcggacgcgatggcgtgctcaaccaggcccaggtgcaggcgctgatggtggcgccggtggccgcggcagagggcgcacgatga

SEQ ID NO: 492692 - DNA, 1488 bp, Stenotrophomonas maltophilia
atgaatcgtaccgccaagccgcagctgtcgttctggcagatctggaacatgtgtttcggcttcctgggcatccagttcggcttcgccctgcagaacgccaatgccagccgcatcttcgagacgctgggcgcggacatcgacgcggtgcccgggctgtggatcgccgcgccgctgaccggcctgctggtgcagccggtgatcggttacctgtccgaccgcacctggacgcgctgggggcgccgccgtccttatttcatgatcggagcggtgctgaccacgctggcgctgctggtgatgccgaactcgccgacgttgtggatcgccgccggcacgctgtgggtactcgatgcctcgatcaacgtgtcgatggagccgttccgcgccttcgtcggcgaccagctggcgccgcgccagcgtccggccggttatgccatgcagagcttcttcatcggcgtgggcgccatcgtcgccagcttcctgccgttcatcctggcccacttcggggtcgccaatacggccgccgcaggtgaggtgcctgataccgtgcgctatgcgttctacttcggcgcggtggtgctgttggcggcaattacctggacggtggtcagcacccgcgaatactcaccggcggagctggccggtttcgatgacgccgaacctccggcacatcacgcagcggcgccgatcagcggcccggcgccctgggtgcaggtggccgcatggctggggctgggcgtactgctggcgctgctgatcacctggcggcagggcgaccggatgctgtacgtgctggccggcctgtgtgccggctatggcctgctgctggcgctcgcgcgtacgctgccggccacgcacatgctggccgccatcgtcggcgacctgcgcgcgatgccggtcaccatgcgtcgcctggcgtgggtacagttcttctcgtggttcgcgctgtttgcgatgtggatctacaccaccgccgcggtggctggcgcccatttcggttcgactgaaccagagtcggcggcctacaacgagggcgccaactgggtgggcgtgctgtttggcgcctacaacgggttcgccgcgttggcggcggtgctgattccactcatggtgcgcgcgatcggcctgcgctggagccatctggtcaacctgtggctgggcggtgccggcctggtctcgctgatgttcatccgcgatccgcactggttgctgctgtcgatggttggcgtcggtttcgcctgggcgtccatcctctcgctgccgtatgcactgctgtccgacagcgtgccggcatcgaagatgggcgtgtacatgggcatcttcaatttcttcatcgtgatcccgcagctggtggcggccagtgcactcggcttcgccctgcgcacattgctgggcggccagccaatgcatgtgctggtgctgggcggctgcagcctgttcattgccggcctgtgcgtgttgtgggttccgtcccgtccggaggtggtgtga

SEQ ID NO: 492693 - DNA, 1716 bp, Stenotrophomonas maltophilia
atgcgtgctgcgttgtctgttgctgtttccttgatgctgctggccggccatgcggcggccgcgccgcgcccggactatgtgggcaccaccgaaccgttcgccagtgatgcggtgtacttcgtggtcaccgaccgtttcgtcaacggtgacccgtccaatgaccatcgtgaccagggcggcaagctccgcaccttcgacatcccggtgccctgcccggacaaggtggacggcaacatcggctatctcggcggcgacttccgtggcgtgctcgacaatgcgcagtacatccgcaacctcggcttcggtgcggtgtggatcacgcccatcgttgacaacccggacgaggcctttgccggcagcaagccgatcagctgcaccagcacgctgaccgatcgtggcaagaccggctaccacgggtactggggcatcaacttctacaagctcgatgagcacctgcccagcaaggacctggacttcgccgggttgaccaagggcctgcacggtgccggcttgaaggtggtgctggacatcgtgggcaaccacggttcgccggcctggaccatgccgacacggcagccgcagttcgggcagatcttcgacaaggacggaaagctgatcgccgaccaccagaacctgccgccgcaggaactggatccgaagcacaacccgctgcacgcgttctacaacaacattggaccggtcgacagcaaggacggctcgatcttcgatggcaacctggccgagctgtccgacttcaaccaggacaatccggcggtgatggactacctggtcggtgcttacctgcaatgggccgctcagggcgtggatgcgctgcgcatcgacaccatcggctggttgccgcacccgtggtggcatgccttcgtcaagcgtatccgcgccgagcacccgggcatgttcatgttcggcgaagcgttcgattacgatgccgcgcgcattgcagagcacacctggccggccaacgccaacgtcagcgtgctcgacttcccgttgcgcggtgcactggagcagaccttcggcaccgccggcaagggtttcgagaccctggccgagccgctgcatctgagcggtgggccgtatgccaacccgtacgagctgatgagcttctacgacaaccacgacatgccacgactgcaggccagcgacagtggcttcattgatgcacacaactggctgttcaccgcgcgcggcattccggtggtctattacggctcggagacgggcttcatgcgtggccgtgccgagcatgccggcaatcgcgcttacttcggccagccgcgtgtggatgctgcgccgaagagtccgatcttcgcgccgctgcagcgtatcgcccggctgcgcgcagccactccggcgctgcagcgcggcctgcaggtgaacgagcgcctgcagggtgatgaggcggtgttcttccgcgtgctgcagcatggcgaggtggcgcagaccgcgctggtgctgctgaacaagggcgacagtgcgaagaccttcaccgtggcgcggtacctccaggcgggccgctggcgtgatgcgctggacggcggttcgttgcaggtggatgcttccctgaaggccgaagtgccggcgcacggggtgaaggtgtacgtgctcgatgccgccgtgcagcagccggcgctgcaggccgagctggacaaggcgatggccgaccagcgggcgcgggacgtacggctggggcggtag

SEQ ID NO: 492694 - DNA, 387 bp, Stenotrophomonas maltophilia
atgaccgacctcgccccgcagaccccgatcgaaaccctgctgaaggcggcgatggacggggcggtgccgatccgcgccttcatggaggccttcgtcgcctccgaggtggtactgctgaccggcagcctggtgacccccgatggcagcggcttcgacccgctgctgttcgacaagcagggcaccctgcacgtggccgtgttcaccgatccgtcgcgggtgggcatctacagccagcaggccgaacaccagatccgctggcggatgctggacgtgctgcgccgggtgccgggtggctacggcgtggtgatcaacccgggcacttcgctgggcttcgagatctcgcccagcggcgtcggcgagatcctgaaggacttcgcccagggttga

SEQ ID NO: 492695 - DNA, 318 bp, Stenotrophomonas maltophilia
atggaattcagcgaatcacccgccgacgcaccggcacgatcacgccattcccgctccgcactggtcttcctgatcgcggccatcgtcgccgcactggtgtccatgcctgttctgcgtgcggtgggcatggtgctgtggccggtgttcgccattgcctggctgatcaacctgggggcggcctggcatctgggccagtgggcgcgccagcagggccgtccggcgtgggcattcgggttgccggcggtgcttggcaccgtcgcctcgatcgtggtcttcgtgctgctggcgttgctggggccgaaggccccggtgcgctga

SEQ ID NO: 492696 - DNA, 3585 bp, Stenotrophomonas maltophilia
atgatcctcgatttcttccgtttcgagctgcgcgagcagctgcgttccccgctgctgtggctgctggccgggctgttcgccctgctcgccttcgccgctgcgtccagcgacgccgtacagatcggtggtggcagcggcaacgtgcacagcaacgcgcccaccgtgatcgcgcagatgctgggcatcttcaccctgctcggcatgctggtcaccgccctgttcgtcagcaatgcgctgctgcgtgacttcgaactgggcaccgccgagctgatcttcgccagcccggtgaaacgccgcgattacctggccggccgcatcgccgccgccctggctaccggcctgctgttctacctgctggtcgctttcgggctctggctggcaccgttcatgccctgggtggacgccgagcgcatggggccgatcagctggcagggctatgcctggagttttgcggtcatcgtcattcccaacctgttgttcaccaccgcgctgctgtcattgctggcagcggtcacgcgttcaatcctgtgggtctacatcgggctggtggcctacctggtcctgttcggcgccagcgcggcggtgctgcgcgacatcgacaacacctggctggcggtgctcagcgagcctttgggcatgcgcgccctgtcgcgcaccatccgctactggtccaccgccgagcacaacagcggcgttcccggcctggcgggctacctgctggccaaccgtgccctgtggctgggtgtgacggcgctgctgttcgccgccacgttcgccctgttccgcaccgagcgcagcggcagcggccgtcgtcgctggggccgccggcaggcgcagccggttgccgacgccgccgccctccggcccaaccgcaacccgttgccgcgcgtggtaccggcattcagcgcgaccaccgcgtggcaacagttcctgcgccaggtgcgcttcgacacgcgcggcgtcctgcgcagcgtgccgttcatcgtgctgctggtgctgggcctggccaatttcctgcccaacgcgctgttccggcagaccctgtacggcacctcgatctggccggtcacctcgcagatgatcatgggcctgcagggggccttcagctggctgctggtgatcatcgtgctgttcttcgccggtgagctggtgtggaaggaacgcagcgcgcgcatcaacgaagtgaccgatgccatgccggtgccgaactgggtaccgctgctggccaagttcaccgcactgctggcagtgatcatctgcttccaggccgccggtgcactggcggcgatgggcgtgcagctggtcaagggctacacccacctggagccgctgctgtacctgcgcagcctggcgctggattcggtgatctacattctgatggggggcctggcactggtgctgcaggtgctcaccaacaacaagttcgtcggttacgcgctgctgatcgtggtgatgatcggccagggcgtgctcggcatgctggactacacgcagaatctgtacaccttcggtggctggcccaacgctccctattcggacatgaacggctacggccacttcctgccggggcagctggcattccagggctactgggcgctgttcctgctgaccctgatgtgcctggcatcggcgctctgggtgcgcggtgtcagccagggcctgcgccagcgcctggccctggccggccgccgcctgcgcggcccgaccggcgtcttcgccggacttgcggcattggccttcgccggcgtgggtagctggctgtactggagcaccaatatccgcaacgagttcatctcgcccgaccagcagctggacctgcaggcccgctacgagcgcgagctgtcgaagtaccgcagcctgccgcagccgcgcatcgtggcggtggacaaccgcgtggacctgttcccggaatcgcagtcgatggtgatcgatgcgaactggacggtgcgcaatacccatgccacgccgatccaggacgtgcatgtctcgataggcgatgacaagcagctggtcgacgtcgacctgggtgggcagacgctgtcgttgcacgatgccgatctcggctaccgcgtctaccgcctgcagaagccgctgcagccgggcgaaacccgcagcgtgcatttccgggtggtgcagaaacccaacggcatcaccgccgggccggcgccgagcaacatcgtggacaacggcaccttcttcaacagccgcgtgctgccctcgttcggctacaacgagggcgccgagatcagcgaccgcaacgagcggcgcaagcgcggcctgggtgagccgcggcgcatgcccaggctggaggacgaagcggcgcgcgccaacacgtacattgccaacgatgccgactggctcgacttccgcaccacggtctgcaccgcaccggaccaggtggcgctggccccgggctacctgcagcgcgagaccacgatcaacggccggcgctgcttcagctacgccatggaccggccgatgctgaacttctatgcctatctatcggcacgctgggaggtgcgcaaggcgaagtacaaggacatcccgatcgaggtctacttcgacccggcgcacggctacaacgtgaaccggatgatcgaggcggtgcagaagtcgctggcctattacgaggcgaacttcaccccgtaccagcaccgccaggtacgcatcatcgaattcccgggctatgcccgcttcgcgcagtccttcgccaacaccatcccctattccgaggccatcggtttcatcgccgacctgcgcgacccggacaaggtggactacgtgttctacgtgaccgcgcacgagatcgcgcaccagtggtgggcgcaccaggtgatcggcgccaacgtgcagggcgcgaccgtgctgtccgaatcgctgtcgcagtactcggccttgatggtgatggagcaggaatacggccgccagcacatgcgccagttcctcaagcgcgaactggacggctacctgtccggccgcggtggcgaagccatcgaggaacagccgctggaacgcgtggaaaaccagcagtacatccactaccagaagggttcgctggtgttctaccgcctgcgcgaggaaatcggcgagcaggcgctgaaccgtgcgttgaagcgcttcctgcaggacaagggctaccagcagccgccgtacaccacctcacgcgagctgctgggctacatccgcgccgagaccccggccgaccgccagcagctggtcaccgacctgttcgagaagatcagcttctacgacaaccgggtcatggccgccagcgcccgcaaacgtgctgacggccgctacgacgtgaccctggacctgcatgccgccaagcagtacgccgatggcaagggcaaggagagcgaggcgaagatggatgactgggtcgagatcggcgtgttcgccaccggaccgtcgggcaaggagcgcgaccagaaggtgctgtacctgcagcgccaccacatcaccagcgccgcgccgaagatcacggtgacggtggatgaaaagccggacgaagcaggcttcgatccctacaacaagctgatcgaccgggtgagcgatgacaaccggcgcaaggtgacgatgtga

SEQ ID NO: 492697 - DNA, 903 bp, Stenotrophomonas maltophilia
atgctgaagatcgattcgctgtccaagacgtacgccaacggcgtgcatgccctcaacaacgtcaccctggacatcccgcggggcatgttcggcctgctcggcccgaacggcgccggcaagtcctcgctgatgcgcacgctgtccaccctgcaggaggccgacagcggcacggtgacgctcagcattccgggcgaggcgccgatcgacgtgctgcgcgacaaggacgccgtgcgccgtcggctgggctacctgccgcaggatttcggcgtgtacccgaaagtcagcgcgctggacctgctggagcatttcgcagtgctcaagggcctgacccagcgcgcgcagcgccgcgaggtggtcgatgggctgctgcagcaggtgaacctgtgggatgcccgcaagcgcaagctgggcacctactccggcggcatgcgccagcgcttcggcattgcccaggcgctgctgggcgacccgcggctggtgatcgtcgacgagcccaccgccggcctcgacccggaggaacgcaaccgctttctcaacctgctggcggcgatcggcgagaacgtggcggtgatcctgtccacccacatcgtcgaggacgtgaccgacctgtgcccgacgatggcgatcatgaacaagggccaggtgctgctgaccggccgccccagcgaagcgatcaacgccctgcagcaccaggtctggcgcaagcaggtcgatccttcagagctggccgaccatgaagcgcgctacgtggtgctgtcgacccgtctggtcggtggccgcccggtgatccatgtgcacagcgccaacgaccccggcgacggctttgcggccgtggctcccgacctcgaagacgtgtacttccagcgcctgcgcctgcaggcccgtgctcgcgcggcagcctga

SEQ ID NO: 492698 - DNA, 1032 bp, Stenotrophomonas maltophilia
atgacgatcaaaggcaaagccacctccctggacatcgcccacctggccggggtctcccagccgaccgtgtcgcgagccctgcgtggcagcccgatggtcaacgccgagacccgcgagcgcatcctgcgcatcgcccgcgagctgaactacaaggtcgacaagaacgcctccagcctgcgcctgcgcaatgccggcacgctggccctgctgttcttcgaggacccgaccaacgacgactcgctgatcaacccgttcttccattcgatgctgggctcgatcacccgcgcctgcgccctgcacgggcaggacctgctggtctcgttccagcagctgtccaccgactggcaggccgattacgaggacagcaacaaggccgacggcatcatcctgctcggctacggcgactatcacgaatcgcgcgaccgcctgcagcggctggtcgaacagggcacgcacttcgtgcgctggggcgccgccctgcccggccagcccggtgtctcgatcggcagcgacaacttccagggcgggcatgacatcactacccacctgctgcagcagggctgccgccgcatcgccttcctcggccatgcctccagccactaccccgaattccaggagcgctaccgcggccacgtcgcggccctgcaggaccacggcctggccgccgaaccggcgctgcagcacgatgcgatcaccactgaagcctccggccaggaagcctgccaggccctgttggcgcgcggcgagccgatcgatgcgatctgcgcggccagcgacctgatcgccatcggtgcgatgcgcgccctgcgcgaggccgggctgcgggtgccgcaggacgtggcggtgaccggcttcgacgacatcccgctggccgcttcggtgtcccccgcgctgaccacggtgcagcaggacaccaagcaggccggccagctgctggtcgagcgcctgctggcgctgatcggccggcagccggtggacagccagagcatcccggtgaagctggtggtgcgcgaatcatccctgcgcgggtaa

SEQ ID NO: 492699 - DNA, 573 bp, Stenotrophomonas maltophilia
atggcgcgcggcatcaacaaagtcatcctggtcggcaatctcggcaacgacccggacgtgaagtacacccagggcggcatggcgatcacccgcatcagcctggccaccaccagcgtccgcaaggacaaggatggcaaccagcaggagcgcaccgaatggcaccgcgtggtgttcttcggcaagctcggcgagatcgccggcgagtacctgcgcaagggcagctcggtctacgtcgaaggcagcctgcgctacgacaagtacaccggccaggacggcgtggagaagtactccacggacatcatcgccgatgaaatgcagatgctgggcggccgcggtgaaggcggcggcggtggcggtggtggcaattacggcggcgatcgtccgcagcgccagcaggcgccgcgccaggagtacggcggcggcggtggccagcgtggcggccagggcggtggctatggcaaccagggcggcaaccagggcgggggttacggcaaccagggcggcaaccagcgcccgcagccgcagcaggcgccgccgatggacgacttcgctgacgacgatattccgttctaa

SEQ ID NO: 492700 - DNA, 912 bp, Stenotrophomonas maltophilia
atgcgcggatccgagttcgctgaactgaaggccttcgtggcggtagtggaacgccagagcttcgcgcgggcggcggaacatctgggggtatcgccctcggccctgagccagaccatccgccaactggaaggccgtctcggcacccgccttctcaatcgcacgacacgaagcgtggcgccctcggcaagcggcgggcgactgtacgcgcgcatcgcgccgctgttccaggagttggccgtcgcggtcgctgaaaccagcgaagccagcggacggatcaacgggaccctgcgaatcaatacgctgggcatcgccgcgagaacactgattgccccgcggcttgcccgcttccaccaggcctaccctgatgtcgttgtcgacatcgtggtcgacgacgcgctcagcgacatcgtcagtggccggtttgatgcgggcatccgcgtgggtggtcagctcgagaaggacatggtggccatccgcctcaccccggacctgaacatggtggccgtggcgtcaccggattacctggcacgccgcggaacaccgcgaactccggcggaactgcaggatcacgcctgcatcaactggcggctgcagagcgatggcaggcagtaccgatgggagttcaagaagcgaggtcgccacctcgaggtcgccgtggacggtcctgtcgtcaccaatcacgctgacatcgggattgcgtcggccctggccggccttggaatcgcctatcacttcgaacaggatggtgtgggcgaactgttggcacagggactgctggtgcgggtactggcggattggtcggtctcgcggcccgggctttttctctactacccgaacaggcggcatcgccccgccctgctgggtgcgttcattgactgcctgctggaccagggaatgttcggcaatcggtga

SEQ ID NO: 492701 - DNA, 327 bp, Stenotrophomonas maltophilia
atgaatgcgttgaccctcccagaacccattgccgcgtacttcgcggccgaacatgaccctgaagtgctggcgcgttgttttgccgcccaggctgtgctgaaggacgacgggcacaccctcgtcggcgtcgacgccatcaaagccttcctggccgaggcatcggccaaatacagcgccaccagcgtgccgagcgccatcgaacggcaggagaaacaccacgttgtccgtgccatcgtgagcggcaacttccccggcagtccgattctgctgagctaccgtttcgaactggaacggggcctgatcgcatcgctggagatcacggcgtga

SEQ ID NO: 492702 - DNA, 783 bp, Stenotrophomonas maltophilia
gtgagcttcgatcttcaactcggtggcctgcgggccgtggtgaccggcggcacggccggtgtgggggcggccgtggtcaggaccttcgccgaggccggggccagggtaatgacgtcggcgcgcagcctgccggcacgcccggtggaaggagtcgcctacgtagccgccgatctgtcgacggccgagggcaccggcattttcgcccacgccgtgctgcaggcatggggcggcgcagacatcctggtcaatgtgctggggggatcaaagacacctgccggtggcttcgcagcgatcagtgatgcgcactggcttgccgagctgaacctgaatctgatgccggcggtccgcctggatcgtgccttgctgccatccatgctcgcgcagagcgctggcgtgatcatccacgtcagttcgatccagcgcatgctgcctctgccggagtccaccaccgcctacgccgccgccaaagcggcactcacgacctacagcaagtcgctttcacgagaggtcacccccaagggcgtgcgggtgctgagcgtagcgccgggctggatcgagacagaagcatccagggaatttgcagaacggatcgctgcggaagcgggaaccgactatgaaggaggcaagaaggtggtcatggactggctcggcgggatcccggtgggacggcccgcggcaccgcaggaggtggccgatctgattgtgttcctggcgtctccccggtcggcgtcgattgccggaacggagtatcggatcgacggcggcacggtttcgaccctgtag

SEQ ID NO: 492703 - DNA, 897 bp, Stenotrophomonas maltophilia
atgtccatccattcgatcagaccggccccggcgatggggctcacgcggcgtgatgcgctgcgcatggcggttgcgggaggcgtagccctgggtattgcgggagcgttgcctgcattcgccgccactgcaccgctgaagggcaacctgcaacactccgtggcccgctggaccttcccgcagctgtcggtcgcccagctctgcgcgacggtgaaggacatcggcttcgccgccatcgacctggtcggcccggaagactggcccacgctgaaggcgaatggcgtctacagttcgatgtgcaatggcgcggagctgggcctgaccaagggctttgccggccgcgaattccacgacccgctggtggagcgctacacgcggcacatcgacctggtcgccgatgccggttaccgcaacctcatctgcttctccggcaatcgcaatggcatggacccccatgacggcatggccaatgccgaagccggcctcaagcgcatcctcgggcatgccgagaagcgcggcgtcgtgctggtgatggagctgctgaactccagggtcgatcaccacgactacctgtgcgatcactccgcctggggcgtggagctgtgccagcggctcggctcggacaacttcggcctgctctacgacatctaccacatgcagatcatggagggcgacatcatcgccaccatcggcaagcatcacgcctgcttcaagcattaccacactgcaggcgtgccgggccggaacgagattggagaccagcaggaactccactatccggccatctgtcgcgcgatccgcgacaccggtttcaaggggtatctggcgcaggaattcacgcctgcagcgcccgatcccgttgcctcattgcgcgaggcgatccgcctctgcgacgtctga

SEQ ID NO: 492704 - DNA, 1686 bp, Stenotrophomonas maltophilia
atggcagataatcactacgacgccattgttgttggctcgggaatcagtggcggttgggcagcgaaggagctgaccgagaagggcctgaaggtcctgatgctggaacgcgggcgcaacatcgagcacgtcaaggactacgtcaatgcgatgaaggaagcgtgggacttcccgcatcgcaaccggccgacgcaggcgatgaaggccgccttcccggtgctgatgcgcgactacggcctggccgagaacctggaaggaatgtgggccaacgagcaggactcaccctacatcgaaaccaagcgcttcgactggttccgtggctaccacgtaggcgggcgctcgctgatgtggggccggcagagctatcggttttccgacctggacttcgaagcgaacctcaaggatggcgtcgccaccgactggccgatccgctatgccgacatcgcgccgtggtacgaccatgtagagaagttcgccggcatcgccggcacgcgcgaaggactggacgtgctgccggacggcgagttcctgccgccgatcccgttgaacatcgtcgagaaggacgtggccgcgcggatcaagaaggcctttggcggaacgcggcacatgatccactcgcgcaccgccaacatcacccagccgatgcccgagcaggggcgcgtcaactgccagtaccgcaacaagtgcatcctgggctgtcccttcggtgcctatttctcgacccaggcggcgacgctgccggcggcgatgaagaccggcaacctgaccttgcggccgttctcgatcgtcaaggaagtgctctacgacaaggatcgcaagcgtgcgcgcggcgtggaggtgatcgatgccgagaccgggcagacctaccagtacaccgccaaggtcatcttcctcaatgcatcgtcgttcaattcgacctggctgctgatgaactcggcgaccgatgtgtgggaggggggactgggttcttcgtcgggcgagctggggcacaacgtgatggaccatcatttcggtgcgggcgcctcgggccgggtcgagggctacgaagacaagtactacttcggccgccgtccgtgcggtttctacattccgcgcttccgcaacgtcgcggccgacaagcgcggctacctgcgcgggttcggttaccagggcggtgccagccgcaccggctggtcgcgcgagatcgccgagctcaacatcggtgccgacctgaaggaggcgctgaccgtaccgggcgactggcgcatcggcatgaccgggttcggtgaaatgctgccgcaccacgacaatacgatccgcctggaccacgaccgcaaggacaaatgggggctgccggtgctggcgatggacgtgtccatgcgcgccaacgaactggcgatgcgcaaggacatggccgccgatgctgccgagatgctggaggcggctggcgtcaaggacgtgaagatgcacgaccacgactatgccccgggcaagggcatccacgagatggggaccgcacgcatgggacgtgaccggaagagctcggtattgaacgcgcacaaccaggtctgggatgcgcccaacgtctatgtgaccgacggtgcctgcatgacctccagcgcctgcgtgaatccttcgctgacctatatggcgctgaccgcgcgcgcggccgaccacgcggtacgcgaactgaaagcggggaacctctga

SEQ ID NO: 492705 - DNA, 576 bp, Stenotrophomonas maltophilia
atggatcgccgcgaactgttgaagatgatcgttgccgccaccggcgcggccatggtcggcctgcctgcgctcgcgcagggaaacgccgccgcggcaccggtgaagaccctgttctccgatgccgacatcggcacgctggacgagatcgccgagaccatcctgccgcggacccggacgccaggggcgaaggatgccggcgctggcctgttcatggcgaccttcgtcagcgattgctacaccgcccggcagcaggcaacgttccgggcaggcctggtcgatatcgacaagcgcgccggcggccggtttgtggcgcttgcgccggaagcccgcacccagttgctgcgaacgctggacgccgaagccaaggcgcgctctgccgacgtgaccgagaccggtacgcctgaagagggcgaggcgatgccgcattacttcacgatgatcaagcagctggccatcttcggcttcttcacctccaaggtcggggcgaccggcgtgctgcagtacgtcgcggtgcccggccgctacgacggcgacctcgcctatgtccccggtacgcccgcgtgggggaccagctga

SEQ ID NO: 492706 - DNA, 759 bp, Stenotrophomonas maltophilia
atggacaccaccctgatgatccgccctgcgttgatcactgttggcctgctggccgctgcatctgcattcgcgcaggacagtgccgacgctgcgcgcgacccgaagaagaccgaagtgtggacccccgtgcccgctgtcgtggccacgccgccaggcaaggccccctccgacgcgatcgtgctgttcgatggcaaggatgtctccgcgtgggaatcggagcagggcggacgcgtgccctggaaggttgccgggggcgccatgaccgtcgttccgggcagcaagggcatccgcacccggcaacgcttctgcgatgtccagctgcatgtggagtggcgcacgcccactgacacgaagggcttcgacggccagaaccggggcaacagcgggatcttcctgcaggaactgtatgaactgcaggtgctcgacagctacaacaacccgacctatgccaatggccaggcgggctccatctacaagcaggccatgccgcgggtgaatgcctcgcgcgcgccgggccagtggcaggcctacgacatcctctggaaggcgccgcgcttctcggcgggaggtgggcttgagtcgcccgcacgcatcacggtgctgcacaacggcgtgctggtgcaggatgacaccgtgctggcgggcaagaccgagtacatcggcgcaccgtcgtacgcgccgcatgggtgcgcgccgctctatctgcaggaacatgactccagggtcagctaccgcaacatctgggtgcgcgagctgtag

SEQ ID NO: 492707 - DNA, 297 bp, Stenotrophomonas maltophilia
atgaaaatgatcctggcaatggcggtggccctgggcggcatgagtgttgcgacagccgcctggtgcaagggcgacccggctgcgggagcaaagctctacaccgcgaactgcgtggcctgccacggcgccgatcgcgcgggcatgccgggcgcgttcccggcactcaccgacatcggcaagcgcatggcacctgcacagatcaaggaaaagatcagcaagggcggcggcctgatgccgcccttctcacagctgtcacagcaggagatcgatgacatcgccagctacctggcgaagtaa

SEQ ID NO: 492708 - DNA, 864 bp, Stenotrophomonas maltophilia
atgaaagcccttgtccgtcgaagtgcaagcctcgtcctgctgctcgcggcgctgcccgccttcgcagtcgaagccgccagcgcgcagaagccgatagcggtgcagatgtacaccctgcgcaatgccggctcgctcgagcaacagttgaagatcgtccacgatgccggtgtgcacgcggtggaaaccgtcggcacgcagaacgtcagtgccgcggaactgaagcagctgctggaccggtattcgatcaaggccatttcatcgcatgtgccgctggccgagctgcgcagcaacctggatggggtggtgaccttcaaccgatcgatcggcaacaccacgctggtggtgccgtacctggacaggaaggaacgcccgagcgatgccgccggctggaccgccctgggacaggaactgggccggatcgcgaaacaggtgcgcggcaagggcatgcgcctggcctatcacaaccacgacttcgagctggtcgacttcgatggcaggaccgggctggaactgctgttcgccgccgccggccccgacctgcagaccgagctggacctggcctgggtcgcgcgtgcgggcctggacccggcggtgatgctgggaaagttccgcggccacgtattcgcggtacacgccaaggacaatgcgcccaagggccaggccgaagacgaaggcggattcgctgcggtgggccagggcgtcttggactggaacgcgatcctgcctgctgcggcggtcgccggcgtgcattggtacatcatcgagcacgaccagccacgcgagccggccaaggtcgtccaggccggcgccgactatctgcgtgaacacctgaccaccaatacgcctgcccgtgcgcggcgctga

SEQ ID NO: 492709 - DNA, 1125 bp, Stenotrophomonas maltophilia
atgcccaagcttggaatcgccatcgtcggcaccggcatgatcggcgccgtgcaccgccgcgcggccttgctcgccggcgccgaggtacgcggcgtggccgcctcgtcaccgcagcgcgcgcatgaggcagcgcactcctggaatgtcccgcgcgcctacctggatatcgaggaggtgatcgccgatccgcaggtacaggtggtgcacgtgtgcacgcccaaccatctgcaccgcgccatggcacaggctgcgctggaagccggcaagcacgtgatctgcgagaagccgctggcgacgacgctggacgatgcgcaggcgctggcggtactggccgcctcgaccggattggttgccaccgtccccttcgtctaccgctaccacccggtggtgcgcgaggcgcgtgcacgcatcgcgcagggtgacctggggccgctgcacctgatccatggcagttacctgcaggattggctgctggacccggccagcaataactggcgcgtggacccggcgctgggcggcacctcgcgcgtgttcgccgacattggttcgcactggtgcgacctggtcgaatgggtcagtggcgagcgcttcaccgaagtgaacgcggcgtttgccacggtgatcgccgaacgcagcgccgtcaccggccagagcttcagcacaccggcagcgaacggcgcgacgcaggcggtcgcgagcgaggacgtggcgacggcgatgttcaggaccggcgccggtacgctggcgtcgttgacggtgagccaggtttcggccggacgccgcaaccgcctctggttcgagatcgacggcgccaacgccagcatcgccttcgaccaggaggacgccgagcggctgtggatcggcctgcccgaccagcgcgaggaaatcttcgtgcgcgggcccggcgcgggcactgccgaacagcgccggctgtcggtgctgccggccgggcacgcgcagggctacgcccagtgcttcgaggcgtttgtcgccgacacctatcgcgccatcgacggcgagcaaccggacggcctgcccaccttcgaggacggcatgcgttcggcgcggatcgttgatcgtgtcattgcatcggccaggtcacgcgcctggaccaccatcggttga

SEQ ID NO: 492710 - DNA, 1218 bp, Stenotrophomonas maltophilia
atgacgcacgccatgtcgcgcctgggcgcgatgatgtttctgcagttcttcatctggggggcgtggttcgtcaccctgggcacctacctggtgcagggcccgctgcaggccagcgcgagccaggtggcgaccgcgttcctcagccaatcgatcggtgccatcgtggcgccgttcctggtcgggctgatcgcggatcgctacttcgcggcgcagcgcattcttgcggtactgcatctggccggtgccgtgctgatgtggctggcgtccacggcaaccagcttcagcatgttctctgcgtgcgtcatgggctacatgttgctgttcatgccgaccctggcactggccaacagcgtggccatgcggcacatgcaatcacccgagaagcagttcccgctggtccgcgtggccggcagcatcggctggatcgtggcgggcgtgctgatcggctggctgggctgggaacaggcgcatcggcttgagctgacgttccggatggcggcggcggcgtcgctggtgctcgggctgtatgcgttcaccctgccgcacacaccgccactggcgcagcagcgcgatgccgggctggggcagatcctggggctggattcgctgcggctgctgaagtcgcgcgcctacctggtgttcttcctggcctccatcgccatctgcatcccgctgtcgttctactacaacttcaccaatccctatctcaacgacctcggcgtgcgcggcgcggcgggcctgcagtcgctgggccaggtttccgaagtgctgctgatgctggccatgccgttcctgttcgttcggctgggggtgaaaaccatgctggcggtcggcatggccgcctgggtggtgcgctacgcgctgttcgccttcggcgatgcaggtggcggtttcccgctgctggtgatcggcatcgtgctgcacggcatctgctacgacttcttcttcgtcaccggccagatctacaccgatgcacatgccggccctgccgcgcgcagcagcgcacaggggttcatcaccctggccacctatggcgtgggcatgttgatcggcaccttcctgtccggcgcggtggtggagcacttcaccaccgaggccggtcccgactggcagcagatctggctgttcccggccgctgttgcgctggtggtgctggtcgccttcctgctgctgttccgcgaccggccggcggctgcggccgcgccctccacaccctga

SEQ ID NO: 492711 - DNA, 1053 bp, Stenotrophomonas maltophilia
ttgaagacgctcaagggtccagcgctgttcctggcgcagttcatcggcgacacagctccttttgatcggctggacacgctggccggatgggccgcgggtctgggctattctggcgtacaagtccccacctccgcgccccacctgttcgacctggcgcaggcggcgcgcagccaggcgtactgcgacgacattgccggcatgctggccgggcacggcctgcagatcaccgaactgtcgacccacctgcaggggcagttggttgccgtccatcctgcctacgacagcctgttcgacggattcgcgccaccggacaagcgcggcaacccggccgcccgccaggcctgggcggtggagcagctgcggctggcggcgcaggccagccagcgcctggggctgaccgcgcacgccacgttctccggtgcattggcctggccctacttctatccctggcctcagcgcccgccgggactggtggaagaagccttcgccgaactcggccgtcgctggcgcccgatcctggatgcgttcgatgcctgcggcgttgacgtgtgcttcgagatccacccgggcgaggacctgcacgatggcgcgaccttcgagcgcttcctcgatgaggtcgaccaccatccccgcgcgaagatcctgtacgaccccagccacctgctgctgcagcagatggattacctcggtttcatcgaccgctaccacgcgcgcatcggcatcttccacgtcaaggacgcggaatatcgccccagcgcaagcagcggcgtgtacggcggctaccaggactggatcgaccgtccgggccggttccgttcacccggtgacggccagatcgacttcaaggcgatcttctcgaagttcgcgcagtacgacttccccggctgggcggtactggaatgggagtgctgcctgaagcacccggaagacggcgcgcgcgagggtgccgccttcatccgcgaccacctcatccgcgtgaccgaacgcgccttcgatgacttcgccgacagtggcaccgacgccgcatcactgcaccgcatgctgggaatctga

SEQ ID NO: 492712 - DNA, 1008 bp, Stenotrophomonas maltophilia
atggccaccatctacgacatcgcaaaacacgtcggcgtgtccgccggtacggtgtcgcgcgcgctttcgcggccggacaaggtgctgccggccacccgcgcgcgcatcgagcaggccgccgccgcactgggctatgtgcccaacacggtggcgcgcacgctcaagacccagcgcagcggcaagatcctggtcaccgtcccggacatcgccaatccgttcttcgcgcagatcctgcagggggcggaggaggccgcgcaggcggtgggctatgcggtcctgctgggcgatacccagcatcaacccgaccgcgaggagcgctacgcgcagatgctccggcgcaacgaggccgacggcatgatcgtgctgggccatcgcctgccaccgaccgcgcgcgagatcgtcgagcagcgcggcgccgccgcaccggtggtcaacggctgcgagttcgaccccgcgctgggcatccccagcgtccacatcgacaacgccgccgccgcacgcgcggtgatggagcatctgtacgggctgggacacgaacggattgcggtggtcggcgggccgcctgacaaccccctgcaccagcaacggctggaaggggtccgcgcggccggcaaggcgcgtggccgcctgcgccagctgagcatcgtgccgggtgacttttccgtggagtccggccatgcagcggcgatggcgctgctggatggcacggccgcgccgaccgcggtgttctgcttcagtgaccagatggcactgggaaccctggccgcttgccgggacctgggcatccgcgtgccggacgagctgtccgtggtcggcttcgatgatctggcgtcctcccgctacctcacgcccccgctgacgaccatccggcagccgatgcgggagatcggcgagcgtgcggtcaacctgctgctcgccatcatcgagcacgtcgatgtgccgcttcagcagacgctggagttcagcttcaagctgcgtggctcgacggctgcgccccgccccgggtaa

SEQ ID NO: 492713 - DNA, 1053 bp, Stenotrophomonas maltophilia
atgccattcttcaccgattcggcggaaggcgcggtcgaaggcattggcgcggcacgtcgcatcggctggatgcgtttcgtcggcaatgggctgggggcgatccccatcgcttcgatcatgcttgaacgccaggacggcgggctggcctgggtcctgctgctgctcaacgcgttggcgtggccggcactggcactgcggctgacccagcgctcgcgccagccggcggtcgtccagttccgctgcatggtggccgactccttcttcggcggtggctggatcgccttcatggcgttgagcgcggtgcccagtgcactgttcgccgcactgctggtggccgacaagatcgctgccggtggcgtgcgcctggcgatgcgcgccaccctggccctgctgctgggtttcgctctcgcctggtggctgctcggcttcccctttcagccggtcacctcgcagcgcacgatcatgctgagtgttccgttcctgttcgtgtatggcatcggcctcagcattctcagctggcagctggcgcgccgggtcaaatcgcagaaccgtcagctgcagcggctcagccggatggacccgctggtcgagctggccaaccgcggcttcctgatcctgcgtgcgcaacaggcgctggaccgggcacagggccagggcggttttgcctgcctgctgatgctcgatgtggatgacttcaagcgcatcaatgactcgcatggccaccgcgccggtgacgaggtgctgcggcatgtcgcggcgacattgcgctcctttgcccggcccggtgatacgcccgcgcggctggggggcgatgagttcgtggtgctgctgcgcgactgcgcacccgtcgatgcgatgcatgtggccgagcgggtgcgcctgcacctgctggaggccgcgcagcaggccacgccgggcgtggagttcagcgtcagtatcggcattgccgccacaccgcgtggcggcagtgtcgaggactggttggcactggccgaccgcgcgctgtaccacgccaagcggcagggcaagaacacggccagctacggcgagtga

SEQ ID NO: 492714 - DNA, 1026 bp, Stenotrophomonas maltophilia
atgcaagacgctctcgttgcccagcccaagccccccattccaaggatcgcggcgtggctgatgatgctgctgggcatgtggctggcgctgaagctcggcctggtggtgaccctgctgtccggcctgctggtgttccagttgacgcacgtgctggcctccaccgtggagggcaagctgccgccggggcgggcacgggcgatcgcagtgatcgtgctgtcggcgatcatcatcagcgggctggtactggccggcatcggcgtggcctcgttcttccgcaacgagaccggcggcccggacgcattgctggcgcgcctgatggagatcctcaacacttcgcggcaccaggtgccggcgctgctgcaaccctacattcccgaagacatgccggcgttgcgcgcggcgctgaacgactgggccgccgagcaccagcggcagctgggcgtggccggtacctcggtggtacaggtcggtgtgcgcgtactgatcggtatggtgctgggcgcgatgatcgcgctgtatgacgaactgccgctgccgaagatgggcccgctggcgcaggagctggtcgggcgcaccagccgcctggccaccgcgttccgccaggtggtgttcgcgcaggtgaagatctcgctgctgaacaccgtgttcaccgccatcttcctgctgggcgtgctgccgttgttcggcgtgcacctgccgctgtccaagaccctggtgctgatcaccttcctggccggcctgctgccggtggtgggcaacatcatttcaaacacgatcatcgccatcgtcgcgctgtcggtctcgttctatgtggcggtggcggcgctgctgtacctgatcgtgatccacaagctggagtacttcctcaacgcgcgcatcgtcggtggcgagatccaggcgcgtgcctgggagctgctgctggccatgctggtgatggaggcggccttcggcctgccgggcctggtcgccgcaccggtgttctatgcctacgtgaagcgcgaactggtcgaccagcgctggatctga

SEQ ID NO: 492715 - DNA, 1743 bp, Stenotrophomonas maltophilia
atggcccgcaaggcgtcgcccatcggattgcggacctgggtctggatcctggccgggctgttcgtagtctgtacgctgccattgatggccatcgcgctggtgcagggcacgctgcgcttcactgccgccgaggacaacctggtcagcctgcgccagctgcggcagaccttcgacctggccaacctggtgtcggccgagcgcggccccgccaacagcctgctcggggccgacacggccgatgcgggcgaacaggcccggctggcggcggagctggcagtcgcgcgcaagcgggtcgataccgccctgcaacgcctggacaccgtgttcaacgctgacccgggcgtggtcgacgaacacgggctgctggccgatgcgcaacgtcgcctgcaatcggcgcgggccgcggtggaccgggtggcggcacagccgcatggcgcgcgccaggtggaggacgtggagcgcgcgatcagcagcatgttcgccgtggttgatcgcctgcacgtgctgacctcggcgcagatcaacgtgctggtcagcgccgaccgcgaagcggcgattccggcgatgcagggccaggtgctgatcgaccttcgcgagcatggcggccgcctggcctcgaacgtgatggcgccggtggcggtgccgggggcctggcgtgacgaacaggtgcgggcggcattgcagaccgaaggccgcctgctggagctgtggcggctggcaggcagccatgaagcggtgttccgcagtgatccggtgctgtcctggcattgggacatggcgcgccggcagttcttcggcgaatcgctgccgatgatcgaacagttgatcgaggatggccggcgcggcgtgccgccgccgtggaccaccgccgaattcaccacccgctacgtgccgaccctgcggtcgctggaagcgctgcgggacggctacctgagcgtgtccatcgcccgtttcgaacgcacccgcaatcgcgaagcgacgcgcctggtggtgctggtggcgacggtgctgggcacgctggtggtgctgggcgtggcgctgcgcatcgcgcatcttcagatcctgcggccgctgctgcaggcgcagaagcaggtcatccagatcgcctcggaagcgcccggcccggagcagcatgtgacccacccgctggccgagatgcagcgcctgttcgatgccatcgaagtgctgcgcgagaagtcgcgcgagcgctcggcattgaccagcgagctgcgccagctggccggcaccgatgagctgaccgggctgttgaaccggcgcgcgctggacgagttggtgcagcagcgtcatgccgacggtggcaacagcgcggtggtgatcctgctggacgtggaccgcttcaaggcgatcaacgatggccacgggcatgacgccggtgacgaggtgctggtgcaggtggcgcagctgctgcagcgccacctgcgccgcagcgacagcattgcccgctatggtggcgaggagtttctcgtgttgctggccgacggtgatctggccggtggccgccagctggccgagtcgctgcgggtggcgctgcagcggctggacatcgccctggtcggtggcaaggtgctgcgcgtcaccgccagcttcggtgtggccgagggcggcaccgacgcgctgggctggcgtaccctgctgcgtgccgccgacgcggccatgtaccaggccaaggcgcagggccgcgaccgcgtgcgcgtggctggcggcggccgcaacgcacgttga

SEQ ID NO: 492716 - DNA, 507 bp, Stenotrophomonas maltophilia
atgaatcccgaatcgatcttctacagcgtggtcaacggtgatcttccacgctcccaggccggcaccctgctcggctggtgcttcgtcggttacgacgatgcactgcgccgcatccaggtcgagttcgaggccgggccggtgctcaccaacccgatgggcaacgtgcagggcggtttcctgtcagcgatgctggacgactgcatggggccagcgatctacgccaccctgcctgccaaccgcatcgcggtcacggtcgaatccaagaccagtttcgtcagccccgcacggcccgggcggatcatcggctggggcgaagtcgagcacagcaagggcagcatcgccttcacccgcggctggctgaccgacccggccggcaaggtgctggccactgccagcgccaccttccgcgtgggtgcgctgcgctggcgtggactctcggtgccgcgtcccatcgcgcgccggatgattgcgcgcacgctgcggcgcgtgcatgcgcagatcggctga

SEQ ID NO: 492717 - DNA, 438 bp, Stenotrophomonas maltophilia
atggacctgtccgcctggctcgcgttcggctgctacctgttggcgttcttcattgtctccctgtttgctgcggcctatctgaaacgctccgacttcatgccctaccacggccaggccgtggacaggccgtgggcacagatcgacccccgcatgcaggtgctgctgatggcactcatccgcgtggtcggcgctgcctggatcgcactggccggtgccggcgtgatgctggcctggttgatcttcttcggaggtcacttcgcactgccgcagctgctggcgttccagctgttctgcctggtcgccaccctgccgccggtcctggtcgcttccggcgtgcggcgacgcaccggtgcgcgtacaccggtgcccgccggcgccgcggtggtgctgctgtcggtcatcggattcgtgctggccctgttgtcgctaccgcagtga

SEQ ID NO: 492718 - DNA, 432 bp, Stenotrophomonas maltophilia
atgacccagctcaccctgcccgaactggccaggaaaatggccggcattgatttcagcctgctgcagacccacgccggtggagagattgccggccgtccgatgagcaacaatggcgacgtggactatgacggtgacagctggttcttcaccaccgaagacaccgacatggtgcgcgagattgaagctgaccccgccgttgcgctgggtttttccggcagcaagtcgctgctgggcaagccgccgctgttcgtgcacgtgcagggcagggctgtgctggtgcgcgaccgggccacgatgagccagcactgggtgaaggacctggagcgctggttcgaacagggcgtggatacaccgggactggtgctgatccatgtgcgcgccagccgcatccactactgggatggcgaggacgagggcgaaatcgtgatctga

SEQ ID NO: 492719 - DNA, 1395 bp, Stenotrophomonas maltophilia
atgcctggttcgacccgcgatcgccgttcgtttccagcagtgcagcttccggcacaggacggcggcagtccgaccgaagtcaccctgatcgcgcagctcggcatcggtgccggcgacgcgctggtgagtgacgccggccagcgtcagcgccaccacccggcgttcatcgatgcgttggatgaaccttcggcgcgactgggtggcatgcacctgcagcacggggatgcctcctcgctgtacagcttcaccgtcggtgccggtggccacccgtttcatcgccatgcaggcccgcgcatgttcaccgccatcgccggcagcgcgggagccgagctgcgtttcgctaccgcctccgacgcgcagctggcagcaggtcctggtgccttcgcgcgcacgcttcggcgcgtccgcatcccaccggactgcctgtttaccgtgcgcttcggcggcggcacctggcaccagttcgcgtcgaaccatcctgcacatccggcgctgtttgcgctgtcctgccacagcgatgaactggcaggccgaatgagcgagcagacccgtgcgcaggtggagcgcaatgccgccgatatccccagcctgaccgaggtgcttccggaatcgcactggccttcgtgcacctcgcttgcggcggcaccgctgttgcagctgtcgctgcaggcggcacctcccagcgtgtgcgcgctcctgtgcgcgcgtacccgtgccgtgctcggcccgctgcgccgcatcccaatacggccgctgcgcgggttcgtcgaacgtgccacaccggcctatcccatccattcgcggcccgcgcccaccgatggcctgctgaccacagcgctgccgcacagccactaccaggacctgaccaccctgtgcctggaaccctcgcaggtggtccacccttccgcgtcggcgctgctggccgacgtactggagggcttcctgcgcaatccacccagcggcgtaggccatctgatggcgctgcgaaaccgactggtggcaccgctgcggttgcgcacgtcgccgctgggatgcccggtgtcgtcattgctgtcgaccgatcgcagccggttgttcgctggtcgattcccggtgctggattcgcacatcgatacgcaggacaacgacgccgaagtcctgctcggcgccgacgatcggcacctgcgtttccgcagcagcgtgcgcgtgcagcggcatcgcgatggacacgtcgagatcagcctgggctcacgcgtgcagaccctcaatgcgttcggcggcatgtacatggccctgatcgacgccgggcaccggcactatgtcgcaccggcactgctgcggcgcgcggtggagcacgccttggcaccggaactggccaaccttgagggtccggcagcacaccctgcgcactgctga

SEQ ID NO: 492720 - DNA, 312 bp, Stenotrophomonas maltophilia
atggaccgcatcttcgaagcccttgcctccaccgcccgccggcagatcctggcctatctcagcgccggcgagctcagcgcgggcgagctggccgagcgcttcgacttcagcaagccggcgttgtccagccacctgcgcatcctcgaggaagccggactgatcgaacgcgagaaacgcggccagttcgtgtacttcaggcaggtacccgaccgtttggccaacacgttgttctcgtgggcggccgaagtctgcccggtcggcggcccgctcaagcgtgaagcccgcgcccgccgcaagtcccccgcccgctga

SEQ ID NO: 492721 - DNA, 582 bp, Stenotrophomonas maltophilia
atgcgtcctgcgttctggctggctttggccctgctgcccaccctggcggtggcgcaacccgcgcgtactcccaaggccaaggccccggcgcaggatcccttcagcgagttgttcgataccgcctgcatgcagcacatcggcgcgccggcgcggttgcagtcgctgatggaatccaacgggctgtcaccgctgcagcctgccgaagcggcaacgttgctgcaggggcagtcgggcgtggcctggatggtgccgctggccagcggccgttatgcggtcagctgggccgacgacggcacctgctcggtgtatgcggaaaaggccgatgcggcggtggtgcagaagggcttcgcacggctggtgcaggcggcaccgaagccattgcaggcgcgctcgctgccgggccgtggtccgctgtcggccgaccaggtggcgatccaatacggctgggccacgccggggcaggccaagctgcaggtgcgcttccggctggtgacgcggcaggcggccgaggccggcgtacaggcgatggcctcggtgacgccgggggacgcgatgctcgaacccgcggctcccaccccgtaa

SEQ ID NO: 492722 - DNA, 468 bp, Stenotrophomonas maltophilia
atgtgctggctgggcatcctggccgcactgctggcggtgcccctggtcgcccatgaccgccgctggctgctcgacagcgtgcatgacgccgaggccgccgccgcgcatggcaacgacctgttcctgcacttctgcctgggcctgggcgcgatcgtcgcgctgctggtgctgtgcctgctgttcctgcgccatctgctgaggctgctgaagtcggcggcgcgcgagcggccgttcacccatgccaatgcacagcgcctgcagcgcatggcctggctgatgctggcaatggaactgctgtcgatcctgatcggtgcctacgcggcctggatgggcccggatttcacctggatggaggtgggcggcggcatgtcgatcaccgggctggtggcggtgctgatgctgttcgtgctcgcacgcgtgttcgccgtgggcgcggcgatgcgcgatgaccttgatggtgtcatctga

SEQ ID NO: 492723 - DNA, 225 bp, Stenotrophomonas maltophilia
atggcgatcgtcatcaccctggaccgcatgctgcaggcacggggcatgaccctgtccgagctggccgggcgcatcgacatcaccctggcgaacctgtcgatcctgaagaccggcaaggcgcgagccatccgcttttccacgctggatgcgatctgccgcgagctgcagtgcacgcccggcgacctgcttgggcatgacccggcgcaggcgcaggatgccgactga

SEQ ID NO: 492724 - DNA, 1542 bp, Stenotrophomonas maltophilia
atggaatggttggctgacccctcgatatggatgggccttgcaaccctggtcgtgctggagatcgttctcggcatcgacaacctggtgttcattgcgatccttgccgacaagctgccgccgcaccagcgcgaccgcgcgcgggtgatcggcctggcgctggcactgctgatgcggctggtgctgctggcggcgctggcctggatcatgaagttgaccgagccgctggtgaccttgttcgaccacagcttctccgggcgcgacctgatcctgctgggcggtggcctgttcctgctgttcaagggcaccatggaactgcacgaacggctggaaggccgcgcgcatcacgaggatggcaagaaggtctatgccagcttcgcgatggtggtggcacagatcgtggtgctcgacgcggtgttctcgctggactcggtgatcaccgccgtcggcatggtcgacaacctgggcgtgatgtatgcggccgtgaccatcgccatggcgctgatgctgctggccagcaagccgctgacccgcttcgtcaacaagcatcccaccgtggtggtgctgtgcctgggcttcctgctgatgatcggcttcagcctggtggctgaaggcctgggctacaagatcccgaagggctacctgtacgcagcgatcgctttctcgatcctggtcgaggcgttcaaccagtgggtgcgtttcaaccgtgagcgcaacgagcgccgccagccgttccgccagcgcaccgccgatgccgtgctgaggatgctgggcgcgcgtccagcgaacggccacgaggacgaaggcgtggacgagcaggcggacgccgacgagcgcctgcagccggcggagcacgaaatgatccgcagcgtgctgggcctggccgatcgtccggtgtccagcgtgatgactgtgcgtgccgacgtgcaatggatcgacctggcgcgtggtcaggaggatgtggtggcgcgcctggtggcctcgccgcatacgcgcctgctggtcggcgacggtgacctggacagcctgcgtggcgtggtgcagagccgggacgtgctggccgacctgctgcagggcaagccactgcagctggagggcaacctgcgcgaaccgcagtacgttctgtccactgccagtgcgctgcaggcgctggaactgatccgccagcatccggtgccgctggcggtggcggtggacgagtacggcagcgtggagggcctggtgaccgccaacgacctgctggcggcgattgccggtgacctggtcgatacccaggacgagcgctatggcgtggtggcgcagggcgaggatcaatgggaggccgatggtgcgctgaccctggacgacctgcagcgtttggcgggcgtgtcgctgccccgcagtgccgactacatgaccatctcgggtctggtgctggagcagctgggccgcctgccggacgtcggcgacgcagtggaggtggccggcgtgcgcatcaccgtgctggcaatggagaagcgccgtatcgcccgcctgcgggtggagcgcctcgacggaatggcctga

SEQ ID NO: 492725 - DNA, 1137 bp, Stenotrophomonas maltophilia
atggttgcagtgctgagtacgatcggtttgttgatgggcctgtatgtggcctggcgcctgttctggccgctgcgcatgcccatcgggttgaaggtcgtgctgtcgctgctggtggtggccatggccgtgcagctgcgcatcgtggccaccttctggggcacgatggcatcgccggaaatcccgaggatggccatcgccgtcctggccaccggctccacggcggtgctgctgctggcgttgctgatgctggtgctggatgtgggcctgctgctttcgcgcctgctgcgatggccgcgcatcgtatcggccctgcgcgcctcgaagctgcggccgttggcgggcctgctggcgctgcttgtgagtggctatggcatcagccagggcatggccgtgccccagcccaggcagatcgacgtggcgatcaaggatctgcctgctgcgttcgacggctatcgcgtgctgcagctgaccgacatccacgccagccgcctgctgaccggcgactgggtgcgcagcgtggtggacgagagcaacgcgctgaagccggacctgatcgtgatcactggcgacctgatcgacggcagcgtcgaggcccgccgtgacgacgcgcgcccgttggccgatctgcaggcgccggacggcgtcattgccatcaccggcaaccatgagtactacgcgcagtatcagcaatggatgcaggcgttccgcgcgctgcgcatgcaggtgcttgagaacagccacctgcaggtgcggcgcggcgatgcggcgctgaccatcgccggtgtcaccgatccggtggccgcacgctacggcctgccgctgccggatctggacgctgcactggccggtgccgatccctctgcaccggtgatcctgcttgaccaccgcccgcgcaacgcgcgcgaagcggcggcgcgcggggtgaagctgcaattgtccgggcatacccatggcgggcagatcattggcatggaccagctggtgaagcgggccaatggcggtttcgtgtccggccgctacgacgtggaggggatgacgctgtacgtgggcaacggcgcgggcctctgggccggtttcccggcgcgcatcggcgtgccttcggagatcaccctgatcacgctgcgccgcgcgccgtga

SEQ ID NO: 492726 - DNA, 639 bp, Stenotrophomonas maltophilia
atggctgcttccaacatttccttcctgcacggctggcgcctgttcgtagccatcgccgtggtcctgatcgcgttcgcactgaccgccttcgccctgtatcccgatgcagccgaaggcagccgcgcggcgatccggctcaccgcccgcacatcgttcctgctgttcttgggggcattcacggcatcctccttcgccaccctgctgcccggcccgttcacccggttcctgctgcgcgaacggcgcatcatcggtctgtccttcgcgttctcgcacctgctgcacgcagtcgccatcaccagtttcggcatcctcaacccggcgttctggccagcacgctccgcgctggccaacctcccgggcacggtgggctacatcgccatcctggcgctggccatcacctcgcaccgggggctcgcccggcgcatgggacccaccgcctggcgtcgcctgcacgtcaccggcatgtggatcatcgcggcggtgttcacctactcgtacttcaagcgcgtgcccggcaacttctggtatgcggtgccgtcggcgttgctgttcaccgccttcgtggtgcgctggatcgccaagcgggcgcaggccctgcgtcgaagtgcgcatgcgcggccgccgctgcgggcggcctga

SEQ ID NO: 492727 - DNA, 735 bp, Stenotrophomonas maltophilia
atggctgagccgctggctaccctgcaacggcgctgggccgatcatgtgcgggaccctgcaaagaccgcacccgatggcgtggaggcgcgcaggctggcggtataccgccgcctgtgcatcgacagcctggacaccctgctggccggcagcctgccgcgcctgcaacagcagttgggcacgtcgcgctggcgcgacaccgtggcgcactactacgcccaccacgcctgccagaccccgttgttcccacggatcgccggcgagttcgcggcctggctggcagtacaggacacgctggcactgccgggctgggcggcggaactggcgcactacgagagcacgcagcagtcgctgcacattgaaccgcgtggcgctgggtgtttgctgcagcgcgtacccgaggacagtgatgtgctggcggtttcgccgctggtgcgggtgcttgggtaccggtggccagtgcatgaggacgaggggctgaaaccggtgttgggcgcagctcccacgctgctggtgatccagcgccgcgccgatttcagcctgaaggtcgagcaaccgtcaccgctggcctacgcgctgctttcggtcttcggtgacgacggcgcgcgtgtggatgaggcactgcaggcgctgtccgaaacacatgacgtggcaacggacacattgcgtgctgcctgcgtgcccgttctgggcgagctgtgcacggcgggggtgctggttgcattgcctgctttctga

SEQ ID NO: 492728 - DNA, 846 bp, Stenotrophomonas maltophilia
atgtccctgcccctgcccacccatgccgccggtcttggcctgcgccgtggcctgatcgacgaactgctggccatgccggccggtgccatcgacttcctcgaagtctcccccgacaactggatcggcgtcggcggtgcacacggcgacgcgctgcgccaactcagcgagcgccaccccttgacctgccacggcctgtcgctgtcgctgggcggtcctgatccgctggaccgcaccctgctggcacagacccgtgccttcctcgacctgcaccaggtgcagctgtacagcgaacacctgagctactgcgccgccggtggccatgtctacgacctgctgccactgccgttcaccgccgaggccgttcaccatgtcgccggccgtatcgcccaggtgcaggacatgctgggccgacgcatcgccgtggagaacatttcctactacaccgttgccggcgcggacatgagcgagatcgacttcatcaacgccgtgctcgccgaagccgactgcgacctgctgctggacgtcaacaacgtcttcgtcaatgcctgcaacaacggttacgacgccttcgaattcctggcccgcatgccgtcccaccgtgtcgcctcgctgcacgtagcgggccacttcgatgaagacgacggcttcaagatcgatacccatggtgcgccggtgaaaggcgtggtctgggccctgttgcgcgaggcctacatgcgggtgggcgtgcgtcccacgctgctcgaacgcgacttcaacttcccgccgctggccgggttgctggccgagatcgcgcagatccgccaggcgcaggctgaggcacgttggccggaggtggcccatggctga

SEQ ID NO: 492729 - DNA, 477 bp, Stenotrophomonas maltophilia
atgtccatctcgaccaagaacacctcttcctcccgccagccgcgcatcggtgccatcggcatcgccctggccggtggcctgctgctggccggccaggccgcggcgatccagccgctggctatcagcgcggtggccatgagcgccgccgccgaaggcaagtgcggtgaaggcaagtgcggggccaacaaggccaccaccggcaagcccgccggcaaggccaaggtggccgagggccagtgtggcgaaggcaagtgcggcgacgcctcgtttgcccgcactgatcgcgaccacgacggcaaggtctcgcgtgccgagttcaatgctgtggccgccaagcgtgccgccgagttcgatcgcatcgacaccgaccacgacggttacatcagcgagcaggaagcacacgactacctgcgcagcgtctacaccgccaacggcaagccgatgccgaagggcctgttctcccgcgttgccgattga

SEQ ID NO: 492730 - DNA, 645 bp, Stenotrophomonas maltophilia
atgatcagcaccgcttcttccgtgtatacgccccgcctggacgccgtcggccgctggctctcgccattggcgctgcgcaccctgctggcctgggagttctttgaatccggccgcgagaagctgggcggccagaactggttcgccgacctggaaggccgcttcccgttcccgttctccacactgcccgcgtcgctgaactggcagctggccacgtggctggaactggtgggtgcggtgatgctgctgctcggtctggccacgcgctcggtggcctacgtcttctgggtactcaccatcgttgccatcgccgccgtgcactggcccgaccaatggaacggcctgggtgaactctggcagggctatgcgatcaccgaccagggctacggcaacttcaagctgccgttgctgttcctggccatgctgctgccactgatcctcaacggcggtggcgcactcagcgtggaccggctgctggccggccccggccgtgccacggcaggaaatgacggcctgggttggggcgtcagcctgatcgccctgctgctgccggttgccgcgctgttgcccggcatcggcttcggcggtgccctgctcggcggtgtgctgctgctgggccatctgctgcgccgtcgccgcgccgcctga

SEQ ID NO: 492731 - DNA, 792 bp, Stenotrophomonas maltophilia
atgatccgtacctgcttgctggccgccgctctcgcccttgccgccgccgcccctgccttcgctgcccaggccgataccgctgcaccgcccaccgtcatcctggtgcacggcgcgttcgctgatggctccagctggagcaaggtcatcagcaccctgcatgactggaagctgccggcggtggccgtgcagaatccgctcacctcgttggccgacgacgtcgccgccacccgtcgtgcgattgccgctgcgcctggcaaggtggtgctggtcggccacagctggggtggcacggtcatcaccgaagcgggcaatgacccgaaggtgcaggcgctggtgtacgtggcggcgttcgcgccggatgcagggcaatcatcggcgcaacagggcgaaggcttcccggtcggtccgggcctggcccgcctgcaggaaaggaacggctacctgacgttgccggctgacgctgtcgcccaggacttcgcgccggacgtgatgaagaagtcggccgcactgctgtacagcacgcaggtcccgttgaaggccagcgcgctgggcgaagtagtgaacgttgcggcgtggcgcagcaagccgagctggtacgtgctcagccgtgacgatcgcatgctgtcgccgcagctgcaggccgccaccgcaaagcgcattggcgcgcagctgcaatcgatcggcagcagccatgtgtcgctgctctcgcatccggcgcaggtggccgacagtatcctggaagcggcgggggtgaagccggcggaactgccactggccgagcaggggggctga

SEQ ID NO: 492732 - DNA, 546 bp, Stenotrophomonas maltophilia
atggccggcctgcgtgcgtacgtgctgccgttgctgatgggcgtgctgggtggggctgcgctgttgatggcctggcccagcccggaggccgatgcgcagccggcacaggccgttcccgccgccgggttcgacggtggcgggccctggcacaacagcccgccgctcacactggagcagttgcgggggcaggtggtgctggtcgagttctggacctacacctgcagcaactgcctcaacgtggcgccgtatgtccagcagtggcatgcacgctacgcgtcgcagggcctgagggtgatcggcgtgcatacgccggagttcgcctatgaagggctgcctggcaacgtgcgcaaggccatcgcacggttggacatcacctggccggtggtgcaggacaaccagtaccggatctggaacgcctggggcaaccgcttctggcccgcactgtacctgctcgaccggcaggggcgggtggtctaccgccattacggcgagggcgactacgcacgtaccgaaagcgagatccagcgcctgctggccaacccctga

SEQ ID NO: 492733 - DNA, 741 bp, Stenotrophomonas maltophilia
atgaaccacgtatcgcatatcctggtcgtcgacgatgacagcgagatccgccagatgctggccgattacctgcaacgcaacggcctgcgcgtgagccaggccgacggtggccgggccatgcgcgcgctgatggatacccatgccgtggatctggtcgtgctggacgtgatgatgccgggcgaggacggactgagcctgtgccgcaacctgcgcgccggcaagcatcgtgcggtgccggtggtgctgctgaccgcccgcgacgacgagaccgaccgcatcatcggcctggaaatgggcgctgatgactatgtgaccaagcccttctcttcgcgcgaactgctggcacgcatcaatgcggtgatccgccgtacccggatgttgccgccgaacctgcaggtgagcgaagccggtcgccagctggccttcggcgagtggcgcctggacaccaccgcacgccatctgctggatgcacaggacaccgcgtatccactcagtggcgccgaattccgcctgttgcgcgtattcctcgatcacgccaatcgggtgctcagccgcgaccagctgctcagcctcacccagggccgcgacgccgaactgttcgatcgctcgatcgacctgctggtcagccgcgtgcggcagcgcctgggtgacgacgcacgcgagccgacctacatcaagaccgtgcgcagcgaaggctatgtgttcagcgtgccggtgcagttgctggggccggacgaatga

SEQ ID NO: 492734 - DNA, 1314 bp, Stenotrophomonas maltophilia
atgaacaccaccgcgcgccgcccacgctggccgcgcacgctgtcggcgcggctgctgctggtgctgctgggcggactggcgctggcccacgcactgtccttcggcctgctgttcttcgaacgctaccagtccacccgcagcatgatgctgcgcaacctggacgaagacgtggccgtgagtgtcgcgctgctggagcacctgcccgcggaccagcgcgatgcctgggtgccgcggctggagcggcgcacctaccgttacctgctgcgcccggccgcggccggaccggggctgcagaccgatcgtgcacgccaggtcacggcgatcatcgatgacagcctgcagcaccgctatccgttgcaggcgcgccaggtggctcgcctgccggagcggttcgaggtggaactgcgcctgcacgacggcactcccttgaccattgaagtcaccccgtcgggcctgccgctggcgcgctggctgcccgccgtgctgctggtgcagctggcgctgctgctggtgtgcgcgtggctggcggtgcgcctggccatgcgcccgctgcagcagttgtcgcatgcggtggagcatctgcagccgggcaaggacgggcctgcactgcctgaagatggcccggcggaagtaggcggcgcagcagccgcgctcaacgcactgcaggcacgcattcgtggccatgtcagtgaacgcctgcagatcctggccgcgatctcgcatgacctgcagacccccatcacgcgcatgaagctccgggtggagaccctgcctgaagacagcacccagcagcggctgctggccgacctcgaccaccttgggcaactggtgcgcgagggtgtggcctatgcgcgcagcagccacgtcgccagtggcgcgccggtgtcgatggacctgggcgcgttcctggccagtgtggtcggcgattacgaggacatgggcaagccggtcagtggcggtgcgcccgctggactggtcgtgcagacctggccgcagctgctgcgacgggtggtcggcaatctggtcgataatgcactccgctacgccggcgctgccgagatcgaggccggccgtgacgaggccggaagggtatggatcggaatttccgaccgtggcccgggcatccccgaggaccagctgcaggcagtgctggcgccgttccatcggctggaaagctcgcgcaatcgcgataccggcggcactggcctgggcctggccatcgcggtgcagctggcgcagtcgctgggcggctcgctgcggttgcgcaaccgcgagggtggcgggctgatggctgagctgcagctgccggggtaa

SEQ ID NO: 492735 - DNA, 1014 bp, Stenotrophomonas maltophilia
atgcagggaacgcagcattcaatccagcgcccgcgccacgtcgcgctgctggtcggtctgctcgcgctggcggcctgccagcgcacaccggacgcaccgaccgacgcacccgcagcgggcacaccgcctgccgccccggccaccgcaacagatctctctccgctgctcgacgccttgccgacctgcgcgctggacggctggtacatcgatcagcagaccgggcgcccggcccatccctggttggcggcgaacgcgccgaagccctgcaaggaagacgtggagaacgagatcgccacgttctgcgtgcaggggcagtggaaggggctgccggtggaagaggtgatcctgccgacgatgacattcgtttcgttccgtggggccaggatcggcctgccgctggagaaggcacgtcccatcgtccgccagcgtttcggccaggacttcccgggtggtgcggcttacgaggagggccgcgagccgaagctgatggccgatcccgaagatgcgcagcgttcgtggctgctgtgcagcaccccggaactgggccacgacgtggacagcgagggaagcatcagctattccggcatgaacctgccctacgaccacgacggttgcagttaccgctacagcccggtcgacttctgcgatgcgcggcaccgcgcagccatcgaagatgccctccagcatcagaaacccaatttcaaccggcactacctgctggtacaggtcgatgatcgtccggagtatttccagcgcacgctggtgctggtcgatgcccgcaccggacgcgccacgccattgccgattgatgccttcaccgggccggcggggaagggcggtgatgctaccggctacgggacactggagacgggcgtggaccagccgcagttctgcctcgatggcgcgttgctggtctaccgcgtgttcgaggaagggcgcttctgcttcggttttgacggtgagcgcttcaccggccatgaaacccagtacatgcaggcagcggatggccgatga

SEQ ID NO: 492736 - DNA, 1260 bp, Stenotrophomonas maltophilia
atgaccgcggcgcggcagcgctcgatgtgggtggcgggcctgtccacggtagtggagtggtacgacttcaccctgtacctgtatttcgccacggtgctgtcgcgggtgttcttcggcggcggcgaacaggcgctgctggtcacgctggcaggcttcgcggtgtcctacctgatgcgcccgctgggcgcgctgtgcttcggccacctgggcgaccgcctgggccggcgctggatgctgctggcttcgatggcgttgatggcggcggcgatgctggccactgcgttgctgccgaccgcggccaccgcaggtaccacggcgggcgtgctgctgctggtattgcgctgcgtgatggcgttttcggtgggcggtgagtacaccggcgtggtggcatatctgctggaaagcgcaccggcgcggcggcgtggcctggtgacctcgctggcctcggccgccagtgaagtaggcgcactgctggcggtagcgatctcggcggtcaccgtggcgctgctcgcgcccgcgcagctggacagctggggctggcgtattccgttcttcgtcggcgcggcgctggcactggtgatcctggtcgcgcgctcgggcatgcacgagtcgccggagttcgagcggcagcgccgcgagggcagcattcccgcgacgccgctgaagcatgtgctgcgcaaccatccgctggcggtggcgcgcacgttcgcgatctcggcgctgggctcgattacttactacgtcggcatcacctatgtgcccgcattcctgcatgcgcggggccacgatgagggcgatgcgctgtggctgtcgacgattgcggccgtggcggtgatcgcgatcacgcccctgtgcggcgcattgtccgaccgtgtcggacgacggccggtgctgttgggcctgaccgtgctggcagcgctgctgccgctgtccttgttcgcgtggatggcgcaggcgacgccgctgggcatcgcgctggccgcggtgttgctggcctgcgtggccggtggcgtgagcgcggtggcggccccggccacggccgagcagttccccggcgaagggcgggtgagtgggctggcactgggcgtgaccatggccacggccttcttcggcggggcaacgccatggctggcgcaatggtgggtggaacgcagcggctgggcggcggcgccgggcgcgatgatcgcgctggtggcggtgctggtgctgccggtgctgtggaccctgcccgagacggtcccgggcagggccaagcgctag

SEQ ID NO: 492737 - DNA, 1020 bp, Stenotrophomonas maltophilia
atgcagggcgcgccggcctgcttccaggccgccggcgccccccgcaccacacggaagaagaagaacaacaacatgctgaaagtcattttcgataccgacccgggcgtcgacgacgccctggccctgctgtacctgcacaagcacgcccagattgacctgatcggtgtcaccaccaccttcggcaatgcctcggtggagtcgaccacgcacaacgcgctgtacctgaagcaggcctggggcttcgccgccccggtcgcgcgcggtgccggtggcccgctgcagccggaagccaccccggaagcctggccggtgcacatccacggccacaacggcctgggcaaccacccggtgccgaccgaactggacgtggccgccgacgcgcgccccgctcaccagctgatcatcgacctggtccgcgcccatccgggcgaagtgaccctggtcgcggtcggccgcatgaccaacctcgcgctggccctgcagcaggccccggacatcgccggcctggtgcgcggcgtggtgatcatgggcggcgcgttccatgtcaacggcaacatcaccccggccgccgaagccaacatctggggtgacgccgaagcggccgacgtggtgttcaccgcaagctggccggtcaccgcgatcggcctggacgtgaccacccgcgtggaaatggaccgtgacggcctggataagctggcagcgatcggcggtaccgacgccgaactggtgcgcgcgctgtcgcaggactacgtggacttctacctgcaggccggccacaagggcatggtcgtgcacgactgctgcgcctgcatcgcgctgacccgaccggagctgttccagttcgaacgcgccagcgtgcgcgtggccaccgacggcgttgcccgcggcatgaccattcccaagccggaaggcctggcgttcggccccagcgtgtgggacggccacgtggtgcagtcgatcgccatcggcgtggatgcggccgcggtactggccgacatcgagcagaccctgaaggtctga

SEQ ID NO: 492738 - DNA, 321 bp, Stenotrophomonas maltophilia
atgttgatcgttgcccttctgctggtcctgctggtgctgggcctgaacgtggcggctaccgtggtgatcgtcaggcgtgatggcctgtcggcgggtggccgcgcggtgcagctgctgctggtctggctgctgccgctggtcggcgccatcctgtgcctggcagtggccacggccgatggctcggccagccggggggatggcggcgcaagccatgacacctccgtcggctattccggtgacagccacagccatcacagccacagcagctccgactgcagcagtgatggtggtgggggggacggcggcagctgcggcgattga

SEQ ID NO: 492739 - DNA, 2193 bp, Stenotrophomonas maltophilia
atgtgcctgaccttcgataaccgcctgccccgccgcgcgctgctgccggccgccctgctttcgtcgttgaccctgctggccgcgcccagcgcgttcgccgccactgatggcgctgccgacgccaagaccctggaccgggtgagcgtgcgtgccgaacagtcggcgccgccggccagtaccacgcgcctgccgatcaccctgcaggaaaccccgcagtcggccaccgcgatcagcctgcagcgcctgcaggacgaatcgctgttcagcatcaacgatgtgatgcgcaacgtgaccggcgtcagcgtgtccttctatgacacacaacgcccgctgtactacgcgcgcggcttcgccatcaccgacttccaggtcgacggcattcccacctacagcggctcgaccaaccaggagtacgacaccgccttctacgaccgcatcgaagtgatccgcggtgccaacggcctgctcagcggcgccggcgtgccgtcggccacggtcaacctgctgcgcaagcgccccggcaaggaattcgacgcgtcgttcgcggtcagcgccggtagctgggactaccgccgcatggaagccgacgtaaccgcgccgctgaccgccgacggccgcttccgcagccgcgtggtcgccgcctacaccgatcgtggcctgtattacgaccgctacaaggaaaacaagatggccggcatggcggtgctggaaggcgatgtcaccgacagcaccacggtcaccgtcggctaccagacccaggacaacaacccgaccggttcgacctggggcaccgtggcgttcttcgacaaccagggcaacttcgcgcatctggcgcgctcgaccaacctgtcgccgaagtggagctactggaagcgcgaaagcaataccgccttcgccaacctggaacagcgtttcggcgaccactggctgctgaagatcaacaccgcctacacccgcggcaacgtgcagaacgtgcgcctgtacggcaccggcaacccggacccggtgaccggcgcgggcatctacctgcgcacggccgccggtgattcgaaggacacccgccgcaatgtcgatgcctacctgaccggcagcttcccgctgttcggccgcgaccacgacctcaccgtcggcgcgcagtggtcggacctggaaggcaccaccaataccgtggcgctgaacttcccgggcgactgggcgacctgcgggcgtgagcgctgctactacatccccaacgtgttcaactggaacggcgacatctccgaagtgacctacacccgcaccggcgcacgccgcgtggccaagaccacgcagagtggcgtctacctggccacccgcctgcgcctggccgagccactgtcgctgattgccggtgcacgcctgagccgctgggaaacgctcagccgctcgtacaacgctgccggcgcctataccggcaccagcggtgcatacaaggtgagcgatgaggtcactccgtacgtgggcctggtctacgagatcaccccgaacgtgtcggcctatgccagctacaccgagatcttcaatccgcagaactacaaggaccgcaacgagaacctgctggcaccggtgcagggctcgaacctggaagcgggcatcaagacgcagtggttcgatggccgcctgaccgccaatgcggcggtgttcgaggccaagcaggacaactacgcggtgcgtgacatgagcgtgccggaaggtacgctgagcgacggcagctcggcctatatcggcatcaacggcaccaaggcgcgcggttgggagatggacgtcaacggcgagatcctgccgggctggacggtcaatgccggctacacccgcgtcaaggtgacccgcgccgccaccgacctgctgtacgccaatccgcccaaggacctgctgcagctcaacacccagctgcagctgcgcggcgcgctggagcgactgagcatcggcggtggcctgcagtggcagagccgggtgcagggctacaacatcgcctacccgctcggcggcacggtgacggtgaaccagccggcgtattcgctggtgcagttcaacgccaactaccgcatcagcgacaactggaccgcgacgctgagcgtgcgcaacgcgctggacaagacctactgggccaacctggactacaacaacttcggcgagccgcgcttcgtgtcggccagcctgcgctggaagttctga

SEQ ID NO: 492740 - DNA, 1689 bp, Stenotrophomonas maltophilia
atgaagaaatttggcaaggctcttctcgccctgctcgtgctgctgttgctggccgccgcgctgttcctgtactggccgctgacccagcgctcggtgcccgccgccagcaacgacaagcccgtcgatgttgtgctggtcggcgccggcatcatgagcatcaccctggccacctacctgcaggaactgcagccggactggaacatccaggtctacgaacgcctcgacggcgtcgccggtgaaagctccgatggctggaacaacgccggcaccggccactcggcgttcgccgaactgaactacaccccggaactgcccgacggcagcatcgagaccaagcgcgcggtcggcatcgccgaatcgttcgaggtctcgcgccagttctggtcgcaccaggtgaaggagggccggctgagccagcccagcgacttcatcaacccgaccccgcacatgagcttcgtctggggcgatgacaacatcgcctacctgcacaagcgccagcaggccctggtcaagaacccgctgttctacggcatgcagtactccgaggatccggcccagatcaagcagtgggccccgctgctgatggaaggccgtgacccgaagcagaaggttgccgcaacctggatgccgctgggcaccgacgtcaacttcggcgtgatcacccgccagctgaccgccggcctgcagcgcagcccgaacttcagcctgcacctgaaccatgaagtgagcgcgctgcggcagaacgccgacaagagctggaacgtgacggtgaaggacctcaaggccggcaccgaatccaccacccacgcccgcttcgtgttcatcggtgccggtggcgccgcactgaagctgctgcagatgtcgggcattccggaatcgaaggactacgccggcttcccggtcggcggccagttcctcgccttccagggccaggacgtgacctcgcgccatggggtgaaggcttacggcatggccgagaccggctcgccgccgatgtcggtgccgcacctggatgcgcgcaagctggacggcaagccggtggtcctgttcgggccgttcgcgctgtacagcaccaagttcctcaagcacggctcgtggtgggacctgtattcctcggtcacccacaacaacgttggcccgatgctggaagtgggcaaggacaacctggacctggtgcagtacctgatgggacaggcgcgcctgaacgatgccgaccgccaggccgaactggtcaagtacttccccaatgccaagccgggtgactggaagctggtcaccgccggccagcgcgtgcagatcatcaagcgcgatccgctgaagggcccggtgctgcagttcggtaccgagatcgtgaccgacaaggaccacaccctcgccgccctgctcggcgcgtcgccgggcgcgtcgacctcgccgccgatcatgcttgacctgatggccaaggccttcccggagcagatgaaggccggctgggaaacccgcctgcgcgagatcgtgccgtcgtacgggcgcaagctcaacgacagcgccgcgctggtcaacgagatccgcacgctgaccagccagaccctgcagctgccctacctggaggtgccggtggacgcgaacgcggcatcgcccgctccggcggcggttccggcgccggccaaggaaaagcgcaacgccaacgaggaactgcaggcgctgtaa

SEQ ID NO: 492741 - DNA, 447 bp, Stenotrophomonas maltophilia
atgcccgtgtacctgcgcgatgcccgccccgaggatgccgctgcctgcatcgacctgcgtgggcgcacccgcgagaacgccttcagcgccgagcagctggcccagctgggcatcactgtggacagctgggcggccggcatcgcccagggcgattcgatcggccgcgtcgcctgggagggggagcgcatggccggctactgcttcgccgaccgcgacagcggcgaggtgctggtgctggccctgctgccggactacgagggccgcggcatcggccgccagctgctgcaggaagtggtcagcctgacccgcgatgccggccaccggcggctgttcctggcctgctcggccgacccgcgttcgcgctcgcacggcttctaccgccgcctgggctggcgcgcgaccggcggggtcgatgaggctggcgacgagatccttgagctggtctga

SEQ ID NO: 492742 - DNA, 906 bp, Stenotrophomonas maltophilia
atgcgcatcgatcacgcccagctgcgcgccctggccgcggtgatccgcgaaggcagcttcgaccgcgccgcgcaatcgctgaatgtcacgccctcggccatctcgcagcgggtcaaggcactggaggaccggatcggccgcctgctggtcaagcgtggcaccccggccaccgccaccgccgagggtcagttgctggtgcagctggccgagcagaccgccctgctcgaacacgatgcgctgcaccggatgggcctggcggatgaggacctgccccaggccagcatcccggtggcagtgaaccacgacagcctggaaacctggttcccgcaggccgcggcgcagttcgcgcagggcaccgggaccaccctggacctgcgcgtggaggaccaggaccacaccgtcgaactgctgcgccagggcacggtgctgggtgcggtgaccacgctggacgagccggtgcagggctgccagatccacgcgctgggcagcatccgttacgcggcgacctgcacccccgagttccgcgaacgccacttcgccaagggcgtgaccgcgcaggcactggcgcaggcaccggttctggtgttcaaccgcaaggacgaaatgcagtcgcgctttgcccggcgcatggccggcgatgacctgcccagcaccgcaccgacctggtggatcccctccacccgcgcctttgtgcaggccaacctgggcggcatgggctggacgatgaatccgctgccgctggtcaagcggcacctggacgccggccgcctggtctacgtacgccagcgcgcgtgggaagacgtgccgctgtactggcagcactggaagggcgacgtgcagaccatggcgctgctgacccgcgccgtgctggatgcatcctcggcattgatccggcgcaagcgctga

SEQ ID NO: 492743 - DNA, 726 bp, Stenotrophomonas maltophilia
atgttgcggcgcgacaatggcgcccgttccggtgctgtccgccttcgcgaggcaccgtccccccccaagcaatacaaggcagtgaatcccatgttctcggtcatctccgccagcaccggcctcggtgcctggttctctggtgcagccaccggcatcggcctgttcgccgtggtcggcgcccagagcgccttcattctgcgccagggcatcctgcgcaagcacatcgtgccggtggtcgccacctgcgcggccatcgatgccatcttcatcttcgccagcgtggccggcctgcgcacgctcacctcggcgctgccgtggctgaccaccgccgtgctgtggaccggtgtcgcgttcctggcctggtatgcgatgaagtcggcacgccgtgcgatcgccggcggcggtggcatgggcgaggccgacagcgacgacggcagccgccgcgcggtgctgatggccgcggtcggcttctcgctgatcaacccgcacttctggctggacatgatggtgatcggctccatcgccgagaacttcggcaatgcccgcatggccttcgctgcgggcgtggtcacggccagctgcctgtggctgaccgcgcagggccttggcgcacgcctgctggcgccgctgttcaccaagcccagcacctggcgcgtgctcgacggcaccatcgccgtgatcctcagcatcctggccctcatgttggcggtgcgcggggtccactga

SEQ ID NO: 492744 - DNA, 1989 bp, Stenotrophomonas maltophilia
atgcacaggacgattctggcggccgcgctggccgtcatcgggggcgttgccgcaggcagcgtgggggcggtggacctgacgcaatacctgcgtcgcgagactttcaccgacatcaagatttcgccgggaggcgagtacgtggcggcgacggtgccgatggaggacgccaccgcgattgccgtgctgcggttgaaggacaagcagatggtcggcagtttccggccacccagccgcaaccacgcgcaggaattcgactgggtcagcaacgagcgcctgctgatcggcctggcccagaagtggggctcgctcgaccagcccaatcccaccggcgaactctatgccatcgacgccaacggcaatcgcggcgaactgctggtgggctaccgagtcgagagcaacggcccgggaacccgcatccagccgaagaaggtcgaagcagtggccgccttcctggccgacgacctgccgggcgacgagcgcaacgtgctggtcacggtgtggccgctggccgaggatccgttcacccgcgtagatcgcatggatgtgactacgggtcgtcgctcgcgggtggcatcctcgccggtaaggcgcggcgagttcaccaccgacggcgccggcgaagtgcgcttcgtgcatggctcgggcagcgacaacatcaacaagctgtacttccgcgaacgcagtggcgacagctggaagctgatcaacgacgaggccgtcagcaagcgcatcgaaaccgccctcggcttctcggccgatgacagcctggcctacctcaacgtcgagcagacccagggcccggacgcgatcgtcagctggaacccgcagaccggcgagcgtgccacgctgctgcgcgacgaggtggtcaatccgtatcgcatcatccatcggcccggcacccacgtgccggtgggcgcgctctatctgggcgatacgccgcgtacccggttcttcgacgagaagtcgccggaggcgcgcctgtaccgcagcctggaagccgccttcggagggccggtctacatcacctccagcacccgcgatggccgtgtcgtgctggtggaaacctggtcgggctcgaacccgggcgatttctacgtctacgacacggtggcgcgcaaggctgaccacctgatcagccgcagcgactggattgacgtggaccgcagtgccagcgtgaagccgattgcactgaaggcgcgggacgggctgccgttgcatggcttcctgaccctgccggccggcagcaacggccgcaacctgccgatggtggtgatgccgcatggcggtccgttcgacatcttcgattccggccagtacgaccgcgaaacccagatgctggccgccgccgggtatgccgtgctgcaggtcaacttccgtgggtcgggcaattacggccgggcccacacccaggccggtgcgcagcagtggggcgcggcgatgcaggacgatgtcaccgatgccacccgctgggcaatcagcgaaggcatcgccgatgctcgtcgcatctgcatctatggcgccagctacggggcctactcggcgatgatgggggcggcccgcgaacccgggctgtatcagtgcgcggccggctatgtgggggtctacgacctgccgatgatgtacacccgtggcgatatccaggaccgcggctcaggcgtgacctacctgcgcgaatggctgggtgatccggccaagctgggcgcggtgtcgccggtgaacctggccgaacggatcaaggtgccggtgttcctcgccgccggtggcgaagacaagcgtgcgccgatccagcataccgagcgcatggaagcggcgctcaagcgcgccggcacaccggtggaaagcctgtactacaagaccgaaggccacggcttctacaccgaggcgcatcgcagcgagtactacgacaagctgctggcgttcctggcgcgcagcctggggggcaagaccgcgacgaccgcgcccgtggccggcaaggacaaggcgccctga

SEQ ID NO: 492745 - DNA, 1398 bp, Stenotrophomonas maltophilia
atggccctccctgatcgatgcacacctgtgcttgcccggtgcggaacgctggcattcgcctgtctcggcttgctggtcctggacgtgcaagccgaggtgggggaacgctacgaggccgatgaagtcgcacgctcgctgctcgctaccggcgcggtccacgaggaggggttgcagctgcatcgatggttgacgggggccgcggtcgacatgcccgcggacgctgagcgcgaggtcaggatgatgacccgcgcgattgcattggcaaccgggctgacggacagctggattgacgcgctgtacggtgtggaagcagcggggtccgaagcgcaggcagcgcggaaactgctggcggacgccaacagcgctggcgcttcgcgctgcatggcgcacggcgtcaagcaacagccggagaatgcgccgctgcacggttatgcgttggagcgcttcggggacaccccgctgccggctcatgcaacggttgtcgacgttcaataccgatgcatcacctcctacatttcggctcacagggttctcgcgttggccgcgatagacgtgctcaagcaggggcgccgcccggtagcggggcagttgcttgccgatctgcaggcgggcatggcgcgtgatcggcactggccccaggcagacggtggtgacatgcagctgctttcgttctggaaggggcgcgcgtggtccggtgatcggcggctggtcgaggcactcgccagacggtcgatctccatggacgaagtgcggcccgtggatgcagtcgcacagaaggcgctgttcgcagacttcagtgaacaggcccttggacaaccggcctcggaggagctgaccacccagatcctgctatggataccgcccgttctgcgcgagtcactgcgcagtgatgtggaggcctatgttgccgcggcagcggtctcgcccctgcaatgtcagccggtgcgagcacagctcatcgacgaagaaggccggcgcgcgcgcatggaagttcgatgcacggtaccggcgctggatgccattgcggtgccggagatggccgcatcccttccaaaagatgcgctggaacagcactaccggcaggtgttgggggcgttgcgcacgtccatcggcagcgtcggaagtaccaccctgatcggcttcaccaccctcggctggagcgcgcatgcccagcgttgggacttgcccgtcggcgcgcacgcggctttgcaggcgcgcacgctgctgccgacgccggtggtcgacgagtggggcaagccgtccaacatcagccgcttcctgccggacgtgctgcgcgtgcagaacatcgatccttcagccctggacgaagatacccgcgacaaaatccagagcatgcggctgcagatggccgacgccatgcgtggcggttggcaatga

SEQ ID NO: 492746 - DNA, 1833 bp, Stenotrophomonas maltophilia
atggcgtggatccaccggcggctgcctgcccaggcccagaggcctataatcgcgccctttccgctgtccccgccgtcgatgaccgttgccgcctctgcttccgacgacttcctgggccaccccaagggcgtctacgtctgcttcttcactgaaatgtgggagcgcttctccttctacggcatgaaggcgctgttgctgctgtacctgaccaaataccacctgttcggcgacaaggccggcctggacctgctcggtgcctacggtggcctggtgtactgcatcccggtgttcggcggcatgctggccgaccgctggctgggcatgcgccgggcagtgctgttcggcggcatcctgctggtactcggccacctcggcatggccttcgagggccacgccgcgtaccgggtgaacggcgaagtggtgcgcgacacctcggcgctggcggtgacctacctgtcgctggcgctgatcatcatgggcgtcggcttcctgaagccgaacatctccaccattgtcggcaagctgtacgccaaggacgacccgcgtcgcgactcgggcttttcgctgttctacgccggcatcaacctcggcgcgctgttctcgtccctggtgtgtggcttcctcggtgaggcctacggctggaagtacggtttcggtgcggccggcatcggcatgctggccggcctggcgatgttcctgtggggccagaagtacctgcagggccatgccgaaccgccgcaaccggcggcgctgaagcagaaggtgctgggcctgccacgcgaatggctcatctatctgtgcgcggtgctcggcgtgctgccggtggcatggctgatgtgggccgccggcaacggcgcgttcgcgctgggcggtgaaatcagcctggcgctgatgctgatgctggtggtgctgggcggcgtgctggtctggttcgcctggttcaccggcacgaaatgcacgccggtgcagcgccagcagatgatcgcgctgatggtgctgatcttcatggcgctggtgttcttcacgatgtacgagcagtcctacggctcgtgggtgaccttcaccgaccgcctgctgaccaaggacatcgtgccctcgctggtgatcaccggcggcacgccgctgccgtggtcgatcctctcgctgctgctggcaccgctcggcttcgtggtcagcgcgcgcctgtcggaacggcgcccgggctcggccgcgccgcgcacgttcttcgccgccatcgtcgtactgatgctggtgctgctggtgcgcgactgcctggtgattccgcagaccgccggctcgctgacctacctcggcggcctgttcctggtgctgctcgctccggccttcgccgcgctgtggacgtggatggaccgccgcggctgggaaccgggcaagccggtgaagtcggcctggggcctggtgatcggcgcgctgtcgttcgtgccgctggcgctggccgcacagcaggtgggcgccaccggcgagatggccagcgtgtggtggctggtgctggcctacttcctgctggccagcggcgagatgtgcctctcgccggtcggcctgtcggcggtgacccagctggccgtgccgcgggtgatgagcctgatgatgggcacctggttcctggccaccgcattctcggaaacgctggccgcgctgttcggcaagctggccgcgatcgaggtgccggaaggcgaatcgctggacatggtggctgccgccggtgcctacgcgcacctgttctggctgctgatgtggatcggcctgggttgcgcgttggcggccttcatcgccgcgccgctgctgaagaagatgatgcacggggtgaagtaa

SEQ ID NO: 492747 - DNA, 1149 bp, Stenotrophomonas maltophilia
gtggccccttcccccactacccgcctggcctccatcgaccagctgcgcggcaccgtgatgctgttgatgctgctggaccacgtgcgtgagaccttcttcctgcaacaccaggtgagcgacccgatggacgcagcgacggtctcccctgcgctgttcgcctgccgtctgctggcccacctgtgcgcccccgtgttcgtactgctgaccgggctgtcggcttggctgtacggccagcgccaggcggatccgcgcggggccacagctgcgttcctgctcaagcgcgggctgttcctggtggtgctggaactgaccctggtgaatttcgcctggaccttccagctgccgccggaaacgctgtacctgcaggtgatctgggccatcgggctgagcatgatcgcgctggccgggctgctttggctgccgcgcccggccctgctggtgctggcaatcgcggtggtggccgggcacaacctgttcgacggcttacgggtgcaaggcaatggcctgctggcgctattgtggaaagtgctgcaccagcgcgactggatcgaggccggcgcgctgcgcctgcgcacctcctacccggtactgccgtggatcggggtgattgcgctgggttatctgatggggccctggttcggccgcgcgcgcgcgccggagcagcgccagcgctggctgctgtgggcaggcgtcggcgcgctggccctgttcgcgctgctgcggttcgccaaccagtatggggatgctccctggtcgtaccagaccactacgctgcgcacgtggttgagcatcttcaacgtcaccaagtacccgccgtcattgcagttcctgttgctgaccctgggcgtggggctgttgctgctgcggctgtacgaatggccgccgctggcgcgggcactgcagccgctggccgatatcggcgctgcgccgatgttcttctacctgctgcacctgtacgtactgaaggggctgtacctggccgcgttggcggcctgggggccgacccatggcgagctatatgccctggattcggtcagcggcctgctgctggtggcctgtgcgctggcggtggtgctgtacccgccgacgcgggccttcgcgcggttcaaagcgcgaaggcgcgatctgccttggttgcgatacctgtga

SEQ ID NO: 492748 - DNA, 525 bp, Stenotrophomonas maltophilia
atgaacaacccactgcggatccgcccgatcaaatcaccggtcgtggctctcgtgaccctgatctgcctgatgccgctttgcgactacgcatctgcctggagccgcattggcgaagtcgagatcaccgaccacgccggcaaaccctgtttcggactacccaagaaagagcgcaagcgtatcggtaaaactccggaggtgtttggtgtggaggtgcatgacgcaattgctccaccgctgcggcggcaatggtctttctactttgcccatcccgcatcaatcccacttccacccggagcctgcgtggtctacggagaagtgccagtcaacgccatttcaaggcaagcggccatgccactgcagcccggacgcctgtacgacgtttcgctgtcggccaccaggaccggcgccacgcaataccacagcgcccgattctgcttgaaggccaaccccgacgggagcctgcgagcgatccaggtccactacgacgaggcactgggctggagcccctcggtttgcctgccctga

SEQ ID NO: 492749 - DNA, 1965 bp, Stenotrophomonas maltophilia
atgaaccacgacgctgcgcccaagcagctcaccttccgcgcagtggccctggccatcgtgctggcggtggtgctgtcggccgcaaacgcctacctcggtctgttcgcaggcctgaccatcgccaccgccattcccgccgcggtgatttccatgggcgtgctgcgcctgctgggcggtggctccatcctcgagaacaacatcgtgcagaccggcgcctcggccggttcgtcgatcgccgccggtgtgatcttcaccatcccggcgctggtgatcatgggctactggccggacttcaagtactggtgggtgctgggcatcgccggcctcggtggcctgttgggcgtgctgttctcggtgccgctgcgccgttcgatgattgtcgaagacccgcttccgttcccggaaggcaaggctgcggccgaagtgctcaaggccggtgagaacccgggcccgggcctgaagatcctcggcctgtcggcggtgatcggtgccttcgtcaagctggccgcggaaagcggcatgcgcctgattcccgatgcctgggccacctcggcctacgtcggcagctccaaggtcaccgccttcatcggcaccaacctgtcgccggcactgctgggcgtgggctacatcgtcggcctcaacgtcggcatcgtggtggtgtccggctcgatcctgacctggcacattgccatcccgatctaccaggcgttcttcatgaacaccgacccggcgctggccgcgtcggttgccgctgcctcgtccaccgaggccgcgttcgccatctggggcgcgaagatgcgctacctgggcgtcggtgcgatgctgatcggtggcatctggaccctgatctcgctccgcaagtcgctgctcaacggcgtcaagagcggctttgccgccgcccgcaagagcggtggcccggtgctggcgcacaccgagcgcgacctgccgatgaagtggatgctggtcgccctggtggtgttcgtgctgccgctgctggccctgtaccaggccatcgtcggccagtggcacgtgtccatcccgatgaccctcatcatgatcgtcgccggcttcctgttcgtctcggtctcggcctacctggctggcctgatcggctcgtccaacaacccggtttcgggcatcaccatctccaccatcctgttcgcttcggccgtgctggtggtgctgctgggcaaggatggcctgcagccggtcggcgccttcggcgcgccgctgggcgcggtggccgcgatcatgatcggcgcggtggtgtgctgtgctgcagcggtcggcggtgacaacctgcaggacctcaaggccggttacatcgtcggtgccaccccgtggaagcagcagctgatgctgggcatcggtgcgttctcgtgcgcgctgatcatggccccggtgctgaacctgctggccaccgcctacggcatcggcgtgaagtcggagctgcacccgaacgcgctggccgcgccgcaggccaacctgatggcctcggtggccaagggcctgttcggtggtgaactgccgtggaccttcatcggcatcggtgccgtggtcggtgccgccatcatcgcgttcgacagctggctgaagtcgcgcaacgcccgcttccgcgtgcctgtgctggccgccgccatcggcatctacctgccgctggaactgatggtgccgatcttcctcggcggcctgatcgcctacctggtcgagcgcttccacaaggtgcgtgccgatgacgaagaaggtcgcgaccgcgtgcacaagccgggcgtgctgttcgccgccggcctgatcaccggcgaagcgctgatgggcatcgccatcgcgattccgatcgtggtgagcagtcgcgccgacgtgctggccgtgccgttccacctgccgggcgcacagtggatcggcctggccgtgctgttcctggtctgctggctgatctaccgcaccggcaagcgcgccatggcgtaa

SEQ ID NO: 492750 - DNA, 2079 bp, Stenotrophomonas maltophilia
atgaaactgcgtcatgccctgctgccactgagcctgctggccgccctgcccagcgtcgccgctgcccgtggcctggaagtccgcgacatggtggccatggaccgcgtctccgcaccggtactgaccgctgacggcggcaccgtggtgttcgccaagcgcagcgtggatgccaacctgaaggcctccaccgcgctgttcgcgcgcaacctgcgtacccgcgatgcagcaccgccgaagcagatcaccccggccggctggaacgtcaattccgcttcgctgtcggccgatggccagaccgtgtatttcctcagcgccaggaacggcagccagcagctgtacgcgcagccggtcagcggcggcgccccgcgccagctgaccgacttcccggtcgacgtggacagctaccacgtgtcgccgcaggacgaccgcgtgctgttcagcgccggcgtgttccaggcctgtgcctcggacctgacctgcaccgagaagaagctcaaggacgtcgcgggcgccaaggccagtggaaaggtcttcgattcgctgttcgtgcgccactgggatacctggaacgacggccgccgcaacaccctgttcgtcgcgccgctgccggcagccaaggccggtccggtcaagggcgcttccgcgctgagcgccaccatcgacggtgatgccccgtccaagccgttcggcggcaatgatgatttcgcgtggtcgccggatggcgccagcgtggtcgccagcatccgcgtggccggcaagcaggagccgtggtcgaccaacttcgacctgtaccgcttcgacgcggcgggcaagcaggcgccggtcaacctgaccgcctccaacccggcctgggatgccggcccggtgttcagtgccgacggcaagaccctgttctaccgcgcgatgaagcgcccgggcttcgaggctgaccgcttcggcctgatggcgatggacctggccagtggcaagacccgcgagatcgccccgcagtgggatcgttcggctggcggcatcaccctgtccgccgacggcgccagcatctacaccactgccgatgacctcggcgaacacccgctgttccagatcgacgtggccagcggcaaagccaccaagctgatcggcgacggcagcgtgacctcggtggatgtggccggcaacagcgtggcgatcacccgcaacagcctgaagagcaacgaccaggtgctggttggcttgctgccggccgcgggcgaagccatcggcgagctgcgcgcgctgaccccggccgctggtgaggtgctcaaggatgtcagcttcggcgactacgaacagttcgagttcaagggctggaacaacgacaccgtgcatggctacgtggtcaagccgcacaactaccaggaaggcaagtcgtacccggtcgcgttcctgatccacggcggcccgcagggcagcttcggcaatggctggagctaccgctggaatccgcagacctacgcgggccagggctatgcggtggtgatgatcgacttccacggctccaccggctacggccaggcgttcaccgatgcgatcagccagcactggggcgaccgcccgctggaagacctgcagaagggctgggatgcggcgctgaagaagtattccttcctcaatggtgacaaggcctgtgcgctgggcgccagctacggcggcttcatggtcaactggattgccggcaactggaacagcccgttcaagtgcctggtcaaccatgacggcgtgttcgaccagcgcatgatgggctacgccaccgaagaactgtggttcaccgagtgggagcagggcggtacgccgtaccagaaggcggcgaactacgagaagttcaacccggtcaaccacgtggcggactggaagaagccgatcctggtcatccacggccagcaggacttccgcatcccggtcgagcagggcctggccgcgttcaccgctgcccagcgccagggcatcgaatcgaagttcctgtacttcccggatgaaaaccactgggtgctgaagccgaacaacagcatcctgtggcatgacaccgtcaatgcctggctgaagcagcacatcggcaactga

SEQ ID NO: 492751 - DNA, 1386 bp, Stenotrophomonas maltophilia
atggttgcggcgccgccctccggggcggcgcttctgtttcaccatctgctttaccggtgggtgccgaccgttggtcggcacaccttcctgatctgccgccaccagcagccggccagcggccggctctaccagagcgcctgcatgccttcgactgccctgatccagaacgacatcgtcgtcttcggtttgatcgccgccacccttggcgccgtgttctggaccgcctcgcgcgagcaggggctgtggaagcgcttctatacgttcgtgccagcgctgctgctgtgctacctgattcccggcatctacaacaccgtcggcctgatcgacggccagaacaccaagctctacaacccgatcgcgcgcgacatcctgttgccggcggcgctgatcctgctgaccttggcagtggatatcaagggcatcctgcggctcggcccgaagctggtactgatgtacctgggcgcctcggccagcatcatgctcggtgcggtggtggcgttcctggtgatgcgcgcgatccatcccgacaccgtggccggcgatacctgggccggcatggcggcactggccggcagctggatcggtggtggtgccaacatgctggcgatgcgcgaagtgttcgacgtcaacgcgaccacctttggccagttcgcggtggtcgatgtcggcgtcggttacgtgtggatggccgcgctgatcttcctggcaggacgtgcagcgaagatcgatgcacgcagtggcgctgatacctcggccatcgatgaactgaaggagcgcatcgcgcgcttccaggccgagcacgaacgcattcccagcctgaccgacctgatgctgatcgtggcggtggccttcggcggcgtcggcctgtcgcatgcgatcggtgcgccgctggcggcctggttcaaggccaacgtcagctgggcgtcgcagttcagcctggacgcgccgttcgtgtgggtggtggtgctgtcgaccacgctgggcctgagcctgagtttcacccgcgcacgcaacctggaaggggcgggtgcatcgcggctgggttcgttgctgctgtacttcctgatcgcctgcatcggcatgcagatggatctgctggcgctgctggatcgcccgtggctgttcctgcttggcctgatctggattgccgtgcacatcgtgctgctgtggtgcctgggcaagctgctgaaggtgccgttcttctatttcgccgtcggttcgcagtcgaacatcggtggcccggcctcggcgccggtggtggcggccgcgttccatccggccctggcgccggtgggcgtgctgctgggcacgatgggctatgccaccggcacctacctggcctacatcgtcggcatcaccctgcgcgcactggccgggcagggctga

SEQ ID NO: 492752 - DNA, 480 bp, Stenotrophomonas maltophilia
atgaccgatacgacaaccgccgtggacatcacctgcgtgggcgacatcgccttcgccgatgcgcagtgcctgctcgccgcgcatggcctgcggctgcaccacgtggcggccggcgagccgattcccggcagctactggggcgagcccgaggcgggcatcatcgccagcaacgtctacgtgcgcgatgacacgcccgtgcactcgatgctgcatgaggcctgccacctgatcgtactgccgccggagcggcgggcgcaggtgcataccgatgccaccgactcggtggccgaggaagacgcgacctgctacctgcagatcgtgctggccgggcagctgcccggcgtcggcagccagcggctgatggccgacatggatgcctgggggtatacgtatcggctgggatctacgaaagcgtggttcgagcaggacgccgaagacgcgaaggcatggttgatcgaacgcgggttgccggtggcgtga

SEQ ID NO: 492753 - DNA, 261 bp, Stenotrophomonas maltophilia
atgggcctgtttgatttcctcaaagcgaagaagaccaccgccgaaaccgccaagaaccgcctgcagatcatcatcgcgcaggaacgcagccaccgtggtggcccggactacctgccgctgctgcagcgcgagctgctggaagtgatcaagaagtacgtgaacatcgacgtcgatgcggtgaaggtcgacctggtgaaggatggccagcacgatgtgctggacatctccgtggcgctgcccgaaggcccggacaaaccctga

SEQ ID NO: 492754 - DNA, 810 bp, Stenotrophomonas maltophilia
ttggctgaaatcatcgtagtcacctccggcaagggcggcgtcggcaagaccacttccagcgcgagcctggcctgcggcctggcgcggcgcggcaagaaggtggcggtgatcgacttcgacgtcggcctgcgcaacctcgacctgatcatgggctgcgaacgccgcgtggtgtacgacttcgtcaacgtcgtgcacggcgaagccaccctcaagcaggccctgatcaaggacaagcgcttcgacaacctgtacgtgctggcggcctcgcagacccgcgacaaggacgcactgacccaggaaggcgtgggcaaggtcctgaaggacctggccgccgacggcttcgactacatcatctgcgactccccggccggcatcgagaagggcgccttcctggcgatgtacttcgccgaccgcgcggtggtggtggtgaacccggaagtgtcgtcggtgcgcgactccgaccgcatcatcggcctgctcgattcgaagacccacaaggccgaatccggccaggacgtgccggccttcctgctgctgacgcgctacaccccgctgcgcgtggaaagcggcgagatgctgagcatcgccgacgtcgaggaagtcctcggcctgaaggcgatcggcgtgattccggaatcgggcgacgtgctcaacgcctccaacaagggcgagccggtcatcctggatgtcgaatccgctgccggccaggcctatgaagacgccgtcgcgcgcatcctcggcgaagaacgcccgatgcgcttcaccaacgtcgagaagaagggcttcttcagcaagctgttcggagggtaa

SEQ ID NO: 492755 - DNA, 846 bp, Stenotrophomonas maltophilia
atggacacgcgcccggcagctgccggcgcaggcacagcggccgacggggacctgagcgtggcggtgaatttcgattacgaacaggccggtgaactgaagatcggccaggtgggcatcgccaacctgcgcatccgtacccttgatgtcgaacgcctcgtgcaggaaatgcgcgagcgcgtgacccgcgcaccgaagctgttcggccgcgccgcggtgatcctcgacttcggcggcctgagccaggtgccggacgtggccaccgcgcaggcgctggtggacggcctgcgcagcgccggggtgctgccggtggcgctggcctacggcaccagcgcggtcgacctgctctcccagcagctcggcctgccgctgctggccaagttccgcgcgcagtacgagcgtgccgagggggaaccggccccgccgccgcccgcaccggatccgcgccgggcagcccgtgccgaaccgaagccagccccagcgacgccggtggccaaggtggccgacgccgctgcaccgcagccgggccgcatgcagctgggcaacgtgcgttcgggccagcagctgtacgcggaaaactgcgacctgaccgtgatggccaccgtcggcgccggcgccgaggtcatcgccgatggcagcatccatatctacggcaccctgcgcggccgcgcgctggcaggggcccagggcaacaccgcggcacgcatcttctgccgtgatttccatgcggaactggtggccattgccggccactacaaggtactggacgatgttccggacaacctgcgcggcaaggccgtccaggtgtggctggaacaggaccagatcaagatcgctgcgctggactga

SEQ ID NO: 492756 - DNA, 597 bp, Stenotrophomonas maltophilia
atgtcgattgtcatccgcgacgtgcgcgagcacgagctcgattccgtcctggctttgaacaacaacgctggcctggccatccttcccctggatgcggcccgcctgcgcctgttctatgaaaccgctgagtatttccgcgtcgccgagcgcgacggcaacctggccggcttcctgatcggctttggcagcgacagccagcacgacagcagcaatttcgcctggttcaagcagcagctggacaccccgttcttctatatcgaccgcatcgtggtcgccagccgccgtcgtggcggtggcgtcgggcgtgcgttctacgccgacgcgcagagcttcgccgagctgcgctacccgcagatgacctgcgaagtcttcctcgaccatggcgccgatgccgccctgctcttccacggcagcttcggcttccgcgagctgggccagaacaccatgccgcaggtcgatgtgcgcgccagcatgctggccaaggaactgtgcagctacccgtgggtccaggagacctacggcgacaagctgccggatgtggcatggacacgcgcccggcagctgccggcgcaggcacagcggccgacggggacctga

SEQ ID NO: 492757 - DNA, 1197 bp, Stenotrophomonas maltophilia
atgttgggagtcctcagccatacccgcgtcctccgcctggccggcctgttcacctgggtcatggtcggcctgcccctggcgtactcgcagttcgagaacctgcacagccgcggtgacatgggtggctgggcgatcctgttgttcgtcgcctacctgtccttcggcacggcctactactggttgacccgtatcctgcgcagcgacagccacaccagctggctggaccgcggcctgctgctgttgctgacggtctcggcgctgggggtcagtttcctcagcggttcgggcctgggcagcatcctgatgatggtcgccgccggggtcattccgtggatgctgtcggttcggctgggggtgctgtggctgctggtcagccagctggcggtggcgccggtctattacctgctgctgcgcttcccgctgttcgaagcggtgatgcagtcgctgctgtacggcggcttctccatgttcatcttcgtgaccagcctggttgcacggcagcagaccgaggcccgcgacgagcagcgccggctcaattcggagctgcgtgccacccgcgccctgctggccgagagcgcgcgggtcaacgagcgcacccgcatttcgcgcgagctgcacgacctgctgggccaccagctgactgcgctgaccctgaacctggaggtcgccggccacctggccgagggccaggcgctggaccacgtgaagcgctcgcacgcgctggccaagctgctgctgggcaatgtgcgcgaggtggtcagccagctgcgcgagaccggcgcgatcgatctggccgcggcgctgcgcccgctgaccgagaacgtgccctcgctggacatccagctggagatcgaggatccgttgaacgtggaagacccgcagcgggcccacgtgctgctgcgctgtacccaggagatcattaccaacgcggtgcgccacgccagcgcccgccacctgtggatcaaggtgtaccgtgaagcccccgaccgggtggtggtggaggcccgcgacgacggcgtcggcgcggatatggtcaatgtaggcaatggcttgcgcggcatgcgcgagcgcctgcaacaatgtggtggccagctgcagatcgaaacccgtcccggagaaggcttccggctgcgggcgacggtgccggcaacggtgctggtggcggcccttaccaaggttcctgaaggagtgcgttga

SEQ ID NO: 492758 - DNA, 642 bp, Stenotrophomonas maltophilia
atgattcgcgtctgcctggtcgacgaccaaaccctggtgcggcagggaatccgctccctgttggcgctcgacgacggcatcgaggtggtggccgaggccggcgacggccggcaggcggtcgagctgataccgcaggtgcgccccgacgtggtgctgatggacatgcgcatgccggtgatgtccggtctggaggcactgcaggtgctgtcgcggcaggaacagctgccgccgaccatcatcctcaccacgttcgacgatgaccagctggtgctggccgggctcaaggccggtgccaagggctacctgctcaaggatgtcaccctggcgcagctggtcggtgccatccgtaccgtggccgacggcggttcgctggtgcagccggcggtgacccagcgcctgctgtccggcctggagcacatgcgcaacgagttcgtcagcctggaccgcccggacccgctgaccgaccgcgagaccgagatcctgcggctgatggccagcggcttctccaacaaggagatcgccaattcgctgggcgtggccgaaggcaccatcaagaaccacgtgtccaacatcctgtccaagctgggcgtgcgcgaccgtacgcgtgccgtactgaaggcgttcgaactccagctggtctga

SEQ ID NO: 492759 - DNA, 1074 bp, Stenotrophomonas maltophilia
atgacccgtattatcgagttcctgatcgccttggggatcgtggctggcctgttcgtcatcattggcgtatgtctgccgggcgagcgtcacatcaccgaaagcatcgagaccaaccgcaagatgacgatcgtgtacgacacggtcagcagcctgcgccgcttcaaggactggaacccgctggtactgcgcgatcccgccgttgaactgaagctgtccggcccggcctccggtaccggtgccaccctcgacttcacctccaaggacctgggcaccggttcctggaagatcaccgaagccgaagagaacaagcgtgttgtgatcgccatcgaagacgccaccaagggtcacgacaaggtcaccaccttcaacctggagccgaccggcaagggcggtcgcaacgtcaagatcacccaggactactcggtgaagtacggcttcgacctgttcggccgttacgccggcctgtatgtcagccgccagatcggcgacgacatcaagctgggcctgtcgcgcatcgccaacatgctcgcaaccgtgccgaacgtggactaccgcacgccggaagccccgctgaccgacctggccatcgttgaagtgccggccgagaacctgctggtggtcaacgccggcaacgtggaccgcggtcaggacaccatcaccaagtccatcaaggacaaccaggagtggatcaagcgcgtgatggaggccaatggccttgaagccgccggcccgttccgcatcatcaccaccgacttcggccaggagaagtacgccttcgacatcgcccagccggtgaagaagaagggtgctgaaggtgctgctgccgacgagctgaccgtcaagatcgacggcggcgctccggtcaagtacgtgcacgttgctccgcaccgttcggcgcatgcggcctacactggccacatggcgggtctggacgtggcccgcaacggcctgcgtgcctgggccgtgacttcgggcaacgaagtcatcgaccgcccgtacgaaacctggaaggacggcatcgacaagtcgttcactccggaagcgacctacgacatctactgggccgtcaagtaa

SEQ ID NO: 492760 - DNA, 372 bp, Stenotrophomonas maltophilia
atgttcaatctcgaacgtcgtgcacgtaagccgtccctgctggcctgcctgggggcgctgctggccgccgcctcgatcggcctgtccgcctacgcctcgcatggcgtggccgatccgctggcgcagcagcacctgaacatggcggcgctgtacgcgttcgcgcatggtgcggtactggtggcactcgggccgcgcgcgcacggggcgatcgcacacctggcgctgtacgtgctgctgctgggtgtgctgttgttttcaggcagcctggtgggcggggcgctgtggcagtggccgacgcggatggcgccgatcggtggcaccagcatgatggccggctgggtggtgctggcgatcaatgcgttgaggcggtga

SEQ ID NO: 492761 - DNA, 810 bp, Stenotrophomonas maltophilia
atgcaacgacgcgcccccctgctgatcaataccgaggccatcgagctgtggcccgcccacctgctgcgcgcacgaagcaacctggatgcccgcctgctgtcgcaggcacagtgggtgctgcgacgcaagcgcgatggccgctatctggcggcggtaacgacgcatggcgtgcattcgctggtgccacgcctgccgcgcgagcccggggccgaggacgcactggcgctgctcgatgcagcggcggcacgtccgttcggcgctgcgctgcaggaacagtggctgccgctggccgggctgcagcaacgcctgcagcaactgggcctggatgcacagcgctatgccgacgacagcggccttccgctggagcccgaaccgtgcctgctgcattttgccggccgcgaccgcttcggccggccgctatggctgcgccgtagcgccgcgcagggctggcgacggatgcgactgcaggcggcacgggatggcattgcgctggacgcgatctccggcttccgcagccatgcctaccagctgggcatcttcgagcggaagctggcacgtgggttgagcgtgacggagatcctgaaggtcaatgcagcgccggggttcagcgaacaccacagcggccatgcgctggacatcggcacaccgggcgatgccccggccgaggaatcatttgaagccaccgacgcgttcgcctggctgcaggtgcatgcgggcgggcatggcttccatctgagctacccacgcgacaacccgcacggcatcgtctacgaaccctggcactggtgctggaggccggccaacggctga

SEQ ID NO: 492762 - DNA, 594 bp, Stenotrophomonas maltophilia
atgggtgccagcgatccaaagcagtacgaggtggccgagagttcgccgttgcgcgtgctgtggatcgtgctgcccctgctcgccgccttcgtggcctgcctgtatgcgcagctgtacaaggcaccggccacggcgccctggatcgaagtaacgctgtcgccgccctggttccggatgggcggcagtgccgcctggagcctgctggtgatcgccgcgctcggtatcgggttgggcgcggcgttcttccgccgccgggtggaactggccgacgacgtgctggacgtgcgctcgacgatgtaccgccgccgcgttccggtggcacagctgcggctggaccaggccgaggtggtcgacctgcagcgtgaccgccgctatggcattcgtttcaagaccaatggctatgcgatgccgggcttctattccggccacttccgcctgcagggcggcggcaaggggttcgcgctggtcaccgaccgcacgcgcgttctcgccctgccggtcagcgatggcagcacgctgctgctcagcctggagcggccgcaggtgctgctggacgcactgcgcaaggtggccgcaccggcgcctcggcggtaa

SEQ ID NO: 492763 - DNA, 180 bp, Stenotrophomonas maltophilia
atgagcaagcgctggagctaccagacgatcgaggtcaagacgtccatgatgggccagctcaaggccgaggacatccagagcgaactgagccgccagggccaactgggctgggagctggtcaacatcatcatccccgcaccgatgcgcccggcgatgctggtattcaagaaggaggcctga

SEQ ID NO: 492764 - DNA, 180 bp, Stenotrophomonas maltophilia
atgagtgagaagaaagcctacccgctgcgcatcaatgccgacgtcctggccgccgcgcaacgctgggctgacgacgagctgcgcagcctcaacgcacagatcgaatacgtgctgcgcgacgccctgcgcaaggcaggacgcctgccgaaacccacgccatcttcgggggacaaggaatga

SEQ ID NO: 492765 - DNA, 882 bp, Stenotrophomonas maltophilia
atgaaagagaagtcgctgtcttccctcaacggcctcggcacgctggtcggcgccctgctcgtcggcctcgccggcgccgccctgttcgtggtgggcgtggcagccaaggccagcaccggctcgcccagcctgctgctgatgctgctgggcgccctgctggtggcgctgggcgtgttcatcctggccggtctgtacaccatccagcccaaccaggcggcggtccttagcctgttcggcaagtacgtgggcacggtgaaggacaacggcctgcgctggaacaaccccttctttgccaagcgccgggtcagccagcgcgtgcgcaacttcgagagcggcaagctgaaggtcaacgagctggacggcagcccgatcgagatcgccgcggtgatcgtctggcaggtggtcgacgcctccgaggccgtctacaacgtggacgactacgagagcttcgtacacatccagtccgaatctgcgctgcgtgcgatggccaccagctatccctacgaccagcacgaagacggccagctggccctgcgcagccatgccagcgagatctcccagcacctgaagaacgagctggccgaacgcctggccgacgccggcgtgcaggtgatcgacgcacgcatcagccacttggcctacgccgccgaaatcgcccaggcgatgctgcagcgtcagcaggccaacgcggtgatcgccgcacgcacgcgcatcgtggccggtgcggtgggcatggttgaaatggccctggccgaactgcagaagaacggcgtggtgcagctggatgaagaacgcaaggcgcacatggtcagcaacctgctgaccgtgctgtgctcggaccgcggtacccagccgatcgtcaacgccggttcgctgtactga

SEQ ID NO: 492766 - DNA, 1188 bp, Stenotrophomonas maltophilia
atggccaagcttggaacgccgttgtccccctccgccacccgcgtgctgctgctgggctcgggcgaactcggcaaggaggtggccatcgagctgcagcggctgggcgtggaggtgatcgccgccgatcgctatgccgacgccccggccatgcaggtcgcgcaccgctcgcacgtgatcgacatgctcgatgcgatggcgctgcgggcgctgatcgcccaggagcagccgcacctggtggtgccggaaatcgaggccatccacaccgagaccctggtccagctggaacaggagcagggcctgcgggtgatcccgaccgcgcgcgccgcacgcctgaccatggatcgcgaaggcatccgtcgcctggccgccgaaaccctgggcctgccgacctcgccgtaccgcttcgtcgataccgaggccgaataccgtgctgccgtcgccgccatcggcctgccgtgcgttgtcaagccggtgatgtcgtcctcgggcaagggccagagcaccctgcgcagcgaggcggacatcgccccggcctgggactacgcgcagaccggtggccgcgccggtgccggtcgctgcatcgtcgaaggcttcatcgatttcgattacgagatcaccctgctgaccgtgcgccatgccggtggcacctcgttctgtgcgccgatcggccatctgcagaaggatggcgactaccgcgaaagctggcagccgcagccgatgtcgagcgcggcactggcgcgtgccgaagagatttcgcgcgcgatcaccgatgacctcggcggctggggcctgttcggcgtggagctgttcgtgaagggcgacgaagtgtggttcagcgaagtgtcgccgcgcccgcacgacaccggcctggtgacgctggtatcgcaggagttgagcgagttcgcgctgcatgcgcgcgccatcctcggcctgccgatcccggtgatccgccagagcggcccgtcggcgtcgtgcgcgctgttggcacacggcgagggcgtgccgtacttcaacaacgtcgccgctgcattgcaggtgccggatactgccgtacgcctgttcggcaagccgagcgtgcatggccatcgccgcgtcggtgtcaccctggcgcgcgcggaaaccatcgacgaggcgcgcgccatcgcgcgagatgccgccgacgccatcggcgtcgaactgcgcccgtaa

SEQ ID NO: 492767 - DNA, 1215 bp, Stenotrophomonas maltophilia
atgaacatgacccgccgccatcccctgatcctcgccctggccctgctctgcggcgccaccgcccctgccttcgccacgtcccctgcgatgaccgaaaacccgtccgctgcgctgcgcctggccacctacaacacctcgctgtactccgatgacgccggtggcctgatcaaggagctggaaggcgacagcgaacacgcgcgcaagatcgccgcagtgctgcagcaggtgcgcccggacctggtgctgctgaacgaattcgacttcgacgacgcccatcgcgccgccgacctgttccagaagcgctacctggaggtcgcccagcccggcggcggcaagccgctgcacttcgcctaccgctatctggcaccggtcaacaccggcgtgcccagcggcctggacctggacaacaacggtgtggtcggtggcgaaggccgcagccgcggcaacgatgcctggggctacggcctgcacccgggccagtacggcatgctggtgctgtcgcgctacccgatcgacgaagccagggtgcgcagcttccagctactgaagtggagcgcgatgcccggcgcgatccgcccggtcgacccacgtaccggccagagcttctacaacgaccatgtgtggtcgcagctgcgcctgtcgtcgaagtcgcattgggacgtgccggtgaagaccccggccggcgtggtgcacgcgctggtgtcgcacccgaccccgccggtgttcgacggcccggaaaagcgcaacgcggcgcgcaaccatgacgaactgcgcctgtggcaggaatacctgtccaagggtgacaagccatggctgtgcgacgacaagggtcagtgcggcggcctggcgcaggacgcgcgcttcgtgatcctcggcgacctcaacaacgacccggtcgatggcgatggccgccatgaggcgatcgtcgaactgatcgagaacgcccgcgtgctgcgctaccccaccccacgcagcgtcggtggcgagcagaccagcctggcctatgcggccaagggcatcgagcgcaagggcgcaccgttccatgccaccggcgatttcggcccgaagtccggcacgatgcgcctggactacgtactgccctcgaccggtttcgagtacgtcggcagcggcatcttctggccggccaatgaaagcccggaagcgaagatcgccgacggcagcgaccaccacctggtgtgggtggacgtgcggtag

SEQ ID NO: 492768 - DNA, 756 bp, Stenotrophomonas maltophilia
atggcgatacatggcgacagagacgacgaactgcgacttttccagaccggcgagcacccctgcgggtactggtcggaccgggtggcacgcgacctggtgctggacccgaacgaccgccgcctcggcgcgctctatccactggcactgagctggggcttccgccgcagcggcgacctggtctaccggccgcattgcgcgcactgccaggcctgcgtggcggtgcgcataccggtggcccgcttcgccccggaccgcagccagcgccgctgtgccacccgcaatgacgacctggaggtgcggatcaccgccgccaccgcccgcgatgacctgttcgcgctgtaccaccgctacctcacccaccgccatgccaacggcggcatggacgaccacggcccgcacgagttcgagcagttcctgatcggcagctggtcgcacacccgcttcatggagatgcgccttcccggccacgacggccagcccagccagctgttgggggtagcggtgaccgacgtcaccgagcacggcctgtcggcggtctacaccttcttcgacccggaccacgccacgcgcgggctgggcaccttcgcgatcctgcagcagatcgagtgggcgcgccgcgagggcctgccgcacgtgtatctgggctactggatccgcggccaccagaagatggactacaagcgccgcttccatccgctggaagcctacgatggccgccgctggcacgatttcgacaaggatctggacgggcgctga

SEQ ID NO: 492769 - DNA, 561 bp, Stenotrophomonas maltophilia
atgatccgtacccccctgctgctggccctgctgctcggcacctccgcatccggtatcgcgctggcggccgacaccccggccacgccggcaccgcgcccggccaagctggacaccaacggtgacggcgtgatcgaccgcagcgaggcggccgccaacccgcgcctggccgcgaagttcgacgagctggacaagaacaaggacggcaagctctcgcgcgacgagctgccgcgctggcagcatggccgtcgtgaccacggcggtgagcgctgggccgcgctggacgtcaacaaggatggccgcatcagccgcgaggaagccaaggccgatccgcgcctggccgcgcgttttgaccagcttgatctgaacaaggacggctacctggacaaggccgaccgcgagctgcgcatgaagcagcatcgtgatgcctggttcgccgccgccgacaccaacaaggacggccagctgagcaaggccgagtttgatgcggccaagggcccgatgcatggtggcccgcgccatggcggtccgcgcgacggcggcgcaccgaagccgccgcgctga

SEQ ID NO: 492770 - DNA, 1218 bp, Stenotrophomonas maltophilia
atgacgacgttcgccgcatcgatcgaccagaccctggaacgcgaactgcccgccgccgccagcggttgccagcacgcctacggccgtatcgtgctggcctgccagaacacggtcaccgccatcgccctggccatcacccgcgaccgccaggccagcgaggacatcgcccaggaggccttcgtgaagggctggcagcagctgcaccagctgcgcagcgcgaccagcttcctgccgtggctgcggcagatcacccgcaacctggcccgcgactggctgcgtgcgcaacgcggccggccgctgaccggcgaggccgcggaggtggcgatgggcatggccgccgacccggccccaggtgcggccgatcgcctgcagcgggtggaagaggagatcgccgccgaggacatcatctccgccctgcccgccgacagccgcgaagtcctgttgctgtactaccgcgaaggacagcgctcgcaacaggtcgccgacctgctcgggctcagcgatgcggccgtgcgcaagcgcctgtcgcgtgcacgtgccctggtgcgcgaaggcctgctgcagcgcttcggcgaattcgcgcgcagtagtgcaccaagcgccgcattcgccaccgccgtggtgtcgatggtgctggtggccgcacccggcaccgccagtgccgcgatcctgatcggcaccggcgtcggcgtcggtggcagcaagctcggtctcggcggcgccagcgttgccggaggcaccgcgatgggatcgttgaccgccaccctgggccagctgcatgtgctgccggccgaaagctggggggcggtgatcgggggcgtggtgggtggcgcgatcggcagctacctcggcgggcgcttcctgatgtcgtacaccgaaactgcggcagagcgggccgatgtgcgccgcttcctctacctcaacatcaccaccggcatgttctggtgcctggcgatcctgctggctgtggtgctgcaggcaccggtctggacgcagctgacggtgctggcggtcgggttgggcgtggtcaactaccagtgcctggtgacgctgcagcgggtgatggcgccgatgatcgcgcgcgattcggcgcggcgcgggcgaaccggcatcaactggaagttcgaatcgatgtacggccgcaccgccatcatcgccatgaacctgatggtcattgcgcttgtggcgtactcgctgatgcgcagcggccgcctgtaa

SEQ ID NO: 492771 - DNA, 510 bp, Stenotrophomonas maltophilia
atgcgccagatcttcagcagccagcgcgtggaaaccgtcgaaggcgtggccgagctcctgcgcgggcatggcatcgacgtcaaggtgaccaacgggcgctcgtacaagacccgtcgccgcggccagttcagctataccgacctcggcaacgccaacgcctacccggcggtatggatcgtgcgcgccgacgaccagccgcgtgcacgcgagatcctgcgtgaggcgcgcctgctcgacaccacccgccgcgaccatccgaccgccgagttcgccttccgcgacacgccggaacagggcagcggcggccgcagctgggcctggcgcatccgcatcgccctgctggtggtgatcgccggcgtggcgctggtgatcggcctgcgccatcgcggtgccccggccccggcagcaccggcccctgccccgcaggcccagccgcagcaggcgcaaccggccccgcaggccgcaccggaagaggatgaagtccgggtccgcatccagccatcgaaataa

SEQ ID NO: 492772 - DNA, 921 bp, Stenotrophomonas maltophilia
gtggccgcccccttgaacgacacgcccgaacccgtcgtctccgagctgatagacctgctcacgctggagcggctggaggacaacctgttccgcgggcagagccgcgacatcggcaccaagtacgtgttcggcgggcaggtgctgggccaggcgctggccgcggcacaggccacggtcgacaacggccgccacgtgcactcgctgcacgcctatttcctgcgcgccggcaacatcgaccacccgatcgtctacgacgtggaccgtacccgcgacggcggcagcttctcggtgcgccgggtcaccgcgatccagcacggcaaggtgatcttcttctgcgcggcatcgttccagcaggccgagaccggcgccgaacaccagcacaagatgcccgaagtgccgcagccggaagacatcgaaccgaaccggccgctgccggccgaagtgctggagcggctgccgatcaaggtgcagcgctggctgtcgcgcggcggcccgttcgaattccgccacgtctacccgcgcgacgaactgaacccgcccaagcgcccgccctaccaccaggtgtggctgcgcctgagcgagccggtcggcgatgctccggaactgcaccaggccctgctggcctatgcctcggacttccacctgctgggcacggcgacgttcccgcacggcatcagctactaccacccgcacgtgcagatggcctcgctcgaccacgcgatctggttccaccgcccgttccgtgccgacgactggctgctgtactcgctggacagccccagcgcgcaggattcgcgcggcctggcccgcggccagttcttcacccgcaatggtgtgctggtggccagcaccgcgcaggagggcctgatccgcgtggttcccgaccaggctgccgcggccgccgtgccggccaaggagtaa

SEQ ID NO: 492773 - DNA, 777 bp, Stenotrophomonas maltophilia
atgacgacgctcatcgaggtgatcaaccatggccccatccgcgaactgcgcctggcgcggccgccggtcaacgcactggacaccgacctgtgccggcagttgatccatgccatcgagctggccatggccgaagacgcgcacggcatcgtgctgtcgggcagcgagcgcatcttcaccggcggcatggacgtgccgcacctgctctcgcatggcgatgacaagcacaagctgctggacacctggaacgccttctttggcgccgtacgcacgctggccgagagccgcatcccggtggtcgcggcgatcaccggccacgccccggcgggcggctgcgtgctggccctgtgctgcgactaccgggtgatggcccgcagcgccgatccgtcgcggccatatgccatcggcctgaacgaggtgcaggtgggcctgatcgcgccggagggcatccagcgcctgctgcgccgtgcggtgggcgtgcaccgcgccggcgtgctgctgaccaccggttcactggtaccggccgaacaggcggtgcagatcggcctggtggatgagctggcagagggggacctggtggtggcacgcgcgattgcctggctgcaggacctgctcaggcagccgcgccagccgatgctgctgacccgcgccatcgcccgcgccgacctgcacgtggcgctgcagccggacctgatccagctcgaccgcttcgtcgaggcctggttcgccccggacgcacagaacgccctgcaggcgctggtagcccggctgggcaaatag

SEQ ID NO: 492774 - DNA, 447 bp, Stenotrophomonas maltophilia
atgataaccaaaccattcgttggcgtactgtggcttctgtgtgcggccgcagcatcggcctcggcggcggaatcgggctgcgtcacggtggatcagggctgggcgcggttgccaccgaatccggcaatgccgatgaccgctggctacggcgtcatccacaacggctgcggcaaggcggtggtgatcaccggcgcgaccagcagcagcttcaatgatgtgtcgctgcacgaaaccacgatcacggatggggtcagccggatgcgcgcgatcgagcgcctgccgctggcgccgggtgcacgtgccgagctcaagcccggtggcctgcacctgatgctgatgcagggcaagggcgcgctgaaggaggggcaggcggtgccgctacggctgcagctggaaggcggcggcgaagcaagtgcgacgctggccgtacgcaaggctgcgccgtag

SEQ ID NO: 492775 - DNA, 726 bp, Stenotrophomonas maltophilia
atgatccaccagactgaactgcgcgacctgctgcccggcatggtccccttccccaccgacgtctttcccgccgaccaggcctggctcggccagcacctgctgccgctgctgaagatcgacctgggcgtgctgcggccggaactggccggccaggtggcgacgatgctgtgcccgatcgagccgtacgacggctgcatcggcgagaccaccgaagaacaccacaacgatttcaccgggaccaactggatcgccttcgaactgaccgccggcaaccagatgcgcttcctcggcaatgagggctatttcatcggcgaggcggtgcaggacaaggatgcgcaggagcacatcgcgcagatgcgcgacagctacgccaaggcccgcgattaccatgccgcgcacggccgtctcgcctgctactcgcgttacggcaagggtgaggccagcgaacgcgactacttggatacgctgggcggaccgataggcttcggcaactggaccgagaccgcggagattcccgcggccttcgaactgggcttcaccgacgctgccgatgatcccaacgctgcggacgatgccgaaacggtgatcatcacccgcaacggcaacaagttcttcgctgtggccggcgtagccggctacaactggtgcgccaccggcgccgacgcgatcgtgatgctgtacgagccggaaagccgcaccgtgctgttctcgtacgactggtcgtaa

SEQ ID NO: 492776 - DNA, 408 bp, Stenotrophomonas maltophilia
atgagcagcgaacacaagatcctggcccgcatcccgatcagcgtgcgctggcgtgacatggacagcatgggccacgtcaacaacgccaagtacatttcctacctggaagaagcgcgcgtgcgctggatgctgggcgtggacggcgtgtcgatgaccgaccgcatcgcaccggtggtggccgcgaccaacgtcaattaccggctgccgatcgtgtggcccaacgacatcctggtcgagctgttcgtcgagcgcctgggcaacagcagcgtgaccatcggccaccgcatcgtcgaccagcacgacgcgtcgaagctgtactcggacggcaacgtggtggtggtgtggatggatacgcagaccggcaagagcgcgccgctgccggaggcgatccgcagcgcctccacctga

SEQ ID NO: 492777 - DNA, 2994 bp, Stenotrophomonas maltophilia
atggcgatggatttcatccgcatccgcggcgcgcggacgcacaacctgaagaacctcgacctcgacctgccccgcgacaagctgatcgtgatcaccggcctgtccggctcgggcaagtcctcgctggcgttcgacaccatctatgcagaaggccagcgccgctatgtcgagtcgctgtcggcctatgcgcgccagttcctgagcgtgatggaaaagccggacctggaccacatcgagggcctgtccccggcgatctcgatcgagcagaagtcgacctcgcacaacccgcgttcgacggtcggcacgatcaccgagatctacgactacctgcgcctgctgtacgcccgcgtcggcaccccgcgctgcccggaccacggctatccgctggaggcgcagacggtcagccagatggtcgaccaggtgctgaccctggacccggaacagcgctacatgctgctggccccggtcatccgcgaccgcaagggcgagcatgcccaggtgttcgaccagctgcgcgcgcagggtttcgtgcgcgtgcgcgtggacggcgagctgcatgaaatcgatgcggtgccgccgctggcgctgcgccagaagcacaccatcgaggcggtgatcgaccgcttccgcccgcgcgaggacatcaagcagcgcctggccgagagcttcgagaccgcgctgaagctgggcgacggcatggcctcggtgcagagcctggacagtgccgacgcttcgccgacgctgttctcctccaagtactcctgcccggtctgcgattactcgctgccggagctggaaccgcgcctgttctcgttcaacgcaccgatgggcgcctgccccggctgcgacggcctgggcatggccgaattcttcgatccttcgcgcgtggtggtgcatcccgagctgtcgctggccgccggcgcggtgcgcggctgggaccgccgcaacgcctattacttccagctgatcgcctcgctggccaagcactaccggttcgacgtcgacgcggcatggaactcgctgccgcagaacgtgcagcaggccgtgctgtacggcagcggcgatgaggcgatcaccttcacctacttcaccgaagccggtggccgcacccagcgcaagcaccgcttcgagggcatcattcccaacctcgagcgccgctacaaggaaaccgaatcgccggcggtgcgcgaagagctgtccaagtacatcagcgaacagccgtgcccggaatgccatggcgcgcgcctgaacaaggcggcacgcaacgtgttcgtggccgaccgcccgctgccggagctggtggtactgccgatcgacgaggcgctgaagttcttcagcgaactgagcctgccgggctggcgtggcgagatcgccgcgaagatcgtcaaggaaatcggtgagcgcctcggcttcctggtcgatgtgggcctggattacctgaccctggaacgcaaggccgacaccctgtccggtggcgaggcacagcgcatccgcctggccagccagatcggcgccggcctggtcggcgtgatgtacgtgctcgacgagccgtcgatcggcctgcaccagcgcgacaacgagcgcctgctcggcaccctcacccgcctgcgcgacctcggcaacacggtgatcgtggtcgagcatgacgaggatgcgatccgcctggccgactacgtgctggacatcggcccgggcgcgggcgtgcatggcggcgagatcgtcggccagggcaccctgcaggacatcctggaggcaccgcgctcgctgaccggccagtacctgtcgggcaagcgcgcgatcgagatccccgcgcgccggcacaagccgaacccgaagatgaccctgcacctgcgcggggccagcggcaacaacctcaagggcgtggacctggcgattccgtcgggcctgctgacctgcgtgaccggtgtatccggctccggcaagtccaccctgatcaacgacaccctgttctcgctggccgccaacgagatcaacggttcctcgcacccgatcgccccgtacaaggagatcgatggcctggacctgttcgacaaggtggtggacatcgaccagtcgccgatcggccgcaccccgcgttcgaacccggccacctacaccggcctgttcacccccctgcgcgaactgtttgcacaggtgcccgaagcgcgtgcgcgtggctattcgccgggccgtttcagcttcaacgtgcgcggtggccgctgcgaagcctgccagggcgacggcctgatcaaggtggagatgcacttcctgccggacgtatacgtgccctgcgacgtctgccatggcaagcgctacaaccgcgagacgctggagatcctgtacaagggcttcaacatcaacgacgtgctggaaatgaccgtcgaggatgcactgaagctgttcgaaccggtgccgtcgatcgcacgcaagctggaaaccctggtcgacgtcggcctgagctacatcaagctgggccagagcgcgaccacgctgtccggtggtgaagcacagcgcgtgaagctgtccaaggaactgtcgcgccgcgataccggccgcaccctgtacatcctcgacgaaccgaccaccggcctgcacttccacgacatcgaagcgctgctgggcgtgctgcacaagctgcgcgacgaaggcaacacggtggtggtgatcgagcacaacttggacgtgatcaagaccgccgactggatcgtcgacctgggtccggaaggcggccaccgcggtggcaccatcctggtcaccggcacgccggaagacgtggcggcctgtccgcagtcgtataccggccagttcctggcgcgcatgctgccgtccaccagcgcgcgcccggaacagccggctgccgtggccaacaagcccgacgcccgcccgccacgcaaggtgaagcctgagaagccggccaaggttgccaagaaggccgcggccgccaagagcaccggcaaggccagcaagagcacatcgaagaagaaggacgcctga

SEQ ID NO: 492778 - DNA, 309 bp, Stenotrophomonas maltophilia
atgtacgcagtactggtcaccggcggtaagcaataccgcgtggcgcagggcgaaaagctccgcattgaaaagctcgaagtcgaagtcggcagcgagatcaagtttgacaacatcctgatgctgggtgacagcgacggcgtgaagctgggcgatgcgctgaagggcgctgccgtcaccgccaaggtcctgtcccagggtcgtgctgacaaggtccggatcatcaagttccgtcgccgcaagcaccacatgaagcgtcagggtcaccgtcagtactacaccgaaatcgagatcaccggcatcgccggctaa

SEQ ID NO: 492779 - DNA, 264 bp, Stenotrophomonas maltophilia
atggcacataaaaagggcgtaggctcctcgcgcaacggtcgcgactccaacccgaagtacctgggcgtcaagatcttcggcggccaggccatcgaagccggcaacatcatcgtgcgtcagcgcggcacccagttccacccgggcaccggcgttggcctgggccgtgaccacaccctgttcgccctcgtggacggcaaggtggagttctcggtcaagggcgccaagaagcgtcgcaccgtcagcatcgtctcggccgacgcctga

SEQ ID NO: 492780 - DNA, 1053 bp, Stenotrophomonas maltophilia
atgaaactggtagacgaagcagaaatcgaagtgttcgccggcaacggcggcaacggctgcattggcttccgtcgcgagaagttcattccgctcggcggcccggacggcggcgacggcggtgcgggcggcagcgtgtacatccgcgccgacgaaaacctgaacaccctggtcgacttccgccatgagcgtatcttcaaggcgcagcgcggcgagaacggcatgggccgccaggcctatggcaagggcggcgaagacctgaccatcaccgtgccggtcggcaccgtggtcatcaacgttgccaccgatgaagtcatcggcgacctgacccagcacggggaccgcctgctggtggccaagggcggtcgcggtggcctgggcaacatgcacttcaagagctcgaccaaccgctcgccgcgccaggcgctgccaggcgagccgggcgaagagcgcacgctgaagctggagctgaagctgctggccgatgtcggcctgctgggcttccccaacgccggcaagagcaccctgatccgtgccgtttcggcggcaacgccgaaggtggccgattacccgttcaccacgctgtacccgaacctgggcgtggtgaaggtggagaaccaccgcagcttcgtgatcgccgacattccgggcctgatcgaaggcgctgcggacggcgccggcctgggtgcgcagttcctgcgccacctgcagcgcacccgcctgctgctgcacctggtggacatctcgccgatggaaggcggcgtggagggcatttcgccggtggagcaggtgcgtgcgattgaacgcgagctggagaagcacgatccggagctgctgaacaagccgcgctggctggtgctgaacaaggctgacctgatgttcgaagacgaggcgcaggccgcggccgagcagatcgtcgccgagctgggctggaaggagccgtggttcctggtttccgcgctgggccgcgaaggtaccttcccgatcatgagccggatcatggccttcttcgatcgccagaaggaagacgagctggaagcccgcaacgcgcagtga

SEQ ID NO: 492781 - DNA, 270 bp, Stenotrophomonas maltophilia
gtggccaatatcaagtccgccaagaagcgcgccaagcagaccgtcgtgcgcaacgcgcgcaacgtggctcagcgctcgatgctgcgcaccgctgtcaagaaagtgatcaaggcgctggacgccaacgatgccgccggcgccgaagccgccttcgccgttgcccagccgatcctggatcgcttcagcgcgcgtggcctgatccacaagaacaaggctgctcgccacaagagccgcctgaacgaccgcatcaaggccctcaaggccgcctga

SEQ ID NO: 492782 - DNA, 1605 bp, Stenotrophomonas maltophilia
atgttgcggggcctgctgtcgttcagcagcatgaccatggtctcgcgggttctcggacttgtccgggatcaggtgatcactaccacgttcggcaccaatgcggttaccgatgcgttctgggttgccttcaggatacccaatttcctgcgccggttgttcgcggaggggtccttctccaccgccttcgtgccggtgttcaccgaggtgaaggagacccgcagccacgccgaactgcgtgagctgatgtcccggaccgccggcaccctgggcggggtgctgatgctggtcaccgccctggcgctgatcttcgcgccgcagctggcggtggcattctcaagtggtgctgataccgatccggtcaagcagaccctgctggtcgacctgttccgcctgaccttcccgttcctgctgttcgtgtcgctgaccgcgctggccggcggtgcgctgaacagcttccagcgcttcgcgatgccggcgctgaccccggtcatcctcaacctgtgcatgatcgccggcgcgctgtggctggcgccacgcctgggcggcacgccggaaaagcagatcctggcgctgggctgggcggtactggcggctggcctcctgcagctgctgttccagctgccctcgctgaagggcatcaacctgctgaccctgccgcgctggggctggaaccatccgggggtgcgcaaggtgctgacgctgatggtgccgacgctgttcggttcgtcggtggcgcagatcaacctgctgctggataccctcatcgcggccaagctgaccgacggctcgcagtcctggctgtcgctggccgatcgcttcctggagctgccgctgggcgtgttcggcgtggcgctgggcacggtgatcctgccggcgctggcccgccaccatgtcagcaccgaccgcgagggcttctcgcgctcgctggactggggcctgcgcatgaccctgctgatctcggtgccggcgatgctgggcctggtgctgctggccgagccgctgatcgccacgctgttccagtaccgccagttcaccgcgttcgatacccgcatgaccgcgctgtcggtgtatggcctgagcttcggcctgccggcgttcgccctgctcaaggtggtgttgccggccttctacgcccgccaggacaccaagaccccggtgcgcgccggtgttgccgcgctggtggccaacatggtgttcaacttcgccctgctggccgtgctgtaccaggtgatggtgcccgacgcgctgaaggcgcagggcgtgatggcggcgatcggcaagcagccgggcctgcacctggcgctgggcattgccagtgcgctgtccagttacctgaacctgggcctgctctggtactggctgggcaagaccgacgtctaccagcggcggccgggctggggcggctatctggtgcggctgggggtggcctgcgtggccatggtcggcgtgctgctggccctgctgcactgggtccccgacttcaccggcatggacaaatggcaccgtatcggtggcctgatgctgctggtcggcggcggcggcgcgacctacgtggtggccatgctggcgatgggcttccgcccgcgcgacctgcgcgggcattga

SEQ ID NO: 492783 - DNA, 948 bp, Stenotrophomonas maltophilia
atgagcaggctgttcagaagcgtcgagggcggggagctgttccccaacggaagcgtggtctgtatcggtgcattcgacggcctccacctgggccatcgtgcgctggtccgccacgcggttgcccgcgcgcgcgccttgggcgtggccgcagtggccgtggcattcgagccgctgccgcgtgaattcttcgcccagggcacgccgccgccgcggctgaccctggcgcgcagcaaggtcgagatcctgcgcgagctcggcgtcgatgcgatcggcctgctgcgtttcgacgcggcgatggcggcgatgccggccgagaccttcgtgcgccggttgctggtgcaccggctgggcgcccgcgaagtgtggatcgggcccgagttctgcttcggcaaccgccgccgcggtgatctggcactgctgcaggggatgggcgccgaactcggcttcaccgcgggcgagatcgaagcggtggacctgcatggcgagcgcatctccagcacccgcatccgccagctgctgcaggagggcgatttcgcccgcgccaacgacctgctcggccgcccctacgcgatcagcgggcgggtggtgcgcgggcgccagctcggccgtacgctgggcttccccaccgccaacctgcgcttcccgaagaccccggcactgtcgggcatctacgcgacctgggtgcacggcgtgttcgaccagccctggccttcggtgtccagcttcggtacgcggccgacggtggagggcgtggagccgctgctggaagcccacctgttcgatttccagggcgacctgtacggccgccacatcgacgtggagttcgtcgccaagctgcgcgacgaagagaaattcaatgatctggcggcgctgaccgaccagatgcaccgcgacgccgaacaggcgcgcgccatcctttccgaacatagattgcgagccactgcgtga

SEQ ID NO: 492784 - DNA, 2832 bp, Stenotrophomonas maltophilia
gtgagccaggactacaagaccaccctgaacctgccagccaccgaattcccgatgcgcggcgacctgcccaagcgcgagccgggcattctggcgcggtgggaagagcaggggctctaccagcagctgcgcgacaacgccgccggccgcccgctgttcgtgctgcatgacggcccgccatacgccaacggccgcatccacctgggccacgcggtcaacaagatcctgaaggacatcatcgtcaagtcgcgctacctggccggcttcgatgcgccctacgtgccgggctgggactgccatggcctgccgatcgagatcgcggtcgagaagaagtggggcaaggtcggcaccaagcttgacgccgtcgaattccgccagaagtgccgcgagttcgccgaagagcagatcaacatccagcgcgtggacttcaagcgcctgggcgtgaccggtgactgggacaacccgtacaagaccctgagcttcgatttcgaagccaacgagatccgcgcgctggccaaggtcgtggccaacggccacctggtccgcggcgccaagccggtgtactggtgcttcgactgtggctcggcgctggccgaggccgagatcgagtaccaggaaaaggaatcgccggcgatcgacgtcgcctacgctgcacgcgatgcgcaggccatcggccaggcgttcggcgtgagcgtgccggtcgacgtcgaagtggccgtaccgatctggaccaccacgccgtggacgctgccggcctcgctggcggtgtcgctgggcgcggagatcaactacgtgctggccgaaggcccggcccacaacggcaagcgccgctggctggtgctggccgcggccctggccgagcgcgcgctgcagcgctatggcgtggacgaagtggtgctgcacggtgaaaccaccggcgctgcgctggaaaaccagctgctggcgcatccgttctacccggagcgcgagatcctggtgctcaatggcgaccacgtctccgacgaggacggtaccggtgcggtgcacaccgcccccggccacggccaggaagacttcgtggtcagccagaagtacggcctgctggacaagtacaacgctggccaggtcactccgatcgacggccgcggcgtgtacctggaatcgaccccgccggccggtgacgtggtgctggctggccagcacctgtggaaggcgcaggaggccatcgtcggcgtgctgcgcgacaacggttcgctgctggcgttccatccgatccgccacagctacccgcactgctggcgccacaagacgccggtggtgttccgcgccaccccgcagtggttcatctcgatggacaaggccaacctgcgcaacgatgcgctggccgccatcgacaccgtcggctggttcccgacctggggcaaggcgcgcatccagagcatggtcgacggtcgcccggactggaccatctcgcgccagcgcacctggggcgtgccgatcgcactgttcacccaccgccagaccggcgagatccatccgcgttcggtggagctgatgcagcaggtcgccgaccgcgtcgaagccgagggcatcgacgtgtggtattcgctggacgccgccgaactgctcggtgccgacgcggccgactacgagaaggtcaccgacatcctcgacgtctggttcgattcgggcgtgacccatgaaggcgttctcgccgcgcgtggcttcggcaagccggccgacctgtacctggaagggtccgaccagcaccgcggctggttccagtcctcgctgctgaccggcgtggcgatcgacaagcgcgccccgtacaagcagtgcctgacccacggcttcaccgtggacgagcacggccgcaagatgtccaagtcgctgggcaatggcatcgagccgcaggacatcatgaacaagctgggcgcggacatcctgcgcctgtggatcgcctcggccgactacagcaacgagatgtcgctgtcgcaggagatcctcaagcgcaacgccgacgcctaccgtcgcctgcgcaacaccgcacgcttcctgctcggcaacctggacggtttcgacccggcgcagcacctgcaaccgctcgagcagatggtcgcgctggaccgctggatcgtgcatcgcgcgtgggagctgcaggagaagatcaaggcagcctacgacggctacaacatggccgagatcgtgcagctgctgctgaacttctgcagcgtggacctgggctcgctgtacctggacgtgaccaaggaccggctgtacaccatgccgaccgattcgcacggtcgccgttcggcccagagcgcgatgtaccacatcgccgaagcgttcacccgctgggtggcgccgatcctgaccttcaccgccgacgagctgtggggctacctgccgggcgaacgcgccggccacgtgctgttcaccacctggtacgacggcctggcgccgttgccggccgatgcccagctcaatgccgccgacttcgaccagctgctggccgtgcgcgagcaggtggccaaggtgctcgagccgatgcgcgccaacggtgcgatcggtgcggcgctggaagcggagatcaccatcgccgccagcgaagaacaggccgcgcgctggcagccgctggccgatgaactgcgcttcctgttcatcagtggcgacgtgcaggtgcgcccggcgaccaccgacgaggtgttcgtcagcgcccagccgaccaccaaggccaagtgcgtgcgctgctggcaccaccgcgccgacgtcggcagcaacgccgaccatcccgagctgtgcggccgttgcgtgagcaacgtgaccggcgccggcgaagtgcggagttggttctga

SEQ ID NO: 492785 - DNA, 525 bp, Stenotrophomonas maltophilia
atggccgcgccccgtccgcatccgaacgccctggtctggctgctgctgtcggtggccatcatcggcctggaccagtggtccaaggcctgggtgctgtccagcctgccggagttccagccggtggtggtcatcgacggcttctggaactggtaccgcacctacaacaccggcgcggcattcagtttcctgagcgacgccggtggctggcagaagtacttcttcaccgcgctggcgatcgccatcagcgggctgatggcgtggtggctgcgcggcaccgcccgcggcaactggaaggccgcggtgccgtatgcgctgatcatcggtggcgccatcggcaacgtgatcgaccgccaggtgcacggccacgtggtcgacttcatccagtggtatgtgggcagctacacctggccctcgttcaacatcgccgactcggccatcgtggtgggtgccgtcggcatcgcgctgtttggcctgttcgacggcaagtccgccaaaaaggcggataatgccaacccgaaaccgtaa

SEQ ID NO: 492786 - DNA, 951 bp, Stenotrophomonas maltophilia
atggatgtgctgctcgccaacccgcgtggtttctgtgccggtgtcgatcgtgcgatcgagatcgtcaagcgcgcgatcgaaacgctgggcgcgcccatctatgtccgccatgaagtggtgcacaaccgcttcgtggtcgacgacctgaagcagcgcggcgcgatcttcgtcgaggaactcgacgaagtgccggacaacaacaccgtgatcttcagcgcgcatggcgtgtcccaagccgtgcgccaggaagccgagcgccgtggcctgaaggtgttcgacgccacctgcccgctggtgaccaaggtccacttcgaggtcgcccgccactgccgtgccggccgtgacgtggtgctgatcggccacgccggtcacccggaagtggagggcaccatgggccagtggaaccgcgaagccgggaccgggcagatctacctggtcgaggacgtggagcaggtcgccacgctgcagatcaaccagccggaaaacttcgcctacaccacccagaccacgctgtcggtggatgacacgcgcggcatcatcgatgcgctgcgcgagcgttttccggcgatgcagggcccgaagaacgacgacatctgctacgccacgcagaaccgccaggatgccgtgcgcgacctggccaagcgctgcgacctggtgctggtggtcggttcgccgaacagctccaactccaaccgtctgagcgagctggcccgccgcgaaggcgtggaatcgtacctgatcgatggtgcgcacgagatcgacccggcatgggtggcaggcaagcagcacatcggcgtgaccgccggcgcctcggcgccgcaggtgctggtcgatggcgtgctggcgcgtctggccgagctgggcgccaccggcgtgggcgagctggacggcgaaccggaatcgatggtgttcgcgctgccgaaggaactgcgcctgcgcctggtcgactga

SEQ ID NO: 492787 - DNA, 579 bp, Stenotrophomonas maltophilia
atgccaactatccttggtgaattcgtgagagtgcccctgaaagcactactcatcttgtctgcggtcattcccctcgcagcggttgcggtgacacctccttctcaaatgtggagtgccgcctcaagggactcccaactggcagcactggattacatcgagaggctggaggtggtgcgaagtgctgggccgcaggccgccgctgatgcattgggtattgagaatggcttccgcgcgaactccgcttcggcttccggcatcgcccgcaatttcggcgatatcgcgcttctgccccaacttgaacagcgatccggccaggtaacgatcgtcgtgaaggcgtcgggcggatgcatcgagcgggatgttgccaaggctagactgctcctcggaaaaatcgtatgggcgccgttggccgattcccccgcgccggtgtttggttatgcacacttccagggcggctccgcatcgacagtgtttttcgatgcgaccggctccaagtgcttgaccggtgtgaggatcgaagatccgacgagattgaagggggccattgaggcggcttacaaagaaggcgcatcaaactag

SEQ ID NO: 492788 - DNA, 1884 bp, Stenotrophomonas maltophilia
atgaagacccgagccctggcgatgtcgttgctgttcgcgctggcggccacgcctgcacttgcgcagacctcgccaccggccaacgcggcagccccaggactgctgcgcatcgatgtggacgcgcgcgatctggcccggcgcatcttcaaggtgaccgccaccgtgccggccaagcccggcccgatgaccctgctgtacccgcagtggattcccggcaaccattcgcccaccggcccgatcgacaagctggccggcctgcgcgtgaccgccaacggcaagccgctggcctggcagcgcgatcagtacaacgtctatgcgttcaaggtgaacgtgcccgagggcgccagcgagatcgtcgcccacttcgatttcctgtcctcgcagggtggcagccagggccgggtggtgatgaccccggagatgctcaacctgcagtggaacgccaactcgctgtatccggccggcatcgacgcgcgccagctgcaggcgcaggccagcgttaccctgcccaagggctggtcgttcgccactgcattggagaccgcgcgccgcgacggtgacaccgtggtgttcaagccgatctcctatgaccatctggtcgattcgcccttgtttgccggcgagcactaccagcgcatcgatctcgatccgggcgcgaaggtgccggtgcacctcaacgtgtttgccgacgacgccaaatcgctgaagccgagcgaggcgcagatcaccatgcaccgcgcgctggtgcagcaggccgacaagctctacggcgcgcggcactacaaccactatgagttcctgctggcattgaccgaccgcctcggtggcatcggcctggagcatcaccgttccagcgagaacagcgccgacccgggctacttcaccgagtgggacaacaacgcgtggatgcgcgatctgctgccgcacgagtacacccattcctggaatggcaagtaccgtcgcggcgccgatctggccaccgccaacttcaacacgccgatgggcgatagtctgctgtgggtctacgaaggccagacccagttctggggccaggtgctggcggcgcgttcagggctgtggtcgaccgcgcaggcgcgcgacatgctggccaacgtggccgcgacctatgaccgtggtcgcccgggcctggcctggcggccgctgcaggacaccaccaatgacccgaccatcgcgcagcgccgcacgctgccttaccgcaactatcagatgagcgaggactactactccggcggccagatgctgtggctggaagtggagggcaagctgcgcgaactgagcggcaaccggcgtagcctggatgacttcgcacgtgcgttcttcggcgtcggcaacggcgactgggacgtcaacccgtacaccttcaacgacgtggtcgcgaccttgaacggcatagcgccgtatgactgggcgacgttcctgcgcgggcgcctggacggccacggctcgttgaccggcggcctggaactggcgggctggaagctggtctaccgcgatacgccgaacgatgcctacaaggcgcaggaaaaacgcgccaaggcggcgctgctggcgtactcgctgggtgcgaccgtgctcgacagcggcgtggtcggcgacgtgatctgggacagcccggcgttcaatgccggcctggcgccgggcatgaaggtgattgccgttggcgggcgcgagtacagcagccagcgcttgaaggatgcggtagctgcggcggcgaaggacaaggcgccgatcgtgctgctagtgaagcagttcgaccgcatcgaaacgatgaacatcgcctaccacggtggcctgcagtacccggtgctggagcgtatcgccggcaagcctgaccgccttgcggacctgtggaaggcacgatga

SEQ ID NO: 492789 - DNA, 690 bp, Stenotrophomonas maltophilia
atgaaaccgcgcgcccgcgatggcgtgatcctgttgatggcgatcctcgccatcctcggtgcgttcctgcacggtgacgggcgctggctgcattggttggccaagccgaccaccacgctgctgatcgctgccatcgcctggcgggtgcgcgatcccgcgcagccgttctaccgccgcgcggtgctggctggcatgctgctgtcgtgcgtgggggatatcgcgctgatgttgccggtggatgcgttcgtgccggggctggtcgcgttcctgctggtgcacctctgctacatcgtcgccttccgcgatggcctgcgtgccggacgtggcctgcttgccgccagcgtcctgctcggcgcgttcgctgtactcaacgtgcttggcctgtggccgcacctgcccgcacccatgcgcattccggtgctggcatacgtggtggtgctggcatcgatggcggtcctggcgctcgcacgccagtggcgcagccccaagcccgatgctgtggatgccagcagctcccgctgggcggccgccggtgcgctgctgttcgtcgccagcgactcgctgctggcctgggaccgcttcgccggcggcctgccactggccagcctgctggtgctgtccacctactacggcgcgcagtacgccatcgcccgctccgtgaaacagcaaaaaggggacggaggggattaa

SEQ ID NO: 492790 - DNA, 708 bp, Stenotrophomonas maltophilia
atgaagcagccgccctcgacccggctggtgttctccgtggtgttgctggtgctggccggcgtcgccgtggctggcggagccctgcagacgctgggcgaaacactgggccattcggtgcaggccaacagcgcaagcgcgccgatcgccatgccgccagcgcgcgagaggcccgcttcgctcgcgccgatgaccgagccgcggttgccgccggtgcccgaacgcaacaaccggttgttcgatgcggactacctgctggccgcccgccaggcactggaacagatgcctgcgctggccgggcaccggctgacggtattccacagcatccacttctacgacgatggccggatcaatctggacctggtggatcctcagcagccgtcacgcgtggacagctaccacttcgaacgcggccagtggcgcaagggcgacccggtcaatccgcagcgcttcgcgcccaccatcaccctgcgccgcagcagcacggcgctggccaacatcgatttcgaggcggtgccgcgcgtagcccaggcactgcaggcacagcgcaacgcattgatgggcactcccggtgaagtcggccacgtctatgtgatcgtgcgcaagggtggcactctggtctggctgccggacgaggtcgccggtgatcgccagtccgcacgcctctctttcgacgcagagggccgttccggcaacgccagcctccgatag

SEQ ID NO: 492791 - DNA, 957 bp, Stenotrophomonas maltophilia
atgaaggcctatctctggttctggggcgcgttcctgctgttcttcgcgttgcccttcccctgcatcctctatgtcggcacgtcgtggccggtgcaactggccgaccgcagcgcaccctggctggccctgctgctgctcgcgctgtcggtgatcctgtggctggccctgctgctcgccttcctgcactacctgctgctgggcccgccgcgcgcgctgcatcgggtgcgcaccatcctggccggcggtgagccgcgcgacgcgttgatcgaacaggccgagcagaccggcgtgcacgtgcgcggcttcgcgcagtggaagctgcaactgggcttccagaacctgtccggcacgcccatcaacgaacagatgctggtggtggacagcaagccgcagctgcagcgtttcgtggccggcaagcgtatcgaggtacgcctgagccggatgccgggcgcgttccccaacgtggtgctggagggtgcccagcctgaactggatgtcgccagcctctggcgtcgtggtgtcggcgcagcgatcggcatcgtggcggtggccagtgcctatgtggccgcctatcggctgcagagtgagggactgggctggaccttcctgtcgctcggtcatccgctgctggtgtgcccgctggtgttgtgcggctacgcgctgggcctgcgcctgctcggccggctgctgcaggccgacgcccgcggtgacgcgctgaagtatcgcggcatcggcgtggatgcgaaggtgctgaagctgcgccagaccggcacctatctcaacgagcagccgcaggtggagttccagctggaatacatcgaccgcgaaggtggcgtgcagcaggtgagcgtgcgccgcttcatcccgttgatcgagctggccaatcttccgcacgagcgggtcacgctgttgtacgacccggaagatcgccgcaacgttcgcctggagggtgtatga

SEQ ID NO: 492792 - DNA, 2799 bp, Stenotrophomonas maltophilia
atggcagtaccgggcgcgctgcagggggggctgctgctccgcaccctgttctgcctcgcgttaggcatccccgcgctgccgtctgccgctgcggccgagcaagcgggcaccctggaggtcgatgttggctcaggcccgctggcgccggccctgcagcaatgggcgcgacagagcggcattgccctgctgttcgatgcgcgtgagctggatggcctgcgcacggccggcactcatggccaccgcgatgcggccgcggccctgaaggaactggtcgcgggcatgccggtgaacatcctgcgtacgcctgctggcggattcgtcgtccgccgcacccgccccgcgccaccatcgccaccgtcggtcgcggcacgcaccacgcccgcagcaccttcgccacacaaatccgccgacgcgccgccgcaggtggaactggcgccgatccatgtcaccggcagccggctgccgcgcacctccgtgcagaccacgctgccggtcaccatcatcgaccgcgatgacatcctgcgcagcggttacggcagcctgttcgacctgctgcggcacttgccgggcatgaacgggcacccggcgatgagcacctcgcgcagtggcgattcgcagtacctgccggtgggtgcggccaccaccaccagcctggacggcatgggtccgcgtgcgaccctgttcctggtcaatggccggcgcctgccacgctatcccatggtgtcgctggaacagggtgggctcaccgatcttgggggaattccgctcagcttcgtcgaacgcatcgagctggtacgtggcggcgcctcggccatctatggcgccgacgcgatgtccggcgtggtcaacatcatcctgcgcgaccaggctgacggcccggaagccatgctgcagaccggcctgagcgggcgcggcgacgctggccagtatcgcgtgcaggcggccacgggcggcgtgcgcgacggaggggaccgctggttcgccggcatcgacctgcaccgcatcgaccacgtggccggtgatcgccgccaatggcatgcggaaacctcgcagtacctgatcggcgcgttccgcgatggacgctactggccggcagaacgctgcgaaggcccattgacgcggcgcgatggtgcctgctggttcgacagcgcccgaccacgctcgctgcaaccggcctcggataccgcctcggcctacctgcgctaccggcatgagcgcggcgaaggtcgctatgcctacgccgaggcgcgggccagccacaaccggcaacgcttcgaccttggtccaaccgccgttgccatcggcctgtacgggttcaccttcaacagcgtgctgcgcgaagctggcaacgtgcgtccgcatgtacgtgccaccgacgccgacgtcaccttcggcattggccgcgaccagggccggcgcagctgggatgccggcatcagcgcacaacgcagcgatgtcagcctgtccacgtcgggcaccgtgcgcgccgagcccctgctgcgggtcgccgagacactggatttcctgcccggcttcacctcgttgccggcgggcgcggccgagcagttgttcccgtcgatccgcaatcgcgggcgcaccgagcagtggcagggctggtggggcatgcagcgggagctgatgccattggccggcggtgctgcacagctggccaccggcatcgacctgcgccaggagcgctggacctcgcatcccgacgccctgctgagccagggtgacctggcgctgggcctgccgcaggagcagcgccacctggcgcgccgcagtggcggcgcctacgccgaactcggcctgcccctggcgcacacgctgcgcatggacctggccgcacgctgggaccgcgacggcgactaccaggccttttcgccccgcgtgggcgtgcgctggagccccacgccccggtggtccttcctgcttgccagcgggcgcggctaccgtgcgcccagcctgttcgagcagcggcgccccccgggctatttcggtgcgatcgagctgccggcctccagcgccctgcccgactgcgcgcagagcagcggcaacgggcgctgcagcgtcaccgtggacgtggtggagaacgatgcgttgaaggccgagcggtcgcgcagccattccctggccgcgacctggacgccgaccgatacgttctcgctgtcactcacccacaacatcgtcgaactgcgcaacgagatcctggccctgcaaccggccgacgcggtgtggaaccccggcacctgggagctggacgaggacggccacctgagcaacctgcgcctgtccttcgacaacatcggccgcaccacctcgcgcaactttgtactgcgcggggagtaccacatcgataccggcaacaccggccagtggctgttctcgctcgacgcgctgaagcagcaggaactgcgccgcgaacgtggccatgatgcaacggtggacctgcgcggccatgtcacgccgacgatggccgccgtgctgaacgtgcagtggcagaacagcaactgggacatcgccctgcgcggcaaccaggtggggcgcacgcgcgcctggctgcccggtgcggaatgcccggaggaacagcgcgagcagaaccactgcatgaacccccggcagctgcgctggaacctgcatctcgcacgacgcctggggccgcgcgtggtcgccgcgctggacgtgcacaacgtgctcgacacgcaaccggtgaactatctggttggcaacggtggccagatgccggggctggacgatccgctcggccgctacttcctgctgaccctgcagatccgctga

SEQ ID NO: 492793 - DNA, 969 bp, Stenotrophomonas maltophilia
atgagtcacgccaggcccagggaagatacgcagctgttcgaacgcgccagcgcctgggtggcgcggctggaggctccggactgtacgccgggcgagcgcgagacgttcgaggactggttggccgaggacccggcccatgtcactgcctggatccaggccgagaccctgttccagcagggcgaggaactggccgccgacccgtggctgcgcaccgccgcggcacgtgcggcacggccggcgccgcgtcgctggctgccggcagtggccgctgccgcaggcgtctgcctggccatcgggatcggctggatgattgccgtcgacggcaaccccacgccgctgcgctacgccaacgactcccaccagccccggcagcagacgctggccgatggcagcgtggccacgctggatgcgggcaccaccctgcacgcccgtttcggttggcgccatcgcaacctggtgctggaacgtggccgcctgcagctgcaggtcgcaccgtcgggcaaggccctgcagctgcgcgccggcgacagcaccatccgcgacatcggcaccaccttccaggtggaacgcctgcatgatggcctggtcgaagtcgcactgctggaaggtgcggtggaagtcagcagcgggggcacccagcacaccctggcgcccggccagcaactgcaggtactgccgagtggccgcatccagcccggtccggcactgtcgtccaatgccgcagctgaaggctggctgcagggacagctggtgttcgatgccacaccgctgtcgatcgtggtcgaacgcatgaaccgctacggccacacgccgctggtgatcgccgatccggagatcgccagcctggcggtaagcggcaccttccgtgccggcgacgcgcaggaactgctgtcggcactggaactgggctggtcggtggctggccagacgcgaccggatggcgcgctggaactgcgccgcacgtactga

SEQ ID NO: 492794 - DNA, 501 bp, Stenotrophomonas maltophilia
gtgcgggaggaacgcgcgccgttgtgtgcgttcctgcgcacgcgcggtgtcgggccggaggatgccgaggacatcgcgcaggactgcatggagcggctgatccgctatcgcgcgcacagtgccgacgagctgcggctgctgctgtatcgtatcgcccgcaaccgcctggcagaccgcggccgttcgtcgcagtcgcggccgcatctgtccctcgccgaacatgatggcggcaacgagccttccagcacgtcgcccgatccattgcgccaggccgagtccgggcagatgctgtccctgctgcggcacgccctgttcaagctgcccgagcgcgcgcgcgaggtgtacctgctcaaccggatcaccggcatgagctacacgcagatcgcgcggcactgtggaattactgccaagaccgtggaaaaacacatcgcccgcgccctgcagggcctgcgccaggaactcggaacggatccgctgcacaacgacagggacaacggatga

SEQ ID NO: 492795 - DNA, 2874 bp, Stenotrophomonas maltophilia
atgaagcattcgaagttgagcctggccctggcagcgttgctgggcatcaccgccatggcggcggttgatgacgtcatggcaatgaattatcacgtgcgggacgatcgcgtcttcctcagtggcggcgtaaccgttgccgatgtggtggcgctgcccgcgctgctggccaaggcgcaggccgaaggacgcccgatccacgaagtcgtgctgcgcacgtccaacggtggcgcgctgatcgccggcgagtggctgcaggcggtaatccgcacccagggcctggacacgatcgtgtccggccactgcatttcgtcctgctcgatcatgcagtccggcggcgtcaaccgttatctcggcggcgacctgccactggtcgattcggtgcagatccatgccgccagcagtggtggcaggatcacctacgcaccgtcgccgcgcatgacccagatctacaccggcaactatggcggcggcatggatgccggcctgctgcacaaggccatgtatgaggtggtgcggcccaatggcctgctggtgttccgcgacccggcgcgcaccacgggtacctcggtcaccttcgatccggatggcagcggcagcaagctggagtccttccatggccaggacatccgcggcaacaacatcatcaacacggcaggctatcgcgacccgggcgacaccctgcgtgtcaccagcaacgtcagcggcgacatcaatccgggctacctgcgcaccgcgcgccagttgcaggccttcgtcgacgacgatttcgcgcgctggaacaccgactgggccagcacctacatcaactacgcggtgagcctgtacaacgtctccacgcgggggccgaacggcatcggcacgcagtcgctgcagcagctgcttgccgaccccgacctccaggatgagctgcgcggccagttgcggctggccgatctggatgcgtccaccctggcaagttcggcgggcgtgatccgtgtcagcaacggcgccacctggcgcaccgccgaaaccaccggcgccgatttcatgctggtcgacaacggcaccatcgcgctggagggcggcgcgctgcgtacccccgagctgcgggtgatgccgggcagcgtggtggttggccatggcgatatcgcatcggtcggcaccgacagtgatgcgttgctggatggcaccggcccgtcctaccgcgaagacggcttcaaccgactgcgcgtgttcggcacgctgatgccgcgtggcggtgatctggtgacccacggctacgtcaacatcatgcccggcgggcaggtgctgttcgatgttaccgaggccgggggcaccggcagtggccgcctgcgcgtcggcagcttctacgatggcggggccgaagagggggcgctggtgatcgcgcagggcgcacacctggcgttgaacgtcgcccagggcttctatgccggcggctaccgccgcgatctggtggaagggccgatctaccagggcggtttccaggatgccgtgcggctgggcgacaccggctacagcgccagcatcaccgcgggcgaagtattccgcccgcgccacaattcgctgctcagcttcaacgtcaaccagacggccgacgggctgtggctgaccgccaacccgggcttcgatcagctgggcctgtttgccaacggcacctccggcgatggactggggcgcgcgctggcagccgcatcggatcgccaggacagcggcctgaagtcgctgctcggcgcactgcagttcgccgaccgcgatgtgatcgcacagcaggccggcgccctgcgcggtgacgcgcatgccagcctgcgcctggccgacaatgcactgctgggcagcatcggcaacgtggtgcagcagcaccaggcggcgatgcgcagtggcggcgatgccgatggcctggcctcgcaggcggcgcagtcggtctcggcgcagccgggcatgcgccatggcagcctgttcaaccagttggccatgcatctggtcgagccggccggcgaggctgctggcgacagccgcgcggcgggtggccgccgtggcctgtgggcgcgcggttttgccagccatggccgcatcgatgccgacggtggcgtggccggcctgagccataacatcggcggcatcgtggtcggtgccgacacgcgcgtggccgatgaccgcgtcaccctcggcgtcagcgtggccgccgcggacatgtcgaccaaggccagcgatggctccggtttcagtggcgacgtgcgcgcgctggatgtgggcggctacctggatgcgatctattcgcgtggctacctgtcggcggccgtgcgctacaccgacctgcgccacgatacccgccgcagcctttcggccatcgatggcctgcaacagccactgcgcgcccgatacagcaacgacgcgatctcggcgcgggtggagcatgcgttctccttcaccaccggcaagggactggtgatccagccgctgctgccggtggtggactacgcgcggacctcggctacccgcttcaacgaagggcagagcgctggcgcgctggtggggcgcagcggcagcctggagagcatccgcgtgggcgccggcctccagctgttcaagaccttcgagggcaacaacggcgagcgcatcaccccgcgtgcccgcgtggtctggcagaaggagctgggcgactcgcaggcgcgctacagcaccggtttcgccgcagccccggacctggtgttcggtgccagcagccaggccgtgggcgagcaggcactggcctggaacgtgggcgtgaccagtcgcgccagcgagcgcctgtcgatcatggccgactacgtgggtgagcgccgcgacgggcagatccagaacggcgtgatgctgggcctgggctaccggttctaa

SEQ ID NO: 492796 - DNA, 1002 bp, Stenotrophomonas maltophilia
atgcagatcgccgttttcagtgcccgcccctacgatcgtcgtttcctggacgaggccaaccagcgcgatgcggccgggcagggctttgcgttcgtgtacttcgatgccgcgctggacgtgcataccgctgcgttggcaaaggactgcgccgccgtctgcgtgttcgtcaatgaccgcctcgacgcgccggtactgcacgcgctgcatgcgctgggcgtacgcgccgtactgctgcgctgtgccggcttcaacaatgtggacctggccgccgcgaaagcgctggacctgttcgtcgcacgggtgccggcctattcccccgaagccgtggccgagcacgcgctggcgctggtgatgacgctcaaccggcagacccatcgcgcctacaaccgcgtgcgcgagggcaacttcatgctcgatggcctgctcgggcgcaccctgcatgggcgcacggtcggcatcgtcggcaccggcaagatcggcctggccaccgcgcgcatcttccacggcatgggctgcaccgcgctggggcatgacccgtatccatcgccggccttcgccggcgtgggcgacatggttgggctggatgaactgctggcgcgcgccgacatcgtgtcgctgcattgcccgctgacgctcgatacccagcacctgatcaacgacgcctcgctggcgcggatgaagaccggcgcgatgctggtcaacacctcgcgcggcgcgctggtcgatacccatgcggtgattcgcgcgctgaagtcgcggcggctgggtcatctggccatcgacgtctacgagcaggaaagcgcgctgttcttccaggacctgtccggcgagatcatcgacgacgaggccttccagcgcctgatgaccttccccaacgtgctggtgaccggccaccagggcttcttcaccgtagaggcgctgcaggagatctcggcaatcacgctggggaacctgcgggatttcgccgaggggcgggtgtgtgcgaaccgggtgggagcgtag

SEQ ID NO: 492797 - DNA, 5388 bp, Stenotrophomonas maltophilia
atgcgtatctggcagtggcaggcgttgttgggcgcggcattggtcgtgtcatccgggtggacctgggcgagtagcccggtcaccccgcataccgagtactacaaaaagatcaagaacagcgaggggctggcaccgctgacctcgagcctgttcggggatagcatcagccccagctcggggtcgaccgaatttatcgttaccgacatcgacttgccaggcaacaacgcgctgccggtgcgattgcagcgtcgtctcgctgtgcagtccttcaaggaccggcagccgttggggggattcggcagctgggacatcgaagtcccctacatgcacgccaccttcgactccatctggaagtggaacgagtcgggtaatggcgccacccagcgttgctcgcagaccttctaccccaagacgcgtaccggcgtgggcaccttcgagatatggaccggcgtgcaggtgcgtgtccccgaccagggcgagcaggagatgctgctgatcgccaacgcctccaaccctaaacccaccaacggtgaaacctatcgctggggtactcggggcaacatgcgcctcagttgcctgggctcgacggccaatggctatcccggtgagggattcctgggcgtggatgcatcggggaatcgctacttcttcaatgtgggtattgaacgaacagccggtttcatggatctcggccagggcgtaggttcaaaactggtgcgtgttctgctgatggccagtcgggtcgaagatcgccacggcaactgggtagcctatgactattcgggcgacaagctggttggcattcgcggcagtgatggtcgcgccatctccattgcctatgccggggaccgtattgcaagtgcaacagccaatggccgtacctggagctatgagtacaacgagggctccggtgcaatgggattcgcacgctggcctgcgctgcgtgccgtgcagcagccggatggtgctcgcttcggctatgagtacagctggcaggacggcggattcgggggcctgaacccggagtatcagagctgggatggtgaaccgaagctctgcatcaagcccacgttcgagcagtctggattcaccctgatcgcgacccatccatcaggaacgcgtggacagtttgagttcaagtacctgcgccgcacccggctgggtgtaaaaagtaccgcttgcgcagacatgggcggtgggcgctacgcgcaacgcgcctccaatgcgttcgacctcttcgcgatcaccagcaagacgctgacggggcccgggttgggcagtttgacctggacgtacgagtcgggcggatatgactcgggcctggccaactccgcagtgtcgacgattgtggagccagatggtacgcgccgtcacagtgtgttcggacgaaaactcgacgagaacgaggggcagttgctgcaggaggcggtgcgtgcgccggacggtcagatcgtccaggtcatcaccaatacctatatgagttcggacgaggtccaggccggaccgttcccggacagctacggttcgatgaccgcggccgatgatcccttcgccgtcaagattcgtcccctgaagcaatctgtgctcagccaggatggcgtcaacttcgtcaatacgaccgatcagttcgatgcgcatgtgcggccggtggtgcagaccgagagtaactcgttggggcgcgcgcgaacgctgagaaccacctacttcgacgacacgggtcgttggatactcagccaagtcgcgcgcagcacacagagcgttggcggcgttgagattgagaccgaacgcaccgagttcgactcgatggcgcgcccgcaacgtacctacgccttcggcgcgttgcagcagacgctgggctatcacgccgatggcacgctcgcctccgtggccgatggcaagggcaatgccattgcgcttggcagctggaagcgtggcctgccgcagagtgtcgcgtacccggacggcagcagtgcctcgctgcaggtcgatgacaatggctgggtgcgcgcagcggtggagcccaatggtgccagccgaagcttcgactacgacgggatgggccgaatcgtactggcgacccaggccgccaatgacagcgtggcctggaatccttctacaacgcgattcttccaggtggcgggagcggagatcgggctggaagcgggacattggaagcgcgagtccagtaccggcaacgcacgcgcggtgacgtactacgatgggttgtggcgcccagtattggaagagtcgttcgacgctgcggaccgtggcggtacattgcgccagacggtgacccgttatgacagcaatgggcgcctggtttttacctcctatccgacgcgcgcggcgtccgacttccgctcggcgctgcccggcacccataccggctatgacgcgctcgggcgccccaatcgcagcgagcaggacagcgaactgggccggcttgtcacgaccaccgagcagatcggcggaggcagcgtaagggtgaccaatccgcgcggcattgccaccaccaccgactacttgatgtacggcaagcccagccaggacacgcccatccggattctccacgcggaaggggtagtgacggagattcagcgcgacacgctgggcaaaccgctgtcgatcctgaggcgcaactacgatggcagcgtcagtgtacggcgccagtacgtctatgacggcgcccagcggctgtgcaagagcatggagcctgagaccggtgcgaccggcatgggctatgacgctgcaggcaatctgctctggtctgcctcgggcctgacgttgctgggccctcagtgcgacagcgacgctgcctatgcgtcgccttcgcgggctgaccgcagctacgacagcatgaatcgcttgctgaccctgcgtttctctgatggccagggtgatcaggactggagttattggccgggcgggaaagtcaagcgtgtgcagacgcgcaacaacggcgccgtcaccactaacgactacacctacaatctgcgtggactgcccacgtccgagagcgtggcctacgacggtggcgaggcctgggcgctgggctatggctacgatgcaaacggcgccttggcaacccatgtgcagccgtccggcctgacgatcgactacggcccgaatgcgctggggcagccgacgcgagccggagccttcgccaccaacgtgcgctattacgcgaacggcggcatgagcggcttcacctatggcaacggcgtcgtgcatcagatgacgcagaacgcgcgcggcctgcccgatcgcagcaccgacagtggtgcaggtggcaaggtcatcgatgacggctacgactacgatgccaatggcaatgtggcggccatcagtgacggcctgccggcagcccctggaaaccgcgacatgcgttacgacggcctggatcgtctgaccacggtgacggcggccagcttcggaaacgcaagctatgcgtacaacgttctggacaatatcgtcaccgccagcgttggtgcacggcggcagtcctttgagtacgacttcaacaatcggttgacgaacgtgcgggatgtcggcagtggtgcgaccgtgaccgggcttggctatgacagccagggtaacctgaagatccgcaatggcgtggcgttccggttcgactacggcaatcgcctgcgcgaggtcgatggcaaggaggcctatcagtacgacgcgcatggacgccgcaccctggccagtgcgcccaatggcaacattcgttccctctatgggcaggatggcgtgctgcgctatcagcacgatcagcgccaggcgaagggctttgactatatccagctcaacggcagccttgttgccaagcgtgccgtggatatcgcgcctgcagcactggtcgtaacggttccgggttacagcgcggacggtgcgtttgcggtgcagtggacagccgttgccggtgcgcagcgttacgaggtgcaggagtcgggtggcggtgactggcaggctgtctatcaagggcctgcgctgaacgtttcgctggccgggcgaagctccggcgtctatcgctatcgtggccgtgcctgcaatggcactgtctgcggtgcttggggtgtggaagcctccatccaggtggagcttgctcccaccgctgcgccggtgatcactgcaccggcgcaaggtatcaacggaacctatttcctgagctggtcagcggtacagggtgccgcccgctttgtgcttgaagaggccgtgggtggcggatggagcgtggtctttgatggtgctggccgcacctatcaagtgaccagcaaaccggcaggcacctatcgctatcgggtcaaagcatgcaatccacagggctgcggcgtctactcggccgaagcggcgattaccgcgctgtatgccccatccgtacccgcactgtcggtacctgctgcgagctacaacggcagctacgccgtctctgtttcgagcgtggcacaggccagcagctatcgcattgaagaacaattcaacggagcagcatggactgagatcaaccggatcagtgggaatcaactggccatcagcggacgaatcgccggcagttacgcctatcgtgcctttgcatgcaatgacgccgggtgcagtgcgtcaagcgccgtaggcagtatcgtcgtgacattgccaccggtccaagccacggcgatcaatctcggtggcgtgagctacagttcaaccgtgagcatgtggtggggcgcaatccccgcagcgacgagctatcagctgatggagcagctcaatgggggtggcttcggactcgcccaggaagacggtgcgaccgccgtggcccgaggcggccgctggccgggacagtgggactaccaggtgcgtggctgcaatgtcgccggttgcggaccgtggtccgcggtagcgggcgtgcgcgtgattggtcctccggcgaccccggttctgcgcgtgccggatggggtgggaatcggcgcggcttactcgatctccctgctggaagtggcggacgcgacgcgctatgaaatcgacgaaagtactgacggcgccaactggtcgctgattgcgggggatcgagccgtttccctcagcaagggcggcggaggcaacttctactaccgtggtcgtgcttgcaatcccgcaggctgcagccccagttctgctgctggcctggttgcgatttccagtgcgccggccgtacctacgggtgtgaggatcgtaaagagcggccccaacatctgctcggtcatctggaatgcgtcgccgggtgccacctactacaacatgcgttcaagcagcggcggcgcgacctatagggcagaaggcatcggctacgacctcgatacgcgctgccagggtggttacaaggtgcgtgcctgcaacgcgcaggcgtgctcggcctggtcgaactga

SEQ ID NO: 492798 - DNA, 969 bp, Stenotrophomonas maltophilia
atgaacgcaggaatgaagatgctggtgagtcgaaccgtaggtggggccgcgctgattctgggtggactgttcaatcaggctgctgcggagacgattacctatatccataccgatgcgttagggtcaccggtcgctgagactgacgcggctggcagcgttatccggcgtaccacctatgagccctatggcgccgtggttggtgggtccgttgctgatgggcctggctatgcagggcacgtgagtgatgcttcgacgggcttgagttacatgcagcagcggtatatggatccaatccttggtgtgttccttagtgtggatccggtgtcgccccaaagcgattcggtgggagcattcggacgctacaggtatgccaattcgaacccatatcgctactttgatcccgatggccggcgagcatgtggcaaagacactgactgccagttggagcagggggcatacggtggttcttctgcaggtcgaggaacgatgggcacgggggcagtgggaagcaggcagtcaacttcggcgtcaccaagttacggtcgctctccgcaatcgactgatcctgcttggacgagagatcctgggctgaagcggcagatggagcgagcttggcaggactccaaccccgatgcgccaactgtattgtgggggcaacctggatcgctgaagcgggaacaaggagggtggatcgtggctccgaacctggttggcgcccctcaattgattcgtgctcaacctggtactcgtgctcaaatggggcaggatgtgcttttcaagccttcagagtttcagtgtggttgccgagttataggattcttccatactcacccgaatactcgggaagagggttatcgccctgcagctaacgggtatgactatcagttccttgaagaaatgggagtgcctgggatgattagaagtcatgagggttatgagttcgtacctatcatggagggacgcagatga

SEQ ID NO: 492799 - DNA, 327 bp, Stenotrophomonas maltophilia
atgaaacgctcagtcatcttgaaagtggggctgctgttttcattgctgatggcaggcggctgtgcagcgaaggagccccgaggtgagaaggggttggaagggctagaaagatgcgtgacgacaatcgagacttacgtccaagagacgaggggatggaaacgggagatgtatcgcattgcggaggagtcttccggcaccgcagatattggcttctcagtccagcacgtccatgacagggttctgctgccagaaggtggactgaagtcatttcatgttgatctcgaccagcgatgttccaaggtcatccgtgaaagccactatcagtag

SEQ ID NO: 492800 - DNA, 336 bp, Stenotrophomonas maltophilia
atgcacctgatcaaccgactgctgcactggaccaccctgcccgccgggcgccgcctgatggccgtgctgggtgccgcactggtgatcgtgctggcctgcaatccggatctgctgccgttgttgccggtggtggatgcgctgggcctggacgtactgatgctgttgctgggtgcgcaggtggtggcggtcctgccttgggtgcgggagcgggccgcgcgtgggatcagggtgctcgcacacctgctgatcggtgcatcggcgggagcagcgggtggttatctccggcagctcgcgtggtggctggcacgggatgcggggatgacgagacgttgctga

SEQ ID NO: 492801 - DNA, 636 bp, Stenotrophomonas maltophilia
atggacaagatcgacttcaagaagcgcgaccgggcgctctatcaaccgcccgccggcaggttcgtaccggtcgatgtgccgcccctgccctacctgatggtcgatggtcgcggcgacccgaacacggcccccgcctacctgcaggccgtgcagtggctgtattcggtgagctatgcattgaagttcgcgctgaaggccgaagggcgcgactacgtggtgccaccgctggaggcgctgtggagcgccgaggacccggccagcttcatcgcgcgacgcaaggatgagtgggcctggaccgtaatgatccgcacgcccgagggcatcggccctacgcagtggcaggccgcgatcagcaaggcgcgcgcgaaactgggggatgcgccgcccagcctccgccatgaaatccttgccgagggccccagcctgcagaccttgcacgtgggcgcctacgacgacgaaggccccgtcctggcgcatctgcatgacgaagtgatgcccgcactgggttacaccttcgccggcccccatcatgagatctacctgagcgacccgcgcaggaccgacgcggcgcggttgaaaaccgtgctgcggcagccggtgcggccgatcaagcctgatgaggattccggcacatga

SEQ ID NO: 492802 - DNA, 1041 bp, Stenotrophomonas maltophilia
atgattccgttgaaaacccttgggcgctggttgcgcccgggcctgctgctgtcgttgctggtgatgctcaccggttgcgatgcggtggccatcctcagtccgaagggccagatcggccaggatgagaagaccctgctgatcacggccaccgtgctcatgctgctggtcgtcatcccggtcatcatcatgaccctgacgttcgcgtggaagtatcgcgcctccaacaccaaggcccgttacgagccgaagtggtcgcactcgacggcgatcgaggtggtggtgtggtccattccctgcatgatcgtgctggtgctggcggtcctgacctggcgttcgtcgcacgcactggacccgtatcgtccgctggattcggacgtcaagccggtcaccatcgaggcgatctcgctggactggaagtggctgttcatctatccggaagagaaggtggcggtcgtcaacgaaatcaagttcccggtcaacacgccgctgaacttcaagatcacgtccgattcggtgatgaatgcgttcttcatcccgcacctgggcagcatgatctactcgatggctgcgatggagaccaagctccacctgatcgccaacgagaccggcgaattcccgggcatgtcctcgcactacagcggcgcgggcttcgccaagatgcacttcaccgcctactcggtcaccgatgccgaataccgccagtggctggaccaggtccgcgccggtgagcagaccctggacaaggcctcgttcaaggcgctgggtgaagcacgcaacgccgagtggtatccggtcacctacttcggcaagaccgaagaaggcctgttcgactgggtcatcgccaagcacatgggcgacaacaagcattacggcatgaagcactcgcatgccggtgccgccgctgccgatgccgccacgcatgaagcgcacgagggccatgcccccagtgatgcgcatgattccaaggaatcgggtgaaaacctggatgccaacgaacacgaacacgcaggccatgccggccatgcgggttcgggagaatga

SEQ ID NO: 492803 - DNA, 1998 bp, Stenotrophomonas maltophilia
atgttgggaaaactctctcttgagtcgatcccccacgatccgatcgtcctgacgacgttgatcggcgcggttcttggtggcctgggcgtcgtcgccctgatcaccaagttcaagctgtggggctatctgtggaaggagtggttcacctcggtggatcacaagaagatcggcgtgatgtacctcatcgtcgccttcgtcatgctgctgcgcggtttctccgacgccatcatgatgcgtacccagcaggccatcgccgtcggtggctccgagggctacctgccgccgcaccactacgaccagatcttcaccgcccacggcgtgatcatgatcttcttcgtggcgatgccgctgatcaccggcctgatgaacctggccgtgccgctgcagatcggtgcgcgcgacgtcgcgttcccgttcgtcaactcgctcagcttctggctgttcgtgtccggtgcggtgctgatcatgctgtcgctgtggatcggtgagttcgctgccaccggctggctggcattcccgccactgtcgggcatcgaatacagtccaagcgtcggcatggactactacatctggggtctacaggtcgcaggcctgggtaccacgctgagcggtatcaacttcttcatcaccatcctgaagatgcgtacccccagcatgaagctgatgcagatgccggtgttcacctggaccgccctggtgaccaacgtgctgatcgtcgctgccttcccggtgctgaccatcaccctggtgctgctgaccctggaccgttacctgggtacgcacttcttcaccaatgacggtggcggcaacgccatgctgtacatcaacctgatctggatctggggtcacccggaggtgtacatcctggtcctgccggcgttcggtgtgttctccgaagtcatcgcgaccttctcgcgcaaggcgctgttcggctacaagggcatggtctacgccaccgcgtgcatcggcgtgctgtcgttcatcgtgtggctgcaccacttcttcaccatgggctccggtgccaacgtcaatgccttcttcggcatcacgacgatgatcatctcgatcccgaccggcgtgaagatcttcaactggctgttcaccatgttccgcggccgcgtgcacttcaccaccccggtgctgtggaccatcggcttcatggtcaccttcgtcatcggcggcatgaccggcgtgatgctggcgatcccggccatcgacttcgtgctgcacaacagcctgttcctgatcgcccacttccacaacgtcatcatcggcggcgtggtgttcggcatgttcgccggcatcacctactggtggccgaagatgttcggcttccgcctcaatgagttctggggcaagtgcgcgttctggtgctggttcatcggcttctacgtgaccttcatgccgatgtacgtgctgggcttcatgggcatgacccgtcgcctgcagagcacggtcaacccggcctatgagccgctgctgctgatcgccgccgcaggtgccttcatcgttggcgccggcatcctgtgccagatcatccaggtggccgtctcgatccgcgaccgcaagaagaccgtcgacctgaccggcgacccgtgggatgcccgtacgctggagtgggaaacctcttcgccgccggccttctacaacttcggcacgctgccggaagtcaccgagctggacgatttctgggagcgcaagcagcgtggtgaagcctggccgaagccggccaagtacaccgacatccacatgccgcgcaacaccggcacgggcgttgtcatcggtgccttcagcctggtgttcggcttcgcgatgatctggcacatctggtggctggccatcgtcggcttcgtcggcatgatcgccacgttcatctaccgcaccttcgaccaggacgtggactactgggtcccggccgccgaggtggaacgcatcgagaacgaacaccgcaagcacctggaagcccagggcctggtgaagtcggagctgaaggcatga

SEQ ID NO: 492804 - DNA, 639 bp, Stenotrophomonas maltophilia
atgagcaccaatacctcgaccctgagccacgggcacgccgcgcacgcggcggcccatggccatgacgaccacgagcaccacgacaccggcggcaacaccgtcttcggtttctgggtgtacctgatgagcgactgcctcatcttcgcctcgctgttcgccacctacgtggtgctggcaggcggtaccgatggtggcccgaccgcgaaggacctgttcgaactgccgttcgtggcgtgggaaaccgcgctgctgctgacctcgtcgctgaccttcggcctgggcatgatcgccatgcaccgcaagcaggttggccagatgttcctgtggctggcggttacctggctgctgggcttcggcttcatgtgcatggaagtctatgagttccagcacctgatccatcagggctacggtccggatcgcagtgccttcctgtcggcgttcttcgccctggtcggtacccacggcctgcacgtcagcgccggcctgctgtggctgctggtgatgttcgtgcagctgaagaagtacggcctgaccccgaccaacaagacccgcatggcgtgcctgagcctgttctggcacttcctggacctgatctggatcggcgtgttctccgtcgtctacctcaatggagcgctgtaa

SEQ ID NO: 492805 - DNA, 342 bp, Stenotrophomonas maltophilia
atggcacatgacaaccacgcacacgaccacggcaccggcggcgaaagccacggcagcgtgaagtcgtacctgatcggcttcgtgctggcggtggtgctgaccgtcatcccgttctggatggtgatgtcgggtgatttctcgcgcaccgtcaacggtgtggtgatcgcggtcaccgcggtgctgcagatgctggtccacctggtgttcttcctgcacctggaccgctcttcggaaagccgctggaacgtcaacgctgcggccttcaccgttgtggtgatcggcatcatcgtgatcggcaccctgtgggtcatgcacaacatgaacgtgcacatgatgcactga

SEQ ID NO: 492806 - DNA, 2058 bp, Stenotrophomonas maltophilia
atgactggcagctacagtcagagcctggtcatcatctccctgctggtggccattcttgcttcgtacacggcactggacatggccgggcgcctggccacggccgagggtcgcgtggcccgctggtggctggccgggggggcggcggccatgggcctgggcatctggtcgatgcacttcatcggcatgctcgccttcgacctgccgattccggtgggttacgaccttggcatcaccctgtactcgctggcggtctcgatcggcgcctcggcctatgcgctgtggctggtgtcgcggcccagcctgccgtggcgccggctgctggccggtgccgtgctgatgggcctgggcatcgccaccatgcattacctgggcatggcggcgatgcgcatgcagcccggcatcgactaccacccgggctggtttgccgcctccatcgcggtggccatcggtgccgccggcgccgcactgtggatcgccttccgcctgcgcgccgagcggcgcaacaccctgctgctgcgcgcgctcgcttcgctggtgatggggctggccatcgtcggcatgcattacaccggcatggcggcggcgcgcttccccgaaggcagcatctgtggcgccgtcggcagtggcggcatcgacacgcgctggctggcagtgctggtgatcgtcaccaccgtggccacgctgggcatcgccctggtcgcctcgctgttcgaccggcagatgcgcgtgcgcaccggtctgctggccgattcgctggcgcacgccaacgacaagctgatccaggccgcgctgcacgacccgttgacccagctgcccaaccgcatgctgctgcaggaccgcatcgagcaggccatcgagaaggcgcggcgccgcaaccatgcagtggcggtgatgttctgcgacctggacggcttcaaggcggtcaatgatgcgtacggccaccagctcggcgaccgcctgctggtggcggtggcacagcgcatcggcggccagctgcgaccgcaggataccttggcccgcctcggcggcgatgagttcgtgatcgtgctggccatcgacattcccgacgatgcggtggtggtggccgagcgcatcatcgccgcggccggcgaaccgttcctgctggatgcggccgaactgcaggtcagcgccagccttggcattgccctgtacccggatgacgccggcaacgagcgcgagctgatggcccacgccgatgcggcgatgtaccacaccaaggaaaccgggcggaacggctacaccttcttcaccccctcgatgcagctcagtgccaaccgccagctgcgcctgctgcaggacctgcgcaaggccatcgcccgcgacgaactgatcctgcattaccagcccaagttccctgccgccggcgcaccggccaccggggccgaagcgctgctgcgctggcagcacccggagctgggactgctggcgccggacgtgttcatccccattgccgagcgcagcggcctgatcctgccgatcggtgactgggtattggaccgcgcctgtgcgcagctgcgggcatggcaccaggccgggcatacggaatggtcgatggcggtgaacctctcgccgctgcagttcgcctcgccggcactgctggacagcgtgcgcgaggtgctgcagcggcaccggatcgaaccggcgcggctgaccctggagatcaccgagaccacggcgatgaaggacgtcgatgccagcctcgcgattctcaacgacctgaccgcgatgggcgtgcacatcgccatcgatgatttcggcaccggctattccagcctgctgtacctcaagcgcatgccggccaccgaactgaagatcgaccgtgcgttcgtgcacgacctggagcgcaatgacgaggacgccgccatcgtctcgtcgatcatcgcgctgggccgcaccctgcagctgcaggtggtggccgagggcgtggagacgcaggcgcagcgcgagtacctgagcgaactggggtgtgatcagttgcagggttaccacctgggccgaccgatggacgccgaggaattcctgcgccgggtggggtga

SEQ ID NO: 492807 - DNA, 1377 bp, Stenotrophomonas maltophilia
atggcaaaagcccgcaccgcctacgtctgcaatgaatgcggcgccgaattcagcaagtggcagggccagtgcaccgagtgcaacgcctggaactcgctgtcggaaatcgtgctggaaagcgcggcggcggccaaggcgccggcttcgcgccgggccggctgggccggcaagatcgacccgccgaagatcaccgccctgaaggacgtggagcagaccgagcatcgccgggtctccaccggcatcggcgagttcgaccgggtgctgggcggtggcctggtcgagggcgcggtggtgctggtcggtggcgatccgggcatcggcaagtcgaccctgctgctgcaggcggtggcgaagatggcggccgaactgccggtgctgtacgtcaccggcgaggaatcgctggcgcaggtcgccggccgcgcgcaccgcctggagctgccgctggacggggtcaacgcactggccgagaccggggtcgaatcgatcctgcagcatgcgtccaaggccggcccgcggctgatcgtggccgactccgtgcagaccctgtggaccgagagcctgaccgccgcgcccggttcggtcagccaggtgcgcgagagcgcggcgcggctggtccggtttgccaaggaaaccggcacggccgtgttcctggtcggccacgtgaccaaggagggcggcatcgccggcccgcgcgtgctcgagcacatggtcgacgcggtgctgtatttcgagggcgagagcggcagccgcttccgcctgctgcgcgcgttcaagaaccgcttcggtgcggtcaacgaactgggcgtgttcgcgatgggcgacaagggcctgaaggaggtctccaacccatcggcgatcttcctgtccggcggcagcacccatcagccgggcagctgcgtgatggtcacccgcgagggcacccggccgctgctggtggaggtgcaggcgctggtcgatgcgtcgccgctgtcgaatccgcgccgtgtcgcggtcggcctggagcagaaccgcctggccatgctgctggcggtactgcatcgccacggtggcgtgctggtcggcgaccaggacgtgttcgtcaacgtggtcggtggcatccgcgtgcaggaaaccgccgccgacctgccggtgctgctggccgtattgtcctcgctgcaggatcggccgctggcggaaaagacgattgcgttcggcgaggtgggcctgtccggtgagatccgaccggtgcccaatggcgaagaccgcctgcgcgaggccgccacccatggcttcaagcgcgccatcgtgcccaaggccaatgcgcccaagggcggatcggtgaaaggcatggaagtgatcgcggtggagcgcctgtccgaggccatcgacgcggcgtga

SEQ ID NO: 492808 - DNA, 1860 bp, Stenotrophomonas maltophilia
atgcaggacaccgcgctcaccgcccccaacgccgagatccgtcgtgccggggtcgatctcaatggactgatgacggtgctgggcaagcacctgtattccgccccggtggtggcgctgcgcgagctggtgcagaacgcgcacgactcgatcatccgccgccgcatcgagcagcccggcgcccaggtgccttcgcgcatttcggtgcaggtcgatgccggtgccggcgtgctgcgcatcaccgataccggtgccggcctgacccgccaggagatccacgactacctggccaccgtcggtgtcggctatacccgtggcctgcgccagggcggcgaggatgatgaaggcctgatcggcatgttcggcctcggcttcctgtcggccttcgtgctggcgcggcgggtcagcgtgcgtaccacctcgtaccagacgccggagctgggccatctgtacgtgtccagcaatgccgagcagtacaccgtcagcgaagtgccggcacgcgcggtcggcaccgaggtggaactggagctgcatccggacttcctgccgctggccaacgaggcgcgcctgcacgaggtgctgggccgctactgcgcgctgctgtccgaaccgatcttcatcggtgctgcgaccgaagcgctcaaccccgagccgccgccgtggcgggggcagggtgacgtggccgtgcacccggtgcaggcacgccgccaggcactgcagttcgccgcgcgcttcgagcacgatttcgagccgatcgtcaccgtgccgctgcgtgccgacggcaacagcgatgccaccggcctgctgtgggtgcaggatggtgccacctatggcaccagcgacaaccgcaacctgtcggtgttcgtgcgcggcatgctgctggatgacgatgcccgtgacctgctgccgccgtgggccggcttcatcggcggggtgatcgaatcctcgcggctgactcccaccgccagccgcgaagacctgcagcgcgatgaccagtaccgcgctgtgcaacatgccttgctggaggcgctgatcgatggtctggccgacgttgcgcggcagcagccggaggcgtggcgacgcgtattgagccgccacaacgaggcgctgctgggcgcggcgctgtgcgatgaccgcctgttcgacctgctgatggagcatgtgcgcgtgccgacctcgcagggcgacctgccggccagtgccctgccggcgcgcggtgccgtgcatgtcatcctcgacaatggcggtggcttcgaagagatgctgttccgcgcgatgggggtgccggtcgcgcatggccatcgttacgcggtggtgccgttcctgcggcgctgggcccaggccaagggcctgcgcctggttgaactcggcaccgagcagggcaatcgcgcactgttccgcagcgatgacagcctcgacgatgcgcagctggcctggctgcgcgaacagctgggtgatggcgagcagctgctgccggcgcgtttcagcccggaagcactgccggtggtggtggtgcccgaccgcgaggccgaactgaagcagcgcctggaagacgacgagaacgacaagcgcgtttcgatggcggcgctgcgcctggcgcgccagttcaccgcacgcatcgaatcgcgcgcaccctcgcggctgtacctcaacctcgacaacccggcggtgcaggcgctgctgcgcgcccagcgcgagggccacccgcaggccgaagcggcggcgcgcctgctgcgctcgctgaagatcatcgtcgctgcgcagggccgtcccttggcccgggcaacgaccgccacgcagggcccggatctcaacggcgcctttaccgatatcgccggtgccctgcagcagatgctgcgctga

SEQ ID NO: 492809 - DNA, 2307 bp, Stenotrophomonas maltophilia
atggacatctggaactgggtcgaaaaactgcagggcgacctgcgccaggccggccaggcgcagaacgcgcacctgctgaaccgcctcgccgacgaggtcagtgaactgcagatcgaccgcgtcgatgcactgctgcccgaagcacgcgcactgggcaaggcgctcgacaacccctgggtcgacgtctacgtcggccactgggcgctgcgcaaccgcgtcggcaaccgtgttgaaggcgagagcgcacttggcgaagccgttgcgctgttcgagcgggcacaccgcgaagacaccttggaatgcccgcagtcgatctgcgtgacccaggacctggccgcctgctacggcaacatcgatggcccgggctgggtgcccgagcgcatcgaggtgtgcgacgagaccctcggccgcatcgatcccagctgggcctgcttccagtgcctgagctgcgagaaggccgatgcgctgctcgacgatggccgtggccaggaggcgctggattacctgcaggcgcaggccgacgccgtggaggcctgtggcaaggaagtgttcgacagcttcccggagatgcagatcaagatcctgctcgctgtcggccgcgccgacgaggcactggcgctgatcgagaagcgcgaagccgaagtggccgcctccggggagtacgagccggccaactgcacggtgccgcgtcgcctgtccaaggcatgggcgctggcccagctgggccgcgacgaagaagcgctgcagcagctggtgccgtggagcgagctgaccccgaactactggcggctgtgggcgaacaccgccgcagcgctgtgccagcgtgaccctgcgcgcaatacgtgggacctgggcacgcgcttcaacacgatcatcgagcacttcgcccgggtcggatcgcatcgcctgctgatcgaagtggcagcgctgagcctggagcttgccctgcagcgtggtgcgcgctgggtggcgctgcgccagctggaactggcccgcacccatctggcgcagctgcgccaggaccggggggcggcagcgctggtggccggcctggcggcgcgcatcgatgcattgccggatgtcgcaccgctgccggtgccggccggcgagctgctggcatggctggacgcgcagggtgaacagaaccaggcgcgcgaccccgagcgcgaggcgcagtggttgctgcaggcgcaggcgcagctgcccgatgacgaggccttggccgagatggccgcctcggcgctgagcgcctgcggcgcgcaggccgaggcgcgagcgctgttgtggcggttcgtacgcagccatgcgcagaacgatggtcccgcagcctacacgctgatgcgctggctggccgagcagggggacgacgacggcctgcgccagctggccgaggtctaccgcagcagcgtgccggtgttcgcgcactggtgcgacgtgcagcgcgcacgccgggtgtccgactggccggcgctggagcaggcggcccgatcgcttctggagctgtctccgggctcgcacggcgcgcgcggcacgctggcgcgcatgtacatggaaaccggccgcttcagcgaggcccaggcctgctatgcgcagttggtggagctgctggacgagccgaacgccgcgcattgggaccacatgagtgcggccagcgcggcgcgcgactgggacgcggtgcgccgctcggccgcggcgatcggcatggagctgtccagccacgagggcgtggtcgaggagccttggggctgggtgatcatccgcagcgaagagaacggcgaaccgatggagtactacgcccgccgcagcggaccggtgaccgcgcgcatcgtcgagaatgcgccgtccaaccgcgcccagcaggtgggcgactgggtggtgttcgatgccgcactggtgcatccggcacccgaggaggaggaagcgcgcgagcatttcatcccgacctatgcgcaggtgcatgtgctggagcgcggcggcttcgcccgcagctggatgatcgatggcgcgcacccgggcgaagaggcgtggaatgccttcgtcgaggcggccgaagcacagggttggaaggtgtggtcgcacagccgcccggactacaccgtcaccgaccccgatagggaggagggcacgctgcccggcctgctgttcaccgtcgcccagccgcaggaccatgcgccgctggcgctgcaccgcttcctccagcagcacaccgcgacgtggccgcatccgcattgctggctgcgcctggctgaagcctgtgaccaggatcgccagccgcacctggacgtgatcgagcgttacgggttgtaa

SEQ ID NO: 492810 - DNA, 465 bp, Stenotrophomonas maltophilia
atgcgaaagacagggatgttcgtgatcgccgggctgctgctggcccccaccgtgcaggccgcaccggcctgccaggaacccatggccgttgcccgtgccttgttcgaggccacgaccggcaatggcgacctgctggagccaccgcccgcgctggtcagcccggcgttcggcaaggcactgcgtggcgagcgtgcctgccagcagcgcgaagagggcatctgcacgatcgattccgacccgtggctggatgcgcaggacggcgacattgaaaccccggtgcgttaccgctggaaagaggcctcggccactgccggccaggtcgagatgcgctatgcggtatggaagaaggcctacgtgacccgtctgccgatggtgcgccagggccagggctgctggcaggtcgatgacatcctcaccaacagcggtcgctcggtgcggaagatcctggcgcagccggtgccctga

SEQ ID NO: 492811 - DNA, 795 bp, Stenotrophomonas maltophilia
atgacaatcgttctcatcgccgtcctgctctacctggctgccagtgccctgctggtgcgcgcgctcggccgcgatgaaagcaccggctcccccacctggctgtggccggccctgccagcgatgctgctgcatggcggttaccacgtgatggtggcgatgcgcaccaacggcgggccggacatgcacttcttcgccgcgctgtcgctggtcggcctgggcatggcttggctgacctcgctggtgggcgcgcgcggccgcatgtcggcgctgggcgtggtggtgttcccactggccgcggtactgcttctggtctatcacggctacggccacgagccgagcaaggtgctgggctggcgcctggccagccacgcatggctggcgctgctggcctacgccacgctgagcatcgccgcgctgctggcgatcatgctgtggctgcaggaacgcgccctgcgccgccgcgagttccgcccgtggctgcgcgcgctgccaccgctggccgacctggaatcgctgctgttccgggtgatcacggtcggcttcgcgctgctgaccctgaccctggtcaccggcgtgctgttcgtcgacgacctgctggcgcagaagctggtgcacaagaccgtgctgagcgtgctgtcgtggatcgtgttcggcgtgctgatgatcggccgtcgccgctacggctggcgcggcatgaaggcggtgcactggacgctggcggcaatgctgttgctgctgctggcgttcttcggcagccagttcgtgatcgaactggtgttcgggcattcgcgataa

SEQ ID NO: 492812 - DNA, 1377 bp, Stenotrophomonas maltophilia
atgttcgagtccctgacccagcgcctttccggcaccatcgagcgcctgcgtggccgcggccgcctgaccgaggagaacatccgcgaggcgacccgcgaggtgcgcatcgcgctgctcgaagccgacgtcgcgctgccggtggtgcaggccctgatcgagcgcatcaaggtgcgcgcggtcggccaggaagtgctgaagtcgctgaccccgggccaggccctgatcaaggtcgtgcgcgacgagctgaccgcggtcatgggtgccgaggccagcgacctgaacctcaatgtgcccgctccggccatcatcctgatggcgggcctgcagggcgccggcaagaccaccacggtcggcaagctggccaagcacctgaaggaaaagcgcaagaagaaggtgatggtggtttcggccgacgtctaccgcccggccgcgatcgagcagctgaagaccctggccgagcaggtcggcgtgctgttcttcccgtccagcgccgaccagaagccggaggccatcgtccgcgccgccatcgacgacgcgcgcaagtcgttcgtcgacgtgctgctggtcgataccgccggccgcctggccatcgacgaagcgatgatggccgagatcaaggccctgcacgctgccgtgaacccggccgaaaccctgttcgtggtcgacgccatgaccggccaggacgcggccaacaccgccaaggccttcggcgacgcgctgccgctgaccggcgtggtgctgaccaagaccgacggtgacgcccgtggcggtgccgcgctgagcgtgcgctacatcaccggcaagccgatcaagttcgtcggtgtcagcgaaaagccggaaggcctggacgtgttccatccggaccgcatcgccagccgcatcctcgacatgggcgacgtgctgtcgctggtcgagcaggtggagcagcaggtcgacaaggacaaggccgccaagctggccgagaaggtcgcgaaggggaagaagttcgacctgaacgacatgcgcgaccagctcgagcagatgcagaacatgggcggcatcggcggcctgatggacaagctgccgggcctgggcaacatccccgaccacctgaagcagcaggtcagccagggcaaggaagtgccgcgcatgatcgccatcatcggctcgatgaccaagaaggaacggcgcaacccgaacctgctcaacggctcgcgccgcgcgcgcatcgccaagggttcgggcgtgaccccggccgacgtcaacaagctgatgaagcagtacatgcagatggaaaagatgatgagcaaaatggccggcggcggcatgaagggcatgctgcgcagcatgaagggcatgatgggtgccatgggcggccgtggcatgccgttccgttga

SEQ ID NO: 492813 - DNA, 1107 bp, Stenotrophomonas maltophilia
atgggggcctgtccgaaacgatgggccatcatgcagagttccgctgtaacttcccgcgtcgaggcgttctgccggcgctttggcatttccgttccgatcctgctggcaccgatggccggtgcctgccccgtaccgttgtccgccgcgctggccaatgccggcagcatgggggcgatgggcgcggtgctgtcgtcgtcggccgatatcggtcgctggatggaggacttccgcgcgacctccaccggcccggcgcaggtgaacctgtggctgccggaccccgcaccgagccgtgatgtcgctgccgaggccgccagccgcgctttcctcgcgcagtggggcccggacgtgccggccagcgccgccgacgccacgcctgccgatttcgaagaacagttcgctgcgttgcttgcggcacgcccggcggtggcgtcgaccatcatgggcgtgctgctgccgcgccacgtgcagcagctgaaggacgccggcattgcctggatcgcctgcgcgaccaccttgtccgaagcgcgtgccgcacaggacgccggtgccgacgccgtggtggcgcagggcatggaggccggtggccatcgcggtgcgtttgatccggcaatggccgaacgccagctggtcgggctgttcgcgctgttgccgcgcctggccgatcacctgcagattccggtgatcgctgccggtggcatcgccgatggccgtggcattgctgccgcactcaccctgggggccagcgccgtccagatcggcaccgccttcctgcgcacgcccgaggcggcgatcgcatcggcgtgggccgatgggctggccgccagcgaaccggaagatacctggccgacgcgcgcgttcagcggccgccttggccgtggcctggcgaccgcgtatgtgcgcgccgctgctgccgaaggcgcccctgcgccgcgcccgtacccggtgcagcgtggcctgaccgcgccgatgcgcaagcaggccgtgcaggaaaatcgcctggcggcgatgcaggcctgggccgggcagtcggcgtggatggcgcctgcacagccggccgccgacgtgctgcgcggcatgtgggaacaggcgcaggcgctgctgcgatga

SEQ ID NO: 492814 - DNA, 783 bp, Stenotrophomonas maltophilia
atgagggtcacctgcaatggccagccggcgcaggtggcggacctgctgccggcgctggtgaactacggccacttcacctcgctgcaggtgcgtggtggtgcagtgcaggggctggacctgcatctggcgcggctgtcgcaggccacgcgcgaactgttcggcagcgaactggacacggtgcaggtgcaggcgtggatgtcgcaggcgctgcggcaggccggcctggccgatgcctcgctgcgggtgacggtgtactcgcgccgcttcgatttccgcaatccgctggcgaccgtgccggtggacgtgctggtggcagtttcagcgccggtggccctggccgcgcccaagcgcgtgcgcagcgtggcctggcagcgcgaaatgccgcagatcaagcatgtgggcacgtttggcctgtttgccgagcggcgcgcggcgatggcgcaaggattcgacgatgtgctgttcgtaaccgccgatggcgacgtgagtgaagggagcacctggaacctggccgtgcacgatggtgaacggctgctctggccgcaggcgccggccctgcgcgggaccgccgaaacgttgctgaagcagcattggcccggcgcacagttgacgcggccgttggcgctggcagaactggacagtgtgaaggccgcttttgcctgcaacgccagcggcctatgggcgctggacgccatcgacgggcatgccctgccaagctcgcagacgctggctgaacagggcagggcggtgctggcagcggtgccgtggcagccgctttcctga

SEQ ID NO: 492815 - DNA, 603 bp, Stenotrophomonas maltophilia
atgggtacggtcaccgagcagcatcgcgcggtagcgatgcacgcaatcaaggtcatgggcgctgaggggcggcccaaggtccaggcctttcacgatgatcatcgcctacgttcggtcgatatcctcacgatgttcagctctccggaagcagggctgaagtccatctcgtccatcggcctatcggattctgtgttatgtcatgcggaggggcacgaactggaaacgcgcgtcgagctgtgtgcgtgtgcagaacaggacgcgctgcattgggacaacgtcgtcgcctcgacggctttcgcgatcatgcgcgatcgtgcggcggtgcagcctggtagcgtgattcccgacatcctgcaggactacttcccgtcgacccggatgccgcacgtctatctggtgccgcccttcttctggaatgacgccaggttcccggggctgcagttcccgccggttgccatcaactggctgcagtgcatcgccatccacgaatccgagcggcaacttgtcgagcggattggcggcgatgcatttgacgacctgctgcagcggcacgaggtagatgtgctggacatgcatcgggcgccggtagcgggagcgctctga

SEQ ID NO: 492816 - DNA, 261 bp, Stenotrophomonas maltophilia
atggtcaagattcgactgacccgcggcggcgccaagaagcgtccgttctaccacatcatcgtcaccgacgtgcgcagcgcgcgcgacggccgcaacatcgagcgcgttggcttctacaacccggttgcccagggcgccgagaagcgcatcgagctggacctggcccgcgttgaccattgggtcaagaacggcgcccagccgaccgacaaggtccgcaacctgatcaaggaagcgaccaagtcccaggccgctgcggcctga

SEQ ID NO: 492817 - DNA, 513 bp, Stenotrophomonas maltophilia
atgaaagatatcgagcgccgcatcctgctgggcagggttgtcggcgcttttggtgtgcgcggcgaaatcaagctcgagtcctggaccgagccacgttccgccattttccgttaccagccgtggatcgtgcgcagcccgtccggcgtggaaaccacgattgaaggtgtgcgtggccgcgacagcggcaagcacctggtcgcccgtttccccggcgtcgaggaccgcgataccgtcgaagcgatgcgcggcaccgagatctacgtggcccgcagtgcattgccgccgccgaagcccgatgagtactactgggtggacctggaaggcctggacgtgaagaccaccgagggcgttgccctgggccaggtctcgcacctgttcagcaccggcgccaacgacgtggtggtggtccgcggtgaccgcgagcggatgattccgttcgtgcagccggacttcgtcaagtcggtcgacttcgaggccaacctggtcgtggtcgactgggatcccgagttctga

SEQ ID NO: 492818 - DNA, 759 bp, Stenotrophomonas maltophilia
atgcgtttcgacgtcatcaccctgttccccgagttcctcgcccagtccgccggactgggcgtggtcgggcgcgcgcaggagaaggggctgttcagcctgcacggctggaacccccgtgattacgccgaaggcaactaccgccgcgtggacgaccgtccgttcggtggtggcccgggcatggtgatgctgatcgagccgttgcaggcctgcctgcaggcgatccgtgaggccgatccgaccccggcgcgggtgatctacctcagcccgcagggggcgccgctgacccaggccaaggtgcgggaactggcggcgctgccgcgcgtggtcctgctctgcggccgctacgagggcatcgacgagcgtttcctggaggccaatgtcgacgaggagatctccctcggcgactacgtgctgtccgggggtgaactgggcgcggcggtgatcatcgacgccgtggcccgcctgcaggacggtgccctgaacgacgccgaatcggcggcgcaggacagcttcgagggcgacctcggcctgctcgactgcccgcattacagccagccggcccagcacccgctgggtgacgtgccggacgtgctgcgctcgggcaaccacgcggccatcgccgcctggcgtcgccagcagtcgctgctccggaccgccgagcggcgcccggacctgctggatgaacaggcactgggcaaggccgaccgcaaactgctggagcagggccgtcaggcccggaaccagaaggccagcccctag

SEQ ID NO: 492819 - DNA, 402 bp, Stenotrophomonas maltophilia
atgagcaagctgaacaagtccatcgtcgcggaattcgaatccgcccagatcacccgtgaactgccgaagttcagccagggcgacaccgttgtcgtcaacgtgaaggtgaaggaaggcagccgcgagcgcgtgcaggcctacgaaggcgtcgtcatcgccaccaagaacgccggcctgaactcctcgttcaccgtccgcaagatctcgcacggctacggcgtcgagcgcgttttccagacccacagcgccatcatcgactcggtcgaagtgaagcgtcgtggtaaggtccgcgccggcaagctgtactacctgcgtggcctggaaggcaaggctgcccgcatcaaggaagacctggctgccgctgctgccgccaaggctgcccgtctggccgacaaggcctga

SEQ ID NO: 492820 - DNA, 381 bp, Stenotrophomonas maltophilia
atgaacgacatcaaccttcgctatccggccgtgatccagtcggcgttgcgctttctcgacggcaaggggctggcacgcgtgcaatcggcgccgttgctgcatcgcctgttgtggcgcctgggcatcgcactgccgccaccgatcctggccggctttggcaccaacgcgttggtgcagggcctgctgttcgggctgttctggaccgcgctgatgtggctgatgctgtggcagggcagcgaacgtccgctggtgctgttgctggtggccggtctggtggccggcgcgctgttcggccttgtgatggcggcgctgatgcgctcgctgcgccgccaccgcaagctgccggattggcgccagttccgggcgcggcaggcggactga

SEQ ID NO: 492821 - DNA, 435 bp, Stenotrophomonas maltophilia
atgcctgccaagcgaaccgcaccttccaccgcgcccacgctgttgtccggcggcaacccccggatcgccaagggcgagggcgatgctccggtgcaggcatacatcgccgccatgccggactggaaacgcccggtcggcgcacagctggatgcgttgatcgaacgggccgtacccggcgtgcacaaggcggtgaagtggaactcgccgatgtatgcggtggcgccgggcgaaggctggtttctcagcttccattgcttcacccgctacatcaaggtggcgttctttcgtggcgcggtgctgaagccgatgccgcccgagccgtccaggagtgccgatacgcgctacctgcatatcgcacaggatggcgcgctggatgaggcacagttcctcgactgggtgcgccaggccgccgcgttgcccggcgagcgcatgtaa

SEQ ID NO: 492822 - DNA, 408 bp, Stenotrophomonas maltophilia
atggctacgcatgcccccaacccggccgatgccggaacaccggcggccgaactgatcgatgcacgcatcgccgagctggcagactggcgcggtgaaacactggcacgcgtgcgtgcattgatccatgaagcgctgccggacgtgcaggaagcctggaagtggcgcggtacaccggtgtgggagcacaacggcatcctgtgcaccggcgaaacctacaagcaggcagtgaaactgaccttcgccaacggtgcggcgctggcggacccgaagggcctgttcaacgccagcctggagggcaacacgcggcgtgcgatcgacatccatgaaggtgcgatgccggatgccgctgcgttcaaggcgctgctgcgcgcagcggcggcgttcaatgcggcgaagaagaaacggtag

SEQ ID NO: 492823 - DNA, 1461 bp, Stenotrophomonas maltophilia
atggccaaagcgccgcttgacctgacctccggcccgatcggccgcaatctcctgctgttttccctgccgatcctggcaggcaacatcgcgcagtcgctgaacggttcggtgaatgcggtctgggtcgggcgcttcctcggtgaggcggcactgaccgccaccgcgaacgccaacaacatcatgttcttcctgatcggctcggtgttcggcttcggcatggcttcgaccatcctgatcggacaggcgatcggcgcgcgtgacatcgcgcaggcgcggcgcgtggtcggcaccagtgccaccttcttcatcggcctgtcggtgatcatcgccatcgccggttggttcatggcccatccgctgctggcggcgatgggcacgccggccgcctcgctgccattggccgaggcctacctgcagatcatcttcctggcgatgccgacgctgtacgcgttcgccttcctcaccgccgccctgcgcggtgccggtgattcgcgcacgccgttccgcttcctgatggtatcggtggcactggacatcgtgctgaaccctgtactgatcttcggcatggggcccttccccgcgctgggcatcgccggctcggcctgggccacgctggtcgcgcagacgctgtcgctggccggcctgctgctgtacatgcggcacaagcgccacaccctgtggctgggccgcgccgacctgcgcctgttcaagctcgacatgaccatcctcaaggcgctggtggtcaagggcgtgccgatgggcctgcagatggtgctgatctcgctgtcggtgatcctgctgatgaccatggtcaaccagtacggcaccgacaccgccgcgggctacggcgcgtccctgcagctgtggaactacctgcagatgccggcgatggcgatcggcgcggcgtgctcctcgatggccgcacagaacgtcggcgctcagcgttgggaccgcgtgcgcggtaccgcacgccagggcgtgctgttcaacttcctgctgaccggcgcgctgatcctgccgttggttgtgttcgatcgccagctgctggcgctgttcctgccgccggccagccaggcgctggacatcgcccgccacctcaaccatgtggtgatcggctcgttcctgttcttcggcgtcagcttcgtgatctccggcgtggtgcgctccaccggcgcggtgattccgccactgctgatcctggccggctcgctgtggggcgtgcgcgtgccgttcgccgaactgctgcagccgtactggggcgccgatgcaatctggtggagcttcccggtcagctcgctggtgtcgatgctgctgtcgctggcgtattaccgctggggcggctggcgcaaggcgaagatgatgggcaagccctcgcatgccgaagaactggcgacgccgtcggagattccggccagtccgccgtcgccggtggccgacccggatgccgcaccaccacggtag

SEQ ID NO: 492824 - DNA, 240 bp, Stenotrophomonas maltophilia
atgcatcaacgactgcaggtgaagtggagcctggcgctggccttgatcagcgtcgtactggccgcatgttcgacaggtgaccggctgggcgatacccaggtgcggcccaccgaccggcccgagtgcctggtcggcagccagcgccaggatctttctgccggcgtacccaccctgatcgggggcagcggctgccgcaccgaccccgacaacccgcgtcccctgaacaagcgaacggagtag

SEQ ID NO: 492825 - DNA, 408 bp, Stenotrophomonas maltophilia
atgaccgagctttccccgctgccgcccagtgtccgcctggacatctggctgtgggcggcccgtttcttcaagacccgcagcctggccaagcaggccatcgagaccggcaaggtcagcgtggctgggcagcgcccgaaatcctcacgcgcggtgcgcgtcggcgagcagctgcaggtggatcgcggcgaggagcatttcgagatccaggtgctggggctgagcgatcagcgcgggccggcgccggcggcgcagcagctgtatgccgagagtgaggcctccagggcccgccgcgccgagcagcgtgcgctgcgcatcgccgcacgcgatggtttccagccgccggagcacaagccggacaaacgcgcacggcggttgatccgcgcgctcggcgatatcgacgcgttgtaa

SEQ ID NO: 492826 - DNA, 603 bp, Stenotrophomonas maltophilia
atgagcctgaccgacgaacttctcgccaaattgcagggcgccccgctgcagcaggtatcgcagcagctcggcatcagcgatacccaggcctccggtgcgatcagtgccgcgctgccggtgctgatgggcgcgctgggcaacaacgcctcgcagccgcagggcgcacaggcgctgctcggtgcactgcagaacaaccacagcggcctggacctgggcagcgtgctcggctcggtactgggcggcggtggcggtggcgccgccagcgacggtgccggcatcctcggccacatcttcggcggcagccagcagaaggtggaaaccggcctggcccaggccacccagctcgacagcggccgtaccagccagctgctgcagatcctcgcaccgatcgtgatggccttcctcgcccagcgcctcggtggtggccaggccgatgccggctcgctcagccaggccctcggccaggaaaagcagcaggtgcagcaacagggtggtcttgccggcggcctgcttggcagcgtgctggaccaggacggtgacggccagctcggcgtgggcgatctgctgaagatcggcggcagcctgctgggcggcaagcgctga

SEQ ID NO: 492827 - DNA, 1644 bp, Stenotrophomonas maltophilia
atgagccagtccgataacaacagcccgaaatgtccgtatcacaccgcgccgtcgcctgcggaaggcgcccagcagcagcgcgagctgagcactaccccgaagcagaagcacggcgatgaaccggtcacgccgatgaccacggccttcggcgcaccggtggtggacaaccagaacagcaagaccgccggcccgcgtggcccgctgctgatggaagacgtgtggctgctggaaaagctggccaacctcaaccgcgagatcattcccgagcgccgcatgcacgccaagggctcgggcgcattcggcaccttcaccgtcactcacgacatcagcaagtacacccgcgccaagctgttcgagaaggtcggcaagcagaccgagatgttcgcccgcttcaccacggtggccggcgagcgtggcgccgccgacgccgagcgtgacatccgcggcttcgccctgaagttctacaccgaagaaggcaattgggacctggtcggcaacaacacgccggtgttcttcctgcgcgacccgcgcaagttcgccgacctcaacaaggccgtcaagcgcgacccgcataccaacctgcgcagcgcacgcaacaactgggatttctggacgctgctgcccgaagccctgctgcaggtgaccgtggtgatgagcgaccgcggcattccgcgcagcttccgccacatgcacggtttcggctcgcacacctacagcttcaccaacgccgacagcgagcgcttctgggtgaagttccacttcgtcagccagcagggcatcgaatcgctgaccgacgcgcaggcgcagatcctggtcggccatgaccgcgaaagccacggccgcgacctgttcgccgcgatcgagaagggcgacttcccgaagtggaaactgttcatccaagtcatgccggaactggaggcggaaacctaccgcatccatccgttcgacctgaccaaggtgtggccgaagagcgactacccgctgatcgaagtgggccagttcgaactgaaccgcaatccggtcaactggtaccaggacgtggagcagtcggcgttcgcgccgagcaacctggtgccgggtatcggcccgtcgccggacaagatgctgcaggcgcgcctgttcgcctactccgatgcgcagcgctaccgcctgggcgtcaaccaccaccagattccggtgaacgcggcgcgctgcccggtgcacagcaaccaccgcgacggtgcgatgcgcgtggacggcaactacggcggcctgccgcactacgaacccaacagctacggccagtggcaggaacagccgcagtaccgcgaaccgccgatgaagatccggggcgacgccgacttctggaacttccgtgaggacgacgccgactacttcagccagcccggtgcgttgttccgcagctacaaccaggcacagaaggagcgactgttcgccaacaccgcccgtgccctgggcgatgcgccggacttcatcaagcagcgccacatcgacaactgcagcaaggccgacccggcctatggcgctggtgttgccgcggcgctgaaggcgctggccagccagccaacggatccgttcaagccggcccagccggaagcggacttccccaccgcgaccccgggtgccgaagacatcgagctctga

SEQ ID NO: 492828 - DNA, 2592 bp, Stenotrophomonas maltophilia
atgtccaaagaaaagtccgccgaacacaccccgctgatgaagcagttcttcgcagccaagtccgagtatccggacctgctgctgttcttccgcatgggcgacttctacgagctgttctacgacgatgcgcgcaaggccgcgcgcctgctcgacatcaccctgacccagcgtggcagctccggcggcgcgccgattccgatggccggcgtgccggtacatgcctatgaaggctacctggcgaggttggtggcgctgggcgagtcggtggcgatctgcgagcagatcggcgacccggcgctggccaagggcctggtcgaacgcaaggtggtgcgcatcgtcacccccggcaccgtcaccgacgaagcgctgctggatgagcgccgtgacaccctgctgatggcgctgtcgcgcacgaagcagggctacggcctggcctgggccgacctggccggtggccgcttcctggtcaatgaagtcgagaccgacgacgcgctggaagccgaactggcccgactggaaccggccgagctgctggtgcccgacgaggagaactggcccgacttcctgcgccagcgcaccggcgtgcgccgccgtgcgccgtggctgttcgacgcggacagcggccgccgccagctgctgaacttcttcaagctgcacgatctgagcggcttcggtatcgatgacaagccacgtgccaccgccgccgccggcgccctgctcggttatgtcgaggaaacccagaagcagcgcctgccgcacctgacctcgatcgcgatggaaaccgccggcgaggcgatcgcgatgaacgccgccacccgccgccacctggaactggatacgcgcgtcgacggcgatacccgcaataccctgctgggcgtgctcgacagcacggtgacgccaatgggcgggcgcctgctgcgccggtggctgcaccgcccgctgcgcctgcgcgaggtactggtacagcgccaccatgcggtggaaaccctgatcgatcgcggcagcgatgccgacatccgcgaacagttccgccgcctcggcgacctggaacgcatcctgacccgcgtcgcactgcgttcggcgcgcccgcgtgatttctccaccctgcgcgatggcctgggcctgctgccggcggtgcgcgaagtgctggcgccgctggattcaccgcgcctgcaggcactgcatgccgccttgggcgagcacgacgcgtgcgcacagctgctggccagcgccatcgccgaaatgccgccactgaagctgagcgacggcggcgtgctggccgatggcttcgatgaagagctggacgagctgcgccgcctgtccacccatgccgaccagttcctggttgacctggaactgcgcgagcgcgagagcagcggcattcccaccctgaaggtgggctacaaccgcgtgcacggctactacatcgaaatcagcaagggccagtccgatcgcgcgccggtgcactacacccgccgccagacgctgaccaatgccgagcgttacatcaccgaagaactgaaggcattcgaggacaaggtgctgtccgcgcgcgaccgttcgctgtcgcgcgagaagtacctgtacgagcagctgctggataccctcggcgcgcagctggaaccgctgaagcagtgcgccgccgcgctgagcgaactggacgtgctggccgccttcgccgaacgcgcgcaggcgctggactggtcgcgaccggaacttgaaacggcaccgtgcctgaagatcgagcgtggccgccatccggtggtcgaggcggtgcgcgagcagccgttcgaacccaacgatctggatctgcatccggaccgccgcatgctggtcatcaccggtccgaacatgggtggtaaatcgacctacatgcggcagaacgcgctgatcgtgctgctggcccacatcggcagcttcgtgccggccagccgggcgctgatcggcccgatcgaccgcatcctgacccgcatcggcgccggtgacgacctcgcccgcgggcagtcgaccttcatggtcgagatggccgagaccagctacatcctgcaccacgccaccgcgcattcgctggtgctgatggacgagatcggccgtggcacgtccacctacgacggcttggcgctggccgacgcggtggcccgccacctggcctaccagaaccgctgctacacgctgttcgccacccactacttcgagctgaccgcgctggccgacgagcagcacgagggcggccgcagcggcatcgccaacgtgcacctggatgccgtcgagcacggtgaagcgctggtgttcatgcacgcggtgaaggacggcccggccaaccgcagcttcggcctgcaggtggccgcactggccggcctgccgcgcgccaccgtggcgcaggcgcgccgtcgactggccgagctggaacagcgcggcggtgagagccatgccgccgagctggcgccgcaggcattggatgcaccgcagcagttcggcctgttcgcggcgccgtcgaacaaggcacaggaagcactggccgccatcgatccggacgaactgacgccgaagcaggcactggaagcgctgtaccgactgaaagcactgctgtaa

SEQ ID NO: 492829 - DNA, 393 bp, Stenotrophomonas maltophilia
atgtcgctcatcctgcagatcgaaggctgtgccattcacgacatccccagcctgtatgcggagatcaaccgcgtgttcatggccggcgaggactggcagctcgcgccaagcctggacgccctggatgatctgctgcatggcgtccatggcgtgttggccggccatgagcgggccacggtgatctggagtgatatcgagcacagccgcgccgcactgggacgaactaccacatgccagtggctgcagtccaagctggaagccccgggcaccttcaacacgcggaccattgcgcgccagctggacgccctgcaacggggcgagggcccaacctacttcgagatcgtgatggatatcttcgccagccaccggcagatcaccctggtcccggcctga

SEQ ID NO: 492830 - DNA, 183 bp, Stenotrophomonas maltophilia
atgagtagaaagtacgcagtttccatgcactcctcgatcgtattgcctcagcgcagcgcgtgggtccgtgcagcatggggtgaccttcccgtctcctacttccagagcgacgagaatctcaatgactgcggttttattgacttgaaggtcaataagtgggagatcagtggcagtcgattgtaa

SEQ ID NO: 492831 - DNA, 2241 bp, Stenotrophomonas maltophilia
atgatcaagggaattgagatgctcgccttacgcaacctccgagtgggatcccggctgggtgccgggtttggattgctgctgctgttcatcgtggccatcgttggcctggcgctgtacggaaatcacctgaagtccgcccagttcgagaaagtggtggacgtcaacatggtgaagatgcggctgttgaacgacatgctggataccaacaacgcggtgttgatgcaccgccgcctgatggtgatcaagcgcggcgaggattttgacagggattatcagaaggcgcaggagctgtcgcagacctacgacggtatctgggccaggtacatcaggattccgcgcgacgcgaccggcgataccctggtggcgaaaatcgacgcggcacgcaaggccaccgacgcctccacccggcatcttcacgagcgcatgaaggccggggatttcgacggcgcggccaaggaactgcttgccgagcaggggctggcaaccgcgtggaacgaagcgatctcgaccctgctgcggcatcaggagacactgaccgagcgcagccgcgaggaataccgttcaaccgaatcctggaccggcacgctgtcgatcgtgttcggcgtgttgagcctggtactgggctcgctggccgcgtgggccatcacccgcagcctgacccgcccgctggaaggcgcggtgaagctggccgacggcatcgccaatgggcggctggacaacagcattgacgcctccggcaacgatgaggtcacgcagctgctcaggtcgatgcagcgcatgcaggcgcagttgcagtcggtgatggcggcgcagggcgagttggcgcgccagcacgatgcgggcagcctcagctatcgcatggacgagagtgccttccctggtgactacgggcgcatggtgcacgagaccaacgcgctggtcggctcacacgtgcaggtacagaaccggctgatcgaagtgatgaagcattacgcccgtggcgacctgtcggtggacatggatccgctgccgggcgagaaggcggcgatcacccaggcaatggacgagaccaagaccagcctgtcggcgatcaacagcgagatccgccggctggcgacggccgcggcggcgggcgacttcagcctgcgcggcgatgaagatcgcttcgcctacgatttccgcgacatggtggccgggctcaatcgcctgatgcagaccaccgacgagaacctggtgcaggtgtcgaccctgctgcaggcgatctcgcgcggtgacctcactgtgcgcatgcagggtgacttccacggcgtgttcgcccgcatgcgcgatgactgcaatgcgaccgtcgatcagctcaagcagatcgtcggccgcatccaggccagtgcgtccagcatcaacctggcggcaggcgaaatcgcctcgggcaacaccgatctgtcgcggcgcaccgagcagcaggcggcgaacctggaagagacggcggcgtcgatggaggagctgacctccaccgtgaagcagaacgccgagcacgcccgccaggccaaccagctcgccatcggtgcgcacggtgtcgcctcgcagggcggcgaggtggtcggccaggtggtcaccacgatgtcggccatcgaggcctcgtcgaagaagatcgccgagatcatctcggtcatcgatggcattgccttccagaccaacatcctggcgttgaacgcggcggtggaagccgcgcgtgccggcgagcagggcaggggctttgcggtggtggccagtgaggtgcgcacgctggcacagcgctcggccggtgcggccaaggagatcaagggcctgatcgaagattcggttggcaaggtcgccgatggatcggcgctggtccgacaggcaggcaccacgatgggcgagatcgttgcttccgtgcagcgcgtgaccgacatcatggccgatatctctgctgcctcgcaggagcagagttcgggcatcgaacaggtgaaccaggcggtggtgcagatggacgagaccacgcagcagaatgcggcactggtggaagaggccagtgctgcggcgcgttccatggaggagcaggcgaacctgctggccgaggcggtttcggtgttccgcaccggcgcggtaacggcggctgcagccgtgcgtccggccctggctgcggtgaccgcgacggtcaccccgatgcgcagggcggcagcgctgtcgccgcgcatcgagccgacactggcggccaatgccggtggctgggaagagttctag

SEQ ID NO: 492832 - DNA, 363 bp, Stenotrophomonas maltophilia
atgaagacctcgacccgattgcttgtgctgggcaccctgctggcggcttcgtcggtggccggcgcgcagacctatggcccgcgcgatgaaggacgccgattcaacgatggcagccgcgtggtctgcaagaacgtggaagtgcagcgcaactcgcgcgatccgaaccgcatcgccggtacggccactggcgcggtgatcggcggcctgctgggcaaccaggtgggcggcggcaatggcaagaagctcgctaccgtggccggtgctgttgccggtggtgcggcgggccgccagatccagggcaacagccagcagaagaacggcgaccgcgtggtcgagcgccgctgcgaacgcgtctatcgctga

SEQ ID NO: 492833 - DNA, 1128 bp, Stenotrophomonas maltophilia
atgagcgcactctggcgcagcctgcggcagaccctgatggcagtgctctgcgaccgctacgcgatcgtggtgatggtcggggcggtgatcctgtactcgttcttctatccagccgcctaccggcaccaggtggccggcaacctgccggtgctggtggtggacgaagaccacagcgcgaccagccgcgagctgctgcgaaagctcgacgcactgcgcgttgcgcgcgtggtcggtcaacccgcggacgtcgacagcgcacgccggcagctggaagccggccatgccgaggggatcgtcgtgatcccggccaatctggagcgcgacatcctgcgcggccacccggccaagctggtactgcttggcaacggtgcctacctgggacgcgccagctgggtgctgggcagcgtggctgacgcgctgggtgcgttcgggcgtgatgccgtggtcggccaggccgccttcatgggcgcaccgcaggcaccaccggtcacgcttgtgcagcgccccctgtacaacacgcaggaaggctatggcagcgccatcgttcccggcgtggccgagctgatcgtgcaccagacgctgctgatgggcatcggcgtcctgctcggcggccgccgcctcgcgctcggccggcgcctgcgcttcgacctgccgaccctggccggcatggcactgggcttcggcctgatcggcctgttcggtctgttctggtatgccgggttcactgcctgggtgcaggactatccacgcggaggcaacccgctgggccagctgctgggtggcacgctgttcatcgcggcgacggtggccttcggcctgttcgtcggcagcttcttccgcacccgcgaacgcgccttccagtacatcatcgccacctcgatcccgctgttcttcctcgccaacctgtcgtggccctcggtgatgacgccacaacccctggtctggctggcgcagctgctgccgaccacctccggcatcaacctgatggtgcgcctgaaccagatggacgccagcctggccgaagtcagccacgaactgatcaccctcaccgtcctgctgctgctctacggcagcctcgccacctggcgcctcctcgcaaaaaaggggacggaggggattaagtcgtaa

SEQ ID NO: 492834 - DNA, 1188 bp, Stenotrophomonas maltophilia
atggccccagcactgagccccggccgcggcggcttcgccgccagctggcggcgcgagctgcagtcgctgcgcagcaaccgcgccgacctgatgctggtcaccctgctgccgctgctgatgctggcggtgatggcatggatgttcacgccctcggtgatgcgcgatatcccgatcgccgtggtcgacctcgaccacagcagtgacagccgcctgctgctgcgcatgctcgacgccagtcccggcgtgcgcgtcgccagccagccggtggacctggaagacgcacgttcgcagctgcgtcggctggatgtgttcgccatcgtactggtgccgcgcgatgtcacccggcaggcgctgcgtgggcgccagggcacggtgtttgcctattacaacgccacctacatgaccaccggccagtcggcgtcgcgcgacatcggcgacgcggtttccgcatggaacgcgcgcctgctgcgcgagcgcatcggcctgcaggtcggcccgggcaagctgcgcgcggcacccatcgcggtgcagtcggacatcctctacaacccggcacgcagctacgagctgttcctgctgccgttgatcttcccggcggtattgtcgctggtactggcacttgcagtggccggcagccttggccgcgagatccgcgacggcaccctgcccgcttggctgggccgcgcgccgtgggcggcgattgccggcaaggtcgcgccgtacatcctgctgttctcgctgtatggcgcgctcggcatcggttacctggcctggctgcgcggtgacggcgtggccggcagcgtgctcctgctgctgctcgcacagccactgttctacctggccacggccgcctacgcgttgttcttcgtcggcgtcacccgcgacatgggtaccgcgctgtccgcagtcggcctcagcatcggcaccgcgttggccttctccagcgccaccttcccggtgctggacggccctctgttcacccgcatctggcatcaactgctgccactcagcgcctacatcaagctgcagacccagcagcagttcatcggttcgccgctgcaggtttcggtgtggccgctggccacattgctgctgatggcggtggtggcaggtggcattggcggcctgcgcctgatcgccttcgcgcgcacacctgccgccgcacaacccgcaggggccgacgcatga

SEQ ID NO: 492835 - DNA, 1014 bp, Stenotrophomonas maltophilia
atgagtgatgtgctgcacgacgatgcgacgacgcccccgggcaagcgccggttgggaccgatcctggtagtggtgctgctggtcgtggtggtgctcggcctgtggctggcctggcgcagcccggccgaccagatccagggcatggccgatgcggacacgatcaacgtggccgccaagatcaccgcgcgcgtggccgaactgaaggtgcgcgagggcgaccgcgtgcaggccgggcaggtgctgttcctgctcgacagccccgaagtggccgccaaggaacagcaggcgcacggcgctttggccgccgcacaggcagtggccgacaaggccgacgaaggcgcgcgcagcgaagacatccgcgccgccgaagcgaactggaagcgggccgaagccggtgcggcgctggctgaagccacttaccagcgcgtgcagaacctgttcaacgaaggggtgatgacccggcagaagcgtgatgaagcgcatgcccaggccaccagttcgcgtgaactggcccgtgccgcgcgcgcgcagtacgacatggccctggccggcgcgcgcgagcaggacaagcgtgccgcgcagggccaggtgcaacaggcacagggcgcggtggccgaggtcaacgcagcgcgtgtcgaagtggaagggcgcgcgccggtcgccggcgaaatcaacaagcgcatggccgacccgggcgaactggtgccggccggctacccggtgttcaccctggtcgacatcgaccgcatgtgggtcgccatgaacctgcgcgaatcgcagatgcagggcctgaaggtcggcagcaagctgcagggcagcgtgccggcgctcggcctggacggcgaattcgaggtctacttcatcaatccggccggcgactatgcaacctggcgtaccacccgccagtcgtccggctacgacgtccgcagcttcgaggtgcgggtgcgcccggtacgccgcatcgagggcttccgccccggcatgagcgtgctgttcgcatggccccagcactga

SEQ ID NO: 492836 - DNA, 1401 bp, Stenotrophomonas maltophilia
atgggcgtgatcggccgacgtacaaggatgcaccgcgcgaaggccgcgctggcgctggcagcctgcctgccattcgctgccgccgcgcagcccaccagcaacgcaccggcattggactgggaacaggcacggcaacgcctggagcaggtctccgatgcgttggccgctgccgacgccgccgtgcgcaacaagcaggacctgcaggacgcgacccgcctgctgcgcctgccggagatcaccggcgaagtgcgccggctgcagttccagaagacgctcaccctgcccctgggttcgctggctccggtggccgaggcctttggcatcgactcgccgctgtcgttcaccgaacgcgactggcgtacccgcccggtggtgactgcagtgctgccgctgtacaccggcggcgtgattccggccgcgcaacgtgccgccagtgccgcccacgaacaggccagtgccgagcgcgaagcacaacgccaatcgctgaccgtacagctggcccaggcctatttcggccagcgcctggccgagcaggcggtggacgtgcgccgcgatgtgcgcgatggcctcaaccgccacctgtccgacgcagagaagctggagcgcgagggcttcgccacccgcgcgcagcgcctgcaggccaccgtggcccgcgacaaggccgagcgcgaataccagaagacagtgaacgacctggccacgctgaaggccgcactggccacgctgctgcgcagtggcggcgaggtgcagccggtgtcgccgctgttcgtgcagcgcgtgccactggaaccggtggccagcttcgaacgcaccgcgcaggcgcggcagccgcagatcgcgcgcctgcgggcgatggtggcgcaggccgaacagggcgtgcgcgtgcagcaggccaagctgaagccacagatcttcgccttcggccagtacgacttccgtcgccgcgacgagatgctgaccgatccggactgggcgttcggcatcggcctgaagtacaccttcctgtcgccgaactcgcggccggcgcagatcagcgccgcgcgtgcgcagcaggaccaggccgaagcgggcctgcgcgaggccgagaaccaggtcgcgctgggtgtgcgcaaggcctggaacgagctggaaaccgcacgccagcagtacgtgctgctcgacagcagcatcgcccaggcacaggaaaacctgcgcctgcaggagctggcgttccgcgaaggccaggcgacttcgctggatgtgatcgacgcgcggctcggcctgggtggcgcccgcgtcgagcgcgcacaggccgcctaccaatacgatattgcgctggcacagttgctggagatcagtggacagatggaccgtttcgaagagttccggcggcgggcggacgaggtgatcgaccatgagtga

SEQ ID NO: 492837 - DNA, 894 bp, Stenotrophomonas maltophilia
atggacctggtacacccgcaactggccgcgtttgccgcggtgctggaggaaggcagcttcgaggctgcggcacgccgcctgtcgatcagcccgtcagcactgtcgcagcggatcagggccctggaggacaggctcgggcaggtactggtggtgcgccaggcaccctgccggccgactgccgcgggtgaagcgctgctgcgccgggtgcgaccgatgcaggcgctggaggccgaggcattggccgagctgctacccgagcgtggcagcgacgctgcgcgcaggccgatcccgctggcggtcaacgatgactcgcttgatacctggttcgtgccggccatcgccgacctgcaccagcgccacggctatctgttcgacctgcgcatggacgaccaggaccacaccctgcagctgctgcgcgatggcagcgtgctcggcgcggtcaccgccgaaagccaaccggtgaagggatgcaacgcgcacccgctcggcgcgatgcgctaccacgccatcgcctcgcccggcttcgcccgccagtacttccgcgatggcatgcaggccgcaaccctggcgcacgcaccgatgctggtgttcaaccgcaaagatgaactgcagtggcgcttcgtgcggcgcctgacccgcgcgcggctgcagccgccgctacactacctgccctcctccaccggtttcgtcgaagccgccgcgtgcggactcggctggggcatggccccggaaaccctggtcgcgcccgccgtgcgcgccggccgcgtggtggtactggaaccccgccgctggctcgatgtgccgctgtactggcagcatgccgccgtgcgctcaagcacgctgcagcacatcacccaggcgctgcgcactgcggccagaggcacccttcgttga

SEQ ID NO: 492838 - DNA, 615 bp, Stenotrophomonas maltophilia
atgtggattgccgctaccgccgccggcttgttcgcaggtgccggcctgatcatcgccatcggcgcgcagaatgccttcgtgctgcgccagggcctgcagcagcgcaatgtagggagggtagtgctggcctgcgccggcgcggatatcgcgctgatccttgctggcgttggcggcatgggcgcgctggtgctgcagtggccgctgctgctgcaggtgctgcgcttcggtggtgcggccttcctgttctggtatggcctgcgggcggggctgcgcgcgtggcgcggtggcagtgccctggccgccgccgaggcgcagggcggcagcggacggcaggtactgctgacctgcctggcgttcacgctgctcaacccgcacgtctatctggatacggtggtgctgctgggcagtctgtccacgcgctaccccggtgacctgcgctgggcgttcgccgccggtgcctgcgccgccagcgtggcctggttctgcacgctgggctatggcgcgcgcctgttgcagccggtgttccgcaggccgggcgcctggcgggtgctggatgccgccgtggcggtcttcatgtcctgcctcgccacgctgctgctgttgcgcccgctctag

SEQ ID NO: 492839 - DNA, 789 bp, Stenotrophomonas maltophilia
atgacgatgatcaagcagccgcacgaaatcgcgttgctggccgaatccgggcgcctgctggcgcaggtgttcgccgcgctcgaccagctgccgctgcagggacgcagcacgatggagatcaacgacttcgtcgagcgcatgatcgtcgatgagctgcaggcgcggccggccagcaagggccagtacggcttcccgtatgtgctcaacacctcgatcgacaacgtggtctgccacggcgttcccagcaccgccgacgtgctgcgcagcggccagatcgtcaacctcgacatcaccctggagaagaacggctacatcgccgactccagcaccacctacctggtcggtgaggtcgactacgccgcgcgcaggctggtgcaggccacctaccaggcgatgtggaagggcatcgctgcggtgcgcccgggagcgcgcctgggcgatatcggccacgccatcgcccgccacgcgcgcagccacggctacagcgtggtgaaggaatactgcggccatggcatcggccagcagatgcacgaggaaccgcagatcctgcattacggccatcccaacaccggcatggtgctggaagaaggcatggtgttcaccatcgagccgatgctcaaccagggcaagccggccatccgtcagcagccggaccaatggccggtctacacccgcgacggcaagctgtcggcgcagttcgagcacaccgtggcggtcacccgcagcggcgtgcgcgtgctgaccctgcgccccggcgaaaccgcgcagtgcgcggtggacgcggcctag

SEQ ID NO: 492840 - DNA, 213 bp, Stenotrophomonas maltophilia
atgggcatcgtcaacatcgatgacaccctgcacgaccagctgcgccgtgcctgcaccgtctccagccgttcgatcaacgcccaggccaccttctggatccgggtcggcatgctgtgcgagatgaaccccacgctgagcttccaggacatcgtcgccagcgaactgcgggcagccggggtgcagccgcaggcgctggcgcccgggcgggcctga

SEQ ID NO: 492841 - DNA, 360 bp, Stenotrophomonas maltophilia
atgccccagaccgtcatcccgcaactgcgcatgcgccatgccgacaccaccctgccgttctacgtgcaggggctgggtttcgtggtcgactgggaacaccgcttcgaacccggcttcccgctgttcgcccagctcacccgcgacggccagacgatcttcctcaccgaacacagcggcgactgcgaggtcggcggcgcggtgtacttcatcgttgaagacgtcgacgccctgcaccgcgccttcagtgccgccaacgtaccgatcgagcagccaccgcacgacaccggatggggcagccgcgagatgctcctgcgtgacccggacggcaaccgactgcgctttgccacccacgtggactga

SEQ ID NO: 492842 - DNA, 885 bp, Stenotrophomonas maltophilia
atgtcggcgcgttttccgctgatcctggacctggacggtggcgtactgccgctgccacaggcgcagaccctggcgctgccgcagtggcacgatccgctgcgcttcgcctgcagcacttcaaccctggaccgtttcgccgctgaagtgctggcaccgctgccggcccagctcggcacggtgatgctcggcagtggcgacttccaccacctcagcctgccgctgctgcgtcgcatgcgcgcgcaccagccgttccagctggtggtgctggacaaccatccggacaacatgcgtttcccgttcggcatgcactgcgggtcgtgggtgaacgcggccagcaagctgccgcagatctcgcacatccatgtgctcggcatcacctccagtgacatcggcctgggccacgcctgggagaaccattggcgcccgctgatgggcgggcgcctgacttactggtgcatggatgtggacgtgggctggggccaccgcctcggcagcggccgtgcattccgacggttcgagcacccggaggcactggttgccgcgttcgccgccgagcaggccaagtcgccgcaaccgacctacctgtcgatcgacaaggatgtgttcgccgaggacgtcgcccgcagcaactgggaccagggccgcttccagctggaacacgcactggtggtgatcgaagcgctgcgcgccggcggcctggtcggcagcgacatcaccggcgaagtgtcgctggccaactaccagagccgcttcaagcgctggctgtcgtcgctggacggccaacctgacgtcagcgccgaggatctgccggtgtggcaggcacggcaccagcaggtgaatcgcgaactgctggcggcgatggccgccgtgccgaccgcctgctga

SEQ ID NO: 492843 - DNA, 1065 bp, Stenotrophomonas maltophilia
atggagatgacgtcacgcgcatccagcaccgcgctggaaccggccgcgctgctggagggcttcctggcccacccgccgcttggattcgaggcaggcctgcttcccagcggcctgccgaccttccgtgcgccgctcgacctgaccaccacgatggacgacgacctgcgcggcaagctgcttggcttgccgctgtcgcgcctgtggcggccctggatcacctggaagacccgcttcgtcggtgccaccagcaccgagtacagcccgttgcccgcgcacgtcgcaccagaggcattggccgaggacgtgacgcgtcacgcgatcggcgattcccggctgctggtggtcaaggacctggcaatcgattcgccgctgctggacgacgcggccaatgcacacagtagcgccttcctgcaggcgctgctggcacgcggtttcgtcgaactggaaggcatgccgctggcttgggtggcgatcgatttcgattcgatcgatggctatctcggacgcctgtcgtcctcgcgccgcaagaacatccggcgcaagctgcgctcgcgcgatggcctgcagatcgactgcatcgccaccggcgatccggccctcgccaacccgcaactgcaggccgaactgtacgcgctgtacctgggcgtgttcgcgcagagcgcggtgcatttcgaccagctcgacgtggcctacttccaatacctgctggccgacagccagggccagggacggatgttcctgtaccgccaccagggtctgctgatcggctggaacctgtgctacatccacgccggaaagctggtggacaagtacatcggcctggcctacccgcaatcacgcgagcacaacctgtacgcggtcagctggatgcacaacctcgagtacgcgctgcagcacggcctgagccactacgtggccggctggaccgactcgcggatcaaggccgagctgggcgcccgcttcacctccacccggcacgcgatccacgcccgctccccgctgctgcgcgctgccctgcgcaagctggcaccgtacctgcagggcgaacctgatggaggcggttga

SEQ ID NO: 492844 - DNA, 1401 bp, Stenotrophomonas maltophilia
atgaacatttttgacaagaacgccgacgcggctgcctccgacgcgcagctgctggccgacgaagcccgctacagctccttcggcgacaccgtccactacgtcgacccgccgaagatcttccagcgcggcgaaggaagctacatgttcgacggtgcgggcgtgccctacctcgacctgcagatgtggtactcggcctgcaacttcggctacagcaacaagcgcctgaacgacgcgctgaaggaccagatcgacaccctgccgcaggtcgccagccagtacctgcacccgacccgcgtgcagctggccaagaccattgccgtggacatgcaccagaagttcggcctcgacggccgcgtgcacttcaacgtcggcggcgcgcaggccattgaagattcgctgaagatcgtgcgcaacgcgcgcggcggcaagagcctgatgttcgccttcgagggcggctaccacggccgcaccctgggtgcctcgtcgatcacctccagctaccgctaccgccgccgctacggccacttcggcgagcgcgcgatgttcatcccgttcccgtacccgttccgtcgcccgaagggcatgaccccggacgagtactccgaccactgcgtgtggcagttcgagcgcctgttcgaaagcgagtacaacggcgtgtgggatcccaaggtcggccaggccgagtacgccgcgttctacgtcgagccgatccagggcaccggcggctacgtcatcccgccgcgcaacttcttcactggcctcaagcgcgtgctggacaagtacggcatcctgatggtcgtcgatgaaatccagatgggtttctggcgcaccggcaagctgtggtcgatcgagcacttcggcgttaccccggacgtgctggtgttcggcaaggcgctgaccaacggcctgaacccgctgtcgggcctgtgggcgcgcgaagaactgatcaacccgaccgtgttcccgccgggctccacccactccaccttcaactccaatccgctgggcacccgcctcggcctggaagtgctgaagctgggcaaggaaatggattacgagcgcaccgtgccggagaagggcgcgtacttcctggacggcctgcgtggcctgcagaagcgtcacccggagatcggcgacgtcgacggcctgggcctggccctgcgcgccgagatctgccagaccgacggctacacccccaacaaggaactgctggaccgcatggtcgacatcggcctggccggtgacctcctgcacgacggcaagcgcatgggcctcgtgctcgacgtgggtggctggtacaagaacgtgatcaccttcgcgccgtcgctggacatcagctacgaagagatcgacctggcgatcaccctgctcgaccaggcgctgaccaaggccaagggctga

SEQ ID NO: 492845 - DNA, 717 bp, Stenotrophomonas maltophilia
atgcactggagcatcctgtgtgacttcgatggcaccatcagcctcgaagatgtcatcgactcgctgctggagaagtacggccagccgggctggcagcaactggaagaccagtggaaggcgggaaagatcggctcgcgtgaatgcatgcagggccaggtgcggctgctgaagctggacccggccacgctcgacgcgcacctggaccaggtgcagatcgatccgggcttcgccgcctttgtcagccgcgccgaacagctgggcgtgccgctgcgcatcgtcagcgacgggctggactatgcgatccaccgcatcctcgccaaccacggcctgtcgcgactgccggtggtggccaaccacctgcgctggtgcgaagaccattgggaactggagtcgccctaccaggccgaaggatgccgcagtggtacctgcaagtgcacctgcgccgcgcaggcgcgtgccgacgaagcaccacgcgtgctgatgatcggcgatggcagctcggatttctgcgtctccgaagatgccgacttcgtgttcgccaagcgccgcctgatcacccattgcacgaaggccggcatcgagcatgccgccatcgataccttccacgatgcaatcgcactgttgccgcgcttgctcgatggcagcctgctgcagccacgtcgcctcgacgccagcccgcagcccgccgcactgcccctgctgctggccaccgcctga

SEQ ID NO: 492846 - DNA, 1209 bp, Stenotrophomonas maltophilia
atgagcctgttcgcgcgcgaactgccgccgaccgctggcctgccgatgcaggccagcgacttccttcccggcggcggcgacctgcgcgacatcctggccacccagctcggcacaccgccgctgcagctgacctgttccggcacccacgcgctgctgatcgcgctgcgtaccctgcgcaagcgcgcgcccaagcgcgataccgtgatcctgccggcctatacctgtccgctggtgccgatcgcggtgcacagcctcggcctgcgcgtgcagctgtgcgatacccggcgtggccatttcgactttgatccggcacagctctcgcgcctggccgacgcacggacgctggcaatcctgcccacccacctcggcgggcgcatcgccgatgtcgaacgggcctgcgaggtcgcacgcggcgccggtgcctgggtgatcgaagatgccgcacaggcgctgggcgcacgggtcggcaacagcagcgtgggcctgcgtggcgacatcggattcttcagcctggccgccggcaaggggctgagcctgcatgaaggcggcctgctggtcagccgcgatgacgagctgcgcgccgcgctggccgaacatgccgccgaacaggtacgtttcagcctgcgctgggagctgcttcgcagcgtgcagctgctgggtcttgccgcctgttaccgcccctcgctgctgtcgctggtgtacggcaatccgctgcgcagcgccctgcaacgcggcgatctggaagacgcggtcggagacattttcccgctggacatcccgcagcaccgggtcagccagtggcggcagaacgtgggcgcccacgctgcacggcggctgcctgcgttcctgcaggccgggcgcctgcgcgcactgcagctgcgtgtgcagctggcacagctgccggcggtggaggtggtcgatggcctggccggcaccggcggcacctggccgatgctgatgctgctgctgcccagccagcgcgcgcgcgatgccgcactggacgaactgtggccgcgcggcctcggtgccagccgcatgttcatccatgccctgcccgactacgcctacctgcgtggcatcgtgccgcaggacgacatgccgaacgcgcgcgacttcgccgcacgcatgctgaccctcggcaacagcgcctggcagacacgggaagagaccgcgcagatcctgcgggcgctggccgctgcgcagccctga

SEQ ID NO: 492847 - DNA, 399 bp, Stenotrophomonas maltophilia
atgaggcgcctgtatgtgatcggctttcccctgctgatggccttcgacacgctggcccagctgtgcttcaagtacgccggtgacgccgcgctgccggtcgaggccaacaccgcgtggctgctgcgcgtactgtcgcagccgtgggtatacggcgcggtcctcggctacatcggcgcgttcttcacctggatgagcctgctgcgccatgcgccgatcggcccggcgttcgcggcctcgcacctggaggtgatcagtgtgctgctgctgtcggcctggctgctgaaagagccgctcaccctgcaccaccttgtcggtgcggtactgatcgtggctggcatcgtctgcctcggccgcgccgaagcggacgacccgcacagccccgccgacagcacctcgtga

SEQ ID NO: 492848 - DNA, 360 bp, Stenotrophomonas maltophilia
atgggggcactcgccacgctgctgtggctggccaatgtggtgctcgataccggtggccagctcgccttcaaggccgccgccagcgacccgcaggatggcgaaggactgcaacgctggaaacacatgctcagccgcccctggctgtggatcggcatcgcctgctacgtgcttgagttcgttgcctggatcgcgttcctgtcgctggtgccgttgtccaagggcgtgctgctgggctcgatcaacatcgtcgcgctgatgatcgccggccgcatcctgttccgcgaaaagctcacgccattgcgggtgaccggcatgctgctggtcacggcgggcgtggcggtggtgggggccggctcatga

SEQ ID NO: 492849 - DNA, 837 bp, Stenotrophomonas maltophilia
gtgaccgaatcgcacgacttcttcctcccaggtggcccgcagggcgtgctgctggtccacggcctgaccggcaccccggcggaaatgcgcatgctgggcaagggcctgaacagcgccggcttcaccgtacacggcgtgcagttgcccggccattgcggcaccgtggatgacctgctggcgaccacctgggaacagtggtaccagggcgtggaagatgcagcggcgagcctgcgtggcaaggtcgaccagttgttcgtcggcggcctgtcgatgggcgcggtactggcgctggcgctggctgcacgccgccccgaatgggtgtccggcgtcggcgtgtatggcgccaccttccgctacgacggctggaacattcccgccgtggcccgcctgtcgttcctgctgccgtggttcaagcgcttcaacatcggccgcgaccgcatgttcatggaagaaccgccctatggcctgcgtgacgagcgcctgcgtgcgcaggtcagtgccgccatgctgtccggcgacagcgccgcggccggcctgccgggcaacccctggcacgcgctggccgagatgcgcgccctgagcaactggacccgccgccacctgcaccaggtcaccgcaccgtgcctggtgatgcacgcccgcgaagacgacgtggccagcatgggcaacgccgaactggtgatatcgagggtcagcggcccgaaggaactggtggtgctggaagacagctaccacatgatcacgatcgaccgcgaacgccgcgaggtgatccgccgcagcgcgcgtttcttcaccgaaatcggtgaacgcagcggcgtgctcaaggcggtggcctga

SEQ ID NO: 492850 - DNA, 1380 bp, Stenotrophomonas maltophilia
gtgatcagcggcccccccagcctgcgtcggcgcctgctcgccttcctggcgttgccgatgctgggcctgcttaccttcaatacgatcctggcctattacgttgcgttggattattccaaccgcatccacgaccgtaacctgatcgacgacacgcactcgttcgcgcagatgctgagcaccatgccggtgaccagcgacctgtctccgcaggcgcgcttcctgatcgagtacgaccccgacggccatcgctatttcaacgtcgacagcagccgcaagggcaccctcagcggcaatgcggacttcagcccgtatgccccttctcaggactgcaccggcgtgcatccggccctgtacgacggcaacctcaatggccagcaggtgcgcatggccaccgtctgcacgcaggcgatgaacgatccgcaggacgagctggcggtgaccgtggccgaaagcatggccgaccgccgccagcgtgcgcgcgagatcctgatgatcatcatcccgctgatgaccatgctggcgctgggcaccgcagcgctggtctggttcggcgtgacctacggcctgcgcatcctcacgccgctgaggacccgcctggcgcagcgccgtggcgaactggcaccgatctccgacgccgacgtgccggaggagatccagccgctgatcagcaccatcgacgatctgttcgcgcgccaggcggaaatgatcacgctgcagaaccgcttcatcgccgatgccgcgcaccagctgcgttcgccgctggccggcatggccctgcatgtggaccaggcgctggcccatggtgacccggacacggtgcgcgaggcattgcagcacatccgccggctcaaccagcgcaccgcccgggtcagcacccagctgctcgcactgagccgggcgcagaccgtgcccgataccgtggaggcactggacctgtgcgagctggtgccgcagtgggtcggcatgcgcgtgcccgaagcgatccgcgatggcattgatcttggttaccgcggcagcccccacccgctgcgcgtgctcggcaacggtgcccagctgcaggaagcactggacaacctgatcgacaacgcgctgcgctatgccggccgcgatgcgaccgtcacggtcggcgtgcatgcgctggatgacaatgacgtcgaactgtacgtggaggacaacggccccggcgtgcccgaggacgtgatgccacggctgggcgagcgcttcttccgagcgcctggcaccgcagccagcggcaccggcctgggcctggccatcgcgcacgaagcggtggagcattccggcggccgcctgaccttcctcaaccgcgccggtgggggcctgaaggtcgccatcacactgccgctgctgaaggccccctga

SEQ ID NO: 492851 - DNA, 684 bp, Stenotrophomonas maltophilia
atgcgcgttctgattgctgaagacgacccggacatcgcctccggcctgtgcgcctcgctgcgccggcaggggcatgtggtcgaccacgtcgacaacggcgcgcacgccgacgccgcgctgggttcgacccaatacgcgctgctggtgctggatctgggcctgccgcagctggatggccgcgacgtgctgcagcgcctgcgccagcgcggcgatggcctggcggtactggtggtgaccgcccgcgacggcctggccgaacgcgtgcgcgtgctcgacctcggtgccgacgactacctggtcaagccattcgcactggacgaattcgaagcccgcgtgcgcgcacagctgcgccgcgtgaccagcaatggcaacccggacctgcgcatcggccgcctgcgcatcgatctggccgggcatcgggtgtggatcgacgaccagtcgctggaactgaccgcacgcgagttcggcctgctgtcggcactggcggtgcgcgccgagcgcatcgtctcgcgcgcacagctggtggaggcgctgtgcgactggggccaggacctgaccgacaacggcctggacatcgccctgcaccgcctgcgccgcaagctgcagcccggcggcatgggcatccgcaccgtgcgcggactgggctacatgctggaagacgcgcaggacgacagcgccccgtga

SEQ ID NO: 492852 - DNA, 1128 bp, Stenotrophomonas maltophilia
atgccgcgctatcgccctttcctgctgaccgccctgctgttgccgctgctggcctgcgccacagcaaccacgcaggcccgcgaggttgccgcgcccgccgaccacgtgcaggccgatggcccctatgtattccgccagggcgaccagctgcaggccaagtggatctgcgacgacaaggtcgagtcgcgctcgctggccatcaacacgacgggcaccgatatcgcgccgcgctgtggctacgaacacaccgtgcacgtggccgcgccgaatgcggcctcggtctccgtgctgccggccgcgccgcgcatcgtcgcgctgtcggacatccatggccagtacgggctgctggtgcgcctgctgcgcgcccaccaggtcatcgacgcccaggatcgctgggccctgggcaaggacacgctggtcatcgctggcgatgtattcgaccgcggcccgcaggtgaccgaggcgttctggctgctgtacggcctgcagcagcaggccgccgccgccggtggcgcagtgcacttcgtgctaggcaaccacgaaaccatggtgctgtacgacgacctgcgctacgtcaacccgaagtacctgcgcagcgcccagctgctgggccgcagctacccgcaactgtatggcgccgactcggtgatcgggcagtggctgcgcacccgcccggtgctgctgaagattggcgataccctgttcctgcatggcggcatctcgcccgaagcggtgcagctggcgctggacccggcacgcaccaatgcggcctatcaggcctctctgggcctgcccaaggccgaagtgaaggccgacccggccaccgcaccgctgtatgacggcaagaccagcccgatctggtaccgcggctatttcgatggccgcctcgacaccgcggcggtacaggccgtgctcgatcgcctgcagctcacgcgcatcgtggttggccatacctcgatgccgcacgtcagcagcttccatggcgaccgcgtgatcgccatcgacagcagcatcaagaacggcgagaacggcgaactgctgttcatcgaggatggcaggctcagccgcggcctgctggacggctcacgggtgccgctggtactgggtgagccgggcctgcaggactga

SEQ ID NO: 492853 - DNA, 450 bp, Stenotrophomonas maltophilia
atgcacgccaacagtccctgccccgttgcccgcagcgccgacctgctcggtgatcgctgggcactgctggtgatccgcgatgccttcgacggagtcacacgctttggcgacttccagcgcagcctcggcgcggcgcgcaacatcctcagcgatcgcctgcgcaggctggtcgaggccggcatcctgcaactgcaaccggcctccgatggctcggcctaccaggaatacgtgctcacccacgccggccaggaactgttcccgctgctggtcgcgctgcgccagtggggagaacgccatcgcttcagcgccggtgaagcccattcgcagttgatcgaatccagcacgcggcgaccactgccctacatgcagccacacgggcgcgacggtcagccgctgcaggccgccgccacccgcgtgcgcaagctcaaggacgaccagcgcgacgcctga

SEQ ID NO: 492854 - DNA, 1203 bp, Stenotrophomonas maltophilia
atgtcccgcccattgctgaccctgctcgcggtcgcggccggcgccagcgttgccaacgtctattacgcgcaaccgctgctggatcggctggcacaggccttcgcactggaccgtgccgtggcgggcgcagtgttggcggcaacccaggccggcagtgtgctggcattgctgggcctgctgccgctcgccgatcgcggtgaccggcgacgcctgctgcggatgcagttgatggcgctggtgctggccctgctgtggctggcagcggcacgcacggccggttggctgttgtcgggcatgctgctggccgggctgttgggcaccgcgctgacccagggcttgatcgcctataccgccacgcttgcgccgcccgagcagcgcgggcgcctggtgggcgtggtgcagggcggcgtgttcatcggcctgttgctggcgcgcgttgtatcgggcgcggtcgcggccaccgtcggctggcgggcggtctatctgctgtcggcagcgctgatggcggccctggccgtgctgctgtggcggcgcctgccggcggtgccggtgccggcggtaccaccgcgctggcgcgaactgctgggttcgatgctgggcatgctgcgccgggaccgcgcgctgcgcgagcgtgggccgctggcattgctgctgtttgctggcctcaacgtgttctgggcggcggtgccgctgccgttgtcggcgccgccgttgcagtggtccaccgcggccatcggcgcactgggcttggccggcgtagtgggcgccttgatggcggcgcgggtcgggcactggatggaccgcggtttcgccggtcgggtcagtcttggcgcgttgctgctgatgctggccgcgtggtggccgctgctgggcctgccgcaggcgctgtcgttgctgctgctgggcgtgatcgtgctcgacctcggtgggcaggcactgcacatatcgaaccaggcgctgctgctgcgtgcaccggcagaacagcatggacgcctggtggcgttgtacatgctgttctatgcagtgggcagtggtgccggtgcggctgccgggccctggatgcaggcccggcatggctggcctgcggtgtgcctgctgggtgcaggcatcgcggcgctggcgctgttgtggtgggcagcatggcgggtggtggcgtccaatgcatcggctggcgcgcgaaccggtagagtcgactgtcggtag

SEQ ID NO: 492855 - DNA, 1416 bp, Stenotrophomonas maltophilia
gtggaaccaccccaactggacgatgccagccaaccgctggccgaggcctggcagcactgcctgcaacaggccggccctgccgccaccgcgctgctgcacgccgccgccgccgatgccccgccggcgctggcccaacgcttctacgaggtactgctgcaggacgggcgtgcacgccgcttcctgtcccacgatcaggtcaagcagcgcctgcagccggccatgcagcgctggctggtgcagttgctgaccaccaatgccgacggtattgccggcgccgttgcctcgcagcgggtgatcggcgatgtgcatgcccgggtcggtattccggtcgacctggtcacccgcggcgcgcgcgtgctcaagcacgaactgttcgtgcgcctgcacgacgacgcgcccgacagtgccactgcgttcgccgccatcgactgcctcagcgcgatcatggacatcgccatggaaggcatgaccctggcctatacccatgcacgcgagcgctcgacccgcgccgatgctgcgtaccggctgttctcgctggtgcagaacgtcggcaccgaacgcgaacgccagcgcgcactgctgctggactgggagaacgccctgctctacgcgctcgctggccacgtacaggccagcgacagcgccagcctggccacttccgagttcggcctgtggttcacccacaagggcatccccagcttcggcgagagcagcgagacccggcaggtcggccagctgatggcccgcatcgacagcaacctgcagcgggcgagcaacgatgccccggcacaacgactggcggtgctgccggccatccgcgaggacctggccgccatccgcaccctgatgacgctgctgttcgagcgcatcggcgagctggatgccggcagcgatgcgctgaccaacctgctcaaccgccgcttcctgcctaccgtgctgcgccgggagatcgagctggccacgcgcaaccgcacgccgttctcgctgctgctgctcgacctggatcacttcaaggcgatcaacgacggccacggccacgacgccggggaccgcgcgctgcagcacgtcgccggcctgctcggccagctgacccgcggcagtgactacctgttccgctatggcggcgaggagttcgtggtggtgctggtcgcggccagcgaatcacaggccgcggtgatcgccgaaagcctgcggcggcagatcgcgcagtcaccggtggcattggccaacggccaggtactggcactgaccgccagcatcggcgtagccggccatgacggccacccggactacgagcggctgatggcacgggccgatgcggcgatgtacgaggccaagcgcagcggccgcaaccgcgtggtagtggccagcgcggaccttgaggaagcaccgggacggcgtgcactgcagcgatga

SEQ ID NO: 492856 - DNA, 2274 bp, Stenotrophomonas maltophilia
ttgccctgccagaaggtccagatcatgtctcctgccgttgtcctttcgccgcgcccgctggcgctcgccgttgccgccctgctggcgggaagcgccctgaccgcccaggccgaaaccgatgccaccgatatcgacacggtgcatgtcaccgcctcgcagattgcccgccaggcactgggtacctcgaccatcaccgccgaggacatcgccaagcgcccgccggccaacgacatcgccgagctgctgcgcaccatgccgggcgtcaacctcaccggcaacagcgcctcgggccagtacggcaacaaccgccagatcgacctgcgtggcatggggccggaaaacaccctgatcctggtcgacggcaagcgcatcggtgcgcgtgacgccgtgcgcatgggccgtagcggtgagcgcaatacccgcggtgataccaactgggtgccggcggaaatgatcgagcgcatcgaagtgctgcgcggccctgcggcggcacgctatggctccggtgcgtccggcggcgtggtcaacatcatcaccaagcgcccgaccggcgacctgaccggagcggtcgacctgtatggcctggtgcccgagcacagcgccgaaggcggcagcgagcgcgtcggcctgcagctgagcgggccgatgaccgacaccctgtcgttccgcctgtacggcaacctcaacaagaccgacgccgactcactggacctcaaccgccagtacgccaccagcccgaacgcggtgccaccggctggccgcgagggtgtcaagaaccgcgacgtcaacgcgttgctgcgctgggacatcaccaccgaccaggtggtggagttcgaagccggcaccagccgccagggcaacatctacgccggtgaccgcgcggtcagcactaccggtacctcgaccggcgttgacctggcggcgctggccgaaggcgaagcggaaaccaaccgcatgtaccgcaacaccggcgcgatcacccatcgcggccgctggggcgacgtgacctcgcgggtgaccgccgcggtggaagcggtcaacaactcgcgcatcaatgaaggcctggccggtggcccggaaggcagcttcaacggcaccgactggtcgacctcgcgcctgcgcaactaccagctggatggcgaagtgagcttcccgacctcgctgggcagcgccgagaacatctggacgctgggctttgaatacctggacagccgcctgaccgacccgtactcgatgagccagtccagcagcagcggcggcggtatcccggggctgtcggccgatcgcgcgcggggcaaggccgacgcgcagaccaccgcagtgttcgtcgaagacaacatctacctgggtgagcgctggatcgtcaccccgggcctgcgcttcgaccaccacagccagttcggcaacaacaccagccccagcctcaatgcgcagttccgcatcaacagcgactgggtggtgaagggcggcatcgcccgcgcgttcaaggcgccgaacctgtaccagtccaatccggactatctgtactacacccgtggcaacggctgcccgaatgcactgccgagcctgggtgccggttgctacatgcgcggcaacgcggacctgaaggcggaaaccagcctgaacaaggaactgggcatcgagtgggcaccgcagagcggctggcaggcctcgttgacctacttccacaacgactacaaggacaagatccaggccggctacacccagattggcctgaccgccgacaccaagggccgcatcttccgctgggagaacgcgcccaaggcgatcgtgcaggggcttgaaggcaacctggtgatcccgctgctgggcgagcagggcaaccgcctgaaatggagcaacaacttcacctacatggtggaaaacgagaacaagagcaccggccagccgctgtcggtgatcccgaagtacaccgtcaacacgatgctggactggcaggccaccgacaagctgtcggtgctgctgaccggcacgttctacggcaagcagaagccggccaccgccaacatcaacaatgatccgcgctgcaccggcagctgcgatccctcgatcgcgctgcaggaccgcggtgcctacaacatctggggcgtgagcgcgcgctacagggtgaccgggaccgtcagcttcggcttcggcgtgaacaacctggccgacaagcgcctgttccgcgaggccaacagcagcgatgccggtgcggcgacctacaacgaaccgggccgcgcgtactgggccagcctgcgcttcgggttctga

SEQ ID NO: 492857 - DNA, 981 bp, Stenotrophomonas maltophilia
atgggccacgaccacgatcacctgccatcccagatccgccacgagaaacccttgtggtgggccctcggcctgacctccaccttcctcgtcatcgaggtggtgggcgcgttctggaccaacagcctggcgctgctgtccgacgcggcacacatggccaccgatgcactggcactgatgatcgcgctggtcgcggtgcggttgagtcggcgcccgccggacgcgcgccgcacctacggctatgcacgcctggaagcgctgggcgcgatgatcaacggcgccatgctgttcgtggtcgccgcctacatcctgtgggaggcgatcggtcgcttccgcgaaccgcaggagatcgcatcttcgggcatgctggtgatcgccgccgcaggcctggtcatcaacctgatctcgatgcgcctgctgcaggccggcagcggcgagagcctgaacgtgaagggcgcctacctggaagtgtgggcggacatgcttggctcggtggcggtgatcgccggtgcgttgttgatcaagtggaccggctggaagccgatcgacccgatcctggccgtgctgatcggcctgtgggtactgccgcgcacctacgtgctgatgcgcgaggcgatcaacgtgctgctggaaggcgtgcccaagggcgtggacgtggccaaggtgcgcgacagcctgtccggtcatgctgcggtgctggacgtgcatgacctgcatgtgtgggcgctggcctccagcacgccggcgctgaccgcgcacatcgtgatgcgcgacggcaccgacgccgatgcgctgcgccgtgagctgggcgggcgcctgcacgatgacttcggcatcgaacacgtgacgctgcagatcgaagcggaccactgtggtgaagcctgcgctggaccggcgtcggcaaagggcggcgcgcagcagggccatgaaggccacgaccacggtgaggacgcgcagggccatcgcggccacgtgcatcattga

SEQ ID NO: 492858 - DNA, 675 bp, Stenotrophomonas maltophilia
atgaatacggtgatcgatcccggatgttgggaaggcagcgtctccgcggcacgcgcgcagcagctccagctggccggccgcgtggagcgccaggaccgcctgccacgcgacgtccgttggctgggcgggctggatgttggctttgaagacgacggcgccatcacccgcgccgcggcggtactgctggacgtggagacgctgaagcccgtggcgcaggagatcgcgcgcatccccacggtgatgccctacatccccggcctgctcagcttccgcgagctgccggcactgctggccgcgctggcgctgctgccgcgcacgccggacctggtgttcgtcgatggccatggcatcagccatccgcgccggctgggcgtggccgcgcatctgggcgtggtcaccgacctgcccagcatcggcgtggccaagtcaaagctggtgggccggttcgtcgaaccgggcgccgaggccggtgcacatgcgccgctgcaggatggcgacgaacaactgggctgggtgctgcgcagcaaggtgcgctgcaagccgctgttcgtggccggcggccatcgggtcagtgccgataccgcgctggactgggtgcagcgcacgctgcgcggttaccggctgccggaaccgacccggctggcggatcggctggcctcgcgacgcgacgaatga

SEQ ID NO: 492859 - DNA, 750 bp, Stenotrophomonas maltophilia
gtgacccgtaaactcgtactgttgcgccatggccagagccagtggaacctggacaaccgcttcaccggctgggtcgatgtcgacctgaccgagcaggggcgccgggaagcggccgccgccggtcgcctgatgcgcgaggaaggcctgcagttcgacgtcgcccacacctccgtgctcaagcgtgccatccacaccctgcagggtgcgctggccgagctggagcaggactggctgccggtgaacaagtcctggcgcctcaacgagcggcactacggcggcctgcaggggctggacaaggccgagaccgcggccaagcacggcgaagagcaggtcaaggtctggcgtcgttcgtacgacatcccgccgccgccgatggacctggaagatccgggccacccgatccatgaccgccgctacgccggtctggaccgcaacgcgctgccgggcaccgagtcgctggccaccaccctggaccgcgtgctgccgtactggcacgacgccatcgcgccgcagctgaaggacggcaagaccgtgctggtcactgcccacggcaactcgctgcgcgcgctgtacaagtacctcaacaatgtctcgcgcgaggagatcctcgagctgaacatcccgaccggcatcccgctgctgttcgaactgaacgacgacctgaccgtgcagtcgttccgctacctgggcgacccggaagcagcgcgcagggccgccgaagccgtggccaaccagggcaaggcgaagtaa

SEQ ID NO: 492860 - DNA, 462 bp, Stenotrophomonas maltophilia
atggacgaagctgcgctgctgcgggccatcgacgcttgtgagtgtctgttcctggcgggcatcggcgagccggaagcgaatcgtctgcgcctggtcgtcgaggaaggcctggtggtcggaaagccctcccgtgtggagctcgctcatggacgttcaatcgatgatgcgcgtgcgatagaggtgatgccccactcgcagcgttttgagctgatctgggaccactacatcagctacgccgtgcacaacgagtcctaccagcgctgggacgacgccgaaagctggagcggcaacctgttccgccgctacagccgttcgaagttcctcgattatctggaccatgccacctttgccgatgtcagttacccgggcccattcacgcactatcaggtgatatgccaggaacacgtcatcgacattgccgcgttgcagccgccgaaggtgcgccgcatggatccctcgtag

SEQ ID NO: 492861 - DNA, 2094 bp, Stenotrophomonas maltophilia
atgaacgtccgcaatctggtcccgctgggcctgaccatcgccatcgctgcctcactggcggcctgtggcaagaacgaaaccgccccggcggccagtgccgacgccaagccggccttcgacctgtcgcagatcaagacgccgctgatctcgctcaacagcgccgacctcgatccggccattccggcctgtaccgacctcaatggtttcgtcaacagcaagtggctgaaggccaacccggtgccgggcgaccagaccacctggggcagcttcgagatcctgcgcgagcgctcgctggaagtgcagcacgcgctggtgcagcaggccgccgccagccaggccaaggcgggctcggtggaagcgaagatcggtgacatctggaagaccggcaacgatgaagcgaagatcgaagctgccggcctggcgccgctgcagccgcagctggacaagatcaccgcgctgaacgacaccgccgccatcacccgctacctgcgcgacagccaggccgagggcaagggcgtgctgttctcgctgttcgccaatgccgactacaaggattcggccaacgtcatcgcctacgtcggccagggtggcctgggcctgccggagaagggctactacttcgacgatgcgcaggccaagatccgcgacgcctacgtggcctatattgcacaggtgctgaccctgtccggcgtggacgcggcgcaggccgccgagcaggcgaaggccgtgatggccttcgaaacccgcctggccaaggcctcgatgtcgcgcatcgaaatgcgtgacccggccaagcgctacaacccgctcagcgcggctgaggccgacaagctgaccccgaacttcagctggaccgcgctgttcgagaccctcaaggtgccggccgcgcagaagttctcgctggcccagccgggcttcttcggtgaaatggacaagatgctggccgatgtgccggccagcacctggcaggcctacctgcgcttccacaccatcgacgacgcctcgccgtacctgagcagccagttcgagaaggccaacatcgatttctatggcaccaccctgcgtggccagaaggaaatgcagccgcgctggaagcgcgtgctggagtcggtcaacggtggcatgggcgaagccctgggccagctgtacgtcgacgccgtgttcccggccgagtcgaaggtcgccatgcagcacctggtggaaaacctgtcgcaggcgctgaaggcgcgcctggagcagctgccgtggatgggcgaagaaaccaggaagaaggccctggagaagtgggccagcttcaccccgaagatcggttaccccgacaagtggcgtgactgggcgggcctgcagaccaacggcgacagctacctgggcaacatgcaggcggcgcgtgcgttcaactaccgctacatgctggacaagatcggcaagccggtggacaagaccgagtggggcatgaccccgcagaccgtcaacgcgtactacaacgccaccaagaacgagatcgtgttcccggcggcgatcctgcaggcaccgttcttcgacgccaaggccgatccggcgctgaactacggcggcatcggtgcggtcatcggccacgagatgatgcacggctacgacgactcgggcagccagttcgccgccaacggcaacttcgacaactggtggaccgacgccgaccgcaaggccttcaccgagcgtaccgaccagctggtcgcgcagttcgacggctatgaatcggtgccgggcgtgttcgtgaagggcaagctgaccctgggcgagaacatcggcgacctcggcggcctgaccgtggcctacgacgcgttgcagatggcgctgaaggaagacccgaaggcgaatgtcgaagtggatggccacagccaggaccagcgcttcttcatgaactgggccaccgtgtggcgccgcaacttcaccgatggtgagctgcgcgtccgcctgaacaccgatccgcacgccccggccaacttccgtgccaacggcgcaccgtcgaacatgccgtcctatgccgctgcattccagtgcaaggccggcgacgcgatggtgcgtgccgacgacaagcgcgtggtgatctggtaa

SEQ ID NO: 492862 - DNA, 612 bp, Stenotrophomonas maltophilia
atgtttcctgacgccgtacccgcccccgacctgctgcacgcgcaggcctgcctgatcgatgccctctcgatgtcgctgcagatgcgcgacgcctacacccgccatcactgcgaccgcgtcggcctgttcgcgcagcggctggccgcgcactgcgatctcgacgaccaggcctgtgcgcaggtcggcctggccgcgcgcttccacgacatcggcaagatcggcattcccgacgacgtactgctggcaccgcgccggcataccgatgaggagcgcacgatcatgcgcgagcatccggtgcgcggcgagcacatcttcctggccaccggccgcagcgacgccgcgctcgtggcgcggctgatccgcgcccatcacgaagccttcgatggcagcggctatcccgatgggctgcgcggcgaatccatcccgctgggcgcacgcatcgtcaccatcgccgatgcctacgatgcgatgaccagcgtgcgcccttaccgcgacgcgatggagcacgaaaccgcgttgcggatcatcgattcgcagtctggagggctggtcgatccctacgtgctgcagcgcttccatcgcatgctggcgcgggagccggagctggcctga

SEQ ID NO: 492863 - DNA, 3465 bp, Stenotrophomonas maltophilia
atgtcgcgtacctcataccccgccccgccgctgccgcgcgccggccagctccgcgcctggtggcgcgcccccgcctcgccgaccgccctggcctggtaccttgcccaggccgcgcgtgcgcacgacgccccgctgctggtgatcgcccgtgacaaccacggtgccaaccagctcgaagccgacctgcacaccctgctcggcggcgatccggccctgccggtggtcgccttcccggactgggaaaccctgccctacgaccgcttcagtccgcatccggacatcatttcgcagcgcctggccgccctgcaccgcctgcccgcgctgaagcgtggcctggtgatcgtgccggtgcagaccctgctgcagcagctggccccgcgcagctacgtgatcggtggcagcttcgacctgaaggtcggccagcgcctggacctggaagccgagaagcgccgcctggaaagcgccggctaccgcaacgtgccgcaggtgatggatccgggcgacttcgctgtgcgcggcggcctgctcgacgtgtacccgatgggtgccgacgagccgctgcgggtggaactgctggacgaggacatcgactcgatccgtgcctttgacccggaaagccagcgttcgctggacaaggtcgaggcggtgcacatgctgcccggccgcgaagtgccgatggatgaagccagcatcgcccgcgtgctggccacgctgcgcgagcggttcgatgtcgatacccggcgcagttcgctgtaccaggacctgaagtccggactggcgccggccggcgtcgagtactacctgccgctgttcttcgaacgcaccgcaaccctgttcgactacctgcccagcggcagcctgccggtggtctgtgccggtgcgtatgaagcgtccgtcgcgttctgggcgcagactgcggaccgctatgagcagcgccgccatgatgtggagcgcccgctgctgccgccgtcggcgttgtacctgtcgccggagctgctgcgcgagcgcctgaacgaagccccgcgcatcgaggtgtgggcggctgaccatgcgcgcatcgccgacgcgcacgcgctgggcgaccagccgctgccaccgctgccggtggccgcgcgcgaagcccccgctggcgatgcgctgaaatccttcctcggccattatccgggccgggtactgatcgccgccgattcacccggccgccgcgaggcgctgctggaagtgctgcaggccgccgagctgaagccgccggtggtggccgacctgcccagcttcctcgccgacgacgcgcgcttcgcgatcgcggtggcaccgctggaggatggcttcgcgctggacgatccgcgcatcgcggtgctgaccgagcgccagctgttccccgagcgcgccggcagcacccggcgcacgcgccgtgccggccgcgagccggaagcgatcatccgcgacctcggtgaactgaccgagggcgcgccgatcgtgcacgaggatcatggcgtcggccgctatcgtggcctgatcgcgatggacgtcggcggcatgcccggcgagttcctcgaaatcgaatatgccaagggcgaccgcctgtatgtgccggtcgcccagctgcacctgatcagccgctattccggtgcgtcggcggaaaccgcgccgctgcattcgctcggtggcgagcagtggagcaaggccaagcgcaaggccgccgagaaagtacgcgacgtcgccgccgaactgctggagatccaggcccgccgccaggcgcgtgccggcctggcactgcaggtcgaccgcgcgatgtacgagccgttcgcggccggtttcccgttcgaggagaccccggaccagctggccgcgatcgacgccaccctgcgcgacctggccagcagccagccgatggaccgcgtggtctgcggcgacgtcggcttcggcaagaccgaggtggcggtgcgtgcggcctttgcggccgccagtgccggcaagcaggtggctgtgctggtgccgaccacgctgctggccgaacagcattaccgcaacttccgcgaccgcttcgccgattacccgctgaaggtcgaggtgctgtcgcgcttcaagaccaccaaggaaatcaaggccgagctggaaaaggtcgccgccggcaccatcgacgtgatcgtcggtacccatcgcctgctgcagccggacgtgaagttcaaggacctgggcatggtcatcgtcgacgaggagcagcgtttcggcgtacgccagaaggaagcgctgaaggcgctgcgcgccaacgtgcacctgctgaccctgaccgccacaccgattccgcgcacgctcaacatggccatggccggcctgcgcgacctgtcgatcatcgccacgcctccgccgaaccggctggcggtgcagaccttcatcacccagtgggacaacgcgctgctgcgcgaagccttccagcgcgagctggcgcgtggtggccagctgtatttcctgcacaacgacgtggaaagcatcggccgcatgcagcgcgagctgtccgagctggtgccggaggcgcgcatcggcatcgcccatgggcagatgcccgagcgcgagctggaaaaggtgatgctggatttccagaagcagcgcttcaacgtgctgctgtcgaccacgatcatcgagtcgggcatcgacatccccaacgccaataccatcatcatcaaccgtgccgaccgtttcggcctggcccagctgcaccagctgcgtggccgcgtcggacgttcgcaccaccgcgcctacgcgtacctgatcacgcccgaccgccgcgcgatcacccccgacgctgagaagcgcctggaagcgatcgcctcgatggacgagctgggcgccggcttcaccctggccacgcacgatctggaaatccgcggtgccggcgaactgctcggcgaggaccagagcgggcagatggccgaggtcggcttcagcctgtacaccgagctgctggagcgcgcggtgcgcagcatcaggcagggcaagctgcccgaccttgatgccggcgaggaagtgcgtggtgccgaggtcgaactgcatgtgccggcactgatcccggaagactacctgccggacgtgcatacccgcctgaccctgtacaagcgtatttccagcgcgcgcgacagcgatgcgctgcgcgaactgcaggtggagatgatcgatcgcttcggcctgctgccggatgcggccaagcacctgttcgccatcgccgagctgaagctgaaggccaacacgctgggcatccgcaagctggacctgggcgaaaatggtggccgcatcgtgttcgaatccaagccgaacatcgacccgatggcggtgatccagctgatccagaagcaaccgaacctgtacgccatggaagggcccgacaagctgcgcatcaagcacccgctgccgttgccggaagaccgcttcaacgcggcccgcgcccttctgaccaccctcgccccgggttga

SEQ ID NO: 492864 - DNA, 546 bp, Stenotrophomonas maltophilia
atggccactcgcaaccgcatgccgccctggcatgagatcttcaaggctcccagcggccacgagctgctgatccgccccatccgcccggaagatggcgcaccgctgcaagcggcgttcagcctgttcgggccggaagaaatccgtgatcgtttcctgcaggcggtgaccgagctttcgccggaaaccacccagcgcctgacccacccgaatcccaagaccgagatcaccctggtcgcagccgaatccctgcccgctggcgaagcggtggtcggcgcggtcgcccgggcctcgatcatccccggcacccgtgaagccgagtacgcgatcctgatcagccgcttcctcattggccagggcctgggccggcagctgatgcgcaagctggtgaagtggggccgcggcaagtacctggaccgcctgtacggcgacgtcgccgccgagaacgagccgatgaaacagctggccgcctcgctgggcttcaagccggtcccgcacccggccggtgccgaaggcctggtgcggatggtgctggagctggacaactga

SEQ ID NO: 492865 - DNA, 858 bp, Stenotrophomonas maltophilia
atgaactatcgccacgccttccacgccggcaaccacgctgatgtgctcaagcacatcgtgcagctggccctgatcgacagcttcaagcgcaaggacagcccgttcttcgtgctcgacacccacggcggtgccggccgctacctgctggccagcgaagagagccgcaagaccctggaggccgaatccgggatcatgcggctgatggcccagcccaggctgccggaggtggtcgagcgctacctgaaggcggtgcaggccgacaacccggtgggcgcgctgaccaactacccgggctcgccgctgctgagcgcacaggcgatgcgcgcgcaggaccgcatggcggtctgcgagctgcaggaagccgaaacggccacgctgaaggccctgttcgcccatgacagccgcgtcgatgtgcgcgctggcgatggctatgccctgctgcgctcgctgctgccgccgaagttcaacggcagcaagatcggccgtggcctggtgctgatcgacccgccgtacgaggcccaggacgccgagtaccaggccgttctggccgccctggccgagaccctggcgcgctggccacaggcgacctgcgcggtgtggttcccgatcaagcagcgccgcaccatcctgcacttcctgcgcaaggccaccgccctgccggtgaaatcggcgatgacgatcgagttcctggtgcgcccggacgactcgccgctgcgcctcaacggcagcggcatgctgctgctcaacccgccgtggcagttcgaccgggtggtcggcccggccctgccggcgctgcgccagcacctgggcgaaccgggggccagcacccgcctggattggctcaaagcccccgaatga

SEQ ID NO: 492866 - DNA, 726 bp, Stenotrophomonas maltophilia
atgctgcgcgccatgacagctcccgttgcccatgtcctggtggtcgaggacgaagccgccatcgccgaaaccgtgctttatgcgctgcgcagcgaaggctatgccgccagccactgcctgctgggcggcgaggccctgcaacggctgcaggccggcgatatcgacgtggtggtgctggacgtgggcctgccggacctgggcggtttcgaggtctgccggcggctgcgtgcgcagcccgggccggcggcgcagctgccggtgatcttcctgaccgcccgcaacgatgaagtggaccgcgtgctcggcctggaactgggcgccgacgattacatgaccaagccgttctcgccgcgcgagctggtggcgcgggtgcgcgcgcgcctgcgtcgtgcggcagcggtcgtcgcagcgccccgcgcggacgccggctggcaggaacacggggcgttcgcgatcgaccgcgaaggccggcgtatccgcttccgcggccatgcgctggacctgacccgatacgagtacgcgttgctggaagcgctgctgcagcggcccggtgccatcctcagccgcgcgcagctgatggaccggggctgggacagcagcgccgacagtgccgaccgcaccgtcgacacccatgtaaagacgttgcgcgccaagctgcgtgcggctggtgccagcgacgacccgatccgcacccaccgtggccttggctacgcgctggaggtctag

SEQ ID NO: 492867 - DNA, 1461 bp, Stenotrophomonas maltophilia
atgcgcctggtactgaagctgttcctcggcttcttcctgatcaccggcatcgccgcgttcttcgtgatgcgcgtattcgtcaacgaggtgaagcccggtgtgcgccaggcgatggaatcgaccctggtcgacgcggccaacgtgctggccgagatggccgccgccgacgtcaaggacggcaccatccgcagcggcagcttcacccgcaacctggccaaggcgcggcagcgcgacctgaaggcgatggtctggcgttttcccaagcgatcgctggattaccgggtgaccatcaccgatgccaggggcatcgtcatctacgactcgctgggccgcgacctcgggcgtgacaattcgcgctggaacgatgtctaccgcaccctgcgtggcgagtacggcgcccgctccagcccggaaataccaggcgaagaaggcgatacggtgatgcacgtggcggcgccggtatacgacccggccgatgggcgcaccctgatcggcgtgctcagcctggcccagcccaaccgcagcatcgatccgttcatcgccgccagccagcgcgccatcatcgagcgcggcgcctggttgatcgggctgtcggcgctggtcggcgtgctggtgacgatgtggctcaccaccggcctcggccagctcagccgctatgcacgcgcggtcagcgccggcgaaccggtgccaccgccacggcgccgccgcgacgagatcggcgacctgggccaggcgctggaaaccatgcgccgcaagctggagggcaaggcctatgtcgaacagtacgtgcagtcactgacgcatgaaatgaagagcccgctggcggcgatccgcggtgccgccgagctgctgcaggagccgctgcccgaggccgaccgcgtgcatttcgcgcgcagcatcgtcgaccagcaggagcggctgaccgagaccatcgacaagctgctggcgctggccgaagtggaacagcatggctggctgcagacccgcgatccgatcgcgctgccaacgttgctggccgatgcggcagcggcggcgcaggtgcgtgcgcaggcggccggcgtgcaggtcagcatcggcagcgcgcccgacctgcgcgtgcagggcgatgcctatctgctgcggcaggcgttgcacaacctgatcgacaacgccattgccttctcaccgcccggcgcggacatcgcactgcaggccgaggtggacgggcagggcgtgcgcctgcaggtggcggatcgcggtgccggcattcccgactacgcgcgcgaacgggtgttcgaacgcttctattcgcttgcccgcccgggcagcggccggcgcagttccggcctgggcctgccgttcgtgcaggaggtcgcgcgcctgcacgatggtcgcgccagcctcgacgcgcgcgacggcggtggcaccgtggccagcctttggctgccgttgtcagtgccgggccagcgtccgcgccgctga

SEQ ID NO: 492868 - DNA, 1320 bp, Stenotrophomonas maltophilia
atgaaatccctgaagatgctgctgaggttcgccattgtcggcgggctgatcctgttgctgctggtgccgctgatgatgatccgcggggtcatcaccgagcgcagccagtaccgcgacgaggcctttgcccgggtggccgacagccgtgccggcacgcagcagctggtgggcccggtacgggtggtgccgtgggtggaacgcaagcaggttgaactggttgacccgctgggcgtcaagaagaccgagatccaggtgaccgagggccactggctgcagatgccggcgtcgctggaggtggggggcgagatgctgccgagccagcgcgaggtcggcctgttcaaggtgccggtgtacagctggaatggccagttgaaggcgaccttcgccgaagacgactatccggtgaagaacggccgcacctatggccagccctatgtggcgctgggggtttccgatgtgcgcggcctggtgggcacgccgaacctgcgggtggacggcaagcagctgcggttgctgcccggcgtaggcgtggccagcgaaatcggacgtggcctgcatgcgccggtgagcggtttcgccgcggatcagggcggcgcgctggccgccagcaccgttgaactggagctgcgcctggatggcagccgcatgctgtcggtggtgccggtgggcgatgacacccggatcgcgctgcgttcgagctggccgcatccgtcgttcagcggcgccttcctgcccaacgaacggcgtgtcgatgcacagggcttcgatgcacgctgggcggtgtcctcgctggcctccgatgcacagcgccagctgcgcagcgagggctcgatcgattcgcaggccgtgacggtgtcgctggtcgatccggtcgacacctacacccaggccgaccgtgcctcgaagtacggcgtgctgttcgtggtgctgaccttcgtcggcttcatcctgttcgaactgatcaagtcgctgcgcatccatccgctgcagtacctgatggtcggcctggcgctggcgatcttcttcctgctgctgatcagcctgtccgagcacatcgcgttctggaaggcctacctggtctcggccgtggcctgcatcggcctgcaggcggtgtacctggccaacgtgctgggccactggaagcgcggccttggcttcgctgcgctgctgaccgtgctgtacggcgcgctgtatggcctgctggtgtcggagaacaacgcactgctgatgggatcgctgctgctgttcgtgatcctggcgctggcgatgtgggtgacccgccgggtcgactggtacgcgcttggcgcggacctgaagtaa

SEQ ID NO: 492869 - DNA, 411 bp, Stenotrophomonas maltophilia
atgagctggcgccagggattgcggcaacgggcgcggcagggcattccggccctgctggaagtggatgcactgctgcaggcacatggcgtgctggcggccctgccgggggcacggatcgcccccggcgtggtccgcttccagcttgccgcggtgacctgcgagggattgcagggcaagggcctggcctggttgcagggcgcgcggcagggacgcggtgcgctggcggggaaggtgccgcgctaccggccatggaaggccggggcggaagcactcgcggaaatcggcattggtggcctgcccgatgactggcccgcgcatgcggcggtgtatggctgcagcagcatcgaccggcggcactggttgctgctgctgccggagcgggcgcagctgtggctggggtggagtgggtga

SEQ ID NO: 492870 - DNA, 1593 bp, Stenotrophomonas maltophilia
gtgttgaagtggggcgtgctggccgtagcgctggcaatgggtggcaatgcagcggcgcagcagcgcgaatcagtggacctggacatggtcagccgcatccgccaggaggccttccaccgttcgcaggtgatggacaccttcagctatctcaccgaacgcatcggcccgcggctgaccaactccccggcgatgggccgcgccaacgcgtggacccgcggcaagttcaacgaatggaagctggacaacgtccacgacgaagcgttcgatgactttggccgtggctgggagttcacctcggccagcgtggaaatgctgggcgaccgtgtgcagccgctgcatgcactgcccaaggcctggacgccgggcaccaaggggccggttgaaggcgagctggtccaggtcgagatcaagaagcccgaagacatcgaaaagtaccgcggcaagctgcgcggcaagatcctgctgctgggcgaggcgcgcgagtacaagcgcggcaccgagccggattcccatcggcatgacgcgacctcgctggaagggctgcaggcgttcaccctgccgaaggaccaggacgccaccgccgaacgtgccaagcgggtcaaggagtaccaggaacgccagcagctggcgaccagggtcaatgcgttcttcgtcgaagaaggggcgctggcctcgatcagcatcagcagctgggacaacggcatcatccgcgttgccggtggtggttcgcgcaaggccggcgagccggtcggcatccccgagctggcgatgatcagcgagcacttcaacccgctggtgcgcgcgctgaaggccgggcagaccgtgcgcctgcgcgtggatgtggccgcgcgcttcaccgatgacgccgaccagcccggctacaacacgctggccgagatccgcggcagcagcaggcctgatgaagtggtgatgatcggcgcgcacctggattcctggcacagcggcaccggcgcggccgacaacgccgccggcgtggcagtgatgatggaggccatgcgcatcctcaaggccaccggcgccaggcccaagcgcaccatccgcgtggcgctgtggagcggcgaggagcagggcctgatcggctcgcaggcctatgtggccaagcatttcggccggttcccggagcccaccgacccggcgcagaaggcgctgccggcgtcgctgcgcgagccgaccggtgcactgcagaagacccgcgattacagcaagttccaggtctacttcaacatggacaacggctccggccgcttccggggcatctacgcccaggaaaacctggcggcgatgccgatcttcgaagcctggctggcgccgttccatgacgtcggcgccaccaccgtggcgacccgcaacaccggcagcaccgaccacatcagcttcgaccgcatcggcctgccgggcttccagttcatccaggaccggctggactacttcaccaatgtccaccacagccacctggacacctgggaccacgccgaaccggaagacctgaagcaggccgcagccatcgtcgcctcgttcgcctacaacgccgcgatgcgcgagcagccgttcccgcgcaaggtggaaccgtaa

SEQ ID NO: 492871 - DNA, 1404 bp, Stenotrophomonas maltophilia
atgacctgccgcacccgcttcgcccccagtcccaccggctacctgcacatcggtggtgcccgcaccgcgctgtactgctggctggaggcccgccaccgtggcggcgagttcgtgctgcgcatcgaggacaccgaccgtgaacgcagcacccagggcgcgatcgacgccatcctggaggcgatggagtggctgggcctggactacgacgaaggcccgatctatcagaccgaccgcgtcgcccgctaccgggaagtggcagagcagctgatcgccgacggcaaggcctactacgcctacgaaacccgcgaagagctggacgcgatgcgcgaggccgccatggccaggcaggaaaagccgcgttacaacggcgctgcacgcgaactgggcctgccgtacaaggacgacccgaaccgcgtcatccgcttcaagaacccgctggaaggtacggtggtgttcgacgacctgatcaagggccgcatcgagatcgccaacagcgagctggatgacatggtcatcttccgcccggacggctaccccacctacaacttcgcggtggtggtggacgactgggacatgggcatcaccgaggtcatccgcggcgacgaccacatcaacaataccccgcgccagatcaacctgtacgagggcattggtgcgccggtgccgaagttcggccacatgccgatgatcctggacgagcagggcgccaagctgtccaagcgcaccggtgcggccgacgtgatgcagtacaaggacgccggctacctgcccgatgcgctgctgagctacctggcccgcctgggctggtcccacggtgaccaggagctgttcagccgccaggagctgatcgacctgttcgacgtgaaggactgcaattccaaggcctcgcgtctggacatggccaagctgggttgggtcaaccagcacttcctgaagaccgaggacgtggccgccatcgtgccgcacctggtctaccagctgcagaagctgggcctggacgtggccgccggcccggccccggaggatgtggtgatcgccctgcgtgaacgcgtgcagaccctgaaggaaatggccgagaaggccgtggtctggtaccagccgctgaccgggtacgacgaagcggcggtggccaagcacctcaaggccggtgccgaggtggcgctgggcaaggcccgcgaactgctggcagcgttgccggagtggaccgccgagtcggtgggcgtcgccctgcacgacacggccgcagcgctgggaatcggcatgggcaaggtcgcccagccgctgcgcgtggcgatcaccggcacccaggtcagtcctgacatctcccataccgtgtacctggccggccgcgagcaggccttgaaacgcattgatgtggccatcaccaaggtagcaacggcctga

SEQ ID NO: 492872 - DNA, 492 bp, Stenotrophomonas maltophilia
atgcccgccaagaccgccactgcctgtaccgccccgcaccaccacgtccacgacgcatcggatttcgtggcggtggtcgagcgtgtctcgcgcgaacgcgggctgcgcctgaccccgatccgcgccaacgtgctgaagctgatcgccgaggccggcaagccggtcaaggcctacgagctgctggaatgggtgcgcaacggcaagggcgtgggcgccgatgccccgcccaccgtgtaccgcgcgctggacttcctgatggccaatggcttcgtgcacaagctggaatcggtgaatgccttcgtggcctgccaccatcccagcagtgccgcgcattcggtgccgttcctgatctgcaacagctgccacagcgcggtggaactggaagaccgcgagatcgtcacccagctggagaagcgcgccaaggagctgggcttccagccgcaggcacagacgctggaagtgcatggcctctgcgcgcgctgcgccggctaa

SEQ ID NO: 492873 - DNA, 1155 bp, Stenotrophomonas maltophilia
atgcctcccgtcccgccccgccccgacgacaccgacaacgtcaccccaccgccgccgaccgacgcggcgcccgcggccacgccggtagaacctgcggtcgcgccgaagtacctcaagcccagcgcccgcagcgtggtggtgatggtggtagtggccttgctgggcattgcgctgatcctgcgcgcctggcacctgtggccgttcaccagcagcgtgatggtgaccgacaacgcctatgtacgcggccagatcacggtgatggcgccgcaggtgaacggctatgtgaccgaagtgctggtgaaggatttccagcatgtgaagcagggcgagccgctgctgcgcatcgatgaccgcatctatgcgcagcgcgtggcccaggcgcaggcgacgctggacagcgcgcgcgcggcgctggccaactcggaccagtcacaggcgcagaaccgcgcacagattgcctccgcccgcgccacgctgtcggccggccaggccgaactgcagcgttcgcgcaatgaattgaaacgctacgaggaactggcggcgcagcagctggtgtccatcaacgaccgcgacaagttccgcaccacccaggcgtcggcacaggccagcgtgcaacagtcgcaggcgcagatccgcatcgccgaggaaacgctggtgtcgacccaggtcgcgcgcaagagcctggaagcgcaggtggaaagcgcgcaggcgcagctggaactggcccgcatcgacctggccaacacggtgatccacgcaccacgcgacggccagatcagcgaagccagcgtacgcgtgggccagtacgtcgctgccggttcgcagctgctgttcctggtacctgacacgctgtgggtggtggccaactacaaggaaggccagacctggggcatggcgatcggccaaccggcgacgttctcggtggacgcgttccagggccaggtgctgcggggccgcgtgcaggagatcgccccagccaccgggtcggaattcagcgtgctgcgcccggacaatgccagcggcaacttcaccaaggtggtgcagcggctgccggtgcggatatcgatcaacagggatcagaagctggcaaagcagctgcggcccggcatgtcggtgatcgtgcgggtggatacccggtccaagccgatggactag

SEQ ID NO: 492874 - DNA, 1674 bp, Stenotrophomonas maltophilia
atggtccagccgtatctgaagccggttccggattgggaggagcatgagaagccgaccatgcccggctcggcgtcgatgccctggcacccgccgtaccggcgcgcggcctatgcgctggtatcgttgctggtggcgatcaccggcggcctcggcaatgcgctggtcaccgccaacctgccgttcctgcagggccagctggcgctcactccgacccagggcagctggctggtggccgcgtatgcgatggtgaatgtcaccgccaacctgctggccttcaagttccgccagcagtacggcatccgcctgttcgccgagatcggcctgggcctgtatgcggcgctggcggtgctgcacctgttcgtcggcagcttcgagaccacgatgctgacccgagccgccagcggcttcgcgggtgcggcctgttccacactgggcacgctgtacatgctgcaggcgctgccgcggcgattcaccggcaacctgctggtggtcggtgtcggcctgtcgcagctggcggtgccgatcgcctggatcgtttcaccaggcctggtcgataccggccaatggcaccagctgtactccttcgaagccggcctggccctgtgcgcgttcgcggcagtggtagtgctgaagctgccgcccggcatccaggtgaaggcgttcgagccattggacttcctcactttcgccctgctcgcgccggcggtcgcgctgctggtgatcgtgctggcgcagggctacacccgctggtggctcaacaccccatggctgggctgggcgctggtcgcctcgatcgtgctgtccaccaccgccttcatcatcgaacactaccggcgcaatccgctgctgcagatccgctggctgtcgaagctgccggtgctgcacttcatcgtcggcgcgttcctgatccgcttcctgaccaccgagcagtcctacggcgtggtcaacctgatgcgcacgctgggcatggggcctgaccagatgcggccgttgttcgtagtgatcctggccggggtgatcgtcggcatcgccggcgcctcgctcaccttcggaccgaagcggctgatcgcgcagctgctgatggcgatcctgctgctgggcgccgccgcgttcttcgaccagcaccgcaccagcctggaccggccgcacgacttctacgccagccagttcctggcctcggtcggtgccggcatgttcatgggcccgctgatcatgctcggcatctccgccgcgttgaaacagggcgtcgaccacatgatcaccttcctggtgacgctgtcgatcacgcagaccctgggtggcctggcaggttcggcggtgctggggaccttccagctgcatcgcgagcagctgtattccagcgcgctgaccagccagctcgatccggccgatccggtggtcgcgcaacggctgcgcatccagcagcagctgtacgctgcgcagatcaccgacccggtgctgcgcagtgcgcagggcagcgcgcagctggcgcagaccacgcgccgcgaagccaacgtgcgtggcttcaatgacgtgttcacgctgagcggctggctggcgatcggcttcctgtgctggttgctgctgctgtcgctgcgcaccgccgtgctcaagcaatggcgcaagcgccaccccgccctttccaccgcgtccacgccggccgcgtcccgttga

SEQ ID NO: 492875 - DNA, 567 bp, Stenotrophomonas maltophilia
atgaccgctcaacgtgccgatgctgctgcccgccgtgccctcatcctcgacgccgccgatcatgtcttcggccaacatggcgtcaccgccccgctggatctggtggtcgaacgcgcccaggtgggccgcgccaccctgtaccgcaacttccccgaccgcaccgcgctgatccaggcgctgctgcagcgcacggtcgaccgcatccggcgccaggtcgaacagctcggtgaccgcgatgacgccctgttcgaggtgttcgagggcatggcccagcgcatcatcgattcgccggcactggccgattactggcgtgcggttgattcggacgtgccgtccatgcgcgccgcgcgcgaaaccgtgcgcgacctgctggaggaaccgatcgcgcgcgccaaggccgccgggctgtgccgtgacgacctggaaaagacggatatttcactgatctcgggcatgctgggtgcggccctgcgcggcaagacccgcgacgagcgcgcccagttggccgggcgtgccctgcagctgctgcgtgggggtctccagggagctgccagcgaggcccgttga

SEQ ID NO: 492876 - DNA, 2211 bp, Stenotrophomonas maltophilia
atgcccgcccacacccctcggctcaagccgcattccctggccctggccctcgccgccctgttgccgtccgtcgcctttgcagccggccaggacacctcccaccgtgaccgccacctgaccgaactctcctcggtacaggtcaccgcgtcgccgctgcagggcgatgccgaatccctggcgcgcccggtggacgtgctggccggtgagcgcctggacgagcagaaggccggcaccctgggcgataccgtggccaagctgcccggcgtacagagcaccttcttcggccccggcgtcggccgcccgatcatccgcggccaggaaggcccgcgcgttgccgtgctgtccaatggcatgggcaacatggacgcctccacggtcagcgccgaccatgccaccagcatcgagccgttcctggccgaccagatcgaagtgctgaagggtccggccacgctgctgttcggcagcggcgccatcggtggtgcggtcaatgtggtggatggccgcatcgcgcgcgaactgccggagcgcccgctcagcggccgcgccgagctgcgcggcaactcggtgaacaatgagcgcagcggcatgttccgcctcgatggtgtcagcggcaatgtcgtgctgcacgtggatggcctggtgcgcaatggcgacgactaccgcattcccggctacgcggtgatcgacagccttgaagaccaccatgaccacgatcacgaccatgatcacgatgcagccgagggcgaagaaccgcgccgcggccgcctggacaacagttcgatccgcacccgcgccggcggcgtcggcgcaacgtggctgggcgacggtggttacttcggtgtgtcggccagcacctatcgcaccaactacggcattcccaacggcgcgcacgtgcatgccgatggtgatgaccatggccatgaccacggtcacgaccacggcgatgaagaggaaggcggcgacgagcatgacgtgcgcatcgacatggtgcagaaccgcttcgagaccaaggccggcatctacaacccggtctcgttcctgaagaacatcaacgcacgcgtggcttacaccgactacgagcacgtggagctggaggccggcacgccgtcgacgcgcttcaccaaccgtggtatcgaagcgcgcctggaagccgtgcagcagcagatcggcggctgggacggcgcgttcggcctgcagttcggcaacagcgatttcggcgccaagggcgaagaggcgttcgtaccggataccggcaccaggaacatcggcctgttcgtgctgcaggaaaagcagttcggcccgttcaagctggaactgggtggccgccacgaccaggtcaagctggacccgaccggtgactaccgtcgccgcacgttcggtgccaccaacctgtctgccgccggtatctggaagctcaacgatgcctttgacctgcgcatcggcgtggacagctcagagcgtgcacccaccaacgaagagctgtacgccgccggcgcgcacatcgccacccgctcgctggagatcggcgacgccaacctgaaaaccgagcgcggccagcgcgtcgaactgggcatccatacccacagcgatcgcctggacttctccgcgtcggtctaccagaccaagttcaaggacttcatctacctcgccgacaccggtgttaccgaaggcctgccggtccgcgcctggacccagcaggacgcggtgttccgcggcgccgaggccgaagcgctggtgcacctgttcgagggtggcgccggtgactgggatctgcgcctgttcggcgactacgtgaaggccaagctggatggcagcggcagccgcaacctcgacatcgccgtgccgcacggcgaccacaaccacaattacagcgtggagctggccaacaccggctacctgccgcgtatcgccccggcccgcgtgggtgccgacctgcgctggtcgaaggacggctggcgcgcctcggtcggtgcggtgcgttacagccgccagaaggacgttgcccagaacgaagccccgagcgacggctacacgctggtcgacgcgcacctggcctaccgctgggatcgcaacgcgggcaacagctacgaggtgttcctggatggcagcaacctgaccaaccgcgaagtgcgcccgcatacctcgctgctgcgcgactactcgccgctgccaggccgtggagtcgcattcgggatccgcgcgttcttctga

SEQ ID NO: 492877 - DNA, 531 bp, Stenotrophomonas maltophilia
atgtatcaatcgcagggcgcacgaatcccgtcgaggggacagggggaggggaaaccgtgcggttcggagagggatgttatattattccataacgattcgccgaccctgctggaagtcatgtccctgtcctcacgcctgcgccacctgctcgatcgtttcggtgccactggttcgatgctgtgcgcagtgcattgcgcggtgatccccgtgctgctggcggcggcgccgtcgctgggcctgtcgttctggctgagcgatggcgtggaacaggcgctggtggtgttcgtgaccctgctcgggctgttcagcctggtctggggctatcgccgccacggtgcgctgcgtgcgctcggcttcctgatccccggcctggtcgcgctgtgggccggcgtgctgtacgacccgctgcaccacaatgcggtgccgcatgcggtggtgatgaccatcggcggcctgctggtgggcgttgcccacctggtcaacctgcgcctcaaccacggccacgtgcacgacgcaagctgcgcgcactag

SEQ ID NO: 492878 - DNA, 180 bp, Stenotrophomonas maltophilia
atgggtaagggtgaccgcaagaccgccaagggcaagcgctacaacgccagctacggcaacgcccgttcgcacaccgcgagcaaggtcgccgtaggcgccgccgccccggttgccaagaagaccgtggccaaggctccggcgaagaaggccgtggcgaagaaggccgtcgccaaggcctga

SEQ ID NO: 492879 - DNA, 1251 bp, Stenotrophomonas maltophilia
atgacttccgtacgcctgacctgttcgctggcgctgctgctgccattggctgcctgcaccactgcgcctgcccctaccgcctccgttcccacgtccgtcgcatcggccgcaccgccgaagctgctgctgatctccatcgacggcctgcgcgccgatgcgctggaccgcgggctgaccccgaacctgcagcggatgatcgacggcggcgtgcgcgcccgctggatgacaccgtcctatccttccctgacgtttcccaaccactacaccatcgtcaccggcctgcgcccggaccaccatggcatcgtcaacaacagcatggacgatgaagcgctgggccgtttcgagctgagcaaccgcgaggccgtcaccaccagtgcctggtggggcggtgaaccgatctgggtcggcgccgagaacgccggcgtgcgcaccgccacgacgtcgtggccgggcagtgaatcggaaatccgtggtgtgcgccccagccagtggcgcatctacgacggcaaggaaccgctggagcagcgtgccggtatcgtgctcgactggctggcacagaccgacgccgatgccccgcgactgaccacgctgtacatggagcacgtggacaaggccgggcacaactacggccccgggtcgaagcagtacgccgacgccatcgcacgcgccgacctgatcgtcggccaggtgctcgacggcctgcagcagcgcggcctggtcgccaccaccaatgtgatcgtggtgtccgaccacggcatggccagcgtcgccgacggccacgtgatcgccaccgaatcgatggccgacccgtccatcgcgcgcaacgtcagccagggccagtcggtgggcttcgcgccagtggccggtcgtgaggctgaggccgaacgcgccctgctcggccgccatgcgcactacgagtgctggaagaaggagaacctgccggcgcgctggcactacggcacgcatccgcgggttccggccatcgtctgtgcgatggatgaaggctgggatgcgctgcaccgcgagaagatcgccaagcgcgcgaagcaggaccgtggctcgcacggctacgacaatgccctaccgtcgatgcgtgcggtgttcgtggccagcggcccgtcgttccgccagggcctggtgatcgacggcttcgacaatgtcgacgtctacccgctgctggcccacctgctgcaggtgccggccgcgccgaacgatggcaatccggaaacgctgaagcagaccctgcgctga

SEQ ID NO: 492880 - DNA, 492 bp, Stenotrophomonas maltophilia
atgacactgttgttcgatcgtttcgacagcccgatcggcgtgttgaccatcgccggcgacgagcgtggcctgtcacacgtgctgttcccggagaaccgccaccccgcgcgcgggcgtgatgactggcattacgcaccggatgccttgccggaagcacgcgagcagctgctgcagttcctgcacggcgagcgcaacagcttcgaccttgtgctggcgccgcgtggtacgccgttccagctgcgcgtgtggcaggcgctggcgctgattccgttcggccagacctggagctacctgcagctggcgcaacacctgggacagcccagcgcgacccgcgcggtgggcgcggccaacgggcgcaacccgttgccgatcatcctgccctgccaccgcgtgatcggcagcaacggtgcactgaccggtttcggcggtggcctggaaaccaaggccgcgctgctgcggctggaacaacgccagcccccgctgttcgcctga

SEQ ID NO: 492881 - DNA, 1479 bp, Stenotrophomonas maltophilia
atggacaccgccctcgccctcgacaccgccgcctgcgaccgcgcccgcctggcccgcgacgcacgtttcgacggcgtgttcttcaccgccgtgcgcagcaccggcatctattgccgcccggtctgccccgcaccgcccccgaagccgcgcaacatcacctactacccgaccgccgctgctgccgccgccgccggctatcgcccgtgtctgcgctgccgcccggagctggcaccacaggcccagcaggcactggccgggcagaccgtacagcgcgccctggccctgatccacggcggcttcctgcaggagcagccggtggccgatcttgctacgaagctcggcctcagcgcgcgccagctgcagcgcctgttcgtcgaacgcctgggtgcgacgcccgggcagatccacgccacccatcgcctgctgctggccaagcaactgctgaccgagaccacgctggcggtgaccgacgtcgcactggccgccggatacaacagcctgcgccgcttcaataccgcattcctgcagggctgcggcatggcccccaccgcactgcgccgccagcatcaaccgctggccgccgacgatggcggcctggtgttgcgcctgggctaccgtccgccgctggacttcccgcgcatgctggcgttcctgcgcaagcgcagcctgcccggcatcgagctgattggcgaggacagctatcagcgcgtgctgggcacgccggagcgccccaccctgctgcgcgtcactgccgacccgaagcgcccggagctgcgcctgcagctgggtgcggtggatccgcgcctgatcccggacatcgtgcgccgcgtgcgtcgcgtgtttgatctggatgccgacctgcagcaggtgcacgccgcattgggcgaggaacccttgctggcgcgcggtatcgccgaacgccccgggctgcgcgtgcccggcggctgggatggcttcgaagtgggcgtgcgcgccgtgctcggccagcaggttactgttgccgccgccaccaccttcgcgcggcggctggtcgatgcctatggcgcgcacctgccgggcatgtcgtccgactttgatcgccagttcccggcacccgaggtattggccgaggcgcctctggaatcaatcggcctgccgcgcagccgcgccgcgaccgtgcgtgcactggccaccgcctgcgccagcggccagctcgacttcgggcccggccaggcgctggaagagtttgttgcccgctgcgtggcactgcccggcatcggcccatggaccgcgcagtacatcgctttgcgtggcctcggccagcccgatgccttcccggccggcgatcttgtactgcagcaggtcctcggccacgcgcagggccagcgcctgagcgaacgcgcaaccgaagcgcgctcgcaaccgtggcgtccctggcgcgcctacgccgtgctgcacctgtggcacctgtccggcacattcgttggagaaccgacatga

SEQ ID NO: 492882 - DNA, 1164 bp, Stenotrophomonas maltophilia
atgtccgccaaattccgctggttgcccctgttgtgcctggccctggcgggctgcagtcagctggagaatccgggcaacgtgaccgctgccgacaaggcagcgcgggcgccggccagtgatggcgagaacatggtttcgatcaatgccgccgacgcgccaccggcaccggcaccaccgcgcagccaggcgggtcggccgtggccgcaggcgcagctggaaaatgggcgtacgtgggtcagttgcagcacggaatatgcgggcgatgccggcgacggtgccgaactggaagggctgcagcgcgagcagatcacccaggccctggcgccgtgtgccgagcgtgggctgatgcgcgtgcgttacgccggcaagatcaatccgggcttcgccgaaatgatgtggcggttggcggtggtcgctgacgaactgaagatccacaagcgcatcctcgacctggactccagtggtggccaggtggagtcggcgatcgtggccggtgacagcatcggtgaatcgggctggaccatctgggtgcgcgaaggctccatctgccacagcgcctgcgtgttcgtgctggctgccggtgacaaccgcctgctgtcgggcaaggtcggcatccaccgcatgatgcggatcagctccaaggccacctcgcgcgccgagctcaaccgcgagctgcacgaggtctacgacaacgtgaaggattacctgcagcgcaatggcgtggcggtgggcgtggccgatctgatgatgaccgtgcccaatcgcagcctgcgcctgctgacgccggatgagctgcgccagtacggcctggatggcaccaacgcggtgcaggacgatctggaacggatcaagcagatgcgcgcctgcggcgatgacttcgtgcagcgcaaggacgcgttcctgatcgccttcgaccagcagtgcaagcgcgacggcgccgacatggaatcgatcaacagctgcggccaggccctgaagcagcgcttcggtttcccggatgcggtatgcccggacgaaagcccgctgtcggagatcgatgtggcgacgctgccaccggcaccgtcggagccgccgccggtggccgagcagccgccagcgaacaccgccgcgcccgccgcgcaagctgatgcggcagcggtggagggcaacgctccggcacgctga

SEQ ID NO: 492883 - DNA, 546 bp, Stenotrophomonas maltophilia
atgaagcgcgcgttcctgctgctgtccctgctgcccctgaccgtgttggcgcaggcccctgcgccggccacgcctgcaccggccccggcacgcccggcaccagcctcgccggcagctgcgaagcccgctaccgccggttcccctgcgttgaccgctgctcaacaggcgcaggtgcagaaacaggacgcggaaatgggcgccgccgcagtgaaggcagcgcagctggtcgacgccaaccgcgccggcgaattgtgggatggcgcttcggccgtcgcgcgtcgtgcggtgccgaaggccgctttcgtcagccagttggccgccgagcgtacgcgcctgggtgcgctggccgggcgtggccagccgaccatcacccgcgtcaagtacagcgccggtgcagcagtgccggaagggctgtacatcaacgtcagcttcccgacccgtttcgccaacagcgcacagccggtgcgcgagctggtctcgttccgtttcgacgaggaccaggtgtggcgcctggccggttacagcctgcgcgcgtcggcaccctga

SEQ ID NO: 492884 - DNA, 390 bp, Stenotrophomonas maltophilia
atggcaactgaactgacgatgctggcctggtcggtactgctgggcttcgtgtacatcttcgccacctccacggtggtcacccgcgagcgcgggatgaagtggaatgcttcggcacgcgatggcgatgcgaagccgctcagcccgctggccggccgcctgcagcgcgcgcaggccaatttcctggagacgttcccgttcttcgccgccgccgccatcgcagtggtcgtggccggtcgcggcaacgacaccactgcactggcggcgcaggcctacttctgggcgcgtgtggtctatctgcccctgtacgccgcaggcgtgccctatgtgcgcagcctggtgtggctggtgtcgctgctatcgatcctggcgctggtgttcgcacttctgtaa

SEQ ID NO: 492885 - DNA, 1179 bp, Stenotrophomonas maltophilia
atgcgcaggatggacgtggtggtggtcggcgccggaccggcaggtctgtgcttcgcgcgcgcgctggccggcagcgggctgcaggtcgggctggtcgaagtgcagccgcgccaggcgctggccgaggccgcctttgatggccgcgagatcgcgttgacccatgcctcgcggcagagcatggagcagctggggctgtggcagcgcctgccgcacgctgaaattgctgatctgcgcgatgccagggtgatgaacggcggctcgccgttcgcgctgaccttcgccagcagccaggtcgacggccagccgctgggctggctggtacccaaccatctgatccgtcgcgccgcgtgggatgccgtgcagggccaggacggcctggagctgttcgacgggcgcaaggtgctgggcgtgcaggccgatgcgcaaggccacgtggtcaaactcgatgacggcagccaactgcatgcgcggctgctggtggccgctgacagccgcttctccgccacccgccgcatgctcggcatcggtgcgcagatgcgcgacttcggcaagtcgatgctggtgtgccgcatgcaggtcgagcgcgaccatcaccacaccgcctgggagtggttcggctacggccgcacgatggcgctgctgccgctcaacgagggccaggcatcggcggtgatcacgctgccgccgcggcagatcgaggcgttgctggcgatggacgaggtggccttcggtgaggccatcagtgcctgcttcgaacaccgcctgggccggatgcagccggtggccacgccgcaggcatatccgctggtgggtgtgtacgcggatcgcttcgtcggcgagcgttctgcgctgatcggcgatgccgcagtcggcatgcatccggtcaccgcgcatggcttcaacctgggcctggccagcgcacagcggttggcgcagggcatcgtcgcgcagcagcgccgtggtgccgacattgccgccgccggcatgctggccagctaccagcgtggtcatcggctggcgtcgcggccgctgtacgaggccaccaatgcgatcgccagcctgtacaccgacgaccgtcgcccggcgcgcctgctgcgtgcggccggcctgcgcctggcgcagggcgtggcaccgttcaggcagctgattgcctcgcacctgacccagcgcgtggcctga

SEQ ID NO: 492886 - DNA, 222 bp, Stenotrophomonas maltophilia
atgcagattctcgaattcgacctcgacggtgactacgtcgaactcaagcagctgctcaagctggccgatctggtcaccagtggcggcgaggccaagatggtcatcagcgagggccaggtacgggtcgacggcgaagtggaactgcgcaaggcctgcaagatccgcgcaggccaggtggtcgaattcgccgacagccagatccgggtgctggctgcaggctga

SEQ ID NO: 492887 - DNA, 1938 bp, Stenotrophomonas maltophilia
atgtcccaagattcccaagcgccgctgcagtttgcgcagctcggcctgtccgagcccgtgatgcaggccgtcaccgccatcggctacgaaaccccgtcgccgatccaggccgccaccatcccggcgatgctggaaggccgcgacgtgctgggccaggcccagaccggtaccggcaagaccgctgcctttgcactgccggtactgtccaacatcgacctgcagcagatcaagccccaggccctgatcctggcgccgacccgcgaactggccatccaggttgccgaggcgttccagtcctattcgtcgaagatccccggcttccgcgtgctgccggtgtacggcggccagccctacggccagcaactgtcggccctgcgccgcggcgtgcatatcgtggtcggtacccccggccgcgtaatcgatcacctggaccgcagcaccctggacctgtccgagctgaagacgctggtgctggacgaagccgatgaaatgctgcgcatgggcttcatcgacgacgtcgaagcggtgctgaagaagctgccggagcagcgccaggtggccctgttctcggccaccatgccgccgcagatccgccgcatcgcgcagacctacctgcaggacccggtggaagtgaccatcgcggccaagaccactacgtcggccaacatccgccagcgttactggtgggtgagcggcatgcacaagctggacgcgctgacccgcatcctggaagtcgagccgttcgacgcgatgatcatcttcgcgcggaccaaggccggcaccgaagaactggccagcaagctgcaggcgcgtggcctggccgctgccgccatcaacggtgacatgcagcaggcccagcgtgagcggaccatcgccatgctgaaggaaggcaagctggacatcctggtcgccaccgacgtggccgcgcgcggcctggacgtggagcgcatcagccacgtgctgaactacgacatcccgtacgataccgaaagctacgtgcaccgcatcggccgtaccggtcgtgccggccgcagcggcgaggcgatcctgttcgccaccccgcgcgagaagggcatgctgcgccagatcgagcgcgccacccgccagccgatcgaagagatgcagctgccgagcgtggaagcggtcaacgacacccgcatcaacaagttcacctcgcgcatcagcgaaaccctcggcgccggtggcctggacttctaccgccagctgctggagcgcttcgagaacgagcagaacgtgccggccatcgagatcgctgccgcgctggccaagctgctgcagggcgataccccgttcctgctgcagccgccggtgcgtgccccgcgcgaagagcgcgcaccgcgcgagcgcttcgaccgtggtgaccgcccggaacgtggtgatcgcttcgaccgcaacgaacggggtccgcgcttcgagcgcggcccgcgccgtgacgacgccgaaggtggttttgaacagcgtccgcgccgtgaggttccgccgcgtggtgcaccggagcagggcatggagacctaccgtatttcggtcggtcaccagcatggcgtgaagccggccaacatcgtcggcgccattgccaacgaagccggcctggaaagccgcttcatcggccgcatcgacatccacgacgacttctcgctgctggacctgccggcacagatgccgccggacgtgctgtcgcacctgcagaaggtctgggtgtccggccagcagctgcagatgcgtgcgctggctccgggtgaagacaccaacccggccccgcgcccgttcaagccgcgcttcgacaagcgtggcccggccggtccgggtggcccgcgtcgtggcggcccgggcggccatggtggcgaccgcggcggtgaccgcgacagtcgcccgccgcgtcgtgacggcttcaagccgcgcggcccgcgcagcttctaa

SEQ ID NO: 492888 - DNA, 2424 bp, Stenotrophomonas maltophilia
atgggtaggagtggcacggaccaacacagccggcgggtgccgatgacccgggggctgggactgcgatttgcgttgttgaccggcatggcgatcggactggtcgcactgtccgccctgatccaggaactgcaggcggcctccactgcctggatcgccggccagggctactggtcgcgtggccagcaggatgccaccgccgcactcagtcgctacctggcgcgtggcgatgccgaggacctggacgacgcacgccaggccctgcaggtgccgttgggcgatctgcaggcgcgactggcgctggaacaggccgaaccggacgaggagaaggccaggcagggcttcctgcagggcggcaatgcgcgtgccgacatcccacgcctggtgttctcgttccgctacgcgcgcgacatcggtgcattccgcgaagcgagcgcgttgtggcggcagaccgatggcgacctgatggcgctgcagcgactgatcgatgaactgcagctgcggcacgacggcaacctggtgcccgttgccgcacgcgaccactacctgcagcagctgcgtgacctggaccagcggatgaaggtgcagagccaggcgttctcgcaggcgctgctgcggatggcgacgctggtgaggctggccacgttgatggtggcgggcctgtcggtgctggcgatcagcctgatggcggtcgccctggcgcgccgcgtcggcaaggacctgaccgaacacgagagccgtttccgcgcggcgttctaccaggccaacgtcggcatgctcaagctcgatgccgaaggcaaggtgatcgaggccaaccaggcgatggccgatatcctcgaccatcgtcgtgacatgctgctgcagctgtcgctgggcgacctgctgatggacggcgagctggtcatcgatggggtgggccgcatcgattgggaccgccagctgcgcccgagcgaactgcgcttccgccgtcgcgatggcagccttgtctggggccgctggagcggcaccggcgtgcgcagcaccggcggtggcctgtcggtgttcgccatcatcgaagacgtcagccagaaccatgcactggcgcgcgagatcgagcaccacgccagccacgacccgctggccggcctgatcaatcgccgcgagatcgaacggctgctggaacgcgcgctgctgcaggtgcgcagcgaaggtggcacgcacgcgctgtgctacatcaacctggaccatttcaagctggtcaacgacagcttcggtcacgccgccggcgaccagatgctgcgcagcttcgccgactacctggtggcggcggtgcgcgatggtgactgggtgggccggctgggcgcggacgagttcgccgtgttcctggcccatgccgggcaggacgaggccaagcgcgtgctgcagcgggtaatccgcaacctggggcaggcgacgttcccggtcagcgaaggcagcccgcagctgagctgcagcatcggcgtggtcgaggtcagcgccgatgcgccggatgtgaactggctgatgagcgccgccgacagcgcgtgctatgcggccaagcaggccggccgcaaccgcgtgcactgcttcaacgagaaccgcatggcgctggaggaacggcgccaggaagccgagcggctgcagggcgtcagcctggccatggccgaaaaccgcatggtgttgtatgcgcagcgcatcgcccgcgtcggcgatccctcctacctgcactacgaggtactggtgcgcatgcgtggcagcgatggcagcctgcacctgccgggccagttcatgccggcggtggagcgctatggcatggccgtggcgctggaccggcacgtgcttggcctgctgttccggcacctgcaggtgtgcccggcacacgtgcggcagctgggcctgtgcaatgtcaacgtttcggcgcagtcgatcgccgagcccggcttcctcgccttcgtctgcgacctgctggagcgcaaccgcgcgctggcctccaagctgtgcttcgagatcaccgagaccgctgcgatcagcaacctcagccaggcgcgtgctttcatcgatgcagtgaaggcgcgtggctgccggatggcgttggacgatttcggttccgggctgtcctcgttcggctacctgcgccagctgccggccgacatcctgaaaatcgacggggccttcgtgcgcgacatggataccgatccggtcagccatgccaccgtgcgcgcgatcagtgaactggggcgcgagctgcagatggaggtggtggccgaatgggtggagactgccgacgtcgccgccgcgctgacccggcttggggtgcagggcctgcagggttatgcggtcgagcggccgcaaccgctggagcggatgaccctggccgacctgcggccggtgcgcctggtggcggtgaaaggtccgcccgccgctggctga

SEQ ID NO: 492889 - DNA, 1665 bp, Stenotrophomonas maltophilia
gtgggcggcaggcaggggcagtacggaacgggagcggtgctggtcgtgctgctggtgtggttggcaatgccgtggccgctgtcggcggccgtagccgaagccgggcgtgactacctgctggtcggtgcggcgaccgatgaacccaccccgcatcgcgcatgcacgccggagatgctggcggggccacggcaacaggtgcaggtgtccgcgccagcgggcggctggtcgggccagccgcaggcactggacgtgttcaatgtgttcgcgggcgaagtccgcgtgcagcatggggatcgcgaaatctgcggcaacatgcacgatgcccgtacccgtgattcccggttccgcgcaggcatcggcctggtcgcggtgccgccggcgggcagccatgaaccgttcctggtgtcatggcagacgccgctgaaggcgcgctgggtaccgaccctgcggctgggcgcgcccagtcccgtgcagcagaacgatactgcccgcctgctggtgcgcgcggcctgcattgccgtggcaatcgcactggcgttgtcggccctgatggccttccttaccacccgcgaccgcagtttcctggtctacatcgccggtaccaccgtgctggtgctgtggcaggccattctcggagggctgagcggctaccccgagccatggctgccggtgggtgagcgcagcgcgtggtggctgctgtcgttgaccgctgcatcccaggcgctggtgctgcccgcgttgtggcgactgaacggcggcgaccgcctgctgccgcgatcgcgcccgatgcagctgctggcgctgtggggattgctggcgctggccgcgtgggtgccctggctgcagcgggacagcctggcctgggtggcgcaggtcctgcaggtgtcctacctgctgggctgcggcctggcattgatggccggggtgtgggcatggctgcgcggcgaccgctgggcgcaggcggggttggcggcgctggcaccgatgctggtgttgatcctggccgacgcctgccgcgctgcgtggttgctggagtaccgcgtggaggcactgcaactgtcggtgacctggctgctgatgatggctgcctatgcgctgaaccagcggctgggccgcctgcgccagcagcgcgatgaacttcgccagctggccgagaccgatggcctgaccgggctgcccaaccgccgtgccgggctgcagcagctggcacggcacctggaacgggtcgatcgcgagcgcggcccgctggtgatcggtttcctggatatcgacctgttcaaggacatcaatgaccgccatggccacgccgtgggtgaccaggtactggtggcggtggcacgtgcattgcgtgccgcggtccgcagccaggaccaggtggtgcggatgggcggcgaagagtttctgctgctgatgccgggcatgccgcgcgaggcggcatcggcgcgcctggatcgcctgcgccagcacctcaccgaggcggcccgggcgctgcaggtgcccggtctggaggtcaccgccagcatcggcctggcgcagtggcggccgggcgaggacgatctcgccgcgctgctgcgccgggccgaccacgccatgtacgtggccaagcgtgccggccgcaaccgggtattcgacggcgaagaactcgatccgccgcccccggcatga

SEQ ID NO: 492890 - DNA, 723 bp, Stenotrophomonas maltophilia
atgaccacccgactcaacaaacatatcgccgacaccggcttctgctcccgccgcgaggccgatcgcctgatcgccgcccgccgggtcaccgtcaacggccatccggccggcaccggcgcggtggtgggcgaggaagaccaggtgctggtcgacggccagccgctgcgcgcgcgcgtggcccgcaagcccggtgcccgccgccatgtctacatcgcgctgaacaagccggtcggcgtcacctgcacgaccgagacctcggtcaagggcaacatcgtcgacttcgtcggccatgaacagcgcatcttcccgatcggccgcctggacaaggagtccgaaggcctgatcctgatgaccagcaacggcgacatcgtcaaccagatcctgcgcgccgagaatggccaccagaaggagtacctggtggcggtgaacaagccggtcaccgacgagttcctgcgtggcatggcccgtggcgttcgcatccacgaccagatgacgctgccgtgcaagacctcgcgcatcgccaagttcggtttccgcatcaccctgcagcagggcctgaaccgacagatccgcctgatggcggccgagttcggctatcgggtgacccagttgcgtcgcgtgcgcatcgacaacatcaagatcggtgcgctgaagccgggccagtggcgcaacctgaccgagcaggagctgcagggcctgctgccgaggcagctggactggtaa

SEQ ID NO: 492891 - DNA, 1071 bp, Stenotrophomonas maltophilia
atgatcaagcccgacaagcctgccaatgaagcccttcggcttgaggcgctgtaccgctaccgtatcctcgattcggagcgtgaaaaatccttcgacgacctggtggtgatcgccaaggcggtctgcggcacctcgatggcggcggtgaccctgatcgacgtcgagcggcaatggttcaagtcgatccagggcatcgatgcggcagaaaacctgcgcagcgaatcgatgtgcggccacgcgatcctgcaaccgcagcaggtcatggtggtcgaggacgcgttgcaggacatccgcttccacgacaatccggtggtggtgggcgatccgcacatccgcttctatgcgggcgcgccgctgatcagctccgatggcctgccgctgggcacgctgtgcgtattcgatgcgcagccacagcacctggccagcgacaaggctgaagcgctggcggcgctgtcgcggcaggtgatgctggtgatggaactgcgccgcttcgcgctcgacatccagaaacacatgctggagcgcgatgactacgagcgactgctgtctgagtaccaggacgtactgctcgcgcagaatgccgacctggccgaacagagccgcaccgacgcgttgaccggcctgccgaaccgccgtgcgatggcggcagcgctggaagaggcggtggcggtgaacggagaccagcccggggtggcctgcgtcgcgctgctggacatcgaccatttcaagcacatcaatgatttccagggccacgccaccggtgaccgcgtgctggccgaactgggcgtgctgctgcgttcgcatttcgccggtcgcggcatggccgcgcgctatggcggcgaggaattcgtggcggtgatgccggctaccgacctgcgcaccgccgaactgcagtgcgagttcctgcgcctggccgtggctgatctgccgctgggattcccggtcacgatcagtattggagtggcccagcaccagcccggtgaaagcgtggatgacacgctggcacgtgccgacaaggcgctgtaccgggccaagggcaatggccgcaaccgggtggaagtggccggctga

SEQ ID NO: 492892 - DNA, 1161 bp, Stenotrophomonas maltophilia
atgctgcagaccctggccatcgcccactatcgttcgctgcacgggctcgtactgccgttgcagcagttgaacgtggtgaccggtgacaacggcagtggcaagtccagcctgtaccgtgccctgcgcctgctggcagagaccgcgcagggcggcgtcgcggcggtgctggcccgcgaaggcgggctgggctcggcgctgtgggcgggtccggaaaagatggaccgtcgggttgctgccggcgaaatccccctgcagggcggcccacgccaggaatcggtgggattgaagctgggcttcgccactgacgaattcggctacgccatcgatctgggctacccgccgcccagtcgatcggccttcgcactggacccgcagatcaaggccgaggcgatctgggccggcccgttcctgcgcagcgccaacctgctggtcgaccgtcgtggagcgatggtgcggcaacgccatgcgcgcggctgggatctggtggatgacaggttgtcgctgttcgacagcctgttcacccaggtcggcgatccgcagcgcctgccggaaaccatcgccctgcgcgagtacatccggcgttggcgcttctacgatcatttccgcagtgatgccgatgccccggcgcggcaaccggcgatggccacgcgcacgccggtgctgcatcacgacggccgggatctggcggcggcctgggtcaccatcctcgagatcggtgacccggtggcgttggcacgcagcgtcgacgatgcattcccgggcgccacggtcggcttcgaggagctggatggacgcttggcgctgcgtttccaccagcctgggctgctgcggcccttgtcgttggccgaactgtccgacggcacgttgcgcttcctgctgctggccgctgcgctgcacacgccgcgtccaccgccgctgctggtgctcaacgagccggagaccagcctgcatccggacttgctgccggcgctggcgcggctgatcatcgcagccagtgcgcgcagccaggtatgggtggtgtcacatgccagccggctgatcgcggcgctggaacaggcgccagggtgccattcgctgcatctgtacaaggaacagggccgcacgctgttgagcgggcagggcctgctggatgcgccggcctggcattggccgcagcgttga

SEQ ID NO: 492893 - DNA, 996 bp, Stenotrophomonas maltophilia
atgccacaggcatcgccggcggccgtgcgattgccgcacaataggcggatgagcacacccgacacccgcaaagcgttgtggcagattcacttctgtgtcctgctgtggggcgtcaccgccatcctcggcaagctgatcaccctgcccgcactgccgctggtgtggtggcgcatgctgctggtgacggcgatgctggcgctgctgccgcgggtctggcgtggactgcgtacgctgccagtgcggctggtggccggttatgccggcatcggcgccctggtcgccctgcactggctgacgttctacggtgcggtaaagctggccaatgcgtcggtggccgccacctgcatcgcgctggcgccggtgttcacctcgatcatcgaaccgtgggtggccaagcggccattccagctgcgtgaactggcgttcggcctggcggtgctgccgggtgtcgcgctggtggtcggtggcgtgcccgacggcatgcgcctgggtgtgctgatcggcgcgatctcggcgctgctggtggcagtgttcggctcgctcaacaagcgcatggtcagccacgcagatccgctcacggtcaccgcgctggagctgggtgcgggcaccctcaccctgaccctgctggcgccgctgatgccctacctgctgcctgcgctggccagcccgttgtgggtggtcccggacctgcacgacggcatcctgctgctggtgctggccgggttctgcacgctgctgccgtttgccctggccctggtcgcactgcgccacctgagtgcctacacggtgcagctggtgaccaacctggagccggtctatgcggtggtgctggcggtggtgctgctgcgcgagcagcacgaagtcaccccgtggttctacctcggcgtggcgatcatcgtaggcgccgtgttcctgcatccgctgctgaaccgccgcaagccggtgcagcatccggagattcttggcacggccgaggcgcgcaacatcgccgattga

SEQ ID NO: 492894 - DNA, 615 bp, Stenotrophomonas maltophilia
atggctgccaaccgttccgcccagcgtgcatgggcagcgctgactgcactgatggcggccacctcgttgctgctgcaatacctgttgctgctgcatggccccggggcggctgccggggtcggcatggcgacgctgcgcttcgttggttacttcacgattctcagcaacctggcggtgtgcctgggatgcgtccggctgatccgtgcgggtgtgctgaacgcgactgtcgccgcggcgatcgcgttgtgcatcggggtgaccgcgtgcatctacgtgctggcgttgcaggggctgtggcaacccaccgggctgcaatggtgggtcgatgccggcctgcactacgctgtgccggcgctgtacctgctggggtggtggtggctgctgccgcatggcgcgctgcgctggcgcgcactgggcggggtgctgctggtaccgctggtgtacctgggctgggcgatgctggtggccgaagtgacaggacaggcgccgtatccgttcctcgaactgcaacgcctggggctggcggcgttcctgctcaacgtgctgcgcgttgcgagcgtgttcgtggtggggtggaccctgctgtgggggctggaccgctggcgctgtcgatga

SEQ ID NO: 492895 - DNA, 876 bp, Stenotrophomonas maltophilia
gtgaccacggccggcaggcaggcagagatccgctgcggcatcggcggctgggtgtttcccgaatggcgcggcggtgtgttctatccagcaggcctgccgcagcgggaggaactggcccacgccagccgcgccctgcgctgcatcgagatcaacggcacgttctaccgcacgccaactgcggcccagtgcgcgcaatgggctgcgcagacacccgacggtttccgcttctcgatgaaggcgccgcgctacctggtgcagcgacgcgacctgtccagcaccgtggaagcggccacaccgttcctgcaggcggcactggcgctcggtgaccggctcggcccattgctgtggcagttcgatccgcgccacccggccgacgccgatgcactggaggcgctgatggcacagctgcctaagcagctggacggggtgccgctgcagcatgcgctggaggtccgcaacgccgaggcacatggcccggcactggtcgacgccgcccgccgccatggcgtggcgctggtgatcgaggacagcgacgaggcgccattgcacggtgatgtcagtgccggcttcgtctatgcgcggatcaagcgcagccaggcccgcttgaacgagggcctgccggcgcccgtgcagcaacgctgggccgaacgcgcacgccgctggtcacgcggtgaaccagtggatgacctgccctgcctggccgggcccgctgcggaggccccgcgcgaggtctacctgctgtgcatcggcgcaggcaaagcgcgcaacccggcggcagcgatggccctgcagcgcctcatcgacagcgccagcggtccagcccccacagcagggtccaccccaccacgaacacgctcgcaacgcgcagcacgttga

SEQ ID NO: 492896 - DNA, 444 bp, Stenotrophomonas maltophilia
atgggcgagaacggccaacccagcagcggctccacgatcattccgtgcctgcgctatcgcgacgcgcaggccgccatcgactggctgcagcgcgccttcggcttccatgcccaggccgtctacgccgatggcgatacggtcttccatgcgcagctcaccttcggcagcggcatgatcatgctgggctcggccagcaaccagagtgcgtggagcaaacacgctgccctgcctgacgaggtcggcggacgccagacccagagcgcctgcgtgatcgtcaccgatgccgatgcgcactacgcgcgggccaaggccgccggtgcccgcatcatcatcgacatcgccgaccaggactatggcggacgcggctacgcctgcgccgacccggaaggctacctgtggtggttcggcagctacgacccgtggcgcacggaccacggccagtga

SEQ ID NO: 492897 - DNA, 1563 bp, Stenotrophomonas maltophilia
atgaaaccctggatcggaggagccgtgctgctggcgtgcacgaccatggcgagcgcggcgaccccgccgccgctgcaggacctggatgcgaccgtcgagcgcgtgcgcgcgcagttcgacgtgcccggcattgccgtagcggtggtcaaggatggcgaggtggtgctggagcgcggctggggcgtgcgcgagcagggcaagccggaaccggtgcaggccgatacgctgtttgccattgcgtccaacaccaaggcgttcacggccacctcgctgaacctgctggcggaagagggcaagttgaagatggacgacaaggtgatcgaccacctgccgtcgttccgcatgtccgacccgttcgtgaccgggcagatgacgatccgcgacctgctgtcgcatcgcagcggcctgagcctgggcgccggtgacctgctgttctggccaaccacgtcctacagcaacgccgaagtggtgcagcggctgggcaaggtgccgctgaagggcggcttccgcgaaagctatgcctacgacaacatcctgtacgcggtcgcccagcaggtgatcgagcacgtctcgggcgtgagctaccagcagttcctgcagacccgcatcttcgacaaggtgggcatggccggcacgcgctacaacgccgaccacctgaagccaggtgacacggcggcggtcggccacgccaagtacgatttcaaggacctgcgcaccgtcgcaccgctgacctggtcgaacaatgccggcgccggtggcatttattccagtgcgcacgacatggcgcgctggatgcaggtgcagctggccgaaggcaagctggccgacggcactgcgctgttcagcgaaaagagccagcagcagatgtggcggatgatcaccccgcagtcgatcccggcgccgagcgtgccggagctggcaccggcacgggccaactttgccggctatggcgaaggctggagcctgagtgactatcgcggccggaaactggtctggcacaccggtggctggccgggcatggtctcgcgcttgaccctggtgccgggcgagaagctgggcgtggtggtgctgaccaaccaggaagtgggcgcggcgttcaacgcgatcaccctgagcgtgcttgatgcctatctgggcggcgacaagcacgactgggtggacgcctatgccaaggccgtggccaagggccaggacaaggccgacgaggcctgggccaagcatcagagcgcgcgcgacaagggcagcaggccgtcgctgccgctggccggctacaccggcacgttccgcgaccgctggtatggcgagatgcaggtcagtgccgcaggcaagggcctgcgcctgcgcttcatgaagaccgcgcagctgagcggccgcctggagcactggcagcacgacaccttcatcgtgcgctgggatgaccgctcgctcaacgccgatgcgttcgtgaacttcagcctggacccggacggcaaggtgcgcgaggtgcgcatgcagtcgatctccgacctgactgatttcagcttcgatttccaggacctgctgttcaccccggtcaacgaatga

SEQ ID NO: 492898 - DNA, 1833 bp, Stenotrophomonas maltophilia
atgttccgttggtttgaatccctgatcccggtgttcccgcccgtggatgggcgcatgccaccgcgcaaggtgctgccgttctacctgcactacctgcgcccggtgtggccggtgctgctggcgaccctgatcgccggcctgctgctggcgctggtggaagtggcgatgttcgattacctgggccgcatcgtcgacatggtcgccgagcaaccgggggccgatttcttcaagcgccatgccaatgaactgggctggatgctgttcatcacggtcatcgcgcggccgatcctggtcggcctgcacaacctgctggtcaaccaggcgatcgtgcccggcctgagcaaccgctcgcgctggctgatgcacaactacgtggtgcggcagagcctgagcttcttccagaatgacttcgccggcagcgtcgccaaccgggtgatgcagaccggtacctcgctgcgcgagtcggcggtgcagatggtcgactcgctctggtacatcgtggtctacaccggcaccgcgctgtacctgttcgcgcaggcggactggcggctgatggtgccgctgatcctgtggctgctggcctatgcggtgatcatggtctacttcgtgccgcgcgcgaaggaacgcgcctggattgcgtccgaagcgcgttccaaggcgatgggccgcatcgtcgatggctacaccaacattcccacgttgaagctgttcgcccatggcgggcgcgagcaggcctatgtggccgaatcgatccaggaactggcggtcaagcaccgtgcgcagacccgggtgaccaccggcatggacctgaccatcgccatcgtcaacggtttcctgattgccggtacctgcgggctcgcgctgtggttgtggaatggcggccacatcaccgtcggtgcgatcacgctggcgaccggcctggtgatccgcatccacaacatgtccggctggatcatgtggaccatcaatggcatcttcgaggacatcggtacggtgcaggacggcatcaccaccatcgcccagccgctgaccgtgcaggaccgcgaggacgcggtgccgttgcaggtgacccgcggtggcgtgcacttccaggacatccacttccactatggcaagaagggtggcgtgatcgcaggcctggacctggtggtgaagccgggcgagaagatcggcctggtgggtccttccggtgccggcaagtcgaccctggtcaacgtgctgctgcgcctgtacgacctggaaagcggccgcatcctgatcgacgaccaggacattgcctacgtcactcaggaaagtctgcgccagcagatcggcgtggtcacccaggacacctcgctgctgcatcgctcgatccgcgacaacctgctgtacggtcgtccggacgcgaccgatgagcagttgcgcgctgcggtggccaaggcgcgtgccgaagccttcatcgacacgctggtggatgggcaggggcgtcgtggttacgacgcacatgtcggcgagcgtggcgtgaagctgtcaggtggccagcgccagcgcatcgccattgcccgcgtgctgctgaaggacgccccgatcctggtgctggacgaagcgacctcggcgctggactcggaagtggaagcggcgatccaggacagcctggatgagctgatgggcggcaagacggtgatcgcgatcgcgcaccggctgtcgaccatcgcacgcatggaccggctggtggtgatggaccagggccgcatcgtcgagaccggcagccacgccgaactgatcgccgccggtggtctgtacgcgcgcttgtgggcgcgacagaccggtggttttgtggccgccgatcaatga

SEQ ID NO: 492899 - DNA, 1224 bp, Stenotrophomonas maltophilia
atgatccgacccgtacgctccttgttgctggcactcattctggccaccacggccgcagccgcggcaccgacaccggtgcaaggcgaccagctcgagcaggtcgtcctgctcagccgccacaacctgcgcgcgccggtggtggcgtcgggcgcccttgcccatgccacgccggaacgctggccacgctgggacgtaggccccggcgagctgaccaccaagggcggcgtgctggaggtctacatggggcgctacatcggccagtggctgcgccaggcgcaattgttgccggcgtcgggttgcccgcggccggctgacttccatgcccatgccaacagcctgcagcgtacccaggccaccgcgcagttcttcattgccggtgcgtttccgggctgccatgttgtggtcgaacagcgcatggcgctggggacgatggatccgctgttcgacccggtgatccacaacgatgacgcggcattccgcaagcgcgcgctggcggcaatgcagcaggcgctgacagcatcggatctggcacccgcactgtccgtggtggaggaaattacccgttacccgcagtcggcggcctgtacggggcgcagcgactgtcatctggtgctgggcgacacgaccttcaatgcggagccgggcaaggagccacgcgcttcgggttcactggcactggccagcggtctggtcgatgccctgctgatggagcattaccagggaagtggcgttccgcgcgaaggttggggccgcttgaacacggaaggccaatggctggcgttggcgcagatccgcaaccgctaccaggacatcctgttcggaacacccgcggtggcgcgtgacgtggccgctccgctgttggcgcgcgtggatgcgtcgttcggtgatccggcgtcgccgaaggtgaccctgctggtcggccatgattccaatatcggttcggtgctggcggcgataggaatcggtgactacagcctgccaggccagttcgagaagacgccgatcggtggcctgctgcagttcgagcgttggcgtgaccgccaaggcggtggcgagcgtttccgcctggcctacgtctatccgatcaccgcgcagctgcgcgatgccgtgccgctgaacgaggcacagccgccggggcgcgtcgcactgcccttgccgggctgtgaccggcagggctgcagccgtgcgcagttccagcagctgctacagcgggcccgtcgctga

SEQ ID NO: 492900 - DNA, 999 bp, Stenotrophomonas maltophilia
atgtctctccccttgcttcgcctcgcgctgctgcccacgctgctggccagtgcgggtgccttcgctgcctgccccccgccgccgcccggccagccggacatccgcgccctgggctactacaccgacaaggccggttcggtgatcgacccggtactgcaccagcagaacaaggacgcaaccgcgccgctggaccgctatgccgccgacgtggcacgcatgagcgatgactacctgcgcaccggtgaccgggcggcggcgcaatgcacactggcctggctgggtgcgtgggccgacgacggcgccatgctcgggcagatgatccgggtcaacaacaaccagtcgttctacatgcggcagtggatgctcgatgcggtagcgatggcctacctgaaggtgcacgaccaggcagatgcccggcagcgcgcgcgcatcgatccgtggttgcagaggctggcccgggccaacctggcgtactggaacaatccgaaacggcgccgcaacaaccactactactggggcggtctgggcgtgctggccaccggactggccaccgacgacgatgccctgtggcaagccggccacgccgccttccagaagggcgtcgatgacatccaggacgatggcagcctgccgctggagatggcgcgcgggcaacgcgccctgcactaccacgactacgcattggcgccgctggtgatgatggccgagctggctcggctgcgcggccaggactggtacgccagcagggatcgcgccattgaccgccttgcccgccgcatcatcgaaggcagcaaggaccctgcatggttcaacgaacacaccggcgttgcacagctgcccctgcaggccagcggctgggtcgagttctaccgcttgcgctcacccgatggcggcctgttcgatgccgcgcatgcacgcggaccgttccgttccccacggctgggcggcgaccttacgttgatggctgcgcagggcatcgtgcgcacgccgctgcgatag

SEQ ID NO: 492901 - DNA, 1809 bp, Stenotrophomonas maltophilia
atgcgcccgcatcttcttgccctcgccctggtcgctgcgctggccggttgccagcctgccgacgccccgaccaacgcttccaccccggccaccagccagcaggccggtgacgcggcggtcgatgccgccttcgccgatctgtccaagcgcgccctggacacctggatgcagctgtcgccggtcagcgccacccagatcggtgaccaccgctacgacagcgaactggacgacctgagcgccgccggccagcagaagaccgtggccgcctacaaggcgctgctgggcgagctggacaagatcgaggtggccaagctgggccgcgagaaccaggtggacgcggcgatcctgcgcaaccagctgcagtcggaaatctggaacgccgaagtgctccagtccggcaagtgggacccgcagctgtacaacggcatcgccggcagcgcgatctatggcctgatggcccgggagttcgcgccgctgccggagcgcctgaagtcggcgaccgcgcgcatggaaaagctgccggcgatcttcgcccaggcacgcgagaacctggatccggcccgcgttccgaagatccatgccgagacggtggccaagcagaacaagggcatcctcagcatcgtcgataccttcatcaccccgcacatcggcgaactgccgcaggccgaccagcagcgcctgcaggccgccatcgacggcctgaagaaggccgtggacgagcagcagacctggctggacaagaccctggtgccgaacgccaagggcgacttccgcattggtgcggaaaagtacgaccagaagctgaagttcgcgctgagctcctcgctgtcgcgccaggagatcggtgagcgtgcacgcgccgaactcaagcgcgtgcgcgaggacatgtacggcatcgcgcagaccgtactgaaggacaagccgggtgcgccggagatgccggcccagccgaccgacgagcagcagcagaaggcgatcgaggccgcactggaactggcctacgccgacaagccggcgcgcgacaaggtggtcgatgatgccaaggccgcgctggagcagtccaccgcgttcgtgcgcgagcacgacctggtgaccctgcccgacgcgccggtggacatcatcctgatgccggaattccagcgtggcgtggccgtggcctactgcgattctccgggcccgctggacaagaacctgaagaccttctacgccgtgtcgccgattccggacgactggaacgagaagcaggtcgactcgttcctgcgtgaatacaactcgcgcatgatccacctgctgagcatccacgaaggcaccccgggccattacctggaaggctggcactcggccaagttcccctccaccctgcgtgcggtgctgcgttcgggcctgttcgccgaaggctgggcggtctacaccgagcgcatgatgcaggagcagggctacctcgacaacgacccgctgttccacctggtgcagctgaagttctacctgcgcacgatctccaacgcgatcctcgaccagggcgtgcacgtggacaactgggatcgcgagaaggcgatgcacctgatgacccacgacgcgttccagcaggaaagcgaagcggccggcaagtgggtgcgcgcgcagctgacctcggcgcagctgccgacctacttcgtgggtgcgcaggaacacttcgacacccgcaaggcggtgcaggaaaagctgggcgacaagttcaacctgaaggcgtaccacgaccaggtactgtcctacggcgcaccgccggtgcgtttcgcacgccagctgatgctggaccagccgatcgagtga

SEQ ID NO: 492902 - DNA, 357 bp, Stenotrophomonas maltophilia
atggaataccagggaagctgccattgtggcaggatcgcattcaccgtacaggccgaggcgccgatcagcgacgtcatcgactgcaactgctcgatgtgccgccgtcgcggcagcctgctgtggttcgccccgcgcgaggcgttccagctggccaccgatccggctgacgtggccacctaccacttcaacaaggcgcatatcgaccaccaccactgccgccaatgcggtatcgccccctacagcgaagcgatcgatccgcgtaccggcacaccgatggtggcggtgaacgttcgctgcgtgccgcaggtcgatctggccggtctttcggtgacctcttacaacggagccgcgctgtga

SEQ ID NO: 492903 - DNA, 816 bp, Stenotrophomonas maltophilia
gtgaggccgctgtgcgcgtggacgcgcacgctggcagtgccggtgctgctgttggcactggcagcctgcgccaagaacggtgagcgcgctgcagaggcgggcgcgaccgcggccgatgccgctgttgcttcgccggaaggcgcattcctggcctacgaacatgacgtgcaggtgcagctggaggcggcgcagatcgcaccgcgcatccagcagatcgcccaggcctgccagagcgcgaagttcggcgactgtgcagtgttgcaggtcgaccagcgcggcggcgagcagcccagcggtgaagtgaaggtgcgcatcgcgccgaagggcaccgagccgctgatcgcgatggccggtgagggcggcacgctgcagtcgcgcaacacgcgcgcggaggacctcgcgcaggaagtagcggacaccgcgctgaccaagtcccggctggagaaggaacacgcgcggctgttgtcctaccaggaccgcaaggacctgaagatcgaggacctgatggcgatcaccacgcggctgtcggagatcgaagcaggcgtcgagcaggccaacaaggatgccgcacagcagcgtcggcgcatcgatacccagctggtgacgatccacttcgacaccacctcgggccagcgcagccgcagcgagatcggcgaggcgctgagcgagtcgggcagcatcctcagcggcagcattgcgttcctgatccgcgccgtcgccgcgttgctgccggtgggtgtgctggccctggtcgtggcctggggtgtgcgggcgtggtggcgtcgccgccgtcgcacgctgccgcccacccgctga

SEQ ID NO: 492904 - DNA, 294 bp, Stenotrophomonas maltophilia
atggccatgctgcgactgcgcatcaccggaaccgaagacgacgcccgcgccatcagcgacctgctgctcggcctggagggcatcgaacatgtcgaggaaaccgacgacctgatgccgcacatggacgacgacgattccagttcggcggggctgtccgatgacatcggcccgggcatccacgagctggaagtggaagtcggcaatgaaagcaccgcgcagaaggtgcgcgacgcggtgcaggaactggcgctggagctggatgtgttcgtcgagtacgagaccgacgagggctga

SEQ ID NO: 492905 - DNA, 945 bp, Stenotrophomonas maltophilia
atgcagctacgcccttccctgctccccgcactggccgtgttcgcggtcgccgcgcgccaccagaacttcgcccaggccgcgcaggagctgcacctgaccgccagcgcggtcagccaccatgtgcgccggctggaagaagtgctggaagtacgcctgttcctgcgccacgcccgcggcgtgcgcctgaccgccgagggccggcaactggccgacgccgccagcgccgccttcaccgatgttgcggccgtcgcccatcacctgcagccggatgccgacagcgtgccgttgcggatcaccacgctgcgctcgctctcctactgctggctgctgccacggctgccgcgcttcacccaggcccatccgcacatccgcatcgagctgcacaccggcagcggcctggatcgctacgacgacaatgggccggaagtcggcatccgctacggtctgggccagtggccgggcctgcgtgcgcagcacctgatggacgactacctgttcccggtggcctcgccggcgctggccggggtcgaagcactggtcgatccggcgcgcatcgccgacctgccgctgctgaccgacctgtcgccgcagggctggcgcgactggttccgtcatgccggcgtgcgcccgccctcgccgctgccgccgatgcacaccttcgccgacagcaccgatgcgatgcgtgcagcggtgtacggcatgggcgcggtgctggcacgtacccacatcgcgcagccctacctgcagcgctacgaggtggtacgcctgcccggcccggcgctgaaggcgcgctatgcgtatcacgtggtgcacgccgaaggacaaccgccgagcccggccgcacgcctgttcatcgactggttgctggagcaggcgcaggacgaacgcacgccgattcccgcattgccggacagcctgctcggacgcccggccacacgcgcctga

SEQ ID NO: 492906 - DNA, 873 bp, Stenotrophomonas maltophilia
atgaatgcggtcccacaggcagccgagcgcgactggcgcacaccgctggagttgaccctgctgggcgccatctggggttgctcgttcctgttcatgcgggtggcggtgccgtcgttcggcccgttcgcgctggtcgaggtgcggctggtgctgggcgcgctggtgctgctgccgttcctgtggcgtgcccgcgcgcagttcccaccgcggcgctggctgtggctggcaccgatcgggctgatcaactcggcgctgccgttcgtgctgttcgcctacgcggccgagcgagcccctgcggcgatcggcgccatctgcaatgcgatgaccgtgctgtttgccgcgctgatcgccttcctgttcttcggcgagaagatcggcatgcgccgcgcgggcgcgttgctggtcggcttcgccggcgtggtggtactggccacggccaaagtctcgggcctgagcatcggcactgcagtgctggctggtgcggcggcctcgctgctgtacggcctgggcgtgaacctggtgaagcggcacatgaccggcctgccctcggcggcggccgctgctgcaacgctgtcgtgtgcctcgctgtggatgctgccgatggcggtgacccactggccgcaggcggcgattccactgaaggcgtggggcgcggcgattgccttgggcgtggcctgcaccgggctggcgttcctgatgttctaccgcctgatcggtcgtatcggcccgtcgcgggcgtcgacggtgacctacctgattccgctgttcggcgcggccttcgcgtggttgttcctgggggaggcggtgacggtgcagatgttgattgcgggtgtgttgattctgggcagcgtggcggtgagtcagaaaggctga

SEQ ID NO: 492907 - DNA, 903 bp, Stenotrophomonas maltophilia
atgccgcaccgccgttgccttgccctgaccgccctcgccctggcctgcctgctgcccgccctggccagcgcggccacgccctaccgcagccctcagcagatcctcgacgcctcggcggccagcgactggcgcaccccggacccggccaacctgctgtacatggacctgccggccggtcgggtcatcatcgagctggccccgcagttcgccccgcgccatgtcgccaacatccggaccttcgcccacgagcacttctgggacggcaccagcatctaccgctcgcaggacaacttcgtggtgcagttcggcgatgccgacgccgatgacgcagccaaggccaagccgttcggcagcgccgcgcgcaagttgccggccgagttcgagcgcgccagcgccggcctgaaggtcaccgcgctgccggaccgcgatggctgggccgcgcagaccggttttgtcgacggcttcccggtcggccaggacccgcaggccggcaaggcctggctggcacattgctacggcatgctgggcgcgggccgcagcaacgaggaagacagcagcatcggtgccgaactgtacgtggtgaccggacagtcgccgcgccagctggaccgcaacatcaccctggtcggtcgcgtgctgaagggcatggaactggtcagcgcgacgccgcgcgggccggcgccgatgggcttctacaccgacccgacactgcgcacgccgatcgtgtcgatccgccgcgccagcgacgtgccggcagccgagcgcacgccgatccaggtactgcgtaccgactcgaagaccttcgccgatacggtggaggcgcggcgcaaccgcgtggatgatttctacaagcgtccggccgggcatatcgatctgtgcaatattccggtgccggtgcgctga

SEQ ID NO: 492908 - DNA, 366 bp, Stenotrophomonas maltophilia
atgtccgaggacgatgtccacctgaagaagttccagaaggagctcagcgccggaacggtgtcgctggccctgctggcggtgctggcccgggccggggagccgctgtacggctacctcattgccaaggagctggagcgggtgggcgagggcgtgctgagcggcaagcagagcgcgctgtacccggtactgcgcaacctggagggcgccggcctgctggaaagccatgtggaaccttccagcagcgggccgccgcggcgctactaccgcatcaacgaacgtggccgcgaggtgctggcgcagtggcgccaggcctggcaggccacccgcgattccgtcgattccgtgttggagggggtaccgcaatga

SEQ ID NO: 492909 - DNA, 990 bp, Stenotrophomonas maltophilia
atgaacgacccgagcctggcaggccgcgccctgcccacgaccatcccgcagtacctggcgcagctgcgcgcggcgctggaaggtgccgatccggcgatggtgcaggacgcgctgtacgacgccgaggaatacctgcgctcggagctggcggcgcagcccggccgcagcgaggccgaggtgatcgccgacgttgccggcagctatggcgcgccggatgaagtggccgacatctaccgcgagaccgaagtgacggtgaaccgcgcgctgcgtacgccgcgtgcggataccgcgccggtgctgcgtgcagcggcggaagccagtggcgtcgagccggcctcaccgccgcaggcgccggtgcagcgttcgctgctggcgcgcttcttcggcgtggtgaccgatccgcacacctacggtgcgctgttctacatgctgctgtcgctggccaccggcatcttcttcttcacttgggtggtgaccggcctgtcattgtcgctgggcctgctgatcctgatcatcggcattccgctgaccgtgctgttcttcggctcggtgcgcgggctggcgctgctggaaggacggctggtggaagcgctgctgggcgagcgcatgccgcgccgcccgcgttacaccgaccgcagccgcacctggctgcagcgcatcggcgacatgttcaccgatggccgtacctggctgacgctgctgtacttcgtgctgatgctgccgctgggcgtgatctacttcaccatcgcggtgacgctgctgtcgctgtcgctgagcctgatctgggcgccggtcgcggcgatcttcagtggtgacatccccggcgtgtacatcaacgacgtgaatgtgctgccgatggcggcctcgccgctggtggcgatcgcggttgctgcggcgggcgcactgctgctggtgctgacgatgcacctggcacgcggcatcggcaagctgcatgggctgattgccaagaacctgctggtgcggttgtaa

SEQ ID NO: 492910 - DNA, 1308 bp, Stenotrophomonas maltophilia
atgctctatcaactgcacgaactgacccgcaacctgctcgccccctgggtgcaccaggcccaggccaacgccagattcttcgccaaccagggccattggtggtcgcagatgcccggtgctgatcgcctggcggcggtcaatgaactcttccaccgcatcggcaaggattacgagaagcccgagtggggcatcaacgaaatcgacgtcgatggcgagcgcgtgccgatcgtcgtgcacgaggaagtgagcaagccgttctgcaagctgctgcgcttcaagcgccacagcaatgaagccgaccagctgcacaccatgctcaaccagccgttcgtgctggtggtggcgccactgtccggccaccacgccacgctgctgcgcgacaccgtgcgcacgctgctgcgcgaccaccgcgtgtacgtcaccgactgggtcgacgcgcgcatggtgccggccagcgaaggcgagttcgggctggatgactacatcgcctacatccaggagttcatccgccacctcggcgtcgaacgcctgcacgtggtgagcgtgtgccagccgaccgtaccggtgctggccgcggtttcactgatggccagccgtggtgaaccgacgccgcgcacgctggtgatgatgggtggcccgatcgatgcgcgctgcagcccgaccgcagtgaacaacctggccacgcagaacccgctgtcgtggttcgagaacaacgtcatccacaccgtgccggccagctatccgggtgccggccgtcgcgtgtacccgggcttcctgcagcacgccggcttcctgtcgatgaacccgagccgccacttcagctcgcactgggatttctacaccgacctggtcaagggcgacctggaagacgccgacgcgcaccgtcgtttctacgacgagtacaacgcggtgctggacatgccggccaggtactacctcgataccatccgcgtggtgttccaggacttcctgctgccgcgtggcgagtgggtggtcaacggcgagaaggtcgatccgtcggcgatccgcgataccgcgttgctgagcatcgaaggcgagctggacgacatcgccggccttggtcagaccgaagccgcgcaggcgctgtgcaccggcatcactgcggaccgccgtgagcatttcatcgtcgaaggtgccggccactacggcatcttcagcggccgtcgctggcgcgaggtggtgtacccgaaggtgcgcgacttcttcgccgcgcatgccgaagccccggcggcgaaggccgcgaagaagaagagcaacgtcaccccgttgcggcgcaaggcggggtaa

SEQ ID NO: 492911 - DNA, 591 bp, Stenotrophomonas maltophilia
atggacaagacctacgacgccgcctacttccaacgctggtaccgccgtgccgacatcggcggcagcgcccgcctggcgcgcaaggtggcgttggccgtggccagcgccgagtactacctggagcggccgatccgcagcgtgctggatatcggctgcggtgaaggcgcctggcgcgcgccgctgctgaagctgcgtccgaaggtcgaatatctcggcttcgacagcagcgagtacgctgtgcgccgctacggcaggacccgcaacctgcacctggcccgcttcggcgacttcgcctggctgcggccctgcgccccggtcgacctgctggtgtgttcggacgtgatgcactacgtgcccgaccgcgagctgcgtgcaggactggccggcgtggccgagctgaccggcggcgtggccttcctggagaccttcgccgccgaggacgcgttcgaaggcgaccacgacggcttccaggcccgaccggcgcgctggtaccgccgcacgctggcccgccagggcctgcagccggtagggtcgcactgctggctcggccccgccctggcgggcgatgcggccgcgctggaacggatgtga

SEQ ID NO: 492912 - DNA, 456 bp, Stenotrophomonas maltophilia
atgcagagctactactgggtcaagaccttccacatcgtgttcgtggtggcgtggatggccacggtgttctacctgccgcgcatcctggtgaacctggccgagaccgcgggccagccggcggtgaccgagcgcctgcagctgatgggcctgcgcctgtaccgcttcggccactcgatgttcggcctggcgttcctgctcggcctggtgctgtggctgggctacaaggtcatccccgatttcccgaccatggtggcgccgggagctgccggctggctgcacgccaagctggggctggtggtggtgctgctggtgtacttcggctggaccggccgcctgctcaagggcgtggccaagggccgggcgctgccgtcgtcgcgcgcgctgcgctggatcaacgagatcccgctgctggcgttcattccgatcgtgtggctggtgctggccaagccgttctga

SEQ ID NO: 492913 - DNA, 960 bp, Stenotrophomonas maltophilia
atgaatccgaactacctcgacttcgagcaacccatcgccgacctggaagccaagatccaggagctgcgcaacgccagtgccgggccggcggtcaatgtcgaggcggaagtgcacgcgctgcaggacaagctgcgcatgcgcaccgcgcagatcttccgcaacctgacctcgtggcaggtgctgcaactggcccgccacccgtcgcgcccgtacaccgccgactacctccgcgtcatgttcgatgagttccaggagctggccggtgaccgcgccttcgccgacgacaaggcgatcatgggcggcctggcccgcatcaatggccgcgcggtaatggtgatcggccaccagaagggccgcgacaccaaggaaaagatcaagcgcaacttcggcatgcccaagccggagggttaccgcaaggcactgcgcctgatgaagatggccgagcgcttcggcctgccggtgctgaccctgatcgacaccgccggcgcctggccgggcatcgacgccgagtcgcgcggccagtccgaagcgatcgcgcgcaacctgatcgagatggccgagctgaaggtgccgatcatctgcaccgtgatcggtgaaggcggctccggcggtgcgttggcactgggtgtgggcgaccgcaccgtgatgctggaatacgcggtgtactcgaccatcaccccggaaggctgcgcctcgatcctgtggaaggacgcgggcaaggccaaggaagcggccgaacagctgggcctgaccgcgccgcgcctgaagagcctgggcctggtcgacaaggtcgtgcgcgagccgaccggtggcgcccaccgcaacccgacgcagatggccaagcgcctgaaggccgtgctgctgaacgaactggacgcgctggacaagctgtccaccgaacagctgctggaacagcgctacacgcgcctgcgcagttacggcacgtacgaagcagcctaa

SEQ ID NO: 492914 - DNA, 870 bp, Stenotrophomonas maltophilia
atgaagaccctgctgttcccgttcgctgccgcactggccctggccgcctgctccccgtcgaagatcgagttccagatcgacaacccgaccgacacgccgctggcgttgagcatcgacggccaggacctgccggtggccgcacagggctcgcgcccggtctcgctcgctgtcggcgagcatcgcctgcataccgacaagctcggtgatgtgcgcttcatcgtctacgtcgacggtcgtggcgggctgatcaatccgaccctcagcgagtacgtgatcgcccgcgagatctacgtcaccgacgagagcaaggtgaagaacttcggcgtcggcaacagcggtatccagctcggcggcgtcgacttcgaaggcccgttcgagaagcgccacgacctgttcatcgacaagacctggacctacggcgtgcgcgaacccttccccaaggaaaaggtggtggcccacgttgattccagcggcggccagatcgtggccaaggtgttcaccgctcccgacttcatcgcttacgtggaagaaggcatgggcgagcccggcgcgttcaagcgcgaacagccaggtggctacgtggccccggcctacagcctggaaccggccccggccagcctgccggcgctggtgccggccttcgaggcccacgccgcgcccctgcgcgaggtctatgcgcgctggctgaaggccaccaccgccgatgaacagaaggccctgcgcaagcaggatttcgccgcgcagatggccttcacctcggccactgccaccctgggcagcggccttggccgggaagccaacgaggcctacaacgacttcgtctcccagcgcagccagttgattggccgcagcgccctggtggtgccctga

SEQ ID NO: 492915 - DNA, 3591 bp, Stenotrophomonas maltophilia
atgtccaactcccgcttcgtacatctccacgtccacaccgagttctcgctggcggactccaccatccgtgtgccggccaaaccggaccaggcggacccgaagaaggccaagcaggccaacctgctgtcgcgctcggtcgaactcggcctgcccgcgctggcggtgaccgacctcaacaacctgttcgccctggtcaagttctacaaggccgccgaaggcgtgggcatcaagccgatcgccggtgccgacgtgctgatcgccgaggaaggccaggacccgtggcggatgaccctgctgtgccgcgaccgcgagggttacctgagcctgtcgcggctgctgacccgcgcctggatggaaggccatcgccccgagggcggcgtggccgtgcacccggactggctgaaggccggcaacgccaacctgttcgcattggccgggcggcagagcctggccgggcgcctggcgctggacggcaagcatgaactggccgagcagcagctggccgactggcggcgcgtgttcggcgatggcctgcacctggagctgacccgcaccggccgcgagggcgaggaagccttcaaccagttcgcgctgatggccgccggccagcgtggcctgccggtggtggccagcaacgacgtgcgcttcctgtcgccgtcggacttcagcgcgcacgaagcgcgcgtgtgcatctccaccggccgcgtgctggacgaccccaagcgcccgcgcgaatacagcgaccagcagtacctgaagtcggccgaggagatgtgcgcgctgttcgccgacatccccgatgcgatcgacaacacgctggcgctggccgagcgctgcaacatcgagatgcggctgggcacctacttcctgcccaactacccggtgccggacgacgagacgctggacacctggatccagaagatgtcgcgcgatggcctggaagagcgcctggagaagaatccgctggcgccgggcaagacccgcgaagagtatttcgagcgcctggaattcgagctcaacaccatcatcaagatgggcttcccgggctacttcctgatcgtggccgacttcatccagtggggcaagaaccagggtattccgatcggccccggccgtggttcgggtgccggttcgctggtggcgtgggcgctgaagatcaccgatctggacccgctgccgtacaacctgctgttcgagcgcttcctgaacccggaacgcgtgtcgatgcccgacttcgacatcgacttctgcatggaccgccgcgacgaggtgatcgactacgtcgcccgcaagtacgggcgcgagcgcgtcagccagatcatcacctacggcaccatggccgccaaggcggtggtgcgcgactccggccgcgtgctcggcttcccgtacggcctggtcgacggcgtctccaagctgatcccgaacattctgggcatccacctgaaagatgcgctgggcaagggcaaggaaggcccgagctctgagatggcgtcggccgaactgatccagcgctacgagaccgaggacgatgtccgcgacctgatcgacctggcgctgcagctggaagacctgacccgcaacgccggcaagcacgccggtggcgtggtgatcgggcccgagccgctgagcgagttctgcccgctgtacgccgaacacgacgagaacggcctcggcaagaacccggtcacccagttcgacaagaacgacgtggaagaagtgggcctggtgaagttcgacttcctgggcctgcgcacgctgaccatcatcgactgggcggtgaaggcgatcaacaagcgccatgagcgcgccggcatcccgccggtggacatcgccgcgatcccgctggacgacacgcccacctacagggacatcttcgccaacggcaataccggcgcggtgttccagttcgaatcctcgggcatgcgccgcctgctgaaggatgcgcgccccgaccgtttcgaagacctgatcgcgctggtgtcgctgtaccgccccggcccgatggacctgattccctccttcaatgcgcgtaagcacggccaggaagagatcatctatcccgatccgcgcaccgaagccatcctgaaggacacctacggcatcatggtgtaccaggagcaggtcatgcagatggcgcagatcgtcggcggctactcgctgggcggcgccgacctgctgcgccgcgcgatgggcaagaaggtaccggccgaaatggccaagcaccgcgagatcttccgcgaaggtgcagccaagggcggcgtcgatggccccaaggccgacgaaatcttcgacctgatggagaagttcgccggctacggcttcaacaagtcgcacgccgctgcctacgcgctggtcagctaccagaccgcctggctgaaacgccattacccggctgagttcatggcggccacgctgtcgtccgatctggacaacaccgacaaagtggtcggcttcctcgacgaggtgcgcaacctcggcctgaccgtgctgccgcccaaggtgaaccagtcggccttcatgttcgaagcggtgacgccggacaccatccagtacggccttggggcgatcaagggcgtcggccagggtgcctgcgaggcggtggtcgaggagcggctgaagggcggcccgttcaaggacctgctcgacttctgcacgcgcgttggttcggccaagctcaacaggcgcacgctggaagcgatgatcaactgtggtgcgttggacgagctcggccgcaaccgtgcctcgctgatgctgcagctgccggaggtgatcaaggctaccgaccagatggcccgcgagcgggcttcgggacagaactcgttgttcggtggcccggacccgagcgcgaccacgatccagctggacctgcccgaagccgaggagtggccgctgctgcagcgcctgaacggcgagcgcgacacgctgggcttctatctcagtggccacccgttcgatccctggcgcgacgatgtgcgcgatctggtcggcaacgacctgggttcggtggagaagatctggagcgccaacagcggtggtggcggcggcggcgaaaagcgctggcgcccggaagtgcagacggtgctggccggccaggtggtcggcgtgcgccgcaagggcgagagccagatcttcatccagcttgaggacggacgtggccgcgtcgagtgcagcgcgttctccgacgcgatggccgagttcggccacctgatgaccaaggaccgcatcctggtggtcaagggcggcctgcgcgaggacgagttcaatggcggcttcgcgctgcgcatccgccagtgctgggacttcgatgaggtctgcgccaactacgccacgcggctgtcgctgcgcctggacctgcgccagcagcgcccggtctgggagcgcatcgatgcgctgctcgaccgccatcgcccgggacggacgccactgcgcctggacctgctgctgaaggggccgcacggcggcgtcgccggcatgctcgatgtgtccgggcagagcgcggtacgcatcgattccaagctgatggaggcgctgcgcgccgacccggccgtgcgcacgctgaaggtgcgctacagcccgccatgggccagctga

SEQ ID NO: 492916 - DNA, 660 bp, Stenotrophomonas maltophilia
atgagccgccgtcacgccgcagcggccagcctggccctgttcgacggtgcgacggtggtcgagccggaacgcctggtcgctggcgtcgacgaggccggacgtggcccgctggccgggccggtggcagtggcggcggtggtattcgatccgtcacggccacgcatcaacggcctggacgattccaagcagttgacggcggcccgccgcgagcagctgcatgaccgcatcatcgagcgtgccctggcctggcacgtggtgctggtggacgtggacaccatcgaccgcctgaacatctaccaggccaccctgcagggcatgcgtgacgtcgttgcagcggttgcccatgtggccggcttcgcccgcatcgatggcaacgtggtgcccaagggcctggtgctgccggcgcaggcgctggtcggcggcgatggcatcgaccgcgcgatcatggccgcctcgatcctggccaaggtttcgcgcgaccgttacatgcaggacgtgcatacccgccacccgcagtacggcttcgaacagcacaagggctatggcaccccggcccacctggccgccctgcgcgagcacggcccctgcatggagcaccggcgcagcttcgccccggtgcgtgagtgcctgggcctgacgcaggcggcggccatcgcctga

SEQ ID NO: 492917 - DNA, 1260 bp, Stenotrophomonas maltophilia
atgagcagcacgaccggccaggcggcggccggcgccgcggtgattccgttggcctcgatggccggcagcgttcccgcacagcgggtgctcagcgagcgcccgttgcggatcgcgctggttgccggcgaagcgtccggcgacctgctcggtgcgggcctggtgcgtgaactgaaggcgcgcttcccgaatgccgagttcgccggcattggcggcgatgccatgcgcagcgccggctgccagacctggcacgatgccagcgagctggcggtgatgggcctgaccgaagtgctgcgccacctgccgcggctgctcaagctgcgctcggcgttccgccagcgcgccctggaatggcagccggacgtgttcatcggcatcgacgcacccgacttcaacctgggcatcgagcgctggctgaagcaacgcggcgtgcgcaccgtgcattacgtcagtccctcggtctgggcctggcgcgagaagcgcgccgagaagatcggcagcagcgcggacctggtgctgtgcctgttcccgatggaaccgccgatctatgccaggcacggcatcgacgcacgcttcgtcggccacccgatggccgatgacattccgctgcagggcaaccgcgaggaagcccgtgccgcgctcgggctgccgacctcggccaaggtgctggcggtgttgccgggcagccgcctgggcgagatctcgcgcctgggcgaacccttcttcgaagccgcctggcaggtctctgaacgcattccgggcctgcatgtggtggtgcctgcctccaacccggcctgccggcagctgatcgaagaacagctgtcgcgctcggcattgccggtcgcctactcgcacgtgctggatggccaggcgcgcaacgcgatgatcgccgccgacgtggtggtgctggcctccggcaccgcgaccctggaagccatgctggtgaagcggccgatggtcgtcggttaccgcgtcaacgaactgacctatcgcctggtcaaggcgctgggcctgatcaaggtcgaccgcttcgccctgcccaacatcctggccggccaggacctggcgccggagctgatgcagcacgactgcacgccggacaggctggccgcggccatccagcaatggttcgaccacccgcagcgggtgatcgacctgcaggacacgtacgtgcgactgcacgagcgcctgcgccgcaatgcttcggcgcgtgccgccgatgccgtcggcgaactgctgatgcgcgaccaggcgcaggcatga

SEQ ID NO: 492918 - DNA, 792 bp, Stenotrophomonas maltophilia
atgactgacaacgcaccgcggatccaccccaccgccgtcatcgatccggccgcgcgcctggccgacgatgtgcaggtgggcgccttcaccctgatcggccccgatgttgaaatcggcgccggcacggtggtgggcccccattgcagcatccacggcccgacccggatcggccgcgacaaccgcttcgtcggccacgccgcgatcggtggcgagccgcaggacaagaagttcgccggtgagcgcaccgaactggtgatcggcgaccgcaacgtgttccgcgagttcgtcacgctcaaccgtggcaccggcggcggcggcggcatcaccaccatcggcaacgacaactggatgctggcctacacgcacgtggcgcacgactgccatgtcggcaatttctgcgtgttctccaacaacaccaccctggccggccacgtgaccgtgggcgactacgtgatcatcagcggcttcgccggtgcccaccagttctgccgcatcggtgcgcatgccttcctcggcatgggcgcgctgaccaatggcgatgtaccgccgttcaccatggtcggtaccgattcgctgggccgcccgcgcggcatcaacagcgaaggcctgaagcgccgcggcttcgacgccgaccgcatctcggccatcaagcgtgcctaccgcacgctgtacgtggccggcctgccgttggccgaagccaagcagcagctgaccgaacaggcgcgtgacagcaatgacgtgaaggccatgctggacttcatcgagcacgccgagaggcccttgctgcgatga

SEQ ID NO: 492919 - DNA, 459 bp, Stenotrophomonas maltophilia
atgaacgattcgctgcagcttccgatcgatgtctgccagatccaggaactgcttccgcaccgctacccgttcctgctggtggaccgggtgcttgaactcgacgtcgaggccaagcgcatcctggcgcagaagaacgtcagcatcaacgagccgttcttccagggccacttcccgggccgcccgatcatgcccggcgtgctgatcatcgaagcgctggcgcaggccggcggcgtcatgacccagctcacgctcggccgcgatgcgcagtccaagctgttctacatggtcaaggtggaaaacgcccgcttcaacaagcaggtcgtgcccggcgacgtgctgatgctggatgtgcagatgaagcgcctgatccgcaacatgggctggtactacggcgaagccaaggtgaacggcgaagtcgtcgcgtcggccgaggtcatgtgcgccggcgccaagggctga

SEQ ID NO: 492920 - DNA, 1023 bp, Stenotrophomonas maltophilia
gtgaatactcccacctacaccgcccagcaactcgccgagcagttcggcctgcaggtccatggcgaccccgccaccgccatccatggcgtggccaccctcgcccatgccggccctggccagctgaccttccttgccaacccgcgctaccgcgcccagttggccgacagccaggcctcgctggtggtcctgcgtgccgacgacgccgaggccgccccgggcactgcgctcgtcgccaaggacccgtacaccgcgttcgccaagatcgccgcgctgttcgacatcgccccgacccgcccgccgggcatccaccccagcgccgtcatcgaccccagcgcccaggtggccgccagcgcccatatcggcccgttcgtttcggtcggtgcgcgcagcgtggtcggcgagaactgcatcatcggcaccggcagcgtgatcggcgaggactgcagcctggacgccggctgtgaactgatcgcccgcgtgaccctggtcacccgggtcacgttgggcaagcgcgtgcgcgtgcatcccggtgccgtgctcggcgccgacggtttcggcctggcgatggacgctggcaagtggatcaaggtgccgcagctcggcggcgtccgcatcggcgacgattgcgagatcggcgccaatacctgcgtcgaccgcggcgcgctggaagacaccgtgctggacgaggatgtgcgcctggacaacctggtgcagatcgcccacaacgtgcagatcggcgcgcattcggccatcgccggctgcaccggcatcgccggcagcgccaagatcggccgctactgcctgcttggcggccacgttggcgtggtcggccacctcgaaatctgtgacaaggtcgtgatcaccggcaagtcggtggtccgcaactccatccatgagccaggcgagtactcgtccggcaccccgttgaccgacaaccgcacgtggcgcaagaacgccgcgcgcttcaagcagctggacgcattggctcgccgcgtcctggctgctggcaaggagaaagaatga

SEQ ID NO: 492921 - DNA, 2364 bp, Stenotrophomonas maltophilia
atgacgcgactccccaatcgccgcctgctggccctcgccctcgccgccgtcaccggcgctcccgccctggcccaggcagccgagcccttcactgtcagcgacatccgcgtcgatggcctgcagcgcatcagctcgggcacggtattcacctacctgccggtggaacgtggcgagacggtcaccgacaacaaggtcggcgagacgatccgcgccctgtacaagaccggcttcttcgaagacgtgcagctggaccgccagggcacgatcctggtggtgaccgtcaaggaacgtccggcgatcaacaagctgaccgtgaccggcaacaaggacatcaagtccgaccagctgctcaagggcctgtccgacatcggcctgaccgagggcggcaccttcgatcgcctgagcctggaccgcgtgacccaggaactgcgccgccagtacaacgaccgtggcaaatacaacgtcgacatcaccccgacggtgagcccgctggaccgcaaccgcgtggacatcgccatcgccatcaaggaaggcaaggcggccaagatccgccacgtcaacctggtcggcaccgaaaagttcgagagcaaggacatcctggagacctgggagtccaaggagcacaactgggcgtcgtggtaccgccgtgacgaccagtactccaaggaaaagctgtccggcgacctggaaaagctcaactcctggtacctggaccgcggctacgtcgatttcagcatcgattccacccaggtctcgatcagccccgacaagcgcgacatgttcctgaccgcgggcgtgaccgagggtgcgcagtacaagatctccgagatcaaggtcagcggcgacaccatcctcccgcaggaggacgtcgagcgcatggtgatccagaagtccggcgacacgttctcgcgtgccctgctggaattcagctcggacaccatcaccaattcgctgtccaacatcggctacgcgttcgccaaggtgaacccgatcccgaccaccaaccgcgccgagcagaccgtcgccatcaacatgcaggtcgtgcccggcccgcgcgtgtcggtgcgccgcatcctattccgtggcaatacccgcacctccgatgaggtgatgcgccgcgaaatgcgccagttcgagaacagctggtactcgcaggccgcgatcgaccgctccaagatccgcctgcagcgcctgggctacttcgaatcggtggaagtggagacgccggccgtcagcggcagcaacgaccaggtcgacgtcgtctacaacgtcaaggaaaccacctcgggcagcttcgtgttcggcctgggctactcgcagtcctacggcatgaccacctcggtgcagctgtcgcagaacaacttcctcggcggcggcaaccgcgtgtcggtcgaagcctcgcgcagcagctatctgcagcgctacggcttcagctacaccaacccgtacttcaccgatgacggcgtgtcgctgggctacaacctgtcctggcgcgaactggactactccgacttcaataccgcgcagtacaacagcaccaatggttcggcgcaggttgtgttcggcgtgccgctgaccgagaccgataccgtctcgctgatgttcggcatcgacagcaaccagatcaccacctaccagggctcgaccccgcagtcgatcatcgactacatcaacgcggtcggtcagcgcaccttccacgcctggcgcaccgagctgggctgggcgcgcgactcgcgcaacgactacttcatgccgacgcgcggcacctaccagcgcatcggcctggaaaccacgctgccgggttcgaccatcgagtactacaagctgaactaccagatcagcaagtactggccgatcatgccgtcgctggtgatcaacacccgcgcggaaatcggctacggcgatgcctacggcaacgactacacccgtacgctgaccaatccggatggcaccacccgcaccgtcaccgccagcggcctgccgttcttcgagaacttctacgccggtggcaccaactcggtgcgcggcttcgaggacaacaccctcggcccgcgcgaagtcaccaccggttatccggaaggccagccgctgggtggttcgctgaagaccgtcggttcggtcgaagcctacttcccgcgcctgttcgacagcccgtcggcacgcgtgtcggccttcgtcgacttcggcaacgtctacaacggcacccagaacttcaaggccaacgagctgcgcgtgtccaccggcgtggccctgctgtggcgcgccccggtcggcccgatctcgatcagctacgccttcccgctgaagaaggaagacgatgacaagatcgagcgtctgcagttcaccttcggcggtcagttctaa

SEQ ID NO: 492922 - DNA, 1359 bp, Stenotrophomonas maltophilia
atgactgacttcatcggatcggtctggtggatgattgtcagcctcgggctgctggtcacgttccacgagttcgggcattactgggtcggacgcctgtgcggggtcaagatcctgcgtttctcggtcggcttcggccagccgctgtggtcgcgccgcgaccggcatggcaccgagttcgccatcgccgccattccgctgggtggctacgtgaagttcctcgacgaacgcgaggtcgaagtccacccgcacgagcgcggccaggccttcaaccacaagacggtctggcagcgcatcgcgatcgttgccgccggcccgatcgccaacctgctgctgtgcatcctcctgctgtgggcgatgttcgtgatcggcaagcaggattactcgcccaccgtcggccgcgtcagcggcatcgccgccagtgccggcctggccagcggcgaccgcgtgctgcgcgtggacgaccgccaggtggtcaccctcggcgaggccagcatggcactgaccgcggccgcgatggaccgccgcgacgtgaagctggaagtgctggatacggccgaccaggtgcgcacgcgcaccctgccgctgtcgcaactgccggcgggtttcgatgagcggcgggtgccgatcctggctggcatgtactggcagtcgtggctgcagcccgcgctggtcgagtcgctcaccgcagactccgtggtggccgggcaactgcagccgggcgacctgatcgtggccattgacggccagcgcatcgacggcgccgaccaggtgatcggcgagatccaggcgctgggccgtgccggtggcccgggcatgatcgaggtcctgcgtggcggcgagcgcctggcgctggaagtgacgccacgcaagggccaggacgccaagggcggccccacgtggcagatcggcgttcagttcccgaccaagttcagccccccctacgacaccctcctgcgctacggccccctggactcggtcaccgtcgcggtacgcgaaaccgggcgcctggcggccgactcgctgggcatgatgggccgcatcgtcaccggcaaggcctcgctgcagaacgtttccgggccggtcaccatcgcccgcgtggccaatgtctcggccaagcgcggcctcgactggttcctgcagttccttgccctgctgtccctcagcctgtgcatcatcaacctgctgccgatcccgatcttggacggcggccacctgctgtattaccttatcgagttggtcaagggcagcccgctgagcgagcgtgccatcgccgccggccaatacatcggcctggcgttgctggccgggctgatggggttggcgttctacaacgacatcctcggcctggtcccgcgatga

SEQ ID NO: 492923 - DNA, 1191 bp, Stenotrophomonas maltophilia
atgaatgctgctgcagacctgcgccgggtcgccgtattcggcgccaccggctcgatcggtgcctccacgctggacgtgatcgcccgccacccgcagcgctaccaggcgaccgtgctcgccgccggacgccaggtgcaggggctgctggcgttgtgccgccagcacaaacccgcgcacgcggtgatcgccgacgaatcgctgttcgccgaactgcgtgacggcctgcgcgacgccggactggccaccgaagcccatgccggccatgccgcgctggaccagctggccgccagcgacgcctgcgataccgtggtcgcggccatcgtcggcgctgccggcctgtcctcgaccctggccgcggccgccgccggcaagcgcatcctgctggccaacaaggaatcgctggtgctggccggcgaactgctgacccgtaccgccgaacgtgccggcgccgaaatcatcccgatcgacagcgaacacagcgcgatcttccagtgcctgcgctcgcgcgacgccagcgtcgacggcgccggcgtgcgccggatcctgctgaccgcctccggcggcccgttccgtggccgcagccgcgccgaactggcccaggtcaccccggcccaggccgttgcccacccgaagtggtcgatgggaccgaagatctcggtcgattcggcgacgttgatgaacaagggcctggaagtcatcgaggcccaccacctgttcggcgtgcccggtgaacgcatcgaagtgctggtgcacccgcagagcctggtccattcgctggtcgagttcgtcgacggctcgaccctggcgcagatgggcctgccggacatgcgcaccaccctcgccgttggcctgggctggccacagcgcatcgaatcgggcgtggccgggctggacctgctggcccagggccggctggatttcgaggccccggacaccgacgccttcccctgcctggccctggcctggcaggccatgcaggccggcggcaccgcaccggcggtgctgaatgctgccaacgaggaggcggtttcagcgtttcttcagggccggatcggtttcctgacgatcccggcgctggttgctaacgctctttcaacactgccgacgcaagcagccgatacactggaggtcctgttgtccgccgaccagcgggcacgccagctcaccctgaacgccatcgacgccgcctga

SEQ ID NO: 492924 - DNA, 837 bp, Stenotrophomonas maltophilia
atgaccaagacccgagtcctcgccgcgctgatcatggcgccggttgccattgcggcgatcctgctgctgcccacgcaatggctggccgccgccgccgctgcggtgctgctgatcggcctgtgggaatggctgaagctggccggtatcgaagacaccctggcacgcaccgtgcttctggtgctgaacctgctgctgatggtgctgctggtctgggccgatggcagtacgctggtgctgttccagataaccacgctggccggcgttgcctggtggctggccgcgctggtctggctgcgcttcttcaatttcggtgcacagccgtcggcgccctcgcgcatcctgaagatgctggccggcacgctcgccatcgtgcccgcctgggccgcgctggtgctgatccatgccggtggcgatccgccgggcaagcagggccacctgtggctgctggctgcactggcactggtgtgggcggccgactcgggcgcctacttcgccggccgccatttcggcaagcacaagctggccccgcggatcagccccaacaagacctgggaaggcctgttcggcggcctgctggccggtgtcgccgtggccgtcggcctgggctggctggccgggatcgataccgcacacctgccgggcctgctgatcactgcggtcgtggccgtgttcgcctcggtgctgggtgacctgttcgagagcctcatcaagcgccacgcgggcgccaaggattcgggccacctgatcccgggccatggcggcgtgctcgaccgggtcgacggcgtcctcgccgccgtcccggtgttcgcgctgggcaaggaaatcttcgggttctga

SEQ ID NO: 492925 - DNA, 711 bp, Stenotrophomonas maltophilia
atggatggcaatgggcgctgggcacagcagcgccgtcgcccccgcgtgatcggccaccgtgccggcgcgcgcgcggtcaaccgcaccatcgagcgctgccttgaactgggcattccggcgctgaccctgttcgccttctccagcgagaactggggccggccgcaggaggaagtggatgcgttgatgaagctgttcctcggcgcgctcgaccgcgaggtggacgagctgcaccggcgcggcgtgcgcgtacgcttcatcggcgaacgcgagcgcttcggtgccgggctggtcagccgcatgcagctggccgaacagcgcaccgccgacaacaccaccctgaccctgtcgatcgcggccagctatggcggccgccaggacatcgcccgcgccgcgcgcgccctggccgtcgaagtggcggccggtcgcctgttgcccgagcagatcgacgaatcgctgctgggcagccaggtcgcccttgccgacctgccgccgccggacctgttcatccgcaccggcggcgacacccgcatcagcaacttcctgctgtggcagctggcctacaccgagctgtggttcaccgaggccctgtggccggacttcgatgccgggcagctgcagcaggcgctggacgcctatgccggccgcgagcgtcgtttcggcctgaccagcgcccagattgccgcactggccaccgagacttccagcccatga

SEQ ID NO: 492926 - DNA, 555 bp, Stenotrophomonas maltophilia
atgctcaacgacatcaagaacaacgcgcagacgcgcatggccaagagcatcgacgctctgaagcacaccctcacctccatccggaccgggcgtgccacgcctgccctgctggaccgcgtgacggtcagtgcctatggcaacgccagcaccccgctgaaccaggttgcctcgatctccaacgccgacgcgcactcgctgctggtcacgccgttcgacaagggcatgatcaaggagatcgaaaagggtctctacaacgccgagttcaccccgaacaccctcggcaccgcgatccgcatcaacatgccgccgccgaccgaagagcgccgcaaggagctggccaagcaggtgcagaaggaaggtgaaggcgccaagatcgcgatccgcaacatccgtcaggacgcgaacaaggaaatcgccaagctggtcaaggacaaggcgatcagcgaagacgagaagaagcgcggcgaagacgacatccagaagctgaccgacgccaacatcaaggacgtcgacaaggtcgtcgccgacaaggaaaaagaactgctgtcggtctga

SEQ ID NO: 492927 - DNA, 729 bp, Stenotrophomonas maltophilia
atgtccaagctcgcctatcgccgcatccttctgaaactgtccggggaggcgctgatgggagacgaggactacggcatcgacccgaaggtcatcaatcgcctggcccgcgaggtcatcgaagcccagcaggccggtgccgaagtggcgctggtgatcggcggcggcaacatcttccgcggcgccggcctggccgccggcggcatggaccgggtcaccggcgaccagatgggcatgctggccacggtcatcaacgccctggccatgcaggatgccctcgagaagctgggcgccaaggcccgcgtgatgagcgcgatcaagatcaacgacgtgtgcgaggactacatccgccgccgcgccatccgccacctggaaaagggccgcctggtgatcttcgccgccggcgtcggcagcccgttcttcaccaccgattccggcgccgccctgcgcgcgatcgagatcggcgccgacctgctgctgaaggccaccaaggtcgatggcgtgtacgacaaggacccgaacaagcacagcgatgcggtccgcttcgacagcctgagctacgacgaagtgatccgccgcggcctggaagtgatggacacggcggccttcgcattggcccgcgacagcgacctgccgatgcgcgtgttcgacatgggccagccgggcgagctgctgaagatcctcaacggcgcgaacatcggcaccctggtccagggccgcgacccggcctga

SEQ ID NO: 492928 - DNA, 1539 bp, Stenotrophomonas maltophilia
atgcctcccgagctgacagctgccctggcgctctgccgcaacctgccttcgccacccggtattgccctgcgcatcatcgaactggcccaggacccggaagcggacatcgccaccgctgccgacatcatcgccatcgacatggcgctgagcgctcgcatgctgcgcatcgccaattcgccgctgtacgccagccgccgccggatcgagaacctcggccaggcgctgaccatgctgggcctgaacgccacgatcagcctcgccctcggcttcactgtcacccagggcctgaccggcggcaccggcgccgaccacgacctgcgccagcgcgcctggaagcgcagcatcctcagcgccctggctgccagccagctgggccaggcgcgcggcctgcgccggctggaagaactgatgctggccggcctgctgcaggacctgggcgtactgtgcctggcccaggccgagtcggagcgctacctgccgctgctgcgcgaggcacgcgacaacaccgacctggtcgcccgcgaacgcgaggaactgggctgcagccatgccgaggtcggcgcgtgggtggccgagcaatggggcctgccccgctacctggtggagagcatcagccacagcgaggacgaggacgtcgccgaatcgccgttccaggcctgcgtgcagctgtccggcgcggtggccgacatctggctggacagcgacgccgacgccgcgcgtgagcgcgccctgcagcaggtgcacgaccgcctggagctggacagcgcgcgcttcgaccaggtcctcgcccgcatcagtgaagccctgcccgacatcgccagcctgtttgatgccggcctcaattcaccggcgcgggtgcgcgagctgatcgatcacgcgcaggagctggccacgctgcgcaacctgcgcgaactgcaggacgccgaccaggcacgacgccgcgccgacgagttcgaggcgcgcgccaagcgcctcgccgaccaggcccatcgtgacgcgttgaccggcgtgctcaaccgccgccagctggaagcggtgctggagcaggaattcctgcgcgccggccgccagggctggccattgtcggtggccttcatcgacctggacgacttcaagaagatcaacgacgcccacggccacctgaccggcgacgaggtgctgcgcgccttcgccggcaagctgcagggccagctgcgcaacagtgacaccgtcgcccgcttcggcggcgaggaattcgtcgcgctgctgccaaacaccagcgaaagcgtggccctggacgtgatccgccgggtgctggccaacatcgtcgccacgccgatggccgagctggagggcgggccgctgttcgtcaccttctccgccggcgtggccacccagggtggctacgagcgcttcgccgacgtgcaggacctgctgcgcgcagccgacgacgtgctgtaccgctccaagaacctgggccgcaaccgggtgatcgcccgctcaccaggtgccctcggccacgacgagctgtcggccaccgctggcgccgagctgggctga

SEQ ID NO: 492929 - DNA, 876 bp, Stenotrophomonas maltophilia
gtggaaatcactgcttccctggtcaaggaactgcgcgagcgcaccggcgccggcatgatggaatgcaagaaggcgcttaccgaagccaacggcgacatcaacgccgctgctgaagccatgcgcaagtccggcgccgccaaggccgacaagaaggctgaccgcgtggccgccgaaggccgcctgggcctggcccaggacggcggcaaggccgtgctggtcgaagtcaactcggaaaccgacttcgtcgccaacgatgacaacttcaagtccttcgtcaacgccgtcgccgctgctgccctggcatcgggcgccaacgacgtcgaagccgtgaaggccgccacgctggccgacggccgtaccgtcgaggaagcccgcgccaccgccgtgcagaccctgggtgagaacatccagatccgccgcatggtcaaggtcgacaccaccggcaacatcggcgcctacgtccacaccaacggcaaggtcggcgtgctggtcgacctgatcggcggcgacgtcgagctggcccgtggcctggccatgcacgtggccgcgctgaagccgccgcacaacaaggctgcggacgtcccggccgagttcgtcgagaaggaaaaggaaatcgagctggccaagatgaccgataaggacaaggccaagccggccgacatcctggaaaagatcatcagcggcaagatcaacaagatcgtcagcgacgtgaccctgtacggccagacctacgtgctgggcgacaccaccgtcgagcaggtggtcaaggccgccggcgccgacgtggcaggcttcaagctgctgatcgtcggcgaaggcatcgagaaggtggtggaagactacgccgccgaagttgccaaggcgatgcaggtctga

SEQ ID NO: 492930 - DNA, 807 bp, Stenotrophomonas maltophilia
atgccccaggtcaccatgcgtcagatgctggaagccggcgtccacttcggccaccagacccgctactggaacccgaagatggctccgtacatcttcggcgcccgcggcaagatccacatcatcaacctggaaaagaccgtcccgctgttcaacgatgcgatgaacttcatctcgtcggttgcccagaagcgcggcaccgtcctgttcctgggcaccaagcgcagcgcccgcgaaaccatcaaggaagaagccgagcgttgcggcatgccgttcatgaaccagcgttggctgggcggcaccctgaccaacttccgtaccgtcaagcagtcggttgcccgcctgaaggaactggaagccggtgaaaccgacggcaccttcgagaagctggtcaagcacgaagtgctgggcctgcgtcgcgagcgcgacaagctggaagcctcgctgggcggcatcaaggacatgaaccgcctgccggacgccatcttcgtgatcgacatcggccacgaagacatcgcgatcaaggaagccaagaagctgggcatcccggtcatcgccgtggtcgacaccaactacaacccggaactggttgattacgccatcccgggcaacgacgacgccatccgcgctgtgcagctgtacgcccgcgccgctgccgacgccgtgctggaaggcaaggcggctgccccgcacgccgcttcggtgcgcgaggaagaattcgctgaagccgctgctgaaggcgaagagaagccggcccgccgcgctccggccaagaaggctgccaagaagggcgacgacgcccaggcctga

SEQ ID NO: 492931 - DNA, 699 bp, Stenotrophomonas maltophilia
atgcgcgcgttgctgaccctgctggcactgctgctggcactgcctgccgcagcgctggagctgttgccgaccaccctgcagctgccggcccagggcggcagcgccgaactgtggttgcacaaccccgggcccggccgctggcagggccaggtgcaggtgctggcgtgggatcagcagctggacgccgaacgactgcaccccagcgaccagatccgggtcagcccggcgcagctggacctggcccccggcagcacccagcgcgtctggctgttgccaggcgatccgccagcggcggccgctgaacaggcctatcgggtcgtactggcaccgacgttgccggggttgccgcgctattcgctgccgctgttccgcggcccagcggggccagcactgcaggcccggctgctgggccgcgtcgaggcccacgggtctctggccgtactgcgactcagcaatgccggtaccctgcacggccgcctgcacgatctgcgcttcatcacggcggacggccaggcaacgctgctgacggctggcctggccggctacattctggcgggccatgaacgccgctggcccctgcctgcccgcgccgatggctatgcaggcggccgcttccaggcacgcctgcaggacggccgcgaggtcgatctggccgcaactgaccctgcaattgcagcaagcgctcccagcgggctataa

SEQ ID NO: 492932 - DNA, 216 bp, Stenotrophomonas maltophilia
atgctggtcgccagcctgccggcatgggccgaacccagcagccccctgcagatccggctgaccgtggttgaatcctgcagcgacgatggcggcggcatccgctgcccggcaccgcaccagcgcagtgacgcaccccaggcgccgcgccaggtccgcgagctcgcaccaccggcgacggacgagaacgcaacaccctccgtgaccctcatctactga

SEQ ID NO: 492933 - DNA, 1038 bp, Stenotrophomonas maltophilia
atgagggtgctgctgctcgtcctgctgctctgcgtcggcctgctggcagcggcgcccgccggtgccaccgcggtctgcacggcggtcgccaatccgaccctgccgttcggcaacatcaacagcaatgcacccggcccgagtacggccaacctcaacatcacggtgacctgcaccaccgccgcgctgagcctgctggccaccaccggcgtgcgcgtctgcgtgggcatcggcgcaggcagtggcggcggcagcagttccaccttccgcacgatggccacctccagcagtgacaccctgaatttccagctgtacaacaacgccagcttcggccaggtcaccggactggtgccgcgcggcacgccacccgcgcaggaactgaccatgacctacaacgtgccgctggtgacgggcggcagcggtgcgcagtccatacagctgttcgggcagatcccggccaaccagatcctggcctccggcgcgtacagcagcaccttcagcggggccaacgtggtcctgacctgggcctggaacgaagtcctgctcggtaccgccaccgtgcccgccacctgcaatggcggcgccaccggcaccaacagcgccagtgcagccttcagcttcaccgccaccgccaacgtgctgccgcaatgtggcagctacgtcaccaccaccatggacttcggcaacgtcaccggcggcattccggccaacatcgaccggaccgccaccctcaccctgacctgcctgaagaacactgccttccaggtcggcctcaacaacggccagaacaatcccaccgccaccaccacccggcgcatggccaccaccctcggcggaagcacctattacctcgcctacgagctctaccgggactcggcgcggagcctgcgctggggcaataccctgaccgtcgacacggccagcggcaccggtaccggcagcgcgcagcagctgaccatccatggccgggtgccgccggtcagcggccagccgccggccggcacctacaacgacctggtgacggtgacgatcacctactga

SEQ ID NO: 492934 - DNA, 2370 bp, Stenotrophomonas maltophilia
atgggcgcgctgttggcggccctggctcccgcggcgaccgaggccgccgatgtgtccggcgtggcggccgttgatgtatccggcgtgtcggccgatgccatcctgcctcccccgaccccgctgaccgccagccaggcgctgtacctggatgtgtcgctcaacagcaccccgcgcggcctgcagccattcaccgagaaccgcggccggctgcaggccagccccgaagtgctgcgccagcttggcttcaacgccagcggcgacgcgccggtctacctggaccagatcagcggtgcggtggtgcgctatgacgcgcacatgcagaccctggcactggacgtgccgctggaccagctcatcctgcccaccaccgtgctcagccgcccgcagacgcgcgcgcccaccggcagtgcctcgcccggcgtgctgctcaactacgacgtctacggcagccgggtggacacgctcggcaacctcagcctgagcgcggagctgcgcgtgttcggtatcggcaacggcaccttcgaaaacaccgccatcagccgccgctaccagcaacccggcgaccgccattggcgcggcgagagcgtgcgcctggacacacgctggagcctggatttcccggacagtgcaaccacgctggaggtcggtgacttctacagcggcttcgtcgactggacccgcccggttcgcctgggcggcctgcagatcggccgcaactacggcctgcagccctaccgcgtgctcacgcccacgcccagcttcctcggccaggcggtggtgccctccacggtcgagctgtatgtcgatggcctgcgccagtacagcggccaggtgccggtcgggcccttccagctggcggcgcagcccggcatcagcggcaccggtaacgcgcaggtggtggtgaccgatgcgttcggccgcatgcagacgctggatttcagtttctatggcacccagcagctgctggccaagggcctgtcggactggtcggccggcgtcggccacctgcgcagggatttcggcgaacgttccttcgcctatgacgatcgcacggtggccagtgccagctggcgcggcggtgtcaccgacacgttcaccggcgaggcgcatgccgaaggcggcggcggcctggcccaggccggtgtcggtggctggtggctgctcggcgccgctggcgtgttcaatgccgcctatgcgcacagcggctaccacggcctgcagggtgggcaatgggcgctgggctacagctggaacaaccgtcgcttcaacgtcaatctgcgcagcgtacgcagccacggcgactaccgcgacctcggcgcgctgcagggcaacctgccgccgagcatcagcgagcaggccacgctcggcctggacctgctgcggctgggcacgctcagcgccagctatctgcgcctgcgctacccggatggagacgacaaccgctatgccagcctgttctggtcacgtacctggagccagcgctggtcggcctatctttcggtaaaccagaacctggaccgcagcgacgaccgcagcatctacctgtcggtgactgccagcctgggcaacaaccgccaggccagcctttcgagccagcgcaacggcgacagccagagctgggtggcggacgtgacccagccagtgccgggcgatggcagcgccggcggcgtcggctggcgcgcgcagctgcgccacggcgaggacggcaacggcggcctggccgaggtcggcatcctcaacgatgtcggtcgctactcgttcggcgcctcgcgccagggtggactcaactatgcctacgccagcgccagcggcagcctggtgtggatgggcgggcacaccttcgccacgcgcgaggtgtccgatgcgttcgcggtgatcagcaccaatggggtcggcggcgtcccggtgcggctggagaaccgcctggtcggcgtcaccgatgatcgcggcctgctgctggtcagtccgttgctgtcctggcagcgcaaccgggtctcgatcgacaccctggacctgcccgaagacatgcgcgccgaccgcatcgaggactgggtgaccccgcgccagcgcgccggcacccgcgtgaccttccagctgcgctcgcggccgtcactgagcctgaccctgctggcaatggacggccagcctctggaggtcggcagcgaggtgcggttgcccgatggccgccaggccacggtcggctacgacggcctgctctatctggaagacgttgccgccggcagcgtgctgtacgtcaccaccagccgcggcccctgccgcgtgaaagtgccggacctgcccaaggtggtggcgtccggcgcgcggccgaagccggcgccgcagcagtgcatcccggaggtggcgccatga

SEQ ID NO: 492935 - DNA, 735 bp, Stenotrophomonas maltophilia
atggccggaccccgcccgtggcgcgccaccggcgtggcgctgctcgccctgtacctgctggcccccgccggtgccggcgccaccagcctgcaggtcgccccgaccagcctgcagctggaagcccgccagcgtgccggcgagctgtggctgaccaacagcggcacctcaccggtgacgctgcaggtgcgcgtgttccgctgggtgcagcaggacggccaggaacagctgctgcccactgatgaagtgatggccacgccgccgatgcaggaactggccgccggccagcagcagctggtgcgggtgatgcgtccggacagcgagccaccgcctgcacagcggcactaccggctgatcgtggacgaggtacccgacctggccacccgtgccgagggcatgcagttcgtgctgcgctattcgatcccggtgttcgtgcagccttcggccagccgcctggccccacggctgcaggcgcgcctgatgaaactggcggacggccgcaatggcgtggaagtcgccaatacgggcgacagctacgcacagatcgccgatcttgcgctgggcagcgccgcgcgcccgcgcattgtccatcccgggctgctgggctacgtgctgccgggccaggtgatgcgctggccgatcgaacgcacggcgatcgaccgcgacaacgaccagatcacggccaagctcaatggcgagtcggaacagacgccactgtcgcccccaccggctcgctga

SEQ ID NO: 492936 - DNA, 843 bp, Stenotrophomonas maltophilia
atggcccggatcgccagttgggcggcgttcgttcagattgcggccggatcggcgataatgggtgccatgagcgtgaatctgaaaaccccgcaggaaatcgagatgatgcgcatcgccggccgcctggccagcgaagtgctcgacatcgtcaccccccacgtcaagcccggtgtcaccaccgaggaactggaccgcatctgccacgaccacatcgtgaacgtgcagggtgccattccggccaacgtcggctaccgcggcttcccgaagaccgtgtgcacctcggtcaacaatgtcatctgccacggcatccccagtgaagggaaggtgctcaaggatggcgacatcatcaatatcgacgtcaccgtcatcaaggacggctggcacggcgacaccagccgcatgtacttcgtcggcaccccgtcggtgatggcccgccgcctggtggaaaccacctacgaagcgatgtggcgcggcatccgtgcggtgcgtccgggcgccaccctgggcgacatcggccatgccatccagagctacgccgaaggcgagcgtttcagcgtggtgcgcgagtactgcggccacggcatcggcaaggtctaccacgatgagccgcaggtggtgcattacggccgcccgggccagggcctggtgctgcagcccggcatgaccttcaccatcgagccgatgatcaacgagggcacccgctacaacaaggtgctgccggatggctggaccgtggtgaccaaggaccgcaagctgtcggcgcagtgggagcacatgatcgcggtcaccgagaccggcgtggacgtgctgaccctgtcgccaggcgagtcgcaggtttcctga

SEQ ID NO: 492937 - DNA, 2628 bp, Stenotrophomonas maltophilia
atgctgccggcgagttcgctgctggacacgccggccgcgtcgctcaacgacccggattgggctgctgccgcgcgccaggcgctgcagcaggccgacgcgcgcctgtaccgccgcttcgaccagggcgacaacatcgagcgcctgctggcgttgcgcgcgcgcgctgccgaccatctgatccgcctggcctggcagcgctgcctgccggccgacagcggcctgtcgctgttcgcggtcggcggctatggccgcggtgaactgttcccgcgttcggacatcgacctgctggtgttcggcgatccgccggcacaactggcgcacgaggcggcattggcgcgcctgttcgcgctgctgtgggactgcggattggctgtcagccatgcggtgcgttctgcatcgcagtgccgggaggcggcggctgaccagaccgtgctgaccgcgctgatcgaggcgcgcccgatcctggccgatgatgctgcgcgccgcgcgctgcgcgaggcgatcgacgaccgcgaactgtggccggcacgcgccttcttcctggccaagctggaagagctgcgcaaccgccaccagcgcttcggcgataccgccgacaacctggagccggacctgaaggatggccccggtggcctgcgtgatctcaatacgctgggctggatggcgttgcgtgccttcggcgtgcgcgacctggaggccctggtcgggctcggccacctgggcgccgacgaagccgcggcgttgaagcgcgaacgtgcagtgctggcgcggttgcgcttcggtctgcacctggtcgcgcgccgtccggaagagcgcctgcgtttcgattaccagaagaccctggccgcgcggctgggcttcgaagacgatgccgagaacctcggcgtcgagaagatgatgcagggcttctaccgcgccgcgctggtggtgcgccggatcagcgaccggctgctgcagcgcttcgaggaacagttcgacggcgaggcccagccggagccgctgaccgtgggtttttccctgcgccgtggctacctggccgccaacgaggccgactggccgcgcggcgacatcggccaggtgttcgccctgttttccagctgggccaacaacccgcaggtacgcggcctgcattcgctcactgcgcgtgcactggccgagtcgctgccgctgctgccggcctatgaccaggccgatgccgatgcacgcgagcagttcctggccctgctgcgcggccagcgtccggtcgatacgctttcgcgcatggcgcggctgggcgtgcttggccagtggattcccgcgtttgcccaggtcagcgggcgcatgcagttcgacctgttccatgtctatacggtcgaccagcacacgctgatggtcctgcgcaacatcggccagttcgccagcagccgcgccgacgagcgcttctcgatcgcgcacgaagtgtggccgcgcctgcgcaagccggaactgctgctgctggccggcctgttccatgacatcgccaagggccgcggcggcgaccactcggagctgggcgcggtggacgcgcgcgcgttctgccaggcgcatgcgctcagtggcaccgataccgagctggtggcatggctggtcgaacagcacctgcgcatgtcggtgaccgcgcagaagcaggacatcgccgatccggtggtgatccatcgcttcgccaccctggtcggcagccgcgaccgcctggattacctgtacctgctgacctgtgccgacatcgccggcaccagcccgaaactgtggaatgcctggaaggaccgcctgctggccgatctgtactttgccacccggcgcgcgctgcgcgaggggctggagcacccggtaccggccgccgagcgcgtggccgaggcacgtgacagcgtgcgcgcactggtgcgcgagcagggttacgacgatgccaccatcgaccgccagttcgcggtgatgccggatgagggcttcatccgcctgcgccccgagcagctggcctggcaggccgccgcactggtgccggtgaagcagggccaggcgctggtgaaggtgcgccggatcagcgtcgacgacccggcgctggaagtgttcgtgcactcgcccgaccgtgatggcctgtttgccgcgatcgtgatgaccctggaccgcaagggctacggcatccatcgcgcgcgcgtgctggacggtccggccgacaccatcttcgataccttcgaagtgaacccggccgatacctttgccgatggcagcagtgccaacctggaagcggcactgcgcgaggcactcagcggtgacctgtcgcgcctgcggccgtcgcgccgggtggtaccgcggcagctgcggcacttccgcttcgccccgcgcatcgagttccgcgatgaaccgggcgcaacccgttttgccctggtcgcccccgaccgtcccggcctgctggccgatgtggcgttcgtgctgcgcaaccagggcctgcgcgtgcatgatgcgcgcattgccacgttcggcgaacgcgccgaagacaccttcgtgatcagtgacgaacacgacctccccctgactgaacctgcccggcagcagctgcatgacgcgatgctggcctgcctggaccctgatcgaaacgccggagaccccgcctga

SEQ ID NO: 492938 - DNA, 1080 bp, Stenotrophomonas maltophilia
atggccaccaagcccgccaagaagaccgccgcgacccccaagagcgcagcggcccggaaacccgctgctgccgcaccggccgcgaagaagacccctgcgccgaagaaggccgctgcggtgaaggccccggcgaagaaaacggctgcagtgaagcgtgctgtgaagaagccggccccggccaagagcgccgaagccgtccgcgccgaaaccatcgcccgcaagtcgctgcgcaagccgtcggcaccgggcgtggaagaactcaagttcggcatcgagagcgccttcgagcgccgcgccaccttgaccctgcacgagctggaagggtcgaccaagccgctggtcaaccgcgtgatcgacggcctggagagcggtgagttccgcgtcgccgagccggacggccagggcggctggaaggtcaatgagtggctgaagaaagccgtgctgctgtatttccgcgtcaacgacatggcggtggtcgatgcacgcccggcgccgttctgggacaaggtcgaatcgcgcttcgccggctatgacgaagcgaagttccgccgtggtggcgtgcgcgtggtgccgggcgcgatcgcccgccgcggtacctacttcggcaaggacgtggtgctgatgccgagcttcaccaacatcggcgcccatgtcggcgaaggcaccatggtcgacacctgggccaccgtcggttcgtgcgcgcagatcggccagcactgccacctgtccggcggcgccggcatcggtggcgtgctggagccgctgcaggccagcccgaccatcatcgaggaccactgcttcatcggtgcgcgttcggaagtggtggaaggcgtggtggtcggccaccacagcgtgatcggcatgggcgtgttcctcagccagagcacccgcatctacaaccgtgccaccggcgaggtcacctacggctacattccgccgtacagcgtggtggtgtccggctcgctgccgagcaaggacggcacccactcgctgtattgcgcggtgatcgtcaagcaggttgatgccaagacccgcagcaagaccagcgtcaacgacctgctgcgcggcctggctgactga

SEQ ID NO: 492939 - DNA, 867 bp, Stenotrophomonas maltophilia
atgacggcgccggaggatctggcgcagtccgcgatctaccagcatccgtccgacaccctgttcgggcggatgctgccgcgcctgctgcacgctccacgctggacccggctgcgccgcgcgctgtcgcggcgctggccgatgccggcgttggtaagcgatgtgcgcgacgtggtctacgtgaactggtgggtcgacgtacgccaagcgccgatgccaccaccaggccatcactacgtggtccatgccggacgcacgccctacaccatcctcagctaccggcacggccacttcgggcccgcgctggccgggccgctgcgctcgctgatgccgtctcccaggcagagcaactggcgctggtacctgcgtcgtgacgacgatcgggacgggacgccggtggtgctgtttgatcgcaacgtgatggaccagctggccttcgtcgccggcgcgcgcgctttcagcgatgccatgcagccgcatctgtcggtgcgcttcgcgcacgtggtgcgcgccgatggcggtgggtacaccctgatcgagggcgggcggggcagtgcgccggcgctgcacctgcagtggcagggcgctgcgggctgggacgatgccgggtgggcggcggccttcggcggccaccaggccctgctgcgcttcctgacctgccaggacgaggccatcgcccgcacctgcgaccagcgctgggccagcacccgcattgctctgccggtggacatcgcgcagctgcaaccgctgcagctggaaggcgaacagcagtgcccgcgcctgcaggcgatgggcgtggcgctgcacgaggggctggccttccagctgccaagggtacctttccgggtcgtgtccgagcgcctgttgtga

SEQ ID NO: 492940 - DNA, 366 bp, Stenotrophomonas maltophilia
atgagcaccactgtctacggtttgaagaactgcgatacctgcaagaaggcgaccaggtggctggaccgcttcggcgtgccgtacaccttcgtcgactaccgcgacaacaaacccagcccggaaatgctgctggcgtgggccgcgcagctgggtggcctggccgcgatgatcaacaggtcctccaccacctggcggcagctgccggacaaccgcaaggccgccgattccgaggccgaatggaagctgctgctgcgcgagtacccgcagctgatcaagcgcccgctggtggtcacggccgatggcacgatcagccagggcttcagcgacaacggcttcaaggcccgcttcggcgtgggtgacgcatga

SEQ ID NO: 492941 - DNA, 1128 bp, Stenotrophomonas maltophilia
atgagcgcggtgctcgacctgacctgcgagctgatcgcgcggccctcggtgacgcccgatgatgccggttgccaggcgctgctggcggcacgcctgaagcaggccgggttccagtgcgatcacctgcggctgggtgaggtcgacaacctgtgggcgacccacggccagggcgcgccggtactggtgctgctgggccataccgacgtggtgccgacgggcccgcgcgaggcctgggccagcgacccgttcagcccgcagatccgcgatggcgtgctgtatggccgtggcgccgccgacatgaagggcagcgtggcggcgttcgtggtggccgccgagcagttcgttgccgcgcatcctgatcatcccggcacgctggcggtgctgctgaccagcgacgaggaaggcgacgccgtcgatggcgtgcgccacgtcgcacgcctgttcgccgaacgcggccagcgcatcgactggtgcatcaccggcgagccgtcctcgactgcgacgctgggtgacctgctgcgcgtggggcgtcgcggcagcctgtcggccaagctgcgcgtgcagggcgtgcagggccacgtggcgtatccggagaaggcacgcaacccgatccaccaggcggcgccggccctggccgagctgagtgcgcggcgctgggatgacggctacgaaagtttcccgccgaccagcctgcaggtctccaacatccatgccggtaccggtgccaacaacgtgattcccggcgagctcgaggtggatttcaacatccgctacaacccgcactgggacgcaccgaagctggaagcggagatcaccgcgctgctggaacggcatggcctgcagtacacgctgaagtggcaccgcagcggcgagccgttctacaccccggagggcacgctgcgtgccaccgcgcgtgcggtgctggccgagcacatcggccgtgcacctgaagaaagcaccggcggcggcacctccgatgcacgcttcatcgcgcccttgggcgcgcagtgcatcgaagtggggccggtcaacgccagcatccaccaggtggacgagaacgtgcgcgtggccgatctggaggcattgccggggctgtaccagcggctggtggaacggctgctggcgtga

SEQ ID NO: 492942 - DNA, 885 bp, Stenotrophomonas maltophilia
atggaaatgcaacaccgcactggacgcaacgcggcgctggccgccctgttctgcctgggcctggccgcctgccagaccctggccccaccctcgcccctgccgccggcccagctgcagggcctggagcaacacggcaccgacggcagcttcgagggtgccttcgataccgcggaaaccttcgaacgcttcaacgatccgcgcgccatcgcctactacgagcgcgccgccgcggtcacaccctggaccttccacaacaccaaggcggaagaagcactgggcaggatctggatctccggcacgctgcggcatgccgacagcccccacatcaatccggcgccggtgctgcgtgcgtcctggcgacgcggagaacgcgcctacctggcggcggcctaccacggcaatccctatgcgttctacgaactcgccaaggcctatcgtcagcgaggcgacgcgcaacaggcgctgcgctgggacctgcgcggaatgatctacgagcgctacccgagttcatcgtcacggctaccggatgcggtggccgcacaggatggcaccgtgcatccactggttgcgcagatccagcgccgcgccgagcgtggcgatgccgaagcgcaggtagacctgggcgcactgctggaaaagggcatgggactgccgcgcgatcccgcacgtgcactgcagctgtatcaacgtgccggcgagaagggcaatgtgttcggccagtacttcgccggactgctgctgggccgcggtgcaccgggcgtggagaaggacaccgacgcagccgcacgctggttcgcccgggccgaggcgcagcgcttctacatggcggcgccgagctactgggaaaaagcggtcgagccgccgttcttcattttttctgagtag

SEQ ID NO: 492943 - DNA, 1692 bp, Stenotrophomonas maltophilia
atgtgttcgatcttcggaatcttcggcctgcaggccggtgacgatcttcccaccctgcgccggcacgcgctggaactgtcgcaacgccagcgccaccgtggcccggactggagcggcgtgtatctcgacgaaggtgcgctgctggtccatgaacggctggccatcgtcgatccggccggtggttcgcagccgctgctgtcggccgatggccagctggcgctggcggtgaacggcgagatctacaaccaccaggcgttgaaggcggcgctgaccaccacctacgacttccagaccggctcggactgcgaggtgatcaacgcgctctaccgccagggcggcgcgccggcgcagtggctggaacagctcaacggcatcttcgccttcgcgctgtgggaccgtgacagtggacgcgtgctggtggcgcgcgacccggtgggcgtggtgccgctgtactggggccacgatgcccaggggcgcttgcgcgtggcctcggaaatgaaggcgctggtcgatacctgtgccgatgtcgcgcagttcccgccgggccactatttcgacagtgccagcggtgagctggtgcgctactaccagcaaccgtggcgcgactacgccgacgtgcagggccgccaggccgatctggttgaactgcgccaggcgttcgagcatgcggtggagcgccagctgatgagcgatgtgccttatggcgtgctgctgtccggtggcctggactcgtcgctggtggcggcggtggccgcgcgctacgcacgtcgtcgcatcgaggatgggggacagaccgaagcctggtggccgcgcctgcactcgttcgcgatcggcttgaagggctcgcccgatctggccgccgcagcgatcgccgccgaagcgctgggcaccgtgcatcacggtttcgagtacacgttcgaggaaggcctcgatgccctgccggaggtgatccgccacatcgagacctacgacgtcaccaccatccgcgcatcgacgccgatgttcctgctggcgcggcggatcaaggcgatgggcgtgaaaatggtgctctccggcgagggcagcgacgagatcttcggtggctacctgtacttccacaaggcaccggatgcgcgtgaattccacgacgagctggtacgcaagctcgacgccctgcacaactacgactgcctgcgcgccaacaagtcgatgatggcctggggcgtggagccgcgcgtgccgttcctcgaccgtgagttcctcgatgtggcgatgcgcttcgatgccgcacacaagatggtcggtgccggttttggcggccgccgcatcgagaaggccgtgttgcgcgaggcgttcgacggctacctgccggacagcatcctgtggcggcagaaggaacagttcagcgatggcgtgggctatggctggatcgatgggctgaaggcacatgccgaggcgcaggtgagcgaccgtgtactggcggccgccgacaagcgcttcccgcacaacccgccgcagaccaaggaggcgtactactaccgccacctgttcgagcagttcttcccaagccgggcagcggccgagaccgtgccgggaggcaagtcgatcgcctgttcgtcgcccgcggccatcgcctgggacgccagcttcgccgcggcggcagatccctccggtcgcgcgatcgccggcgtgcacgagcaggcactggcctga

SEQ ID NO: 492944 - DNA, 1383 bp, Stenotrophomonas maltophilia
atggacgtacaggcaggcggcaacgcgccgcccacgaaatggggatggcgctacctggcctgggccggggttccgttgctggctggcgtgctgctggcgcggtatgccgggccggcggcgcccgaggcggttgcccgtgcctccgtcgccgccgaaggcggctgggtgcagcatctggcgtctccgctgggcctgttcctgctgcagctgctggtactgctgctggtggccaagggcgcgggggcgctgctcaagcgcatgggacagccggcggtgatcggcgaaatggccgctggcctgatgatggggccgctggtgcttggcagcctgctgccgcagctgcatggtgcgctgttcccggccagttcgctgggcccgctgggcatgctcagccagctgggcgtgctgatgttcctgctggtggccggtgccgaactggacctggcggcgctgcgtggccgtcggcgtttcgcctttaccgtcagccatgccggcattgcagtgccgttcgtgctcggcgtcgccttggcgatctggctgtatccgcagcatggcccacagggtgtgggcttcaccgcattcgcacttttcgtaggcatctcgatgagcatcacggccttccccgtgctgctgcgcatcctggccgaccgtgggatcacacagacgccgctggggcagaccgcgatcgcctgcgctgccttgggcgatgccaccgcgtggtgcctgctggcgctgatcgtggctgccgcccaggccagcggctggttgccggccagcctcaacctggtgtgcgtggtcgcgttcgtggcgctgatgctggggctggtgaagccgtggttcgcgcgccggcagattgcgccgggccgtgaggggcgctggctgctcggcatcctgctgctgtcgctgggcagtgcgctggtcaccgagatgctgggcatccacgcgctgttcggcgcgttcgctgcgggtgtcgcggtatcgtccaacgcgcagctgcgtgacctgctgatggcccgtgtcgagccgttcgcggtcacgctgctgctgccgttgttcttcgccatgaccgggctgcgcatgcgcgccgatgcgctgcaggccagcgacatcgtgctgtgcgtggtggtgatcgcggtggccacgacgggcaagctgctgggcaccttcagtgccgcgcgcagtgccggcatgcccacgcgcgaagcgtggcggctgggcgcgctgatgaacacccgcggcctgatggagctgatcgtgctcaacctggggtatgagctgggcctgctcggtgaccgcctgttcgcggtgctggtgatcatggcgctggtgaccacggcgatgaccgggccgctgctgaacctgatcgaacggcgcaggggctga

SEQ ID NO: 492945 - DNA, 2328 bp, Stenotrophomonas maltophilia
atgcgacgtacatggcgttgggtgctgggcgtgttgatcgccatcgtgctggtcaccgcactggtgctgtggctgctgctgcgcggcagcctggccgacctggacggcgagcatgcgctgccggggctggcccagccggtcaccatcgagcgcgatgggctgggcgtggtcaccatcactgccggcagccaggccgacgcgatgcgtgcgctcggccgcgtacacgcgcaggaacgttatttcgagatggacctgatgcgccgcagtgccgctggcgagctgtcggcgctgttcgggccgaaggccatcgacgccgacaagcgcatgcgcgtgcatcggctgcgtgcacgcaccgaggcgaatctgcaggccgcactgggcgacaacggcacggccgtgcgcgcctacgtggatggcgtcaacgagggcctggccgatctctccgtgcgcccgtgggcctacctgctgctgcggcaatcaccacaaccgtggcaggccagcgacagcgtgctgaccgggctggccatgtatgccgacctgcaggaccccggcaaccagaccgagcttgcgctcagccgcatccgcgcagtggtgccgccggcgctgtacgcactgatcgcccatgacggcaccgaatgggatgcgccgctgtttggcgaacccaccggcaacgccgccctgcccgatgccagccagctggacctgcgcacattgaagggaaaaacgggcactgagcaggaagagggcgacgtcatcggcagcaacaacttcgcggtggccggcgcgcttaccgccgacggccgcgccatcgttgccgacgacatgcatctgggcctgcgtgcacccggcctgtggttccgcgtgcgcctgcgctaccccgacccgcaggccgccggcggccaggtcgatgtcaccggcttctccctgccgggcctgccggcggtgatcgtcggcagcaacgggcacgtcgcctggggcttcaccaacagctacatcgacacggcggactatcgcacggaaccggccaacaccgccgtgaccgtgcacgaagagcgcatcgccgtggccggccaggccgacgtgctgttcgcggtgcgcgaaaccgactgggggccgatcctgcatacccatgccgatggcagtggcgacgccctgcgctgggtcgcacacctgcccggtgccgtacgcctggatttcgctgacctggcccgcgccggtgacctcgacggtgcactgcacttcgccgaccgtgccggcatccccgcacagaacctggtggtcggtgatcgcagcgggcgcattgcctggcgcctgatcggcgctcgcccggaccgcggccccggctgtgcaccggccggcttcaatgccgccagcaaccagggctgcgcgccgtggccgatccgcagcgatgcctcgccggcattgatcgatccccccaaccatcgcctgtggaccgccaatggacgcgtcctcgacggcgaggcactcgccagcgtcggcaacggcggctatgacctgggtgcgcgggcgcggcagatccgcgacctgctggcaatccaggagcgcttcgacgagcacgaccttctggcgatccagctcgacgaccgcgcggtgttcctgcagcgctggtgggctctgctgcacgacgtcatcgaacgcagtgacgaccctgcgctgaagcgtttgaaggaggccagccatcaatggggcgggcgcgcctcggccagttcggtcagctaccgggtggtgcgtgaattccgcacgcaggtcatggccacgctgtccgatgcactgctggccccggccaacgcgcagctgggcgatgcctacctggacccacgcctggcacagctggaaggcgtggcctggccgatgctggaacagcgcccggccaacctgctgccaccggccttcgacagctgggatgcgctgctgatcgacgccgcccgccgtaccgagggtgagctggccaagcaggggccgctggccaagcgcagctggggtgaacgcaataccgcggcgatctgccaccccatcgcacgggcgctgccggacatcgccaagcgctggctgtgcatgcccgccgaccgcctgcccggcgaccgggacatgccgcgcgtgcagacgccgaacttcggcgcctccgagcgcatggttgtctcgcccggccacgaggccgacggcatcgtgcacatgcccggcggccagagcggccatccgctgtcaccgtactggggtgccggccacgaggactgggtgcatgggcgcccgacaccgttcctgcccggcaaggcccagcacacgatgacgctggtgccagcccggtag

SEQ ID NO: 492946 - DNA, 489 bp, Stenotrophomonas maltophilia
atgaaaggcaacccggacgtcatcgcctgcctgaaggaactgctgcgcggcgagcttgctgcgcgcgaccagtacttcatccattcccgccgctacgaggaccagggcctgttcgcgctgtacgagcgcctgaaccacgagatggaagaggaaacccagcatgccgatgcgctgctccgccggatcctgttcctgggtggcgacccggacatgcgcccgcatgccaccgagccgggcaagaccgtggaggagatgctgcagaaggatctcgatactgaatacgccgttcggaacaatctcgccgccggcatgaagctgtgcgaggagaagggcgattacgtgagccgcgacatcctgctggcgcagctgaaggacaccgaggaagaccacgcctggtggctggagcagcagctgggcctgatcaagcgcatcggcctggagctgtaccagctgagcaagatcgacggcaacggcgccccggcgcactga

SEQ ID NO: 492947 - DNA, 2244 bp, Stenotrophomonas maltophilia
atgaccgaacttgcccgccccgtgttccacggattcgaacaactgccgctgcgcgagtacgccgaacgcgcctacctcgactactcgatgtatgtggtcctggaccgcgccctgccgttcatcggcgacggcctgaagccggtgcagcgccgcatcatctattcgatgagcgagctgggcctgaatgccgcgtccaaaccgaagaagtccgcgcgcaccgtcggtgacgtcatcggtaagtaccacccgcacggcgacagcgcgtgctacgaggccctggtgctgatggcacagccgttctcgtaccgctatccgctgatcgagggccagggcaacttcggctccagcgacgacccgaagtcgttcgcggcgatgcgttacaccgaatccaagctgaccccgatcgccgaagtgctgctgggcgaactgggccagggcaccaccgactgggcaccgaacttcgacggcaccctgcaggagccgacctggatgccggcacggctgccgcacctgctgctcaacggcaccaccggcatcgccgtgggcatggccaccgacgtgccgccgcacaatctcaacgagatcgtcagcgcactgctgcacctgctggaccaccccgatgccagcgtgcgcgacctgtgcgagcacgtgcagggcccggactatccgtccagcgccgagatcatcacctcggccaacgacctgcggaacatctacgagaccggcaacggcagcgtgcgtgcacgtgcgaccttcaccaaggaggccaacaacatcgtggtgacggcgctgccgttccaggtgtcgccgtcgaaggtgatcgagcagatcgccgcgcagatgcgcgccaagaagctgccgtggctggaagacatccgcgacgaatccgaccacgccaacccggtgcgcgtggtgctggtgccacgttccaaccgcgtcgacgcggaccagctgatgggccacctgttcgcgaccacggacctggagcgcagctaccgcgtcaacctcaacgtgatcgggctggacggccgtccgcaggtgaagaacctgaagatgctgctcagcgaatggctgaccttccgcagcaacaccgtcacccgccgcctgcagcaccgcctgcagaaggtcgagcgccgcctgcacctgctggaaggcctgctggtcgccttcctcaacctggacgaggtgatccacatcatccgtaccgaggacgaaccgaaggcggcgctgatcacgcgcttcggcctgtccgaggaacaggccgagtacatcctggaaaccaagctgaagcagctggcccgcctggaggagatgaagatccgcggcgagcaggacgaactggccaaggagcgcgagaagatcctcggcatcctcgacagcaaggccaagctgaagaagctgatccgcgacgaactgaccgccgacgccaggaagttcggcgacgcacgccgctcgccgctggtgcagcgccaggccgcgcaggccatcgacgagaccgagctggtgccgagcgagccgatgaccgtggtgctgtcggagaagggctggatccgagcggccaagggccacgacgtcgatgcgtccgccctgtcctaccgcgacggcgacgccctgcagggcgcagtgcgtgcgcgcagcacccagcaggtcgcgttcctcgacagcgaaggccgcgcctactcgacgccggtgcataccctgccctccgcgcgtggcaatggcgaaccgctgaccggccgcttctcgccggcagcgggtaccagcttcgtgaccctggccagcgccgagccggatgcccgcttcgtgctggcctccagccacggctacggcttcgtcacccgcttcgagaacctgatcggtcgcaacaaggccggcaaggcgatgctgaacctgtcgtccggctcgtcggtgctcaccccgtcgatggtcgccaacgtggccaccgaccgcatcgtggcggtgaccagctccggcaacctgctggcgatcgccgccaacgacctgccggaactggacaagggcaagggcaacaagatcatcgagatcccgaaggccaagctcgccaccgaacgcgtggtcgccatcgtggcgatcagtccggggcagaccctgcaggtgcgcagcggccagcgcaccatgggcctgaagttcaacgagctcgacgcctacctcggcgcccgtgccacccgcggccacctgctgccgcgcggctggcagaaggtggaagggctgtcggtggaataa

SEQ ID NO: 492948 - DNA, 882 bp, Stenotrophomonas maltophilia
atgatgaacaaggcagaaattcaggttcccaaacgcctgctcagagatgaggcactggactggttcgagcgcaacgacggcccgccggtcatcgccttccgcttcgacagccagcagggcctggcccgcgaggtcgactggcaccaccaccagcgtgcccagttgatctgcgtcgaacgcggcctgctgaccacccgcacctcgcatggcacgtggtcgctggcgccgggctcggccggctggatgccgccgctggaaccgcacaccgtcaccctcgacggcccgttgcgcggctggggcatggcattggctgcaccggcctgcgccaccctgcccgccgacccctgcgtgctgggcctgtccaagctggcgcaggcgctggccgaccgcatctgcgaatggccgctcggccatgacaccacgcccgagcgccagcacatcatcgacgtgctgctggacgagatccgcaccgcgccgcgccagcgcatgcacctgccgatgccgcacgaccggcgcctgctgaagatcgcctcgcagttgctggccgacccctccgacgaacgcagcctggccgaatgggcgcattgggccggtctgtcaccgcgcagcctgacccgtcacttccgcgacgagaccacgctcagcttcgcccagtggcggcagcaggcgcgcctgtcagaggccctgcgccagctgaccgacggccgcagcgtggccgacatcgcccacgcgctgggcttcagcagcgccagcgcgttcgttaccgtgttccgccgccacttcggactgccgcccggtcgctacctggcacgggccgggcacggcctggaaaccgggctggaccctgcgcgcggcttggcatcccccgccgcatccggataa

SEQ ID NO: 492949 - DNA, 444 bp, Stenotrophomonas maltophilia
atgatctgtcctgcaaccactccccccagcttcggcctgctgctgcgccaggtgcgcgacggcctggtgcgccaactcgacgcgtccatggcggaagaagatctgggaatcggcttcacccattacatcgggttgaaggtgctttcccacatggcgccctgcaccgccaacgaactggcccaggccatcgaccaggtgcccagcgcggtcacccgcctgctggacaagctggaggcgctgggctgcgtccgccgcgaggcgcatgcgcaggaccggcgggcactgcagatcgtgctgaccgacgaaggccgtgcgttgtgggcgcggctgaagctgcgcggcgacgcggtgatggattacgcgctgcgtgatctttccgccgacgagcgcacgctgctgctgtccctccttacccgaatccgcgattcactgacgaccccatga

SEQ ID NO: 492950 - DNA, 1494 bp, Stenotrophomonas maltophilia
atgaacccgatcccgcattccactctccgccggtccgggcgcgcgctgctggtgtcagcgctggcgctggccctggccgcctgcgccagcagtcgtggcctcaacccgcagggccacgtgcttgacgtggacagcctgcacagcgaacgcaccctggctgacaccgacctgagcgccgccggcttcccggcgcaggactggtggaaggcactgggcgatgcgcagctggacgcactggtcgccgaaggcctggccggtcatccgagcctggacgccgccgacgcgcgcctgcgccaggcccaggcccaggtcggtaccgcgcgcgccgacgagctgcccagcctgtcggtgtccggcggctacaccggcctgcgcctgcccgagtcgatggtcggcagcgagatgggcggccgctatggcggcagcagccaggtcgccttcgatttcagctacggcgtggacctgtggggcggcaagcgcgctgcctgggaagccgccgtggatggcgcgcatgccgccaccgttgaagcccaggccgcacgcctgaacctgtccaccggcattgcccaggcctatgccgacctggcctacgcgtggcagctcaacgacgtggccgaggaagaactgacccgctcgcagaaatcgctgcagctgacccgccagcgccgcagcgccggcatcgacagcgatctgcaggtgcgccaggccgaggcccgcgtgccggccgcgcagcagcaggtgctggccgcgcagcagcgcatcgacgccgcccgcaccgcgctggctgcactggtcggcaaggggccggaccgtggcctgtcgatccagcgcccgcagccgttgaacccgatggcactgcagctgccgggcgtactgcccagcgaactgctcggccgtcgccccgacatcgtggctgcgcgctggcgcgtggaagcggccgacaagcagatcaaggtcgccaagaccaagttctacccgagcttcaacctgaccgcgctggccggcgtggtcgccccgaacgtgggtgacctgctgaagagcagctcgaccttcgcctacatcggcccggcgttgagcctgccgatcttcgaaggcggcaagctgcgcgccaacctggccaacaccgacgcgcagtacgacctggcggtggccaactacaaccaggccgtgctcgatgcactgcgcgacgtcgccgaccaggtcaacgcggtgcgctcgctggcgcagcaggcgcacgcgcagcagcaggcagtggacaccgcacgctcggccttcgacctggcccagcagcgctaccgcgccggcatcggcagctacctggacgtgctgaccgcgcagtccaccctgctgcagtcgcagcagcagctggccggcctgcagtcgcagcaggtgcagacctcggtgcgcctgagcaaggcgctgggcggtggtttccagcccgccgacaccgaccgcgcaccgatcgcctcccattccgattcctcgcattcctga

SEQ ID NO: 492951 - DNA, 1182 bp, Stenotrophomonas maltophilia
atgagccagacccaagacaccgcggccccggccgcccccaaccgccgcggcaacctgctgcgcggcctgttcgtgatcgtcgtgctgctgcttgccgccctggcgctgtggtacttcatgttcggccgttggttcgaagagaccgacgatgcctacgtgcagggcaaccaggtgcagatcaccccgctggtggccggtaccgtggtcgccatcaatgccgatgacggcatgcgcgtggagcgcggccagctgctggtgcagctggacccgtccgacacttcggtggcgctgcagcaggccgaagccaacctggccaagaccgtgcgccagacccgtggcctgtaccgcagcgtggaaggcgcgcaggcggacctgaacgcccgccaggtgaccctgaagcgcgtgcgcgaggacttcgcccgccgcaaggatctggccgccactggcgccatttccaacgaagaactggcccacgcccgcgacgagctggctgcggccgaagcggccgttgccggttcgcgcgagaccgtcgagcgcaaccgcgcgctggtcgacgacaccgtgatcgccacccagccggacgtgcaggccgccgccgcgcagctgcgccaggccttcctcaacaacgcccgcgccggcatcgtcgcgccggtcaccggctacgttgcccgtcgttcggtgcaggtgggccagcgcgtgcagccgggcaatgcactgatggccgtggtgccgaccgagcagatgtgggtcgaggccaacttcaaggaaacccagctgcgccatatgcgcctgggccaggaagtggagctgaagtcggacctgtatgccggtgacgtgaagtacaagggccgcatccagagcctgggcctgggtaccggctcggcgttctcgctgttgccggcgcagaacgccagcggcaactggatcaagatcgtgcagcgcgtgccggtgcgcatcgccatcgatgccaagcagctggccgaacacccgctgcgcatcggcctgtcgatgaaggccgaagtgagcctgcgcgaccagaagggtgaagtactgccgagcaccccggccaagggcaccgtgttcgacaccgacgtatatgccaagcagctgcatgatgccgatgaggtgatccacacgatcatccagggcaacctgccgcagcaacaggcaaaggtgggctga

SEQ ID NO: 492952 - DNA, 1587 bp, Stenotrophomonas maltophilia
atgtccgcacaagctccagccgcacccggcgctccgggtgcaccggcggcgccgggtgcggcctccgggttcctgccacccagcgtcgccctgtgcaccgtgggcctggcgatggcgtcgttcatgcaggtgctcgacaccaccatcgccaacgtttcactgccgaccatcgccggtaatctcggcgccagctcgcagcaggcgacctgggtcatcacttcgttcgcggtcagcacggccatcgcgctgccgctgaccggctggctcagccgtcgcttcggcgagcgcaagctgttcgtctgggccacgctggccttcgtcatcacctcgctgctgtgcggcctggcgcagagcatgggcatgctggtgctgtcgcgtgcgctgcagggtttcgtggccggcccgatgtacccgatcacgcagtcgctgctggtctcgatctatccgcgcgagaaacgcggacaggcattggcgctgctggcgatgatcacggtggtggcgcccatctgcggtccgatcctcggtggttggatcaccgacaactacagctgggaatggatcttcctgatcaacgtgccactgggcatcttcgccgcgctggtggtgggcaaccagctgaagggacgcccggagcagatcgagaagccgaagatggactacgtcggcctggtcaccctggtgatcggtgtcggtgccctgcagctggtgctcgacctgggcaacgacgaggactggttctcgtcgatgaagatcgtggtgctggcctgcgtggcggtggtgacgctgacggtgttcctgatctgggagctgaccgacaaggatccgatcgtcgacctgaagctgttccggcaccgcaacttccgcgccggcacgctggcgatggtggtggcctacgcggcgttcttcagcgtggcgctgctgatcccgcagtggctgcagcgtgacatgggctacaccgcgatctgggcaggcctggcgaccgcgccgatcggcatcctgccggtgatcatgacgccattcgtcggcaagtacgcatcgcgcttcgacatgcgcatgctggccacggtggccttcatcgtgctgtcgatgaccagcttcctgcgttcgaacttcaacctgcaggtggactacatgcacgtggccggcgtgcagctgatcatgggcatcggcgtcgcgctgttcttcatgccggtgctgcagatcctgctgtcggacctggatgggcgcgagatcgcggcgggctccggcctggccacgttcctgcgtacgctgggtggcagcttcgcggcgtcactgacgacgtggctgtgggcgcggcgtacccaggtgcaccatgccgacctgaccgagcacatctcggcctatcagcccggcatgcaggaccaggtgacggcgatggggcagggcgacctgcaacacggtgcagcggtactgaacaacatgatcaaccaccaggcatcgcagatgggcttcaacgacatcttcttcctgctgggctggatcttcctggcgatcatcacgttcctgtggctggccaagccgccgttcggcgcgggtgcaggtgctgccgccggtggcgggcactga

SEQ ID NO: 492953 - DNA, 900 bp, Stenotrophomonas maltophilia
atgcggatggacatcgccgacctgcgcctgttcctggcaatcgccgaagccggcagcatcaccgccggcgcggcacaggcaaacctggcattgggttcagccagcgagcgcctgcgcacgatcgaagccgatgccggcaccgcgctgttgcaccggcacccacgcggcgtcagcctgaccgaggccggcgccgccctcgcccaccacgcacgcctgatcctgcagcagcaggcacagctgcgtggcgaactgcaggcgttcgcgcagggtgcgcgcggcaccctgcacctgtatgccaacaccgccgcgctgaccaactacctgccctcgcggctcgcgccgtggctggccggacgcccacgcctgcatgtcgaactgctggagcgcaccagccccgaagtcgtacgcgcgatcagtgccggccaggccgaggccggcatcatcagcgatgcggtcgacgctgccggcctgcagcagcatgtggttgccgaagacccgctggtgatgctgctgccggccgatcaccgcctcgcctcgcggcgcagcgtgaccttcgtcgaggttgccggcgagaccttcgttgccctggccgatggcaatgcactgcagacctacatcgaggaccaggcgcgcggcatcgggcgccgcctggatgtacgcatccgcatgaagaccttcgaaggcgtgtgcatcatggtcggccacggcatcggcgtcggcatcgcgccgcggaccatcgcgcgccagcatcggcgcagcacgcacaccgtcgccgtaccgctcgccgatgcgtgggcgcaacgacgcctgtgcgcgtgctttgccgagtggacacgactgtcaccggcgatgcgcagcctgctgcatcacctgggcgtgcagccccagaaaaaagtgtga

SEQ ID NO: 492954 - DNA, 747 bp, Stenotrophomonas maltophilia
atgcatgaatcgacatacttctatttgctgctggtggtggtgttcgtgctggccggcgtggtcaagggcgtgacagggatggggttgccgacggtggcgatgggcctgctgggcagcaccctgtcaccggtggcggcggcgtcgatgctgttcattccaaccttcgtcaccaatgcgtggcaactgctgtccgggccgtcgctgggccacatcgtgcggcgtttgtggccgatgatgcttgccgtggtggtggtgacgctgggttcggccgcactgctggtgcgggtcgatcgcacctggtcgcgcgttgcgctgggcgtggcattggtggtctatgccgcctatgcgttgctcgcgccggtgttccgcgtgccgcagcggcgcgagcgctggctggggccgctggtgggtgcgctgtccggcgtggtgacgggggcgacgggtgtgttcgtgatgccggcggtgccgtacctgcagtcgctgggattgcagcgcgaggagctggtgcaggcgctcgggctggcgttcaccgtgtcgacgatttcgctgaccaccggtctggtgctgcacggtgcgttcggcatccagcagctggggctgagtgcgctggcggtgctgccggcgctgctgggcatgtggctgggccaggtgatccggcagcgcatcagcgcgcgcgtgttccgcgcctgcttcctggggttcctgctgctgctcgggctggaactggtgctgcggccgttgttctga

SEQ ID NO: 492955 - DNA, 2460 bp, Stenotrophomonas maltophilia
atgactaccaaaaaaccaagcaagggcgggagcaagtcccgcagccaggccccgaacaagggcgccaaggcgggtgcagcccgcaccaccaagccgggcaagccgctgccgggctggttccccgaattgaatgaaggcggtgcaccgccacgcggccgcaaggtccgcagtaccgatgcaccgggcccggccccgggccgcaagctgccgccggccggcaaggtgatcgacgatccctatgccgctcgcgaagcggagaagtacgaacagcccatcgccagccgcgaggccatcctggccctgctggagcgctgcgaagggccgcagaccgccgaggaactgggcgcgcgcctgggcctgaccgctccggaccgggccgaggcgctgtcgcgccggctcggtgcgatggtccgcgacggccagctggtgcagaaccgtcgcggcggtttcgccccgatccagaccctgaacctggtcaccggcgtggtgatcgccaacccggaagggttcggcttcctgcgcccggtcgagggcggcgacgacctgttcctgccgccttatgaaatgcgcaaggtcatgcacggcgacaaggtgctggcccgcgtgaccggcatcgatcaccgcggccgtcgcgaaggcagcatcgcccgcgtgctggagcgcggcatgacccgcctgatcggccgcttcagcatcgagatgggcatcaactacgtggtgcccgacgacaagcgcgtgcagcgcaacgtgcaggtgccgccggaccagaccggtggtgcgcgcgacggccagctggtggtctgtgaactgacccaggcgccggacagccgccgcccgccgatcggccgcatcatcgcggtgctcggcgacaagctgaccgcgtcgctggtggtggagaccgccatccatggccacgagctgccgttcgagttcccgcaggaggtgctggacgaagcggcctcggtgccgctggtggtcgagccggcgatgattggcgaccgtgtcgacctgcgcagcacgcccctggtcaccatcgatggcgaggatgccaaggacttcgacgacgcggtgtactgcgagccgaatgccgagggtttccgcctggtggtggcgattgccgacgtctcgaattacgttcgccctggtacgccgctggatgaagaggcgcagaagcgtgcgacgtcggtgtacttcccgggcttcgtggtgccgatgctgccggagacactgtccaacggcatctgctcgctgatgccgaaggtcgaccgcatgtgctttgtctgcgacatgcagatcgaccgcgatggcctggtcacgcattcgcgcttctacgaggcggtgatgaactcgcatgcgcgcctgacctacacccaggtgtggaaggcggtgggcgaggacgatgccgataccaaggcctggatgggcgacctgctgccgcaggtgcagcgcctgcaccagctgtacaaggtgctgtccaaggcacgcgccaagcgcggtgccatcgaattcgaaagcagtgaagtgcgcttcgtgctggacaaccgtggtgaagtgacccaggccggcatgctggtgcgcaacgacgcgcacaagctgatcgaggagtgcatgatcgcggccaacgtcgaggccgccaggtacctgctgtcgcgccatgtgccggcgccgtaccgcatccacgagaagccgccggaaaccaagtacgccgacctgctggaattcctcaaggagttcaagctgagcctgccgccgtggtcgaaggtgcgcccgggcgattacaccaagctgctgaagaagatccgcgaccgccccgatgccacgctgctggaatcggtgttgctgcgcagccagagcctggcgatctacagcccggagaatcacggccacttcggcctggcgctggaggcgtacgcgcacttcacctcgccgatccgccgttaccccgacctgctggtgcaccgtgcgatcaagcatgcgttgtccggcaagccgctggacaagttcacctacaacgcgcgcgaaatggcggccctggcgctgcagtgttccgagcgcgagcgccgtgccgacgaagccgagcgcgaggtcgacgagcgttaccgcgcggcgtggatggaaaagcacgtgggcggccagttcgacggcgtgatcagcggcgtgaccagcttcggcctgttcgtggaactggacgagtccaaggtgcagggcctggtgcatgtgacccagctgccgcaggactattacaagttcgacgccacccgcaaaacgctgaccggcgaacgccgcggcagcagctaccggctgggtgaccgcgtgcggatcctggtgctgaaggccagcatggaagagcgcaagatcgacttccgcctggtcgagcacaagggcgaggacgagggcgatggcctgccgccgccgcccgagcggggcaagccggccaagcgcaccaagaagaagtattga

SEQ ID NO: 492956 - DNA, 483 bp, Stenotrophomonas maltophilia
atgcaaggccaacccgaatacagtggcggctgccagtgcggcgcggtccgcttccaggcgcgtggcgagctcaccgacagctcgatctgccattgccggatgtgccagaaggcgttcggtgcctattacgcgccgctggtatccgtgcgcagcgtgcagttcagctggacccgcggccagccgcgctatttccagtcgtccaacgtggtgcggcgtggtttctgcgccgactgcggtacacccctgacctatgaagccccggatggcgtggccgtggctgccggcgccttcgatgagccggaacgcctgccaccgacgatccagtacggggtggagcgcaagctgccgttcgtcgacagcctgtccggcctgccggcgcggcgcaccgaggacgacgtcgccgcgctggagttcctggccaccattgtctcccaccagcaccccgaccacgacaccccgcactggccgccgcgcagtcggtaa

SEQ ID NO: 492957 - DNA, 744 bp, Stenotrophomonas maltophilia
atgagcaagaacagccagtggattgtcggcgtcaacgccgtcgcctcctccatcgagaacgacgccgagaacgtccgcgaagtgctggtcgaggccggtgcgaagaacccgcgcctgaccgagatcgaagagaacgcccgccgcaagggcatcgatgtgcgcaaggtgaacagccaggcgctggacggtgttggcggttcggtgcgccaccagggcgtggccgcgcgctacgccgccgcccgtacctacagcgagaacgagctggaagggctggtcaccgcggccgagggcaaggcccttctgctggtgctggacgaggtgcaggacccgcacaacctcggcgcctgcctgcgctcggccgctgccgccggggcgaccgcggtgatcatcccgaaggacaagtcggccacggtcaatgccactgtgcgcaagacttcggccggtgccgccgacctgatcccggtggtggcggtgaccaacctctcgcgctgcctgaaggacctgcagaagcagggcgtgtggatctacggcctggccggtgaagccacggcctcgctgtaccagctggacctgaagggcaacatcgcgctggtgctgggcggcgaagccgatggcctgcgccgcctgacccgcgagaactgcgatggcctggtcaagatcccgatgccgggcgagatcgagagcctgaacgtctccgtcgccgccggcgtcagcctgttcgaggccgtgcgccagcgcggttga

SEQ ID NO: 492958 - DNA, 1440 bp, Stenotrophomonas maltophilia
atgaagatgatgacccgactgcccttccccgctccccggcacctgctgctggccggtgccgttctactcgccctgtccggctgcgcgtcggtcggccgctacccggtgtacgacccggccgtggcggcgcagtatggacgtggcgatgccaccctcaacgcgccagccgatgacccgcgcagcagcctggatacaccgggccgcgacatccgccaggacacctggtggaccggcttcggcgatgaacgcctggaccgtctggtggcgcaggcgctggccgccaacagcgatctggccgccgccggcctggccgtgcagcgttcgcgcctgcaggccggcctggccagcaacgcactgtggccgcagccctcgtcatccggcgtgagcggcagcgccagccgcgccaccgaccagtctgatgattggcgccgcagctattccaccggcgtctcgctgggttgggaagtggacctgtggggccgcctgcgcacccagcgcgacatcgcccgctgggaagccgaggccagcgaggaagatcggcagaacaccgcgctgctggtgatcagcgacaccatcacccagtactggaacctggcctacctcaaccagtcgatcgccaccggccaggccaacctggagcgcctggaacgcacccgcgaactggtgcaggcccgcttcgacgccggtgcggtatcgcgcctggaagtgcgtcaggcactgcagaacctgcagtcgcagcggtcctcgcagagcgcgctggaacagcagcgggtggaggtgcgcaacgcgctgaccgtgctgctggacggcacgccctggccccagcaggacgaaccacaggacctgctgggcgcacgcagcccagccatcagcgaaggcctgccgaccgatctgctcggccgccgccccgatctgcgcgcggccgaacttcgcctgcgcaacagcctgaagaccatcaaggtcaccgccacccagtactaccctgcgctgagcctgaccggcagcctcggttccagcgcgacctcgctgggcgatgtactgcgcaacccggtggccacgctgggcgccggcctgtcgctgccgttcctcaacctgcagcgtgcgcagctggataccgatatcgccggcaccgcctaccagatcgccgccagcaacttccgcaagacgctgtataccgcgctctcggaagtggacaacgcactgtcggcgcgcgagcagctggcgcgccaggtggcggcctcgcaggcttcatacgacgaagcggtggaagtggaacgcgcgcaggaagtgcgttaccgcgtgggtgccaccgatctgcgcacctggctggaagcgcagcagacccggcgtgatgccgaactgtcgctggcacgcgcgcgccagggccagctcaacaacgacgtgacgctgttcaaggcgttgggcggcagcgcggggtga

SEQ ID NO: 492959 - DNA, 1959 bp, Stenotrophomonas maltophilia
atgagcacgacggcgccgctgctgcgcctgcgcgacctgcgacgtgaattcccggccggcgatgatgtgatcgccgtgctgcgcgacgtcaatctcgacatccacgccggtgagatggtggccatcgtcggccagtccggctcgggcaagtcgacgctgatgaacatcctcggctgcctcgatcgtcccacccgtggcagctaccaggtggccagccgcgaaaccgggaagatgcaaccggacgaactggccgaactgcgccgcgagcatttcggtttcatcttccagcgctaccacctgctcggcgacctggatgcgcgcggcaacgtggaagtgccggcggtgtacgccggcagccccggcccggtgcgcaacgcgcgtgccgagcaactgctgcagcggctgggcctgagcgaccgcatgcatcacaagccgggccagctgtccggtggccagcagcagcgcgtgtcgatcgcacgcgccctgatgaacggcggcgaggtgatcctggccgacgaaccgaccggcgcgctggacacgaaatccggcgaggaagtgatggcgatcctcggcgaactgcatgccgaaggccacaccatcatcatcgtcacccacgacatgagcgtggccgagcacgcgcagcgcatcatcgaaatccgcgatggcgagatcatcgccgaccgcgccaacccgaatgcgccgacctaccgtgcgcagcgcgaggccagtaccggcgtcgcccgcggcaacagctggcgggccgcgcgcgaccgcttcaccgaagcgttccgcatggcgctgctggcgatgaacgcacatcggctgcgaaccttcctgaccatgctcggcatcatcatcggcatcgcctcggtggtctcggtggtggcgctgggcaatggctcccagcagcagatcctgcagaacatcagcgcgctcggcaccaataccatcgacgtctatcccggccgcggtttcggcgacatgcgctcggcgcgcgtacagacgctcaaggccagcgatgccgatgcactggcaaggcagagctacgtggacagcgccacccccagcgtatcgacctcggtcaccgcgcgttaccgcaaccagtcgtccaccgcccaggtcagcggcgttggcgagcagttcttccgggtcaagggcgtgaccctgctcagcggcagcttcttcgatgccgatgcggtcaagggcctgggccaggtggcggtgatcgacgagaacacccagtcccagttctttcccgatgtcgacccggtcggccaggtgatcctgctcggcaacgtgccggcgcgcgtggtcggcgtggccaagcggcagagtttcggcttcggcggcagcaccagcctcagcgtgtgggtgccgtacaccacggtgatgtcgcgcatgctcggccagagccacgtgtccagcatcaccgtgcgcgtggacgatgacacgccgatggacgccgcgcaggaagcgatcacccgcctgctgaccctgcgccatggcaccgaggatttcttcctcagcaacagcgccgagatccgcgagaccatcgagcagaccacgcgcacgatgaccctgctgatcggtgccatcgccgccatcgcgttgctggtcggtggcatcggcgtgatgaacatcatgctggtatcggtgaccgagcgcacccgcgagatcggggtgcgcatggccgtcggcgcacggcagagtgatatccgccagcagttcctgatcgaagcggtgctggtctgcctgctcggcggcgtgctcggtatcggcctggccctgctgctgggctcgatgatcggccgcttcgccagcgacttccaggtgctgttctccaccgcctcgatcgtcgcagcgtttgcctgctcgaccctgatcggcgttgcgttcggcttcctgccagcgcgcaacgccgcgcagctcgacccggtggaggccctggcccgcgaatga

SEQ ID NO: 492960 - DNA, 1242 bp, Stenotrophomonas maltophilia
gtgacgttccgcctgctgcccgcgacccgccggagtcgcctgatactgatcgccctgcttgccctgatcgtcgccgcgaccgcctggtggctgctgcgcaagcccgccgcgccggcggtggccacctcgccggtcagccgcggtgacatcgagcagacggtggacgccaccggcgtgatcgatgcctacaagctggtcagcgtcggtgcgcaggcctcgggccagatcaagtcgctgaaggtgcagctgggcgacaccgtgaaggaaggcgacctgattgccgagatcgacgccaccacccagcagaaccaggtgctcaacgcgcaggcctcgctggaccaggtcaccgcccagcgcgccgtccagcaggccaccctgcgccaggccgaactggaattcgcgcgccagcagcagatgctggccgccgaggccacctcgcgccaggaatacgatgccgccgaggcgcagctgaagaccgcccgtgcccagctgcagtcctacgaggcgcagatcaagggccgcgaaaccgagctgggcaccgcccgcgccaacctggcctacacccgcatcaccgcgccgatggacggcaccgtggtggcggtggtggccgaggaaggccgcacggtgaacgccaaccagaccgcgccgaccatcgtcatgctggcgcggctggacgtggtcaccgtcaatgcggagatctccgaggccgacgtggtcaagatcaaggccggcatgccggtgtacttcaccacgctcggcgacccggaccgcaagtaccacgccacgctgcgccagatcaatccggcgccagcctcgatcgccaacgagaattcatccagctccagcagctcctccagttccagttccagcagcgcggtctactacaacgcgctgttcgacgtggagaacccggatggcacgctgcgcatcgacatgaccgcgcaggtctcggtgctgctcaagcaggccaagggcgtgctgatggtgccggcagtggcgctggggccgaagcgccgtggcgacgagcgcatggtgcgggtgctggacgacaagggccagccgcagccgcgcaaggtcacggtgggcatcaacaatggcgcctcggccgagatcctgtccgggctgaaggaaggcgagcgcgtggtggttggcgaagcgggtgcggccggtgccagcgccggcggcggcaaccgcggcggcatgcagatgcgggttggcggcccgggcatggggcgccgatga

SEQ ID NO: 492961 - DNA, 729 bp, Stenotrophomonas maltophilia
atggagactgaaaacccgatgcatcgactgctgatcgtcgacgacgacaacgacatccgcacgctgctggccgagcagctcggccgcgccggttacctggtgagcacggcggccgatggcaccgccatgcgccagctgctggaccgcgagcacgtggacctgatcgtgctcgacctcaacctgccgcgcgaggatggcctgaccctgtgccgtgacctgcgtgcgcgttcgaacacgccggtgatcatgctgaccgcacgcgccgagccgatcgatcgcgtgctgggcctggaaatgggcgccgatgactacctggccaagccgttcgaaccgcgcgagctgctggcacgcatccgcaacgtgctgcgccggaccgaggcgctgccggccaacctggagccgctagcggtgcgccgtgcgcgcttctcgcgctgggtgttcgacctggaacatcgccacctggtcgatccggatgaccgcgtggtggtgctgtccggcgccgagttccgcctgctgcgggtgttcatcgcgcacgccaacaaggtgctgtcgcgcgagcagctggtcgcgctcagcagtggccgcaactacgaggcacaggaccgcgcgatcgacctgcaggtcagccgcctgcgcaacaagctgggcgacgacggtggcccggacggactgatcaagaccgtgcgcaacgagggctacgtgctggcctccgcggtcaacctggaataa

SEQ ID NO: 492962 - DNA, 1410 bp, Stenotrophomonas maltophilia
atgaagcgcctgcgccatttcctgtcctcgatggtcgggtggttgttcgtgatcctgttgctgggcatggcggtggctgcgatcggcgcgaccatgctggccacttccaagcgccagcaggagttcgagcggcagaacctgaaccgcatcgccgaccgcctgcagggctacgtcaacctgctggacggcaatccggagctgcgcgagcgcctgctggcgatcggcgggccgagcgtgcgcgcgctgcagcccggagcccgcctcgggcgtgccgacacggcgctgatggaagtgctggaagaccgccccggaccggtgtcgcgcgcgcatgtgcacttcgcttcgttccgctcctgcattcccaagctgcaggacctgctgccgccgccaccgccgggtcaccggcggccgccgcgcgaacgcgacccggcgttcatcccgcccaagtgccgcgcggtggacgtgaccctcaacgacggcacgctgctgaaactggcgctggactcgccggcggtggcgcacaacggcatcctcgccgtggacccgtggttcctgaccctgctggtgctggcgattgccgtgctggcctatatcgttgcgcgcatggccagtgcgccactgcaggaactggccgccgctgccgaggatctcggcgacgatctgcagcgcgacccgttgccattgcgcgggccgcgtgaagtgcagcgcgccgccgaagccttcaacgccatgcagcaccgcctgcagcggcacctggccgaacgcacgcagatgctggcggcgatcacccatgacctgcagacgccgctgacccggttgcgcctgcgcctggagaatgtcagcgacgaagccctgcgcgagcgcctgatcggtgacctggcggcgatgcaggcgctggtgcgcgagggcctggaactggcccgcagtgccgagagtgccgagcagcgcgccgcactcgacctggattcactgctggagagcatcgtcgaggacaccgccgaaggcggcgccgacgtggtcttcgaggggggcagtggttcggtgctgatgctgcgtccgctggccatgcaccgcctgttctccaacctggtggacaacgcggtgatgtacgcgcaacgggcgcgggtacgggtcgagcgcagcggcggtgcgatcaccgtagtggtggccgatgacggccccggcctggccgaagagcagctggaggcggtgttcgatccgttcgtgcgggtggaaacctcgcgttcgcgccagaccggcggggccggcctgggcctgaccatcgcccgcgccctggccgagaaggacggcgcgcggctgtggctgcgcaaccgggccgaaggtggcctggaggcggtggtgcagtggccggccagtgcccaggtggtggcgcccggccgcgccggctga

SEQ ID NO: 492963 - DNA, 3027 bp, Stenotrophomonas maltophilia
atgggcgggcagggggacgaggggcgctgggtggagcgccgcgcatcaggattcaggtgggcactgcggcagggcctgctgtggttgctgctggccctcgcgctgccgctggcggcacaggagggcgcgcccccgctgcgcgactacgccatcgatgtatggacctcgcgcaacggcctgccgcacaactcgctgcgcgacatcgcacagacgccggagggccatctgtggttcgccacctgggaagggctggtgcgctacaacggcctggacttcaccgtgttcgaccgcagtacgcgccctggcctgcgcgacaacggcatcggcgcactgttcgtcgaccgccagggcgggctgtggatcagcgattcgcgcggcaacgtcagccaccgcggcagcgacggccaatggcgggtctgggagcaccaggccggtacaccgcaggtgctgatccagtccatgcagatggacagccagggccggctgtggctgctgtacgaaggcaagggcatcggctacctgacgccggatgccggcatcgtctaccaggcaccggcggcggacctgccgatggcgatgagcttcaccaagctggtggtcgatgcacaggaccgggtatgggtcggcacgctcgacgggctggtgctgcgcgacaacgacggcgtgctcaagcgcgcgcccgccgcgtgggggctgggcgccggcagcggcctgtcgtggccgtaccgggcaccggatggcgcgctgtggatcgtcgccggcgagcgcctgtaccgggtggaggacgaccagctggtgctggtgcaccgcctgccgggccagctgcacatgacctcgatgctgcaggaccggcatggcgatctgtggctgggtaccgagaaccagggcctgctgcgcatttccgcccatggcctggagcggctgccggccggcctgaacctgccgggcggacgcgtggtcagcctgcgcgaggatgccgaaggcagcatctgggtgggagccaatgggggcctgtaccgcctgcgcgaaacactgttcagcagcttcaccgagcgcgatgggctcagtggcgactacgtgcgcacggtgttcgaggatcgcgaccgccaactgtgggtcggcagcgccagcggccttgacctccagacccgcgacggtcgtttccgcgcggtaccgctgcacaaccgcggcggcaaggcgccctcggtactgagcctggcacaggggccggacggtgacctgtgggtgggaaccttcggcgacggcgtttaccggctgggtcgcgatgggggcctgcgccacaactatgcggcgactgacggcatgccgggcggcaacatccgtgcgatcaccgttgacccgcagggcgtggtctgggccggcacgcagaagggcgtggtgcgcatcgacggcgaccgggtgcaggtctcgaacgtgccgggtatgcccggcggcctgatcaccgcgctcgagcatgaccaccagggcaacctgtggatcggcaccatcgaaggcatccgcgtgctgcgtggcgaccacgtgcagtcgatcgacctggccccgctggggggcggccgcagcgtgttcggtttccaccagctgggcgatgcgatgtggatcagcagtgatcgtggcctgtaccgctggcgcaacggtgcgctggcgcgggtcggcctggagcagggcatgccggtggacgcggtgttccagctggtgccggaccgcctcggcaatgtctggatcagcagcaaccgtggtgtgctgcgcaccgacatggccaccctcaatgcggtggccgatggccgcacgccgcgggtggtgctggagcgctacaacgagatcgacggcatggccaatgcacaggccaatggcagctccagtccatcggcgatcctgcgccaggatggcacgttctgggtggtcaccgccggtggcctgagcacggtcgacccgcaacgcctgcagcgtttccgcgagcggccatcgccgccggcggcgatcgagagcgtgcaggtggatggtgcgccggtgcactgggagggaccggatcgcaattacattcccggtggccgccggttggcggtgagctatgtcggcctgagctacctgatgtccgaccggatccgctaccgcacgcggctggacggcctcgatgccggctgggtcgagcgtggcccgcagcgcagcgtcgagttcgttggcctgccgccgggcgactacaccctgcatgtggctgcggcgcatccgggcggcagctggggccaacaggaggcggtgtggagcttcagcgtcgagccgttctggtggcagcggcgcagcgtgcaggcgctgggcgggctgttgctgctggccggcctggtggcactgtaccgcctgctgctgcagcagctgaaggccagcaacctgcgcctggcgcggcgggtggacgacgcgaccttcgacctgcaggccaagaccgtgcacctgcaggcgctgaaccaggaaaagaccgagctggccgagcgcctggcgcgccaggccgaagccttcgagcgccaggcccgcgaggatgcgctgaccgggctggccaaccgccgcggcttcgacgagacgctggcgcgtgacttcgcccgttcgcagcgcagtggtcatccactgtgcctggtggtgctggacatcgaccatttcaaggacgtcaacgaccgccacagccacagcatcggcgatgccgtgctggtgcaggtggcgacgctgatcgcagccgccagccgcgactccgacctgccggcgcgcaccggcggcgaagagttcgcgctgctgctcaacgacacccgcctggaggaagccgcgcagctgtgcgcgcgcctgcgtggcctgttccatgaccaccccgactgggccggtgtggaaggcctgcgcgtgaccttcagtgcggggctggtggagctggatgccgacgaccgcaccccggcgctgctgtaccagcgcgccgaccgcgcgctgtaccgcgccaagagcgacggccgcgatcgtacgagcattggttga

SEQ ID NO: 492964 - DNA, 585 bp, Stenotrophomonas maltophilia
atgtcacaacgcttccgcggcttcctgccggtggtggtggatgtcgaaaccggcggcttcgacagccagcgcaatgcgctgctggaaatcgctgcggtgccgatcgagatggacgagaacggcctgctctaccccggccagaccgccagtgcccacgtggtcccggccgagggcctggagatcgacccgaagtcgctggaagtgaccggcatcatcctcgaccatccgttccggctggccaaggaagaaaaagcggcgttggaccacatcttcactccggtgcgtgcggcgatgaagaagtacggctgccagcgcgcgatcctggttggccacaacgcccatttcgacctcggcttcgtcaacgcggccgtggcgcggaccggccacaagcgcaacccgttccatccgttcagcgtgttcgacacggtcaccctggccggtatcgcctacggccagaccgtgctggcgcgtgcggccactgccgccgggctgggttgggatgcgaatgaagcgcacagcgcggtatatgacaccgagcagaccgcgcggctgttctgcaccatcgccaacgcctggccgcggtaa

SEQ ID NO: 492965 - DNA, 522 bp, Stenotrophomonas maltophilia
atgaaccttccgaccctggccgccgcgcgtggccagctggaccgtctcgccccctggttggccccgctcggcctgcgcctgctgctggcctgggaattcttcgaatccggccgcgagaagctgcgcggccagaactggttcgccgacctgcaggacgcctttccattcccgttcgaccagttgccggccaccctgaactggcaactggcgacctggttcgaactgctcggggcggcctgcctgctgttcggtttcggcacccgtttcgccgccgcgagcctgctggtgctgaccgtggtggccacctatgcggtgcattggccgatggagtggaactcgctggccgacctggccatgggctatgcgatcagcgaccagggcttcggcaacttcaagctgccggtgctgttcatggccatgctgctgccgctgatcttcaccggcgccggcaagctgagcgtggacgcgtggctggcgcggtggtctccctcggccacacctgcgcggccagcggttcggtag

SEQ ID NO: 492966 - DNA, 756 bp, Stenotrophomonas maltophilia
atggctgacgctatcgacaccctgcgcgcgcaacagcacgcgttcaccgcgcacctgcgcgatccacaggcggtgccggcaccggccggcctggatgcacgccggttggcggtgtaccagcacctgctgttcaacaacctgctcgggctcctgagcaacggtttcccggtctgcgtccgactgctcggcgaaccggcatggagcgcgctggtgcgccactacttcgccacccatcgctgccagacccccctgttcaccgagctggccgccgagttcgtgcagtggctgcaggcacagccgcagctgccgcacccggcgctggccgaactggcccactacgagtgggtggaaaccgcgctgtaccagttgcaggccgagccacttcctgcgcctggcgatgtcgatccgctgcgggtgccgctgcagcgttcgccgctggcgtggccgctgctgtaccagtggccggtgcaccgtctcggtgcagaggatgcgccgacccagcccctcccagaacccaccggcctgctggtccgccgcgaagccgacggtgaagtgcgattcgccgcgctcagccccttggcggtgcacctgctgtccagcatcggtgaacagcctgggctggaaggccgtacgtacctgcaacgcctcgccaccacgcatgggctggccgaagacgcgctggccggccccggtgccgcgctgctgcggcagttcctgcaggccggcgtgatcggcccgctcaccaccccgccctga

SEQ ID NO: 492967 - DNA, 876 bp, Stenotrophomonas maltophilia
gtggcaagcactgacgtccgcgccagcctcgtccacccgcagtcgccgcttcgcgcggcggctgcagggttgggcctgcgccgggcgctgctgcaggatctgcgtgacgctccggcaggcgacttcgacttcctggaatgcgcgccggagaactggatccatgtcggcggcccggccggtgatgccctggccgaactggcacaccgccatccgctgagctgccacggcctgtcgctgtcgctgggcggcagtgccgccctggacacccagctgctggagcaggtcggccggttcctcgaaaagcacagcgtgccgctgtacagcgagcacctgagctactgcagcgacgacggccacctgtacgacctgctgccgattcccttcaccgacgaagccgtgcgccataccgcgcagcgcatccgccgcgtgcaggacctgctcggccgccgcatcgcggtggagaacgtgtcctactacctggcgccggaaccggcgatggacgaactggcgttcaccaatgcggtgctcgccgaagccgactgcgacctgctgctggacgtcaacaacgtctacgtcaacgcctgcaaccacggctacgatgccgatgccttcatcgccggcctgcccgcgcagcgcatcgtctgcctgcacgtagccgggcacctggacgaggcacccgacctgaagatcgatacccatggctgcgcggtgattgatccggtctgggagctgctggcgcgtacctatgcacgcatcggcccacgccccaccctgctcgaacgcgatttcaatttcccgccctatgcggaactgcagggcgaactgcagaccatccgccgcctgcaggccgcacacgccggggctgcacatggctga

SEQ ID NO: 492968 - DNA, 354 bp, Stenotrophomonas maltophilia
atgagcagttccaacaagaccctgtccctgctgaccgctaccgccctggccgccggcctgggcatgaccgccagcgcctcggcgctgagcatgagcgacctcgcccagggctacctggtggccggccaggcagccaaggccagcaccgatgccaaggccgccgataccaagatggcagccgacgcgaccaagcacgccgaaggcaagtgtggtgccgacggcaagaccggcgaaggcaagtgcggtgccgacaagggcaaggctgccggcgcagccggcgccaaggccaagaccggcgacacgaagtcgactgaaggcaagtgcggcgaaggcaagtgcggtggcaagcactga

SEQ ID NO: 492969 - DNA, 708 bp, Stenotrophomonas maltophilia
atgaaccttcccaacgaccacatcgtcaagagctacgacgaagagcagcagcgcctggtggccgagatcgtgcgcatgggcgagatggccgtcgcccagctcgaagcgtcgatggacgtgatcgagaagcgcgacgagaacgctgcccatcgcatcatcgccaacgacgaggcgatcgatgcgctggaacagcagatcagccacgacgtgatgcgcctggcgctgcgtggcccgatggcgcgcgacctgcgcgagatccttgccggcctgcgcattccggccgacatcgagcgcatcggtgactacgctgccaacgtcgccaagcgctcgatcgcgctgggcaaggtgccgccgctgccgcagatccagggcctgcgtgcactgggccgcctggccgcgcagcaggtccggcgtgccattgccgcctaccgcgacaacgatgctgatgccgcgctggaactgcgtgaggacgacgcccgcctggacgcgcagtacaccgcgctgttccgcgagctgctgacctacatgatggaagacccgcgcaacatcaccccgtgcacgcacctgctgttcatggccaagaacctggagcgcgtgggcgaccacgccaccaacatcgccgagaacgtatggttcctggtgcatggcgagcagccgctgccaccgcgtgaaaagcgcgacgagacctccagcaccggccagccctga

SEQ ID NO: 492970 - DNA, 831 bp, Stenotrophomonas maltophilia
atgaacgacctttccaacgccgtgccgatgcagcgcatcgccgtgccgtcctcgcacgagagcctgcacacgccgtcgccggtgaagctggctgcgcgtggactggacttctactacgacaagttccacgccctgaagggcatcaacctggaaatcccggaaaagcgcgtgaccgcgctgatcggtccttccggttgcggcaagtcgaccctgctgcgcatcttcaaccgcatctacgcgctgtacccgaagctggaagcgcgcggtgaagtgctgctggacggcgagaacatcctgtcgccgaagtacccgatgaaccgcctgcgcagcaaggtcggcatggtgttccagaagccggtgccgttcccgatgaccatcttcgagaacgtggcctacggcatccgccaccacgagaagctgagcaaggccgacatggccgaccgcgtcgagcaggcgctgcgccagggcgcgctgtgggacgaagtgaaggacaagctggggcagagcgcactgggcctgtccggcggccagcagcagcgcctgtgcatcgcccgtgccgtggccctgcgcccgtcggtgctgctgctggacgagccgacctcggcgctggatccgatctcgaccagccgcatcgagcagctggtggaagaactcaagcacgagtacaccatcgtgatcgtcacccacaacatgcagcaggccgcgcgcgtatccgactacaccgccttcatgtacctgggcgacctgatcgagcacgaccgcaccgaagtgatcttctcgcagccgtcgcagcggcagaccgaggactacatcaccggccgcttcggctga

SEQ ID NO: 492971 - DNA, 864 bp, Stenotrophomonas maltophilia
atgtccagcaccgctgactccctgtacctgcgccgccgcatcggcaatgtcgttgcgatcaccgcctcctgcgccaccgcgctgttcggtttgttcttcctgggctggatcctgttcaccctggcctccaagggcctggccggcatcaacctggatctgttcaccaagatgacgccgccgccgatgcaggaaggcggcctcgccaacgcgttcttcggcagcgccgtgatgtgtgcgctggcgatcggcatcggcaccccgctgggcgtattggcgggcacctggctggccgagtacggcaacgcccgcaaggccggcaccgtggtccgcttcgtcaacgacatcctgctgtcggccccgtccatcgtgctcggcctgttcgtctacaccctgtacgtgatgcagaccggcggcaacttctcggcgttcgccggtgcgctgtcgctggccttcatcgtgctgccggtggtggtacgcaccaccgacgagatgctgcgcctggtgccctcgcagatgcgcgaagcggccctgtcgctgggcatcccgcagtggaaggtgatcgtgcaggtgctgtaccgcagtgcctcggccggcatcatcaccggcatcctgctggcactggcccgcatctccggcgagaccgcaccgctgctgttcaccgccttcggcaaccagtactggaacaacaacatcttccagccgatggcctcggtgccggtggtgatgaaccagttcgccggcagcccgtatgaatcctggcaggtgctggcatgggccggtgccctggtgctgactgtcttcgtgttgctggtcagccttgccgcccgcggcatcctgctgcgcaaccgtatctcccatgactga

SEQ ID NO: 492972 - DNA, 969 bp, Stenotrophomonas maltophilia
atgaatgccatcgcccagcctgtagccgccccgtccacgcgtgatgcgcgtgatgcccgcaacgacaaactgttccgatgggtgctggtcggcaccgtcatcttcgtcctgatcgccctggcctgcgccgcgctgtcgatgctgtggggcggccgccatgccctgcagatgcagggcctgagcttcttcttctccgccgactggaatccggtcgaaaacaagttcggcgcgctcgccccgatctacggcaccctggtcaccgccgtcatcgcgatggtcatcgccgtgccggtcagcttcggcatcgccttcttcctcaccgaagtcgcgccacgctggctgcgtggcccggtcggcacagccatcgaactgctggccggcattccctcgatcatctacggcatgtggggcctgttcgtgctggtgccggtgatgaccgagtacgtcacgccgttcctcaacgagaccctgggcgaatggccgatcatcggcccgatgttccagggcccgccgctgggcatcggcatgctcaccgccggtttcgtgctggcgatcatggtcattccgttcatctcctcggtgatgcgcgaagtgttcctgaccgtgccgacccgcctgaaggaatcggcctatgcgctgggctccaccaagtgggaagtgagctgggacatcgtgctgccctacacccgctcggcggtgatcggcggcatcttcctcggcctcggccgcgccctcggcgagacgatggcggtggccttcgtgatcggcaacagcgtgcgcctgtcgccgtcgctgctggaaccgggcaccaccattgctgcgctgatcgccaacgatttcggtgaagccactgaaacctaccgttcggccctgctgctgctcggcttcgtcctcttcatcgtcaccttcgtggtgctcgccatcgcccgcctgatgctgatgcgcctgtcccgcaaggagggcaactga

SEQ ID NO: 492973 - DNA, 1089 bp, Stenotrophomonas maltophilia
atgaaactgcactcggccggccttgccgccctttccctggccatcgccctgggcctgtcggcctgcggtggcgacaagcaggccgcgcagcagccggcggccgacggtgccgctgccccggccgctgccggtgccaaggtgaccgccgaagtgtccggcgcgggcgcgtccttcatcttcccgctggtctccaagtggtcggccgactacaacgccaccaccggggccaagatcaactaccagtcgatcggctccggcggcggcatcgcccagatcaaggccggcaccgtcgacttcggctcctccgacaagccgctgagcagcgaagagctggcacaggccggcctggcccagttcccgtcggccatcggcggcgtggtgccggtggtcaacatcgaaggcctggaagccggcaagctgcgcctgagcggcgccctgctggccgacatcttcctgggcaaggtcaagacctggaacgatccggccatcgtcgccgccaacccgggcgtgaagctgccggacggcaagatcaccctggtccaccgttcggacggttcgggcaccaccttcaacttctccaactacctgtccaaggtcagcccggagtggaagagcaaggtcggcgaaggcacctcggtgcagtggccggacggcgtcggtggcaagggcaatgaaggcgtcgcttcgtacgtgaagcagatcaagggctccatcggctacgtcgagctggcctacgcgctgcagaacggcatgccgtacaccgccatgcagaacgccgccggcaactgggtcgagcccagcgcggaaaccttcgccgcggcggccgccagcgccgactgggccagcgccaaggacttcaacctggtcataaccaacgctgcgggcgagcaggcctggccgatcaccgccaccaacttcatgctgatgcagaagcagccgaaggacgccaagcgcaaccaggacaccctggccttcttcaagtgggccttcgagaacggccaggcccaggccaacgagctgcactacgtgccgctgccggccgaactggtcaagcagatcgaggcctactgggcgaccgacctgaagtga

SEQ ID NO: 492974 - DNA, 1017 bp, Stenotrophomonas maltophilia
gtgatccacgccttcaagtcgcgcgttgccgttgccgtcttcgcagcgtcgtccgtgttcgccgccaacgccgctgaaatcaccggcgcgggcgcctcgttcatctacccggtgatgtcgaagtggtcggccgactacaacgctgccaccagcaacaaggtcaactaccagtcgatcggttccggcggcggcattgcgcagatcaaggccaagaccgttgatttcggctcttccgatgcaccgctgaagccggaagaactggccgcctcgggcctggcccagttcccgtcggtgatcggcggcgtggtgccggtggtcaacgtggccggcatcgccccgggcgcactgaagctggacggcaccgtgctggccaacatcttcctgggcaagatcaagacctggaacgacccggccatcgccgcgctgaacccgggcgtgaccctgccgagcgccaagatcaccgtcgtgcaccgctcggatggttcgggcaccaccttcaacttcgtcaactacctgtccaaggtcagcccggagtggaagagctcggtcggtgaaggcacctcggtccagtggccggccggcatcggcggcaagggcaacgaaggcgttgctgcctacgtgaagcagatcaagggcggcatcggctacgtcgaactgtcctacgcactgcagaacaagctgtcgtacacggcgatgaagaacgctgccggcaggttcgtgcagccgagcgatgcatcgttcgccgccgctgccgccagcgccgactgggccagcgccaaggacttctacctggtgatgaccaacgccccgggcgccgagtcctggccgatcaccgccaccaacttcatcctggtgcacaagaagccgaagaacgctgccaacggcaaggccacccaggagttcttccgctgggtctacaagagcggcgacgcccaggcccgccagctcgactacgtgccgctgccggacagcctggtccgccagatcgagacctattggtcgcagaacctgaagtaa

SEQ ID NO: 492975 - DNA, 1233 bp, Stenotrophomonas maltophilia
atgcgttcccatttgctcgccgccgcggtcgttgcaagcctcggtctggtttccgccgacgccttcgcagcccccgccagctcgggcgtgtcccaggcacagttgcagcagctgcaggcacagatcgctgcgctgcaggcccaggtccagcagttgcagaacgattcgcaggcgctgcaggcgcagtccgacgcgcagtccgaagtgaacatcacccaggcgcaggccctggaaggtgcgcagaagacccagaccagcgtcgacaagctggccaagctggtcaatgacaacaagattggcggtcgcatgttcttcgacctgaccaacatcgacaagaccagcaacggcaaggacaccgccgccagcggcaccggcctggacgtcaagcgcttctacctgaccgtcgaccacaagttcaacgacatctggtcggccaacctgaccaccgacttccagtacagctcggccatcggcaacaccgaactgttcgtcaagaaggcctatgtgcagggcagcttcgacccggccttcaacctgcgcgtcggtgccgccgacatgccgtggatcccgtacgtcgagaagttctacggcatgcgctatgtcgagaacaccctgaccgaccgcctgaagtacggcaactcgtccgactggggcctgcatggcttcggcaacctgggcaacaacttcaactacgccgtctcggtcgtgtccggcgccggctacaagaacccgacccgcagcaagggcatggacgtggaaggccgcgtggcctacactccgaacgagaacttcgtggtcgccgtcggcggctacagcggcaagctgggcaaggaaaccgacatccagagcgccgagaacacctacacccgcgccaacgcgatggtggcctacgccgacagcaacttccgcgtcggcggcgagtacttccaggccaagaacctcaacaacgtgctgaccgttgccaccgacaagaccagtggctggtcggtgtggggcagcgtgcgcgtgaccgacggcggcatcaacgtgttcggtcgttacgatgacaccgacgtcagcaagaccctggacccgaccctgagcgacaagtactggaacgtcggcgtcgagttcccggtcatgaagaacctcaagctgtcgaccgtgtacaagtacacgcacctggccaacgccagcgacaagaagaacgacaagaccaaggaattcggcgtctggggcgacctgtcgttctga

SEQ ID NO: 492976 - DNA, 693 bp, Stenotrophomonas maltophilia
atggccaccgcgaagaagactgcccgcgcaccggcgcggcgcggcggccgcatgccgcgcgccgacgtggtggaaatgttcacccgcctgcgcgagctcaacccgcacccgaagaccgagcttgagtacagctcgccgttcgaactgctggtggccgtggcgctgtccgcccaggccaccgacgtcggcgtcaacaaggccacccgccgcctgttcccggtcgccaacacgccggcggagatcctcgcgctcggtgaggatggcctgaagccgtacatcgccaccatcgggctgttcaacgccaaggcgaagaacgtgatcgccacctgcgcgatcctgctgcagaagtacggcggcgaagtgccgcgcgaccgcgaagcgctggaagcgctgccgggtgtgggccgcaagaccgccaacgtggtgctcaacaccgccttcggcgagccggtgatggcggtggatacgcatatcttccgcgtctccaaccgtaccggcctggcccccggcaagaacgtgcgcgaagtggaggacacgctggtgaaggtgattccggccgagttcctgctcgacgcgcaccattggctgatcctgcatggccgctacgtgtgcaaggcgcgcaagccggattgcccgggctgcgtgatcgccgacctgtgccggttcaaggaaaagaccacagccgagacgtga

SEQ ID NO: 492977 - DNA, 354 bp, Stenotrophomonas maltophilia
atggcatcccgacccacccccgcgcagttgttcgcccgggtccaggcagacgatctcgatggcgccctgcaggcggggctgatggactacgtcgcccgagccggcgacgaacagctgctgcctggccacccggaccttccgcagcggctgcagcaggcccagcagcaactgcgtacggcctgggccgcacgcgaacgctatcgcgcccgcgcggtgcgcctggcccgccgcgaagccgagcgcgatgcacgtcgcaccccgcccccggcgccggacgtgaagccccccctgcccgccgcggcggccgcgattctcgcccgggccaaggcccgcgtcaccggcaaggagccgtaa

SEQ ID NO: 492978 - DNA, 783 bp, Stenotrophomonas maltophilia
gtggccgatgccctgatcgctgttgccgacgaaggcgccatccgcaccgtgaccgtccagcgcccggacaagctcaatgccctgaacgccgcgaccctggaggcgctggccgatgccttcagggacgccgctgccgatccggaggtgcgcgtggtggtgttgaccggagcgggcccgaaggccttcgtggccggtgccgacatcgcggaaatgaacaccctcagcgccgttcagggacgtgatttctcgctgctgggccaggccctgatgcgccagatcgaacgcatgcccaagccggtcatcgcacgcgtgaacggtttcgcgctgggcggcgggcttgagctggcgatggcgtgccacctgcgcatcgccgccgataccgccaaggtcggccaaccggaaatcaatctcggcctgattcccggcttcggcggcagccagcgcctgctgcgcctgtgtggccgcgccgccaccctggagctgtgcctgctgggggcgccgatcaacgccgcgcgtgcgctggaactgggcatcgtcaacgaagtcgtgccggccgacgcgctggacaaccgtgtacaggacgtcgcccgccagctggcacgctcagcgccgctggccctgcgtggcctgctcgacgcggtgcacgtgggcggcgagtgcagcctggaggccgggctggaatacgaaagtacgcagttcggcctgctgttcgccaccgaggacatgcgtgaaggcaccagtgccttcctgcagcgccgcccgccggccttccagaaccgctga

SEQ ID NO: 492979 - DNA, 702 bp, Stenotrophomonas maltophilia
atgaagttgcgttctatcgcggtcgccgtcgcggccctggccctgacgggcaatgccttcgcccaggacatcgcgtccgagaagggcaagctgagttattacttcggttacgactacggcaacaacctggcggagctgaccggtcgcggtgagcagctggacatcaactcggtggtgaagggcctgcaggatgcctacgccaagaagcagccggcgatcaccgccgagcagctgaagccggccgttgaagcgttccagaagcgcgagcagggccgtgcccaggctgccaaggccgagtacgaaaaggcggctgccgaaaacaagaccaagagcgatcagttcatcgcggcgaacaaggccaaggccggcgtgcagtccctgccgagcggcgtccagtaccgcgtgatcgaagccggcaagggcgccaagccgacccaggccagcaccgtgcagctggaagtggccggtccgttcccgtacggccagcgcccgaccgaagcccgcccggcccagcagatcccgtcgatcaaggtcagcgaagttgaaatgaaggccatgcgcgagaccctgctgcagatgccggccggctcgaagtgggaagtcaccctgccgccggaccaggcctacggtgccgacccgcgcaccccgttcccgccgaacgtggctgtgcagttcgagatcaagctggtcagcgtcaagtaa

SEQ ID NO: 492980 - DNA, 687 bp, Stenotrophomonas maltophilia
atgagcaacgaggaacgcagccgcatcctgcaccgcgtgcagcccctgcgcgaacaactgcagcaatcgctgcgtggctcgctggccgaccacgagcgactgatgcgcgcgctgcaccccttggcccaaccgccggccggcgacggctggaaccgcagtgagctgatcgacctgctgccgcccgggcctccggtggaggctgcggtgctggccggcatcgtcccgcgcgccaacggcgcacaggtgatcctgacccgccgcaccgaaaccctgcgcacgcacgggggccaggtcggattccccggcggccgcaccgagcccgatgaccgcgacgcattggcggccgcgctgcgcgagagccaggaagaaatcgcattggcgcccggccaggtgcaggcgctggggtatctcgatcccttcgtcaccatcaccggctaccgggtcacgccggtggtggcggtggtggatccggatttcgtgccggtgccgcagcccagcgaagtggccgaagtgttcgaggtgccgctggattatctgatggcgcccgacagcctgcgccaggtcgaaatcactcatcgcggccgggtccgccacgtcctggagtatggctggccgggccagcgcatctggggcgcgaccgccgccattctctacaacctgcgtcgtcgcctggagcaagtgcaatga

SEQ ID NO: 492981 - DNA, 903 bp, Stenotrophomonas maltophilia
atgaagccgatcgatccgccgtggaccaccctggtcgatgtcaccacccttgccgctgcgctgggcgcaggcgtgcgcgtcgtcgacgcgcgtgccaccgccagcaccgccgtgcgcgtggtcgatgcgcgtgcttcgctggccgatccgcaggctgcgggcggccagtatctggcagggcacataccgactgcggtgcatgccgatctcaaccgtgatctgtcggatctgacccgaagcggccacggccggcacccgctgccggacagcgatgcgttcgccgcgaagctcggcacgtggggcatcggtcccgaaacccaggtggtggtctacgacggcagcgacggcagcatggccgcatcgcgcctgtggtggctgctgcggctgatcgggcacacccgggtggccgtgctcgacggcggtattgccgcctggcaggccgccggtcacgcgctggcgagcgggccgactgaagtgacggtgttacctgcctacccgggccgtttcgacaccacccagatcgccaacgccgatgaaatcagcgcacggctgaagcacgcgccgggctggttggtcgacgcgcgcgcgggtgagcgcttccgcggtgacgtcgagccgctggacccgatcgccggccacgtgccgggcgcggtcaaccgcccgttcgccttgaacgtactcgatggccacctgcgcgacccacaggcgctgcgcgccgaactgcagggcgtgatcggcaaccgcgatccgcagcaggtggtgctgatgtgcggctccggcgtgaccgcctgccatctgctgctggcgatggaaacggcgggcctgtccggcgcgcgcatctacgccgactcctggagcgggtgggtcagcgacagcagccgcccggtggcgaccggcgcctga

SEQ ID NO: 492982 - DNA, 567 bp, Stenotrophomonas maltophilia
atgcccaacccgctcctgcccggcctgcagctgcagcccctgccctacgaagaccgtctgccgctgcgcgacccggccacgctggagatggtggtgatccactgcaccgaactgcccgatctggcgatggcccgcgagtacggcgagcgtgtgctgtacgacagcggtgccggcaacagcgggcacttctacatcgaccgcgatggcagcgtggtgcagtacgtggcaccggaacgcgtggcccaccacgtgcgcggcatgaacgcgcatacgctgggcatcgagctggtcaataccgggcgctatccggactggttcgacagccgccaccaggcgatggacgaggcctacaccgaggcacagctgcaggcgctggaacagctgctgctggcgctggtggcgcactacccgtcgctgcgacggattgccgggcatgaccagctggacctggaacgggtgccggccagcgacgatgcgacgttgacggtggcgcgcaagcgcgatccggggccgctgttcccgtgggcgcgggtgctggcgaaggtgccgttgcagccggttgggtaa

SEQ ID NO: 492983 - DNA, 528 bp, Stenotrophomonas maltophilia
atgagccgcggccactgcatcctgtcgcatggcttcgagagcggcccggaagcgaccaaggtcaccgcgctggccgacgtggcgcagcgcctgggctggacccatgagcgcccggactacaccgacctggacgcgatgagcgaggtcagccgggtaggcgacgtgccgacccgcctgcgccgcctggtcgagcgcgccgccatcgcggcccggcaggggccggtggtgctggccggctccagcctgggcgcctacatttccgccatcgcctcgttgcaggtaccggtggccggcctgttcctgatggtgccgccgaccacgatgggcccgatgccggcgctggacgccgccgccgtgccgaccaccgtggtccaggcctggcatgacgacgtggtgccagcagcgggagtgatcgcgtgggcgcaggcgcgctcggcgcagctgctgctggtcgacgacggccaccgcctcgagcgccacgtggaggcttccgcgcaggccttcgaacgcttgctgcggcaactgtga

SEQ ID NO: 492984 - DNA, 2139 bp, Stenotrophomonas maltophilia
gtgaaattcttcgtctcctgcgccaagggcctggaatacctgcttgccgatgaactgtcggccctgggccttggcaaggccactgccaccattgccggcgtcaacgccgagggcgaactggcgcaggcgctgcggatcgtgatgtggtcgcgcctggccagccgcgtgctgtggcccatcgacgagttcgagtgcccggatgagcaggccctgtacgacggcgtgcgtgcgctgccgtggcacgagcacatcacgccggagatgaccctggcggtggacgcgcacgtgtccggcgacaagatcacccacgcccgcttcgccgcgcagcggatcaaggacgccatcgtcgaccgcatgcgcgatgaaggcctggaacgcccctcggtcaacaccgatctgcccgacgtgcgcgtcaacctgttgctgcgcaagggccgtgcctcgttgtcgatcgatctcggcggcggcccgctgcatcgccgtggctggcgtggtgctgcccacgaggcaccgctgaaggaaaacctggccgccgcgctgctgctgcgcgcgcaatggccgcgcctgcacgctgccggtggtggcctgctggatccgatgtgcggcagcggtaccctgctgatcgaaggtgcgctgatggccgccgacgtcgctcccggcctgatgcgtcatggcagcctgccgccgagccgctggctgggcttcgacaaggccgcctggaagtccatccagagcgaagcacgtgagcgcgaagcggccggcctggccgcgctgaagccagtcatccacggcagcgacatcgatccgaccgcgatccaggcggcacgcgagaacgccgaggtcgcgggcgtcgcccacgcgatccgcttcacccgcgccgacgtggccgacctggccgcgccggaacaggagatcggtgcggtggtctgcaacccgccgtacgacgaacgcctggccgccgatccggcgctgtaccgcgcgctgggcaacgccctgcagaaggcggtgccgcagtggcgcgccagcctgctgtgcggcaacgacgaactggccttcgccaccggcctgcgcgccggcaagaagtaccagatgttcaatggtgcgctggagtgtgcgctgatcgtctgcgacccgatcgccgtgccgggccgtgatccggcacagccgcgcgagctgagcgaaggcgcgcagatggtggccaaccgcctgcgcaagaacctgaagaagttcaagagctggcgtgcccgcgaagacatcacctgcttccgcgcctatgacgccgacctgccggagtacgcggccgccatcgacgtctacgaggaagacggcggcaagcgccgtaccttcctgcacgtgcaggaatacgccgcaccggctgccattcccgagaacgacgtgcgccgccgccgcaacgagctgctggccgctgcgcgcgaagtgttcggcgtgccgcccgagcaggtctcgatgaagtcgcgcgagcgcggcaagggcggcagcaagtacggccgcttcgagcagcgtgacgaattcatcgtggtgcgcgagaacaatgcactgctgcaggtgaatctgttcgactacctggacaccggcctgttcctcgaccaccgcccgctgcgccggatgatggccgagcaggtacgtggcaagcgcttcctcaacctgttctgctacaccggcgtggccagcgtgcaggcggcggtggccggtgccgccagcaccaccagcgtcgatctgtcggcgacctacctgcagtggtgctacgacaacctggcgttgaacgggcagggcggcaaccagcacctgctggtgcaggccgacgcgatggcgtggctggagggcgaccgtggccagtacgacgtgatcttctgtgacccgccgaccttctccaactccgcgcgcgccgatgacttcgacgtgcagcgcgagcagatcaagctgctgcgtgcagccgtggcgcggctggcgccgggcggcgtgctgtacttctccaacaatttccgccgcttcaagctggaagagaacgccatcgccgaattcgcccagtgccgcgagatcaccgcgcgcaccatcggcccggacttcgagcgcaacgcgcgcatccaccgcgcgtgggaattgaagcggttggggtaa

SEQ ID NO: 492985 - DNA, 330 bp, Stenotrophomonas maltophilia
atgatgctgctggcactggccctgtcgttctccgcgttcaccgcgttgtcgctggcgatggaaaagcaccagcacgacctgcacggcagggccgcagccacgcccgcacggcgcacccagtggcgcgtgctgggctgggccctgctgacggtggcgttcgcgctgtgcgtgatcgaccacggctgggcgatgggcccggtgctgtggctgggcacgatgacactgggcggtctggcgctgtcgttcgggctgtacccgtaccggccgaagtggatcgcggcgttggcgatcgtgctgccggtgctggggctggtggtggcggtgctgtag

SEQ ID NO: 492986 - DNA, 1638 bp, Stenotrophomonas maltophilia
atgaagaacggcttccgccagtcgatggcctggctgcacacctggaccggtctgctggtcggctggttgctgctgctgatcttcatggccggcacggccagctactaccgcgaggaaatcagccgctggatgcgaccggaacttccgtccagccaggtcagcatcgatgtcgccgcgcagcgcgccgtggattacctgcaggccaatgcggcgcaggccgggaactggttcgtcaccctgccgcagccgcgcaacccggccatgcagatgttctggcggttgccaccggagctggccgatcccagtcgcggccgtcgcggtggcttcggcgaagccacgctggacccgaataccggccaggcactgaaggcacgcgaaacgcggggcggtgatttcttctaccgcctgcatttcgacctgcactacatcccggtgctgtgggcgcgctacctggtcggcttctgcgcgatgttcatgctggtggcgatcatcaccggcgtcatcacccacaagaaaatcttcaaggacttcttcaccttccgcaaggacaagggcctgcgttcctggcttgatttccacaacgtcagcgcggtgatggccctgccctaccacgcgatgatcacctacaccggcatcgtcaccctgatggtcatgtacctgccgtggggggtgaaagtcgcctacccgcaggacgaagacaagttcttcagcgaagccttcggcggcatgccggaggtgaccgcgccggccgaaggacgcgccacgccgctgccgatcgcgcagctgctggacagcgcacgtgcgcactggcacggcgtggaagtggccggcttcaccgtgtccaacccgggggcggccaatgcggtgatcgacatccgccaacgcgacggcaagcgcctgtccaccgacactcccgccgttcgctacgacatggtcaacggcacgttgctggaggaaacgcctccatccggcggcgccaccgccacccgtggcgtgctgtacggcctgcacctggcgcgcttcgccgattggggcctgcgtgcactgttcttcctgtccggcctggtcggctgcctgatggtggccagcggcgtggtgctgtgggcggtgaaggaacggcccaggcatgccaagagcggccgcaccggcttcggcctgcgcctggtcgatgcgctgaacatcggcaccgtggccggcctgccgatcgctttcgcggcctacttctggggcaaccgcctgctgccactggacatcgccgggcgcgcgagtgcggaggccaacgtgttcttctacgcctggggcggcgcgctgctggccgccttcatctggccgaagcggatgatgtgggcgtggcagctgtacctgggtgcggctgcgttcgcgctggtaccggtggtcaacgcgctgaccacgcacgcgcatcttggcatcacactgcgcagcggtgactgggtactggctggcgtcgatctgtcgatgatcgcgttcggtgcgatgctggcgctgtgcggctggcgcatgcagcgctggacgccaccgctgagcgcggccgagaagaagaagcgcgccgccgccgcagcagcacccagggccccggtggacgctgcggaaaccgccgaagcggaggccagcgcatga

SEQ ID NO: 492987 - DNA, 315 bp, Stenotrophomonas maltophilia
gtggaccgctcgcccgcaaccgccagcccccgcaccttcttctccaatccacgctggggcgtgctgtcacgctcgctggccgcgatcttcggcggctacgcgctggcttcggccaccagcgtgttctgcgcggtggcactgcccggtgcgcgcggccaggccgtgctgaccggcatgctgctggccatcctggtagccgcgtgcgcagcgctgtgggcgttcgcgacccgcagcgcgctgcgcgcctgggtgggcatcctcgcgcccgcgctgctgatggccgccgttgcgcgcctgctgggggcctgggcatga

SEQ ID NO: 492988 - DNA, 1287 bp, Stenotrophomonas maltophilia
atgacgcctgcccacgatccgcgccgcgctcagctgcgacgcctgaaagccctcgcactgggcctgctgctgttgatgctggccggattcgcggtcagccactggcagggcgaacgcggcatctgggcctgggtctcggcgttctgcgaggccgcagccgtgggcgcactggccgactggttcgccgtcgtcgcgctgttccggcgcccgatgggcctgccgattccgcacactgcgatcatcccgcgcagcaaggaacgcatcggcgacagcctcgccctgttcgtgcgtgaccagttcctggaaccgcaggtgctgctggccaagctgcaggtgttcgatccggccagccgcctcggcagttggctggccgacccggcgcgctcgcggatgctggccgacatggcacgcggctgggccctgcaggcactggacttcttcgacgagacagcggtgcgccggcagctgcatgcgttcgtggtgcagcagctgcggcagtggaatgccgccgccaccgccggtgagctgctggccctgctgaccgccgacgggcgccaccagcgcgtgctggacgagggcctgcagcggctcggccgctggctggaacagccagaagtgaaggaacgcgcctcgcagctgatcgtgcgctacatccagcgcgaatggccgacgctctcgagcacggtgaactgggtgaagccgatcgatgagatcggcgacagcctggccgagcgcctggcgcgggcggtgctggaagaactgcagcaggtactggccgagccgcagcatccgctgcgccaggactacgagacctggctgcagaactacgtgcagcgcctgcgcgaggacccggccctggccgagcgcatcgaacagctcaagcaggaaatgatcgaccaccccgccctgcaggactatgtgcaagggctgtgggcgcgcatccacgccagcctgcgtgacgacctgcagcgcgaggactcggcgctggtcggacacctgcagcgcagcctcgcctcactgggcgccagcctgcaggccgacccggccctgcgcgaggccctcaaccagcacctgctggaaggtgcgcaacgcctgaccggccgtctgcgcgagggtgtgaccacgcatatcgcgcagaccgtgaagggctgggacgagcggcatctggtcgaacagctggaactgagcgtgggccgcgacctgcagttcatccgcttcaacggcacgctggtgggtgggctgatcggcctgttgctgcatgcggcgacagtggtgttcaggttctag

SEQ ID NO: 492989 - DNA, 879 bp, Stenotrophomonas maltophilia
atggatatcgtcgtcaaagaagaactcaaggcctacatcgacccgctgaccgcggacgaacatgacgcgctggagcgcagcatcctggccgaaggctgccgcgatgcgctggtgttgtgggggaatgtactggtcgatggccataaccgtttcggcatctgccagaagcatggcctgcccttcaataccgtgcagaacacccgcttccagagcatggaagacgtgcacctgtggatgatcgaacagcatctgggccgccgcagcgtgtccgacttccagcgcggcgtgctggcgctgcgcaagcgcgacatcctggccgcccgcaagcaggtcgagcaggcgcagctgcagcgcgagagcgatggcaccgccgacgtcgccgatgagaccagtgaagacagcccgccgtgggaaccggcaccgaagatcagccgcgccgagctggcgcgcgaagccaagctgagcaccagccaggtcggcatgatcgagcgcatccacgcccaggccgccgccgaggtggtggaagcggtcaaggccggcgtgatctcgatcagcgccgccgccgccgtggccgacctgccggaagaagagcagcgcgccgccgccgccggtggcaaggacgagctgaagcaggccgccaagcgcgtgcgcgagtccaagcgcaagccgcgcgcaccgaagccggaagcggccgagatggacttcgaggaaccggacgaggagcagatcgccagccgcgacgccgaggtgctgtcggcgctggaacaactgggcgaggatgccccggcactgcgccgccgcgtcgtcgcgctgacccgcgagaacgacaccctgcgcgcgcagctggctgcgttgcgcaagcaactggaagcgctctga

SEQ ID NO: 492990 - DNA, 1353 bp, Stenotrophomonas maltophilia
atgaagcgttccgcgagcgacctgcacgatctggccacccgacgcccggagtcattggaggcgtactggatgccgttcaccgccaaccgccacttcaaggccgcgccgcgtgtgctggtgcgtgccgagggcatgcactacgaggatgtcgacggccgccagatcctcgatggcaccgccggcctctggtgctgcaacgcgggccatgcacggccgcgcatcgtcgaggccatcgtcgagcaggcgcgcacgctcgactattcgccggccttccagatgggctcgccgccggccttcgccctggcgcagcggctggccgccttggcgccgggcccgctcaaccatgtgttcttcaccagctccggttccgaggcggtggataccgcgatgaagatcgtgctggcctaccaccgccagcgcggcgagggccagcgcacgcgcttcatcagccgcgagaaggcctaccacggggtgggtttcggcggcatggcgctgggcgggctgcccaacaaccgcaagccgttcggcctgcagctgggcggcgtcgactacctgcgccacaccctggacctgccgcgcaacgcgttcagcaagggcctgccacgccagggcgcggagctggccgatgacctggaacggctgatcgcgctgcatgatgcctcgacgattgccgccgtattcgtcgaacccattgccggctcggccggggtgatcctgcccgcaccgggttacctgcagcgcctgcgcgaactgtgcgaccagcacggcatcctgctggtgttcgacgaggtcatcaccggtttcggccgggttgggatgcccttcgccgcgcagcgcttcggggtcaccccggacctgctgaccttcgccaaggcggtcagcaacggcgcggtaccgctgggtggcgtgctggccagcgacgccgtgcatgcaaccctgatgcaggcaccaccacaggccatcgagcttttccatggctatacctgttcggggcacccgctggcctgcgccgcggcgctggcgacgctggaggtctatgccgaggagcgtctgttcgagcgcgccatcgagctgggcgaatactggcaggaacgactgcatgcgctgcagggcctgcccaacgtgatcgacatccgcaacttcggcctggtcggcgcggttgagctggcgcctcgccgcgatgcgccgggcagccggggctacgaggtctaccggcgctgcttccacgacggccgactgctggtgcggtgcaccggcgacatcatcgcgctgtcgccgccgctgatcgtggacaaggcgcagatcgaccagatcaccggcaccctgggcgagatgatccgggccaccgcctga

SEQ ID NO: 492991 - DNA, 1497 bp, Stenotrophomonas maltophilia
atggccgactttcccgaccgcagccactggcaggcgctggcccagcagctttcgatacccggacaggcctttatcgagggtcgttacaccgacgctgccagcggcgcgcgcttcgactgcatcagcccgattgatggtcgcgtgctgggggtggtcgccgactgcgatgcacaggacgtggagcgcgcagtgggcgcggcgcggcgtgccttcgatgcgggccactggtcacaggccagcccggcccatcgcaagcgcgtgctgctggcgttggcggcgttggtggaaaaacacgcggacgagctggccctgctggaaaccctggacatgggcaagccggtgcgtgatgcgcgtcgtatcgacctgcccggcgcggtgcgctgcctgcgctggacggccgaagcggtggacaagctgtacggtgaggtcgcgcccaccggcccgcatgagctgggcctggtcacgcgcgagcccgccggcgtggtggcggcgatcgtgccgtggaatttcccgttgctgatggcgtgctggaagatcgcgcctgcattggccatgggcaactcggtggtgctcaagccttccgagcgctcgcccctgagtgcgttgcggctggcggcgctggccgccgaagcgggcctgccggagggcgtgctgaacgtgctgccgggccacggtgcgcgcgtcggtgagccgttggccctgcacatggatgtggacgtgctggcgttcaccggctccacggccaccggcgcgcggctgctgcagtattcagggcggtccaacctcaagcgggtctggctggagtgtggtggcaagagcccgcacgtggtgtttgccgatgcccccgatctggatgccgctgcgaaggcggtggcacggggcatcttcttcaaccagggcgaggtctgtactgccgggtcacggctgctggtgcagcgctcgatccgcgaggatttcgtgcaccaggtggttgcctacggccagcacatgcagccgcgccacccgcttgacgccgacgcaccgatgggcgcgctggtggatgccgcgcatctggacaaggtgatgggggatatcgtgcgtgccgaaagcgagggcgcccgcctgctgctgggcggtcatcgcgccgatgtcgaggcgggcggttgttatgtgcagcccacggtgttcgatcaggtgagccccgaccaggcattggcgcgcgaggaagtattcgggccggtgctggcggtgctcggctttgacgacgaagccgaagcggtgcgcctggccaatgacagccgctacggcctcgccgccggcctgtggacgcgcgatctgggccgcgcccaccgcgtcgcacgccagctgcgcgccggcagcgtctgggtgaacggctgggatggcggtgacatgaccgccccgttcggtggctacaagcagtccggcaatgggcgcgacaaatcgctgcatgcgttcgacaagtacagcgagatcaaggccacctggatccagctgtaa

SEQ ID NO: 492992 - DNA, 1464 bp, Stenotrophomonas maltophilia
atgctcggctgcatttcgtggaatgtggtcgagcaggggcgaggacctgcagaacaatggcgcctgccaccctcgttggcatcggtgtcggctgaaaccatcgtcccgtgcggccaccggcccgtggcagaatcgggcgatccgccgttacccgtgttgccgatgtcgacgatcaccgctgccgcaccgcccgtgaactctccccgccgcgtcctgttggccagcctgatcggcaccaccatcgaattcttcgatttctacatctacgccacggccgcagtgctggtgttcccgcacctgttcttcccggacagcagcgaacaggcggcgctgttgcagtcactggcgaccttcgcggtggcgttcatcgcacggccggtcggctcggcggtgttcggccatttcggcgaccgcatcggccgcaaggccaccctggtcgccgcgttgctgaccatgggcctgtccacggtgctgatcggtctgctgccgacccacgcgcagattggcctgtgggcgcccgcgctgctggcgctgtgccgcttcggccagggcctggggctgggcggcgagtggggtggggcggtgctgctggccaccgagaacgcgccgccgggcaagcgcgcctggtacggcatgttcccgcagctgggcgcgccgatcggtttcctgttgtcggcgggcattttcctggtgctcggccgctgcctgagccaggacgacttcctgcagtggggctggcgtattccgttcgtggccagcgcgctgctggtcggcctgggcctgtgggtgcgcctgaacatccatgagacgcccgacttcaagcaggcactggagcgcaaggcgccggtgcggctgccgatgtggacggtgctgcgtgaccatccggtggcgatgctgctgggcacgctgggggcgttcgccaccttcgtgctgttctacctgatgaccgtgttcagcctcggccatggcaccgccgtgctgggctacagccgcgagcagttcctgctgatgcagatggccggcatgctgttcttcgcgctgggcatcccgttgtcggcgcgctatggcgaccgctggggcacgcgtcgcacgatgatcgtggccagcgtgctgatcatcggcttcggcgtactgttcgcgccgttgttccagccgcacagtccctggctggtcacggcgttcctgtgcctgggcctgttcctgatggggctgacctacggcccctgcggcaccttcctggccgagatctacccggtggaagtgcgctacaccggcgcctcgctctcattcaacctggccggcattctgggtgcggcgccggcgccgtacctggccacctggctggccgaacgcttcggcctggtcgcggtcggctactacctgtgcctgactgcggcagcgaccctgtgcgcgctggtggccctgcaccggcgcgcgctgcggctcagccaaagaagcgcttga

SEQ ID NO: 492993 - DNA, 462 bp, Stenotrophomonas maltophilia
atggcactactggtctggcaggacgatctgaacatcggcatcgatgtgatcgaccaacaacaccgccgcatcatcgagatgctcaaccatttgcacgtggcccaggccagcatgcagcgtgcggcagtgggcgaggtgatcgacgaagtggtggactacaccatgtcgcacttcgcgttcgaggaagaactgatggaggaagcgggctatccgttctgtgccgcgcacaagcgcgtgcatgaagtcttcatcaagcgggtatcggagtaccgcatgcgcttccaggccggcgaggacatcagcgatgaactgcgcaccatgctctcgcgctggttgttcaaccacatccgcggcgatgaccaggcctacgccgaacaggtcaaggcgcacttgaaccagttcgcccgcgaacaccagggcggcggttggctggggcgcacgctcaagcgcttctttggctga

SEQ ID NO: 492994 - DNA, 1344 bp, Stenotrophomonas maltophilia
atgcccgtcctgccgcaggccgccgtcgatggcgacctggccgatccgctgccgcaacggatcctgctggtcgaaaactcccgtgcgttcaccggcatgctgcgcgaggccatcgagcagcgcctggaactgccggtggtgatcgcttccaccctggccgaggccgatcgcctgctgagcgaggatgggggctggttcctggtactgaccgggctggtgctggccgacggcgaccgcgacgcggtggtcgagttcttcctcaggcgcggcctgcccaccgtggtggtcagcagcgtctacgacgaggatctgcgcaagcgcgtactgcagcagcagatcatcgactacgtgctgaagaacacgccgggcagcatcgactacctggtgtggctggtgcagcgcctggagcgcaaccggcgcattgcggcactggtggtggacgactcgccgtccgcgcgcggctatgccgccgccctgctgcgcatgtatggccacgaggtgcacgaggccgctgacggcaacgagggcctggccgcgatcgaggcgcatcctgcgatccgcctggccgtggtcgaccaggaaatgccgggcatgcagggcgtggagttcacccgccgcctgcgcaccctgcgctcgcgcgacaaggtggcggtgatcggcatttccggcaatgccgatgcctcgctgatcccgcgcttcctgaagaacggcgccaacgacttcctgcgcaagccgttctcgcgcgaggagttcttctgccgggtctcgcagaacgtggatcagctggagctgatcggcacgctgcaggacctggccacccgcgacttcctcaccggcctgcccaaccgtcgctgcttcctggaacagagccagcgccagctgccgcaactgcagctgcatggccagtgcgtggcggtggcaatgatcgacatcgaccacttcaagcacatcaacgacacctacggtcacgaagccggcgatgacgcgctgcgcgcggtggccggtgcggtggccgcgcatgcccgcagccacgacctgaccgcccgcttcggcggcgaggagttctgcctgctggtgccggacatggagcaggacgaggccctgctgtacttcgaggaactgcgccagcgcatcgccgcgctggaagtggacatcggcaccgccagcctgcgcatgacggtgagcatcggcctgtgctgcctgcgcccgcagcgcgatgcactgcatcggctgatctccgaagccgaccgccagctgtacctggccaaggccggcggccgcaaccgggtcagctgcaccacggtggccagcccgctgcgcccgcgcgagcccgcgctgacctga

SEQ ID NO: 492995 - DNA, 1578 bp, Stenotrophomonas maltophilia
atgagaggcgcgggcttggaccgattcaaagaagcaattgaactgagcttccggatccgacccgtcggaatcgcactcgcggccgtctacgccctgggctgccttgcctcgcgtcagttctcgctggatcagttcttcctgcccgcgggcatccgggcagcggcactactgatcgtcccgacccgcctgtggccctacctgctgcttggcgagtacgcgtacttcgcaaccttgcgcattcccatgatcgacagctacggcctggcctgggtcatcctggcctcgacgctgctgatgccggtggcgatgctggtggtctacctgcatcgcattagaatgccatcggagtccgccaccggcctctggttgctgtcgttgaccttctgcatggcgttgttcgtcccggctctcaatatgggcatttcatttgctctgtggtcgaacccaccgccgagcaacctgcttagcgcagttgatcgcacgatctttggccacttcgccgccatcatcaccctcgtgccgttggcattcctctggtcgcgacgacacgcggcccccaattggacgcgccgctttgctgcgcctacggtcacggccatcctggtgatgctggtcctgggcctgtgcatgcagcttacggccatcagcgcccacaccacacgcacccacctggtactgctgtcctccctcccagcgatcgccctgaccttcatgcatgggtggcgtggcgctgccatcgcgattccgctgttgaaccttccactccatttcgccacacccagcaccggcctaccgtcctcgttcgacctgggcaccttcgccacccagcagaacatggccgtgatgagtgtcgcactgctcgccctggggtccagcatcagctatcaccatgagcgtgcacggtgccgtggactggcagaggaaaccacgttgcgcctggcacgtagttcgcaccagacccgtgagcgtgagcttcgcgagcgcgcctcccatctcaagcaactcggcgaaggcatggacagctcgctcggcgagatggtcagctggctgaaggcgcaggggcatcatgcggtggccaacagcctgcagcacgcctcatccgtgcactcgcggctgttccgtgaacaggccagtctggtctaccccacggggctggagcaggttgggctgtatatcgcgctgcgggttagcggcgcatgcgaaagctgggacaactcccatcgcgtgattccgccccggctggagggcaacccctgcctgctgactgtcgacctgcagctcgccatctatcgctcgctgatcgaggcggtgtcgctgctgctggaactggagtcgggacaggtcagcgtgcgcgcccggagcggccaggcgggcgaccggcgcggcatcgtggtggtcgttggcctgcttgaccgcggtcgcacgctgtcgaaccggaccgttcagcaggccatcgagcgtctggccggccggataatggcctacggcggcacggtgcattgccgtggcaaccggctccggctcgtcctgcacgaatcgcttgcgggtacagcggcggcattcgcatcgcctgcctga

SEQ ID NO: 492996 - DNA, 489 bp, Stenotrophomonas maltophilia
atgctgatgcgattggcggtagcatccttcttgatccgtattgcatccaacctggaggtcagtgtgagaagtttccgaattcatgcatttgctggtgcattgatgttggtgccggtatccgtttttgcttttgccccgagtgacgaccatggaatcaagttggccggccaaggactcggccagtcgattccgcaggcacaagacctcagcgtggatcccggctggttggtctatgggttcgagcgcgatggcatggattatttccaggtaaacgatctcgcagggcacgtgcacatcgtgatcggcaatgctgccggcacgttctgggtgctgccggcaggtgacccgtctgcgaaggtgtcgttgccggagcagcgcctgcctgttcccgccaaggccaccagaacggttgtctatcgggcccccgcattcacgctggtcagatatgcaagcggagctgatgtgttgtgggcagtagaggcaccctga

SEQ ID NO: 492997 - DNA, 1593 bp, Stenotrophomonas maltophilia
gtgcgattggactggtggaaagaaggattgttgctgaaggtgcgcattcgtccggctggcctgatgattgccttgctttatgcagttgcctattgggcaacccgacagctgtcgctggatcagttctatttgccagccggcattcgggtggcagccgtgctgttgtgcccgccgcgcctgtggccctacctgctgttgggcgaatatgcgtactttgcacagtcccgcgtgccgatgatcgagaagtacggcctgacatgggtcattgttgcctccgcattcctcatgccagcggtgatgctgattgtgaagctgcaacggcgactgatggcggagtcgcagacgatcggcctcttgttgattgccgccgcttccagcgtcgttattactctgctcaacctcagcttttcccatctgctctggccaacacctccttccacacccttcctgaccaatgccgcgcgcttcagcgtgggtgatttcatcggcattctgacggtggcccccatcgccatgctgtgggcgcggcaggacgtggggcaggagtggaacgctcgacgaaagaccccgatgctggcagcactttcatcgatgctgctgatcgggatagcagcgactcaactgcccgcagactggattgcattgaaggcaacgttcctgctgctgttggcactccccgcggccgcgcttacctgcctgtatggctggaagggggctgcccttgcagtgccggtgctcaacatggtcatcggcctgaccacgcccaacacccatcccaccgcattcgatccagcggccttcatcacccagcagatcatggcgatcagcggcatcgtattgctgctgctcggatcacgcatcacccacttctaccaccgttacaggctgcgcgagatgggggaaagggacgccatccatttggcgaggagctcgcaattggccagcgagatggagctgcgtgaacgtgccctgcaccttcgcaagctcggcgacggcattgatacgtcgctggttgagctggccgaatggctcaaggcccagggacatcacgcagtggccaacagccttctgcatacctcgaatgtacattcgcggctctttcgcgaacagacaagcatggtctatccctcgggcctggagcatcttgggctttacgtggccctgcaggcgggtggcatccgtgagtcgtggaagctgacggagcgcgttctccgcccggatctgaaaggcgacccctgcaacctgagcgtggaactgcaattggccgcttaccgaacactgattgatgcggtctccattcttctcaagcatgaaggtggtcagattcgcattcgtgcaaggtgcggcggaatgggctccaggcgcggaatcctcatggtcgtgtcactgctggaacagcgcagacgcctttcccagcagacaaccatggcagcgttcgagcgactgaccgggcgaaccctcccctatgacgggaccgttgactgctatcgcaaccgggtcaggattctgttcctcgaccgcgaaaccagactggaggcagtagccagtactccatcgcggtacggctgccccgcaccctctgcgctgcagtag

SEQ ID NO: 492998 - DNA, 1278 bp, Stenotrophomonas maltophilia
gtgagtgccgcgttcccgcccagctggtacgccgccagcctgcccgaaccgcccgcactgcccccgctgcaggggaatgtgcaggccgacgttgcggtgctcggtgccggctataccggcctgaccgcagccctggaactggccgcgcgtggccagcgggtcgtgttgctggaagcgcagcggatcggctggggcgcgtccggccgcaatggtggccaggcgctggtcggctatggctgcgaggtcgacgaactggagcgtcagctcggccgtgaagatgcgcgccacctgttcgactggtcgcgcgacgcggtgcaggcgatgcgcacccgcatcgatcgccacggtatcgactgccactgggtggagggccacgccagcgtcgccatccgcgagcgccatgagcgcgacctgcgggccaactgcgagcacctgcaacgccattacgactaccccatgcagtggtgggagcgggatgccctgcgcgcgcagctggacagcccgcgctaccgcgccgcgatgttcgatccgctcagcgcgcacctgcatccgctggcctatgcgcgtggcctggccgacgccgcgcgcgcagccggcgtggtgatccacgagcattcgacggtaacccgcgtgcagcgtgggccgcagcctgccctgcacaccgcgcagggcagcgtgcgcgccgcacatctggtggtggccggcaacgcctggctgcagggcctgctaccggagctggaacggcggatcatgccggtcggcacctatatcggtgccagtgagccgatcggggccgagcgtgcccgggcgctgatcggcaacaacatggcggtggccgataccgcctgggcactggactacttccgcctcagccacgaccaccggctgctgttcggtggccgtgccagctattcggcgctgccaccgcccggtctgcgcagggtgatgcagcggcgcatgcaccaggtgttcccacagctggccgacgtggccctggaccaggtctggggcggctacgtcgacatcacccgcaaccgcgccccgcactggggccggctggacggcaatctgtacttcgcgcagggcttctccggtcatggggtggccgccgccgggctggccggcgaggtgatcgcggccgccatcgccggccagagcgagcgcctggacgtattccagcgcctgcggcatgcgcccttccccggcggccggctgctgcgcacgccactgctggtggcggcgatgtcctggtacaagctgcgggatgcattgtggtga

SEQ ID NO: 492999 - DNA, 762 bp, Stenotrophomonas maltophilia
atgcgccgcctgccctgggtgggcctgcccaccgacagcaccgtgctcggccatcaccgtttcgcggtggccggcgagaagtacgtgcgcgcgctggccgaggcggccgaggtgactccggtagtgttgccgagcctgcagccaccgctgccggccggcgactggctgcaggggctggatggcctgctgctgaccggcgcggtcagcaatatcgaaccgcagcactacgaaggtggccgcagctggccaggcaatccacatgacccggcccgcgatgccaatgcctttgcgttgctgcacgaggcactggcgctggacctgccggtgctggcgatctgccgcggcttccaggagttgaacgtcgcgctgggcggcagcctgcatccgcaggtgcacgcggtgcctggcctggccgaccatcgcgaagaaccgcaggcgccggtggaggtgcagtatgggccggcgcacgcggtcacgctggctgccgatggctggctggcgcagtggcacggcagtggccgcgcgcaggtcaattcggtacacgggcagggtgtcgcccgcctggcgcaggggctgcaggtcgaggccgtggccgacgatgggctggtcgaagcggcacgcagcctgcaccatcgtttcgtgctcggcgtacagtggcacccggagtggcgtgtcatgcaggcgccgttctatcacgctattttccgtgcgttcggccaggcttgccggcagcaccaacagaaccgactggattcccgatga

SEQ ID NO: 493000 - DNA, 1398 bp, Stenotrophomonas maltophilia
atgagttcccgaacgcgcccgcgcaagacggccacgccccccgcaccgcaggaaagcacgctgctgcgctggctgaaggagcggcgcatcaccgaggtggaatgcctggtgccggacatcaccggcaacgcgcgcggcaagatcattcccgccgacaagttctcgcacgactacggcacgcgcctgcctgagggcatcttcgccaccaccgtcaccggtgagttccctgacgattattacgagctgacctcgccgtcggactcggacatgatgctgcgccccgatccggacacggtgcgcatggtgccgtgggcggccgacgccaccgcgcaggtcatccacgattgctacaccaagagcggtgagccgcacgaactggcgccgcgcaacgtgctgcgccgcgtgctggcagcctacgccgagctgggcctgcgcccggtggtggcgccggaactggagttcttcctggtgcagaagaacaccgacccggacttcccgctgctgccaccggccggccgctccgggcgcccggagaccgcgcggcagtcgtactcgatcgatgcggtcaacgagttcgacccgatcctcgacctgatgtacgactacgccgatgcgatgaagctggacgtggacacgctgatccacgagtccggcgcggcgcagctggaggtcaacttcacccatgccgatgcgatggacctggccgaccaggtgttcctgttcaagcgcaccatgcgcgaagcggcgatgcgccacggggtgtatgccacgttcctggccaagccgatggaaaacgagccgggcagtgccatgcacatccaccagagcctggtgcgggtgagcgatggcagcaacgtgttcgccggcgagaccgatgccgagggcgagttcagcccggtgttcggccactacctgggtggcctgcagaagtacgcaccgcaggcgatggcgttcttcgcgccgaacgtgaactcctaccgccggctggtgttcggcgaagtctcgccgagcaacgtccactggggcttcgacaaccgcacctgcggcctgcgcgtgccgctggatacgccggagaacatgcgcgtggagagccgtttcgccgggtccgatgccaatccctacctggcgatggccgcgaccctggcctgcggcctgctgggcatccgcgagcggctggcaccggatgcgccggtgaccggcagcgccaaggaactggggtacaacctgccgcgctcgctgggcgaggcgctggatgggctggagcagtgcagcgagctgcaggccctgctgggcgagcgcttctgccgggcctacatctcggtcaagcgcaaggaatacgagacctttttccgcgtcatcagctcgtgggagcgcgagttcctgctgctgaacgtctga

SEQ ID NO: 493001 - DNA, 1110 bp, Stenotrophomonas maltophilia
atgaagctgcgtatcctcacgctcggcctggcctccgccatgctcgccgcctgcagcggtggcaacggcggcgcgcaggacagccaggtcctgaacgtctacaactacagcgattacatcgccgaggacaccattccgaccttcgagaaggagagcgggatcaaggtgacctacgatgtgttcgacagtgacgagatggtcgagaccaagctgctggccggcaacagcggctatgacgtggtggtgccgaccctgaacttcttcggtcgccagatccaggccggtgtgttcctgccgctggacaagagcaagatcccgaacctggccaacctcgatccggcggtgatgaagcgcatcgccacccaggacccgggcaaccagtacggcgtgccgtacatgatcggcaccaccggcatcggctacaacgtggacatgctgaagcagcgcttcggcggcagcgccgacatcgccaacagctgggacctggtgttcaagccggagaacatcagcaagatgaaggactgcggcgtgaccatcctggacacgccggcggacatgatcccgatcgcactgcattacctgggcctggacccgcacagcggcgacccggccgagctgcagaaggccgccgacctgctgaagtcgatccgcccgtacgtgcagaacttccactcctcgcagtacgtgggttcgctggccaacggcggtacctgcctggtggtcggctggtcgggtgacatcatccaggcccgcgaccgcgccgaggaagccagcaatggcgtgcacgtggcctattcgatcccgaaggaaggcgcaccgcagtggttcgacatgctggcgatcccgaaggacgccaagcatccggaagccgcgtacgccttcatcaactacctgctgcagccgaaggttgccgcggccaacaccaacttcatccactacgccaacccggtgccgaccgcgaccccgctggtggacgaggcgatccgtaccgacccgaccatctacccgccggccgacgtggccgagaagatgttcacctactcgatcaacacgccggagaccgacaagctctacacccggctgtggaccgaggtgaagaccgggcgctaa

SEQ ID NO: 493002 - DNA, 1137 bp, Stenotrophomonas maltophilia
atgcccgttgaagcccagccggtagccgccgtcgtcgacacgaccggtgcgcccggctatctctccattcgtgatttgcgcaaggaattcgacggtttcgtcgccgtcgacgacgtcaatctggacgtgcgcaagggcgagatctttgccctgctcggaggctccggcagcggcaaatcgaccctgctgcgctgcctgggcggcttcgagacgcccaccaagggcagcatcaccgtcgatggccagcgcctggacgcgctgccgccgtaccagcggccggtcaacatgatgttccagtcctatgccctgttcccgcacatgacggtggagcagaacattgccttcggcctgaagcaggatggcctgggcaaggacgcgatcagcaagcgcgtcggcgagatgctcgacctggtgcagatgggccacctgggcaagcgcaagccgcaccagctgtccggtggccagcagcagcgcgtggcgctggcgcggtcgctggccaaggggccgaagctgctgctgctggacgagccgatgggcgcactggacaagaagctgcgctcgcagatgcagctggaactggtcagcatcatcgagtcgtcgggcgtgacctgcgtgatggtcacccacgaccaggaagaagcgatgaccatggccacccgcatcgcggtgatggatgccggctggatccagcaggtcggcaagccggacgaggtctacgagcagccggccaaccgcttcgttgccgagttcatcggttcggtcaacctgtttgacggggtgatcgacgaggacctgcccgagtacgtgaccgtgcgctcgccgctgttcccggcaccgatctacatcgcccatggcatcacctgttacgaagggcagccggtcgcattcgcgctgcgcccggagaaggtgatgatcggcaaggacgagccggatgggcacaccaacaaagcgcagggcgtgatcgaggacatcgcctatttcggcagccattcggtctaccacgtgcggctgcccagcggcgccaaggtgctggccaatttcgccaattcgcagcgctgggccagcgatggcctgacctggggcgacagcgtgtgggtgcactggcgcgacaacgacggcgtggtgctgacctcatga

SEQ ID NO: 493003 - DNA, 933 bp, Stenotrophomonas maltophilia
atgagcgtcgccggcctgaagcgctggcggccggggctgcgtgccacggtgatcggcattccgtacctgtggctgctgctgttcttcgcagtgccgttcctgatcgtgctgatgatcagcttctcgctcagccgggtcggctcgccgccgtatacctggctgctgcagtacgccgacggcggcttctcgctgaagctgaacctggagaactacctggcgctgttccgcgattcgatctatgcgcaggcgttcctgagctcgatcaagatcgcggcgatctccaccttcttcaccctgctgatcggctatccgatggcctatgccatcgcgcgcctgtcgccggccgcacgcaacgtggcgatgatgctggtggtgctgccgtcgtggacctcgttcctgatccgcgtgtatgcgtggaaggcaatcctggaccgcaatggcctgctcgaccagttcctgcagttcactggcctgcagacgctgatgacgtcgatggggctgccgaaactgcagctgatcgatacgccgaccgccgcctatatcggcatcgtctactgctacctgccgttcatggtgctgccgctgtacgccaacctggtcaagcatgaccaccgcctgctggaagcggcctacgacctcggcgccaagccgtggcaggcgttcctgcgcatcacgttgccgctgtcgaaggccggcatcatcgccggctgcatgctggtgatgatcccggccgtgggtgaattcgtgatcccggaaatgctcggtggttcggagacgctgatggtcggccgccagttgtggaacgagttcttcaacaatcgcaactggccgggcgcttcggcgatggcggtggcgatgatcctgttgctgctggtgccgatcctgctgttcaaccgttcccagcagcgcctgctggaagggaagcaggcatga

SEQ ID NO: 493004 - DNA, 843 bp, Stenotrophomonas maltophilia
atgagcccgcgtaccgccaagggcctggggctgggcgtgctgctgctcggcttcgccttcctgtacctgccgatcctgttgttgatgttctactcgttcaacagctcgcggctggcgatggtctgggccgggttctccacccgcgcctacagcgacctgttcgccgaccgcgcgctgatggacgcgatgtggaccagcctggtggtggcgttctggaccgcctgtaccgccaccgtgctgggtacgctggcggcgatggtgatgacccgcttcaagcgattccgtggcaagccactgttcggcgcgctggtgaccgcgccgctggtgatgccggacgtgatcctgggcttctcgctgatggcgctgctggcatcgatgggcgcgattcccggcttcccggcgcgtggcctggccaccatctggatcgcgcacgtgaccttcaccctctgcttcgtcaccgtagtggtgtcctcgcgcctgcaggaaatggacctgtcgctggaagaagcggcgatggacctgggcgccagccggttgaccgtgttcacccgcatcaccctgcccatcatcgcgccggcgctggtggcgggttggctgctggccttcaccctgtcgctggatgacgtggtggtggccagcttcgtggccacgccgggctcgaccacgctgccgatgaaggtgttcgcttcggtgcgcatgggcatcagtccgaagatcaacgcgttggccacgctgctggtgtcggcggtgtcgatcgctgcggtgatcggctggtacatcaacgcccgcgccgagaagcggcgccagcgcgacctgcagctggcgcggcaggacaacggctga

SEQ ID NO: 493005 - DNA, 1365 bp, Stenotrophomonas maltophilia
atgaccgtcgagatcatcgacccggccaccggccaggtgacctaccgccatgaactgatgggcgctgctgacatcgagcagcgcctgcaggctgccgccgatgccttccccggctgggccgatcgctcgctgcaggatcgcggtgccgtccttcgccagatcgccgcgcagctgcgcacgcgtcgcgacgacctgcagcaggcgatgacccatgagatgggcaagctcaaggccgaggcgctggccgaggtcgacaagtgcgctgccgcctgcgagtactacgccgaccacgcggccgactatctcaagccgcagctgatcgacaccgaagcccagcgcagctatgtgcgctacgagccgatcggctgcgtgttcgcggtgatgccatggaatttcccggtctggcaggtgttccgtttcctggccccggcgttcatggctggcaacgtggccttgctcaagcacgccagcaacgtgccgcagtgcgccgacctgatcctggcggtgtgtcgtgacggaggcctgcctgatggcgtgttcgacgtgctgcacatcgacaacgaccaggctgccgaggtgctgcgcgacgcacgggtgaaggcggtgacgctgaccggcagcgaacgggcagggcgctcgatcgcgtccactgcaggcagccagctgaagaagtcggtgatggagctgggtggcagcgatgccttcgtggtactcgacgatgccgacctcgacaaggccgtggcggcggcggtgaagtcgcgtttcgacaacagcgggcagacctgcattgcggccaagcgcttcatcgtggtcgatgcggtggccgatgacttcacccgacgcttcgttgaagccgcaggcgagcgccagtacggcgatcccagtgagcgtggcaccacgctggcgtcgatggcacgcgcggacctgcgcgatgagctgcacaaacaggtgcaggccagcgtggcgaaaggtgcgcgcgttctggtcggcggcgagcccattgccggcacccatgcgggctatccggcgaccgtgctcgatcaggtcggcccaggaatgcctgcctacgacgaggagctgttcgggccggtggctgcggtgatccgggtcaaggatgaggccgaggcgctgcgcgtggccaacgacacccgcttcggcctgggcggcagcgtgtggacgcgcgacccggtgcgcggcgaagccttcgcgcagcgcatggaatgcggcgccgcgttcgtcaacgccatcgtcaagagcgacgctcggctgccgttcggtggcagcaagcagtccggcttcggccgggagctggccgaccacggcatccacgagttcatgaacatcaagaccgtctacgtggcttga

SEQ ID NO: 493006 - DNA, 1023 bp, Stenotrophomonas maltophilia
atggcgggcatgtcattgcccgcctccgcttccgcccctgcctcggccaaccccgcctgcgtcatcaactgcgtccactacgatgacgacggcaaacgccacgacatcagcctggatgccatcagcgatgtcattgccagtggcaacggcttcgtctgggtcggcctgtacgaccccaacgacgatgtgctgctgaaactgcaggaagagttctgcctgcacgacctggccatcgaggacgcgcgcaatgcgcaccagcggcccaaggtcgagacctacggcaattcgctgttcgtggtggtgaccaccgcgcagatggtggacgaacgcatccagtacggcgaaacccacgccttcctcggcccgcgtttcctggtgacggtgcgccacggcgcctcgctgtcctacgccccggtgcgtgcacgggtcgagcgtgaaccgcagctgctgaagatgggcccgtcgtactgcctgtacgcggtgaccgacttcgtggtcgacaactacctgccgatcgtgcaccgcttccgcgacaccctggacctgctggaaaaggacatctttgccgacagctacaagcgcagcacggtggtacggctttacgagctcaagcgcgaactgaacaagatgcggatggcggtggcaccgctgcaggatgtgctggcgcagctgcgccgctaccagggtgacctgattcccgatgaagtgaagctctacgtgcgcgacgtgcatgaccacgcggtacgcatcagcgatgtgatcgacaccctgcgcgagatgctgggcaccgcactgagcgtgaacctgtcgctggtgacgctggcgcagggcgagacggtcaagcgcctgggtgcatgggccgcactgctggcagcgccgacgctgatcaccagctggtacggcatgaacttcagccacatgcccgagctgagccagccgtggtcgtatccgctgatgattgtcggcgtgggcggtgtgtgcgtcggtctgtaccggttgttcaagcgcgcgaagtggttgtag

SEQ ID NO: 493007 - DNA, 1260 bp, Stenotrophomonas maltophilia
ttgaagcgcggcgccctcctggcactgcgcctgaggctgtggctggcactgtgcgtgctggccacggccctgccgctggccgccttcgcgcagccggcggcacccgctcctgctgcacccgccgccagcgccgaggctcccgccccgcgcatcggggtggtgaccatgcagccgggcacggtgttcttcgagcgcttcggccacgacgccatcgtcgtgatcgatccgctcagcggcgaagcgacctcgtacaacttcggctacttcgatccgtccgaggacgatttcatcagccgcttcgtgcgcggcgacatgatgtactacctggtggcgctgccgctgcagcaggacctgtcgtactacgacgagaccggccgcggcgccagcgtgcagtggctggacctgcgccccgaccaggcacgcgccctggccgctgacctcgccgagcgcgccaagccggagaacgcgcgctaccactacgactactacaccgccaattgcgccacgatggtgcgcgacacggtggacaaggcgctggatggcggcctgcagtcgcagctgtcggggcgttcgcgcggcaacacctatcgcagcgagtcggtgcgcctggcctcgccggcaccgtggatgtggctgggcttcgatgtcggcctcgggccgttcgccgaccagccgctgtcgcgctggcaggaagccttcgtgccgatgcgcctggccgacgcgctgcgccaggcgcgcaacagcgacggccggccgctggtgcagtccgaacaggaactgctgccgcaccgcatcgacccggagccgaaggaattcgcacgccgttggtggccgtggctgctgcttgggctggtcgtggccggcggcatactggcgctgcgcagccggccgcgcctgcttgccgggctggccctgccgttctggctgctgtgtgccatcgccggcagcctgctggtgttcctgtggggcttcagcacccactacgccgcctgggccaaccgcaacctgctgctgctttcgccactggccgtgctgttgctgccaggcgcgatcgcgctgctgcgccggcgcgcgccgggccgcatgttcagggtcgtgctgtggctgctggcggtgcaggccgtggcggcgctggtgctgcactggctgagcctgcaggcgcagtacaacgtgcagtggatcgtgcttctgctgcccgtccacgtcgcgctggcgtgggtactggggcgccgtcctcacttgtccgaaacacggcactga

SEQ ID NO: 493008 - DNA, 882 bp, Stenotrophomonas maltophilia
atgtcagaagacgacagtagtagctccgcacaggagcccagtgaaaagaagcgcggctggcttgaacgcctgacctccgccttctccggcgaaccccatacccgcgacgagctggtcgctgtcctgcacaccgcgcaggaagagggcctgatcgccgccgataccctgaagatgatggaaggcgccatttcggtggccgagttgaccgtgggcgacgtgatgatctcgcgctcgcagatggtttcgctgccggtcgaagcgcccttcctggaactgatgaagcaggtggtcgaatccggccattcgcgcttcccggtgcacggcgagaacaaggacgacatccttggcatcctgctggccaaggacctgctgcgcggcgtggtcgccgacaacggcccggccaacgtgcgcgagctgctgcgcccggcagtgctgatcccggaggcgaagaagctcaacgtgctgctgaaggaattccgcctgtcacgcaaccacatggccatcgtggtcgacgagtacggcggtgtcgccggcctggtcaccatcgaggacgtgctggaacagatcgtcggcgagatcgacgacgagcatgacgaggccgaggatccgtcggcgcagatcgccatccagtccgacggccagtacgtggtcgacgcgctgaccccgatcggcgacttcaacgaacgcttcggcgctaccttctccgacgaggactacgacaccatcggtggcctggtcaccgaggccgtgggccacctgccggaagtcggtgacgagctggcgctggaccgcttcatgttccgcgtggcccgcgccgatgcgcgccgggtccaggccttccacgtgaccgtgctgccgccggacgcgcaggacgacgcttga

SEQ ID NO: 493009 - DNA, 570 bp, Stenotrophomonas maltophilia
gtgctgctgcgtattgccctgcccctgctgctcgccgtgtccgccccggccgctgccctggacctgccggccctgattgaatgccgccagggcgtggccgagcaggccgcgctggcgcccctgctggctgatccactgagagccgtcgcccacggcctgcagccgctgccgcagggcaaccagttcatgagcgagtaccggctggcccagccgatcagcgtgttcggcgcccgcaccgaacgggtcgccgtggccgggtccagcgtcatggcgatcctcgaccaggccgatccgcggccgctggccgggcggctggggctggagaccggctacgaccaggacggcaagttcatggccggccgcgagctggtcagccgcgacgtgaccgatccgaagaccggcgaggcccggatcgagtcgatcatcctcagcgtctccaccgtggcctcccatcccggcaaaaccctggccggctgcacctacagcctggacctgcccgaggaagaagcccccgcccggcctgaactggccccgccgccgatcaccggaccgggcagcgacggtcactga

SEQ ID NO: 493010 - DNA, 486 bp, Stenotrophomonas maltophilia
atgacccgtggtcccgtgcgactggacgtcgccgtcagttatgccctgccgcgcaccggcctgccggcggcggtcagcttccgcaagtgggtggctgctgcgctgaaaggccgcatccgcgaagccgacctggccatccgcgtggtcgatgccaaggaagggcagtcactgaaccgccattatcgcggcaaggattacgcgaccaacgtgctcagcttcccggccgaagtgcccgaagggctgcccaagggcgtgaagtttccgctgctgggcgacctggtgatctgcgcaccggtggtggcccgcgaggccgatgaacagggcaaggcgctcaacgcccactacgcacacctgaccgtgcacggcgtgctgcacctgctcggctgggaccacgaggacgacaaggaagccgacgccatggaacagctggagcgcgagatcctggccgagctcggcatcgccgacccctacgccggcgagcgctga

SEQ ID NO: 493011 - DNA, 987 bp, Stenotrophomonas maltophilia
atgaaaagcatcgaacatcgagacttcaccctgtcgccggaagacaccgagcggctggccaacctgtgcggccccttcgatgggcacctgcgccagatcgagctgaagctcggcgtggagatcgccaaccgcggtttcgtgttccgcatcagcgggcccaacgaagccatcgtcgaggcgcagaagctggttgaagcgctgtacgccgaagccggcgaaaccaccttcgacaaccacgccatccacctgcgcctggcgcaggccaacgtcgagcagatcgccgaacgctcctacgaagcgcaggaggtggcgatcaaggtcaagcgcggcacggtgcgcggccgcggtgccaaccaaggccgctacctgcaccagatcgccacgcatgacatcaacttcggcatcggcccggccggcaccggcaagaccttcctggccgtggccagcgcggtcgaagcgctgaacgaatcacgggtgcagcgcctgatcctggtgcgcccggcggtggaggccggcgagaagctgggcttcctgcccggtgacctgagccagaaggtcgacccctacctgcgaccgctgtacgacgccctctacgagatgatgggcgtggagaaggtggtcaagctgctggaaaagaacgtcatcgaaatcgcgccgctggcctacatgcgtggccgcacgctcaacgatgccttcgtgatcctggacgaagcacagaacaccaccatcgagcagatgaagatgttcctgacccgcctcggctacggttccaccgccgtggtcaccggcgacctgacccagaccgatctccccaagcacgtgaagtccggcctgcgcgatgccatcgacgtgctgcgcgaggtcgagggcgtcagcttcaccttcttcgagtcgcgcgacgtagtccgccacccgctggtggcgcgcatcgtcagcgcctacgatcgccgtgacctgcatcagatccaacctggagcaactccatga

SEQ ID NO: 493012 - DNA, 957 bp, Stenotrophomonas maltophilia
atgggcatcggcaacgggatgcgtggaatcggattggtgggtatcggcctgctggcagggtgtgggcaggcgccgcctgcagcgctcggcacgctggaatgggaccggatcacggtgccggcgccggcggccgaagtgatcgccacggtggaggtgcgcgagggccagcaggtcaaggccggagcagtgctgatgcagctcgaccccgcccgcggcgacgcgcagttcgccgcggcgcaggccgacacggtgcgcgcgcaggcccagctggaagaactgaagatcggtccgcgccaggaacagatcgcgcaggcccaggcgcagctggccgcgttgcgcgcgcagtctgctgaagccacggcctactaccgtcgggtgcaaccgctggcacgccagcgcctgatcgccgccgccgagctggaccgtgcacgggcggctgccggcaatgccgaggccagcgtgcgggccgccgagcaggtttggctggaacgggtgcacggcagtcgcgcgcaggacatcgcccagggccaggcggccgccgacgccgcacaggcgcagcaggtggtgcagggcgtcaacctgcagaagctgcagctgcgcgcaccgcgcgatggcgtggtcgatgccttgccctaccggcagggtgaccaggcaccgatcggggcgccgctggcggtgatgctggttggcgagcgcccctatgcacgcgtctacctgccgcagccgctgcgcctgcaggtcaaggtcgggcaggccgcgcaggtacagctggaaggcggcagcaccgtgctgaaggggcacgtgcgctcaatccgcagcgagccctcgttcaccccgtactacgcactgaccggtgatgacgtcgagcgcctgagctatctggccgagatcgaagtggacacggccaccgacatgcagaagcttccggccggactgccggtgcaggtgcgcttctga

SEQ ID NO: 493013 - DNA, 924 bp, Stenotrophomonas maltophilia
gtgcatgcgcagggcttgacccgccgcttcggcgatcttctggccgtggacaatgtcgacctgaccgtgccgcgcgggcaggtgtacggcttcctggggccgaatggatccggaaagtcgaccaccatccgcatgctgtgcggcctgctggaaccgagcgctgggcagatcgaggtgctggggctgcaggttcccgagcaggccgaagcactgcgccggcgcatcggctacatgacccagcgcttctcgttgtatgaggacctgtcggtgcgcgagaacctggaattcctcgccgccatccaggatctgccacgcgcgcaggcccggcagcgggtcgacgagctgctgcagcagtaccgtctgctggaccggcagccgcagctggccggaaccctcagcggtggccagaagcagcgcctcgccctggccggcgccgtcgtgcacgcgcccgagctgctgttcctggacgagccgaccagcgcggtcgatccggaatcgcgccgtgatttctgggaagccctgtttgaacttgccgacgccggtaccaccgtgctggtgtcgacccactacatggacgaggccgagcgctgccaccggctggcaatcctggaccgtggtgcactggttgccgatggcacgccgtctgagctgtgcgcacggctggacggccgcacgttgcaggtcacgtcgtcgcagccgcggcaggccagccgcgcactgtctgagctgcccggtgtgctgagcgtggcgcagatcggcacccagctgcgcgtgctgtgcaatgagggcgcagcggacgtcgcagtgctggcccgtgcacttgccaacgctgacccgcaggcccgtatcgagacggtggcgccgaacctggaagatgtgttcgtggccgccacccgtggccgcggccgggagccggcggcatga

SEQ ID NO: 493014 - DNA, 1113 bp, Stenotrophomonas maltophilia
atgaacctgcgccggctgtgggcgatcatgctcaaggagctgcggcagctgcgccgcgaccgcatcacgctggcgatgatcgttggcattccggtgatgcagctgttgctgttcggctatgcgatcaacctcaacctgcgtcatctcgatgcgggtgtcgccgatcaggccaacagcgccgcttcgcgcgcgctggtgcaggacatggtggccaccggcgtgatcacgccgcgcagcgaagcctacacgcctgcccagctgatgcaggcgctgcgccgtggcgagatcagtgtcggcatcgtggtgccggccgacttcgagcgtcgccgcttcgatggacgcgaggcggtgcaggtgctggtcgatggcagcgacaccgtggtgcagagcgcggcgatccagctggcgcaggtgccgctggacacgcgcccgaccagcaacacccgtcccctgcgcgaaggcagcatcgccagtggtccggtcagcgtgaccagcttctacaacccgcagcggcgctcggcggtgaacatcgtaccgggcctgatcggggtgatcctgaccatgaccctggtgatgttcacggcggtagcggtggtgcgcgaacgcgagcgcggcaacatggaactgctgatcgccacgccggtgtcgcgcagcgagctgatggtcggcaaggtgctgccctatgcggccatcggcctgctgcagaccacgctggtgctggtgctgggcacctggctgttccaggtacccattcgcggcagcctgctggacatctatctggccgcggtgctgctggtgctggccaacctggcgctgggcctgctgatctccacgcgtgcgcgctcgcagttccaggccatgcagatgacgctgttcctgttcctgccgtcgatcctgctgtcgggcttcatgttcccgttcgcaggcatgccgcggccggtgcagtggctggccgaggtgctgccgctgacccacttcctgcgcctggtgcgcggcatcatgctgcgcggcgcctcattgtgggagctgtggcacgacgcgctggcgctgctggccttcatcgtggtgatgatgaccctggccatcctgcgtttccgcaagcgcctggattga

SEQ ID NO: 493015 - DNA, 1419 bp, Stenotrophomonas maltophilia
atgaccgggacgccagacgtctttccgcccaccacaccgggcggtaccccgctcgttgccctgcccgctggtccgcgcaagcccgaccaggtgaaaggcaagctgtacatcaagacccacggttgccagatgaacgagtacgactcggccaagatggccgacgtgcttgccgccagcgatggcctggaactgaccgacagcccggacgacgcggacgtcatcctggtcaacacctgctccatccgcgagaaggcgcaggagaaggtgttcagccagctgggcgtgtggaagggcctgaagaacaagggccgcgaagtcatcattggcgtcggcggctgcgtcgcctcgcaggaaggcgaagcgatcatcaagcgcgcgccgttcgtcgacctggtgttcggcccgcagaccctgcaccggctgccggagctgatccgcgcacgccgcgaacagaagcgcccgcaggtcgacatcagcttccccgagatcgagaaattcgatcgcctgcccgagccgcgcgccgaaggagcctcggcattcgtgtcgatcatggaaggctgttccaagtactgttcgttctgcgtggtgccctacacccgcggcaccgaagtcagccgcccgttcgaggacgtggtggtggaggtggcgcagctggccgcacagggcgtgcgcgagatcaacctgctcgggcagaacgtcaacgcgtatcgcgggccctatggtgacggtgagttcgccgacctcggcctgctgatccgcaccatcgccgagatcgatggcgtcggccgcatccgcttcaccacctcgcatccgctggagttcagcgattcgctgatcgatgcgttccgtgacgtgccacagctggccaacttcctgcacctgccggtacaggctggcagcgaccgcgtgctgtcagcgatgaagcgcggctacaccgcgctggaattcaagtcgaagatccgcaagctgcgtgcggtgcgcccggacatctcgatcagctcggacttcatcgtcggcttccccggcgagaccgatgccgacttcgagaagaccatgaagctgatcgaggacatcggcttcgaccacagcttctccttcatctattcgcggcgcccgggcacgccagccgcggacctggaggacacgatcagcgatgccgaaaagcacgcgcgcctgtcgcgcctgcaggagcgcatcaatgcgcatgccgctggcatttccgagaagatggtcggcaccgtgcagaccgtgctggtggaagggccctcgcgcaagaacccgaacgagctgaccggcaagaccgagaacatgcgttcggtgaacttcccggcgccggcgcgattgatcggccagttcgtggatgtggtgatcaccgaagcgctgaccaattcgctgcgcgcgcgggtggtggcggaatga

SEQ ID NO: 493016 - DNA, 618 bp, Stenotrophomonas maltophilia
atgaattcacgccagatcaccctgtaccacgccgcccgttcccgctcgagcggcgccgtggccctgctcgaagcactgggtgccgactaccgcatgcaggtgctggacctgaaggcgggcgccaacctggccccggcctacctggccatcaacccgatgggcaaggtgccggcgatcgtccacaacggtgcgctggtgaccgagcaggtggcgatctatctgtacctggccgacctgtatccggaggccggcctggcaccgccgatcggcgacgccctgcgcgggccctacctgcgctggatggccttctatggcgcctgtttcgagccggcgatgatcgacaaggcgatgcaccgcgagccgccgccgcgcctgatgtcgccgtataacgacgccgagaccgtgctgcaggtgatcgaggcccagctggcgcagggcccctacctgctcggcgagacgatgagcgccgccgacgtgctgtggggcaatgcgctggcctggaccacggccttcggcctggtgcagcctgcaccggccacggctgattacattgcacggatgagcgcgatgaccgccttcgaccgttcgcggcagatcgatgcggaactggcggcgtaa

SEQ ID NO: 493017 - DNA, 969 bp, Stenotrophomonas maltophilia
atgcgccacaccgcccatcgactgctgcgcctgatcgccctgctgcaggcccgccgccagtggtccggggctgaactcgccgagcgcatgggcgtggaccggcgcagcatccgccgtgacgtcgagcgcctgcgcgagctgggttatccggtccgggcctcgtccggggttggcggcggctaccagctgggggcaggggcgccggtgctgccgatgctgctggacgaggaggaggcgactaccctggccatcgccctgcgcgcggcctctgcgaccgtcgccggcatcgacgacaccgcgcgtggcctgttgtccaagctcgatccgctggtgccgacccgtcgccgccagcaggccggcgaggtgcatgccgccaccgccaccctgtccgaccttccgtccaccgacgcacgcctgctcgggcggctggcccagcactgccggcaggcgtcacggctggccttcgaataccgcagtgcccaggaagcggtgacccagcgcgaggtcgaggcgcagcacctggtcaactacgggcggcgctggtacctgctggcctgggacctgggccggcaggactggcgcaccctgcgcgtggaccggatgggcgcggtgcgcgaatgcgccgagccgggcatgcaccgccgtacgcccgcaccgccagatgtgatggtgcggcaggcggtcagccaggccccgttcgccctgcaggccatcgtccgcctggccggcagccgcgccgagctggaatgccgcatcccgccctggtgtggtgtgctggaggacgatgggcccgaccattgcctgctgcgcatgggcgccgagagccgcggcatgatgctggcgcagatcctcagcctggaccgggtgccggtggcggtgtggaccacgccgccgggcctgcgcgatgaactggcacagcgcctggccggattggggcaggtgctggctgtgccgcccgtcacaggctga

SEQ ID NO: 493018 - DNA, 906 bp, Stenotrophomonas maltophilia
atgaaggggataccgggaacaacggcgatcatcatcgctgcgctgaccgctgcgccggccagcgcgggcaccctgttcaagtgccagggcgccgacggggtcaccagctatgtcagcaagcgcctggccggggcccgctgcagcgccatcagctacagccgcgacctccgcccggcaccgcgcccggtggtggccgcgccgaagccggcgccgaccaccgtggccagcatcgagcgcaacccggtggcggtggcggccagcactgcggcgccggcggctgcgccagccgccgtgcccgcgcccccggtcgcctcgcgcagcgggcgcatggtcagcggccaggtctattccttcatgaaggacggcgtgcgccactacaccagcgcgcgcccgacccaggtcgccaacctcggcccggtgcgcaccatccgctacagtttcatggagcgctgctacgcctgtggcgtcaacccgcgcgtggacttcggttcggtgcggttgaacaccaccgcgttccagaccgagatcagctcggccgcgcgcgagttcggcgtcgacgaagccgtggtgcgcgccatcatccacgccgagtcggcctacaacccgaccgcgctcagccgcgccggcgcgcagggcctgatgcagctgatgccgccaaccgcggcccgtttcggagtcagcgattcctacgatgccgggcagaacatccgcggtggcgtgcagtatcttgcgtggttgttgaagcgtttcaatggcgacctgaccctggccgcggctggctacaacgcgggcgaaggcgcggttgaccgccacggtggcgtgccgccctacagcgagacccagtactacgtgcgccgggtcgggcagctggccgagcgttaccgcaccgcattgacgcaccagtag

SEQ ID NO: 493019 - DNA, 621 bp, Stenotrophomonas maltophilia
atggccaacgatggggtacacgatccagtcaacaccggacgtcggcgttttctttctgccaccacagccgtggtgggcgccgtcggcgtcggattcaccgctgttcctttcatcaaatcctggaaccccagtgcccgtgccaagcttgccggcgcaccggtggtggccgacatcagcgccctgcaggaaggccaacgcctgatcgtggaatggcgtggccagccgatctggatcgtcaagcggtccaaggcgatcctcgatgcactgcacgggctcgatggccgcctcaaggaccccgagtccggcgagaaggaccagcagccggactacgtgctgaagcagaaccccgagctgcgctcgatcaagccggacatttccgtgctggtcggcctgtgcacgcacctgggctgttcgccggaaatggtcgccgagatccggcctgaaccctatgacccgcagtggaagggcggctacttctgcccctgccacaagtcgcgcttcgacatgtccggccgcgtcttcaaggacgtgccggcgccgatcaacctgaaggtgcccgcgcaccattaccaggacgacaacaccatcatcatcggtgtcgatccgcagggggcagcctga

SEQ ID NO: 493020 - DNA, 1260 bp, Stenotrophomonas maltophilia
atggccaatatcctcgctcgtaccgccagcggcgtggccgactgggtcaatgcccgcgcgccgggcctgatgccggtctatcgcaagcatgtcaccgagtactacgcgccgaagaacttcaacatctggtactacttcggttcgctggcgctgctggtgctggtcaaccagatcgtcaccggcatcttcctgacgatgcactacaagaccaacgccgccgaggcgttcggctccatcgaatacatcatgcgtgatgtggagtggggctggctgatccgctacatgcactccaccggggcctcgctgttcttcatcgtggtctacctgcacatgttccgcggcctgctgtacggcagttaccagaagccgcgcgagctggtgtggatcctgggcatgctgatctacctggtgctgatggccgaagccttcatgggctacgtgctgccgtgggggcagatgtcgttctggggcgccaaggtgatcatttcgctgttcggcgcgataccggtgatcggcaacggcctgaccgagtggatcatgggcgactacctgcccagtgacgccacgctcaaccgcttcttcgcgctgcacgtcatcgcactgccgctggtgctgctgttgctggtggtgctgcacttgggcgcgctgcacgaggtggggtcgaacaaccccgatggcgtggagatcaagaaggggcccaagggcaaccgctggtcgccgaacgccccggccgacggcattccgttccatccgtactacacgctcaaggatggcgtcggtgccggcttcctgctgatcatcgccgccttcatcatcttcttcgcccccggtttcggcggcctgttcctggagcacgacaacttcaccgaagccaaccgcctggtgaccccggaacacatcaagccggtctggtactacacgccgtactacgcgatgttgcgcgtggtgccgaacaagctgggcggcgtgctggtgatgttctcggccatcgcgatcctgttcttggtgccgtggctggacaaggcgaaggtgaaatcggtgcgctaccgcggctggatctcgaaggtgatgctgggcgtgctggcggtgtgcttcgtgtggctgggcgtgattggttccggcccgggcaccgatgtgcacgagacctacatcgggcgggtgttgaccttcctgtacttcgcgttcttcatcaccatgccgctatggacaaggttggacaggaccaagccggtaccggagagggtgaccacgcatgactga

SEQ ID NO: 493021 - DNA, 750 bp, Stenotrophomonas maltophilia
atgactgagcgctggatggtccggctggccctggcggccaccctgatgctgggcagtttcctggcctccgccgccgaaggcggcaccccgctgctgcaggccggcaacgacctcggtgaccgcgcctcgctgcagcgcggcgcgcagctgtacatgaactactgctccggctgccacgcattgaagtacctgcgctattcgcggatggcgcaggacctcggcctgaccgaggaagaggtgatgaacaacctcaacttcaccggctcggcgatcggcgacccgatcccggtggcgatgcccaaggagaacgcggagaagtggttcggcaagatgccgcccgatctcagcctgatctcgcgcgtgcggggcagtgactgggtctacacctatctcaagtcgttctatctggacagcagccgcccgctgggctggaacaacgcgctgttcgccaatgcctccatgcccaacccgctgtgggaaatgcagggcctgcagcatgcggtgcacggcaaggcggaagcgcccggcatggacccgccggtgaccggcctgaaaatcgaaacgcccgggtcggtcgatgccggccagtacgatcaggccgttcgggacatcaccaacttcctcgaatacgccggtgaaccggccgcgctcaagcgccagcagctgggcgtatgggtgatcctgttcctggccctgctgactttcctgctgtacctgctgaagaaggaatactggaaggacgtccactga

SEQ ID NO: 493022 - DNA, 636 bp, Stenotrophomonas maltophilia
atggcggcgagcgtacgcatgcgcaatacactgacgctgttttcctcgaacgacgacgtactgtgccaccgggtacgcctggtgctggcggccaagggggtcaccttcgactttgtcccggtcgatccgcagaacccgcctgaagacctgatcgatctcaatccgtaccactcggtgccgaccctggtcgagcgcgagctggtgctgtacgccgcgtcggtggtcagcgaatacttggacgaacgctacccgcatcctccgctgatgccggtcgatccgctctcgcgtgcgcgtatccgcttggccatgctgcgcatcgagcacgactgggtaccgcaggtgcaggccatccagctgggcaacaagacccaggccgaggccggccgcaagcgcctgaaggaactgctgaccgcctcgctgccgctgttcaaggccagcaagttcttcctcaatccggaaatgagcctggccgactgtgcaatggcaccgatcatctggcgcctgcagtcgctggacgtgccgctgccgaaggacggcaaggcgatcgaggactatggcaaccgcatcttccgtcacccgggtttcgtccgcagcctgaccgaccaggaaaagaagctgcgcgatctgccggtctga

SEQ ID NO: 493023 - DNA, 501 bp, Stenotrophomonas maltophilia
gtgcaggcgatccgccccggcggggcgccgggcgcgtacacttcacgcatgaccgaagacttcttccacatgaccagccaccgcccgtacctgctgcgggcgctggtggaatggatcaacgacaaccagctgaccccgcacatcctggtcgacgccggcgtccccggcgtgcaggtgccgccttcggcggtcaaggagggccgggtcgtgctcaacatcgccgaacgcgctgtcgtgcggctgatgatcgacaacgaaatggtgagcttctcggcccgcttctccggcaccagctacccggtgcaggtaccgatcagcgccgtgctggcggtctatgcccgcgagaccgggcagggcatggcgctgccggatgacattccgggcagcgagaccgcgccgaccagcgacgagctgctgcatgaggacggcacgccaccggacgatacgccgccggccagcccgccgccgaagggccgcccgaacctgcgcgtggtcaagtaa

SEQ ID NO: 493024 - DNA, 351 bp, Stenotrophomonas maltophilia
atgcccaccctgctgttgttgctgattgccggcggaatcatctatttcttctggaatgcggcgcgttcggccgccgagcgcgcggtcgagctgggccgcaatgcctgccgcgctgccgacgtgcaatggctggatcaggcggtacatgccaccggcctgcgactgtcgcgtggcgaggatggacggctcggtttcgagcgcaccttcaagttcgagtattcctacgatggcatcgatcgccacgtgggacgcatggtgctgcgtggcgaccagttgatctcgttcaccggcccaggcgcggcgcggatcagccagatccggccggatgtggaggatgccgaggatgtgtaa

SEQ ID NO: 493025 - DNA, 1002 bp, Stenotrophomonas maltophilia
atgcgccggatgctcttgcctgcctgtctgctgctggccgcggcccccctgtccgcagcggcggccgaagcctgcgatgtgccaccgcgtttcggcctgagcccattggcggtggccatccgcaatactgcctgcaatgaacaccggctctggttccggcctttcatcgatcgcgatggccgcgcggcgagcctgagtgtcaccgaggccgagaacgaacatctggccgacaacgggctgattgcctggcagcgcgtggccggctactggcgcaacagcggcacgctcaacgcgatgggcagcatcgtcggcgccagcagctgtctggcaccactgggcacgcgctacaccgacagcgactgccgcaccttcctgatcgacaacccgtggtcggccgcgttcatttcctgggtgatggtgcagtccggcgtccccggcttcaacgcgtcgccacgccacatcgactacatccgtgccgcgtaccagggcggaccctcgggcgtgccgtaccggctggtcgatcccgcgaccgcaaagcccgcaccgggcgacctgctgtgcttcctgcgcgatcgcagcaccacgctcagctacagtgggctggtgcaggcactgggcaacggttcggtgggccactggaaatcacattgcgaagtagtggtggccgccaacctggggggcgaccagaccctgtacctggtgggcggcaacgtgatgaacacggtggcgatgcgactgctgccgctggaccgcaccgggttgatcaagctgccgccggcgcgcgaacgcaacagcaccggcatcgagcccagctgcacgccgggccgcgaggacgaatgcagcttcaaccgccaggactgggcagcgctgctgcagctgacggcgaccgcgccattggtgatgccttcgccctccgccgcgccgatgcagacggtgccggcgacggcgccgtctaacgtgcccgcatcaccgatgtccagcgaaccgcagccgcggcggtga

SEQ ID NO: 493026 - DNA, 852 bp, Stenotrophomonas maltophilia
atgagcacgctgccgacgccggatgcggccgttgtcgccgccgatgtcgcgcgtgcactggccgaggacctgggcagcggtgatgtcaccgccgccctgctgcccgaccaggccgacagcgcctacctgctgtgcaagcaggacggggtgatcgccggccgcccctggttcgacgccacccaccgcgcgctcgacccggacgtacgcatcgaatggcaggtttccgacggcgacgcggtcaccgcaggcaccgtgctggccctgctgcacgggcgcagccgcagcctggtcagcgccgaacgcacctcgctcaacttcctgcagacgctgtccggtacggcaaccaccaccgcccgctacgtggcggcggtggccggtaccggcacgcgcatccttgacacccgcaagaccctgcccggcctgcgcctggcgcagaagtacgcggtgcgctgcggcggtggcgagaaccatcgtttcggcctgtacgacacggtgatgctgaaggaaaaccacatccgcgctgccggttcactggccgacgccgtggcgggcgcacgccggcagtggcctgcgctgccgctggtggtcgaggtcgaggatctggcgcagctgcgccaggcgctcgacgctggttgcgaacgcatcctgctggacgacttcagccccgacctgcgccgcgaggcggtacgcatcacggccggccgcattccgctggaagtgtccggcagcgtcggcctgggtggcctgcgctcgatcgccgaggatggcgtcgactgcatctccatcggcggcctgaccaagcacgtgcaggccatcgatctgtcgttgaagctcggcccaccgccgggctga

SEQ ID NO: 493027 - DNA, 270 bp, Stenotrophomonas maltophilia
atggatcgcaagctgctcgacctgctggtgtcgcctgacacccgccagcccctgtccctgctggatggcaagggcctggaagccctcaacaaggccatttccgccggcgcggtgaacaaggccgatggcaacccgctggcgcagccgctgcgcgaagcgctggtcacccgcgaccgcaagcaggtcttccgcgtcgacgacggcatcccggtgctgctggccgaggaagccatcccgaccgcccagatcgccgatttcccgaccgcatga

SEQ ID NO: 493028 - DNA, 504 bp, Stenotrophomonas maltophilia
atgacccccaacccgatcgcgccgcttgtcggcatcgtcatgggttcccgttccgactgggaaaccatgcagcacgccgcccagaagcttgaagccctgggtgttccgttcgaagtgaaggtggtgtccgcgcatcggacgccggatgtgttgttcagttacgccgagcaggcgggcccgcgtggcctgcgcgcgatcatcgccggtgccggcggggccgcccacctgccgggcatgatcgccgccaagaccgccgtgccggtgctgggcgtgccggtgcagtccaaggccctcaacggcatggattcgctgctgtcgatcgtgcagatgccggccggcatcccggtcgccaccttcgccatcggcaatgccggcgcgtccaacgcggcgctgttcgccgccgcgatgctggccagcgaccagccggcgatcggccaggcgctcgacgccttccgtgcacgccagaccgaagacgtgatggcccatgacgatccgcgccaatga

SEQ ID NO: 493029 - DNA, 1149 bp, Stenotrophomonas maltophilia
atgagcctgaccgtcggcatcctgggcggcggccagctcgcccgcatgatggtcctggccggtgcgccgctggggctgcgcttcgagctgtatgacccggcggccgacgcctgcagcggcccgctggcgccgctcaccgtgggcgccttcgacgaccgccaggcgctggcggacttcgctgccaaggtcgatgtggtcaccttcgatttcgagaatgtgcccgctgatagtgcgcagttcctggccgaccgcgtgccggtctacccgccgccggccgcgctggcggtggcccaggaccggttgagcgagaagaccctgttccagcagctgggcatcccgctgccggccttcgctgatatctgcagccgcgacgagctggcggcgaaggccgccgaattcggcctgccgtgcatcctcaagacccgccgcctgggctacgacggcaagggccagttccgcctgcgcagcgaggccgacatcgactccgcctgggatgcgctgggtgcgcaggtcgagcgcaccggactgatcctggagggcttcgtggccttccagcgcgaggtcagcgtggtggcggtgcgtggccgcgatggcagtttcgaagcctggccgatcaccggcaactggcatgtcgacggtgtgctgtcggccagcgtggccccggccgtgctgtccgccgccgagcagcaggcagcgatcggctatgcacgccgtgtcgccgaacacctgcagtacgtcggcgtgttcgcgctggaactgttctgccgcgatggcgagctgctggccaacgagatggcgccacgcgtgcacaactccgggcactggaccatcgaaggcagcgagacctcgcagttcgagaaccacctgcgcgccgtgctgggcctgccgctgggcagcacccgcatgctcggccatgcctgcatgctgaactggctgggccggatgcccgacccgctgccggtgctggcccaggccagtggccactggcatgactatggcaaggagtcgcgcgaaggccgcaaggtcggccatgccacgttgcgcgatgacgatgccgcagcactggccgacgcgttggaccaggtgggcctggaactggaccgccaggcccaggtggcaccggcggtgcacgcgctgcgcaaccgctga

SEQ ID NO: 493030 - DNA, 342 bp, Stenotrophomonas maltophilia
atgctcgactggaatgcctaccgcaaggaactgaagggccgcatcggcgagatcggcaagctctcgccggatacggtcaagggctacgccaccctggccaatgccggtgcccagaccaaccacctggatgccaagacccgggagctgatcgcgctggcggtggcggtgaccacccgctgtgacggctgcatcaccgtgcacgtggacgcggcgctgaagcatggcgccagccgcgaggaaatcgccgaggcgctgggcgtggcggtctcgctcaacgctggcgccgcgctggtgtactcggcgcgggtgatggatgcggtggccgcgcacgagagcgcgtga

SEQ ID NO: 493031 - DNA, 579 bp, Stenotrophomonas maltophilia
atgcccgtcgaattgcccgccctgccctacctctccggctccctgcagccccacctgtccgcgcagaccgtggaactgcatcacggccgccaccaccgcgcctatgtcgacgcggtcaacgccggcaccctcggcaccgagtgggaggaggcgtcgcttgaagagatcgtgcgccatgcccagggcacgctgttcgatgcggccgcccaggcctggaaccacggtttctactggcagtgcctgcgcccgcgcggcggcggcgaaccgcagggccggctgggcgaactggtcaagcgccagttcggtgacgcgcagcgcctgcgcgaggaattcaaccgcactgcactgggcctgttcggctcgggctgggtgtggctggtgcagcacccgggcggccagctgggcatccaggccacccgcaacgccggcacgcccctgaccggcgacagcaccccgctgctgtgctgcgacgtgtgggagcacgcgtactacaccgactaccagaatgaccgcgcgcgttacctggacgcgttctggcagatggtcaactgggaattcgccgagagccagctgcgctga

SEQ ID NO: 493032 - DNA, 321 bp, Stenotrophomonas maltophilia
gtggcggtaatgcagcaaatccaggccgaggtcgatcgttacccgctcgtgctgttcatgaagggcaccccgcagtacccgatgtgcggcttttccagccgcgccgtgcaggcgttgatggctgccggcgccgtcaccctgcgcaccgtcaacgtgctcgaagaaccggagatccgcgccaacctgccgcgcttctccaacctgccgaccttcccgcagctgttcatcaacggcgagttgatcggcggctgcgacatcgtcatggaactgtttgaatccggcgagctcaagcgcatcgtcgaagaggcgacccagggatga

SEQ ID NO: 493033 - DNA, 777 bp, Stenotrophomonas maltophilia
atgagtgcctggccgtcgacgtcaccgactgacggggcgctcgatggccgccccttgcaggaccgcgtggtgctggttgccggtgccggcggcgggctgggcagtgcggcggcgattgccgctgcggcggccggggctacggtggtcctgctggggcgcaagccgcgccggctggaccgggtctatgcccaggtccaggcggtcggcccggaacccctgctgtacccgatggacctggagggtgccggccccgatgactatgccgaactggcccaggccctgcagcgtgagctggggcggctggatggcctgctggtctgcgccgcgcatttccccggcctgaccccgttcgagctggccgacccggccagtttcgcccgcgcggtccatgtcaccctgaccgccccggcctggctggcccaggcctgcctgccgctgctgcggcagcgcgaggatgctgccctggtcttcgcggtcgatgcccccgaacgggtggggcaggcctactggggcgggtatggcgtggcccagcacggcctgcgtggcctgatcggcagcctgcacgatgagctgggtcgcagcccggtccgggtcagtggcctgtacccggggcccctgcgcacggcactgcgcgcccgagcctattccgtcgatcaggacccggctgcgcaagggcccgaagcggccgccgctgcggccgtcatcctgttgtccccggccggccatgcctggcgggggacgattctcgatgccagcgaggcagttccccgcgagtga

SEQ ID NO: 493034 - DNA, 3219 bp, Stenotrophomonas maltophilia
atgacccacccactccggatgtccaagcttacccttggtctcgtggctgcacttgctgccgctcccgccttcgcccagaccaccactgccggtgtcggcggccaggtcgtgaccagcggcggccagcccgtcgccggtgctgaagtcaccatcacccacaccgagtcgggcacggtttcgcgcgctactaccgacgcggcgggtcgctacaacgcgcgcggcctgcgcgtgggtggtccctacaccatcaccatcaccaagccgggtgaaggcaccaagaccgaagatggtgtgtacctgggcgtgaaccagaccggcaccatcaatgccatcctgaccggtgacgtggccaaggccaccaacctggacaccgtgcaggtcaccgctgtcggcggcggctcggaggtgttcagtgccaccaagatgggctcgggcaccaacatcagccaggagcagatcgagattgcgccgtccatcggcggcaacatccaggatctgatgcgcctggatccgcgcgtcaccttcatcgatcgcgcctcgggctcgatctcggccggtggccagaacccgcgctacaactcgatcaacatcgacggcgtctcggccagcgacaccttcggcctggaaggcaacaacatgccgacccgccgccagccggtcgcgatggaagccatcgaagcgctggacatcaacctgtccaactacgacgtcagcatcgctggcgctgccggtgccaccgtcaatgcggtgaccaagtccggtaccaatgaattccacggttcggtgtacggcacctaccgtgacggtgactggttcggcaagaacccggaaggcaagaagttcaacggcttcaatgacgaaaagacctacggcatgaccctgggcggcccgatcgtcaaggacaagctgttcttcttcgccaactacgagaagttcaagcagtccgcgccgggcgccgatctgtccagcaccgcgctgggcaaggccaatgccgactacagcatggctgacgtgacccgtgcccaggaaatcgccaagggttatggcttcgatgccggcggtatcgaaagcaacggcaacacggatctggaagagtacgcgctgaagctcgactggaacatcaacgagaaccaccgcgccaacatccgttacagcaagctcgagcagagcaagctgcgcatcaacggcatgggctcgacctcgcaggcttcgctgagctcttactggtaccagcacgtcaagaccaacgagagctacgtcgcccaggtcttcagcgactggaccgacaccttctcgaccgagttgaaggcttcgtaccgcgagtactcggccgtccgcgaggtgccgaccaatgccccgagcatccgcatctacttcccgcgcggtggcgatgtgaccacgccggaaggcgactcgctgttcctgggtaccgagaccaactcgcagaacaacgtgctggaaaccaaggcgtggaactactacgccgccggtacgctgaccttgggtgaccacgacctgaagttcggtggttcgtacgacaccaacgatgtctacaactactttggcgctggctcgtggggtgcttacaccttctatggcctggacaatttcgccaaggggcagtggcagacctaccagctgaacaaggaaaagagcgcgaactcgatcgcggctgactacaagtacagcaacctggccctgttcgtgcaggacacctggtacgtcaacagcaacctgaccctgaccatgggtctgcgtggcgaccggccgaaggtgagcccggcgccggcgtacaaccagaaggcgcagactgtcttcggttatgacaatagtgcggtgttcccgagcaagttcctgatccagccgcgcttcggcttcaactacaccttcgacaccgagcgcccgacacagctgcgcggcggcatcggcctgttccagggtgatgcaccgcaggtgtggatcagcaacagctactccaccaccggcttcaactacgactcgtacaacatcagccgctacaacggccagaagttcaatccggacaaggacaaccagccggtcccgaccactccgggcagcgcgctgcagaacgtcaacttcgtcggccgcgacttcaagctgccgtcgctgtacaaggccaacctggccttcgatcacgagctgccttggtacggcatggtcgcctcggccgagctgctggtcaccaaggtcaaggatggcctgtactaccagcacctgaacctgggcaagggccgtcaggtcggtgccgatggtcgcgtgaactactacgtgccttcggctgacggcagggcgtggggcaccaacgatgcgcgtaatggttatgccgcacagggcttcaacaacgtctacctgatcgacaacaccgatcagggccgcacctcgcagttcaccgtctcgctgagcaagccgtggagcgcgagcagcgactggtcctggaacctgggctacacctacaccgatgccaaggaagtgggtagcctgaccagctccaccgccagctcgggctggggctaccagtacgccttcaatgccaacgaggaaatgctgaacacctcgcgctaccagatccgagaccgcctgtcgggctcgctgaactggaagcacaagttcttcggcgactacgagaccaaggtgggtctggtgtacgaaggccgcagcggccgcccgtacagctacatctatgtgaacgacgccaacggcgacggccgttcgggcaacgacctgttctacgtgccgcgtcgcggcgaggtcctgttcggtaccctgtccaacaacggcaagttcaccgccgatgcggcgatggagaagtcgttcttcgactggctggcggccaacccgcagctggccaagtacgaaggccaagtggctccggccaaccagttccgtaccggctggatcaacaccttcgacatccgtatcagccagcagctgccgggcttcatgaagggccacaagtcggagatctggctggacatccagaacgtcggcaacatgctcaacaagaagtggggcaacatctacgactacggcttctacgccaacgctcgtgttgccagcctgcagggcctgtacaacggcaagtacgtctacaactaccgtggcgcggacctgccgagcgtcgccaactccgatgctgacggcttcgacgtcggtgtctcgcagtggtcgatgcagctgggcttccgctaccagttctga

SEQ ID NO: 493035 - DNA, 1389 bp, Stenotrophomonas maltophilia
atgaccacgaacgaaaaatcagcccgtgcactgccggtgcaggatgcgcggatctacccgcgcggtgggctggatgtgctgtcgcgggccgaggtcgcacgcctgcgcgatgcctccgccggcggcatgcatgagctgctgcgccgctgcgcgctggctgtgctgaccagcggcagcgcttcggacgatccgcgcgcggcgcgcgacctctaccctgatttcgacatccaggtggcgcagcaggatcgcggcgtgcgcatcgacctggtcaacgcaccggcgatggccttcgtcgacggcgagatcatccgcggtgtcgccgaactgctgttcgccgtcgtgcgcgacctggcctacatggccatcgagatgggcccggcctacgcggccgagctggagtcgtccgagggcatcaccaacgcggtgttcggcctgctgcgcaatgcgcgcatcctcaacccgggcgatccgaacctggtggtgtgctggggcggccattcgatctcgcgcgacgagtacctgtacaccaagcaggtgggttacgagctgggcctgcgcggcctggacatctgcaccggctgcggtccgggtgcgatgaagggcccgatgaagggtgcgaccatcgcccatgccaagcagcgccgcaccgtcacgcgctacatcggcctcaccgagccgggcatcattgcggccgagtcgccgaacccgatcgtcaaccacctggtgatcatgccggacatcgagaagcgccttgaggccttcgtccgcatcggccacggcatcatcgtgttcgccggcggcgtcggcactgccgaagagatcctgtacctgctcggcatcctgctgcgcgaggagaacaaggacctgccgttcccgctgatcctgaccggcccgaccgtggcggcgccgtacttcgagcagatcgaccgcttcatccgcctgaccctgggtgatgaggctgccgagcgctacgagatcatcatcggtgacccggtcgcggtggccaagaagatggccaacggcatcaagcgcgtgcgcgagcaccgcctggcgcagaaggactcgttcttcttcaactggtcgatcgagatcccgtgggagtaccagcagccgttcgtgccgacccacgaggcgatggccgcgctggacctgcaccacgggcgtgcgccgcacgcgctggcggccgatctgcgccgggcgttctcgggcatcgtcgccggcaacgtgaaggaggacggcatgcgccgcatcgagcagttcgggccgttccagatccacggggatccggacatgatgcaggcgctggatgcgctgctgcgcgccttcgtcgagcagcgccggatgaagatctccggcgaataccagccctgctaccaggtgctggcctga

SEQ ID NO: 493036 - DNA, 516 bp, Stenotrophomonas maltophilia
atgtctttgcgccggcaaaacggtttcacgctggttgaactgatggtcacgctggccgtcttcgtgatcctggcgtcgatcgcctatccgagcttccgcgggatgatccgctcgaaccggctggcgaccgccaacaatgaactgatcgcgctggccaacctggcccgcagcgaaggcatccgcaacagcaacggtggcggtgtctgtggcagcgccgatggcaaggcctgtgatggcgactggtccaagggtgtgctggcctggtcggacctcgatggcgacggccagatgggcagcaatgacgtcgcgctgcgcttttctcagggcaatccgcagctgagcgtagtcggcccaccgggcgcggtcatcgccttcgacgggcgcggccggcgcagggcggtcgctgatcagaccctggtgctgtcgccggatgcgtgcaaggccggtgaatcgaaaagcacgttgacgatcaaccaatccggccaggtccgggtgaccaagggagcctgctcatga

SEQ ID NO: 493037 - DNA, 498 bp, Stenotrophomonas maltophilia
atgagccgccgcaacctggcccgcccgcgctcgtcgcagggtggcttcagcctgatcgaagtgatggtggcggtgctgatcctggcgttcgggctgctgggctttgccttgctgcagaccaccaacgtccgcttcgtgcagagcgcaaactaccgcacccaggcgaccaacctggccaacgacctgatcgagctgatgcgcgcccagcgcaccgataccctggccggtggggcctattcctcggcctcgttctcggccggctcggtgaagcccagcggcgtctgcgcctggccgaccggcgctgccgtgacgccgaagacgaacgtggcgcgatggcagtgcgaggtcgcgcgcacgctgggcgagaaggccagcgcgcaggtgaccttcgtgcagagcaccggccaggtcaccgtggccatcagctggggtgaccagcgctgggatccgaaggatcccgacagccttaccaccttcggcctgacgaccttcctgtga

SEQ ID NO: 493038 - DNA, 1158 bp, Stenotrophomonas maltophilia
atgagtccaatttcgcgagcccgaggcctgtcgctgatcgaactgatgatcgccatggtcatcggcctggtcctgatgctgggcgtcacccagatcttcatcgcctcgcgtgcggcgtcgcggctgtccgaaggcgcggcccgtacccaggagaacgcgcgcttcgcgctggatttcctgcagcgtgacctgcgcatggccggccacttcggctgcgtcaacgaccaggcccacgtggtcaagaacaccggcgatgtcggctatcacctgggcatcagctcgggcagtggcgacccgcaggatttctcggttccggtgcaggggtatgaggcagcaggtacggcgccgggcgccacgctgacgctgggccgtgcgtggagcgcggcgcagtcggtaccgaagagcatcaccaacctcaagccggcgccgttgcctggcagcgacatccttgtgctgcgcctgatgagtccggaaggggccgtggtgaccggcatctccgtggccgcgggtgcgaccacgctgaccgtctccagtgatggcatggcccgactgaaggccaacgccgcaggtacgccgacggtcttcggcatagccgactgcacccgtgccgacgtcttccccgccaccatcagcggttcgaccttgaaggtggacaaggtcgacctgagcaactattcgatcaacaacgcgatgaccatgctgtatcgcgccgatggcatggcgtactacatcgcgaccaatcccaatggcgagccggcgctttaccgggcacgcgcgaatggcgccggcggctacgccgatggcgaggagctggtggaaggcatcgagaacatgcagttcctgtacggactggatgccaccccggatatcgccctgcccacgccgccgaccggtcgcatcgtcgaccagcgcgtggccagtgcggtcagtaccggtaccgatgccaccgccgcagggcagtggcgccgcgtcggcatggtgcaggtcggcctgctggcgcgcagtccgcagcgtgcgtcggccgaagcgccgggcagtgcggccacgtatccggccatcctcggggtgggctttgccccggccgatccttacgaccagcgccatcgtggcgcctatgaagcgtccgttgcgctgcgcaaccgcttgttcgggaactga

SEQ ID NO: 493039 - DNA, 522 bp, Stenotrophomonas maltophilia
atgcgcactcatccttcctcccgacgccgtcccttcgttgcccagggacgacagcagggtgcggttctctatgtcgcgctgatcatgctggtgctgctggccctgctgggcgtgatcggcatgcaggtggccggcatgcaggaacgcatggcggccggctaccgggcgaccaacatggcgctccagaacgcggaaggcgcggcacgcagcgccgagaacgccgtggagaacatcgccaaccgcaaggatgccggcgccaatccggccgtggcctcctccgacatcaaccagcagtgcgatgacggcttcgacccctcggcctgggtcgcgaaaaccaagctgggcagcaagccggccatctatgtccgtgagatccagggctgcatccagggggagggtgcgctggacatgggcaagtcggtggagaagccgacgccggtctaccagatcacgacctatgccggtgataccaccagtgatgcgacgtcgcgtgcggcgatcgataccgtattcaagctgtga

SEQ ID NO: 493040 - DNA, 3768 bp, Stenotrophomonas maltophilia
atgaacactcgcaaccgcaggatcctggcaggcgttggccttgccgtcttggccgctggcggctatctggcgcataccttgtttgccgcacaggcgcagggcgtgctggcacaggagccgatgaacgtgcagacgcgcgcgacaccggcgttcatcatggcggtggacgattcgggttcgatgaacttcgaacgcatgttccccggtggtgacggccgcatgcgctggaacagcaacaccaacagcttcttcaacaacgatggaagcttcttcagcgtgggctcggcgtgcgccagcaactcggtggactgttacctctacctgtatccgcacgcggagttcaacaaggaatactcgccaggccgcgccattccgccgctggatatctacggcttcgcgcgttcgcatgtctacaacgccagttacttcaacccggcagtgacctatcggccgtggaccaatgccgatggcacgctgtgggcagatgcctccatcacccagacccgcgccgatccccggtccggccagcgcggctacaacgccgtgtacaacatgaccgtcaatcgggccgacacgtcggaaaagttccagttcgtcaacggtatgcggattcccgacctttccggtaccggcaatgaatactatgtcgacagctggtgggatggtggatggaagaccgccgcgatcagcaacaccggcaataccacatactccatcagttattttccggcgaccttctacctgccggctgcagcgcctgcaccggacggatacaagaccgacgacgccagtcgcccggtgattaccggtgcctgtggtccgggctgcaacctgcgtcgctaccagatcaagccgggcaattactcgagtccggccgcctacaacgccgcgatccagaatttcgccaactggttccagtatcaccgcaaccgcgtgctggccatcgtcggttcgtcgaccgccgccctggtgagcgtggatacgatgcgggtgggctacttcaccatcaacaagctcagcaacgcgaccatgtatgacatggtcaccaaccgagctgacctctacaagcagatttatgcgctgacggccaacggcggcacgcccaaccgtcgcgcggtggagtatctggtcgaccagttccgtcgtaccgacgccgatgcccccgtgcagctggcctgccagcgtaatggcggcatgctgttcaccgatggctacaccaactccggcaatgcaccgagcgcgtccttcggtgacgccgactcggtgaactcgacccacctgccgtccattccgttctccgacggctacagcaataccatcgccgacatcgccgcggcggcttatgcaggcgcccggacccccctgcgcaccgggaccagcttcccggcggggcaggtgccggtcagtgacaagtgcagctccctggacaagagcagcccggactggaagcgcctggactgccagaccgacctgcacatgaacttctacggcgtgaccctgggcgcgcagggcaagatctacggcgtcaaccaggccgcaaccgccgatccgtacaagacggcgccgaactgggccggcaatggcaatccgctggacgtcgatgacggtaccgtcatcgatgagctgtggcatgcggccgtcaacagccgtggcgaattcatcaacgcgcagaccccggcggacgtcaccgaggccatgcgtcgggtgctgtcctcgatcagtggtggtgcgtcgccttcaggcacgatcggtatcagtggtgcgcgcatcggcaccggctcactggcggtcaccccacgctatgacatcaccaacagcggcaccgactggtcgagcaagctgactgcggccagcgtcaaggtcaacgccgaccaggtcgcggagctcaccgaggtgtgggaagcctccagccgcctgacgtcgtccggccgccggatcgtggccaacaagctgggttcgccggtggacttcaacagtgcccgtatcagcctgcaggatctgtgcagcaaacccgacggcaagtacgcgtcgatgctggtctgctccaccgacaagctgacgacgatcaaggccgatctggccagtgccatcaactatctcagtgccgacagctccaccgaggtccgcaacggcggcaagtatcgtgaccggaccacgccgctgggtgacatcgtcaattcggcgccggtggtcagctcgccgctggacgactacgggtaccgccagctcggcggcacctacgccaagagctacaccgactacctggcggccaaggccaagtcccagcggtacatggtctatgtcggtgccaatgacggcatgctgcacgccttcgatggcggcatgaaggccgatgccaagcaggacggcaccggcggcacggagagctttgcctacatcccggccaccgcgctggggcacatggccaacctgctgttcccctacaagtccgatacggccgaccagaccttccgccaccgctattacgtcgatggcccgattgccgtggccgatacctacaatggcaccgcgtggcagaccagtctggtaggcaccacgggggcaggtggccgttcggtgttcgcgctggacgtcaccacgccgggcagcttcggcaccggcaacgtgctgtgggaaatcagcgacatcaacgcgtcgctgagggacgaggtgcgcaacaacatcggattcgtgctgggcaagccggtgatcgtgccggtgaagagcggcaccggcgtggcctggaaggcgatcttcggcaatgggtacggcagcgccaatggcaaggcggtgctgttcgtggtcgacatggccagtggcgacatccggatgatcgaagccgtcgagggtacgtcaggcgccggcatctccgggagcaacggactgggcaatgttgtggttgtcgatcgctggaccggtaccaaccaggatgcgcgcggccgtgatggactggccgacaccgtctatgccgccgatcagcgtggcgccgtgtggaagttcgacctgaccagcagtgcgaacaccacgctgaccgtgccgatgttcaccagccaggttgcccaggactcctccaccaagacctaccgccagccgatcaccggtggcatgactgctgccaccggtccttcgggcggcgtgatgctctatttcggcaccggcagcttctccttcaccagcgacaaggatgacaaggcgcagcaggcgctgtacgccgtgaacgatctgtcggggaagacagtgacctcgacggtgaccgctgccaacctggttccgtacacggccgcggccgccactgcaggcgttgatgaacgcaagatcacggcggggacggccccggcaaatgcccggggctggatgatccagctgcctgccggcaatggcgagcgtgcggtgggcaacccgatcctggtcagtggcatcgtcttcatgccgacctacgtgcccaacatgcagtcggtgggctgttcgaccagcggttcgaactggctgttcgggctgtcgtcgatcagcggcttgccgatgttggagaacgtgcgctatggctcgccgaccggcagccggcccggggcagcgaccgccgccatcgcgttgaagactggaggaactgcgccggtccgtgacgtttcgctgtcggtgctgccgcgtccgacggacaacaaggcgccgcccggaggcagctcctgctggatggccgtcggcgcggcgggcagccagtcgctgtatctgccttacccttgcggtcgccagtcctggcgccagctccagtaa

SEQ ID NO: 493041 - DNA, 408 bp, Stenotrophomonas maltophilia
atgttgcacactcacatgcctcgccgcgcggctggctttacgctgatcgaattgatgatcgtggtgatcgtcatcggcatcctggcggcgatcgccattccgtcctatcaggaatacgtgcgccgatcgcatcgtgccgtggtgaaggcggacctggctgagtacgcacagcgcgccgagcgctaccacaccagcaacaactcctacaccggctacgcgctgccgaccaaggtgtcgccccgtgatggcggtaccgtgcgctacaacctggactacaagggggatggcaccagcttcaccatcaccgccaccccgcagggcacgcaggccaaggacagctgcggcacgatgagcgtggaccaggccaaccgcaagacggccgacggtggcgttgccagttgctggtga

SEQ ID NO: 493042 - DNA, 546 bp, Stenotrophomonas maltophilia
atgcacccgacccatgccccctgccccctcggcccccgctctgcgcggggcgtgcacctgaccgaactgctggtggtcatcgccgtgctggcggtgctgctggcggcgtcctggccggcgctgcagcctttgctgctgcggcaacgcgccgatgcactacaactgaccctgcacgccagcctggccggcgcgcgcagcgaggcattgcgcagacgcgagctgatcggcctctgcgccagtatcgacggcctgcactgcagcgacgactggagcgccggctggatcatctaccgcagtggcgaccagcgcggggagccaacgtcgccggaggcgatcctgaaccatcacaccgggcgctcggacatatcgatccttgcccaggccagcagcgggcggccccagctgttcttccaggcagacggacgcagcccaggggccaacctgaccctgcgcatctgcgcgggcaaccggctgcacggtgcgttgatcgtcaacaatggcggccgcgtgcgaagtgaacgcgtggaccgcgatacgccctgctga

SEQ ID NO: 493043 - DNA, 2025 bp, Stenotrophomonas maltophilia
atgagcgacagttttgaacttgtctcgccgtattcgccggcgggcgaccagcccgatgccatcgcgaagctgaccagcaacttcgaggccggcatcgccaagcagaccctgctgggcgtgaccggctcgggcaagacctacaccatcgccaacgtcatccagaacattcagaagccgacgctgatcatggcgccgaacaagacgctggcggcgcagctgtatggcgaattcaaggcgttcttcccgcacaacgcggtggagtatttcgtcagctattacgactactaccagccggaagcctacgtgccgtcgtcggacaccttcatcgagaaggacagttcgatcaatgaacatatcgagcagatgcggctggccgcgaccaagaccctgctgtcgcgcccggacgcgatcgtggtggcgacggtgtcggcgatctatggcctgggcgcgccggaagactacctgtcgctgcgcctgatcctgtccaagggcgagcgcatcgaccagcgcgacctgatcaaccacctgacccagctgcagtacacgcgcaatgagtacgaactgcagcgcggcaccttccgcgtgcgcggcgaagtgatcgacgtgttcccggccgagtcggacagtgaagcgctgcgcctcgagctgttcgatggcgaggtcgagaagatcaccctgttcgatccgctgaccggcgagacgctgcgcaacatgcagcgcttcaccgtgtatccgaagacccactatgcgaccacgcgcgaacgcgtgctggcggcgatcgagacgatcaaggtggagctgaaggagcggctggagcagctgtacgcgcagaacaagctggtggaggcgcagcgtttggcgcagcgcacccagttcgacctggagatgatggccgaggtcggttactgcaacggcatcgagaactactcccggcacctgaccggcaaggccgccggcgagccgccgccgaccctgttcgactacctgccggccgatgcgctgctggtcatcgacgaatcgcatgtgaccattccgcagatcggcgccatgttcaagggcgatcgctcgcgcaaggaaaccctggtcgagttcggcttccgcctgccgtccgcgctggacaatcgtccgctgcgtttcgaggaatgggaggagcgttgcccgcgcagcatctacgtgtcggccacgccgggtccgtatgaataccgcgaggccggagacgagatcaccgaactggtggtgcgcccgaccggcctgatcgacccggtggtggagatccggccggtgggtacccaggtcgacgacctgatgagcgaggccaacgcgcgcatcaaggcgggcgaccgcgtgctggtcaccacgctgaccaagcgcatggctgaaaacctcactgaatacctcaccgagcatggcatccgcgtgcgttacctgcactcggacgtggacactgtcgagcgtgtggagatcatccgcgacctgcgcctgggcaagttcgacgtgctggtcggcatcaacctgctgcgcgaaggcctggacatgcccgaggtatcgctggtggcgatcctcgatgccgacaaggagggtttcctgcgctccaccggctcgctgatccagaccatcggccgcgccgcccgcaacgtgcgcggcaaggcgatcctgtatgccgaccggatcacccgttcgatgcaggcggcgatcgatgaaaccgaccgccgccgcgccaagcaggtcgagtacaacgaagaacatggcatcgtgccgcgttcggtggcgcgcccgatcgtcgacgtcctcgagggcgcgcgttcggatgccgcggagaaggaagccaagaagggcaagggcaagggccgggcgggcgtggccgaagaggcgaccgactatcgttcgctgtcgccggcgcagctggctgtccgtctcaaggcgctggaacagcagatgtaccagcacgccaaggatctggaattcgaggatgccgcgcgcgtgcgtgaccagatccgccagctgaaggaagccagcctgggctga

SEQ ID NO: 493044 - DNA, 303 bp, Stenotrophomonas maltophilia
atgccgatgcttgccctggtcctgctgttctccagcctgttcggcgacggcagcgggcccaccgaggatgccctgcgcagccagatcctgcgcaccgaaggaccgcaggacacgcatgaagcgctgcccctgcagctctatcacctgcgccaggaccgcgtgctgcgcctgggcagccagcaactggcaggcgaccaaggcggcagcccgcatgctgcgctggcccgggcaggtgtagcgcagttgtgggaacgcgtcgatggccactggcggatccagcgttcgatcaccatcacccactga

SEQ ID NO: 493045 - DNA, 141 bp, Stenotrophomonas maltophilia
atgagcgatcacgtcccggtgtccaggcccaatccgttcctggaacgcctgttcggcggcaacatgctggaaggcacgttcaaggcagtgatctgggtggcgatcctgtgcgcgctgctggcgtggaccacgctgcgctga

SEQ ID NO: 493046 - DNA, 285 bp, Stenotrophomonas maltophilia
atggcctccgtctcctccgccaccgaagcccacgcgatcctgcgcgcgcccgacctggacagcgccgagcgcgtctatctgggactgatgcccgacctcgaacatgtgaatgcactggcacgccgtgcagtgggcctgtcacgcgtagccgacgcggcacgcggctatgcgttgtcgatgaccctggttggactgcgcctgcaggaactggagatgggcgagccgacggccagggagcaccgccaggcaaccctgcgcagcctgcgccaggccttcagcgcctga

SEQ ID NO: 493047 - DNA, 768 bp, Stenotrophomonas maltophilia
atgccgtcgctgtccccgaccctgctgcgcccgctgctgttcaccgctgccctcggcgtgccgttgctcgcccacgctgccgagcagaacccgggcgtacaggccggcatcagcgctggcgcgacctccggtgcgtacgcgcactacgacgtcaaaccgctggtggtaccggccattgcctggcagggcgagcgcttcttcgccagccccggctcgctgggcatgtacctctacaagggccagggactgcgcctgtcggcggcggtcacgccctacacgctgcgcttcaagaccgacgacgtgaacgatgctcagctgcgccgcctgcacagccggcagatgtcggccatggccggcatcaacggcgagtacagcgccgactggggcatggtcgaggccagcgtgatgcgcgaagtgaccggccatggcggcggtttcgagtcgcgcctgcattacagctacccgatccaggcgggtcgcttcacctgggtgccgcgggcgggcgtggtgcactccagtgcacggctgctcgactactactacggcatcagcgatgaagaagccctgcgctcgggccttgccgcctaccgccccggcagcaccacgtcgccgagcctgcagatcgcggtcagcacgccactgggcaccaaatggcgcgccaccggcgtggtggccaaccagtggttcggtgatgcagtgaaggacagcccgatggcacgacgtggcacgcagacgtcggccttcgtttccctgatgcgctcgttctga

SEQ ID NO: 493048 - DNA, 672 bp, Stenotrophomonas maltophilia
atgcgcatcctcctggtcgaagacgatcctgatctgtcccgcgccctgcaatcgggcctggagcggcagggcgtggtcgccgacgtggtcggcagcctggccgaggccgcgctcgcgttgcgcgaaccggtgcaccagctgctgctgctcgatcgccagctgcccgatggcgatggcgccggattcgtcgcgacggcgcgtgcgctgcggccgaacctggcggtgatcatgctgaccgccaagggcacgctgtcggacaaggtcgaaggcctggacgtcggtgccgatgactatctggtcaagccggtggcgatcgaggaactgatggcgcgcatccgcgcggtatcgcgcaggccttcggcgatggtgacaccgagcctgcggctggggcgcctcgagttcgatttcgaatcgctgcaggcgcaggtggagggccagcctctggcgctgccacgtcggcaggtactggtgctgcaggcattggcgatgcggcaggggcgcacggtcacccgcagtgcgttggaggctgcggtgtacggtttcgacgatgagatccagtccaatgcgctcgacgcgcacatctccaagctgcgcaaggcactgcagcaggccggtgccggcgtcgagatccacgtgatacggggcgtcggctacctgctggcggaggcctga

SEQ ID NO: 493049 - DNA, 1344 bp, Stenotrophomonas maltophilia
atggcccgtccgatccgttcgatcacccttggcctggcctggcgcctgttcctggcgcaggccttcaccgtactgttcgcggtggtcgcgctgatcctgacctggggtgacaaggactcctggggcatggacatgttcgttgccgaggcggtggccaaggcggtgcacagcgaagacggccgcctggtgctggaccaggcgcgctgggacaagctcgatgccaacgccgggggaaatctctggttcgccgcggtggatgacaagggcatgtggctcgagcgcggcaccatccccgcgatccacgcgccgatgctcgcgcggctgccgaccgtgggtgccaccgagctgggttcgctggtaccgccctacctggacgtggcgcgggtgatgatccgcaacgaggatgggcgccgcatcaccgtgatggtcggtggagcacccaagggcgggctgctggacggtgcgctgatggtgctgcgcctgatcggcctgtggttcttcctgccactgatcgtggtcaccctgctggtgatgccgaccgtgatccaccgtgccatgcgcggtgtgcgccgttccgcgcagcaggccaaggagctggacatcggccagcccggtgcgcggctggatgcgcggctggtctccacggaagtggcgccgctggtggaagcgttcaacgatgccatcgacaaggtgcagcagggctacgccgcgcgcgacaagttccttgccgacgcagcgcacgagctgcgcgtgccgatcgccgtggtgcaggcgcgcctgtcgcagctgccgcagggcgagctgaaatcgcagttgctgaccgacgtggcgcggctgggcaatgttgccgagcacctgcttgatctgcagcggcttgaccgcaatgtcggcgcattgcagcggctggacctggccctgctggtgcgtgaggcagccgcggacctggcgccgttggtggtgggcgccggctatggattcgaagtggacgcgccggacgcgccggtgtggatccacggtgacagcctggcgctggggcgggtgattgccaatctggtacacaacgcgatcgtgcatggtggtggccgtggcaccatctgtgtgcggttggacacgcgcgggttgctggaagtcagcgaccagggcgcgggcattccagtaggcgaccgcgaggcgatcttcgagccgttccatcgcctgcgcgcggcgggcagcggcagtggccttggcctgcacctggtgaaggagatcgtgcagcaccatggcggctcggtcagtgtcggtgaggccgcgggcggcggcgcaagcttccgggtcactttccatcgcggcagcgcgcggcgctga

SEQ ID NO: 493050 - DNA, 2400 bp, Stenotrophomonas maltophilia
atggccatcgagcgctccccgtctcccttgctgggcagtggcaccgctggggcgctcacactgggggcgttgggctgcgtgcagctgtcgcagctgccgccgctgtgggtctgcacggtgatgatcgtgcttggcatggtcgggtggggcctgcgatggcgggggcgcctgccggcggtcatgctgctcggtgccggatggacgtcgatgcacgggcactgggcaatgcaggaccagctgccaccgggccaaccggctcgggatgtagtggtcagtggccgggtcatcgatctgccggatcatcgggccgcgcacacccgcttcctgctgcaggtcagcgagagccgcgaactgccatcgctgcgcggcaagcgcctccaggtcacctggaacgacggctggcaaggcaggtccagcgccgctgccgaggggcggcgcaggcaggtcctggccggtgcgcagtggcagctggcgctgcgtgtgcgggcccctcgctcgcggatcaatcccgggggttttgacagtgagcgtcatgcgctgctgcgtggcgtagccggcactggaacggtgagggcgccggccagcgcgcgtgagctgcaggccggacatggcctgccggcatggcgtgagcgcaccagcgccgccatcgccatgcaagtggcccatccgaccgcccgtttcgtgcaggcgctcgccctgggcgacacgcgtggcctgtccgacaccgattgggatcagctgcgggcgctggggctgacccatctggtggccatttccggatttcatgtcggggtggtggcggggctgggggcgttgctgtgccgagggctgtggtggctgtgccccctgctggcccggcattggccacgtccacaggcggcggcctgcgccgcggcgctgtccgcagcgggctatgcggtgctggccggcggtgaattgccgaccgtgcgcacggcattgatgatcgggctggtggccctggcgcgcagcgggcggcgcccgctcggtctcgtgcaggggcttgcgctggcggcgctcgcgctgctgctgccggcgcccctgtcggtgctgtcagcgggcttctggctcagcttcggcggcgtactgtggctggtgtggtgcttgccgcagggacgtccgcgcggggtggccgccaacctgcgcgggttcctggccgcacaaggggtggccagcgtcggcctgttgccgctgggcatcgccttgttcggtggcaccgcctggctggggccgctggtgaacctgccggtcatcccgtggtggacattgctggtggtgcccctgtcgctgctgggcaccgccctgcaggcgctgcacgacggtgctgggtgctgggtgtggcgcgcggcggcgtggctgttcgagatcagctggcaggccctgcagccactggcggcgcacccgcaggcgatgtggtggctggccgaggcgccggcctgggcggtgccggcggcgctgctgggggtgttctggtggctgctgccacggggggccgggggctggctggctggcctgctgctgtgcctgccgctgctgtggccggcgcgtgagcgcccggccgagggggagctggagctgctggtgcatgacgtcggccagggcacggcggtgttgctgcgtactgcgcagcatgccctctggtacgacgtggggccgccgaacgggggcgagggcagcgagcgggtcctggttccgtcactgcgggccctgggccaggcgccgcccgagcgggtgctgctcagccacgacgatctcgatcatgccggcaacctgccgagcctgcgtcttcagctgccggggctgccattgctggcgccgccgggaagtacgatcgccggggccggccgttgccagcgcggcctgcgctggcactgggacggcgtcgatttccaggtgctgcacccgggtgccgacagccagcgggccgaaaacgaggacagctgcgtgctgcgcgtggccggtgcccatggcgtggtcctgttgccgggggacatcggccgtccggccgaacaggcgctgttgcgggcgtctgcagcggcgctgaaggcggatgtggtgctggtgccgcaccatggcagcggcggcagttccagcgcgccctgggtggcggcggtgtcagcccggctggcactggtctcggccggccaccagaaccgtttcggccacccgcgccaggacgtggtccggcgctggcaggcgcagggcgccgaggtggtgtccactgcggagtccggggcgatccgcgtatggcttggcgcacaagggctgcagctgcgtgaacagcgcatccatgcatcccggtggtgggatgccgctgggcgggcgcggtcggctgctatcctatcgccgatcgaacaagcggccgttgggccggagggttga

SEQ ID NO: 493051 - DNA, 663 bp, Stenotrophomonas maltophilia
gtgtgggaactggtcaaggccggtggctggccgatggtgccgctgctgctgttgggcgtactggctttggcgatcatcctggagcgtttctggtccctgcggcgaacggaggtgctgccgcccggtctcggccaggaagtgcgcaactgggccgcgcgcggcaagcttgacccggcgcacctgcagaccctgcgtgccaactcgccgttgggcgcgctgctggcggccgcgctggaagcccgcaaccgcccgcgcgaccagatccgcgagcgcatcgaggataccggccgtcacctggtgcaccgcatggagcggttcctcaacgcgctgggcaccatcgcttcggccggcccgctgctgggcctgctcggcaccgtgatcggcatgatccagatgttcctgggcatcctcgaccatggcgtgggtgatgtgaaccagctggccggtggcatcggcaaggccctggtgtgcaccgccaccggcatgatcgtggccatcccggcactgatgttccatcgctacttcaagggccgcatccacggctacgtggtggagatggaacaggaggccagcgccctgctggatacgctcgacggccgcccgggggtgatgaacccgtccccgtcggcgcgcccggccaacgccgctgcggcgaaggcctga

SEQ ID NO: 493052 - DNA, 423 bp, Stenotrophomonas maltophilia
atgcgtatcggcaatgaccgatcccaggatgagccgcatatcgatctggtcccgctgatcgacgtcatcctggtgctgatcatcttcttcgtggtcaccaccaccttcgatgcgcgctcgacgttgcaggtgcagctgcccaccgccagccagcagcccaacaacgaaccgccgcgttcgctcagcgtgctgatcaacgccgaaggccgttatttcatcaatgaccaggaagtgctgcgcagcgatgtcgagtccgtcaagcagaccatcgccgccgtcgccggcagtgatcgcagccagcccgtgctgctgcgcgccgacgcgcgtactccctaccaggccgtggtgactgcgcaggacgcgctcggtcagctcggtttccgtcgtatcgccattgcaactgcgccagaggtgcgtccatga

SEQ ID NO: 493053 - DNA, 1749 bp, Stenotrophomonas maltophilia
atgagttcccatcacgcgccggtgtggccgatctacaaacgtctgctgggctacacccgcacctactgggtgttcatggtgggcgcggtcatcgccatggtggtcgaagccctcgccggctaccacttcaccaagctgatggagccgctggtcaacgaaggtttcgtcgatccgcagccgcgcgcggccgtggtgctgccgctgaccatcctcggcctgttcctgatgcgcagcctggccacctgggtcagcgactacacgctggccaagaccggccgcagcgtggtccgcgacctgcgtgagcaggtgctgcagaagtacctgcacctgccgtcgtcgcacttcgataccgaagcgacgccggtaatggtcagccgcctcaacttcgatacggaacaggtcacccaggccagtgccgacgcgctgaagaccgtggtcgccgataccctcaccatcatcgcgatgctggcggtgatgctgcagatgagcgtcaaggtgaccctggcgatgctgctggtggtgccgctgatcggcggcatcgtgtcctacgtgggcaagcgctaccgtcgcatcagccgcggcatccaggacggcatgggcacgatggcgcagactgccgagcagtcgctggccgcgcagcaggaagtgaaggtgcacggcacccagcagcatgagatctcgcgctactcgcgcctggccaaccgcatgctggcgctgaacatgaaggtcgaggtcacccgcgccgccgcgtccagcgtggtgcagttcctggccgcactggcgctggcggtgattgtctgggtgtcgacccgcgaagccctggccggccgcctcaatgccggccagttcatgggcctgatgacctcgatgatggccatcattccctcgctgcgccgactgaccagcgtacagacctcgatttcgcgcggcgtctccgccgccgagcgcctgttcggcatcctcgacatgccggtggagcgtgatgagggccagcaccgcgtgcagcgcgtgcgcggcgaactggcgttcgaccacgtcatgctgcgctaccgcgaagacagcggcattgccctggacgacatcagtttcgttgccaggccgggcacggtgacggccatcgtcggccgttccggcagcggcaagaccagcctgatccggctggttccgcgcttctacgagcccagtggcggcgtcatcaccctcgatggcgtggccctggatgactatccgctggccgacctgcgccggcaggtggcgatcgtcgggcagaaggtgatgctgttcgatgacaccatcgccgccaacatcgcctacggcatggaggcgaccgatgagcagatccgtgcggcggccgaagcggccaatgcctgggagttcatcgcacgcatgccgcagcagctgcagaccccggtcggcgagaatggcgcgctgctgtccggtggccagcgccagcgcctggcgattgcccgcgcgatcctgcgcgacgcgccgatcctgatcctcgacgaagccactgcggcgctggacaacgaatccgagcgcctggtgcaggatgcgctgcagcgcctgatgccggaacgcaccacgctggtcatcgcgcaccgcctgtcgaccatcgagcatgccgaccaggtgctggtgatggaccatggccgcatcgttgaacgtggcacccacaaggagctgctcgaactgggcggcctttaccagcatctgcacagcatgcagttccgcgaaaggcaggactga

SEQ ID NO: 493054 - DNA, 1020 bp, Stenotrophomonas maltophilia
atggccggcaagggtacccagaccccggcgtactggtacgacggcagccccgttccgtggacgatgcgcctgctggcgccgctgtacgcaggtgtcaccgcactgcgccggcgcgcctatcggcgtggctggcgcaagcgccactcgctgccggtgccggtcatcgtggtcggcaacatcaccgccggtggtaccggcaagacgccgctgaccattgccctggtcgagcgcctgcgcgcggccggctggaagccgggcgtggccagccgtggttatggtcgcgaagacgccgacaagccgctgtgggtgcaggccgatacgccaactgccaagggcggtgacgagccggtgctgatcgcctggaagaccggtgtgccggtgcgcgtggaccgcgaccgtgtcgccgccggcaaggcgctgatcgaggccggctgcgatgtgatcgtctgcgacgatggcctgcagcactaccgcctggcgcgcgacatcgagatcgaagtggtcgatgcgcagcgtcgctacggcaatggccggatgattccggccgggccgttgcgcgagccggtcagccgcgccagcgaatgcgatttccgggtggtcaacctcggccaggccgatgaggaaaccgcagcgcaggcctgtggcttcggccagtggccgatggcgctgcacatcgacagtgcacagccgctggccggcggccgcgctcgcccgctggcgtacttcaagggccagcgcgtgcatgcggtggccggcattgcccatccccagcgcttcttcgacatgttgcgcgcgcgcgggatcggcgtggtgccgcatgcgttcgccgaccaccaggcctaccagccgcaggacctgtccttcggtagccagctgccggtattgatgaccgagaaggacgcggtgaaatgccgtgcgttcggcaacgactggcactacgcggttccgctgcgcgccgagctgcccgcggcgttctgggtggcgctgaccgatcgcctggacaagctgcggccgaactga

SEQ ID NO: 493055 - DNA, 774 bp, Stenotrophomonas maltophilia
atgactgaattcgtcgtcgccattccggcccgctatgccgcctcgcggctgccgggcaagccgttgcgcccgctgggcggcgagccgctggtgctgcatgtggcgcgccgcgcgctgcaggccggtgcccgtgaagtctgggtagcgaccgacgatcagcgcattgccgatgcgctgtccgggctggccgaagtgaaggtggcgatgaccgcgaccacgcacgcctccggcactgatcgcctggccgaatgcgcacgcattgccggctgggccgatgacacggtggtggtcaacctgcagggcgacgaaccgttcgcaccggcggccggtatccgtgcggtggccgatgcgctggtcgcaggcactgcgccgatgtcgactctcgccacgaccgtcgaggacgcgcacaccctgttcgacccgaacgtggtgaagctggtgcgcaacgtgcgcaacgaggcgatgtacttcagccgcgcgccgatcgcctggcaccgcgacggcttcgcacgcagccgcgacacgctgccggacggccaccactggttgcgccacatcggcatctacggctatcgcgccggcttcctgcagcagttcgcggcgatgccgccgggccagctggagcaggtcgaatcgctggagcagctgcgcgtgctggaagcgggctatccgatcagcgtggcgatctcgcccgagccgttcccgccgggcatcgacacgcccgaggacctggagcgcgccgaggggctgctgcaggcgatggcgccgcgatga

SEQ ID NO: 493056 - DNA, 489 bp, Stenotrophomonas maltophilia
atgaggctgctggtcgtctgcctcggcaacatctgccgttcgccgatggccgaaggcgcgctgcgcgcacgcctggatgcctcgccgctggccgggcgggtgcaggttgattcggctggcaccggcgactggcatgtgggcgagccgccggaccgccgcgcgatcgcctgcgcggccgggcacggcgtggacatcggcggcctgcgcgcacgccagctgcaggacgtggatttcgaccgtttcgactggatcctgtgtgccgacgaggccaacctgcgtgatgcagggcgcctggcgtcggcggcccagcgtgaacggctggcgttgtacctgccctggtcgggcgttcaggggcgggtagccatccccgacccctacaccggcggcagcgatcatttcgaacaggtctggtcgctggtcgacgatgctgcaaaacgtgcggtggcacgactgttgcatgacgccgactccggcataatcgggtcatga

SEQ ID NO: 493057 - DNA, 1413 bp, Stenotrophomonas maltophilia
atgaacgtccagcccgtcccggacctgcccgagttcgccacctggctcaatgccaccccttgcaccctgaccgagctgcgcggccggccggtcgcgctgctgttcgtcaatgcggcctccgcctggagtgcgcaacgcctggccgagttcggccaatggctgtcgcgccaccccggcaagctgcagccgctggtgctgcaggtgccgcgcttcgatttcgagcgcgacgccagtgccgcactgaagctgctgcgccgccagggcctggccatgcccgtactgctcgatgccgattgggatggctggcgccgcttcggcgttaccgcctggccgaccgtggtgctgctggacgcgcagggtcgcgagcagcagcggctggtcgggcagggagcacccggtgaactggagcgcgccctgaacacgctgtgccagggcgcgccttcggcgccgccgcgcggcggcagcgaactgcatccggaaccacgccaggcgctgcggttcccgctgggcctggcggtcagcaccgaacgcctgtacatcgccgacagtggccaccaccgcattctcgaatgcagccatggcggccgcatcctgcgccagttcggcctcggtaccgccgatttcatggacggcaacctggccgaagcggcgttccaccgcccgcaggcgctggtgctggagcgcgattcgctgtacgtcgccgacaccggcaaccatgcggtgcgccgcatcaacctgctgaccggcatcgtcgacacgctgtgtggcaacggacgtcccggtgcgccgatggaaggtccggtggcgcaggcgcggcaggtctcgctggaccatcctgtcggcctggccatcgccgacaaccagctgcacatcgcgatggccggcgacaaccgcatctggagctaccacctgggccagcgcagcctgcaatggcgcgccggcagtggttccatcgacgagcgtgacggcagcggccacctggctgcctttgcccaaccgactgcgctggccgtggtgcagcaggtgttgtacgtcgccgacgccttgggatcctcgatccgtgcactgcaactgcgcggcgacctggtgcagacgctggtcgggcaggggccctggcgctttggcagcgaagacggcccgcgtgcgcaggccagcctgcagtatccgcaggcgatcgcattgagcgcggacgctccgctgctgtggattgccgataccggcaacggtcgcctgcgcacgctgcgcctgggcggcggtgaactgaccacccagccgctgccgcgccgcctgcatggcccggccggattggcggtgggcgccggtgcggtgtggatcgccgagactgacgcccatgccgtgctgcgattcgaccccgacagcggcgtgctcagcgaagtcccgatcagcgaatga

SEQ ID NO: 493058 - DNA, 1845 bp, Stenotrophomonas maltophilia
atgaccgacgttcccgccccggccttcgacggcaaggccttcgcggcccagctcagcaccgcacctggcgtgtaccgcatgtacgccgccgacgacaccctgctgtacgtgggcaaggcgcgcgcgctgcgcaaccgtgtcggcagctatttcaacggtagcccgaagaacgcgcggatcatgtcgatgatctcgcagatcacgcgcatggacgtgaccgtgacgcgctcggaagccgaggcgttgctgctggaaaaccagctgatcaaatcgctgtcgccgcgctacaacgtctcgctgcgcgacgacaagacctatccgcatgtgctgctgacccgcgaggactggccacgcatcgcgctgcatcgtggcccgcgtgccattcccgggcgctacttcgggccgtatcccggcgtcaccgccgtgcgcgagacgctgaacctgatgcacaagctgttcaagctgcgcagctgcgaggacagcgtgttccgcaaccgctcgcggccgtgcctgcaataccagatcgggcgttgcagcgcgccgtgcgtggagctggtcccggcgccggagtacgccgagtcggtgcgccgcgccgccctgttcctggaaggcaagagtgacgagctgacccgcgaactgggcgagcagatgcaggccgccagcgaggcgctggagttcgagcaggccgcgcgcctgcgcgacctgatctcctcgctgcgcagcatgcagacccgccagtacgtggatggccgcgccgcggacctcgatgtgctggccgtggccatgcagggctcgcaggcctgtgtgctgctgctggccttccgtgatggccgcaacctcggtacccgcccgttcttcccgcgcaccaatggcgaggaaagcccggaggaagtgcttgccgccttcgtctcgcagtactacatcgaattcgagccgccgcgcgagatcctgctggaccgcgagattcccgacgccgacctgctggtcgccgcgctgtcggcctcggccgagcgcaaggtgcagctgaagtggaacgtgcgcggcgagcgcgccggctatgtggaactggccagccgcaacgcgcagctgaccctggccaccgaactcaacagccgcaatgcgcagcacgcgcgcagcgatgcgctgcgcgagatgctgggcctggccgagccggtcaagcgtgtcgagtgttttgatatcagccacaccctgggcgaggccaccgtagcctcgtgcgtggtgttcgacgccgccggcccggtgcgcgcgcagtaccgccgcttcaacatcagcggcatcgagccgggcgacgactacgccgccatgcgccaggccatcgaccgccgtttccgccgcgcagtggaagagcagggcgtgctgccggacgtgctgctgatcgacggtggcgccggccagttggcacaggcgcaagctgcactggccgatctgggcgtggaaggcgtgctgctggtgggcgtggccaagggcgtggagcgccgtgccggccacgaagcgctggtgatgcccgatggccgcgagctgcgcccgggcgcggccagcccggcgctgcagttcatccagcaggtgcgcgacgaggcgcatcgcttcgccatcaccggccacagggggcgccgccagaaggcgcggatgaccagcaagctggaggatatccccggcatcgggccgcgccgccgcgccagcctgctcaagcatttcggcggcctggtgggcctgaaagccgctggcgaagcggaaatcgccaaggtggaaggcatcaatgacgccctcgcggcacgtatctacgctaacctgcacgggttggccacgcctgatgcggccgagtag

SEQ ID NO: 493059 - DNA, 627 bp, Stenotrophomonas maltophilia
atgaagttgaccctgcccacctggctgacgttgttgcggatcgtgatgatcccggtgctggtgctggtgttctacctgccctacacctggaccaacttcgcttcggcggcgatcttcggcctggccgcgatcaccgactggctcgatggctggatcgcacgccgttaccagctggagtcggccttcggcgccttcctcgacccggtcgcggacaagctgatggtggcagtggcgctgttcctgatcgtgcagggccacccgacgccgtggatggcgttctgggcggcggtcatcgtcggccgtgagatcgcggtatcggcgctgcgcgaatggatggccgagctgggccagcgcgcgaaggtgcgcgtggcgatgatcggcaaggtcaagaccaccgcgcagatggtcgcgctgttgtgcctgctgtactcggtggccccgaacgtgccggtggaagacatctggatgggctggccggtgttccatatcggcgactggactctggccattgccgccgtgctgaccctgtggtcgggcttgcagtacctgcacgccgcgtggccgagcctgcgcgacgatgagcgcgcggcgcgcgagcgtgcgcggcagaagaagctgggcaactga

SEQ ID NO: 493060 - DNA, 1107 bp, Stenotrophomonas maltophilia
atgcctcatcaatcctctgcttacgaccacgatgtcgtcatcgtcggcgccggtttcgccggcgccgcctgcgcattggccgctgtccagtacgggctgcgcgtctgcgtgctggaacgcaaggccgaccccggtgagcgcctgcacaccaccggcatcgtggtgaaggaagcgatggagcagacctggctggggcgcatgcccgagcatctggtgcagcgcggcgcaaacgtgcgcctgtatgcgccgaaccttcgcagcgtgttgctggccgcaccgggctattacttcctcaccaccgatacgccgaacctgatgcgctggctggccagcgagctgcatgcgaacggcgtcgacctgcgcctgcagcagtcctttaccgacgcccatcgcagtggtgacggctggcaggtggatggggcagggcgatgcgcctatctggttggcgctgacggcgcacgctcacgcgtggcacaacgcaccgggcttggccaggtgcgtgacaacctctacggcgtcgagcgtgagttcgccggcctgcaggtgccgcagggcgatgcactgcattgcttcgtcagcaagcgctacgcaccgggctacatctgctgggtcgcgcagaatccgaccgggctgcaggtgggattggcgctgcgtcatgacccgcaacaggtacggccgccggatatcgatggcttcctcgaccacgtgcgcaatgtggtcggcattccgccttcggcgcgtccctcggccacccgcgccggcttggtcccgtgcggccggccggatgggcccttcaccggccaacgcgtgatcctgaccggcgacgcggcaggcatcgtctcgccgctgtccgccggcggcatccactcctcgtggcggcacggctgggcggtcggcgaggcgattgcccgccatctgcgtgggcaagggccggaagcggaacgggtggcgcggcaggtggcgccggcattccatggcaagcgcctgctgcgctgggcgatggaccatctgcaggccgactggccgctcaacgcactgctgcacacgggggccacgcggcgcatcgccgagcaggtctacttccaccgccgtggcctgcgaacctga

SEQ ID NO: 493061 - DNA, 915 bp, Stenotrophomonas maltophilia
atgaaccagattgatcacttccgcggcgccttgctcggcctcgcatgcggcgatgccgtcggtaccacgctggagttcaagcctcgtggcagcttcaccccgatcaccgacatggtgggtggtgggccgttccagctgcagccggggcaatggaccgacgatacctccatggcgatgtgcctggccgagagcctggtgcgttgtgacaccttcgatgtgcacgatcagatgaaccgctacgccaactggtaccggcatgggtactggagtgcgaccggcgagtgcttcgatatcggtatggcaacgcgggctgcgatcgaccggttcctgcaggatggccatccgctggcgggtagtgacgacccacgcagcgctggcaatggctcgatcatgcgtttggcgccggtggcattgcgctacgccgggacccccgacctgcaggcaatggccgagctgagttcgcgaacgacgcacgctgcgcaggagtgcttggaggcgtgccgcttgctggcggtcgcgctggagcgggcgttggcaggtggcccccgtgacgcggtgctggatctcagcaatgtccccgtcgagagcgcgcggctgcagcagatcgcggcgggcggctaccgcggtgccgcgcgtgagcagatccgtggcaatggctatgttgtcgacagtgtcgaagctgcactctggtgctttgatcgccacgacacctttgaagccgtcgtactcgaggcggccaatcttggcgaggacgccgacaccacggccgccatcgcggggcagctggcgggcgcattccatggtgcgcgcggaatccccgggcggtggttgcagcggctggccctgcgtgccgaaatccaggcgctggccgatgcgctgcacgccttgaaccagggcagcgaccgcgctgcgtga

SEQ ID NO: 493062 - DNA, 270 bp, Stenotrophomonas maltophilia
atgagcaaagtcatggcagatgtgcgttggctgacctttcgcttgaagaacggacaatccatcgggccggagcggctgaaggacggatgggtgattgcctcggaaaccgcccgctgcgaggtccgccgcgagcatatcgagggatcgggcctggtgtatgcgctgtatgcgccggccagcctggcctcaccgcggcgcgcggaaatgcgcatgcgcgaattcctgatgagctcgggctacaccttcacgatgggcacgctgggcggctga

SEQ ID NO: 493063 - DNA, 1074 bp, Stenotrophomonas maltophilia
atgcgaaccttgtttcgatgtgcgcttgccctctgcctgctgccttggatgacatcgctggctgcaccaccgccggcaccgcgcacgctcagcggcgagctgcagggcgcaccgtggcggctggatgtaccggcccgctggaacggcgacctggtgatgctggcccatggctatgaaccggtcggcatgccacgcaccgcacccatggcggccaatgacagcaccgcgccactgctggcagcaggttacgccgtcgcgcagagcgcctatgccagccagggctgggcggtggccgatgcgatcaccgatacagaacgcctgcgccagcaggcagtgggtgaactcaagcatgtccgccacacctggatgctgggattctcgatgggcggcgccgtgaccatcggcagcctcgagcgcttcccgcagcactacgcaggtggcgtgtcgctgtgcggcgccaatctcggcggcgaacagatcgcgaccgatctgctgaccacgctggtcgcattcgattacttcttccccaaggccgatgggctgccggccgccggcctggtagcgcgcgaagccgccgcgcagccacagggcgagttgtaccagggcatcgccaatgccctgcaacgtgatccgtcgcacgccgcagtgctggcgcggcggctgcaggtgtcccctgatgcagtggccggcaccatcagcctgcacgcgctggtgctgcacgaactggccacgcgcagcggcggcatgccggtcggcaacctgggggtggtgtacagcggattcggtgacgacgccgcattcaatgccggtgttcagcgcatcgatcccgtgcctgcggcacaggcgcatgtccgcaactcgctggcaatcaccggcgcactgaagcgaccgctggtgatccagttcaaccacaacgacccgaccatcgtgccgcacatgcagacggcgtatccgcaattggccgcacgggctggcgcacgcccgctgccacgcgtgttgccgccagtgggcgaaggacattgtggtttttctggggcacaggtggtcgacgccttgaaagcagtgcaacgctga

SEQ ID NO: 493064 - DNA, 519 bp, Stenotrophomonas maltophilia
atgcacgacctttcatcgaacgacgctgcgccgaccctgcacctggtgtgcggcaagatcggtgccggcaaatccaccctgtcgcagcagctggcgttgaagccgcgccacgtattgatcagcgaagacacgtggctggcggcgctgtatccgggcgaaatccattccattgccgactatctgcagcgtgcagccacgttgcgcaatgtgctggccgatcatctgcgcgcattgctgcgcatgggcgtctcggtggtgctcgatttccctttcaacacgccggccgcgcgggcatgggcgcgcgagctgttcgaaccggagggagccgcgcaccagctgcatttcctggatgttgccgacgaggtctgcaaggcgcggctgcgtgcgcgcaatgcgcgcggtgagcatccgttccaggccagcgatgaggagttcgcacagatcacccgccacttcgttgcaccggccgcggaagagggctttgtggtgatgcgctacaccgaggcaggcccggcatag

SEQ ID NO: 493065 - DNA, 918 bp, Stenotrophomonas maltophilia
atgctcgatctccgccaactgcgctatttcgtggccgtcgccgaggatgaacacgtcggccgcgctgccgagcgccttcacatctcccaatccccgctcagccggcagatcgcgcagctggaggaacggctggaactgcagctgttcgaacgctcgcagcagcgcatccggctgaccgccgatggccgcaccttcctggccgaggcacgcgccctgttgacccacgccaaccggctggaatcgctggcacgccggctcggccgcggcgacgagggcggcctgtgcatcggctacctggagtacgcgatgcactccggcgtattgcccgccgccctgcgcgaactgcgtggcgaccgtcctgccgtacacatcgcgctgtacaaccagcagtcggacacgcagctggaaggcctgcggcaacgcagcctggacatcgccctggtctgcgaaccccccgcgttcgacgatccggacctggaggccacgcaggtgctgaacgatccaatgctgctggcgctgccggccggccacccattggccagcgcagagaccatcacgccagaggatctggccagccagcaatggatcggcgtgatgcacaaggaaagcgcgctgcgccatgacaccttcatcgccgcctgcgcgaaggccggcttcaccccgaccatcgccatggaggcgaccgagccgctggccgcactcggtctggtcgctgctgggctgggcctgaccaccctgcagcgcagcctggaccaccaggcaccgcagggcgtggtactgcgcgagctgccgtggttcagctaccgcacaccgctgtgggcggcctggcaccgcatcaacctgcgcccgctggtcgagaccttccgcaggacgctggtgcagaccgcaaccgagggcaagccggccttcgtcgactga

SEQ ID NO: 493066 - DNA, 1092 bp, Stenotrophomonas maltophilia
atgtcttggacagtcttattgggcaagcctagcctatgcctcaacctcaacaacgtccccaaggggaaccccatgagcatcaacactctgctggctggcaaggccctcggcttcggtaccgcgccgctgggcaacatgttccgtgacatcccggaagccgaggcccaggccaccgtggacgcggcctgggaacagggcacccgctacttcgataccgccccgttctacggcgccggcctggccgagatccggctcggcgacgcgctggccaagcgcaaccgcgacgacttcgtgctcagcaccaaggtcggccgcctgatcctggacgaagtggaagacaccagcgcccgcgatcttggcgagaagggcggcctgttcgtcgccggccgccccaacaagctggtcaatgactactcggccgatgccaccctgcgttcgatcgatgacagcctcacgcgcctgaagaccgaccgtctcgatatcgtctgggtgcacgacatcgcccaggatttctacggcgatgagtggctgtcgtacttcgagaccgcacgccgcggcgccttcaaggtgctgacccgcctgcgcgaggagggcgtgatcaaggcctggggcctgggcgtcaaccgtgtcgagccgatcgagctgaccctggatctggacgaagcccgtccggacggcttcctgctggccggccgctactcgctgctcgaccacgagcgtgcgctgcagcgggtgatgccgaaggcggccgaacgcaacaccggcatcgtggtcggcggtccgtacagctccggcgtgctggccggtggcagccacttcgagtaccagaaggcgtcgcctgagatccttgccagggccgagcgcatcaaggccgtcgccgccgggtacggcatcagcatcaaggcggccgccctgcagttctcgctggccaacccggcagtggctgcggtgatcccgggcgccagccgtcccgagcgcatcgccgaagacgacgccgcactgaaggaaatcatcccggccgggttctggcaggaactgcgcgcccagggcctggttgcggccaacgccccgctgccgatcgacaacatctga

SEQ ID NO: 493067 - DNA, 411 bp, Stenotrophomonas maltophilia
atggcaactgcatctgcatccatcaccgtgccgaccccggccgaccaggtctgggacctcatcggcggcttcgattcgctgcccgactggcttccgtacattccccggagcacgctcagcgaaggtggccgcgtgcgccatctggccaatcccgacggcgatgccatcgtcgagcgcctggaagccttcgaccaggccggtcgcagctacacctacccgatcctgcaggcaccgttcccggttaccggctatcgctccacgctgcgtgtggtcgagcagggcggcggttcgcggatcgactggtccggtgagttcactccgatgggcgtcagcaacgaagaagcgtccgcgctgttcgagggtatctaccgcgatggcctgaaggcgctggaaaccacgctggccgggtga

SEQ ID NO: 493068 - DNA, 495 bp, Stenotrophomonas maltophilia
atgtcgatccgcatcgccctggccctgttgccactgctgctcgtggccccgcacgccctggccgctccgtcctcgaagatcgaccacctggcgtggctggccggttgctggcagcttgatggccagccggccggcgctggcgagcagtggtccaccctggctggaaacaccctgttgggcagcagccgcagcctgcgtgacggccgcaccgtgggtttcgagttcatgcagctgcgccagcatgacgacggccgcctggtgctgaccgccctgccctccggccagaacgccacggacttcaacgccacccgcgtcgatgccaacgaggcagtattcgagaacccggccaacgacttcccgcagcgcatccgctatcgacgcctcgatgaacagcgcgcgcatgcgcgcatcgaggtcgcgcaggagaacccgaaacaggccctggacttcccgatgcatcgcgttgcctgcggtggaccatcacccacccactga

SEQ ID NO: 493069 - DNA, 834 bp, Stenotrophomonas maltophilia
atggtcgaccgtctcgccattctgctggaacgtttttcggtcaccgcctcggtgttccatgccggcgcgctgtgcggcatcaacacgctggacggcgaggatgaagccgggcagttgcacctggtgcgacgtggcccgctgcaggtcagccacggccagcagaccgtgcaggtcgaggtgccgagcctgctgctgtacccgcggccgatgccgcatcgcttcagtaccgacccgcagcagggcgccgacatggcctgcgccaacctgcatttcgagggtggacggctcaacccgatcagcgccgcattgcccgatttcatctgcctgccgctggccaatctgtacggcggcaacgcagtgctggaactgctgttcgaggaagccttcgagcagcgctgcgggcgtgcggcgatggtcaaccggctgttcgaggtggtgatgatccaggtgctgcggcagctgatggaagggggcgagatgcgtggcggcctgtttgccgggctggggcatccgcggctgcggctggcgctggtggcgatgcatgaggcgcccgcacagtcctggaccctggaagacctggccgaggtcgccggcatgtcacgcagcgtgtttgctgccagtttccgtgaggcgatgggcaccacgcccggtcaatacctgcagggctggcgggtgggcctggcgcagcaggcactgcgccagggcagaccgctcaagcggattgccgacgatgtggggtacggcagcgaagccgcgctgtcgcgcgcattcaaggcgcacaccgggcagtcgccgcgcgagtggcgtgggcaggcccgcgccggcgcggcctga

SEQ ID NO: 493070 - DNA, 393 bp, Stenotrophomonas maltophilia
atgcacgcattgaacaactacttgctggtcttcatcggcggcgggctcggcgcctgccttcgccatgcctgcaacctgatcggtgcgcgggtggcagtcggcagcccgtggccatggtcgaccttcctgatcaacatcagcggcgcgctgctgatgggcgtgctggtcgaagccttcgccctgcgcaatggcgcctcgccgcagctgcgcctgctgctggccaccggcgttctcggcggctacaccacgttctccacctatgcgctggaaatcggcgtgctgctgcagcgcggccagcacggcctggcagcgttgtacgccggcggttcggtggcactgggcctggtcggcctgttcggtggcatgaaactggcccggctggtgctgggctga

SEQ ID NO: 493071 - DNA, 402 bp, Stenotrophomonas maltophilia
atgaagaaagccgggcaccctcgcccggccgatctggcccgcgccgccgattcgacgacggcaaccatcagcaactggctcaacgaccacgtcagccccgcccatgtgaaggccgaacagctgttccgcatcgccgatgcggccaagctggacgcgcgtgaactgctgtatggcgtgagcgggcttggcgtcggtgagcggggcaatacctatatccccagccaggcccacctggatgtctggcaggacgcctacgaactggtcagccatctggtggaagagaagggcctggagatcgaccaccgccgccacgcggccctggacctgctggccttcgaactgctgatggacggcttcagccgcagcaaggtcatccgggtgctgacgacctcgatgacgtga

SEQ ID NO: 493072 - DNA, 204 bp, Stenotrophomonas maltophilia
gtgaccgaattctggagcaaggggcaggtgcgcacccggctgggtttccgcaccgatgccgaactggcgcgcttctttggcataagccgatctgcagtgtcgcaatggcccaaggatttcccgattcctgcgttacgccaatacatcctgcatcagcgctatcccaacctgttcccggcaactgaagccacgcagggcgaataa

SEQ ID NO: 493073 - DNA, 237 bp, Stenotrophomonas maltophilia
atggaatacggcatgcatggcttggctgaacgggtacgccgcgaactggaagccagttatcacaaacacggatgcggtccggcgttctgggatacctaccagcaggtgctggaccgcctggtcccgcaggggaccgagcgtaccgaagtcaccaatgaaatggcgctgatcatcgaacagctcggcatcgtccgacgtgcgcagctggtgccgccgcacgccaacgggccgcgttga

SEQ ID NO: 493074 - DNA, 1056 bp, Stenotrophomonas maltophilia
atgagtacgccctgtaccggaaccggaaccccacgcccctggcgttggcgcggcgcgctcagcgcgctcttgctggtcctgttctatgccctgccatggctgcgctggaatggacaccaggctctgctgctggacatcaacgcacggcgcttcgacctgttcggctggacgttgtggcccggcgatgtcggcgtgctgatcgggttgctggcggtgctggcggtgggccttgcgctgctcacccacctcgccggccgcatctggtgcggtcatgcctgcccgcagacgctgtggcgtcgtgccttcgactggatcgcgcacggcatggccaaggtcttgccagtgccagccgtgcgcccggccacccaggtcgcgtgggggctgctgtcgctgtggactggcatcaccttcgtcggcctgttcagcccgatcgccggactgctggccgccgcgccgcatgccggctggagcggctgggaaacattctgggtgctgttctatgccgccgccacctggggcaatgccggcttcctgcgcgagcaggtgtgccgttcgctgtgcccgttcgcgcgcatgcaaccactgctgatcgatccacatacaccacgcatgctgtacgacgcgcgccgcggcgaaccgcgcggcatgcgccctccgggcatggggggcgtgctcggacgcggacgcggcctgctcgacccgaccaccgcacaggactacgtgttccgcgccgcacatccgctgctggccggaccgatgcccaccttcagcgccgatcgcctgggcgactgcaccgactgcgccgcgtgtgtcagcgcctgcccgatgcagctggacatccgccagggaccgcaggccgattgcctggcctgcggcgcctgcctggacgcctgctcgcggcagcagcaccaggccggtttcggcccggggctggtgcgctactgcagtccgcaggccatggccgggcaaccgcggcaatggtggcgaccgcggaccctggcactgctgtcaatgctgctggcgctgttggcctgtggcgcctggcgcctgctttga

SEQ ID NO: 493075 - DNA, 288 bp, Stenotrophomonas maltophilia
atgaacagaccctctcccagccgccgccagcagctgatccagcactggggcgccatcctctggcccagcttcatcgctgccggcctggccagcgtggtgttcttcgccttcgtcgacccgctgcggttgcaggcgatcagcttcccgggcacggcgatcagccgtgaactgggctatacggcaggattcttcatgttctggtcggtgaccgcactttccagcgcggtcacctggtacctgcagcggcccctgccgagcgatgacgacgacgagctgccgctgggatga

SEQ ID NO: 493076 - DNA, 507 bp, Stenotrophomonas maltophilia
ttgatctggatcaacggcggtgccggccggctgcggcacactgccggcacgctttgggtacccccgatgaacgcaataccgccacctgtcctgcccgtcgcctcgcccgggctgtgcaccgagcaggaagtgacccgcctggtccacgacttctatgcgcgcgtgcgcgaggaagagcggttggggccggtgttccaggcgcatgtccacgactggccggaacatctggcgcagctggtcgatttctggtcggcgatgctgcgcggcacgcgccgcttcaagggctcgccgatgtccaagcacatggccatcgagctggacaaggacttgttcgatcgctggctggtgctgttccggatcaccaccgccgagtgcggcaacccgctgatgcaggagctggccaacgacgtcgccgcgcgcatcggtgacaccttctggaagcgctaccagatgctgcgctggccgcaggtgggcctgccggtgctgggaatccccacccgcgattga

SEQ ID NO: 493077 - DNA, 1437 bp, Stenotrophomonas maltophilia
atggccgtccggcgcgatgctggcgtcatggacacgttctctcccgccgccggtggcctggcctggaccttcgaccccgacctgctgcgccggcatgaccggccggggccgcgctacacctcgtatccgaccgcgccgcacttccacgatggcttcgacgcgccggcgctgcgccaggcgatcgccgacagcaaccagctggcgcgcgcgctgtcgctgtacgtgcatgtgccgttctgctccagcccctgcttctactgcggctgcaaccgggtgatcacccgcgaccgcggtcggggccacagctacgtcgcgcgcgtgctggccgaggccgacctgctggcgccgcagttcgaggacggccgtgaggtcatccagctgcatctgggcggtggtacgccgaacttcctcgaggccgaggcgatgaccacgctggtggaggggctgcgccggcgcttcgatttcagcgattcgccgcagcgcgatttctcgatcgaactcgatccgcgcttcatcgatacccgcgatgtcgccatgctggcgcggctgggcttcaaccgggccagcctgggcgtgcaggatttcgatccgcatgtgcaggaatcgatcaaccgcatacagggcgtgcagcagacgctggacatcctgcatgcctgccgcgacagcggcatgcgctctgtcaacgtcgacctgatctatgggctgcctggacagagcctgcagggattcggccgcaccctggaacgagtgctggcattgcgaccggatcgcctggcggtgtatggctacgcacacctgccacacctgttccgcgcgcagaagcagatcgacgagcgccggttgccttcaccggaagacaagctggcgctgctgggcctggcggtggagaagctttctgctgcgggttaccagtacatcggcatggatcacttcgcgctgccggaagaggacctgtcgcgcgcgcagcgtgccggccagctgcatcgcaacttcatgggctataccacccacgccgataccgacctgctcggcctgggcgtgagtgcgatcagtcatatcggtgccacctacagccagaatccgcgtgacctgccgtcgtgggaggacgcggtggaccagggccagctgccggtctggcgcggcgtggcactgagcgccgacgaccagctgcgcgctgaactcatccagcagctgatgtgccagggcgaggtggacggcgccgtgctgggccagcgccatggcgtcgatttcgagcagtacttcgccgaggacctgcgttcggtgcagcggttgcaggaagacggcctggccgaataccgcgacggtgtagtgcgcgccagcgagccgggtcggccgctgctgcggctgctggcgatgtgtttcgacccctacctgcgcgcggcgcatgaacagccgcgttactcgcgtgcaatctaa

SEQ ID NO: 493078 - DNA, 1029 bp, Stenotrophomonas maltophilia
atgggtaggaagccgaagaagccaggggcgattccccggctgcgccagcgcaagcagaagtcgggcgtggtgttctactactacgacaagggcggcaagccgcgtgtcgagatcccgctgggcagcaactacgcgctggcggtgaagaagtgggccgagctggaaggcacgcgcgaggcgcaggccgtggccgtcatcaccttccggcaggtgagcgatgcctaccgaaaggaggtcatcatccacaaggcgccgcgcacgcagctggacaacgggcacgaactggccaagctgctggagtacttcgacgacccgccggcaccgctcgactcgatcaagcccatcacggttcgccagtatctcacctggcgcaccgccagcggcaagggcatggtgcgcgccaatcgcgaaaaggcgctgctgtcgcacatctggaacttcgcgcgcgacaagggctacaccgccctgcccaacccatgcgccggcatcaaggggttcaaggagaccggtcgggacgtctacatcgaggacgaccagtaccaagcgatccgcgcagctgccgacgtggtggtgcaggacgccatggacctggcctacctgatcggccagcggccggcagacgtgctgtcgctgacagaaatggacgtgcgagacggggtgatcaacatccgccaggggaagaccaaggccaagctgcgcatcgcggtcgagggcgagctggcggtgctgctggagcggctgcgcgcgcgcaaggctggccatgccgtgcgcaacaccctgctgatcgtcagcgagcgcggcgatgccgtgagcgtggacggcatgtccaggcgctgggcgaaggcctgcgcggctgccggaatcgagggtgtgcagttccgcgatctgcgtgcaaaggcggccaccgacaaggccgaatcgtcgggcgacattcgcaaggcgcagcagcagctgggccacaccacggtgtcgatgaccgagcattacacccgcaagcgccgcggtcacaagtccacgccgacgcgctga

SEQ ID NO: 493079 - DNA, 249 bp, Stenotrophomonas maltophilia
atggccacgaagaagcaggccaaccccagcgcaggcgcactatgcctgtcccgggagtcgatgcgggagctgtgcggcacaccctatagggaacgccagcaggagtttctggtgctgaacgggattccccactacaaggggctggatggttggccgcgtgtgctgtgggccaccctggaagggggcgcggatgcggcaactgagaaggccgtcgccgttgccgagtggcgatcgaacaaggtggcatga

SEQ ID NO: 493080 - DNA, 795 bp, Stenotrophomonas maltophilia
atggctgagcgaccgatgatcgcggtgtggttctcctgcggcgccgccagcgcggttgccgcgaagctgaccatcgagcgctatggcgctacacacgatatccgcgtggtgaacaaccccgtggctgaggaagatccggacaaccagcgctttgctgcagacgtggcggcgtggctgggagtgcagatcgagcgagccataaaccccaagtggcccacctgttcgtgcgaagacgtgtgggagaaggagcggtttatggcgggtgttgctggcgcaccctgcactcgggcgctgaagaagcaggcgaggcagcactgggagcagcagaaccggccagacttccatgtccttggcttcacagctgaggaaaaggcccggcacgcccgtttcgtgctgaccgagcggcccaacgtcctgccggtgctgattgaggccgggatgacaaaggacgactgtgcacggcggattctggccgagggaattgcgctgccggccatctacctgcggggctacccaaacgccaactgcgtcggatgcgtgaaatcgcaatcggcgacgtactggaaccatgtgcgccgccaagaccccgaagtgttccagcggcgtgcggagcagtcccgcaggatcggcgcaaagctggtcaaggttcgcggtgaacgtcgctacctggacgaactgaagcccacggaccgtggcggcgccatgaagacactcaattttgattgcggcctgttctgtgaagaaccggagctgcaggccaccgagcagctgcgcgctgcgctggccactgactga

SEQ ID NO: 493081 - DNA, 153 bp, Stenotrophomonas maltophilia
atggctgaccagctgctcaccgctgcaatggtccatctgctcgccctgggcgggtttgcggccggcatcgccaccctgtgggcgatcagtcgcgcatgccgcgccgcgcgcaatgggctgcgctggtgcttgcggaggtgcgctcatggctga

SEQ ID NO: 493082 - DNA, 567 bp, Stenotrophomonas maltophilia
gtgatcgacatcgaacaaagaatcagcgcagccatcgagcgtatcacatcgggcaacgctcccatgagagttcctgcggacgaaactgatcctgacttggttctagctgattgcctagctgagatacgccgactgcgcgccgccctctccgcccgccagccggcgtatgtgcaaggctgcgatgagctgcgtgcgcggaccgagggcgagcgtgccgcgtacatggaagggttggaggaaggcaagaagatcgccgcccgtcagccggtgggggagccggtgggctacctctacgactggacccacagcagcgcactcggtcgaggcgatgaagagttcacctctttcacgacggacatcgaagtggctcgtagcagcaagggcggaatcaacattcgtccggtctacgccgccccgaccgcgcaggccgtggacctggggcagttccgggacttggccgagttcgcgttgcgaaacgcgaagctccacaactgctgggagaagcgggaagcactggcgcgtgaactgctggacctgatcggcagccgggatccccgccatggctga

SEQ ID NO: 493083 - DNA, 507 bp, Stenotrophomonas maltophilia
atgaccaccgacaacaagaccctggcggacgtgcagcccggtgggagggtgaggctgggggatcaggccgagctggatcggcatgaatttcaggcgtggacacgcgagctgctcccctgtccgctctgcggaaacgttgccgagttcgtgccgtacaaggacaacgggctgaccctgaagtgcaagagcatgggatgcatccagcggaaccagcgcaccctccgctacggaatcgattggctgcggacctcgatggcagaacactggaatacgcgcgccctctccgcccagccatccccgggtggtcagggggatgctcgcaggcaatggctggaaatccgtgggctggccgcagccatcgtgaagaacctccaagcgttcgctgattcgccacacaaggcggcgtggtgcggagcgcttgacgactcgctgttgttcgcagatcagatcgaaaaggctgccgctgccgcctatgaagccgacctcgaacggaggcgcatggcatga

SEQ ID NO: 493084 - DNA, 369 bp, Stenotrophomonas maltophilia
atgaagaccatcgagtactccatcagcgaagccgacgccgtgcgccacctgatcgtgtgcgacacacagttcacgtgggctggcgtcaccaatctcacgttgccgcagatgatggatctgcaggcccgtggctgggttgtggaaggcgctgaaaacgacgagttccagctgaccgaggctggcgaggcagtcgttgccagggcgctacaggccgggagtggcagcgacgatgcgctacaggaagtggcccgcaagattcgcgcacgcgccgccagcgagggcacggctcagcaacacggaaagcagtacgtggcaggccttcgcaccgctgcgaacatgatcgacgccgcaatgggagcatccgcatga

SEQ ID NO: 493085 - DNA, 219 bp, Stenotrophomonas maltophilia
atgaccagcatccacgtacagccgaccttcgacctggccacgcaggccgagaaggaccgccagcgggccgagatcgccggcgacgtggcgcagttcctgcgctcgggcggcaaggtccagaagctcggcaacagccccatcgaccgatccaccatcagccgccgccaggtggtcgagggtggccacgacagccgcacgaagaagggagcgcgcgcatga

SEQ ID NO: 493086 - DNA, 207 bp, Stenotrophomonas maltophilia
atgacgaatcgaaccaagccggcctacccctccgaaggccggatgaatgcaccgagtggactgaccaagcgcgagctgttcgccgcgatggcgatgcaggggcttctcgcaagcggcaaggcatggaatggaccgatgggttggatcggtgaggagtctgtccgcgtcgcggactcgctactagaaaccttggagaagaccgcatga

SEQ ID NO: 493087 - DNA, 222 bp, Stenotrophomonas maltophilia
atgaagacctgcacgaagtgcgcggcccggctgccgctgcggttcttccctctgatcaacggcaaggccaccgccgcgtgcgcgccctgccggaacaccgagcgccgcctgcatgacccgctgcgccccctgcgccgcgatccgctgcaggtgcgcctcaacaacctcaccaacctgtggcacgggccagtgcgccgcgtgccgctcaggagccacgcatga

SEQ ID NO: 493088 - DNA, 216 bp, Stenotrophomonas maltophilia
atggacgtgacgatctaccccagccacgccaaatgcctgcgccgtgccggcctcgcccgcgcccagctgttcgcgcaggtgatcgagggcaagcgctacaccaccaggcaggtggccgagattctggacgtctcgcgcagcacggcctacgaccggatcaagcgcggcccctacccgctcacctgggccaacctgatgaaggctcgcctgccatga

SEQ ID NO: 493089 - DNA, 780 bp, Stenotrophomonas maltophilia
gtgatcgtcatcgggtgcgaccagggcagcgaggcgtggcaccgcgcccgcgccggcatcatcacggccagcatgttcgccaccgcgcgctcgcgcgtgggcgagctgaccggccagcagcgcacctacgtggacgcggtgctgtccggcctggccgagaagaccgcaatggagcgcgccggatacaaggccgtgccgcgctcggcaatcatcgagaaggccatcgccggcgagcccatcggcgatttcagcgaggcgtcgaagaactacgccttccggctggctatcgagcgaatcagcggcgagccgctgggcgaaggcttcgagacgttcgccatgcgccgcggccatgagctggaaccggaagctcgcgccgagcatgaggtgcagtccggcctgctggtgaaacgcgctgggttcgtgttgagcgactgcggcgactacggctgctcggctgacggcttcatcggcgaggacggcggcagcgaatacaagtgcttcatcaaccccgagaagctgcgcgcgttccacatcgacaacgatgcgagcgaggtgttcgagcaggcccagggctgcatgtggctgaccggccggcagtggtggcacatcggcctgtactgcccggcgctggccgccgtgggcaagcagctgtggtggcgccgcttcgaccgcgacgaggcgttcatcgccaagctgcgcgcggacctggaaccgttccggcagatggtggccgggtttgagcacagtctgcgtgctggcgatcaccaggaggccgcctga

SEQ ID NO: 493090 - DNA, 963 bp, Stenotrophomonas maltophilia
atgaaccagatgaccacccgcgccgctgtcggcgccctgatgaccagcgagcaggccgaagctatccgcggcgcgttgaagtcgagcctgtacccgggcgccagtgatgcgtccatcgacatggtgctgagctactgccaggcggccgggctcgacccgatgaccaagccggtgcacatcgtgcccatgaaggtgaagatcggcgagaaccccgacggcacccccgtcaacggcatgcgcgacgtggttatgcccggcatcggcctgtaccgcatcaacgcctcccgcacgggtcagtacgccggctgcagtgaacccgagttcggaccaacctgcaccatggagtcggtgcgcgacgtgtggtcggatggtcccaatgggcgcaggcagaagacgcagaaagctattcagctgctctacccagaatggtgtcgcgtaacggtccgcaagctgctcggcaaccaggtggtggagttctccgccaaggaatactggctggagaactacgcttccaagagcgatggcagcccgaacgccatgtgggaaaagcgcgccttcggccagctggcgaagtgtgcagaggcccaggcgttgcgcaaggcgttcccggaagcggtcggctcccagcccaccgccgaggaaatggaaggcaaggaaatcattgacggcgagacggtgcgcgctgatcgccgcccctccaccgctggcgccatcacccgccagcagcaggccgagccgcaagacaccccggagcgccaagcgctgtacgccagcctgaaggatttcgccgactgcggaatggaggaatacgagggcgcctggggccgcctgaccaaggagcagcgacagctgatcggcagcgcgggccatgaaacgctgaagggcatcgccgaacgcgcaagcgccaccgtagtcgaagaaggcgaccagcagcctgcagccgatgaagaggtgccgctgtga

SEQ ID NO: 493091 - DNA, 939 bp, Stenotrophomonas maltophilia
atgtccgaagccctgattccactcgaatccgtcaatgccgtcgaggccttcaccggcggcggactggacgacctcctggcccgcattcgcgctgaggccgtcaccctggtaccgaacgtcaagacggttgccggccgcaaggaaatcgcctcgatcgcctacaaggtgtcgcgctcgaagatcgccatcgatgacgccggcaaggcgctggtggccgacctgaagaagcagaccggcgacatcgactcggcccgcaagaaggcccgcgacacccttgacgcgctgcgcgacgaagtgcgcaagccgctcaccgactgggaagaagagcaggcccgcattgagcgcgagcgcgccgaggccgaggaacgcgcccgttctgaggccgaagcggcccgcctggccgagatcgcccggaaggaagaagagatccgcgcccgcgaggaagccgtgcgcgccgctgaagaggcagagcgccagcgcgttgcagctgagcaggccgagcgtgagcgcgtcgagcgcgaggcccgcctgcaggctgaggccgcagagaacgcgaagcgcgaggcagctgctgccgtggagcgtgccgaacgtgaggcgcgcgaagccaccgagcgcgcagcccgtgaggcagccgaagccgaacagcgtgccaaggatgccgccgagaaggccgagcgcgaaaaggctgaagccgtcgccgccgctgagcgccgcgcgcaggaagaagctgagcgcgccgagcgtgagcggcaggcccaggccgatgcccagcgcaaggcggacgaagcacgcgccgccgacgtcgaacaccgccgttcgatcaaccgcgccgccatggccgcgctgatcgcccagggcatcagcgaagacgatgccgccaccgttatcaccgccatcgtgcagggcaaggtcccggccgtggccatccgctactga

SEQ ID NO: 493092 - DNA, 150 bp, Stenotrophomonas maltophilia
atgagtagccgcctacgcatcgcctgggccgccgtcgcgctgttcgccgccgtcgtcgtgccgctgcgcatcgccgagatccaccaggcccacaccgaccgtgacgctgcgaaagcccgatgggctgcaaccagcagcgtgcgcggctga

SEQ ID NO: 493093 - DNA, 150 bp, Stenotrophomonas maltophilia
atgaacccgtttgaccggctggacgcggccttcgccgaccagttctgcctgccgccaatcgccccgccgatgtcgctggcggaagcccgagaacaacggaaccgcgaggccgtggacggcctgtgcgtggaggaaaacgaccatgagtag

SEQ ID NO: 493094 - DNA, 252 bp, Stenotrophomonas maltophilia
gtgagtcggcgcctcacggatgcggagcgcgtcgcacacagcgacttcctggcgtcgacgtctggcatcaccaccagcacggaccacttcctggccggaatcgactacgcgcggtcgctgttcgctgaggttctggccgccgcccgcgcatccctcgcggcccgcgacctggcagaacaaatggccgccgacgaccgcctgcacgccgctctggccgcgtgcgaaccggagacgcgacatgaacccgtttga

SEQ ID NO: 493095 - DNA, 474 bp, Stenotrophomonas maltophilia
atggccgccatcgcatttggactgccccgctcgaccacccggaccggctatgcgtcggtccgcgaccacaagcgttccatcgagctgacccgggaagagcgcggcctgccgctgcacccggccaatgccttcatcacctgctcggactgtgacggcaccggcgaacacgtccgcaacgacagcgccagcggcgatccgcagtgcgagtacggcgtggcctgcggccgctgcggcggcgaaggcgagattgccgacggtctgatcgacccgctactgctggtggcgaagtaccgcaagggccgcttcggctgggccatgagcgagcgccgggcggctgaccgccggcattcctacaacctgtaccggatgcgcgcgatgcgcccctgcagcggtctggctgcggtcgacatgcgggcccgggcgcagatgtgcgccaacgacgcagcccgcgcattgcagcaggtggccgcatga

SEQ ID NO: 493096 - DNA, 372 bp, Stenotrophomonas maltophilia
gtgatcgcagcaattcttgcactagcgttaggcaccacggcgactaccgatcgatgggtagaggttggcgcaactgtggtgggcggtagcgtgtatgtggacaagtcaaccgttctgaaatctgaggacggcaccacggtttgggtcaagttcgtcggcggtggtgaacgtgtcctaggctcgccactcgccgccgaagcgatggcccgcgtttcattctcctgctccaagatgacctactccgtccatgaggtggtgcgccgcgatggcgctggacgtcctctacctccgcaggcgaacgacaaagtcgaggggcgcactgtggtgccggatacgatctacgaagccctgtggaacgccacctgccgctga

SEQ ID NO: 493097 - DNA, 363 bp, Stenotrophomonas maltophilia
atggcaatcagcgacgagcggctgaaggaactggcaatggaaatggctgtggcgatgggcgtccagccacgggcaaagccctcaccgactcttgtccggcgaggccaagtgatcgccttccagcgatcagggatggatagcgctttgcgtgacgttgtctgcgccaggatcaaagacctcgccagaatgtactggctcgcttggcttgtccggcaagagactgcacatgtgcgcggcgtcattgagtgcttgaccgacgatgagctgatggatttgaaggacaaaatggagcgagccagggaatgccgtgtggaaggcatcgggttcgatgaagcaggcctggtcagggagcaaagactgtga

SEQ ID NO: 493098 - DNA, 567 bp, Stenotrophomonas maltophilia
atggcgagtgatgggttcatagcgtcggaaaatatcccattcgggataccattggaatccccaaatgcattttgtccgacgaacggtatgcgggatcatccccatatgcatgccgatgacctgccccgccgaaatctgcgacacctgattgccatcaaccgaacgaccgctgctgacgccgcagtcgcctcgggggcgggccagtcctgggtgagccgctatatgaccgggaagatcagcaagcccaaccccgagaagctggcccagcttgcagcgcacttcggagttccgatcagcgacctgatgtggaaagacctgtcgagttcaggtgcgccgtcacagtctcagccggtgggatccgagcgcgccatagtcgaggccgcagtgaagctggtgcgcgagctggaggccatatcccccgatgccccctcccccgacacctatgcggaacgtctctacgtggccatgaaggtggtccgggatgagggtgccgaaggcgtcttggacgatagcaacgtcatcgtcgcgctacgccgctttgctgccgaactccgcaaaacagggtga

SEQ ID NO: 493099 - DNA, 798 bp, Stenotrophomonas maltophilia
atgtcatgcgctcaaggccaaggcgggcgccctctcgcggtaggatgcgaatgccagtccgcaacctgccaacgagagggatcccatgagcatttgcccgcactgcaagaagagcttcagcaccgtgaccattggcgaagtaagcgcgagcgttccgttcgggcgaaggacgttcaaagcgctgtcgtacaactgcccgcacatcggatgcggggtttccttgggcgtcgaaatcgaccccattgcagttcgcacagaaatcgtggcgcaggtcatcgacgcgctccaggatccgaaacggaagtagttcgccagcacccgcatgcacccgggtcgccgctaccgaggcaggtggcggcgtgccccttgcaaggggctgtgccggtggccgtgctgtccgactcgccgtggccgaggacgcggttcaataggtcgatttccgcaacctcagccacctgggccagggtcagcgcaccgtgcggacttaagtccttctcggcgtgcagcacgacatgggcggagatcgcgttgccgtcggcatctgcgaccactctcaacgcaatccatccgaggtggatggtcttgttgtcatcacgctgcacggctggcccccttcttgcggcgagcggctttgcgctcggtagcggtggcaaggtcaaccagcgccttccccacctcgtaggtcggctgcatcaggccgcgtcggatccggttgatggtggactgccgggcgcccacagcagagccaatgctctgttcggtcagcccagcagcgcggagacgttcaatggcgagtga

SEQ ID NO: 493100 - DNA, 507 bp, Stenotrophomonas maltophilia
atggcaacccctggcaaccaaaaagaactgaggctcgcgttcggcgtgcaccacgccccgaaagacgcgtcctcgcagatcgtccggcagatcgaatcggcggcgcacgcgctggccgtgatgatccgcgctggccaccacaagctggaatacgtggcggcctgcatcggcaagtcgaagtcctacatctcgcggatgcagaacggcgtccgcccgatccccgagaagctggtcggcccgctgtgcgccgcgaccggctccaacctcctgcgccagttcctcaacctgcaggccgctctggacggcatctgcgaggtcgagcgcctggccgacctgatgaggtccgccaatgaagaaccgcgagctgctgcagcatctggacgagtgcatccgggtcatcgagtccagcccgcctatgacgcgcgaggagatcgtcgcgcacctgtcccgatgcgcggccgagcaggccagggtggaagcccggcgcacggctacgccgcagcctga

SEQ ID NO: 493101 - DNA, 735 bp, Stenotrophomonas maltophilia
atgcgcgactacggaaagatccacaccgggttctgggccagcgagacgatgctggggctggaatccgatgctcgcctgctggcgatctacctgatgacgagccagcacacgacgatgctgggtgcattccggctgcccgatgcctatgcctgtgaggatcttggctgggattcggaacggttccagaacggtttggaaaccctttcggaagccgggttcgtgaagtacgaccgcgcgaccaaggtcgtctggatcgtcaagttcgtgaagtggaaccgcccggacaatccgaaccagcagaagtcgatcgccaagcttgcccaggctctgcctgactcgctggctttcaaggatgaaatcctcgcatcgatcggagtttccgaaacggtttccaaaccgttaggaaactctcctgttcctgctcctgttcctgtttctactccggaggggatgcaaggggaggttctgaccatcccgctggccgacggttccgagtacgccgtgaccgatgccgagctggccgagttccgcgccgcttatccccggatcgacgtggtgggcgagatccgcaaggccagggcgtgggcggtggccaacccgcagaaccgcaagacgcggcgcggcacgccgaagttcatcaacggctggctgagccgggcgactgagcgagtgccggcgcaggtgctgcagctgacccagccgcagcaggctggcggcggaaggagggcgctgtga

SEQ ID NO: 493102 - DNA, 1272 bp, Stenotrophomonas maltophilia
gtgagcaacgttgccccagccttcgccgaggaggccgtgatcggcggcctgctgctgcagaacgagcggttccacgacgtggcaccgctgatcggcgcagaccacttcaccagcccgcagcgcgctcggattttcggactgatccgcgatcgcgtgctggccggcgaagacgccgacaccgtgaccatcggtgaggcttccccggaagacttcgactacgccgtccacctcgcgtctacggttccgagcgcctcggccgcgctggcctatgccgagatcgtccgcgagaactggcgccgccgcgaggccgtggctgttggcctgcagctggtgtctgctgcccgcgccggcgaggaggacgcggtcgacgtggccgccggccggctgctagcgctcaacgccgtggtgactgcgtgcgagtacaccggtaagcaggcgctgcagcaggcatggcgcgaggtcgagcgcaaccacgcatccggcggtcgtctgccgggcatcccgacgggcttggccgcgctggacgagatcctgggtggttggcacgacagcgacctgacgatcatcggtggccggcccgccatgggcaagacagcgttcctcggtggcctgatcgaggcggcggcggatgccggcaagcgccctggcgtcatcagcgccgagcagccggccgtgcagctggccctgcgccgcctgtcgctggtgtcgtccgtcgccgcctctcgccttcgcagcgggcagctggaggacgaggattggggccggctgcagtcgagcatgggccaagccatagcgcgcgacatgtggatctacgaccgctcggccgtgacgctggacgagctcgtcggtatcgcccggaagtggaagcacacccacggcatcggctgcctgttcatcgactatgcacaacgcatcactgtgccccgcgcggaccgcatcaccgaggtttcgcaggtggcgcgcggcatgaagaatctcgcccgtgacctgcagatcccggtcgtcgcgctggcacaggtggtgaagggcgtcgaccagcgggtaggggacaagcgtccgaccgccggcgacctggccaacagcgacgagctgacccgcgaggccgaccagatcctgatgctgtaccgggacgaggtctacaaccgcgaaacgcaggaccgcggcatcgccgagatcctgatcgagaagaaccggcacgggccgaccgggttcaagaaggtggccttcctcagcgaaaccatgcgcttcgccgacctggggagggagttctga

SEQ ID NO: 493103 - DNA, 180 bp, Stenotrophomonas maltophilia
atggtcccggcttacgaactggaacgcgcccgccagaccggccggtggatgcgcgacgcgcacaaggaccgcaattcggtcccgctctacgccatgggcgaggacgggctggcgctgcgccaagcatggctagccggctacgacgaacgagacgagcagatcaggaggaagcggggatga

SEQ ID NO: 493104 - DNA, 156 bp, Stenotrophomonas maltophilia
atgaggtttctgcggaagtacccgaagacggggatcagcgttgcaatggtgttgatcaattccccgttcgccttatcaggctttggggttaacacctttctgtgtggagcgttctccgtgttcgcgctgtgggactactgcgaggagaggaaatga

SEQ ID NO: 493105 - DNA, 468 bp, Stenotrophomonas maltophilia
atgaagcgcaccttcctgatcgacccgcagaccaaccgcaactggccgcaggtgctgtccaacgtcgtgagcggtatcaatgactggatcagaggcggcccggtgcagatcaccctggacgagccgaagcggacgctggaccagaacgcggcgatgtggccggcgctgagcgacatcgctaggcaggtgccgctcgtgatcacccgccgcgacggcagcaccaggcaggccacgccctacgactggaaggacgtgctgaccgcagcgttcgaggaagagaccgagtgggcacccggcctgcgcggtggcgtggtgatgctcggcgcccggaccagcaagtacagccgccggaagatgggcgacttcctcaccttcatccacgccgagttctcggaccgggtgcgctggtcggacagcgcggtggaacgactggcgcagttcgcgccgaccaacaggagggcagcgtga

SEQ ID NO: 493106 - DNA, 297 bp, Stenotrophomonas maltophilia
atggacgccatcgagaagcgggcgcgggagctgctggatgccgagctgcgaaagcttgggctgcacgaggacgcctatcacgttggatgcggtgctggcctcgacaggaacgatcaggccgcgatcagcgccatcgccgccgccctctcgccgcccgagggctacgtgctggtgccggtggagccaacagaggccatgcagattgcagtcgagaaagccaacccatggctgatccgctatgaagctccagaaatttgggccgccatgctcgccgctcgcccggaggtgaagctgtga

SEQ ID NO: 493107 - DNA, 345 bp, Stenotrophomonas maltophilia
atgccgttccctctacaggctttgcgaacggatattgccatgcagttggcgatccgcagtcgcgggatggcgaactccctaaatccgctggatcacccgtggaactttgattccgccacggtggcgaagcaccggcttcgcgcggttgttcgttccgacagggaggtttgtcagacggcccggtggcgtctgcgcccgagctatttcggaagtaaatctgacttggccaaagcgcagctggagatgctcgccggccgagaggccttattccgcgggaagcgcgtaacgcgtgaggagctttcgaggatgaggaagcctcgctaccggtgggaggtgcgccgatga

SEQ ID NO: 493108 - DNA, 303 bp, Stenotrophomonas maltophilia
atgaactaccgcgaccgcgcactgctggacctcgcctaccagctcaactgcaccctccagatcgaaggggtgtgcgagggcggcccgggcgagccatgccatagcaaccagtcccgacacggcaagggcggcagcatcaaggcgcacgactgcttcttcgcgagcggctgccggagctgccaccgcgagctcgaccaggggaagcgcttcacccgcgaggagaaggccgagatctggcagcgggcccacgacctgaccatgttgcagctgtggcagcagggctacctgcgggtgcgcgcatga

SEQ ID NO: 493109 - DNA, 471 bp, Stenotrophomonas maltophilia
atgaggatcctggccatagaccccggcaccgaggaaagcgggtggtgcttgctgcagaacggcagtgttctcgaatctggcgtgatgcctaaccaggagctgctgggtgtagtggctggctatcgccgctacggcgaggatcaactggccatcgagatgatcgccagctacggcatggcagtaggccgggaggtattcgagacttgcgtgtgggtcgggcgcttccagcaggtgtggcggcacccggacgccgtccgcctcgtctaccgacgcgacgtgaagctgcacctgtgcggcaacgccaaggccaaggacgccaacatccggaaggcgctgctggatctgatcgggccgcaggggaccaagaaggcgcccgggccgacctacggcgtcaagtcacacgcgtgggctgcgctgggtgtcgccgtcaccgtggccggcatcacgcccgagtcgaggagggcggcgtga

SEQ ID NO: 493110 - DNA, 198 bp, Stenotrophomonas maltophilia
gtgaccccgaccttcagccagtacaccacgccggagctagagatcgtcgccaggatcgatcacgagctggccaacgagatcttcagcctgcaccggaagggttacgacgtgcgcgaggtgctgcacgaggcccgcgcgttcaagaccgaggcgcagctgatgcgccgcgagatcaaccgcaggaaggcacgcccatga

SEQ ID NO: 493111 - DNA, 441 bp, Stenotrophomonas maltophilia
atggccgcatccgttgaagctccgcgccgcaccggtacaactgagggtgttccgttccggcaggtctggaagccgcgcgtggtctgcgtggtcgacccgaccaacccggcagatgccctgaacgccatccttccacgaatcgcagagaaccagcgcggatgcacggtagccagcttcctactgatcaacccggagacctcgcaggctttcgtcctggccgaggacaagccggtggccgtggagatggcccgcaagggcgagaagtctccgtactggccgtggttggtgggcaagtacagcttcccccgtgtgaccgccgaggccttcgcgaacgtgctggaggacatgctggagcatctgggcatcgccacgccggcgccacggaagcggccgttgcccgtgcagctcgacctgttcgacctgtctgggcacgccgcgtga

SEQ ID NO: 493112 - DNA, 207 bp, Stenotrophomonas maltophilia
gtgagcctggacccgatcacgcagggcctgcagcacctggccggccagttcagcctgacccgccaggagtggcgagaccaccactgcggcggtgactcgctgctggacgcgctggtgagccacggctacgcgcaggagcagaacgatcgcttcggcatcacccggcaggggcaggtgcggctgcaggcggaggtggccggtgaatag

SEQ ID NO: 493113 - DNA, 174 bp, Stenotrophomonas maltophilia
atgagtgagctgcacagcgtcttcctccacaaggggttcctgaagcgcgtggttgtggatctcgggatcgattacgagagcttgccgaccgaaaacggtcagaagtactacgactgggttggaggcggcattcggtattgggatggctggcgggagatgccccttggccggtaa

SEQ ID NO: 493114 - DNA, 537 bp, Stenotrophomonas maltophilia
ttggccggtaagcagcccaaggccggcacggccaagaagcgggcgaaggccaagccgaagtctgccgccgccaagccggggcgccccagcaagtacagccaggccgtggtcgaatccatctgcgagcagcttgccaccggtgtgccgatggcccagatctgccgacaggacggcatgcctgcctaccggaccgtgaaggactggatggacgaggacagcgagaggggccgcctcgtatccgcagccatcgcgcgcgcgcgcgaggaaggcttcgatgcgatcgccgccgactgcctggagatcgctgatgatggcagccgcgactacacgcagaccacggacgggcgcatcgtccccgaccacgaccatatccaacgctccaagctgcgcatcgagacgcgattgaagctgctggccaagtgggacccgaagcgctacggggagaaaatgcagctggccgatgctgatggcgagaagctgccggccccgccgccgttctacgtgatgggcgttaccccggccaagcagggcgagtga

SEQ ID NO: 493115 - DNA, 1368 bp, Stenotrophomonas maltophilia
gtgaccgtgtcggcccagccgaacccgctggcacggcacactccggtgcacatcccggccaagctgctgccggtgctgaagccgaagcagttcaaggtgctgtacggcggccgtggctcggctaagtcgcacaccgtggcgcagatcctggtgatgctgtcgatgcaggctaagcaccgcatcctgtgcgtgcgcgagatccagaagtcgatcgcccagtcctccaagcgggtcatcgaggactacatcaaccggatgggcctgtcggcctacttcaagatcaacaagcagggcgaggaccagatcacctgcatcctgaccggttccacgttcagcttcacgggcctgcaggaccacaccgccgacagcatcaagtcgttcgagggcgcgacgatcgtgtgggtggaggaggcgtccaacgtctcggccaacagctggaacaagctgatcccgaccatcgtccgcacgaccggcgccgagatctgggtgaccttcaaccctgaccagcaggacgactacgcctacaagcgctgggtgctgggcaacgacccggacgcgatcgtcatccagatcaactggctggataacccgtggtggaacccggcgatggagacggagcggctgaagacgctggccgtgtcgcaggaccttcacgaccacatcttcggtggccaaccccgggctaaggccggcatcctgttcaagcgtcactggttcaagcgcttcaacctgggcgacgagccgaagggactgcgcaagtacctggccagcgactacgccggcgcgccggacccggacgaccccgaggctgaccccgactggaccgagcatggttgtgccggcctcgaccacgtgggcgacatgtggttcgtggactggtggagcggccaggaagacccgtcggtgtggatcgccgccctgatgcagatgggcaggcgcaacaagccggtgatggcgttcgaggagatgggcgtcatcctgcgcaccactgatggcgccatccgccgcgcggccaaggccacgcagacgttcgttcaccgggtgccgctggcgagcgccggcagcaaggccgaccgcgctctgggcttcgctgcccgcgctgccaccgggtcggtgcacatcccgaacaccgaatggggcgaccggctgatcgaccagctgtgcgccttcaccggtgaggacgggcgccgcgacgacatggtggacgtgtgcagcctgttcggccgtggaatcgatctgatggccgatggcagcctcccgcccgaggccaagccggctccgcctgcaccgttcacagacccgtggttcaagcagcgcgacgccgccgaccgcgacgaggacgagaagacggcgcgctactaccgttga

SEQ ID NO: 493116 - DNA, 2328 bp, Stenotrophomonas maltophilia
atggcagaccaacccatcgcagcactcgaaaccgggatcgcggccgccgctgatcccgatccggcgcgcgccaagcagatcagccgcatgcaggccgacgtgaagcgctggatggcccgcttcgaggaggcccgcgagttcgacaaagacgcccgccagcagtacgtgaaggaccggcgccaggcgcgcggcgattccggcttcctggtcgacgccaacctgatcggcacctacatcgacatccaggaggcgttcctttacgcccgcaacccggacttcgacgtttctcccggcccggcgcaccgcatgccgacgcctgagcagctgcgggacatcatcgagtccgacgagcaggtgatggccggtatccagcagcaggccgagcaggacgcgatggaggtcggccggcagattgccgtgcagcaaacggccatgggtgtgccaccggaacaggccttcgagcagggccagcaggcgcaggagagctacctggccaccggcgtagtggagaagctggtggccgacgaggtcctgaagctgcgcaagcagtacgccaagcgctcgcgggagatgaagcagttcgccgagacgctggaggccgtcggcacccagatgtggaaggacgcgcagctgaagcgccgcggccgtccgtgggtccgctcgtcgctcaccatcggccccggggtgctgaaggcgacgtggcaggagcgcaccgagatctcgcccgagacgcagaccgcgatcaacgacctgcagcagaacatcgcccgggccaaggcgctgcagaaggagctggaagacggcaccgccggctatggcgcccgtgcgtgggacacggtcaagggcgtgttcgggaacaacgaggaggccaagatcgccgacctggagcgacagctggccgccatccagaacggggccgagcgcgtggtcgcccgcggctacgcgatcgacaacgtggccggcgagaacttccaggtggcaccgggcttcaccatcgccaaccacgtcgatgcgccctggaacgccgagatctcctatccgtcctacgaggacgcgctggccgagcatggtccgtacctggcgcagttcgacaaggacggcaacgccgagaacatcctgcgcaaggccgtgcgctacgcaccgcgcaagccgtgcatgggcaagaacgagagcgtcggcttgaccggaaacgcggccacggctgaggaggccgatgcctacaccacgaacaccgacggcggcgccaatgggtgctacgtgcgccgcatcgagatctgggacgcggagagcaacaccgtcctgaccgcgatcaccggcgttccgttctgggtcaagcccgccttcaacccgccagccacgacccggttttacccgtatttcgtgatctgcacgtccgaagtggacggccagcgccacccgcagagcctggtcagccgttcgaccaagctcatggacgagtacaaccgcatcggctcggccgagactgaacaccgccgccgcatcaagcccaagacggcgttccacgcaggcgcgatggaggcggaagaggcgacgaagctcgccaaggctgacaccggcgagatggtccccctcaacgtgacccagccgagcgcagacctgcgcacgctgttggtcccgatcacctacccgccgatggacccggcggtttacgaccgcacgcgcatcctggccgagctggagcgcatctggggcgtgcaggaggcgctgacgggctccatcaacacggccaagaccgccaccgaggcggacatccagcagcagggtttccaagcgcgcagcagcagccgccgcgacaacatggaatcggtcctgagcgagctggccgaatacacctgccagatcgcccgcgtctacctgaccgacgaggacgtgcgctttatcgctggtccgaccgcattctggccgccctacatggggccggatgacctggccgagttcgtgcgcatcgagattcgcgccggttcgtcgggtaagccgaacaccgcgatggagcgccagtcgtgggccaacctgctaccgctgctgcagaccggcattacccagatcggccagctgcgcggcgcgtcgcccgacgcgatcgccgacgcgctggagcagctgatgcgcctgaccgccgagcgcagcggtgagcgcttcgacatcgaccagctcattccccagaacgacggcacgcagccggcgctgcccgcacaggccgtgcccggcagcgcgccgcctccgcagggtggaaacgccggccagcagccgccggtaccgcccgcgcctcccggtggctcaccggccggcgttcccctcgcagcagcctga

SEQ ID NO: 493117 - DNA, 300 bp, Stenotrophomonas maltophilia
atgaacgagagcatcaattccgcttgttccccggcagaagagttcgaagccgaaggattgcgtgatcgcctgcgcattaccgagagccagatcgcgcagctggaatacgccatcggtcagctcgccagccgactgtcaccagttctgcgcccggaactggccgatccgaagtccgaggcatgcagtgcaacgccccagccggttcgcagccccttggcgcaggaagcgcaccgacagggcctgcgcatctaccaggcgcaccgcgacctgcactccatcgaacagcggcttgccctgtga

SEQ ID NO: 493118 - DNA, 1158 bp, Stenotrophomonas maltophilia
atgaacgtcgacgcagacaccccggccgctgcgccggacaccaccccgaccgaccaggccgccgacgtcatggcagcactggacgccggcattgccgctgccgatgctgaggctgcgcctgccgctgatgcagtaccgtcggatgccgccccggtcgccgatgcggatgcgcccgcggcagacgacccgaacgctgctccgcccgctgacggccatcctccggcacagccgcaggaaggcgctcccccggcggatgaccagccggccgctgccgatgaggatgagccgcagcccgacgccgacaccgaggcggagatcgcgtcgctgggcctgaaggagaagtcggccgaacggttccgcggcatggccgccgagatcaaggagctggcgccgctgcgcgaggccatgaaggctgcgggcatcgaggacgtggcccgcctgccggagctggtccagcgctcgaaggtcggcgaagacatggtgcagatggtcgtggagactggcgccagccccgagcagtacggcatggcgctcgactacctgggcctgatcggcaaggcgcagcagggcgatctggtcgcagccgagaaggcctacgaggtcatgggcaaggagtatgccgcgctcgccaagatgctgggcaaggaggcgcccggcatccacgacccgctggccaaccaccaggaccttcgtgccgaagtcgaggccggcgacctgccgcgcgcccgtgccgtcgagattgccggccagcgggaccgtgcagcctacacgggcaacgtcgagcgacagcgcaccgagagccagcaggcggcggagcaggccgaacagcggggcatccagtggctgcagcagttcgacgccgagatggcgcaggaagaccccagctatgcggcaaagcgcccgcagctgaacgaggccgttcgccagatccgcgagcagtaccaccccagcgaatgggcacagcgaacggcgctggcctatgcgcgcatccagacgccggaggcggcagcgccggccgttgccgcgcccgccgcgccggtccagccgcgcccgggtccggtgcgcccgagcggcccgcgtccggcgatggacccgaccaccttcgccagcccgatggacgcgctggagtacggtatccagcaggccaccaaccgctga

SEQ ID NO: 493119 - DNA, 1047 bp, Stenotrophomonas maltophilia
atgccgttcaccaccgcgcagattgcgcagggcgcgaactactcgctcgagtcctacgcgaccaacgatccgatcgaccagatcaacatcgcccacaccaccctggacctgctggtcagcaataaggaggtgtcgtacttcggtaacggcatctacaacgagaagctgttcatctcgaacgacagcaactaccagaactacagcggcgccgaccaggtcacctacaacgagcgtgacccgaaccgcttcgccaagttccagtactacagcaaccacgagggcttctggttcgatgaagaccgcctgatcgcggccggcatcaccatcgatgactccggcgccggcgttccctcctcgtcggagaaggagcagctggtcaacctgctgcagtcgagctggaccgccatgaagaatggcctgcaggaaggcctggcgctggaaaccctgcagaacggttcgcagtcggccaaggccgttccgggcctggaccacatcgtctcgaccaccccgggcaccggcgacatcgtcggcggcatcaatgccagcaccagcacctactggcgcaacaacgccagcatggctatcgcctcgggcggcatcgtcgcagcgctggacgccatgtgggacgcgtgcatccgctacggcggcgccatgccgaccgacatccgctgcggccaggcgttcctcaacgcctacaaggctgagaccaccaccaaggttgaccggcagatcatcgtcaaccagcagggcggcaccggcatggatccgtcgatcacccgcgtgttctacaagggcatcgagctgatctgggatccgaccttcgaactgctggacgctcgcctgggcgcgatcacctacccgtggaccaagcgctgctacctgctgaaccgcaacttcatcaagttccgcccgctgaagggccactggatgaagaagcgcaagccggaaaagctgccggaccgctacgtgacctactacgcgcagaccaacaagtacggcatgacggccaagaagcgcaacgtccacgccgtgctgtccatcgcctga

SEQ ID NO: 493120 - DNA, 243 bp, Stenotrophomonas maltophilia
atgaagtccaccccgatcaccaacaccgcgttcaagaccggcaacagcccgttcctgcgcggcggcagcgccaccttctccaacttcgccgacaccgccgcaacgctgcagggctcggacaccgagaccggcacgtacaccacgctggcaaccctggctgcgaacgggcagaccgaggtccagaacctgccgcagtggatcaagttgtccgctgccggcaccgtctacatggcggctggctga

SEQ ID NO: 493121 - DNA, 546 bp, Stenotrophomonas maltophilia
atgagcaaggaaaccatcatcgtcccggtagtgcaggcgacgatccagcgcagcgagtacgtcacgatctccgactcgttcccgaagcatgagctgccgatcctggagctgatccacggcgaggacaacgtggtcgtgaccgacccggactacttcgcattcgagcttccgaacaacgccacgcaggaattgcagcgcatctacaccaagtacaccgacaagtaccggccggtggtggaccaggtgttcccgcgcggcgcccgcgacgtcgcttccgagctgggtatggatgtcggcaaggacactttcagcaagcagtccgaggctgtgatcgaaagccggctgccgccgcgcccgaccgctgccgccagcctgagccgtctcgcgccggaagacgatggcgacgaccagcccgagctgacccatgccgagctgcgcgaagagctgacccgcctgggcatcgaccacaagggcaacgcgccgaaggccgagctgcaggcgctgtacgacgccgcgcaggccggcgccggcactctgggcggctga

SEQ ID NO: 493122 - DNA, 747 bp, Stenotrophomonas maltophilia
atgagcatcaccgacggcatccaatgcgcctgctccagcaccgacgggaacgccacgctggcagaactgcgcaagcggctgatgatccggctgggctttgccgcgcaggcgaacaacccgccgccgggcatgaaggagctgctcaacgacttcctgcagagcgcgcaggtggcgctgttccggcgccccaccggtgagttccgcaacgagcgttggttctcctggccgctggtggccggccagcggctgtacgactacccggacaacgacgagaagaatgccccgcagtcctgcccggcgacgctggacccgcgcaaggtgacctgggtcggccgtgagcgtgatggcgtctggtccgagatgcaccagggcatcaacccgcgcagctacacgaccagtgagctgaccggcttgccgcagcgctacgagttccgcaactgcatcgagatctggccggcgcccgacgagacgctgggcaatctggtcatcaagggcaagttcgacctcaaccggttcaccgaggacacggatcggaccacgatcgacagcgagatcgtgttcctgctggcgctggccaacggcaaggcgcactaccggcaggcggacgctcaggcctacatccagcagctggaggtgatgatcaccaatctggttgcaggcacccacgccacggcgcggtacatccccgggccgccggcgggtgagggcgtctatgtgccgcctcgcccggaggtaccgttcccgtga

SEQ ID NO: 493123 - DNA, 801 bp, Stenotrophomonas maltophilia
gtgaccggccgcattgtcaccctcaacgcctccaagggcggcatcaaccggctccggacgaagggcggggcagacccgaacaccctgtacgacctggtcaacggctacgtcgatcaggacggcgtgccgcggtcgcggccgggcaccaagaacaagaacacgctccccaccggggcgacgaagggcctgtgcgcctacgacggtaagctgatcgtcttcagccatgagccgcagaccatcgcagccagcacaccggtggtcgagtgtgaggtgctgaagcacccgaacaccccagacctgccgatcaaggaaatccacttcgccggcccgttcctcggctacctgtatgtggtgcccgagttcgtcaatggcgacgtcttccactactggctgcagcgcggcacaacgtgggagccggcgaaaatctacctgccagggtcgttggtgacgcccgcatcgcccaacggcatcgcctaccagctcgacagcggcaccgagcagttccaggtgtgggtgcgcaacgtcgcgcgcgcgctgggagacaaggtcgttcccaccgtcgacaacggctattcctacacggtcaccgacgcgttcgggccggcaccccgttctggcgccaccgagccgtcctggccggcatcgccgggcgcaaccgtgttcgaagacagcgatgtggccaacccgacgccgatccccggtgaacagtccggcaaccagctcccgccggatgtgacggaccgctatggcagcagcggcggtaacagcccttggcgctacgccaatcaggaggcgcagtaa

SEQ ID NO: 493124 - DNA, 2763 bp, Stenotrophomonas maltophilia
atggccgctcccttctggcagcccggcaccctgtatctgcccggggatctggtccagcccatcacccagccggcaccgaacaacccgcaggtcatcaacggttacttcgagcaagggaccacaggctggacgttctccggcgacgcttcgctctcgacgtcgcacggttacggcagcccgaattgcgtccagctgcctggcaacaagccagacggtgtcgccctgaacaacgcgcagctcgtcgtgccagtcggcgggcagctgactgcaaactcgatgatccagcagggggcgtcggtcgccggcgccacggcaggctggaccgagattcgctggtatgactcgctaaacacgttgctgcagacggacaagggcaacgtggtcgacagtggttctggcggcgcatggcaccagtccacggtcaccgcgacggcaccggcctcggcggcctatgcccgtgccgcaatccacctgacctcggtggccgaccacaaccacgagatcttcggcgacaacctcgttgtgagcggcgcaaccgcaggcctgcccgaagggctggtctacaaagcagtccagaccgagtcgggcacatcgggcagcagcgagccggcctggccgggcatcctcggccagcaggtcatcgacaacgaggtgatctgggaggcggtgaccaccagccgtgtggtgtggacggcctcaccgcgttacgtgagcggtgccaccgagccagtgtggccagtcgatattggcgcgatggtccgtgacggaacgatcaactggcgagcaatctcacgcagggttgaagacgaaaaatgcccccaatcgaaggtggtggctatcgtcgccagcaaggtgttcgcggcagacaaggacatcgtgcgctacagcgctacggccaatccgctggactggtccacggctgacgacgccggctacctgccgaccggcctgcagcaggccaacgcgaacaacatggcggtgctgcagcagtaccgcgccaatctggttgcgctcaacgccagcagcttccagaactggcaggtggacccggatccggcctccatggacatcctggaccagatggacggcgtcggctctgtgtggccgaaagctgccgttcctgtggcgaatgacctgttctaccttgcaacgcttggcgtgcggacggttggtatcgcgaacgcggccgagaacctgtcggctggagacgtcggcgcgccgattgacgtgctggtccaagaggcgatgcaggagagtgacgccaacaatgggaagatgctcgggacgtactacccgagcgccgggcaatactggctgtcggcctcggaagtcccggctccggagcagacaggcgtgatcccggccgtgatcggggccgaggtcagccacacgatcaccatccccgacgcgtatcagtcggcgtacatcttcccactcgcggatggaggcataggtgccgcctccgcgccagatggactcgacagcggtggaatttttggccaccggaagtacaacagcgttctttcgcccaaggaagactttcaacagtcgatctggggaggaacgtcgacgggcgactctcgtttgttccttcgcggcatgcgtgaagatctcgcggcgatcagcgccgatgacaattttggatattgcaagcagctggccggtggaacctacaagggctacttccagccaaccgggcttgttccgacatggtggtacaacgagcagggctatgcgccggaattcggcggattggtttggttctccgatgattcggtatacatcggcgttcggcgcacctcccaggcattcaacgctatctaccgtttcccgatcggggcgggtggggctggcatagcgaatagcgcttcctatacgccagtgggttctgccaccacgccttacttctggatgacgcgcgctcgctctggcgagatccacgtcgtcacgcaagacagtcgctttaagacgttcaacgaagcgttggagctgctggatgatcggccttttggcctgtctctggatgggttcaggggcttcggcgtcgacaggggaatcatctgcgccgtatacggtgggtcctccacaagctcggcaggatgccagttcgcacgggtagaagattggtcgctgcagggctccaagatcctaaatgcagccatgagcggcaatgagtcgacgcgcgtgctgttcgatgaccagtcctgctacatccagtgccgaaactgggtaggccgggtgcagtactcgcccgagatcaaggtgtataggcacaccagtacggtcttcgtttacacgatgaggggaaccggaaagcagggagcctggagccgctatttgttcccgttcgccgttgatgccttcagccagctcggcaacgatctctacattcgacacggggatgaaatcagcgcggtcagcgactttgccttgggcgacgacgttggcggccagacgatcccgttcggtggcacggtctggtggccgtggctggacttcgggacgccgagcgtcaccaagatgatggagggtttcgacatcgtgagccagggcacgcccagcatcagcatcggctacgaccagcggaaccttgccgcgttcaccgacccgtacacggtcgaccccgacacgctgccgggcggggtgatcccgttcccgatgtcggcgccgaccttcagcctgcgcgtcgacttcgcgccgggcaagaagtgggcgctgacgcaggcgtcgctgagcttcttcgacctgggcaacgggccatga

SEQ ID NO: 493125 - DNA, 489 bp, Stenotrophomonas maltophilia
atgactgtcaccgcctccagcgacgtcctgattgaggatctggcctacctggcgcgcaacatgcgcccggacgagatcgcgcaggacctggcgatgaccggcgcggccgagtacgaccctcagcaggcgatcctgaagatggcggccgtgcccggcccgaagttcgtcctgctggccgacggcgtgcctgtggttgccggcgggttctggcaggtccgcccgggggtgtgggagggctggcagctgggcacgatggccggctgggagaaacactggcgcgccatcaccaagatcacgcgcaggctcaacgacaggatgctcgccgagccgaacgtgcaccgcctgcagctctacggccaggccggccgcgacaagacgttcgagtggtacgagcgttcgctgggctaccaccgtgaagccaccctgagccgctactgcgccaatggcgacgacgcggtcctgttcgcacgtgtcaaggaggcaggctga

SEQ ID NO: 493126 - DNA, 711 bp, Stenotrophomonas maltophilia
atggccggcggcggcaatatcggcaagggcaattgggcagacccgacgggcctgatccagaagtcgggcgccagcaagattctggacccgctgggcctgaccaagacggccaagcagggcgagtccgctgccgacgtggccgcgcgcatggagatggagcgccaggagcggatccgcgaggctcagggccgcatcaaccaggtgttcgacaacccgcgtcgggccaaggacatcgccgattttgtatcggcaacccgttcgaagctgatggaagacctcaaccggcagaacaccgacgcggcgcgcgaactgaagttctcgctggcgcgcggtggtctgtccggcggcagtgtcaacgtcgaccagaaccgcaggctcaccgacgaatacaaccggggcctgatcaacgtggagggcagggcgcagggcgccggcgcgcagctcgaagctgccgatcaggattcccgtgcgcgcctcatccagctggcgacgtctggcttggacgcaaccacagctgcgtcgcaggctgcggccggtctgcgctccaacttcgagaacgcgaggtctcaggccttcggcgagcagctgggcgaccagttcgcgaccatcggcgggttcgtgaagaaccgccgggaggaagcggcgcggcgccaggcgaatcgggacgcgaatttcaacctctacggcggcggtgccgcatacggcgggtaa

SEQ ID NO: 493127 - DNA, 645 bp, Stenotrophomonas maltophilia
atgggccagttcattcccatcgcgatcgctctggccggcacggcggcgcagcaagcagaaacgcagcgcgtcgagcgcaagcaggacgaggcgaccgcacagggcctgctgaaccagtcgcgccgccagcaggaggccgatcgccgcgtgaacgacgagatcgcccagctggagaccagcacggcagccgatgaccgagcccagcggctggggcagtacatgcagcagctgcagcgcggccagcggcaggctctgtcgggcttgaacagcccgatcggcggtgcgaccttccagtctgatgccggcgccgcgcgcgccggcgcagacaacgccgcggcgaccactgccggcctgatgtcgcgcatcgacgcgccgcagctgcagcggcagcaggaggcattcgggtacggcaagctggccacggatttggacatggaagcgcgcgcgagccgcgggcagcagttcatcgaccagctgcgcctgcggcagatccgccggcggcccgaagtcgatctgctggccggcctcgccacttccgccggcggcgcgatggctggaggcggcggcgggttcgccgcggcagccccacgagcaggcgccaacttctacgggtcctacgatccactcaccacggggtacgcctga

SEQ ID NO: 493128 - DNA, 1251 bp, Stenotrophomonas maltophilia
atggccaatccataccaggccgggcaggctctcggcgccgcgctgttcggcaacacgcgcgatacctacacggatcagctgggccggaactaccaggtcgaacgggcgctgcaggaggcccgtcaggcgcgttcgaaggccgtgctggccaaccagatcaacgagcagcgggcgctggtgaatccggagctggtcagcggcgtgctgggcggcgacgacaccgcccgcgcaacgcttggcagcatcgcgctgctggccaacgatcgattcgacgcggggcagctgaacgacgtactcggtgccgctgcgcgcagctccgcccgtgatgccgcgttgggcgggaactgggaggctgcgaatgcaaacctcatggccgtggccaacggaccgcaggagctgggggccgtgcagggtcagaacctgctgcagaaccgcttcaaggagggcggcggcgggatctcgaccaccgagcagggccgggccggtatcgctgccgacgctgcccgcgcggccgcctcctatgccagcgccaacagctccaatgccagcgcggcacgcacccgtcaggcggccggcatcgacgcggcgaagttcgggctggagcgcagcggccagtggaaccctggcggcaagtctgccggcacgcttggggacagcaagccgttgccggtcggagcgctgaaggacctgctggccgtggaagatgccttgggcggcacggccgtcctcaatgacatcatccagaagaatgctgcgcgcttggcggatggcaccctgaagatcagcccacagaacgccgcgctctcttggggccgcaccggtctgggcatcgctaccgagggcgacgtcgctctcaatgagtggaagtcggacctgaccaagatcgtcaatgagtcgttgcggctcaacaagggcgtgcagactgagggcgacgcccagcgtgcagcaaacgagctgatgtctgccaacgacccccgcacggctgctgctgcgctcgcgaggcttgccaagttcaaccggcaggctgtggagctccatacccgcaagcaggacatcatcaacgcaaactacgggcgctccagcacgcctggtgttgagccgaggagcttcggtgggacactcggcgatccgccggccgcccgtggccctggccagccggcccaaggcggcccgacgccaggaaccgtgcgcaatggctaccgtttccggggcggcaaccccgccgatcgtaacgcgtgggagaagatctga

SEQ ID NO: 493129 - DNA, 2145 bp, Stenotrophomonas maltophilia
atggccggtccgctgccgtgggaggagtaccagcagctgcaggccaagcctgcgccgcgcgcgccgcagccggccgaggacgctggcccctggacggagtaccaggacatcccgaccctcggggccgtaaaggcgctgccgccggatttctccgaggtcaccggcagcgtttccagcaccgcagacggccgacaggctgacggctggaaagccggcgttccgcgcgacctggcgttcggcgctcgttcggtgctgcagggcatcggcagcctgctgggtgcggtcggcggcgacgccctcggcgcgctggagaccaagatcacaggccgccccgtggccagcttccgcgacaacgccgcgacgctgggggacaccctgggcctgcccaaggcacagaccgccggcgatcgcgtcctcggtgacattggcgaagcgctgaccggtaccgctttgacccttggcggtggtggagcgctcactgctggccgtgcggtagcaccgacgcttgcgcaggcagcgccggctccacgagcgattgctaccctcggtgagcgtgccggagagctgctggctgctcagcctgctctgcaggttgcgagcaccttgggtgggtctactgccgccggcgtcacccgggagtcgggcggcggcgccggtgctcaggcagtcgcgggcctgctcggcggcttggccccctctgcggccctgaccggagcgcagtccggcgttcgtggcctgatgcgtggcggtgaggctggtcgccagcagctggaacaggccatcgatgactttgctgtcctgggcgcgaccccatcagtgggacaggggactggcaggtggtcgatgcagggggcggaaagcctgctgagcggcggtccgaccagcggcggcgtgatgcgccgctttgctgaggcgcagaacgagcagatcggcagcgggctggctgacgtcagcaatcagctggccaggaacatcagcggcgagcgtgctggccgcgcgatcgagcgcggcgtccagacgttctccaagaacacgaacgccatgcgcaaggcgctctactggcaggctgaccagcacatccccagcgacacgccgatcggtgtgtcgaacacccagcgggcgcttgccgacctcactacgcctattgcaggtgctgaggccaccaccggtgcccagatcagcccgaagatccagcagatggccgagaacctggctcaggacgtcgcagcagcgcagcaggccggtctcgccggcatcccctatgaggccgtgaagcggattcgcacccagatcggtgaggagttgtctgatttctcgctttccactgaccggccgacggcacagctgaagcgcctctacggatccttgtctcaggacctggaggctgccgctcaggcacagggcccgagcgcggtggccgcagtccgccgcgccaacaactacttcaaggcgtcggccgaccgtctggaaacgctggagcgcgtggtcgataagaacggcggccccgaaaaggtgttccaggcggcaatgtctggcacgaaggacggtgcgacgacgctgcgcgcggtgatgcgctcgctgcctgaagacggccagaaggcggtcagcgctgcagtaatcaagcgcatgggcctggccagtccgggggcgcagaacgcggccggcgatgccttcagcccgaacaccttcctgacgaactggggcagcctgagccccgaagcgcgccggaccctgttcgggcgatacggcgccggcttcagcgaggacatggacaagatcgctcgcgtggcggagaggatcaaggaggggtccgaggtgttccggaatcccagcggcaccgccaaccgaggcgcggcgtttgcgtacccagccaccatcggcggccttctcatcacggggcaggttgggcctgcggcggttgccgtcggcggcggcgcaggagctaacgtgttggcacgcgctatgacgaatccccgtttcgtgaagtggcttgcacggtcgacggagcttccgattggagctatccccgcacagatcaacgtgctgaagcgcatgagcgcagagaacgatgatgattcgatcggcgaggttgccgcagcgttggaagcgtcaggcgaacggagcgctgaaggcccacagcagtag

SEQ ID NO: 493130 - DNA, 219 bp, Stenotrophomonas maltophilia
atgaccgacgaccgattcaaagacgcagggcagttccacccggacaagacctgggcgaagcttgatcgtgaggccaaggaccgagcattcgacgccaagcatcctccgaagtggtggcattcccttgccttcccgtggggcgtggccctgttgctcctcggcctggccggttgcgtcatctacctactgctgtgggccttcagcgctccgttcgcctga

SEQ ID NO: 493131 - DNA, 516 bp, Stenotrophomonas maltophilia
atgaaaaagaacacccaagaggactacgtccgcacggccctccgggttccccctgagcttcacgcccaggtccacgaagaggcccgcaaggctgggcgcacctttaacgcccaactggtccacatgcttcaggggtacatggagcaggagctggaagagtccgaagagcgcgaacgcggcatcgaactggagagaagcattggcgttagctatgggctgaccgatccgctcgaccgggctgcagttctgaaggtgctactgttcccagagcgtacggttctgcgtcaacgcgtggcggagcttggcggcaaggacgctgtgttgcagctggacgatgccgagatcaagcggcgtgtcactggcccacgcatcactggcacggacgccgagaagcggtcgcacatgtccagggcgctagagacgttcccgctcactaccctgctgaccgacggcgaactggaaaagctcgccgagcgcgtcatcaccatccagaaggccatggggcagctgaaatga

SEQ ID NO: 493132 - DNA, 165 bp, Stenotrophomonas maltophilia
atgaagcagaagcgactggttacccccttcggtttgcggctctccccggagctgaagcagtggctgaaggacaaggcggctgacaaccggcgttccctgaatagcgaaatcgagcatcgccttgcaggtacgcgcgcgcaagaagagcggagggcagtcgcatga

SEQ ID NO: 493133 - DNA, 768 bp, Stenotrophomonas maltophilia
atgaacggactgatcctgaatgggactgcctcgatcaccagccgagaaatcgccgatctggtcgactcccggcacgacgacgtgaagcggtccattgaaaggctggtcgcaaaaggggtcattggttctccgccaatggcggaaaagcccacagcaggccgccctgtctccgaatacgtcttctccggcgagcagggcaagcgcgacagcatcgttgtggttgcccagctctcccccgagttcacggcacggctggtcgaccgctggcaggagctggagtcgaatgtggtcgccccggacccaatgagggtgctggctgacccggccgcgatgcgcggcctgctgctgacctacacggaaaaggtcattgctctggaagacaaagtggccgagcaggcccccaaggtcgaattccacgacagggtggttgaaggcgacgacgtgctgatgatggacgaggctgccaagctgcttggaacagggcgcaacacgttgatgaagtggatgcgccgatctggctggctgcgccgcgacaatcagccataccaggacaagatcaacgccggcctgcttgatttcaaggtcagcaaggaatggacgcatcccaagcgtggggttcagcgctcgatgacgccgcttgtcactggaaaggggcttgccaggctgcacaagctcctgaccgacgagcatttcccgctctcgggtactgctcatagcgcagccctggtaaccaaggctgacgagagggcgagccgcgatgtccactga

SEQ ID NO: 493134 - DNA, 507 bp, Stenotrophomonas maltophilia
atgtccactgacaagagcaaggtcatcgactttcccagtcgctcccgagccaagccccgggatgaaaggttgtgtacccgcgactacacagggcatgtaggcaagatctacacgcagatctggtggtcaggggacgttttgtggggtgtgagcgaaagcgaaaatctcactctcggcggcctgaaagaacgggttctggaagaggctgacgccgtcaagttcgtcatgcaggaatccatcagcggcatggaagcactgtatgagcggagcaagaaagagccctacgttgccgatcctcgaagcatctcgttcaccgttgcagttgaacgggcggtgcatttcgtggattggctgcaagagatggttgcaggctgggagaagaacttcgaaggcattgaggccgcagtttatgaggtccgcgaggtcagcttcgaaatgtccggcgacgaccctgcctgggcagtaatcctgaagatccacgctgattcgcagaagaaaccggcgtga

SEQ ID NO: 493135 - DNA, 279 bp, Stenotrophomonas maltophilia
atggcgagaaccagtgtagccgctaacagcgagcgtgaggttcagttggtcgagatgctgcatgaatcaaaggggtcattgcagcacgcaagcgacctgttccgccagctgtcggccttgtttcaagccattcagaagtgcggcggcgagacgcaggaacttgctgcgcttggccgatacgtggccaatgagtgggaggaaattaccgactctgctcagttggatgttgaacgacttctcagctcgccggtcaacgatgtcctgagaaaggcggcatag

SEQ ID NO: 493136 - DNA, 228 bp, Stenotrophomonas maltophilia
gtgtacaacaacacgccgcacatcccgacttggcgcctgtggctgatccacatcgtggcgaaggcggttggggtcttggtgcatgtccaggggttcccgctgggtagcaggagcaagaagtacgcgctgccaagtgagccgagctggagcgaggagctttcggagctgcagcgcatcaccgccgaccgggcgaatgacgatgcttggcggggagcctcgctccgttga

SEQ ID NO: 493137 - DNA, 246 bp, Stenotrophomonas maltophilia
atgaaagatccggtttcccaagaggtggctgcggccgcctacaagctcgtgccaccggtggtggggacgatcaccaccacggcgcagggactgtcgtgggctgacctggtggcgatctcgacgctggtttacacgtgcgtcctgactgccacgacggtgatgcggaactggggcgattggtcgcagtggctgggcgcccgtttcgcggccttgcgccggttctgggagtggatccgtggccactaa

SEQ ID NO: 493138 - DNA, 474 bp, Stenotrophomonas maltophilia
gtggccactaagcgcggcgtggtgattggcgggacggtggccagtgtgattgccctggccagcaccgccctggtccgtccgtgggagggctactcgccgactccctacatcgacatggttggcgtggcgacctactgctacggcgacaccggtcggccggaaaaggcccgatataccgagcaggagtgtgcccagcggctgaacagcaggctagggcagtacatggccggcatcagcagctgcatcgtcctgccactccacgagaacgagtgggcggcggtgctgagctggacctacaacgtcggcgtggatgccgcatgcaagtcgaccttggtccgcaagatcaacactggccagccggcgtcggcctggtgtcctgagctggacaagtgggtgtacgcaggcgggaagcgtgtgcagggcctggccaaccgtcgcgcggcggagcgccgcctgtgtgagggcaagtcgtga

SEQ ID NO: 493139 - DNA, 396 bp, Stenotrophomonas maltophilia
ttggcaggccgcgagttggtcgtcggcgtctcgcccgactcgaacaacagcgcccgcaaactttgctcggcgctcggcggccgcatcacgttcgctggcggcggcgacggcatcggacagacgctgggtctcgcagctcgcccacccgtcgcgcagccggagatcgccagcacgcacaccagccacaacaacatcagcgacggccggggccgcggcacgatcttcttcatgcttctctccgatggcggccagagcgtcggcctgttggtgttcagtcgtccgcgtctgattgacctgctcaacctgggcggcactggcgccggcctgctgcctggcttccgcgccctctgcgcgatcgccgcgccacgcccagcccgcgccgaacatcgccgctga

SEQ ID NO: 493140 - DNA, 1284 bp, Stenotrophomonas maltophilia
atggccaagaagcgcgtaccgctgcaccagaatccccgcggcttcgttgacgtcgaccccgacgcaaccaacggcgcacaggtgggcgtgaaccttcgggggccagacggccagatcctgacggcggcgcaggtgatcaaccccaccggcggcagcagcggcggcccgagcagcatcgcgtcgaccatctggaagctgatcagggaggtcccgtccaacatccagaagctggccgcgctgatcggcgccggcttcgccgcgaggcagagcaacggtgattgggcgttgcggtcgctccaggaaggtaccggtatagacatcgccaaccccgacggcgatgcagggaatccgacgatcgggctgaaggacgtcgcgaactcgggtactggcacgcttctggcggtcacgcgcgacggaaagggcagggtgaccggaacacggccggccacgatcaccggcaccgctcagcagatcgacgtggccaatgggaacgcggcggccggtatgcccacgctggagctggcttccgaagtacttgactcgctggggaaggccgacagcgccgtgcaggaggtccgcccaggggcgaacgtgaccgtggacaacaccgacccgcgtcggccgattgtctcagcaatgggtactcccgatggctatatcgatggcttcaaactttcatattccggggctgggcaagtatcagtttccagcgggaatgcgtatgtacccagtgtcggggggatcgtttccgccctgccatccgcgccttcggtgtctgtaggcacgaacgcttttggccatgtctatctccgtgccgatggaagtacggaggtagattcgacatctccatctgctgcatatagcggcacggctaggacgaaaaccggggacagcagctgtcgttatctaggaactgttctaactgattcacttggcgatgtttacatgttcatgcatgtaggtgcgcaaatcacatacatggttacgctggagaatgcacctttccgtgtccttgcaaatggccagcaaacaacggctgcaactgtttccgtagcttctattgtgccgacaaccagtagtatcgctaatttcggcataaccaatatcgacgccgcagtggcagcgctgataaatagcgatgcattcgcatacacctcgaaccccaatagcttcgctgctatcccagttccactcgatgcatcaaactccttcaattacaactacattgtgacacctactggcggcctatacgtggactgccttggatactactttgagagatag

SEQ ID NO: 493141 - DNA, 336 bp, Stenotrophomonas maltophilia
atgtacgccataaaaggaggtagttacaggacgatctcttcctttgacgagctggaggccggcgaagaattcgcaatggctatcccgccacctttggaagaggcgctggagacgggaaagatacgccgccgccgtgacatggcattgcgcggcaccgactggacccagatgcccgacgcgccactgaccgcgctggagaaggccgcctatcagacctaccgacaggcgctgcgagatttgcccagcgttccagggttccccgacgtgccctggccgacgttaccgaccatcagggacggcacggccagctctggagagggcgctgtgtattcctga

SEQ ID NO: 493142 - DNA, 666 bp, Stenotrophomonas maltophilia
atgtgcggccgattcgtccagctccccgtgatcgacttcggccagccggggctggctgaccttgcccccggcctggccgagatccagccgagctacaacctcgcgccgacacagcgcgcctcggtgattctggacaggggcgaaggccggcaggtgacccgattggcgtggggcctgctgcctttctgggccaaggccaagggcctgcagggctcgaccatcaacgcgcggatcgagacggtggccaccaaaccggccttccggtcggcattcaagaagcgccgctgcgtcatcccaatggccggctactacgagtggtcggtgagcccgatcgacgagaagaaagatccctggttcatccacgccaccgggccgctgctggcggctggcctgtgggaggacaccagccctctgctgcccgagggcaacctgggcaccttcaccatcatcaccggcgacagcagcggcgtctcggccgacattcacgaccgcatgccggtgtggctgcaggccaaccagatcgatgactggatggccgcgagtcccgacgacgccatggcaatgctgctggccagcgagccgccggcgatggaggcgtaccgcgtcagccgcgcggtgaacacgcctcgcaacaaccgcgaggatctgctgcaaaagatcgcctag

SEQ ID NO: 493143 - DNA, 675 bp, Stenotrophomonas maltophilia
atgacgagcatcaccatccccggtggcctgctggttgccatcgagggaatcgatggggccggcaagtcgaccttggccaagggcctgaccgagcggcttcgcgcccatggcgtggccgtttcgactagtaaagagccgaccaatgggccgtggggcaccaaacttcgtcagtccgctgaatcgggccgcctgagcccggagcaggaggtcgaatacctgctggctgaccgccgcgatcacgtggagcagttcatcgaaccggctctgcagcgcggagaggtggtgatcctcgaccgctatttcccgtcgatggtcgcctaccagggggctgccgggctgccggtggaggacctgtcgaaggccaacgacttcgcgccccggccacacctgatgctcctgctcgacgttgagccggccactggcctggaacgtatccgcgcacgtggcgacaggccgaaccacttcgagaacgaagagaatctggccctgtgccggcagatcttcttgggcatggccgagcgcacgaagtgtgtgatcgatgcctcgaagtcggaggcggatgtattggaagactcgtatgcccagctcatccgccagttcgcgcagaacatcggcggcttgtcgctggagaacatcgagaaggtcggcaccctcatggaagggcggctggcttaa

SEQ ID NO: 493144 - DNA, 504 bp, Stenotrophomonas maltophilia
atgcgctcttcctacggcttccgcaccgccccgatcccctctggctgggtccagaccggcgagcgctgggcgctttggtacaacggccgggagacggccagcgtgactcccgacggcggtcccggggtccggctatggatggaaggccagaaaatgtggcaggtgaaggaagtgcgcgcggccaacgtccggcaggcgaagcggtacgccgagcgctggtgtgcggccaggctctatcccgatctgcccctgcgccaggcagtcgcccggctgaccgacagcacgccgatccagccgccgccgccgctgcccggcctgccgccgacccgtgagcagcagcaacaggcccggcgcctggccgaggcaggggcgaaggaggtcgagcggatcaaggcggcgcttgaaccgcgcaagccgccggcagagacgaaaccccgagcgagggacgcccgcagcaaggcgtgggtgagggcagggctgcagcagatgcggcgcggcgtttga

SEQ ID NO: 493145 - DNA, 435 bp, Stenotrophomonas maltophilia
atgtcgctgcacgcgattgcctatgccagtgaggcccgcgccgatctgcagacaaccgatcttgaccgcctgctggccgatgccacggcattcaaccgtgtagccggtgtcaccggtgtgctgatgttcgatggcagccgtttcctgcagtacctggaaggcccggaggacggtatcgattcggtgtaccagcgcatcgtcaatgcgcgcagccatggccagctgaaggtgctgtgccgcgcgccggtggcgcagcgggcgtttccgcgctggtcgatgggaacccggcgcattgatgcggagctgctggcacagatcgttgaatcggcgtggccgggcttcctgcttggcagcggtggcttcgagcgcctgcggcaggcctggaccggcgccgatggcgaactggaaccggccgcggtcgcactgggctcctga

SEQ ID NO: 493146 - DNA, 1293 bp, Stenotrophomonas maltophilia
atgccagtgagcgcgtcccttgcggcagcggagaccccgcgttttgcggtgatcggcctgggctacgtcggcctgccgttggcggtggccttcggtcggcactggccgacgctgggcttcgacatcgatgccgatcgcatcgccgagctgcgcgatggccaggaccatacgctggaggtggaggccgacgagctggccagtgctcggcagctgcagtacggcagcgatccggccttgcttgatgcatgcaacgtctacatcgtcaccgtgccgacgccgatcgatgcctatgagcagcccgatctggagccgttgcgttcggcgacgcggctgatcgccagccatctgcgcgcgggtgacctggtgatctacgaatccacggtgtaccccggcaccactgaagaagtctgcgtgccgctgctggaagaaggctcgggcctgcgcttcaacgaagacttctactgcggctacagcccggagcgggtcagtcccggtgaccgccagcggcgcctggccgacatccgcaagatcacctcggggtcgacagcggaagtggctgcggtgatcgatggcctgtaccagcgcatcattgccgccggcacgttccccgcgccatcgatgcgcgtggccgaggcggccaaggtggtcgagaacatccagcgcgatgtgaacatcgcgctggtcaatgagttggcgctgatcttcgacaggctgggcatcgatacccaggatgtgctcgatgccgccggcagcaagtggaacttcctgccattccggccgggcctggtcggcggccattgcatcggcgtggacccgtattacctgctgcacaagtccgagagcgtgggctaccacccggacctgatccacacggcgcggcaggtcaacaaccgcgtcggtgagcatgtggcgtcgcgggtgctggcgatgctggccgaacgcggccgtgaaccagtgcagtcgcgcatcctggtgctcggtgtgaccttcaaggaggattgcccggacctgcgcaacagccgcgcgctggagctggcgcagcgcctgcgtgatgccggcgctcaggtcgaggtcagtgatccctgggtcggcccggcggcattggccgatgagggcgtgcagtggctggccgaacccgtggcaggggcctatgacgcggtggtgctggcggttgcccatgcccgcttcaaggcgatggatgaggcgggtatccggtcgctgctggcgccgggcggcctggtctacgacgtcaaatcggcctggccacgcaacgtggttgacgatcgcctgtaa

SEQ ID NO: 493147 - DNA, 1623 bp, Stenotrophomonas maltophilia
atgcaccggtatatcgtctacctgctcgccatcctgatgttccccatctgcctgtggttggccacgatctggccggcctggtactggggcgtcggcctgaccgccgcgatggtggcactggggacctgggacctgctgcagaagcgcagcacgctgcgccgcaactatccggtgatggcgcacttccgctacggcctggaatcgatcggtccggaaatccgccagtacttcgtgcagagcgacctggaggacgtgccgttctcgcgccagcagcgtgcactgatctaccagcgggccaagaacgagatggacacggtgccgttcggcaccctgcgcagcacctacgcggtggattacgagtggatcaaccactcgctggcgccgaccgccatcgccaagcacgatttccgcgtgctgatcggcgccaattgtgcaaagccgtattcggcgagcgtgttcaatatttcggcgatgagctttggctcgctgtcggccaacgcgatccgcgcactgaacgaaggcgcgcggcgtggtggcttctaccacgacaccggtgaaggttcgatttcgccataccaccgcgagatgggcggcgatctggtgtgggagatcggctcgggctacttcggttgccgtgacgaaaagggcggtttcagtgaagagcgcttcgtcgccaacgccacccatgatcaggtcaagatgatcgagatcaagctgtcgcagggcgccaagcccggtcatggcggcgtgctgccggcgccaaaggtgaccgccgagatctcggtcacccgtggcgtgccgatgggcgtggactgcgtatcgccgtcgcgtcactcggcgttctcgacgccggtcgaactgctgcagttcgtcgcccgtctgcgcgaactgtccggcggcaagccggtcggtttcaagctggccatcggccacccgtgggagtggttcggcattgccaaggcgatgcaggaaaccggcctgctgccggacttcatcgtggtcgacggtgccgaaggcggtactggcgcagcaccggcggagttcgtcgaccatgtcggcgtgccgatgcacgaagcactgctgctggtgcacaacacgctggtcggcctggaccttcgcgagcggatccgcatcggcgcggcgggcaagatcaccagcgccttcgacatcgcgcgcaccatcgcgctgggtgccgactggtgcaatgccggccgtggcttcatgttcgcgctgggctgcatccagtcgctgagctgccataccgacaagtgcccgaccggcatcgccacccaggacccggcgcgctggaagcacctggatgcgccggacaaggccacccgcgtgtacagctaccacgagcacacgctgcacgccctgaaggagctgttgtgtgcggccggcctgaacgatccggccgaactggggccggagcacatcctgcgtcgtgtttcgcctgtcgagatccgctcgctggcgtcgctgtaccgctacctggaaccgggcgagctgctgcacaaggtgccggatcatgcggtgttccatgcattctgggccgatgcacgcagcgattcgttccagccgccgccgaagatccaggcgctgcgcgccagcaagtcgcgataa

SEQ ID NO: 493148 - DNA, 489 bp, Stenotrophomonas maltophilia
atgggctcggccctacagggggatgtcatgcggttcaggaccggcaccatcgacgatgtcgccatgctgtgggcactgcgcacgcgttgcgttcgcgagacgtgcagcagccattatccggcggaggtgatcgatccgtggtctgcttcgccgccgccgtcgcagtacgcacggctgctggggcagggaggctgcgtggtggccgaggacgggcagggtgtcctgctcgggttcggcgtgtttgataccgacgccaatgaagtcgatgcgctgttcgtcgatccggatcgtggcggcacgggcatcggccaggcgctgatgcagcgtctgctggcgatggccgatcgtgagcgcgaggtggtgctgtcagcctcgctaaacgccgtgccgttctaccaacggcagggattcattgccgtgcgggaggaagcctacccgcatcccagcggcgtggcgctggcttcggtgagcatgcgcaggccgtggtga

SEQ ID NO: 493149 - DNA, 1248 bp, Stenotrophomonas maltophilia
atgtcaagccgtaataccgcattgccccatcgggtcgccgtcatcggcggtggcccggccggcctgttcgccgccgagcgcctgcgcgccgcggggctggacgtggacctgtacgaggccaagggctcacccggccgcaagttcctgatcgccggcaagggcggtctcaacctcacccattccgatccgcggccgctgttcgacagccgctaccgcgagcaatccacggccgtgggtcgctggctggatggcttcgacgcgcaggcgctgcgcgactgggctgccggctttggcgtggagacctatgtcggcagctccggccgcgtgttcccggtcgaccgcaaggctgcgccgctgctgcgcggctgggtgcgccgactgaaggaacagggcgtgcgcctgcatgccaaccaccgctggatcggctggggcaacgacggcgcgctgcgcttcgccaccgaagccggcgagatcgatgtccacgccgatgccagcgtgttggcgatgggtggcggcagctggccgcagctgggcagtgatggcgcctgggtcgcccccttgcaggcacgaggcgtggacattgcgccgctgcaatcggccaactgcggcttcgacatcgactggacgccgttcttcgcccagcgcaatgcaggcgcaccgttgaagccggtggtcgcgcactggctcgacctggccggacaaccgcagtcgctgcagggcgaatgcgtagccagcgagtacggcatcgaaggcagcctgatctacgcgctggccgcagacctgcgcgagaccatcaaccgtgatggccatgccatgctgtggctggacctggtgccgggacgcgatgaagcacgcctgctggccgatctttcgcggccgcgcaagggtcgcagttttggtgagcatctgcgccgccaggccggactggatgcggtgaaggccaccctggtgttcgagatccttggcaaggatgcgggccacgacctgcctgccgtggctaccacgctcaagcgcctgccgttgcgccttctgcgtccacggccgatggccgaggtgatcagcactgccggcggcgtgcgcctggatgcgctggatgatggcctgatgctgcgggcagtacccggcgcgttctgtgccggcgagatgctggactgggaggcccccacggggggctacctgctgacggcgtgctatgccagtggcctgcgcgccgccgagggcgtgatcgggtggctggctgggcggtga

SEQ ID NO: 493150 - DNA, 435 bp, Stenotrophomonas maltophilia
atgcgccgcctgctgcttcccctgctgctgtccctcgccgccgctggctgctcgagcgagccctccggtccgccgccgggcggcaccctgaccaccttcgagcgcatcgataccgtcgctggcaccggcaccgaagccgttcccggcagcaaggtcaccgtgcactacaccggctggatctacgacaaccgcaccgaaaccaagcacggcaagaccttcgacagctccttcaagcacggccagccgttcaccttcgcgctcggcgccggccaggtcatccgcggctgggatgagggcgtggccggcatgaaggtcggcggcaagcgcacgctgatgatcccgccggattacggctacggcgaccgccgggtcgggccgattccggccggttcgtcgctggtgttcgatgtcgagctgctcgatgtcaagccgtaa

SEQ ID NO: 493151 - DNA, 366 bp, Stenotrophomonas maltophilia
atggcaaaactcctgctcaatctgcgcaatgtcggcgacgacgaatatgccgatgtctgcacgctgctcgaccagcacggcatcgcctggtaccgcaccgaacccagcccctggggcatttccaacggtggcctgtggctgcgcgaggacgccgatcatccgcgcgcgaaggcgctgatggccggatatcaggcggcgcgcggtgtgcgcgtgcgggccgagcgtgagcaggcgttgcgggatggcacggcggagacctttggcagcctgttccggcggcggccggtgttcgtggtgctggtgctgctgggcatggccgctgcggcggcgctggtgctgctgccgttcatgctgttgcgggggtaa

SEQ ID NO: 493152 - DNA, 1089 bp, Stenotrophomonas maltophilia
atgcctgccacgcccactctcgatgaccttcgccgctacgcggtggcgcgcaccttgttcaagccgaccacgctgctgaccgcgatccggcggttgggcttcgtgcaggccgacccgatccgcgcacccgctcgcgcgcaggacctgaccctgcgccaccgggtgaaggactaccgcgcgggcgatcttgagcgccgctacacgcgtctgccggtggaagaggattgcctggtgaactacggcttcctgccgcgcgagcatctggcgctgatgcacccacgggtttccaagcgcgagtgggatgccgagacccatcgccgtgcggccgacgtgctggcctttgtgcgcgagcgtggcagcgtgcacccgcgcgaggtcgaccaggcgttcgcgcatgggcgagtgaccaactactggggcggcaccagcaacgccagtacgcatctgctggatggcatgcactaccgtggcctgctgcgcgtgcagcggcgcgacagcggtacgcgcatctacgcggtggccgatcatgccgagcccgattccagcgaacaggtgcagatcgaacgtgccgccgccctgatcgacctggtggtgcgcaagtacgcgccgctgccctcggccagcctgacctatctggtgcgcctgctgggctatggcgcgccgcacctggccgagcagacccgcaaggcattggcgctggccaagcaacaactggccagctgcacgctggaaggcaccacctggtactggccggcggacgagaatccgcgctcgcgccgccatgcaccggatgagcaggtgcgcctgctggcgccgttcgacccggtggtgtgggaccgccgccgcttcgaactgctgtgggattgggtgtacaagttcgaggcctacacgcctgcaccgaaacgccagtacggctactacgcactgccggtgttgtggcatgagcaggtggtgggctgggccaacttgagcgtgcgcgagggtgagttggtgtcgagcgtgggctatgccggcaagtcgctggcccgcgacaaggtatttcgtggcgcgctggacgacgagctgcagcgcatggcggagttcctgtag

SEQ ID NO: 493153 - DNA, 585 bp, Stenotrophomonas maltophilia
atgagcacgcaccccgatccaacggcgccgacccgtggccgcccgcccaccatcaccccggagcgtctggccgacatcggcatccgcctgggcctgcccaacctgaccatggccaacgtggccgccgaactggcggtgacccaggcagcgctgtacaagcgcgtggccaacctgcaggcgttgaagcgcctggtggcggaggcggtgttccagcgctggcagattccgcgcgcgtcggtcgacgcaccgggtgggctggaggcctatctgatggggttcgtggagtcgctgtgcgaagtggtgaaggcgcatcccgggctgccgccttacctgctgcggcgcacggtggcgaccgcgccgatgctggaaaagatcgcctcgcaccaggcgcacgtggctgaggtgttcggactgccggtggacaaggcgcgctggctgctggccacgatcgcgttctactgcatcgccggcgccgacaccatctacgcgcttgcggatgacgaagaagggcaggtgatcaccgagttcaagcagggcatgcgggcgttggtgatcggttcgctggaggtatcgcggcttcggtag

SEQ ID NO: 493154 - DNA, 2196 bp, Stenotrophomonas maltophilia
atgaccgttttcaacttcacttctgcacagcatcgcgctgccgccgcatcctccggcctgatgtattcgccgggcatggtccggcgctaccgggtgtccgccctcgcgctggggctgctggcctcgttcgccgcgctggccgacgccgcgccgtccacccttccgtcggtgcaggtgcaggaacaacgccgggtcactgcagactatgcgggcgggcaagtggctgccggcagccgcgtcggcctgctcggcgacaaggatttcatggacacgccgttcaatacggtcagctacaccgagtccttcatccgcgatcgccaggccaaggacctgaccgacgtcattgccgccaccgaccccacggtgttcagcaacggcgtcaccggtgcctggagtgagaactacgcgatccgcggctttgcctccaacgccagcgacaccaccttcaatggcctcagcggcatggcgccgtactaccgcacctcgccggaaatgttcgagcgcatcgaggtgctgaagggaccgtctgcgctgctcaacggcatgccgccgggcggctcggtcggtggcagcgtcaacctggtgcccaagcgcgcaagcgagcaaccgctgctgcgggtcagtgccaacttcgcctccgatgcgcagttcggcacccacgtggatatgggccgtcgcctcggcgccgacaggcagttcggcatccgcttcaacggtgcctaccgtgatggtgacggcgccgtcggcaagcagcgcaagaaggtacagctcggttcgctggcactggactggcgcggcgaacgtatgcggctgtcggccgatctgtacagcgccgacgaccgcgttgacggcccggcgcgtggcgtcggcctggcaccgggtgtggccattccacgcccgccacgcggggatacgctgatcaacccggattgggcctacgtggacagccaggacaagggcgcgatggtgcgcggcgagctggatgtcaacgatagcctgatggcctacctcgcgtacggcaccagcaggaccgactaccgctacaacggttcgatcagcgcgcagatcctcaatccagccggcgacttcaccacggtgatcggccagctcgccttcgacatcaggaagcagtccgcagatgccggcctgcgcggttcgttccacaccggcagcgtcggccaccagtgggccgccaacgtgacccactaccagcacacccagaacgactacggtcgccgcagcgtgccgggctgggactggaccaccaacctgtacaacccggtgtggggcccggccgcgccgttcgtggcaccgcacatctcgcataccgagctgacgctggacagcatcggcgtcgccgacaccctcgccttcgccgatgaccacgtgcagctgacgctgggcgtgcgccgccagcaggtggtcagcgagaccttcaacgtgtccacgggtgcacgcacctcgcgctacgacgagagcgccaccacgccggcagcggccctgctggtgaaagccaccgacacgatcgccctctacaccaactacatcgaaggcctcagccagggcgccaccgcgccgatgaccgctgccaatgccggcgatgtgttcgcaccgttccgcaccaggcagaaggagctgggcctgaagctggacctgggcagcttcgcgcacaccttcagcatgtacgagatcaagcgaccgagcagctataccgacccggtcacgaatatcttctcgtttggcggcgagcaacgtaaccgcggcgtggaatggggcttcttcggcgcaccgctggacggcgtgcgcctgctcggcggcgtggcctatgtacggccgaagctgacccgcacggcaggcggcgtgaatgagggacgcatcgccaccgccgtggcgcagcgacaggccaagctgggcgtggagtgggatgtgccgaccttgcagggcctgaccttgaccggcaatgccacggcgatgtcgaagcagtacatcagtgcggacaatagcctgtcggtgccggggcgcacgttgttcgatgtgggggcgcgttacagcaccaccgtggagggtcgaccgcttgcgctgcgggccagcgtgaacaacgtgaccaacaaggcctattggggcatgccgttgttgtcgagcctggcactgggtgcgccgaggacggtgttgctctctgcgacgatggatttctga

SEQ ID NO: 493155 - DNA, 1398 bp, Stenotrophomonas maltophilia
atgaccgttggcgtacgtccgtcaatcatcacctggctggccagcacgtctcgatacgcgctgctggccggcctcctgctggcgccccacttcgccaacgccgctgcggtgtgtgtcatccgatcgagccaccgcatgctgctggtgcaggacctcgcttcgcgctggcaacttcccggtggcggcgccgagcccgctgaaacaccgcagcagaatgcgctgcgggaaaccctggaggagaccggcattgaagccacgatctccggcgtgctggcgaccgaaggcagcgtacacgtcttcggctgccaggcccgaagcccgctgcaggcgcagggccacgccgtcaatgtactgggcgcgccgcaccttgggcgcgagaccatccaggcgcgactggtcacccgcgacgaagcacgccagctgcggacccgtttcccggaccagcttgagcgcgctttcgaacgtttacccgatgtgcccgataccgcgctgcagcccgtggctgggtttgacccagcaacgcctttccgtgaagcagagcttcagcgggtcaagcagacgcagcaatggccgctgggccccgtcgccacggtcggcaacgtactgggcgagttctggttctacctgctgaccatgccggtgctgtgggtcgtcttcggcgcgcgcgtcgcgcgattgatgctgatgacgctgatgctggtgaccgtggtcgtgcagggcttgaaagcgtgggtggcagtgccgcggcctttcagcttcgaccccagcctgagcctgtccggcgccggcggcccggccatgcccagcggacatacggccagcgcgacggcgttcttcctgctgattgcattgtggctggcaggcaggagcgccggcaaaggccgctattggcggcacctggggctgggggtgcttgcactgatggccgggttgctggccgggctgtcgcgggtctggctgggcgtccattactggtcggacgtaggcgtcgggttgttgctgggcgtactgtccgcagtggcaattcgtgagcttgagcgccggctgtcctgcagccagaagcccgggcgcgacgagcgcgcaggctgggcggtgttggcggtcgccagcctggcggcgggcctctcttggtggaccatggccatgctgctgccgctcagcgtggccgttgcctgcgcatttgcaccacgccgggcgcaggagctgtcctcagcgcgctctgccgccgtgctgctggccggcctgttgctgttggcggggttctgcctgcccgctgcgcagcgcgccgaaccctttgtgttcgctgccagcctgcaggccatggtgttcgccgccatgggcctgtggatcgcgtggggtgccggtgccgtggcgacctggcgctcgaagaacccgtag

SEQ ID NO: 493156 - DNA, 357 bp, Stenotrophomonas maltophilia
atgaatgcatcggagttcccccatcagcgcgccccggccaatgccgatgaaggacacgacatcccgcccgatcccaacaacctgacggccctgctgcatcgcatcgggctgggcgccgccgccgatggccagccctggccagagcgtcatcagctgccgggccggtgcctggcgctggccgacgccgatggcgcactggccgggctgcgtatcgtgcaggagatcctgctggcggccgaacgcgcccggcagaacggtggcccggaacagtacgtgggcgatcgcgtgatggaaggtctgaagctggccgcactggcgttgaccagccacgccatctatcgcctgcaccctgagtga

SEQ ID NO: 493157 - DNA, 666 bp, Stenotrophomonas maltophilia
atgcaagcgaccacgaccgggacgtccacgttcaacctcagcctcggcagcggcgcgcgcgagctgttgaagtggatcgcgctgctggccatgaccggcgaccacgtggccaaggtggtgttcgggggctacgtgccggtggtcagcgaactggggcgtatcgccttcccgctgttcgcgctggtgatggcctgcaacctggcccagccgggcgccgacctgcgcaaatcgatccgccggctcgcgctatgggggctgatcgcgcagccgttgcacgccttcgcgttcggttcctggctgccgctcaacatcctgctcaccttcaccttggcggcggtggccgtgcatgcgcttgcgaacaatcggcctgtgctgctgttgctggctgccggcgtgctgccgatgctcgtggattaccagtgggccggcgttggcgctgtgctgctggcctggatcgcgttccggcatcgagcatggttgctgcgcctgctcgcgcttgcggcggtgtgctgggccaaccacaacggctgggcgctgctggccattccgatagtgctgctggcgacgcggatgacgtggcaactgccgcgttggcgctggatgttctacgggtactacgtggggcatctggcggtgctggcgctggttgcccatctgcttgcgtaa

SEQ ID NO: 493158 - DNA, 948 bp, Stenotrophomonas maltophilia
atgcgcaccctgtacccggccatcgagccctaccgcgaattcaccctgccggtgagcgatctgcacacgctgcatatcgaagagtgcggcacgccggagggcattccggtggtgtacctgcacggtggcccgggcgccggtatctcgccgacccatcggcgcttcttcgacccggcgcgctaccgcatcgtgctgatcgaccagcgcggcagcggccgttccacgccgttcggcgagctgcgcgacaacaccacgcaggacctggtggcggacatcgaaaaggtgcgtgagcacctgggcatcgagcgctggctggtctatggcggctcctggggctccacgctgtcgctggcctacgcgcaggcgcatccggaacgcgccaccggcctgatcgtgcgtggcgtattcctcggtcgtgagatcgagaaccgctggttcgccgaggccgatggcggtgcgcgctggatcttcccggagcgctgggaccgctacgaggcttatatcccggaagccgagcgtggcgacatgatcgcggcctactgggcgcgcatggatggcccggatcaatcaacccgcatcgaagccgcgcaggcctggttgggctgggaagacaatgcggccaccctgcagcacgacgtggataccgaatccaccgatgatccgctggataccctggcgaaggcccgcatcgaagcgcactacttccgcaacggcatcttcctggagccggaccagctgctgcgcaacatcgaacgcatccgccacctgcccggcgtgatcgtgcaggggcgctacgacatcatctgcccgccgcgcagcgcgtgggacctggcgaaggcctggccggaagcgcgcctggagatggtgacctccggccacagcgccaacgagccggccacggtcgatgcgctggtgcgggcgacggatgcctttgccgaccggttctga

SEQ ID NO: 493159 - DNA, 1212 bp, Stenotrophomonas maltophilia
atggcaaacactgtacttcgttctcgaacattccaatcatccatcgcactctacctcgttgggctcctgctgttcctgccgctgccgcctgcgcgtgcggtagatctgcagattaccgcggagttcaggccgacggcgcttgatcccacccacaaccgtttcgtcaataccacaccgcaatcagggtactgtgcccagcactcgggctactgcaagccaggcgacttcaccatcaacacgggcctgaacgtcagccagcggcggctgttcggggggggggaggaggcgcgcgagaagtggtacctcggcgccgatggaaactggcgcgacgtgacggttgtcaacgccgcaggccatgaactgaaggcgcgcatacgactgttcctcgtcggcatggagtggggtttggctcacgatggcacgtcacccgggctatatggatcatctacaggaggttgcgccggacgaacgggcgttggaaatgcgacgttctatcgatacgcctgggaagtgccagagcgcagtgcggtctgcgcgcgcaatccgcgtgctaccaccgattccgtcgcgaactatctgcgattctccattggctatcaccttgaaacccctaatccgttgcgggcgcaggatggacagtacagcggcagcgtgacgtacacggttggcaacgggcagcagatcgacctggggcagggtgactattccgactcggagctgacactgcagctgttgctggacgtggtccacgacttcaaggtgcgttttgcaagcgagcgtccaaccgtcaagcttgccccggaaggaggctgggcacagtggaacgatcatggcctaaccccggcacgcctctatcaggagctccctttctacctgactacgtcgatggacttcagcatgaagctgcggtgtgagcacgacgcgggcaatcgctgcggcattcgcaatcagacgcttggggaggttgtaccggtggatgtggacgtcaccctgcccggcatgcgcaatctgcgcgatgggcgcccggcgcaggacacaccgctgtcgcccgacgacgcacaggcgccgcgcttcacaccggatggctatctgatgcagcggcggtcgaccttgcggttcaccgcaggacgggacgccgtaacagagatgctgaaggcgccaggctcgcattgggagggcaacatgaccgtggtgtttgacgccaacccgtag

SEQ ID NO: 493160 - DNA, 2505 bp, Stenotrophomonas maltophilia
atgctctcgtcctccaaccaccgtcgattccgactggcccggctcgcgaccgcgatcggtgccgtggtccttgccacctcagcgcatgcggccggcctcgcgccgggcgagctgcccagcctgctgcagcagcgcgaacgcatgccggccgagttccgcgagcacctgtttggcaacccgctcaccgtgcgcgtggagctggacggccagtatctgggtgacgccgaggttctgctgcacgaagacaaccgggtgcaggtgatcggctttggtgacagccacgaaagccggctggcacagaccgagcgtgcccgttggggcgagcagctcgctgaaccgatggcgctgggcgtatgcaggcagcagtgccggggcatggcagcgctgcactacagtctgtccaactcgctgctgagcgtgctgacgcctgccggcgcgcagaaggagcggcgccacatcgccttgccggacgcgggcagccgggggttgatcgtgcgcaacagtcttgccgtgcacggcggccaggaacagcaggccaccgtacgctacagcgccgaactgcgcggcagtgccggccactggagcacggttggcagctaccaatactacgcccagcccggcagcagcgagcactacctcagtgccctgtatgcccagcgcgaactgggagatcacttcgttcgcgccggctacttcctgcccagcttcgagggcattgtgcgccagccccgcgcgccgggtacgcagaacgatacggcgctgggcctgctgttcggatcctcggacgtgctgctggccgatacgcgaagccccagtgtctatcccgtctatgtcaccgccagcggcgaaggcgtggtggagatctaccgcgacgggaacctgctgtccacgcaggccgtcaagcccggcatccaggaaatcgatacgcgccggctacccggcgggatctacgatgtggaactgcgggtggtccaggacggccgcgaagcgtcccgcgaaagcgcctccatccacaagcccagccgctggcaggatcccagccggcggtggcgctacagcgcgttcgcagggcagcagcgcgggttgctggccagcgccggaagcgcccgcgagggcggcgccgcggccggtgccgtggtcaattacctgttgcattcccgtgcggtggccggggccaccgtgcagcggatcggcgcgcggcatgcggcgggtgtgtcgatggactggcaggccagtgaccgcttcagcacctacaccaatgtctatacctccagcgacgccgggcgcggcgtggacctgcagggcctgtacggctatcgtgccggctcggtggtggccaaccatgcgcgcggttgggtggaacagcgcgagcgcgtcgtggcggatgcgagcagcgccccacgctgggagacccgcggcggctggcaggacaccacggccatctcgatcacgcatcgtttcgggcaccgcgacactgccagcctgcgcgtggcccgcagttcgggcttcacccgcgggaccggcatcgatgtctcgtacgggcgccgggagacggtgttcggcaagcatgatgtcaactggcgcgtttccgcctatgaccgccccggcgcccgctacacggggtaccggcggcaacgcggcatcgacctgacggtgagtgtgtcgctgggcagcgatcgacgcagctacagcggcagcctgggcagccgcaccggcgaagccggacgccgcgacacctatgtgaccgcgaccgccacacagcgcgtggacggagcggtactgcagagcgtgaatggcacggtcaccgccgaacggggcgggctgggcgcaggcgcgggtgcctcgctgcagggcgcgtttgtggaaggtgacatgcaggtctaccgcggcgcggcgtcgggtcgcatcagcggcaccgccaacctcgacagcaccgtggtcattggcggtgggcgcgccgccgtgctggggcaggggcgcggcagaagcgccgataccgggctgattgtcgatgtccgcagcgattatcccgatcttgccctgcgtgcggacgacagccacggtggcggcgttgcgctgcgcccgggccgcaacttcgttccggtggccgcgtatcgcgcaggccacgtgcagttcgatttccagggccggcatgcgccgtcggcaacgctgcagccctcggtcgtcagctatcacctcaacaagggcggcgtgatgcatgccacgctggacgtgctgcgcaccttcaccgtcatgggccaggtactggatgcagacggcaacggcgtgcgcggcgtgcaggtgatcaaccacgccggccgcagcgtcagccaggaggacggcttctttaccctggaactgagcgcccgtgcgccggtggtggagttgcgttaccccaacctggtcagctgcacgctgacgatggaggaggggcgctaccccagggaaggggatgtgttgatggtgggcaccgtcggatgtccagccccactggcaggtccgtga

SEQ ID NO: 493161 - DNA, 501 bp, Stenotrophomonas maltophilia
atgtccctgaagaagtacgccctggctgcagccgctgcagccctcatcgcaccggctgtcagcctggcagccaccgaatccaagtcgatcaccgtcaacgtgaccgccgacgtcccgaacaccgctggcctgcaggtgtccacgcctgacggctgggaaggcctgccgcagaacctgccgtgggacaccgcgcgcgaaaccctgggcgaactgaccgggcgcgtcatcaacatcaagtcgccggctgccatcaccgcctacctgacgtcgccggcacagatggcgtcggccgcagacgtcgtggacctggtggtgaagctggacaacgtggaggttccggcaaccgccgccgccaagatcaccgttgccaacgcggcccaggccgccgcgggcaagtcgctggccttcgccattgcgccgactgcgccgacgggcggctacaagcagggcagctacggcggccagttccacatgatcttcgaaagcgacatcaccccctga

SEQ ID NO: 493162 - DNA, 735 bp, Stenotrophomonas maltophilia
atgcaacgcgcactcattctgatcctgctggccctgttcgtcagcagcgcccatgccacgacaccacagatcaacgtgggtctcctgttcgatcatcttgcgcccgcgcagagcaacctgctcaagcgcatacgcaataccggtgatgtgaccgcatacgtgcgcgttgaggtcaccgagatgcacttcgatgcagacggcaaggttgtcgaaacgccagtggacaccgtggcgctggtacgcaatgcacctggcgcgcacggggtgatcgccagccccagccgcctgatcattgccgccaatggccaacaggcgacgcgcctggtctatcgcggtgaccgcgatgaggagcgctactaccggctgcgcttcattccggtggtgccgagcgccgaggagttttcgctcagtgatgcgcaggtgcaggagatcaccgggctgacttcggcagttcgcgtgttcaccggctacggcaccatcctgttcgtggcaccgcggaacacgcgctatgacacccgtgtgcaggacggtcacgtgcacaacggtggcaacgccacggtggtgctggacaacctgcggtactgcgagcgaagcagtccggatgcctgcacgcccggcatcatcgtccatgtccggcccgggcgaacctatgcgctgcaggccgacgacagccggttcgcccgctacgacctgagggagggcgacgaccgccgcagcatcgactcgcgccgctga

SEQ ID NO: 493163 - DNA, 300 bp, Stenotrophomonas maltophilia
atgaccggtattcgctgcgtttctgctgtcctcctcatcaccatcggcctgctgctgggcgcctgttccagaacccaggaggcgagcaaggccaccgccgccgaggacgtcaccgaagtgaagctgataccgccgtatgagtcgctggacaaggacaaggacggcatcgtcacgctggccgaagtggatgccgtggcacccgactgggccgagcgcctgcatgcctgcgataccgaccgtgacaagacgttgacccgtggcgagtacgacgtctgcaagcagaccagcggcgcgcattga

SEQ ID NO: 493164 - DNA, 300 bp, Stenotrophomonas maltophilia
atgtcctacaagatcctctacatcaccctgcgccgcctgattggcgagcgcgatgttgccgccctgcgcagccagttgctgcagcacggcccggtcatgttcgcccgttcgctgtcgctcggttcgccgcgcgtggtggctgacgcgctgtcgctgctgccgatcagcgagcggatcaccgtgctgcgccatctgccctacccactgcgcgatgcgatgaagccgctgtgcattggtggcagccagcgcctgcacatgcagccgtggtcgccggcggtgctggcgatgcgccacgcctga

SEQ ID NO: 493165 - DNA, 2760 bp, Stenotrophomonas maltophilia
atgagcctgctcaacgcctggttcaatgccttcctgcgcagccgtcgcgcaggcaacctgttccgccgccgcgcgatgcccgaagccggctttggcccgggcagcgccgaggccgcgccgttcgcgcttaccaccggcctggtcacccttgcccagcaggaggaagccgagctgctggccacgctggagtcgcatgccgatggcctcagcccgcatgaagccgaggagcggctggccacgctcggccccaacgaggtggatcacgaaaagccgctgccgtggtggcggcacctgtggcagtgctaccgcaacccgttcaacctgctgctgaccgtactggccgcggtgtcctggctgaccgaggacatcaaggccaccgtggtgatcggtgcgatggtgctgctgtccacgctgatccgcttcgtgcaggaaggccgctccaaccgtgccgccgagcggctgaaggcactggtcggcaacaccgcgcgcgtgctgcgccgcaatccgggcaccgaggccgccgatgtggccgaccagtacttcggtgcgcacctgcacagccgtcgcccggcacgcctgctggacctgccgatccgtgagctggtgcccggtgaccacatcgtgctgtcggccggcgacatgattccggccgattgccgcgtactgaccgccaaggacctgttcgtggcacaggccgcaatgaccggcgaatcgctgccggtggaaaagttcgcgcaccccggcgatggcctggccggcctgctggagcagcacaacctgctgttcatgggcaccaacgtggtgtcaggcaccgccaccgccgtggtgctggccaccggcaaccgcacctacttcggcacgctggcccagcgcagcaccgctaccgaccgtgcgcccaccgcgttccaggccggcgtcaacagtgtcagctggctgctgatccgcttcgcgctggtgatggtgccgttcgtgctgctgatcaacggctggaccaagggtgactggaccgaggcgttcctgttcgcgctgtcggtagcggtgggcttgacgccggaaatgctgccgatgatcgtcacctccaccctggccaagggtgcggtgctgctgtcgcggcgcaaggtgatcgtcaagcgcctggatgcgatccagaacttcggcgcgatggaagtgctgtgcaccgacaagaccggcacgctcacccaggacaggatcgcgctggagcgccacaccgatgtgttcggtcacgattcggaagacgtgctgaagttcgcttacctcaacagccacttccagaccgggctgatcaacctgctggaccgcgcggtgctggagcacgtggagctgcagagttcgctgcggctgtcgcaggactaccacaaggtggatgagatcccgttcgacttcgagcgccgccgcatgtcggtggtagtgtccgagcgcgaggaccatcatgagctgatctgcaagggcgcggtggaagaaatgctggcggtgtgcagtaccgttcgcgagaacggccgggacatgccactggacgagcaccgcctggcccgcgtgcggcagaccaccgaggaactgaacgagcagggtctgcgcgtcgtggcggtggcgatgaaggagaccgctgccagccagaccacctattctcaggccgacgagtgcgacctgaccctggtcggctacgtggccttcctggacccgccgaaggaatcggcagcgcaggcgctgcaggcgctggccgcgcatggcgtggaggtcaaggtcttcaccggtgacaacgaactggtgaccgcccgcgtctgcgcacaggtggggctggacgcggacaccatcctgaccggcccgcagatcgagcgcatggacgacggcgcgctgtcgcgggcgctgcaccaccatcgcgtgtttgcccggctgacgccgctgcacaaggagcggctggtacgcgagctgcgggcgcagggcaaggtggtcggcttcctcggtgacggcatcaacgatgcgccggcgctgcgcgcagccgatatcggcatcagcgtggacagcgcggtggacattgccaaggaggcggccgacatcatcctgctggaaaagaacctgatggtgctggaggaaggcgtcatccagggccggcgcacgttcaacaacatgctgaagtacatccgcatgaccgccagctccaacttcggcaatgtgttctcggtgctggtggcctcggccttcctgccgttcctgccgatgctgccgctgcagctgctggtgcagaacctgctgtatgacatctcgcagatcgccattccgttcgacaatgtggatgaggaactggtacgcaagccgctgaagtggaacccggcggacatcggccgcttcatggtgttcttcgggccgatcagctcgctcttcgacctgagctgtttcgcgctgatgtggtacgtgttcgatgcacgcacgccggccgaccagggcctgttccagtccggctggttcgtggtcggcctgctgacccagaccctgatcgtgcacatgatccgcacgccgaaggtgccgttcctgcagagcatcgccgcgccgccactgctgctgatgaccggcctgatcatggccatcggcgtggccctgccgatgagcccgctggccggctacttcaagctgcaggcgctgccggttggctattggccgttcctggtggcgatcctgttcggctatgcggtgctgaccaccgcgctgaagaagttctacacccgtcgttacggctggcagtaa

SEQ ID NO: 493166 - DNA, 738 bp, Stenotrophomonas maltophilia
atggacatcaatccgaacctgccggcgttcaacgccggcgcaaccctgagttcgctgatcagcctgtcggtggcgttcgtgctgggcacggtcatcggcctggagcggcagctgcggcaacgcaccgccggcctgcgtaccaatacgctggtggcggtgggtgcggcagtgttcgtcgatctggcggtgcgcttccatgacctgtacggcggaccaccctcgccgctgcatgtggtggcctatgtgatctccggcgtcggcttcctcggcgccggcgcgatcatgaaggacggcgcgcaggtgtccggcctgaacaccgccgccaccctgtgggggtcggcggcggtgggagcatgtgcaggtatcaagctgctgccggaagcggtgctggccgccgtcttcgtgctggccgccaataccctgctgcggccggtggtgaaccgcatccagcggcaaccgctgccggaagcgttcagcgaggcgacctatgcgatcaacgtggtctgccagcgcgagcagcaggccgaggtgctggaccagctgttgctgctgcttgagcaggcgcagtacccggtgcgcgcggtggaccagcgcccgttcggcgagcgcgatgtggagatcgaagcggtgttgtatgccaccaccgtggatgccggcgaactggacgccgtacttgcgacgctggcgaccacgcccggtgtgctgcagggattctggaacgccagcctggaggagtag

SEQ ID NO: 493167 - DNA, 1056 bp, Stenotrophomonas maltophilia
atgccatcgctgtcgccccgtcgcccgctggtgctgctggccctgatcgtcgtgatggccgcgatcttcctgatcgacaccgtcaccgattacgcggttgctgctgcctgcttctacgcagcggtcatcctcgcggcatcgcgcgtgctggccgcccgcggcctgatcacgctggccatcgcctgcatcgcgctgaccgggctgagcttcttcctgacccgcttcggcacctaccgcatcggcctggtcaattcggtgatcggcatgctggtgatcggcatcaccacctacctcgccctgaacatggaagcggccaaggccgccgtgcaggaagcgcagggtcgcctgctgcgggtcgcccgcgcctccaccgtgggcgaactcaccacctccatcgcccatgaagtgaaccagccgctggcggccatcgccagcagcgccgaagcctgccaacgctggctggcccaggacccgcccaacgtggacaaggcccggcagaccgtagcccgcatcctggcggacgcgcaccgcgcaggcgatgtgatcgcccgcatccgcggcctgacccagggcgcggcaccggaacgacttgccttcgacctgaaccaggcggtggaggaaatgctggcgttgtcgcgcagcgaactggaccggcatggcgtggccgtggccctgctgctggacgccgacctgccgccggtgcaggccgaccgcgtacaggtgcagcaggtgatcggcaacctcatcctcaatgcggtggatgcaatggaagccgtacccgcaggcgaccggcgtctgtcgctgctgacccggcgtgagggccaacgggtcagcctcagcgtacgcgatcgtggcgtcggcctgcccgccgagcatcccgagcgcgtgttcgacgcgttctggaccaccaagtcgcacgggttggggctgggcctcagcctgagccgctcgatgatcgaggccaacgacggccaggtccgcgccgaacgaccggcaggcggcggtgcctgcttcgtcttcgacctgcccgtcgccacggatgtccaccatgcgtaa

SEQ ID NO: 493168 - DNA, 642 bp, Stenotrophomonas maltophilia
atgcgtaagcccactgcacccctcgccgatccggcgcccattgtctatgtggtcgacgacgatccgtcggtgcgcgcggcgctggaagacctgctggcctcgatgggcctgcaggtgcgggccttcgcctccacccaggcgttcctcgaacacgacctggaagacgcgccggcctgcctggtgctggacgtgcgcatgcccggccagagcggtcttgaattccatggcacgatgggcagccatggcctgcagctccccgtggtgttcatcaccggccacggcgacatcgcgatgggtgtcaacgcgatcaaggacggtgccatcgaattcctgaccaagccctttcgcgaccaggaactgctggatgcgatccacaagggcatcgagatcgaccgccagcgccgccgcgagggcgaggcgctcgatgccctccagcagcgctggaacacgctcaacacgggtgagcgcgaggtggtcgatggcgtggtgcgtggccgcctcaacaagcagattgccggcgacctcggcgtcagcgagatcacggtgaaggtgcgccgcgcgcaggtgatgcgcaagatgggcgcgcgcaccctggtcgacctggtgcgcatgtacgaccgcctgcaggcggggacgccatga

SEQ ID NO: 493169 - DNA, 516 bp, Stenotrophomonas maltophilia
atgaacgtccacgtcgccttgctgcgcgcggtcaacgtcggcggtaccggcaggctgccgatgcgcgaactggcggcgatgtgcaaggacgcaggcttcgccgatgtccgcacgtacatcgccagcggcaacgtggtgttgcgcagctcgctcgacgaggcgggcgtgcgccaggccctcggccagcagctccaggaatatgccggcaagccggtaggcgtactggtgcgatcggccagcgagatcgcaggtgtggtggcacgcaatccgtttcagcaggccgccggcaaccgtgtggtcgccctgttcctggacggcagcctgcctgcggacccgcttgatggcgtgaccggccggcgcgacgaacagcttgcactcggcacgcgcgagatcttcatccactacggcgccggcatggccgactcgcgcctacgcattcccggcacggcacagggcacggcgcgcaatctcaacaccgtcgctaggctagcggcgatggcagcggaactccgctag

SEQ ID NO: 493170 - DNA, 393 bp, Stenotrophomonas maltophilia
atgcagggcgaagcacacggtacgtttgaagtggatctgcggccgatcggtggcaatgacggcccgattgcggtgatgtcgatcaacaagaccttcgccggcgacctgcacggcagcagcgtcggccagatgctggccttccgcacgccggtgcagggctcggccggctacgtggcgatggaacgggtaacggccacgctggccgggcgccagggtgggttcaccctgcagcacaacgggttgatgacccgtggcacgccgcagctgagcgtggtggtggtgcccgactcgggcagtgaaggactgctcggcctgagcggcacgctggagatcaccatcagcgagggccgccatgactaccggctggtctacagcctgccggaagaaccctag

SEQ ID NO: 493171 - DNA, 435 bp, Stenotrophomonas maltophilia
gtgcagaacgtaccgcaatggttgctctgggcgggactgtccgccgtgttcgcagcgctgaccgcgctgttcgccaaggtcggcgtcaagggtgtcgatccggacctggccatggccatccgtaccctggtggtggcggcggtgatcctgccgctggtggtggccaccggcaaatggtccaacccgttgctgctgccggggcgcacccagctgttcctggtgctgtcggcgctggccaccggtgcgtcgtggctgttctacttccgcgcactacagagcggtgagctggccaaggtggccgtggtggacaagttcagcgtggtgctggtgatcgtgctggcctatcttctgctgggcgagcggcccagcctgcgggagtggagcggcatcggcctggtgctggccggggtgatcgtgctggccacgaagaagtag

SEQ ID NO: 493172 - DNA, 1197 bp, Stenotrophomonas maltophilia
atgtccgagaacaccctccttgccacgccggccgctaccgcgccgatcaagtacctcgaccgcgccatggccacgctgcgcagcctgggcctggccgctccccaggacaacaacgctccggccatcgcgctggtctcgcagctgtccacccttgaccagggccgcgtggtggccattgcccgcgtgctgcagcagtccgggcatttcaatgccgtgatgcgtgatgaaatcagctcggccaaggtgtccgaccgctataccgagatcatccgcgccttcgacagcatccgtgacgatgccagcaccatggtcgagcaggtgcgcgacggcaggatcgacatgggcgagcgcctgcagaacctgtggatgaaggtcacccgcggcgacatcccgagccggttcgagaagatccgccgcacatttctggaagtcagccgcgattcggccgagcagctgcagcgcgagtcgcgcgtgctggagatgtacggcgacttccgcctgtcgatcaaggatgccgagatccaggcccatgagctgttgaagctgcaggagcaggcgctggccgatgcccgcgaggcgctgaagcaggcgcagcagcgcgtggagtcggccgatccggccgccgatgccgccgacaccggccgcctggtcatggcccgcgatgaggccctgcgcaacaaccaggccgaggagtcgcgctaccagctggccaaggacctggccgagaacctgcaggtgaactacgccacctccgaggcgatcatgctgcgcgtgcaccagtcgcacgagatcaagcgccgcgtcaacgagcgctcggtggtgttcttctccaccaatgaaaccagcttcaccgccttgaacctggccttcaccacgcagatgggcctgcatgagtccacgcaggcgctcaatgcgatgaccgagggcacctccaagggcctggaagcggtggccaacatcggcgatgacgtgctgcacgagggcctcaaggccggctacggcgccaccatcggcgtcgattcggtgcgcaagctggtcgatgcggtggtgcacttccaggagacctcgctgcaggagatcgagcagctgcgcggccaggcgacccgcgactcggccgagatcgccgagtatgtcgaacagggcaagcagcgcttcgccgccctgctgcaggcgccgccgagcccggagtcgcgctga

SEQ ID NO: 493173 - DNA, 1488 bp, Stenotrophomonas maltophilia
atggcccctgccgagctgcaggatgcactgctgaccatggatgtggtcgaccagctgcgctaccgcaacgccgaaatgaaggcgctggccgacagcggccatgacaaggcgacgctgaagcagcgcctgcttgagctgtaccgctcgcagggcatcgaggtctccgacgagatccttgaggccggcatccaggcccagcgcgagcagcgctacctctacaccgcgccgcgtggctggaaggcgtggctggcgcggcgctggatcgatcgggcccgcctgttgaagtgggcgctgctggcggccttcctgctgctggtgctcggcatgctgctgttcatggcgcgcagcttcggagcgttcgtgcacgagagcaacgtgcagaagaacgtgcaggtgctgaacgacaaggtggccgcgcagcaacaggaggctgctgcagcgcgcgccctgctggccgcacaggaacaggccctgcaggggctgctgccacgtgccaccgccagcggtgggcgcctgcagccactggccgaaggcgcacaggccgcgctggccgaagcacagcggcgcttcgccggggttcccgccgcactggccgcacagccgacccttgtgcgcaaggacaagctcacccggctcagcagtggtggcagtgccaccggcgagcaggcggccgcgcaggttgagcagcatcggcaggccgccgcgcagctgctggcgaatgccagggaaaccctgccgccgctgaccgagcgggtgaacattctcggccaggcgatcgaggccagcgagctgctggataccaccaacgccgctgcaaaggcggcacgcctcgcgccggatgcagagcaggcgcacgcacgcgcctacaccggcggcgacgtggcactgcgcgcgggcgacatcgccgcggccggccaggcggtagcgaccctgaaggagctgatcggcagcgccgccacgctggccgcgctcaacgagcggttggccgagctcaaggccgacggcctcgccaccggtgtcgccggcgaagaccgcaagcgcttcgaacgtgcgctggagcaggccgcccgcctgatccgggtcgagacgctggccgaagccgggccggccctggacgaggtcagccagctggtggggctgctgtcgcagaccctggtctaccgcatcgtcaaccgtgacgatgaacgcaccggcgtctggcgctacaacgaaaaggccaatggtggccgcaactactatctggtgaccgaagcgctggacgaggccggcaatgctgccgaactgccgatccgtaacgaggaaaccggcaaggaggaacgggtctcggtgtttgccgtgcgcgtgcccgaggccacctacaaccgggttgccgccgacaagcaggacaacggcatcatcgaagatgaccagatcggcagcaagccgcgcggcagcctgtcgccgcggttccgcatgcccgccaccggtggctacatcacccaatggtga

SEQ ID NO: 493174 - DNA, 1422 bp, Stenotrophomonas maltophilia
atgagagacctgaacgacgcgattgccgatgtcgaaaccgatatcggccaggtgcaggcacaactggccgcgcgtggcgaccagtgccgggagctgatcaaggaacaggaagcgctgcacgggcgggtccgcgacgacttcaacgccctggcgcgcctgcaggccgaggccgccaccgatgcgccgccgatgctggcccgggacctgctgcagcagtccagcgccgatctgcagcgccgtgaccgcaaagcggcggtgcttaacgacgaactgcaggcgctgctggacatcgagcagtcgttgcagcagcggtcgcaggaggccgttgccgcacgcgacgccggcggcggacgctggcaggccctgcaggaccaggtggacaccacgctggaagcggaacctacctacagggcgctgcaggacgacctgcagctggccgtggcgcgtgccgacacggtcgagcgcatggcttcctctgcccaatcggagcatgacgccaaggccggcgcctatcaggccgacccgatcttcatgtacctgcaccggcgcagctacggcagcacggcctaccgcggctggccactggtgcgcaccgtcgacggctggctggccgaactgtgcggctttgaccgtgcccgtcgcgagtacgccacgctggtcgagcttccgccctatctgcaggaacatgcccgacgcgcccgcgacgacgtggaggcggcccgccaaccggtacagcaggcccgcgatgccgccctcgcccgcgccggtggcgacccgctgcgccagcagctgcagacggcacagggcgcagtagcgcaggcgctgctggccgagcagctgcatcgtcagaccgtggatgccaagcaggcacagatcgacggcttccgcagttggaccgatgccgaaggcagcgccctgctcaccgcgctggcgcgcacgctgtcggccaagagcatggacgacctgtaccggcgcgtggccgccaccgcctccggcgaggacgatgccgtgctcgagcgcatccatcgcagtcgcctgcgcctgggcgagatcgatgggatggtaggcgagcacacccgcgaaatggccgtgctgaaaaagcgcctggacagcctgcaggcggcgcggaggagctaccaggcggcagcagacatcgagcgccaggcctacgaggcgccgagctaccgggccgccgcgccggccaccgtcgccgcatccttcttcagcaccaccagcagccgaagcaccacccgctcctctggcagcctgttcgacctgctttcgggaggctccagcagttccggctcgggttcgagctcgagttcgagttccagctccagctccagttccagcggcagcagcttccacagcggcggtggtatcagcggcggcggtgacttcaagaccggcggcgggttctag

SEQ ID NO: 493175 - DNA, 1179 bp, Stenotrophomonas maltophilia
atgagtacccgactgcgcctgcccgcgctgcgccaccgcgatggccatcatgcccgcgtgacctacgaagaactgttcttcgacctggtctacgtgtttgcggtcacccagctcagccaccatctgctgcaccacctggacctggccggcgtgctgcagaccctggtgctgtggttcgcggtctggctcggctggcagtacgcgtgctgggtcagcaactggttcgacccggaggcgccgcgcatccggggcgtgatgttcgccaccatgctgctggcgttgttgatgtcctcgtccattcccgaggcgttcgccgatcgtgcctggatcttcgccggggcgtacgccacgatgcaggtcggacgcaccgccttcgtgctgctggaagtcggccgcaaccatacgttggcgccgaacttccgccgcatgctggcctgggtcagcgtgtcggcctgcttctggctggccggcgcggcggccgagggccacctgcggctggcactgtgggcgatggcggtggcctgcgaatacatctcgccgatgttcggcttcgcgttcccgggcatgggccggtcgcacacccgcgactggaccatcgagggcggtcacctggccgaacgctgccagctgttcgtcatcgtcgcactgggcgagacgttgctggccaccgggggcgtgctcagcgacgtcgagcactggagcctgcaggtgatctcggcggtgctggccactttcgctggcacgattgccatgtggtggctgtacttcggcatctccagccgcgatgccacagaggccatcacccacgccgaagacccgggccggatgggcgccaatttccattacgtgcatgccctgctgatcgccggcatcatcgccaccgcggtgggcaacgatctggtcatggaccatccgggggcggccgtcaccacggtctacgccacggtgatggtggcgggcccgctgatctatctgctgggcagtgccctgtacaagcgcgtggtctacgggcgcgcgccgcgctcgcacctgctgggcgcggtggcgctgctggtgctgggcctggtgttgccctggacgcacctgctggccgccggatggctgaccagcctggtgctgctgggcgtggggttgctggatgcgcggctgaagcggcgcacccggccgttgccgggctag

SEQ ID NO: 493176 - DNA, 267 bp, Stenotrophomonas maltophilia
atgcacgtgctcatggtgatgctgggtggcgtactgctgctgggggtattcgtgctgtttggccatctctggagcacgggcacctcgcagctgcccacggcactgatcgccttcatcgccacctggctgctggtggccgtggccaacatgtgggtaggggtcagcaaggccggctacgcggtacgcgaggagctgccgatcctgttgctggtattcgccgtgccggcgctacttgccggtttcctgtactggcgcctggcgcgctga

SEQ ID NO: 493177 - DNA, 870 bp, Stenotrophomonas maltophilia
atgcgcctttgcctgacgacccttgccctgactgccacacttgcctttgatgtgactgccgccgacgcaccgctgccgcagctgcaggcctacaccgtggacgcctcgtggctgcagccgatggcaccgctgcagattgccgaccacacctggcagatcggcaccgaggacctgaccgcgctgctggtgcagaccgccgacggtgcggtactgctcgacggcggcatgccgcagatggccggtcacctgctggacaacatgaaggcacgcggggtggcagcacaggatctacggctgatcctgctcagccacgcacacgccgaccatgccgggccagtggcggagctgaagcgccgtaccggcgccagcgtagcggccaacgccgaatcggcggtgctgctggcgcgcggcggcagcaacgacctgcactttggcgacagcatcacctttccgccggccagcgccgaccgcatcatcatggatggcgaaggggtcaccgtaggcggcatcgcgttcaccgcgcacttcatgccggggcacaccccaggcagcaccgcctggacctggaccgatacccgcgatggccagccggtgcgcatcgcctacgccgacagcctgagtgcgccgggctaccagctgcagggcaacgcccgttatccacgcctggtcgaggactaccggcgcagcttcgctacggtgcgcgccctgccctgcgacctgctgctgacgccgcatccgggcgccagcaactggaactatgccgcgggtgcagaggccggagccaacgccctgacctgcaaggcctacgcggatgcggccgagaagaagttcgacgcacagctggccaaggaaacagccacggcacgctga

SEQ ID NO: 493178 - DNA, 540 bp, Stenotrophomonas maltophilia
atgaaccgttctctctccctcggcctgctgctgggcatcgtgctggccaccaccgcctgtggacgtgccgccgaagaatccgccgccgcaccggtcgccagcaaggcaccggtagcaccgatccaggccagcccggccaaggtcgatccggccctgccggtggccatcgtgcacaagaccgccagctgtggctgttgcggtatctgggtcgaccatctgaaggccgcgggcttccaggtggacgtgcgcgataccgatgacatgaatccgatcaaggtccgcctgggcgtgccggtcggcaaggcctcctgccataccgccgagatcggcggttatgtggtcgaaggccacatcccggccgaggacatcaagcgcctgctggccgaacgcccggccgcacgcgggctggtgctgcccggcatgccggccggttcgccgggcatggaaatgccggatggttacgtgcagtcgtacaccgtcgagctggtgcggaccgacggcagcaccgagccgtttgcccagcacgggcagggtggctga

SEQ ID NO: 493179 - DNA, 2286 bp, Stenotrophomonas maltophilia
atgtccgagcagaaaccgccgcgttacaagccctacaaccagcccgccggaggctggggggccgccggcgccacggccaaggtgctgctgcagcagagtgtgatcggcaagggatcgaaggcattgctggcgatgaaccagcccggtggcttcaagtgccccagctgcgcgttccccgatgccgacgaacgcaagaagctggagttctgcgagaacggcgcgaaggcactggcctgggaagccacccagttccgcgccggccgcgaactgttcgcccggtacaccgtgaccgaactgatggcgcagaccgactactggctggagatgcagggccggctgaccgagccgatgcgctacgacgcagccaccgaccactacgtgccgtgcagctgggacgatgccttcgcgctgatcggccgccacctgcaggcgctggacagcccgcaccaggccgagttctacacctccggccgcacgcccaatgaagccgcgttcctgtattcgatcttcgtgcgcgagttcggcaccaataatttcccggactgctcgaacatgtgccacgagccgaccagccgtggcctgccgccggccatcggggtgggcaagggcaccatcgtgctgcaggacttcgagcatgccgaggcgatcttcgtgatcggccagaataccggcaccaattcaccgcggatgatgagcaacctggtcgaggcgcgtaaacgcggcatcccgatcgtggcggtcaatccgatgcccgagcgtgcgctgatccgcttcgccgagccgcaggacgtggtgcagatggccacgttcggttcgaccgagatcaccagcgagttcgtgcatatccgcatcggcggcgacctggccctgatcaagggcatgatgaaggtgatgttcgagcgtgaggcacagggcgagcgcgtgctcgaccatgatttcctgtcggaacacacggtgggcctggaggcgctgcgcgaagacgtgatggcgcaggactgggaccagatcgtgcaggtgtccggcatttcgcaggcgcagatccgccgctgtgcggagatctacatccgttccaaggccaccgtgatctgctacggcatggggctgacccagcaccagtatggctcgcgcctgctgcagcaggtcgccaacctgctgttgctgcgtggcaacttcggcaagcccggcgccggcatcggaccgatccgtgggcattccaatgtgcagggcgaccgaaccgtcggcatcgacgagaagcccaagccggcctatctggaccgcgtgcagcaggtgttcggtttcgacccgccgcgcgagcatggccaccacgtggtcgagtccatcgaggcgatgctggatggcagcgccaaggtgttcatcggcctgggtggcaacttcatccatgcggtgcccgatacgccgcgcgcgtacgaggcaatgcgtggcctggacctgaccgtgggcatcgccaccaagctcaaccgtgggcacctggttcatggccgcgatgcgctgatcctgccggtggtggcgcgctcggagcgcatcgttacaccggccggtgagcagttcgtcaccatcgaggacgcgatgtccaatgtgaccgcctcgcgcggcgtgctcgaaccggtcagcgccgatgtgttgcccgaggtcgaaatcgtctgccgcatggcgctggccacactgcccgacagcagggttgactgggccggctgcatgcacgactacgcacccatccgcgagctgattgctgcggtgtatccggagatctacaccggcttcaacgagcgcatccagcagccacacggtttccatctggacattccgccgcgccgccgggtgtggcccacgcccaatggcaaggccaacatcctggtgatgcccggcctggacgtggacgatccggtgcacgatccagacatgttgcggttggccaccgtgcgctcgcatgatcagtacaacaccaccatctacagctacaacgatcgctatcgcggcgtgtacaacgatcgcatggtgctgttcatgaacatcgaggaccggctggcgcgcgggctggagaaggaggcgctggtcagcctggagacgatcagcggcgatggcgtgcagcgccgcatcgagggcctgaccgtgctggactacccgatgccgcgcggcgcgctggccggttactacccggaactgaacccgttgctgccgctggactactacgaccggatcagcggcacacccgcagcgaagtcgatcccggtgcggatgcgggcgatggcggcggcgattgcgtga

SEQ ID NO: 493180 - DNA, 849 bp, Stenotrophomonas maltophilia
atgcctgattcgatcccgccgcacaccccgcctgccggcaccgcccaacgcccgttgcagcgctggcgcggcggcacgcaacagcagcagctcgacgtggtggccgaggaagtgccggtggcgctgcgctacaacgatgccgcctttgccgtgatgatggccacaccctgtgatctggaggacttcgcactcggattttcgctcagcgaaggcctgatcagcgcgccctcgcagctgctgtcgatcgatatccacccacagctggaaggcatcgagctgcagatgaccgtggacgaggctgcgcccggcgcaaacctcgaccccgacaagggacgcctgctgcccggccgtggtggctgtggcctgtgcggcacgcgccagctggaagaagtgctgcgcccactgccgcagatccgcgaacgccgcagctattccgccaccgccctgcagcgggcgttggccagcttggcgcagcaccagccgatgaatgcggcaagcggctcgatccatgccgcggcctgggccgacgccagtgggcgcatcggctgggtacgcgaggacgtcggccgccacaatgcactggacaagctgatcggcgccctgcaccacaacgaacacgccatcgaaggcggcctgctggtgatttccagccgggccagctacgagatggtgagcaaggcagtgcgcgccggcgccagcgtgctggcggcagtgtccgcgccgaccgcgctggcgatcgatctggcccgcagcgccggcctgtgcctggtcgggttcgcgcgggaaagcgggttcaatgtgtatacccatccggagcggctgcaggcgcacgacggccacgcccgctga

SEQ ID NO: 493181 - DNA, 537 bp, Stenotrophomonas maltophilia
atgtcccgtgtccccctgatcgatgccgccaacaccaccgccgaccgccaggccctgctgggccaggtccacgctgccttcggcgccaccccggccatgttccgcgccgtggccaactcgccggctgccctgcagagcatgtggggttcgttcggcgcgctgggcggcggtcgcctgtcgccgctgatgggcgagcagatcgccgtggccatcgccaaccgcaacgcctgcgagtactgcctggccgcgcacacggcattgggccgcaaggccggcgccagcggtgagcagatggctgccgcgcagatcggccagtccagcgacccggccactgcggcggcgctcgacttcgcgttgaaggtggtcgagcagcgtgcgcagatcgccgacggcgacgtgcaggcgctgcgcgcggccggcttcgatgatgagcaggtcgtcgagatcctcgcgcatgtggcgctcaacctgttcaccaactacgtcaacgtggcgttcgacgtgccggtggacttcccgaaggtcgcgctgcgctga

SEQ ID NO: 493182 - DNA, 882 bp, Stenotrophomonas maltophilia
atgagcgtgcgcgccgccacccctgcgccagatcgactctcctcgctgctggaacgcttccgggtgcaggcggcgctgttccacagtggcccgctgtgcgggcagcatgtcttcgagccgcagcccggtcgtgcgttcctgcacatcctgcgccagggtgagatggaagtccgtcatcctgggggcgatagcgcgctgccccggttgaagatcgatacacccagcctcctgctgtatccgcagccgctgcaccatgtgttcttcaacgctccgctggacggcccggatttcacctgtgccacgctggatttcgatggtggcgcgcgcaatccgatcgtgcagtcgctgccaccggtgatggtggtgccgctggccgcgatcaccgaactggatgacaccctgcagctgctgttcgccgaagccgatcgccagcgctgcgggtcacggctgctgaccaaccgcctgttcgaggtggcgctgatccagatcctgcgttgggtggtcgaccacccggatgcagccggcgtcagccacgggttgatgcgggggctgtccgatgcgcggctggcacgcgcgctggtggcgatgcaccaggcaccgcaggacgaatggacgctgccgcgcatggctgcgaccgccggcatgtcgcgcagcgcgttcgcggccgtgttcaaggacgtgatgcaggcaacgccagccagctacctgctggactggcggctgagcctggcctgcgcgcagctgcgggccggcgtggcggtcaagcaggtggggatcgaggtggggtttgccgataccgcatcgttgtcgaaggcgttccgcaagcggctgggggcttcgccgagggcgtggttggccgcgggcgccgcgcaggctgggtag

SEQ ID NO: 493183 - DNA, 558 bp, Stenotrophomonas maltophilia
atgagaaccagcaagcgcgaccgcatcctcgacgccgccgtcaacgtgatcaatcgtgatggcgtgcgcgcagtgaccttcgagtcggtggcggccgaggccaagctgacccgcggcggcctgctgtaccacttcccgtcgcgcgaggcgctgctgcgcggcatcgacgagcacctggtgcaggcctgggagacgtcgatggaaacgctgctgggcaagcgtgcagacgaagcctcggcgctggagcgttaccagaccttcgtgcgcgtctcggcgcagagcgctacccgtgccgagctgatgttcatgctcgaatcggccgacccggacgccgatgagcgcccgtgggggccggcggtacggcgttgggcgccgttgccgccgtcgaccgggcagagcgacccggccgcgctcgacaatttcgtggcacggctggccgccgacggcctgtggatctacgaggcgatgtacgaggggcagctggatgaaagcgtgcgcgcccaggtggccgaacggatcgccgggctgctggcgaagcccgatggaacgaccagttga

SEQ ID NO: 493184 - DNA, 1533 bp, Stenotrophomonas maltophilia
atggctttgtcccagcccttggccggtgctccggccctgtcgcgtgcccgtcgctgggcactgctgttcaccgttgccgccggcctgctgctggtcacgctcgacaactccgtgctctacaccgccctgcccacgctgaccgaagaactctcggccagtgccggccaggcgctgtggatcatcaacgcctatccgctggtgatggccggcctgctgctgggcgcgggtacgctgggcgaccgcatcggccaccgccgcatgttcctgatcggcctggtggtgttcggcgtggcatcgttggcagcggcgttcgccgacaccgcagggcagctgattgccgcgcgcgccttgctggcggtcggcgcggccgcgatgatgccggccacgctggcgctgatcggcctgagcttccacgaagcgcgcgaacgcaacatcgccatcgcgatctggggttcggtggcgatcgtcggtgcggcgcttggcccgatcatcggtggctggctgctgcagcatttctggtggggctcggtgttcctgatcaacgtgccggtggtggtggtcgcgttcgtggccacgttgctgctggcaccggaaggccagcgcgacacctcgcgaccgtgggacctggtttcgtcgctgctggctctggctgcactgtccggcctggtgctggcgatcaagtcactgatcgctacgccgccgtcgtatgcgctgggtgcaggcgcgctgctgctggccgccatcagtggtgcggcgttcgcgcgccgccagcagcagctgccgtacccgctgctggacttcgcgatcttccgcaatccggcgttcctggccggcacgctgtcggcggtgttcaccctgtttgcgatggccggcctgcagctggtcaccacccagcgcttccagctggtggcgggcttttcgccgctgcaggcgggcctgctggtgtcggtggccgcgcttggcagcctgcccagtgcgctgctgggcggcagcatcctgcaccgggtgggcctgcgcccgctgatctgtggcggcctggccgcaggtgcgctgggtgtcggcgtggtggcattcggcttcccgcacggcctcggctgggtggtcgccggcatggcgatcaccggcttcggcatgggttcggccatctcggtggcgtccaccgccatcctcaacaacgtaccggcgcaccgtgcgggcatggcctcgtcggtggaagaggtgtcctacgagttcggcggcctgctggcggtggcgatgctgggcagcttgagcgcggcgatgtatggcgcattcctgccggtctcggccgacatgcccgcgcttgcacgggaaggcttcacccaggcgctgcacgtggcacgtgaaagcgggcagggcgagtggttcgcactggccacggccgcgtatgaccgcggctaccagatcgtgctgctggtgatcacggtggtgctggcgctgggcgcgtcgatcattgcgcgcctgctgcgcgggcgcgtcggcagccgcgagggtgcggccgatcgcgtaaaatga

SEQ ID NO: 493185 - DNA, 747 bp, Stenotrophomonas maltophilia
atgcgccggcgatggctcatggctgccggggtgctgctggtcgcggtggtgctgctggtgtggtggcagcggcagcgcgcacccaccgcgccgccggcggttgcgtttccagcaccggcgtccgatgccagccagcgcatcgaacagcgcctgggtgacgatcacgcgttccgcaacgacgtattgttcctgctcgcggcaacagtgcgcgaccgctgccagccagcgcaggcggggctgctggcgcgcatggccaatcgtgcatcgctgccggtgctggcgggagtcagcgcggtgacccagcaggatccatcgctggaccggccgatctaccagtacatccagcatcgcgccgatgcgacgcggtgcgggcagccgctgcagatgccgttggccggtgggcgcagcatggcgttggacatcgaacagtacgcgcgcaccttcccggacagctacttcgacccgcagcgcagcagtgaaccccgggatttcggtggacggtcgttgcagcagcgcgctggcaacgcctgcaacagcgtggtgtattcggtgttgccactgggtggcaccgattggcggtgcagcagcctgcgcgcgaatgcccgcgcgcgggtgcgcggcctgtgcgaggacgagctgcggcgccagcacggggcaacgggcggggagctggacatggccgtgaggcagggcatgcaggcggcggtggtagcggcgattgctgcgctgccggaagactgccggtga

SEQ ID NO: 493186 - DNA, 621 bp, Stenotrophomonas maltophilia
atgaaccgtagccccttgttgctggtgctgggatgcctgtggctggcgggctgtacgtcgccgggcggcgatgccgtggtggtcacgccgaaggacacgccggctgcagtcgctacggacgctgccgccatcgaccgttgggatgcactgcggcccgatgaagtcacctatcagcgcccgccgccgcagatcggtctgtcacgcactggcatggatgatgtgggcgggctgatcgacgacaccggctccggcacgccgccggggcaggagatcgaccactccagcccggaccgcgccaagcagttcggctcctcgcgcgtggtcgacgccgtcgacggtcgcgcggtcgatctggatggctacgtggtaccgctcggcaccaacgatgcaggcctggtcgatgaactgctgttcgtaccgttctacggggcgtgcatccacgtgccgccaccgccgccgaaccagatcatccacgtgaccctggccacgccgatcgcgctgggcgacctgtgggatccgtaccggcttgccggccgcctgcaggtgaagcgtttcgacgcggacatcgccagcgcgtcctacgatgctgcggcggccacgctgacggcgatccgcaactga

SEQ ID NO: 493187 - DNA, 552 bp, Stenotrophomonas maltophilia
atgcgctggatgctgtcattgccgatggtgctggcgctggcagcctgcgagcggccggcggataccggtgtgcaggcgttgccaccttcgccggttgtcgaccacgctggcgctgtggatgcggcggagcaggaactggaatggttgcagatgatgcccaaggacgagctggccgcgctggagcgcggagagggcccggaggtcgagcacaacggcaaccggcgcatgccgcagttcggcacgttccgtaccgtggatacggtgctgcagcgtccggtgcgcctgcccggctacgtggtgccgctggccactgcgcaggacgggcggctgaccgaattcctgttcgtgccgtactacggcgcctgcatccacgtaccaccgccgccaccgaaccagatcgtgcacgtggtgctgccacgccccatcgcgatgccggacatgtactcgccgttcttcctggccggcaccctgcgtgccgaacggctggatgatgatctggccggctccgcctacaccatgcgcgatgcacagctgaggccttatgaaccgtag

SEQ ID NO: 493188 - DNA, 1254 bp, Stenotrophomonas maltophilia
atgcttgagcttgcctgggccagcctgcgcagccgtgcgttgagcgtgggcctgaccgtgctggtcatcaccctcagcgtggtgctgttgctgggcgtcgagcgcgtgcgcacgcaggcacacgaaggcttcgccagcaccgtgtccggtaccgacctgatcgtcggtgcgcgttcggggccggtgaacctgctgctgtactcggtgttccatatcggtgacccgaccaacaacgtgtcctggcagtcctaccaggagctgtccgcgttgccgcaggtgaagtgggcggtgccactttcgctgggcgattcctggcgcggctaccgcgtggtcggtaccagcgatggctatttcgagcactaccgctacggcgccgggcacgcgcttgcgtttgcgagcggacggccgttcgatgacctgtatgacgtggtgatcggtgccgaggtggcacaggcacagaaggtcggtctcggtgaccagatcgtgctggcgcacggcaccggcgcggtcaccctggccacgcatgccgacaagccgttccgggtctccggcatcctgcagcgcaccggcacgccagtggattcgtcgctgctggtctcgctgccggcgatcgaggccatccacgtcgactggcgctcgggtgtgcagctgcgcagccagagcgtcagtgccgagcaggcgcgccacctcgatctgaccccgaccagcatcaccgctttcatgctcggcctgaactcccgcatcgccaccttttcggtgcagcgcaggatcaacgagtatcccgaagaggcgatgctggcgatcctgcccggggtgacgctgcagcagctgtggcagtcgctgggcacggccgagcgcgccctgcagctgatcagcgcgatggtggtgctgctgggcatggtctcgctggtggcgttgctggtctcgacgctgcagcagcggcggcgcgagatggcgatcctgcgtgcgaccggcgcgcggccgggttacatcgccggcctgctggtagtggaagcggtggcgaccagtgccgtggcctgcgtgctggcgttggcgctgctggtggccgccagcatggccggacgcggctgggccctggccaccttcggcctatccatcacccatgtctggccggatggccgcgagctggcctgggtggcgggtgtgttggcgatcagcgcggtggccgggctggtgccggcgttgctggcctaccggcgcaccttggccgatggcctgtcgccgggaggctga

SEQ ID NO: 493189 - DNA, 690 bp, Stenotrophomonas maltophilia
atgcgaccggtgatcgcgctggatggcgtgcagttcggctatggccggcggctggtgctggacgtgccgcggttgtggatcgagcagggcagcagcgtgctgctgcgcgggatcagtggcggtggcaagagcacgttgctgggcctgctggcgggcgtgctgctgcctggcaagggccgcatcgaagtcgccggccacgcgctgcaggcgatgcgcggtgccgcgcgggaccgcttccgcgccgaccacctgggcgtgatcttccagcagttcaacctgctgccgtttctcagcgtgcgcgacaacatcgcgctgggcctgcgcttctcgcgcctgcgcagcgcacgcatcagcggcccgctggatgccgagatcgcccgcctggtgcaggcgctgcagctggacccggcgctgatgcagcggcgcgcaggcacgctcagtgttggccagcagcaacgcgtggcggcggcacgcgccctgatcggccgcccggcgttgctgctggccgatgagccgacctcggcgctcgaccgcgacgcggcgaccgcgttcctgaagctgatgtcggcgcaatgccaggcagccggcaccaccgtgctggcggtcagccatgacgacagcctggagcggttgttcgaccgcacgattgccctgtctcagatcaaccaggcaggtgccggccatgcttga

SEQ ID NO: 493190 - DNA, 534 bp, Stenotrophomonas maltophilia
atgaagcgttctgctgctcttttcctgctgcaggctgccagtgccgcgcaggcccatgacatccgccagcacgcaccgcacgtgcacggccaggccaccgtcgatcttgcgcttgaccagcagacgctggaattcgccctgcaggcacccggcatcggcatccttgattacgagcgaccgccggccaatgcagccgagcaggccgcgctgacacgggctacgacagtgctgaagggcggcagctgggtcaccttgcccaccgccgcgggctgccgcctttcaggcaacgatgccaaggccgagggattcgatgcgacggctgccgcaccgccatcaggtgagcaccggcacgcggggttcagcgtaacgctgcggtaccagtgcgccaagccggccgagttgcgggccatcgtggtgcgcttgcccgtgctgttcccgggcctgcacgaagtgatcgtcaacagcgccaccgcccgaggacagaaccgcagcgtgctgaccccggacaacctgcgcgtggtgctggcaccgtga

SEQ ID NO: 493191 - DNA, 495 bp, Stenotrophomonas maltophilia
ttgttactatgtaacattatggaccacatccccacgacgcccgcaagggccctgacccagccgccaacttcggcacgctggcacccccgcttcgatcttgccggggcctggctgtccctggcctgcgccgcccactgcattgccctgcccctgctgctggccttcgtgccggctgcgatgatggcgctgcgctcgttccagcatcccggccatggcgcgatgacactgctgctgatgatgtcgcgctgggaatggctgttcgcgctgctggcctcgtcgctggccttggcgagtacctcggccggggtgcaccggcacgggcgctggcggcctgtgcagctggcctgcaccggcgcgattctgctgctgtcggcctcgctgtacctgccgctgaaggaatcactgctctggcatggcgtggcgacagctggtggtggcgtgctgctggcatgcgcgcacatcggcaaccggcgcgcgctgcacaaccgccggtag

SEQ ID NO: 493192 - DNA, 903 bp, Stenotrophomonas maltophilia
atgaaaaccaccctggatgagctgaaggccttcgtggccgtggtcgacagtggttcgatcacggcggcggccgaagagctggagctgaccatctccgccaccagccgcaccctggcgcggctggaggacaagctgcagaccacgctgctgcggcggaccacgcggcggctggagctgaccgaggagggagccgcattcctggagtacgcgcgcacgatcctggccacggtggacgaggccgaggaacagatggccgcgcggcggctgcagccggtcgggcgcctgcgcgtagacgccgccacgccgttcatgctgcacgtcatcgtgccgttgctggagggcttccgcgagcgctacccgcaggtggagctggagctgaattccaatgaaggcatcaccgacctgatcgagaagcgcaccgacgtagcattccgcattggcgtgctgcgcgactcgaccctgcatgcgcggccgatcggccacagccgcatccgcgtggtggccagccccgagtacctgcgacggcacggcacgcccacgcgcgtggagcagctgcacgaacatgaccttctgggcttcacccagcccagttcattgaacgaatggccgctgcaggatgccgatggcggccctttcgtgattgagccggcgattgcttcgtccagtggcgagacactgcggcagatggcggtgaccgggctgggcatcgcctgcctgtccgacttcctgacccgccaggaccggcgtgatggccgcctggtgcagctgttcgcgaagcagacgcaggaggtgcgccagccgatcaacgcggtgtactaccgcaataccgcgctggccgcgcgcattacctgtttcgtcgaccacgtgacgcagacgctcggccagcgtccgtttgacgaataa

SEQ ID NO: 493193 - DNA, 804 bp, Stenotrophomonas maltophilia
atgagcgttccttcctttggcgtcggcaccttccgcctgaccggccagaccgtcatcgattcggtgcgcaacgccctcgacgtcggctaccgtgcgatcgataccgcgcagatctacggcaacgaagccgaggtcggccaggccatcgccgaatccggcgtcccgcgcgacgagctgttcctgaccaccaagatctgggtggacaactacgccgccgacaagctgatcccgagcctgcgcgacagcctggccaagctgcgcaccgggtacgtcgacctgctgctgatccactggccggcgccgggcaatggcgttgaactgcgcgagtacatgaccgcgctggccgaagccaaatcgctgggcctgacccgtcagatcggtgtgtccaacttcaacatcgaactgacccggcaggccatcgaggtggtcggcgccggcgagatcgccaccaaccagatcgaactgagcccctacctgcagaacccggcactgactgccttcctgcaggaacaaggcatcaccgtcacctcctacatgaccctggcctacggcaaggtgctgaaggacccggtgctggccgccatcgccgacaagcaccaggccaccgtcgcccaggtcgcgctggcgtgggcgctgcagcggggttactcggtcatcccgtcctcgaccaagcgcgagaacctggccagcaacctgcttgcccaggacctgcacctggatgccgatgacatggccgcgatcgccgcgcttgaacgcaacggccgcgaagtcgatccgccgggcctggccccggcctgggactga

SEQ ID NO: 493194 - DNA, 948 bp, Stenotrophomonas maltophilia
atgggcagtgcgttgacgcggctgcaggccggtggtttcagcatcggcatcgaagcaccgctggacaatgactggacgccgctgggcgaacaggcacgacacgccgcgcgacgcctgcccggcgaaccggacctgcagcgccatgcggagctggcacggttggccgaccgccttggcttccgtgcgctgtgggtacgcgacgtgccggtgtacgacccggccttcggcgatgccgcacaggtgttcgaggtgttcagttacctcggctatctggccggcatcaccgagcacatcctgctgggtaccggcgcggtggtgctgccgatccgcgagccgttgctgaccctgaagtcggcacgcagcgtgcagcggctgagcggtgaccgcctgctgctgggcgtggccagtggcgaccgcccggtggagtacccactgttcggccgcgacttcgacagccgtggcagccgcttccgcgagcacatcgcactgctgcgcgaaggcgccgccccgcacctgccgcagggcctggacgtgctgcccgcggatggcccggccctgccgctgttcgtggccggcctggcccagcagcaaccggcgtggatcggccagcacatggatggctgcctggcctacccgggcacgccgcaggaccatgtacaacgcgtggcggcctggcgcgccgtggccggcaacaagccctatgccagcttcatccacctggacctggtggccgatgccgatgctcctctgcagcgctggcgcttcggcctgcgcggcggccgcaacgccctgctggccgagctgcacgccatgcaggcggctggtgtcgatcacatcggcctgcagttccgccgcaacgaacggccgttggccgaaaccttccacgaaatcgccgagtacgtgctgccgcacttcccggcccatgccggcgccgctgcgacggcctga

SEQ ID NO: 493195 - DNA, 939 bp, Stenotrophomonas maltophilia
atgaagatgaagaccctggccgcgcttgcgctggccaccctgccgctgtccttccaggccactgccgaggactggtatccctctgcctacggcgccaacgacgagatcggcgcggccaacctgctcaccgctgacgtggtcaagcacgcggtctcgctggtcaggaccggcaagacctatccgctggcggtgccggtggacaagaacctgcccgcgttccgccaccgcagcttccgcctgtacaacgtgcaggtcggccagcaggctggcaagtcgctgggccccaacaggttcactttcaacgatgaactggtgaacgcctggaccggcgttggcacccagctcaacggcatcggccatatcggcatcgacaacgtctactacaacggcaacaaggccgccgacttcgtcaccgtggacggggtgcgcaagctcggcgtcgagaaggtgccgccgatggtcacccgtggcgtcgtgctggacatgaccgcgtactacggcaaggcgatcgtgcccggcggcaccgagttcaccgtggccgacatccaggccgtgctgaagaagcaggggctgcgcctgcgcaagggcgacgtggtgctgttcaacaccggctggctggaactgatcggcaaggacgacaaacagttcctggaagtggaaccgggtatcggcatggaggcggcgaagtggctggccgaccagggcatcgtcgccttcggtggcgacacctgggcctcggaggtctacccgaacccgaacggtgccgaggagttcccgatcaaccagtacatgctggccaagcgtggcatctacaacctggagctgatcgacagccgtgccctggtgcgcgacaaggcctgggaattcctgttcgtgctcggccagccgctgtacgtcggttcgacccaggtcaacatcaacccggtggcaatccgatga

SEQ ID NO: 493196 - DNA, 324 bp, Stenotrophomonas maltophilia
atgaacaccgccgctgaccttcccgtgttcgccggccgccgcttccgcgtcagctatgacggcctggccgccgacaatgtctacagcgccgatggccgccacgtgcagtacgccatcgtctccggcgcctatgccggtgcgcggggcgaagccgcctgtgagtggcagcggatcagcgacggggtctatgccatttcgtggcaggaagccgatggcgctacggtcgtgcatgtcgatgacttcgcgggcgggcattcgctggcctggttcaccgccaccgatggcagtttccatcgcatgcaggggccgctgcacgcgctgtga

SEQ ID NO: 493197 - DNA, 378 bp, Stenotrophomonas maltophilia
atggcccgtcccctgctccgctccaccgcccttgttgtcctcgtctccggcctcgcggttgcgccgctggccctggcccatcccagcctggtacgctcgacgccggccgccgacgcgaccgtggcgccggccagccagatcgagctgcagttcagcgagaaggtgatgccgcgtgccacccgcatcgaactgagcatggaccatggccgcatgaagatggccatgcccaccactgcgcaggagctctccgaagatggccacaccctgcgcgcacgcttcgccaagcccttgccggcaggcagctacgcactgcagtggcgcgcggtgggccaggacagccacccgatcactggcacgtaccgtttcaccgtgaaataa

SEQ ID NO: 493198 - DNA, 885 bp, Stenotrophomonas maltophilia
gtggccgagctctcgccgtatgcgctgcggctggcactgtacctggtgctgatgctgctgttcgggcggatgctgttcgtccgtccggggctgccgcgcggcgtctcgctggcgctcgccctgatcgcgttggccgtggtggtcaccgatgccatcacccgcttgaccggtgtgctcggcatcgcaccggccgacatcgaccctgcaacggcgcactggttcctcaccggtacgccggtgggtaaagccggcctgctgcgtaccgtggcggtgctggcgatgctgcccctgctggcattcgccacgccgctgccgggcctgcgccgcgtggccctgctcgctttgtctgccacggcgttggccagcctgtcctggaacggccacgccgctgcgggcgatgggttcggcggcaccttgcggctgctggccggcatcgtgcacctgctggccgccggtgcctgggtcggcgcgatcgccgccatcctgcagttggcgctgcgtccacagggcctgcgcctgcgcgagcgcacctacgagttgtggcgggccgcgcacagcttcgccctgccgggcacggtcatcgtcgccctgctggcaatgaccggcacctatacctatgtcgatctcggcggttccgtgcagaccctgaccggtaccgcgcatgggcgctggctgctgctcaagctggccctggtggtcggcatgctggggttggcggcgctgcatcgctggcgattggtgccggccttggccacctccatccgcgacggctggcaaccgcggccgctgcgttccctgcgccacagcctggcctgcgagtcggtgctggccgtgctggtgctggcctgcgtggcggtgcttggtacgctggacccgttggcgtga

SEQ ID NO: 493199 - DNA, 699 bp, Stenotrophomonas maltophilia
atgaaactgctgatcgtcgaagacgaacccaagaccggcaactacctgcgccagggcctgatcgaggccggctacgtggtcgatctcgcctgcaacggcgtggacgggctgcacctggccggcagcggcgagtaccaactggtcattctcgatgtgatgctgcccggcatggacggatggaacgtgctgtcgcggctgcgcgccgccggatggcaggtgccggtgctgttcctgactgcgcgcagcagcatcgccgaccgcgtgcagggcctggaactgggcgccgatgactacctggccaagccgttcgccttcgccgagctgctggcgcgggtacgcaccctgctgcgtcgcggccaggcacagccgcaggccgagcgcatcatcatcgccgacctggtggtggataccctgcgccgccgggtcgaacgcggcggccagcgcatcgccctcagccagaaggaatacaccctgctggagctgctggcgcgtcgccagggcgaagtgctgccacgctcgctgatcgcctcgcaggtgtgggacatgaacttcgacagcgacaccaatgtgatcgacgtggcgatccgccgcctgcgcgcgaagatcgacgatgacttcgatgccaagctgatcgtcaccgtgcgcggcatgggctatgtgctggaggcgccggacgacggtgccgtgcacagcggatga

SEQ ID NO: 493200 - DNA, 1368 bp, Stenotrophomonas maltophilia
atgagcctgcgtcgttccatcgcggtacggctgacactgctgttcgccatcgtggccacgctggtgctggccgcattgggcgtggcaatctatgtcagcgcccgccatgatcttgttgcccaggacttcatcgaactggaaaacaaggtcgcgttgatccgcgacctcgctgacaatgggcctgccgccgcgcgcggaccgcggttggcagaggcgctcggccatcatccggatatcgccttccacattgttgatgggagcggaaccgtactgttctccactgcgccggcactgctgcgcgagcatgcacgcagccagcccatcgacgccgcgccacggcggcacgactggatcctcaccgatggtcgctgcatgcatgccctgcacctgcgccagacgctggccgacggcagccagctggtgaccctgctggccattgatgacaaccgtcacgccgacttcctggagcgcttccgccacctgctggcaatcgccatcatcggcgccgccgtggccagcagcctgctcggcggctatgtggtgcggcgtacgctgcggccgctgcgcacgctggccgatgaggccaggcagatcaccgccggtcgcctgcagcggcgcctgagcgcgcgcagtgcaccggccgaactggagcagctggcgcagaccctcaacggcatgctggcacgcctgcagcgggacttcgcgcggctgaccgaattctccggtgatctcgcccacgagctgcgcacgcccatcaccaatatgctcacccaggtgcaggtggtgctggcgcacccgcgcagcaacgaggcctaccgcgagacgctggcgtcgtgtgccgaggaactgcagcagctggcacagaccgtgggcgacctgctgtacctggcgcaggccgaagcaccgggcgcgctgccttcgcgcgagccggtggcgctggatggggtggtggattcgctgctcgagttctacgagctgctggccgaggaccggcagttgaccctgcgccgcgaaggcgtggcgagcgtggaaggcaaccgcttgatgctgcaccgggcgatcgccaacctgctgtcgaacgcgttgaagcacgccactgccagcagcgaggtgcgggtacggctggccgaggccgatggcgtgtgcagggtcagcgtgcacaacgtcggcacgccgatttccgccgaagcgctgccgcgcctgttcgatcgtttctaccgcggcgagcgtggccgccacgaaggtgcggggctggggctggcgatcacccgcgcgattgcacaggcgcatggcggcagcgtgagtgttgcgtccgatgacaccggcaccgtgttcgagttggtgctgccgagcgccgcagcccggtag

SEQ ID NO: 493201 - DNA, 954 bp, Stenotrophomonas maltophilia
atggaccgcttcacggccatgcgcgccttcgtccgtatcgtcgagcgccgcagcttcacccgggcctccgaggacctgggcctgccgcgggccacggtgaccgacgcgatcaaggcgctggaacagcggctgggcgtgcgcctgctgcaccggaccacgcggctggtggtgccgacgctggaaggcgaggccttctatggtcgttgcctgcgcctgatcgccgacatggacgacgcggaggccgccttccgtgacgcgccgccgcgcggccccttgcgcattgaggtgcatggcacgctgggccggcacctgctgtttccccacctgccggggttcctgcagcgctacccggagatcgaactggaggtcagcgaaggcgaccgctatgtcgatctgctgcgcgaaggcgtggatgcggcgctgcgggtggggacgctggccgacagcgatctggcggcgcgccggttggcgatgctgcgcgaggtcacggtggccgcgccgggctacctgcaggccaagggcgtgccaggcagcatcgagtccctactgggcggccatgaaatggtgggctatcgctccagcgccaccggccagctgattccgctggagtttcagcagggcgggcaggtgctctacgtgccgctgccggtgcgggtgcgtgtgtccggtgcggatgcgttcctcggcgccgcgctggcgggcctgggcatcatccaggctccgcgctaccggatggacccgtatatcgcgcgcgggcagctggtggagctgttgccggacgcgccgccgaccccaagcccgttgagcctggtctacccgcgcaaccgcacgccgtcgccacgcctgcgggtgttcatcgactgggtggccggggtgttcgagcagaccgggggggccggccagcggccggcactaccggagcggcacgcgaagctgtccgaccgcagggggtag

SEQ ID NO: 493202 - DNA, 744 bp, Stenotrophomonas maltophilia
atgaccctctcccccgcccgctctgtcgccctggtcaccggcggatcccgtggcatcggtgccgccatctcgcgtcggctcgccgccgatggccacgcggtcgcgatcaactatgcgggccgccgcgacgacgccgaagccttggcggccgaactcaacgccgccggcgcgcaggccaccgcgctgcaggccgatgtgtccgatccgcaggcggtgcgccagctcttcgacgccatcgaagcccgtttcggcggcatcgacgtggtggtcaacagcgccggggtgctgcagctggcaccactggccgataccgacgacgccctgttcgagcgggtgatcggcatcaacctcaggggcgccttcaacgtgctgcgcgaaagcgcgcgacgggtgcgcgacggtggccggctgatcaccctgtccaccagcgtggtcggcatccggctggagaactacagcgtgtatgcggccagcaaggcggcggtggagacgatgggcgcaatcctcagcaaggagctgcgcggacgcaatatcaccgtgaacgccgtggcgccgggcccgaccgccaccgatctgttcctggatggaaaatcgcccgagctgatcgagcggttggcgaagatgaaccccctggagcggctgggtacgccggagaacatcgccggcgcggtggggttcctggcaggtgccgatggcggatggatcaacggccaggtgctgcgcgccaacggcgggatggtatag

SEQ ID NO: 493203 - DNA, 3078 bp, Stenotrophomonas maltophilia
atgatcgatcgcctgattgcctattgcctgcgccagccgctgatggtgatgctggcgctgctgctgttcatcggcgctggcattgccgcgttccgcgtgctgccggtggaagcctttccggatgtgtccgacacccaggtgacggtggtatcgctgcacccgggccgggccgccgaagaggtggagcgcgaggtgacgatgccgctggaagtggcactgtccggcatcccgcattcggtgcgggtgttctcgcatacgcagttcggcctgtcgatgatcatcctgaccttcgacgacaaggccgatgattacttcgcgcggcagcaggtgctggaacgcctgcagggcgtggagctgcccgaaggggtgacgccggagctggaggcgatgagctcggcggtgggcgaaatctaccggtacgtgcttaaaggcccgcacctgacgccgacccagctgcgcaccgtgcaggaatggacgatggagcgcagcctgcgcaccgtgccgggcgtagccgatgtgatcagtttcggcggcttcgcgcgtacgttccaggtcaagccggacctggacaagctgcgtgaccgcggcatcagcctgggtgagttcgccgaggcgctggagaagggcagctcgaacgcaggcggcggctacgtggaacgtggccagcagcagttcctgatccgcggcgtcggtctgatgcgctcgccggccgacatcggcaacgtggtcgtggcgcagcgcagtggcacgccgatcctggtgcgcgacctggccggcatcgccgataccggcctgccccggcagggcctggtcggccaggatgacaacgacgacgcggtgttcggcatggtgctgatgcgcaagggcgagaacccgtccgacgtgctcgacgccctgcatgcgcgcatcgccgagatcgaagcgaatcagctgccggccggggtcagcatcgagccgttctacgaccgctcgtggctggtctcgaccacgctgaaaaccgtcttcagcaacctgctggaaggcgcggtgctggtgttcctggtgctgtggctgttcctgtacaacgcccgtgccgcgctgatcgtggcggcgatgatgccgcttgcgctgctgtcgaccttccttggcctgcatctgtggggcgtgccggccaacctgctgtcgttgggtgcgatggacttcggcatcatcatcgatggcgcggtgatcgtgaccgagcacatcgtctcgcgattgtcgaagctgccacctgcggccgaccgtaagacacggttctcgaccattctttcggcagcgtcggaagtgggccggccgacgttcttctcgatgctgatcatcatcgccgcgcacatcccgatcttcaccctgcagcgccaggagggccgcatgttcgcgccgatggcgtactcggtaacctcggcattgatcggcgcgctgatcctggcgctgaccgtggtgccgttgttctgctactggtggctgcggcgcgaccgcatgcgcgacggcaatccgctgatggaccgcctgaccggctggtaccggccggtcctggagcgcgcactggcccgcccgcgtgcggtagtgctgaccgcggttgcgctgctggtcggcacgctggcattgggcacgcggctgggttcggagttcctgcccgagctggacgaaggatcgatctggctgacggccacgctcgacccgagcaccagcctgggcgaagcgcagcagcagtcgcggcgcatccgagagctggtcggcagctttccgcaggtatcgacggtggtggccaagctgggacgcccggaagacggctccgatgccaagggcgccaaccagatcgaggcgctggtggcgttgaagccggagaaggaatggccgagaggcgtggacaagcgacagctggtgagcgacctgcagcgcacgctggagcagcgcattccggggcccgagttctcgatttcgcagccggtgcgcgacaacatcctggagagcatctcgcagatcaagggccaggtggtgatcaaggtcagcggctcggatctggacgtgctgaaccagcaggcacaggcgatcctgggccaggtacgcggcgtggagggcgtggagagcgccttcatcgaccgcgacgggtcattgccgcagctgcagatcgagatcgaccgcgaccgcgccgcgcgctatggcctgaacgtacgcgacgtcgacgaagtgatcgagaccgcactgggcgggcgccaggtcggcgagctgtgggagggtgaccgcaggttccccatcaccctgcgcctgaacgatgccgatcgtgacctgcagcggctgcgtacggtgccggttggcatcggcgatggccacacggtgacgctgtccgacgtggccgacttccgcatggccagcggcgcgatcaacatctcgcgcgagaacgcacagcgggtgaaggcggtgagcatcttcatcgccggccgcgacatgggcagcgtggtggctgacatgcgcaagcgcgtggatgccagcgtacagctgccggaaggctatcggctggagtggtccggcgagttcgagaaccagcagcgtgcgatgaagcggctgggctgggtgattccgctgtcggtgctgatcatcttcgtgctgctgttcgatgccttcaaggacatcagcagcgccgcgctgatcctggccaacgtgccactggcgatgatcggcggcatcctcgccctgtggctgaccggcattccgctgtcggtgtcggcggcaatcggcttcattgcattgttcgggcaagcggtgctgaacggcgtggtgatgctcagccgcttcgcccagttgcgcgagcagggcatggacctgctgcagtcggtggtgcagggttcgctgcagcgcctgcgcacggtgctgatgaccgcactgctggcgatgttcggcctgctgccgatggccacctcgcatgcgatcggtgccgagacccagaagccgctggcggtggtggtgatcggtggtctgctgtcggcgatgctgctgaccctgctggtgttgccgacgctgtactactgggtgcatcgccgccgcgaggcgcgcatcgcctga

SEQ ID NO: 493204 - DNA, 1173 bp, Stenotrophomonas maltophilia
atgaagtcccccgtcgcccatcgcccgcgggcgcgacacggcttgctgccggccttgctggcgctggccttgctgggcggctgcggccgtgagccggcgtcctacaccgaggatgcgccgcagatcagtgccggccagatcctgtttccggccggcagccgccagctggatgtactgcgcagcgagctggtgaccgccggtgccagcgccagcctgcagctgccgggccgggtggtctgggacgagacccgctccagcgcgctgcgcaccccgctggcggggcaggtggcgcgcatcgaggcgcagccgggccagaaagtgaaggccggccaagtgattgcctggatcacctcgcccgagttcggccaggcccaggcggagggcgtgcgtggccgcgccgagctgcagcaggcgcgcaaggagctggagcgcacccgcgagctgcatgcggcgggtgtggcgtcgggccgcgaactggacgaggccgaggccaacttcgccggcagccaggccgatcatgcgcgtgcaaccgccttcgccaaggcatatggcaatggtcagcgcgtcgaccagcgcctgccgctgcgcgcgccgatcgatggcgtgctggtggagcgacggatgagcccgggcatggcggtcagcccggacagcgaacagccgttggcggtgattggtgatccggaccgcctgtggttgctgctggatgtaccggagagcctggccggacgcctgaaggcgggcatgcaggtgagcgtgcccggcgccgatggacagccgcagcaggcgaccctgcagcacgtggatgacttcgtcgacagcgagcgccgcgtggtgcaggcgcgcgccgaactggacaaccgtgcgcgcggtttcaaggcgggccagtacgtgcgtgcgcaggtggcagtgccggccgagggcggtgtctcgctgcccgatgctgcggtactgctgatcgacggcaagcaggtggtgttcgtggaggaggccaagggccgcttcgcgcgccgggccgtgcgtgccgaggagctaggtgatggccgcctgtgggtgcgcgagggcctggcccagggcgccagggtggtggtcgaagggggcctgttgctgcagcagctggtcgacagtgcgcccgctgccgccagcaccgggacggggcatgccgcgccatga

SEQ ID NO: 493205 - DNA, 1248 bp, Stenotrophomonas maltophilia
atgaatttctcccgtcgtcttgcggccctgctggccgccctttcgtgcgcgcctgcgacttcggcgctgtccttgcaggatgcacagcgtgcaatggaagcgcacaacccggacctgcacgcggcggcattggaactgcgtggggtgcagggcgatgcgctgaccgctgcgttgcggccagcggccgagctgtcgatcggcagcagcaagatcagcccgaagcacggcatcggcccggggcgctggcaggacaagcgggtggacagcacgctgggcctgggctggacctgggagcgcggcggcaagcgcgcattgcgcatccgccaggcggacgcgctgctggaagtggccgggctggacatgctcgatacccggcgccggcagcaggtggcactgcatgaagcctatttcggcctgaagggcgcgcaggagcgggcgcagattgccgaggccaaccgccagagttcggccgaacagatggcggcggccgacaagcaggtggccaccggggcgatggcgccggtggatcgcgcgcggatggcggtggaccatctggcggtggccgatgcggcgcgcgaggcggccctggatctgcgtgacgcgcggcatgcgctgggcctgctgctcggcagcgatgacagccgcgacctcagtgccgatgacccctggccggatgccagcagcgtggccaaggtgcgcgcgttcgatccgcagcagcgtgccgacctgcgcgcggcacgctcgcgcctggccgccgccgacgctggcgtggccctggcacgtagcgagcgccaccgcgacatccagctgggtgtggaggccgagcgcgagcccaccgatatcagcggtgtcacctggggcgtgtcgttgaccattccgctgggcggcccgtcgcgcgcacgcggcgcgatccagcgtgccgaggccgaccgtgacagcgccgcgctggagctgcaggtactgcagcgcgaagcacgcgccgagctggaccagctgcaggccagcgcgcagtccgccgcacagcgccgcagcgactacgaggggctgcagtccgacgccgcacgcaaggcggtgcagggcatcgaactggcgtaccggcgcggcgccgccagcctgaccgatctgctggatgcgcgccgcagttggcgcgacttcgaggccgcgctgatcgatgcgcgcgccgaccatgccattgccctggcgcgctgggaagcggccacatccgttgctgaaggagagtcccgatga

SEQ ID NO: 493206 - DNA, 675 bp, Stenotrophomonas maltophilia
atgcgaatcctgctgatcgaagacgacgccgccctggccgatggactgatccgcgccctgcagggtgccggtcatctgtgcgaccacctctcgcgtggactgcacgcgccggcggcattggccagcgcaccgtatgacgtgatggtgctggacctttcattgcccgacgtcgatggcctggacctgctctcgcgcctgcgcaacgacggcgccaccctgccggtgctgatcctgaccgcacgcgatggtgtggaggaccgcatcctcggcctcgaccgcggtggcgacgattacctggccaagccgttcgcactcggtgagctggaagcccgcctgcgtgcgctgtcgcgtcgccgcagcgacgcaccggcgcagaagcggttgggccggttgtgcttcgacagcatccgcaatgaagtgcaggtggaaggccagcgcatcgaactgaccgcgcgcgagctgtcgctggtcgaggcactgatgcagcatcctggccgcaccgtcaccaagcagcgcctgttcgacgcgctgtacagctgggatcacgaggccaacctgtcagtgatcgaagtgcatgtcagccgcctgcgccgcaagctggaacaggcgcgcgccggcgtcggcatccgcatgctgcgtggcctgggctatcggctggaagccggtggtgactga

SEQ ID NO: 493207 - DNA, 1434 bp, Stenotrophomonas maltophilia
gtggtgactgagcgtgtgcacagcctgcgtggcctgctgctgcgccgcctgtggctgcccctgctggtgctgctgctgtgcagcgcgatcggttcattcgcgttggcccgcttctatgccggccaggtctatgaccgctggttgctggactcggcgatgtcgttgtccgagctggtgaaggtgcaggacgggcgtgcctcgatcgagatcacgcccgcggtgtcgcgcatgttcacctgggataccgctgacgaagtgcatggcgaagtggtcgacgctgcgggcgggcgcctgtatggggacctgcccgaagcgctgccccgccccgcgatcgctgccggcagcgacgatgccgtctactacgacgcgcgcctgcgtgggcagccggtgcgcatggtcgaggtcgtggtcagcgctgggccgggccacgatatccgcctgcgcgtggccgagacgctgcgcaagcggcaccggctggagcgcaagctgctgctggccagcatcccgttccaggccgcgatcctggcgctggccgcgtggctggcctggtccggtaccggcgcggctgcacgccatgccaaccaggtggcgcggcggctggccagcccgcgtccggacccgctggcgccactggagcccgcgcaggaagccccacgcgaactgtggccggcggtcgaagcctacaacgcactgctgcaacggctggacgcgatgcaggccgcgcaacggcgcttcgtcagcaatgcggcgcaccagctgcgcacgccgctggcggcaatgcaggtggagctggagagctcactccgccaacaggatccgcaggcccagcagctggcgctgtccggcacgctggccgggctggcacggctgcagcacctggtcaaccagctgctgatgctcagccgctcggaagatccacagggcagcgcactgccgctgcagccgctggatctggccgcgttggcacggggcgtggtcgagcgctacgccgaccgtgcgttggtggcgggcgtggacctgggttacgacggacccgacgacggcgtgaaggtacagggtgatccgcagttgctgcgcgaggcgctgggcaacctgctggacaacgcgctgcgctacggcgccgtgcccggtgtgatcaccctgggactacagcgggatgccgagggcgtgcaggtgtgggtggacgatgacggtacaggtatcgccgaagccgagcgcgcgcgcgtcacggaacggttctaccggaccagcagcgagggagatggctgcgggctggggctggcgatcgtggccgagatcgcgcagcggcatggcgcgatattgatgatcgaaacggcgccactcggtggcgcgcgcgtggggttgcgtttccgttcgcgaaagcaccccgacccacggattccggtagacgcccaccttggtgggcgccgttga

SEQ ID NO: 493208 - DNA, 2346 bp, Stenotrophomonas maltophilia
atgcccacgctggaccgtcgtctcctgatcgctttcgccgcgaccgccatgcttgcctccggggcggtgctggcggctccgtcgacatccgccgccgaacgcgcctatggctcggtcgacccgttcatcggtaccggcggggaaggccatacctacccgggggcgacggtgccgttcggcatggtccagctcagcccggatacgcgtatccagccgcgcgagaaggcctacggttgggcggccggctaccgctacgacgacagcagcatcgtcggcttctcgcacacccatttttccggcactggccattccgatctgggcgacatcctgctgatgccgttcaccggcagtcccggcctggagcgtggcgatcccgagaagccgcgcagcggctatgcctcccgcttccgccatgatgacgagaaagcggagccgggctactacgcggtcaccttggacgattacaaggtgcgtgccgagctgaccaccagtacccgcgtgggggtgcatcgctatgcgttccccaagggcaccgacgccaaggtgctgctggacatgcgcaccagcatgtacgactacccgggcaaggtgctgtggtcgcgggtgcgggtgcgcgccgatggcacggtgaccggcttccgcgagacgcgcggctgggcaccgggccgccagctgtatttcgcgatgcgtttctcgcggccgctggccggccatgagctgcacaacaccgagcaggacatcgtctataaaggcttcccgccgccgggcgagaaggatccggcgcagcgcgcccagatcgaaggccggcagctggtcggcaccttcaacttcggcaagctggacgcaccgctggtggtgaaggtagccatctcgccggtcagcgaggccggcgccattgccaacctcgacgcggaagtggccaacttcgatttcgatcgcgtgcgtgcacaggcgaagcaggactggacgcaggcgctgtcggtactcgatatcgatgcccccgagcatgcgcggcgcagtgcctataccgcgctgtaccacacgatgctggggccgacgctgttcatggacgccgatggccagtaccgcggttcggacaacgcggtgcacaaggccgacggcttcacgcactattcgacgttctcgctgtgggacacctaccgcgcgctgcacccgttgctgacgctggtgcagccggagaagcgcaacagcgacttcgtcaattcgatgctggcccaccatgagcacagtccgtacggcatgctgccggtgtggtcgttccatggcctggaagactggtgcatgatcggctaccacgccgtgccggtgatcgccgatgcctacgtgaagggcattcgtggcttcgacgccgacaaggcattgaaggcgatggtcgagaccgccaactacggcccgtatgacggtatcgcgcagtaccgtgagctgggctatgtgccgatcgacgaggaaggcgaagcggccagcaagacgctggagtacgcctttgatgactggaccatcgcacgcatggcgcaggcgatgggcaagggcgatatcgcggcgaccttcgacaagcgcgcggccaactggcgcaatgcgttcgacaaggacaccggcttcatgcgcgcacgcaagcgcgacggcagcttccgtacgccgttcgaccccagcgccagcggctacggcaccgactacaccgagggcaacgcctggcagtactcgtggtacgtgccgcaggacgttgccggcctggcggcagcccacggtggcagcgacaagctgctcgcgcgcctggacgaggtgttcaacgccaaggtggatccgtccatcttcgagcacatggaagacatcaccgggctgatcggctggtatgcacatggcaacgaacccagccaccatgtggcctacctgtactcgtacgctggccagccgtggcgcacccaggcgcgcctgaagcagatcatggacacccagtacgccgaccgtccggatggcctggccggcaacgatgacgtcggccagatgtcggcgtggtatgtgttcaccgcgctgggcttctacccggtggcaccgggttcgggcgagtacatcctcggccgcccattcctgccgaagaccgcgatgcgcctgcccaacggcaagacgttcaccatcgtggccgatggcctggatgacaggcacacctatgtgggcagcgtgagcctcaacggcaagccgctgcagcgcaccttcctgcgccacgacgagatcctggccggtggcgagctgcgcttcagcatgcaggccgagccgaacaaggactggccggggcaggacgcgcaggcgccgtattcgatgagccggtga

SEQ ID NO: 493209 - DNA, 2310 bp, Stenotrophomonas maltophilia
atgaagatcgctgttcgccgttcccttgcgctggccattgccgccggccttgccgttgccggtcccagccaggccggcaccctcaacccgggtgaaagcgcaacagtcaatgctggagaccccattgaaggctggtctgcccacggtgccacactgacgttcaacaccggcagcgccgccacatccgtaggcatcagcgacggatccacgctcgccatgacgggggcagcagccaccgccaccgatccgtttgccgccgtccagattgcctcctccagcgcaacgatcgccggcacccggatacagaacagccgcgccgcgggattggcggtaaccaatggcatctctggtggcgctgccggcaccgcaactgtcactgactcgagcatcatcggccaaggaatcggaggctatgttcaaggtggcgtactgaccctgagcaacacgacgattgatggaaccggcatcggagccggcctcctaccgtccgaaatctcgtccggtctggcagtcttctcgaactcaagcgtcaacatcaccaacggatcttccgtcatgggggatgagaacggcatcgttgtgaaggacatcgggggaactcccaccagtccgatcagtgacaacgtcctcaccatcgacaagtcacgcgtcgccggtcgaaacggctcgggcattgttgtcagcggtgcagggatcatcgccccaaccactgtcaacgttctaaacggcagcactgtaagcggcggcaatggcgtgattgctgaagccgtcgatggcggtacgctgaatctgaacgtcggcgcgtcacaactgcagggtacgcttcgtgccgatgcaacctcgcagctgcacgccaagctttccaatggcgcggtactgaccggcgtcatgaccaacgtcaccagcgccacgctggactcggccagctggaacatgaccggcaattccacgatcggtgcgctaagcctcggtaacggcaccatctccctcggcgacggctccgccttccacactctcaacgtggccggcaacttcagcggcgccgatggcacgatcatcttcaacaccgtactggccggcgacgacgcagccaccgacaagctgatcatcggcggtgacaccagcggcagcgccaacgtgcgcgtcaacaatgtcggcggcgcgggggcgcagaccgacaagggcatcgagctgatctccgtcggcggcgcttccaacggccagttcaacctggccgggcgtgcggtgggtggccagtacgagtacttcctgcacaaaggcaccggcgccgacggcaactggtacctgcgctcgcagctgccgacccagccggacccgtgcgtggtcgatccgagcctgcccgagtgcgatccggtcgatccggagccggtgctgcgccccgagcccggcgcctacctggccaacctgcaggcggcgcagaccatgttccggctgggttaccacgatcgccatgccggccagaatgccggccgcgcctgggcgcgcgtggatggctcgcgcaacggcttcgatgccatcagccgccagctcgacatccggggcaacagccaggcactgaccgtcggtgccgatctgtggcgtcacgattcgggcagcagcgtgggcgtgatgctgtccagcggcaacgccagcagcacctccaccaatgagctgaccggctactacgcccgcggcaaggtgaagggcgaggcgctgggcatctacgccacctggcgcggcggcaacggtgccgacccgtatgcaggcttctatgtggacggctcggtgcagcgcgcgcagttccgcaatcgcgtggaaggcatcggcctggatacggaacgctacgacagccgtgcctggcagggggcggtggaaaccggctacgcgttccgcgtaggcggtgccaacaacggcggcatctacctggagccgcagctgcaggtgggctacagccgctgggacagcaaccgccacaccgaggccaacggcacggtggtgagcaccgagaatgccaatggcgtgttcgggcgtgcaggcctgcgcctgtccggcgtgacccgctggggcaatggcgcggcggaggtgcagccgtacctggccgccaactggctgcacacccgcgccgaatcgcagatccgcatggatgacgagatcgccgatgcgcgcgtgccgcgcagccgtggcgagttcagtggcggcgcgtcggtgaagttcagcaacggcatcggcgcctggggcgggctgtcgctgcagaaggccagtggctatcaccagaccagtgcgcaggtgggtgtcagttacagctggtaa

SEQ ID NO: 493210 - DNA, 243 bp, Stenotrophomonas maltophilia
atgacccaacgtccactcagtccggccatggagtcgctcttccagcgcatcgaacacgccctcaacagcgccgaaggcatggccatcctcatcggcgaacagtacggccccgagccgaagccgcccgcaccgatgggctacaacgccaaagagatcgccaacgcgatggtcatgctgagccagcatgggcggtgcctgttgcagaagctgcgtgcggaagcggagaaggtgacctatcactag

SEQ ID NO: 493211 - DNA, 324 bp, Stenotrophomonas maltophilia
atgccgttcatgcgtgactacccggcggcggagcctgcgggcgcggacgtggaagctcaggcgggctggcagctgctggagttcggtgcaccctggtgtggccattgccaggctgcgcagcctgcactccaggcgtttgtggacgcccacgatcttgtgcattggaagatcgaggatggcaagggaaagccgctggggcgtgcgttcaaggtaaaactgtggcccaccgtggtgctgctgcatgacggccaggaagtggcgcgcgtggtgaggccggtcgacagcgccgacctcgccaccttgcagggcgcattgccagattga

SEQ ID NO: 493212 - DNA, 417 bp, Stenotrophomonas maltophilia
atgacccgtcgcattcccgaaggcacgttgatcatcgtcgccgatggcggttcggcccgcgtgttcaccaacgtcggcagcgaacatcagctggcgttgaagcaggaaggtgagctgcgcctgcaggacatcagcgagcagggcgtctctggtcagggcccggctggcgcggtgccgaaggacatgtccatttcgcagctcaacgaggcgacgtttgccaagcaggtagcggagcagttgaacgaagatgcgctcaacaaccgctatgcacacctggtgctggtggcagacccgaccacgctgggccgtatccgcccgctgctgcacaaggaggtccaggcgcgcctgctgggcgatatcgccaaggacctgaccaacgccccgctggcggatatccagaaagcgctggcggcgtaa

SEQ ID NO: 493213 - DNA, 1491 bp, Stenotrophomonas maltophilia
atgcaggacacccccgatgcacatgcccatttcggctggttcaaacgccgccgccacctgaaggtcgatgagatcaccgtcgtcgacaagcccatgctcaagcgcgctgtcggcgcggccgcactcggcaatgccatggagtggttcgacttcggtgtctacggctatctggccgtcaccatcggccaggtgttcttcccctccagcaaccccaccgcgcaggtgatcgccgcgttcgccaccttcaccgtggcgttcctggtgcggccactgggcggcctggtgttcggcccgctgggtgatcgctacggccgccagaaagtgctggcgttcaccatgatcctgatggcgctgggcacgtttgcaatcggcctgattcccgcctacgagcgcatcggcatctgggcgccggtgctgttgctgctggcgcgcgtggtgcagggcttctccaccggcggcgagtacgggggcgcggccaccttcatcgccgagtattccaccgaccgcaaccgcggcctgatgggcagctggctggagttcggcacgctgggcggctacatcgccggcgccggcaccgtcaccgcgctgcacatgctgctgagcagcgagcagatgctggactggggctggcgcattccgttcctggtggccggcccgctgggcctgctcggcctgtacatgcgcatgaagctggaggaaaccccggcgttccgcgccttcgccgaggaagccgagaagcgtgagcacgagcggccggggctgggcgcgctgttccaggtgcatggccgccagctgctggtgtgcatgggcctggtgctggtgttcaacgtgaccgattacatgctgctgacctacatgcccagctacctcagcgtcacgatgggctatgccgagagcaagggcctgctgctgatcatcatcgtgatgctggtgatgatgccgctgaacatcgtcggcggcctgttcagtgaccggctgggccggcgcccgatgatcatcggtgcgtgcatcgcgctgctggtgctggccattccgtgcctgctgctggtcggtagcggcaacgacgggctgatcttcctcggcctgatgctgctggggctggcgctggtgtgcttcaccagctcgatgccgtccacgctgccggcgctgttctacaccccggtgcgctacagcgcgctgtcgatcgccttcaatgtgtcggtgtcgctgttcggtggcaccacgccgctggtgaccgcgtggctggtggagcgtaccgacgacccgctggtgccggcctattacctgatgggcgcggcggtgatcggcctggtgaccatgctgttcgtgaaggaaaccgccggcctgccgctgcgcggttcaccgccagcggttggcagcgacaaggaagcagccgcgctgttgaagagcgatgtgccggtgacggtggacccgaccttgccgccgctgccggacgttgccgagcccgagcaggcgaagccggcgttgtag

SEQ ID NO: 493214 - DNA, 630 bp, Stenotrophomonas maltophilia
atgggacgcatcctggcgttggccggtgtcaatggcgccggcaagagttcgctgctgggcacctggctggacgccgaagggctgagctggttcaacccggactcgttcacccgccgcctggtcgacgccggctggccgctgccggacgccaatgccgaggcctggcaggaaggcacccgccgcctgcgccaggccatggccgatggcaccgacttcgccttcgagaccacgctcggtggcaacaccattccgcgtctgctgcgtgaggcctgcgagcggcaccaggtggcgatctggttctgtgggctggccgatgtcgggctgcacgtcgcccgtgtggccgcgcgggtggccgccggtggccacgatattccggtggagaagatccacgcgcgtttcgattcggcgcgcgcaaatctgctggagctgctgccgcacctggccgagctgcatgtctacgacaacagcgcgccggccgatgctgacggctgcgtggtgccgctgccggtattggccatggctgcaggccagctgcattacccggtcgcagtggccgacctgttgcacacgccgggctgggccaagcccatcgtgatgcgcgcgatggaattggacaccccgggtgattga

SEQ ID NO: 493215 - DNA, 342 bp, Stenotrophomonas maltophilia
atgaccctgccgctggatctgcctggccttgaaaaggccccggcctcgtcggtgaagacccggggctggccgagcctgatgcgcaccgtgcgcgaaaagcaggcgctggtcatcaccaaccacaaccacccggaagcggtgatcgtggacatccgcacctaccaggaactgctggccaaggccgccggcggtgatgccggtgagcgcagcgaggagctgcagcgcctgcgcagcgagttcgaccagaccctggccgggctgcagcgcggggaagggctgggcaaggtgctgggccagccgatccggcgcggccgcaaggtcacccttggccgtccgctctga

SEQ ID NO: 493216 - DNA, 1539 bp, Stenotrophomonas maltophilia
atgccgccgccgctgcaggcgcatgcgcgccatgacggcatggccgcccgtattgcccgccacgactggtcaggcacgccactgggtgcgatcgagcgatggccgccgcacctgcgcgccactgtcgacctgatgctggcccacggcttcccgatgatcgtgctgtggggcgagcagctggtgcagctctacaacgatggctatgccgagatcctcgccgacaagcatccgggcgggcttggccagcccacccgcgagtgctggcctgaggtctggcacatcaacggcccgatctaccagcgggtgtggcagggcgagaccatcacctacgaggacaagctctatccgctggcgcggcgggggcggctggaggatgtctggttcaccatcacctacagccccatccgcggtgaggaagggcgcatcaacggtgtgcttgtcaccatgttcgaaacgaccgccgcgcatgtcgcgcaggcggcccgcgagcgcgaggagcagaagcgccgtgagagcgaccggcgcctggcgctggcattcaaggtgctgccggtgggcgtctgcattgtcgatgccgaaggccgactgcaactgtccaacgaccggatgcggacctatctgcccaccggcaaggtgccgtccactgatcgtcccaaccactaccgctggcagggatggcaccccgacggctcgcgcatcgagccccatgatttcgccatcgcccgcgccctgcggggggagacggtggtccccggcctggagttccagttcatccatgacgacgggcgcgcccgctggacacgcgtcgccgctgcgccgctgcgcgatgcagacggcgaggtgaccggggtgttcgccattgcggtggatatcgacgacctcaagcgcgccaccgagcgccaggcggtgctgctggccgaactgcagcaccgggtccgcaacatcatgtccaccatccatgcccttgcctggcggacgcgcagcaccgtggccagcgtggacgagtacgccgagcggctgtgcgggcgtttgatgtcgctggcgcgcacgcagagcctgctgacccgcggcggcaatgccggggtctgcctgcgcgggatgatcgaagaggaagtgtcggcgcagatgccgggcacgggcctgtgcgaactgcacggtgaggacgtgctgctgccaccgaaagcggccgaggtgctgtcgttggccatccatgagctggcgagcaatgcgctgcgctacggcgcggccgcgcgcgaggcggggcggatcgaggtgtcctggcatctgcaggtgcaggacgccgaaccgtggctgggcctgcactggtgcgagcgccatgccgacgtggagggctgggaaatgccacgccagcgtggcctgggccgggcgctgatcgagcagcgcgtgccctacgagctggctggcagcggcgagctgcactttggcccacaggggctggatgcgtggatccgcttcccgctgcgcgaacgcgacagcctgctgcagaccgacgctccggacaccgcgcccctgcggtaa

SEQ ID NO: 493217 - DNA, 393 bp, Stenotrophomonas maltophilia
gtgctggaagcgggcaacaagccagagggcctgaaagggctgcgggtgctggtggcggaagatgaattcgccatcgcgatgttcctggtggactatctggaactgaagggggcgcaggtggtgggaccggccggtgacctgcaggcgctggggcgtctggtcgatgagaaccccatcgatgtcgccctgctggacatcaacctggggggtgaactggtctaccgcttggcggacgccggcacgccgttcatgttgacctccggctacgatgacaatctgcccagccgcttcgctggcgcgccccgctgtaccaagccctatcacatcgaggcactggtgcagcagctggcacggctggtggcaggcccgcaggctgctgcgggcatcgcctga

SEQ ID NO: 493218 - DNA, 1455 bp, Stenotrophomonas maltophilia
atgcgccattccaccttccttgtcgtactgctgttggctgccgctgatgtgcgcgcccagcaggacgatctgcgccgcgtgcttgaacagggcagcgaactgcgccaccagcagcaggaccggcagcgcctgcaacaggccgagtcggagcggccgaccatcaccatcgatggcaggacgctgcgcgtggagcgcaccgtcgacgatctcggccaggccctctacctgtcactgcagcatcagcaatggcgggccgccgcggcgttcctcgaggagtacatcgaactgcaggggcatgacccgctgctgcgccattacgcgcagggggtgttggcccgcgtggccggcgaccatcgtcgcgcggcgaaggagtacgaagcgctgctggcggcgcagccggatttcctgccggcccgactcgagctggcacgtgtctatgcggaagaccagcgtgatcgcgatgcggtcgcgctgttcacggccatcgctgcaggcatcaatgctgatgatccggccacggccggcgtccgcgcgcgcgtggacggttacctgggtgccctgcaggcgcgccagcgctggaaaggcgcgctgtccgccggccccgcatggagtgacaacatcaaccgcagctcggccagccgcacctgcctgttcggcgtaggcgacgcctgcatcatcgaacggaaactgcccgacgcccagcgcgcagggggcctcgactacgacgccagcctggaacggcgctgggtcctcgacgggcatcatgggctgtacgtgcgcggtctcgccttcggtcaggcatggcgcgggcaccgtgcctacaacgagctcaatgccaatgtgcaggcaggttacagctggcgcagtgcgcggcagaccgtgctgcttgcccccagctatgacgtccagggcctgggcaaccatgcgctgcagggcggcagtggcgtgcacggcgaatggcagtacgccccggatgcacgcagcctgctcaagctggaggccgactggaagcgccagcggtatcgccaacagggcctggccagcaactatgacggcgaactggcatcggtgtatgccacctggttccgtgcgctcaatccgcgctggacggtcttcgccgggctggatgtcaccggcagcagcgctgccgacccggccaacggctaccgccagcgcggcttgcggctgggcgcggcgcggcagtggagcggcaccacggccacggtgttcgtgtcgctgcgccgccgcgactacgacgcctggagtccattgctggaggcgcgcaggcaggacgacgaacagaacctgatcgccatcgtgcgcagcgagcggctggcgctggccgggctggtgcccagcctgggcctgcgctacgcccgcatcgacagcaacgtcggctggctgtacagccacgaccgcagcctgctcagcctgaaatgggagcgtgcgttctga

SEQ ID NO: 493219 - DNA, 765 bp, Stenotrophomonas maltophilia
atgaagatgatctcccgttccgtactggccatggccgccaccttcgccctggccggtgccgcccaggccgccgacatcgtcggtgcggccagcccggccaccgattcgcagctgtacgtcaaggtcggtgcctccgaagtcaacggcggcccgcacagcgcaggcaaggccggcatcggcgtcggcgccgtctccaacggcaagccggtcgacttccaggggctggcggcctactcggccccgaccaccgtcaacggcgttaccgtgcgtaccctggccatgccgatcaccggtacgccgggcagccattccggcatgggccacttcaacttcgtcaaggtgggcagtggcgatgtgtggttcggtgaatggtccaaggacggcgccgcaggtggcttcaacaaccgccaggtgtacttcgctggtgaccgcgccggcaccaccctgcccagcggtaccgccacctacgcggtggccggcctgaaccggttcaatggcagcaacctgctcagcggcacgttcgcggcgaacttcggcactggcaagctgaccggcggcctgaccggtggtggccagaccctggcgatcagcgccaacatcaacagcgccgatgcatccttcgccggcaccgccgtggccaacggctcggtcaccggcaacagccagggccagttcttcggcgccaacgcggccacgctcgccggtatcgccacgttcgccggcaacagccagtacgacaccgccttcggcggcagcaagaactga

SEQ ID NO: 493220 - DNA, 3117 bp, Stenotrophomonas maltophilia
atgccgtccacggcatccgcctgtcatcgtcgcgccaccgctctggccctggctgtttccaccgcattgctgcagttggcctgggtgccggccgggcaggcgcaaccggcggtcgtcgcgccgctgcgccagtacgccattccggaacagcccctggccgccgccgtgcgtgcctttggccgccaggccgatgtgcaggtggtgttccgcagtgacctggtggaaggccgtcgctccagcgcggtgagcggcgagtacagccagatgcaggccctgcagctgctgctgcgtggcagcggcgtgcgcgcgcagcgtggcatggacggcacctggagcctgcgtgccgcagcggaggcgggtgaaggggaaggggtgcgggtgaccgagacactggacgtggccggtcgcctgcagtcggaagggggcgaggcccgcgatcggcgcggctacgatgatgtgttcgcgctggacatggccacggcgtattcggggcgcgaccgggtggagcgctaccgcggctccaatccggccgacgtggtcaaggatctggtcggtgtgttcagcggcgatgcgcgcaacagtggcgcgctggacatcaacatccgcggcatccaggggccggggcgggtgccggtcagcatcgacggcggcgagcaggcacttacggtctggcgcggctacaacggcgtcagcaaccgcaactacatcgatcccaacctgataggtggcatccaggtcatcaaggggccggggctggtgcgcgatgtgcacagcgggatcggtggcgcgctggtgatcaagaccatcgacgtcgatgacatcgtggaagcgggtgagcgcttcggcggggagctgaagatcgaaggcagcagcaatgcggtggcgccacgcctgccgcggctgcataccggcgaggactaccgcacggtgcccgggttcccgcagggctcgccctcggcaccgtatgccgacagcacgctgctggtgccggtgaagtcgcgcggttcggaagccaatgtgttcgccggcgaggaccaggcctggcggctggcgctgggcctgcgcggcgaacacgtggacctgatggccgcgtatgcctggcgcaagcgcggcaactacttctccggcacccagggcacggcgtactacgaccaggacccgcgcgagcagttcgagtacaagggcctggactacatcaccacgctggcgcgctacttcaagcccggcgacgaggtgcccaacacctccagcgagcaggaatcgtggctgctgaaggcgacctggcagatcaacgatgaccagcagctgcgcgccacctggcggcgtacgctctcccactacggcgagatcatgccctcgcgcatcctgtccgcgcccgactacggtcgcatccagtggccgctcagccgcgtcgatgccgatgcctggaacctggaataccactggcagcctgccggcagccgctggctggacctgcgtgccaacctgtggcgcaccgaaaccaccagcgatacctacaccgccggcggcttccccaattttgccagcaaccccgactggaaccccggcagcagcccgatcctgcgcaataccgcgctggccaatgcccgcaacgaccgcaccggcctgaccctgagcaaccgcttcgcgctgcattccaccctggacctgaccgtgggcggcaactggcagttcgagaaactgcgctcggcggacccgtactttggcgtcagcgatggctggcgcatgtacccgcgcgccgggcgtcgccaggaaggcgagggctacctggtgctggactggcggccggtggatttcctctccctgagcgccggcgtgcgctacgcgcgctattgggccttcgatgatttcctgcaggaacacccggagctgatgaccacctctgtgttccccagggaagcccgctaccgggtcaacgaactgcccgaacgcccggccagcctgcagggcgagatcgacgccatcgaggcgcagcgcgcgttctgggacagcatcggcatgggcttcatcgtcgatgatctgctgaagggcctgctgagcaggtacgagacgccggtggcggtggagcacagcattccgtggctgccggatgcggacggcaactaccgccgtgccagcaacccgtgcctgaatggtcaggtggcggccattcccgggctgttgccggtgcagggcgcgcagatcctgtgcagcatccagagcgggcggtcgcagacggtggccggccgcaacgagcgcaggcgcgaccatgcctggctgccgaccttctcggccaccgcgcatttctcgcccaatgcgcgcgcctatgtgcgttacagcgaggcggtgcgtttccccagcatgttcgagagcaccatcgcgttctccagcagcctgaacccgctgtacccgctcaagcccgaacacgcctacaactacgaagtgggctacgtgcacaacctgtcggcgctgttcggcaacaccgccgatgccgacgtgaagctggcctactacgtgcacaagacccgcaacgtgatcgagcgcgacggcaatttcctgttcgacaacctggacaagcagcgcatccgcggcctggagttgcaggcgcggttcgacaaccggcgcttcttcaccgacctgggcatcacccgtacgctggaaaacaaggtctgcgacgaaagcatggcggtgcagctcgatgcgctggccggcaaggtgcccaactgcgtgcaggacggcttcgtcagtggctacctgctgacccaggccattccccggttgtcggtgaacgtgtcgctgggcacccggctgttcgatgagcgcctggagctgggcagccgcatcgtgcattaccagcgccaccagaacccggacctgcaggcctaccgtgatcgcctgtacgccggcagcggtggcctgatctggcagaatgtgccgttcacctggggaaacatcaccaccgtcgatgcctacgcgcgctggcgcttcaatgaccacgccagcgtcgagctggtcggcaccaacctaggcaaccgctactacgtcgacccggccacgcgctccacgctgccggcgccggggcgcacgctgaagctcggtgtcactgcgcgcttctga

SEQ ID NO: 493221 - DNA, 957 bp, Stenotrophomonas maltophilia
atgaccacgtccgaaccctcgccgcgtcaggccaggcaggcgttgcgctgggtgatacggtgcagtgcaggcccgttgccgggacgccagcaacgcaccctgcagcgctggctgcagtccgatccgcgccatgcgctggcctggcgccagcagcaggccttctggcagcggttggacgctgccgggcccgaggtgctggccgcgctgcccgagctgaccgccgaccgtcaggggctgcgtccgatcgcaccgcgccgtcgcctgccgtggctgctggcttcggccgcggccgtggtgctgatggtcgcggccgctccgcatgcgttgctgctggcgcgcagtgatgtgcgcagcagcgatgcgccacgagtggtgcagctggccgatggcagcacggcggtactcgatgccggcaccgcgctggcatttgcgttcgatggccagcagcggcgcgtacgcctgctgcgcgggcaggcctggttccaggtggcgcacgaggttcgcccgttccaggtcgaggcagcgggcggcctggtccgtgacatcggtaccgccttcagcgtgtcgatgctggataccacggtcaccacccaggtcagcgcgggtgtggtcgatgtgcgcccgggcgatggcagcgtgcagcgcctgcatgccggacaggcacgcgtgttccgtgacgggcactggctgcagccggtgcagctggaagatccggagagcatggcgccgtggcggcgtggcgaggtagtgatcgatgatcggccggccgcgcaggccatcgccgacctggcgcgctaccgtcgtggcccggtctgggtactgggcgggcagggcgcacgcatacgggtcagtggcctgttccacctgcagcaaccggacacggccatcgtcgccgtggccgcgcaggcgggactgcgcgtgcagcgcttgcccggtggtgcgttgctgctgtggtga

SEQ ID NO: 493222 - DNA, 504 bp, Stenotrophomonas maltophilia
atgtctcccaatgccctggcgctggtcgagctgctgatccgcgagcgccgtgcgttgtcccgcttcgtcgcgcgctacctcgacccggccagcaccgaggacaccctgcagaacctctacctgaaggccagcagcgtgcccggtgatccaccgatcctggagccgcgcggttatctgtaccggatggcctaccaccacgcgctcaaccgcagccaggccgacgcccgcgagcggcgcgcgatggccgagtacgccaccggcatggccgaggcaggccacgacggcgaggcgcgggcgctggaccaggcgcagctgcgcgagatcacccagaccatcctggccctgccggcccaggtacgcgagtgcttcgtgctcaaccgctacctgggcctgagcgaacgcgagattgccgcgcgcctggggatctccaagagcctggtcggcaagcatgtgctgcgcgcagcgctgctgatccagcaacagcagcggggaatgggccgatga

SEQ ID NO: 493223 - DNA, 927 bp, Stenotrophomonas maltophilia
gtgttcatcgcagatatccgccgttgtgacctcaacgacctgttctacttcgccatggtggtcgagcatggcggcttctcgcaggccggccgggcgctggcgatgccgaagtcgaaactgagccggcgcatcgcgctgctggaggaacggttgggcgtgcgcctgatccagcgttcgacccggcgtttctcggtcaccgaggtcggccaggactactaccgccactgcaaggccatgctggtcgaagccgaagcggccgaggaagccattgcgatgtcacgcgccgagccgcgcggcaccatccgcctggcgtgcccgatcgcgatcctgcacgcgcgcattggcacgatgctggccgatttcctggccctgcacccgcaggtgacggtgcagctggacgccaccaaccggcgcgtcgatgtggtgggcgagggtgtggacgtggcgatccgcgtgcggccgccgccgctggaggacagtgacctggtggtacgcgtgctggcgcgccgggtctggtgcaccagtgccagcccggcgctgctgcagcggctgggcacgccgcaggtgccggccgacctggcgatgatgccgaccgtggatctggcatcgcccagccagcagcatgcctgggaatacaccgggccgggcgatgtgctggccagcgtgcaccatcgcccgcggctggtcagcgatgacatgatcgcgttgcgcaccgccgcggtggccggggtgggcctgctgatgctgccgcggatgatgatcagcgacgagctggccagtggcgcgctggtgcctgtactgccggagtgggtgcccaagcacggcatcgtgcacgcggtgttcccgtcgcgacgcggcctgttgcctgcggtgcgtgcgctgatcgactacctcgccgaacgcttcgaggcgctggaggaaccgtag

SEQ ID NO: 493224 - DNA, 867 bp, Stenotrophomonas maltophilia
atgaagcgtgtcaccggtacctacagcgccccgcgcccgcactgggtgggcgacggattccccgcccgctcgatgttttcctacaacacccacggccagcacctcagcccgttcctgctgctggattatgccggcccgtacaccttcgcccccagcaatacgccgcgtggcgtcggccagcatccgcatcgcggattcgagaccgtcaccatcgtctatgagggtgaggtcgcccaccgcgattcgaccggggccggcggcaccatcggcccgggtgacgtgcagtggatgacggctgcctccggcatcctccacgaggaattccacacgccggaattcagcaggcgcggcggcacgctggacatggtccagctgtgggtgaacctgccggcgcgcgacaagatgggcgcaccgggctaccagaccctgctcgacgcagagattccctcggtggatctgcccgatggcgccggccgcgtgcgggtcatcgccggccgcttccacggtcatgccggcccggcgcgcacccacacgccgatggatgtctgggacatccgcctgcagcagggccaccacaccgacctgccggtggccgagggccgcacgctggcgcttgtggtgctgaagggtacggtgcggatcaacggcggccagccggtcggcgaagcgcagctggtcaccttcgaccgcagcggcgaggacgtgttcgtcgacgccgacagcgacgccaccgtactgctgctcagcggtgagccgatcgacgagccggtggtgggctatggcccgttcgtgatgaacagccaggccgagatcgcgcaggcggtcaacgacttcaacagcggccgcttcggccagatcgcgcactga

SEQ ID NO: 493225 - DNA, 681 bp, Stenotrophomonas maltophilia
atgagtacccccgccaacttcaacggtgcccgcccggtgatcgatccggacaacgccgcgatgctgctgatcgaccatcagagcggcctgttccagaccatcggtgacatgccgttcacccgcgtgcgcgcccacgccaccgcgctggccaggatggccacgctggcaaagatgccggtgatcaccactgcctctgttccgcagggcccgaacggcccgctgatcccggagatccacgacgcagccccgcatgcccggtacgtggcgcgcaagggcgagatcaacgcctgggacaacccggaattcgttggcgcggtgaaggccactggccgcaggcagctgatcattgccggcaccatcaccagcgtgtgcatggccttcccgtccattgccgccgttgccgatggctatcaggtgttcgcggtcatcgatgcctcgggcacctattcgaagatggccgaggagatcaccctggcccgggtggtgcaggccggcgtggtgccgatggacaccgccgcggtggcctcggagatccagcgcagctggaaccgcgatgatgcccagcagtgggccgaggtctacacgaagatcttcccgaactaccagctgctgatcgaaagctacctgaaggcgcaggacgtgcagaagaaccacgagccgctggattcgcagcgcagctga

SEQ ID NO: 493226 - DNA, 642 bp, Stenotrophomonas maltophilia
atgtccagtgaaccgatccgcgccccggccagcgatcatctgctgaccccgcagaactccgccttcatcatcatcgactaccagccggtgcaggtgaactccattgcttcgatggaccgccagttgctggtcaacaacatcgtcggcactgccaaagccgcagtggcttatggcctgccgatcgtgcattcgacggtgaacgtcaagaccggcctgaacaagccgccgattccgcagctgcgccaggtgctgggtgactatccgacctacgaccgcaccaccatcaattcctgggaagacgtccagttccgcagggcggtggaagccaccggccgccgcaagctgatcatgaccgcgctgtggaccgaggcctgcctgaccttcccggccttggatgcgttgaaggaaggctatgaggtgtatgtggtggtcgacgccgtcggcggcacctcgctggccgcgcacgatgccgcgctgcgccgcatcgaacaggccggcggccagctgatcagcgtgccgcagctgttctgcgagctgcagcgcgactgggcccgttcggaaacggtgccggccttcatgaacctcttcattgaaaccggcggtacggcgggcatccagttctcgtacgatcgtaccgagtaa

SEQ ID NO: 493227 - DNA, 399 bp, Stenotrophomonas maltophilia
atggcctacgcacgcattgtttcgaccgccgacaattacctgcaccacatcagcaatggcagcttcgatgtggatgcggacgagcccgcctcgttgggcggccagggcaagggcttcgcgccgttcgacctgtacctggcctcgctggcggcgtgcaccgccatcaccctgcgcatgtacgcgcagcgcaagggctgggacctgggcgagttccatgccgagctgcgctcggaacgtgacgaggacggacgcctccacgtgcaccgcgtgctgcatgccagtgccgagctgagcgatgcgcagtggcagcgattgctggaggtggtggaaaagaccccggtgaccctggtgatgcgcgaaggtgcacgcatcaccagtgagcgtggggcggcggcgtaa

SEQ ID NO: 493228 - DNA, 330 bp, Stenotrophomonas maltophilia
atgagccgtcgcaagctgttcgagagtcccgaaccgtccagccagatgctgggtgttggaccggcctatgtttccgtggagggcctgcggcagcacctggccgagttcctgctgtacgcgggccggccggtggtgatcatgcgcgggcgcagcgaagtgggctatttcctgccggcccgctgctggcgccagcgtgacgatgatccgctggcggccgcggccgccgaccagctgctggatgccgccgggttccaggccgaagacatccagcaggtggagcaggaattcaacgcgatgcgccagcgcacggtgctgcattcacggcgctga

SEQ ID NO: 493229 - DNA, 1746 bp, Stenotrophomonas maltophilia
atgaacgaccacgtccgcgcacgaaccgattcccaccgcccgcggccggcccgacgggcgctgctgtgctgcgccgtgctgctcagcctggccgccccggccggtgcgatggccgctgaaaccaccatggtcaagctgatcaagggcctgatcgccagcggcgcactgaaaccagaagacggccaggcattgctggtgcaggccgaggccgaagcggcggccgcccagcgcagcgcagccaccgcgacctcggccgccagtggcggtgtcgccctggaagccggcgacgtgcgcgtgccctacgtgccgcagagcgtgcgcgacggcatccgtgacgaagtacgccaggacgtgatggcgcaggccaggtccgagggctgggcggcaccgaacgaagtggctgagtggaccaagcgcatcaaggtcaccggtgacatgcgcgtgcgcagcgaatcgcgcttcttttccgaacgcaacagcgatatcgtgagcaactggtcgtcgatcaattccggcaacggcttcgacaccaacaccaacaccaacctgcagctgccaccactgctgaacacccgccaggaccgccgcaacctgtggcgcatccgcgcccgcctgggcatcgaggcgaccatcggccagcacaccacggccggtgtgcgcctggccagcggcagcagcaatggcccggtgtcgaccaccgagcagctgggtggcggcctgagcaagaaggatgtatggctggaccaggcatggctggcctacagcccggccgactgggtgacggtgcgtggcggccgcttcggcaatccgttctggaccagcgacacgctgttctccaacgacctcaacttcgacggcctggccgccaacctgcagtacgacttcggcggcggtgacctcggcctgttcggtaatctggcggtggtaccgctggagtacacctccgacagctcgcccagccagagccgggtcaagaccccgaacgagaacaagtggctgtccggtgcgcaggtgggcgtgaactggcgcttcaatgacgacaacgcgctgcgcgcggcactgggctactacgacttcaagaacatcagcggccacctgtcctcgccgtgcgcgctgtatgcgggcgcggtgggctgcgacaccgactggtcgcgtccggcgttcatgcagaagggcaacaccctgatgctgatccgcgacatcgcgcgcaatccgctggatccggccaatacgcccaccccgcagtatgtcggcctggcctcggcattccgcctggccacgctgaacctgcgctgggatacgcagctggcccaggacgtcggcctgcgccttgaaggcgactacatccgcaacctggcctacgacaagcaggcgatgttcagtcgcgccaacaacggcatcgtcaacaactacggtgccggtggtgccgccagcatcgacaccttccgcagcggcgacaccgcatggatgctgcaggccaccttcggtgccaccgagctcaaggagaagggccagtggcaggcgctgctgggctacaagcacatcgaggccgatgcgctgccggatgcctacaacgatccgaacttccacctcggtggcaccaacgcccgcggctactacgtgggcggtgcctatgcgctggacgcgcgcagctggatcagcggcaagtggatggcggccaaggaagtgtccggtgcgccgctgtcgatcgacgtgttccagctggagttcaacaccggcttctga

SEQ ID NO: 493230 - DNA, 618 bp, Stenotrophomonas maltophilia
atgcgcggtcgccagctgctggtgactgtcgcgctggtgctggccgcgttgctggtgctcggcatcgccgtgtggtggatgctgttcaaggacaccgccagcacccgtcggccggtggtgcagccgccgatgcccccggaaccggaaacgccgccggaagaagcgatgcctgagccggagccgctggatcaaccgacgccggccgaagagccgacgccgacccccgacaacgctgacccggtgacgatgaacgccgatgcgcaggccggcggtgacaacttcggcatccagtccggcaatggtggcggttcgtccggcgtcggtcgcggcggtgccggcaatgccacctatgggcgctacctcggctacctgatgcagcaggcaatctcgcgcgacgacaaggtcaagcgcctggcgttccagctgcaggtgaatgtgtggctggccagcgatggccgcctggaaaaggtcgagctggtgcgtggcagtggcaacgaggaggccgacgcggccgtgctcgatgcactgcgtcgcatcggcaaggtcgaccaggcacccccaccgtcgcttgatttccccgcccgcgtcctgatccagggccgccggcccggggcctga

SEQ ID NO: 493231 - DNA, 414 bp, Stenotrophomonas maltophilia
atgggccagaaggcgaagttcggcatcaagaagcgcgagaagggcatcaacgtgacgcccttcgtcgatgtgctgctggtggtgctggtgatcttcatcctgaccagcaacgcttccatccccggcatcgaggtcaacctgccgaaggccagcaacagcgtcgcgctggagaagcccaagaccaaggcgatcaccatcgaccccggtggccaggtgtttctggatgcctacccggtgacgatggcggagctggaagaccgcctgcgcaccgagcgcgcgaccacgccggatttcccggtgatcgtgcgcggtgacgcgcaggtgcagtacgcccgcgtggtcgaggtgctggacctgctgcggcgcctggagctcgcccaggtcggtctggtcaccggcaaggcgcagggctga

SEQ ID NO: 493232 - DNA, 1785 bp, Stenotrophomonas maltophilia
atggaccgtttgctttcccgagtgttgctgctgctggccgcgctggttgcgttgcctgcggctgcggccgatgccaattggtggcaggccgaatggaaataccgcaagccgatcaccgtcgacgccggcccgcagggcgcgggcctggccggtgacccgggccgcacgccactgctgctgcggctgcataccggcaacttcggcttcgacggcacccaggatgcgggcaacgaccttcgcttcgtctcgggtgatggccgtacggtgctggcccaccagattgagcagttcgatcccacgctgggcctggccctggtctgggtggacctgccggcggtcagtgccgccgcgccgcagaccatctggatgtactacggcaatgaaaaagccccggccagcggcaacggccagcaggtgttcgatccggactacacgctggtctatcactttgccgaggccaatgcgccggcacgcgacaccaccgcctatggcaacaatgccggtgcggtggtgccgccgtcggaaggcgcggtgatcggccgcggcgtgcagctgggcgccggcccgctgccgctgccggccagcgcgtcgctggcgcaggaagcgggcgcgccgctcaccgtttcggcctggatcaagccgggtagcaacaatgcggctcaagccatctacgcccgccgtgatggtgcttccgaactggtgctgggcatcgagaaccgcgtgccgttcgtgcagctcaatggccagcgcagcacgccggcgcaaccgattccggaagggcagtgggcgcatgttgcactgacggcagagaagggcgcgttgcagctgtacctcaatgggcgcgtagctgcccagctgagcggtgcgctgccggcgctggccaccgcgccggtggtcggcgccgatgcgccgggcgccgcgcagccgctggccaacttcgaaggtgccctggacgagttgcgcatttcgcgggtggcacgcccggccgcgctgctgctggccgacgccaccgctcagggcgccgactcgcgcctggtcagctacggcgccgacgagcagtccgccgggcagagccacttcgccttcatcctcaaggcgatgccgttcgatgcctgggtggtggtcgccatcctcggcctgatgatgctgctgtcgtgggcgatcatgatcgccaagagccgccacttcggccgtaccagcaaggccaatgccgtgttcaccgagagcttcggcaagctgtccggcgtaccgctgcgcaccctgtccgacatggaccgccagggcaaggcgccgaccgccatgcacgatggctcgttgtggcgcatctaccaggtggccatcgatgaaatgcagcaacgccaccagcgcgatggcaacagcggttacctcagtggtgccaccatcgcggcgatccgcgcctcgatggatgcagtgatggtgcgcgagcaggaagcgatggcgcggcgcatgaactggttgtcgaccaccatcgaaggcgcgccctacgtgggcctgttcggcaccgtgatcggcatcatgctggtgttcgtggttgcggcaatggccggcgcggtggacatcaactcggtggcaccgggcatggccgcggcgctgctgtgtaccgccgccggcctcggcgtcgcgatcccggcgctgttcggctacaactacctgggcgcgcgtgccgaagcgatcggtgcggacatggcggtgttcatcgacgaattcgccgcgcgcctggccgaagagcaggacgggcgcggcccggccgcggtccagggctga

SEQ ID NO: 493233 - DNA, 1617 bp, Stenotrophomonas maltophilia
atgactcctgttccgtgccgagccgtccgctttccgttgcgcctgcatccgctggtgctggcgctggccgcgatgccgctgccattgttcgcgcaggaggcggcgcctgcgcccagcgtgaacatcaatgaatacatcgtgcgcggcaacaccgtgctcgatccgcgtcagatcgaacgggtggtagagccgttcctcggcccgggcaggaccctggccgatgtcgagaaggcgcgcgatgcggtccacgcgctgtaccagcaggcgggctaccagtcggtctacgtcgaactccccgagcagcaggtcagtggcggcgtggtgctgctgaaggtgcagcagacgccgatcggccagctgcgcgtggtcggcacccgctacgaatcgcccgaccgcatacgcgatcgcgtaccggcactggccgagggcaaggtgccggacttcgaccaggcccagaaggaactgaccgcactgaacgaaggcgggcgtcgccaggtgatgccgctggtgcgcgaaggccaggtgccgggcacgatggatgtggacctgcaggtcgaggagaagtcgccgtggcgtgccagcgcgtcactcaacaacgaccacagtgccgacaccgagaagctgcgcctgagtgcgtcgctggcctacgacaacctgtggaagcgcgggcacagcgccaacatcggcgtgtacctggcgccggaagatacaaagcaggccaaggtgttctcggcctcgtacacgatgccgttcgaaggcacgccgtggagcctggaagcctccggctacagatccgacagccgcgtgttgaatgcaggcgggcaggtcggtaccggcaccggcaccaacgtgatcggcaacggccattcgatcggcctcaagctcaactaccgccttgccggcagcagccagtggtggcgccagctcagcctcggtgtggatttcaaggacaccgaggaagacacgcagatgggcaaggacagcctgaagacaccgttgaagtatgcgccgatcaccctggccttcgtcggcgtgcgccagggcgagcaggatcagctgagcatcaacacccagctggtggccggtacccgccgcctgttcggttacggcagcgacgccaccgcgttcgggcagaagcgctactgggctgacccgagcttcgtggccttcaaggccgacgtggccaacacccacaccttcagcaatgactggcagtggtatgcgcgtggctcgctgcaggtaaccgatgcgccactggtgtcggccgagcagttcgctgctggcggcatgtacaccgtgcgtggctacctgtcggccgaggcgatcggcgactacggcggcctggccagcctggaatggcgcaccccggcgtggtcgctgtggagcggcaccgatctgcgtgtctacagcttcgccgacgcggcctacctgcgcctgcgccggccgctgcccgagcagcgtgacaagtacaacctggcctcggtcggcctgggcgcgcagctgcgcctgggtgaacacctgcaactgcgcctggactacgcctggccttatgccgatggcccggtcacgcgcaaggacgacccgcgcctgcatttcaacatcagcaccagctactga

SEQ ID NO: 493234 - DNA, 336 bp, Stenotrophomonas maltophilia
atgagtgagccattgaaggcgggccttcgccctgccctcgcccttgccttgttgctggcgttgccatcggcctgggccggagaggcgaagaagcaggacggtgctgcgccgtgcatcgaagtacaggtcaacggcgagcgcatccccgcgtgggaatgcctgcaacgcaggctggcgccggcgccgaaatcggcgaagtcagcggcgctgccggatgccgaacgcctgatgcggcagcccggcaaccagctgatgcagtacaacctggaaggcacgcggcaacgcatgggcgatgccttcgggcggtccgtggtaccgcagcgtccggcgcgatga

SEQ ID NO: 493235 - DNA, 534 bp, Stenotrophomonas maltophilia
atgatgaaacaaaagcgtcagcggcggctgctagcgtgggcggacacgaacgtggcgatggtgcggaacatggatggcaggcgctgggatcgcaatcggatgttgaccctgctggcggccaccctgctgctggcggtggtggcctattggagcgtcaccctgtctgcggtggcgcctgcggcggcggccagcgaagcgcatgccgatgcgccggcccggccgctgttcgatgcggtggccagtctgccgctggtgcggctgctgtcgcccggtgcggtgcagaccgaggtggtcgtgctgggtgtgatggcgggtgaccacgcgcccctggccctgttgtcggtggatggacgcccgccggaggcttacgcgcccggccagcggctggggccctgtacggtgctggccagcatcagcgccaacgcggtggaactgaaccaggctgggcaatcgcgcagcctgccggtgcccgcgctgccaccggtgccgaacgatggcatcgtgccggccgctccgcacggcggcgctcggtag

SEQ ID NO: 493236 - DNA, 447 bp, Stenotrophomonas maltophilia
atgcagcacgtgccgcgtggtttcaccctgctggaactgatggtggtgctggtgatcatcggtatctgcacggcgggcatcggcctgggcctgggcagcctgctcgaccccgcgcgccagctgcggcaggaggccgaacgactggcgcagcgcctgcaggtggcgcgcgacgaggcccgcatcgatggccgccccctgcgctggcaggccgacgccgccggctaccggttcagcaggcgcgaaggcacccgctgggtggacgtgcaacgcgacgacctgctgcgcccacagtcatggcaaccggccggcatcgtggtgcagccggccaccccggttgaactgagcccggagtggatcggcgtggcatgggaactgacgttgtcgttgcagggccgccagctgcgtcttcgtgacgatggcagcggacagttgcaggtcgtgcagtga

SEQ ID NO: 493237 - DNA, 351 bp, Stenotrophomonas maltophilia
atgcgcggattcaccttgatcgaagtgctgatcgcactggcgatcgtttcgattgcgctggctgcggtcatgcgctcggtcgcggtggccatcgacgatcagtcacgcctgcgcgaccgtcgcctggcgctgctgtgcgcgcaggaccgctggcaggagctgcgcctggccgggcagccgccgcaggatgcacggctgcgctgcgtgcaggggcgaagcagtttcctggtgctgcagcatatcggcacggggggtgacggacagccgcaactggaactcagcgtggctgccgaagatgcaccgcggcagtcgctggcgcggatgcagctgccgtggaccgcggcgcaatga

SEQ ID NO: 493238 - DNA, 615 bp, Stenotrophomonas maltophilia
atgaagcgtaccgcagcaggcttcacccttatcgaggtggtgatcgcgatcaccatcatgggcgtgctggcgctgatctgctggcgagcgctcgacagcgtggccagcagcgaccagcgcctgcgccgggccgatgccgagaccacgacggcactacgcgtgctgcagcagttccagcgcgatatcgagatgcgtgccgacgatgcgctgatgaacggcgcggtgcgcccggcggatcgtccgcagcgactgctgccgccttcgctggtgagcgaacggtacccggatggcagctttgcgctggaaatcacccgcagcgtcgacagtgatgggctgcgctggcagcgggtgcgctggtggcggcaaggcaacacgctatggcgcgccagcggtacggcgaaggaccgctatcccctgcccgcgccggttccttcagaaggcattgcagtggcaaaggatgtgcagcggttcgaggtgcgcgcctggcagcccggggccggctgggcaatgctgccgagcgagggcgaggtgctgccggccaccgggctggaactgcggctgggcctgcgtgacgggcgtggaccgctgagctaccggcgcgtgctggagctttag

SEQ ID NO: 493239 - DNA, 12384 bp, Stenotrophomonas maltophilia
atgtcgcacccgctcccgtccgctgttcatccggccgcgtcgatgcgccgcaatcatccgatggcgtgggccatcgcggtcgcactggggagcatggtggccccggccagccaggcgcagcaggcgttcagtccgggctggttcgccgaacggggcgcggcccagggcagcgcggcacagagtggccggatgcccaacggcgtgccgatccagttccagttgccggcccagcagcaggatgcggcacggcagaagctgcagcagtcgatcgacaatcttggcactgcggcgcaggcgattgccctgcagcagcgcctgcaggaacaagcccggcaggcgcgccgcgaggctggcttcatcgttgccgatggcctcggcaaggacggcctgagcgtcgaccagaacccgctgacccgtggctggctcaatgcgcgcgacgcgatccagtcgcagggcagcgacgggagggtgcaggtcacggtcgagcagaccgcggacaaggcgatcctgaactgggagaccttcaacatcggcggcaacaccacgctgaatttcctgcagaaccctgactgggccgtactgaaccgcgtcaacgatccgcaggcgcggcccagccagatcctgggccagctgaaggcaagtggcacggtgttcgtggccaaccgcaacggcgtggtgttcggcaacaacagccaggtcaatgtacgcaatctgctggcggctgcagcacggatcagcgatgcgcagttccgcgacaacggcctgtacagccccgacgccagcagcagcgcgctcagcgatgcattcggcaaggtgatggtgcagcggggcgcccgcatcgcgacccatgagccgaccagtgcgacgcgcggcggtggctacgtgctgctggccgggcacagcgtggacaatgctggccagatcgaagcgcgcaagggccaagtgcagctcgcagccggtgacagtttcgtgatccggcgcggcgtgggtacggccgccaacaccagttccaccacccgcggcaatgaaatcgcgccgcgctttatcgctggcagcacggctggcagcgtgcgcaataccggcctgctgcgcgcactcgagggggacgtgaccctggccggacgcagcgtcgagcaggccggtgtggccgtggccagcaccacgcttgcacagcgcggcaccgtgcatcttctggcctcggccagtgatgcaggcagcagcgtcacgcttgctgacggagccaccacggcggtgctgatcgaggacgatggcaagaccacggtgctggatacgcagcgcgacgccctaatcaaggaatcggccgagcaggacgcgatccgcgctggcgcgcgttcggcaaccttcgacaatctgtcccagcacaatgatcgccgggaccagtcgcgggtggagatcgtctcggggggcaacatccatttcagcgcggattcgctgacggttgccacgggcggccagatcatcgccgatgcggcggcccgtagctacgtggacgatgccgcgcgcgtggacgtgtccggcgcagtgggcgtgcgggtgtcgatggagagcaacaatgtccaggtcaaggtgcagggcaacgaactgcgcgatgccctggacaaccgcgacagcggcaagctgaccagcagcgaagtctgggtcgaccgccgcaggctggtccacgttccggccggtaccgggggctacgagggtgagcgctggtacgccgcaggcggcctgctggaagtggggggctacctcgacaaccaggggcactcgatcggcgaatgggctgcgcagggaggcaccgtcctgctgggcggcagggaagtgatcacgcaaggtggctcacgcatcaaccttgccggcggcagcctggatgtgcagagcggcgtggtccggcagagctgggtgcgcggcgttgatggccaggtctaccgtcttgatgaggcgccagcggagatgctgttcgatggcctgtacagcggccatgaagtgaagcaggaacgctggggcatcaccgagaccttccgtgatccgatcgtattcgcggcgcagcgggtcgataacgggtacacggtcggccgcgatgcaggacggctgatcgtctccgcaccgaccgcggtgctggatggaaaggttgagactgcaaccttccagggcgcgcagcagaaccgcaggccggatgccgcgctggatggctatgcacaggcgcagacggcggtcgcgcgcaatgcgcagttgtacctggggcgctacgacggccagggccgcagtggtgtgttcggctcggatgtgcgcctgggtgacaaggctccgacgaagacggcgtggtcgctggcggctccggtcaacgaggagcggcgtgacacggtgtggctggatatcgcagagctgagtgcccagcagtgggggcggatcgacctggcgaccgccgatcgcatccgcatcgacagcagccttcggcttcaggccggcgggcagctcaacctgaccggcagcgaggtggagctggcaggcgacatcggcattgccggcggccagttgtcggcgggcaacctgctggatgtccagggccggccgacggcgctgctgcacgatggccgcgcccgcaccgtcattgccgacggaacgcggatcgacctctccggcgaatggagcaacgcctcactggcgatgccgcgcgacgcgagcggtgcctggacggatggcggccgcctgagcctgggcaacagtcatgacgtggccgtgggcgccagggcaacggttgacgtcgaggccggtgctgcgctggacctgcgcggcaaggcccatatcggcaaaggcggcagcgtcaccctgcaggcgaacagcagtacggtgacgaccgacggcagtggccgggtgcaactgggtgagggaagccggttcagtggtcgaggacagggcggtggttctttctcgctgggtaccggtggccaggtgcgggtgggcgatgcggacctggcgggcgcgtcgctgcgactggaccccggcctgttcggcagtggcttcgcgcagtacgacatcaatggccaccacggcgtggaggtggccgatggcgcgcggctggtcgctgccctgccaggcctgcgcctgacccaggacgcgccgatggcgaccgaccgggcgtccgcactggcggcgtgggacgaaccgctgtacagcgccgatccgtcgagcgggcgcgtcagccagcgcgcgggtgcgagcatcagcctgcgttcggagcgcaacagcgtgggcggtgacctgcgggtcggcaaggatgcactggtggcggtcgatccaggccagacgatctcgctgcttggtgcgggcaacatcgatgttgaaggcacgctgcgcgcgaagggcggacgcatcctgatcgacgatgtgcgcccggagaacgcgctgtacgccgggcagcgcaccgaacgcacctggcgtttcgccgaaggcgcgctgctggatgccgatgcagacgcgatttcgctgcccgattccagcggccgtctgcgcgggcaggtgcgcgcgggtggacgcatcgagatcggcggggcgctggactgggagaccacagcattcgtcgacaaccgaccaccggaagccttcgtggtggtcgaacgcggtgcgcgcctgcaggcgcggggtgcgtcggccgagctggacgtcgacggccagggccgcgtgcgcgtggacagcgatggcgggcagatcgtgctgcgctcggccaatgcgctgtacctggacggcgggatggatgcggccgccggcggtgccggcgcacgcggcggcaccctggggctggcctttggcggcagcatccatgcacgtggcgccagcgaggaggtactgcggtcacgtgcgatcaccctcagccagcacagcgcgccggggcagccactgccgaccacattggagtatggccacgccgcgttgtcggtcgagcagctgcaggctggcggtttcgacaatctgtccgtgttcggtgacatccgcgcggtcggcgacgtcgacctgcgcctggcccagagcctgcgcatccacggccagggtacttcgagcctgggcatggccgtggatgccgggccatcgtcggggctgcgactgagtgcgccctacgttcgcctggcgcaggcacgctggcgccagatgccgggcgagaacctgcagggcaccgccgcggtcgcttcgtccgggccggaagatcacgcgctggcggtgcaggccgggctgatcgacatccgcgacgtcacctggctgccgggtttcaagcatgtggcgctggaaagccgcagtgacgtgcgcctgaccaacggcattgccagcagtggcaacaccagcgcgttgatgacggctggttcgatggacgtgaccgctgcgcgcctgtatcccaccacaggcgcggtcggcacgctggtggccggcgcgtcggcgcagaccgtgcagaccgctgattactggtccgatccggatgccgtgctgcgcatccacggcaccggtgcggccacgaagccggcgccggaatcggcgctgggtacgcttcgcctggtggccgccacggtgcagcagggcggcaacgtacaggcgccgatgggcacgctgcagctgggtggcctgatccagaacggaaccgtcggcagccgggtggaactgctgccaggcagcgtaacctcgaccagtggcgccggcttgtcgctgccctatggtggcaccgtcgatggtgttgactggcgggtcggtacgcgcagcctgggttcgctgacgccggccggtatctcctcgatgggggtgacactgaaggccaacgagatcgaggtggcgccgggggccctgctggacatgtccggcggtggtgagctgaccggcgccgccttcgtgtcaggacgcggtggctctgtcgacgtccggcgaacggcgttggccgacgccaacccgcgctacgggttcagtgcgtcgggcaacccggtgtacgcgatcgtaccgggacgcgccggggcgttcgcccccagtggcgaagaagggttcgcagctccggcggtgggccagcagatcacggtgccggctggcgtgcccggcctggcggccggcacctacacgctgatgccggcaagctatgcgctgcagcccggcgcattccgggtggagctgggcgccaccggcacctccggcatcgtgcaaccgattgcgaccggcaccggcacctggcgtgtgtccgggcagcagcgcacggcgctgggcgcggcaatctcgccgttgctcaccgacatcctgctgactcccgcggccgtggtacgccggcactcgggctacaacgaaacctcctacaacagcttcgcgcaatcggtagctgaccgccgcggcgagtcgcgtggctggcagaccatcgatgcgctcgggttgacccttgcgctgggcgaaggtgcaggtcgtgcagacacgcctgccatccacttcgccggcaccgcgcggttcgcggctgccaccgacaaggggcgtggtggcacgctggcagccacgttggcgagcccggcggtcggttcgctggagatcgtcgatggcaccacgcaatcgcaggcgcgtgatcgcggcgccaccttcagcgacgacgcgctcaatgccttcctgccggcgcggatgatgatcggcgggcagttcaaccaggaggcctcgcaggttgcggtgaccggccaggcgcgcagcgtggcgatccgttccggcgtcaccttgaacgcaccggaagtgctggtggcagcggcctccggtggcagcggcgtgctggtcgaggccggtgcgaccctcgatacactgccgttcgcatccgccaacgcgaatgccagcgcgaccctgccttaccaggtctccggcggcctgctggcggtgtccaaccagcgcctgaacctgatcaccggcaccaccggggtggaggccggtccggtggcgatcgacatcggcggatgccaggcggcgtgcgacggccagacgcggctggtttccgatggcagcatcgcggtagcgaccgatggcgcgctgcagatgcgcgactcggccagctatggcacccgccagctcggcctgagcatggcggcgctgaacctcggcagtgccgaagcgatcgcccaggccgctgcggccggggcgctgcccagtggcatgaccatgaaccagtccgtgctgcaacaactgctgcgcggcaatgatgcgaccggcgcgccggcgctggacacgctgagcctggtcgcgcgggagtctgtcaacgtgttcggcagcgtcgacctggatgcgcgcgacagtgccaccggccgcagtggcctgcagacgcttgtgctcggtgcgcaggccatccgcgggtacggtgcggcgaccgaccgcgcgcgcatcctggtggacacgctggtctgggacggctcattggcggcgggccaggcgccgggcagcgacgcgacggtgccgccggccgagccgatggtggaccggctcggggccgggcaactggacatcgtcacccggcagctgcagctggggcgggcgccattcagccgtcccagctctgaagtacctgcgaaccggcaggtgctcggcttcagtgcgctgaacctgagtgcctcggagcagctgtcgttctccgcgcagggcacgctggacgtattccagcagcgtggcgactatctggccgacaaggggtggcagtacagcggaggcaacctcggtatcgatacaccgctgttggccgccgatcccgccgcgcggctgcgcgtgcgcaccggcggcgacttccgcctgcaggggggcgccggcaagacgggtggcgatgcactgggcagtgagttgagcatcgacgccaaccggatcgcgctggacagcacgatcgcgctggcgtccggacggctgtcggcgaacgcgcgccagggcatcacgcttggcagccgggccgcgctggacctggccgggcgcaaggtctcgctgtacgacgtggacaagttcagctggggcggcgatgtcctgctgtccagcgacacgggtgacatccgcgccgatgcggcctcccgcatcgatgtttccgcacgcaacaaccgcggcggacgcctgacggtcaccgcaatggccggccgagccgatctggccggtgttctgcagggtgccgccactggtcgctacgatgccggtggcacgctggtgccctacgacggtggcgaactggtggtgcgggcacgccagctgcaggacttcgccggcctcaaccagcgattgaccgccggcggcgtcgtcggcggtcgcagcttccagatcggtgagggcgatctgcggatcggcgacgaagtgaaggcgcgccgggtcgatatcagcgtcgacgcgggcagcctgaccgtggccggccgcatcgatgccagcggcgagcaggtcggcagcatccgcctgtacgcccgcgatcagttgcaggtggacggcacgctggacgcgcacggtaccggcctgcgcgtggacagccatggcaagatcatcgacagtccaaaccgggccaccatcacgctgggcagcgccgaaggtgccgtcggcctgggcagcgcggcgcagctggacctgcgtgcgggcagcgacgttaccgtcggtggacgtcctggccagaacgatggcaccccgcgcggcacgctgaagatcgatgtgccgcggctgggcagcaacgacgcggcgattgccgcggccaccggcctgcgcatcgatggcgcggccgacatccagctcaatggtgttcgccgctacgacgatgcgcccctggcaaccaccgctgacgtgcgcggcaaccgcgcgcagctggtcacccagcagtggctggaccaggtggtcgatccgcacagcgtggcctggatcgatggtgcgctgggcaacgcggatctgcagcagcgcacgcgggcgctgggcgatgtgcgccttcgtcccggcgtgcaggtgctggcgcggcgcagcgacgccaacccggacggcgacctgaccatcgccggcgacatcgatctgtccggctaccgttatggccccgatgccaaccgcgccgatccatcgcggcgtggcttcggcgaatcggcctcgctggtgctgcgcgccgaaggcaacatcaacgtctacggcagcatcaacgatgggttcgcaccgccgccgtccacgccggatgagggcggctggcagctgtacgagggccgcaatggcagcgcggggcacaccccctttggcggtgggctggtggtgccggtggacggagtgaagctgcagcccggcaccgagttccaggccggcacccgcctgaactatgacgtgccggtcgaatcggtaacgcttccggtcggtaccgtgctgcccgcgccgatggtgatctcgcagaacctgcggctgcctgcaggcacggtgctgggtgcggcggtgaccaccgactccgggcagacgctggccgcgggcaccgtgctgcaggagccgctgatgctggcggccggtgcgcggctgggagccggcttccgcctgcgcagtgcggtgcagatggcggcacaggagtggcccgccggcgcggtgctgccggttgcgctgcgcctggcacgcgaagtcgcgctcaaggtgggcgcgtacatcccgtcgttgaccaaggtggagctgcccggcgacgcgccggtgaatctgaggccggccgatgccggcggcaaccaggggcgcaactgggcgctggcgccgatgctggccgagggcaccacctcctgggacctgaccgttgttgccggtgccgatgccggggcagccgacccacgcagccggcgctggggcagcgaaggcagcgtcgtgctggccgatacccaccagggctcgatcggcacggtcaagacggaaatcatctgggtgggggatcgcgcgttgaccgagcaggcatcgttggactggatcggcgacacctcctatgcaggccgtccgatcgcggagctggccgacatgttcggcttcaccgaagacgagttctgcgcgatgtcggccgactactgcgggccggcaccccgccaggtggccgcgcagggctcgctggattactggggcgacgagtcctacgcaggcactcctgcgaaggacttcgccgcgatgtttggcatgaccgaagacgagttctgcagcaccgcgcctacctactgcgccggcggcggcacgcagaccgaagtgaccacttacggcaagcgcgcaggcacgccggcgtggagcgtactgcgcaccggcaagggtgacatggagctgctcgcggccgctgacgtcgtgatgaagtcaggctttggcgtctacaccgccggcactcccgccgcgctgggtgggggccgcgacgctgccttcaattcgcaccgtgcagcggccccttggaacaccgcagtgctgggaccgaacctggtgccgggcagctatgacgccgcgatggcaggctaccaggcctggtatccggatcatggtggcaacctgcgcgtcgaagccgggcgcgatatcgtcggcgacgcctggaccgcgcgcgcagagtcgggcagcagcgatcgcgactgggcgctgtactccagtgccgcggtcggcaactggctgtggcggcagggtaccggcggcaccactggggtggagccggtgccgaccagctggtgggtgaactttggcgcctacaccaacgtgtccgctgccgccggcgcttctccacggatggttggtttcaccggcttcggcacattgggcgggggcaacctgacgctggaggccgggcgtgacgccggcgtgcgcgatgcgataggtgacgcgttggtctcgacgatcgcaccgcgctcgggtgcgatcattgctgcggtgggatcgaccggccgggtcagcgatggccagctgcacctgaccggcggcggcgacctgcaggtgcgtatcggtggcgcgctgaatccgaacctgcaggcgacgatctccagcctcaacccctccagggcgggacagaatctcgacctcaacggtaccttcagcaacctgcgtgggagcctgcagctcgatgcagggcgcatcggtgcaatgggcgtcaccctggaaagctacgcgacgctgggtaagcagcgggcggcagacctgtttgcgcctgacgccgcccgcgcgatgggcgggccggtgctggtgctgggcgacgccgccgcgcagctgcaggcgcggggcgatgtggtgctcggcggcgtcgccgatgcgggccgggttccgctggccaactacagcgcggtgctgcaggatgatggcgcgcgcgctgcaggcagtacgtggttctccctgtggaccgccaacacggccgtggatctgttcagtgccggtggtgacctcgcgccaggcctcgccgggccggaaaacgtgacgggcagcaatctgtggcgggagcaggtccagcttgttgtgcgtggcggcgatgatctgctgaattactggctctatccttcgcgcttcagcgcgattgctgctcagggtgacatcaagctggaccggatcagcgccacgccggggacgcaggatgtgatcctgctggcaccctcggcgacaggacggctggacgtcctggccggtggaggcatcttcgcccagcctggcgcgacccagatcgcgcgctcggccagtgacgcgcgcctgccgggacccttcgacccggcattcatggccgagcagggggattccgcaggcaatgtgacccgcacgcggcgcaacctgtcggtcgacggcaacattgcatcgccggacgcgtcgcttccgctgttcgcattcggtccgaatacgccgctgtccactgtgtctgcggcactggcgccgagccgcttctacgcggtgcagggcgacatcatgggtctggccaccggcgcccagcgcacgctgaatgtcaacgcggggcagcgcacgcagctgaactggttcgaggccgccggcgccgtgcaactgcgggcaggccgggacatcctcggggtgtcgatgaccgcgttgaacaccgcgcccaccgacatcacggtggcggcggcgggccgcgacatcgtgcatctgaacgcgaccatcgctggccccggcaacaccgagatcagtgccggccgccagctgcgccaggaggatgcgggcagcatcgccagcctcggtggcatcgtgcagggcgacacccgtcccggcgccagcatcgcgctgacggccggcaaccagcagatcgatttcgcggccctgcgtgcacgctatctggaccctgccaaccttgccgatcccgcgcaatcgcttgcgtcgcagccgggcaaggcagccaaggtgtacgaccaggaactgaagcagtggctgcagcgacgcttcggcgtggcggccgagggcgacggggcgctggccacgttcgatgcgttgccgcaggaacagcagcgtatcttcctgcgccaggtctattacgcagagctgcgcgaaggtggacgcgagtataccgatgcagaagggccccgcttcggctcctacctgcgcgggcgcgaagccatcgccacgctgatgccggacaggaatgcggccggtgcgacgatcgaccgtaccggcgatatcgtgatgtacggtggctccggcgtgcgtaccgaggcgggcggcaacatcgaactgatggcaccgggtgggcagatcgtgatcggtgtgcagggcgtggtgccacccgccagcgccggccttgtcacccaggggcaaggtgatatccggctgttcagccaggacagcgtgctgctcggcctgtcgcgggtgatgaccaccttcggcggcgacatcctggcgtggtcggagcagggtgacatcaatgccggtcgcggttcgcagacgacgctgctgtacacgccaccgcgtcgcgtctatgacggctggggcaatgtgatcctgtcgccgcaggctcccgccagtggcgccggcatcgcgaccttgaaccccatcgccgaagtacgaccgggcgacgtcgacctgatcgcaccgcttggcaccatcgacgcgggcgaggccggtatccgcgtctcgggcaacatcaacctggcggcgctgcaggtgctcaatgccgccaacatccaggtacagggcgagagcaagggcctgccggtgctggcatcggtgaacgtcaatgcgctggcctcggccagtgcggcagccaacagcgccagccaggcggcacaggatgtgatgcgcaagagccaggacgaggcacggcgcaaccagccgtcggtgatcagcgtgcagatcctcggcttcggcagtggcaccagcaccatcaatccgccggcgcgtggcaacactgccaacagcggctatgacgccaacagtgccttccagttcccgcaggcaagtcgcgacgagggcacgcagcgccggtag

SEQ ID NO: 493240 - DNA, 1176 bp, Stenotrophomonas maltophilia
atgaacaagtacaagaccctggccgcgctggttgccaccgcgctgctcgctaccgtgggcgccgcctcggcgcagaccgtgaccggcggcggtgcctcgttgccggccgacctctacaagggttcgtccgacagcatcctgccggcgaacttcagctacgccgtgaccggttcgggcaccggcaagaaggccttcctggaaaacaactcgctgctgttctcgaccaccggcaccgtgcacttcgccggcagcgattcggtactgagcggcaccgagctgaacacctacaccaccaacttcaaccagccgaccaatgccaaccgctacggcgcgctgatccaggtgccgtcggtggccacctcggtcaccatcccgttcaacaaggccggttcggcggtgaacctgagcgtggcgcagatctgcggcgtgttctcgggcgcgatcagcgactggtcgaccatcgatgccaaccgcagcggcccgatccaggtggtgtaccgcgcggaaagcagcggcaccagcgaaatgttcagccgcttcctgaccgcggcctgtgccgctgagaatgctgacacctcgaagctggtgggcggcaagttcgccatcaagtcgaccttcgccgacctgtacaagcgcgatgccaacggcaacctgccggcgttcctggtggccgccccggccaccggcggcacctcgctgtacaacgctgtctacgcggctgaaggccgtatcggctacgttggcccggacgtgattccgaacctgaccgatgcgaccaaggtcgccaaggtcaagggcttctcgccggaccaggtgagcgtgcaggccaccctggacaccgtcgctccgccgaccggcaccgatgcagagaaccccgccaactgggtgccggtgttcggcaacccgtcggccggctatccgatcgccggctacaccaacctggtgatcggccagtgctacaaggattcgagcgtcgccaccagcctgcgcggcttcctggcccgccactatccggcgacctacaccgtcgcgtatgagaagtcgatcaccgaccacggcttcatcccgctgaccaaggcctggcgcgatgcgatccgcaaccgcttcgtgctggccagcagcactgccggcctgaacaaccccagcacctgcgccggcatcggccgtccgctgtaa

SEQ ID NO: 493241 - DNA, 1200 bp, Stenotrophomonas maltophilia
atggcgctgttcgactaccaggccgccaacgcgcagggccgcatcgagaagggccagctggacgctgacagcccgcgcggtgcgcgacaggtgctgcgcggtcgtgggctgacacccgtgcaggtcagcgtggcgcgcagtgccggcagtggctgggctgcccggcggctgtctgccagcgagctggcctgggccacgcgccagctggccagcctgctggccgccagcctgccgttggaaggcgccttgagtgcggtgatcgagcaggccgaacgcccgcacgtggcccaggcgctcaccgaagtacgcgccgacgtgcgtgccggccagcgcctgaccgtggcgctggcagcgcggccgcgcgattttccgccgatctatcgggcgctggtgggcgctggtgaagactctggtgacctggcacgggtgatggagcgcctggccgactacatcgaagaacgcaatgcgctgcaggccaaggtactgaccgccttcatctatccggcggcgatcagcctggtgtcggtggcgatcgtgatcttcctgctcagctatgtggtgccgcaggtggtgaccgcgttcgttcaggcacggcagacgctgccgatgctgacccaggtgatgctggccgccagcgcgttcgtgcgcagctggggcgtgtgggcagggctgggcatggctgcgctggtggtggcctggcggctggcgttgcgccggccggaactgcgcctgcgctgggacgcgatgctgctgcgggtcccgatggtcgggcgcttcgtgctgggtgtgaacagtgcgcgctttgcctcgacgctggcgatcctgctggatgccggtgtgccgctgctgcgtgcgcttgaagcggcgcggcagacgcttggcaatgcgctgctggcgcgctgtgccgatgatgtggctgctcgcgtacgcgaaggtgcggcactgggtgctgcgttgaaggtacagaaggtctatccgccgatcctggtgcatctggtggccagcggcgagaagaccggttcgctggcgccactgctcgaacgcgccgcgcagacgatctcgcgcgagatcgagcgccgcgcgatggcgctgaccgcactgctggaaccgaccatgatcctggtgatgggtggcgtggtgttgacgatcgtgctggcggtgctgatgccgatcatggaaatgaaccagctggtgcagtga

SEQ ID NO: 493242 - DNA, 1434 bp, Stenotrophomonas maltophilia
gtgagcgccgccgcgtcactgccgtacgcctgggtgcgcagccatggggtgatgctgtccgaggttggcggtgagcctgtgctgctgggtaccgtcgataccgcagcgtgggccgtggccgaactgcgccgccggcatggaccgttgcccttccaggcactggatgccgcgacgtggcagcagcggttggctgagcagtaccgtgacggcggcgacgccgctgccgtggtcggtgccgccgagagcgaagtcgatctggaccggctgatgcaggacatgccggaagtcaccgatctgctggacgcgcaggatgatgcgccggtgatccgcatgatcaacgcgctgctggcgcaggccgcacgtgatggcgccagcgatctgcacatcgagccgttcgagacccattcggtggtgcgctaccgggtggacggcacgctgcgcgacatggtgcagccacggcgcgcactgcacgcagcgctggtatcgcgcatcaagatcatggcccacctggacatcgccgagaagcgcctgccgcaggacgggcgcatcgcgatccgcgtgggtgggcgtccgctggatatacgagtctccacggtgccgaccgggcatggcgagcgcgccgtgctgcgactgctggagaaggatgccggccgtctgcagctgcagcgcctgggcatggccgatgacaccctggccacgttcactggattgatccggcagccgcatggcatcgtgctggtcaccggcccgaccggtagtggcaagaccacctcgctgtacgccgcgttggggcagctcgacagcagcaccagcaacatcctcaccgtggaggacccggtggagtacgacttcgccggcatcggccagatccaggtgaacgcgcgcatcggcatgagcttcggcaccgcgctgcgcgcgatcctgcgccaggacccggacaccatcatgatcggcgagatccgcgacctggagaccgcacagattgcggtgcagtcgtcgctgaccggccatggcgtgctggcgtccctgcataccaacgacgcgatctcggcagtgacgcgcctggccgatatgggcgtggaaccgttcctgctggcctcgtcgctgcgcggtgtgctggcgcagcggctggtgcggcggctgtgcacccaatgccggcgtgccgaggtggatggggacggccgtaccgtatggcgcgcggtgggttgcgcggcctgtgccaacagcggctaccgggggcgtaccggcatccacgagttgttcgtggtggacgatcgcgtgcgtacgctgatccatgaagggcagggtgaacctgcactgcgcgaggcggcgcggcgtgccggcatgcggaccttgcgtcaggacggccagcgttggatcgacagcggggtgaccacgctggaagagatcctgcgcgtcaccggcgacgactga

SEQ ID NO: 493243 - DNA, 2382 bp, Stenotrophomonas maltophilia
atgagggcgatgcgcagccttgcctgcagtactgcattggccctgatcgtgggcatggcccacgtgccggcgccggtggcagcgcaggacacacgcgatgagccggtgcagctgaacctggtggataccgatatcggtggcgtgctgcggatggcggcacggttcaccggccgccagttcctggtcgacccgcgggtgaccggcaagatgacggtggtctccgatggcccggtcagccgtacccaggcctaccagctgctgctgggcgcgctgcgcatgcgcggcttcgccgtggtcgagaatggcggcgtcagccgggtggtgccgcaggccgacgccaagctgctcggtggccgggtgggcagtggcggtgcagggggcgagatcgccacgcgcacctttccgctgcgctacgagaacgccgccgcgctggtggcggtgctgcggccgatgatcagcccggacaatccgatcacggcgaacccgggcaacaacaccctggtgatcaccgactatgccgacaacctggagcgcatcgcgcgggtgatcgccagcgtcgacacgccggccggcatggacaccgatgtggtgaagctgcagcagggcatcgccgtagacgtcgcggcgatggtcgcgccgctgctggatgcgcagggcgcagagcccagccagaaggtagtggtgatggccgacccccgcagcaacagcgtgctgctgcgttccagcagtcccgggcgcacccgtctggcccggcagctggtggagaagctggaccgcgcgcaggacgagtccggcaacctgcatgtggtctacctgcgcaatgcccaggccaatcagcttgccggcgtgctgcgcggcgtggttgcggggcagagcgatgcgccggcagtgggcagcaatgaaggcatcacgccactgcctggcgatgcaagccgttccgcaccggcgcagccgtcgcagccacaacaggccaggaccggcagcaatgcgctggaatcgcagcggctggatccgaaccgccgcgacccgatcgacgccgggagcaccggcttcagccagaacggcatttcggtgcaggcggacgtggccaccaacacgctgttgatctcggcgccggaaccggtgtaccgcaacctgcgacgggtgatcgaccagcttgaccagcgccgtgcacaggtgctggtggaaagcctgatcgtggaggtcaaccagaccgacgcggccgaactgggcgtgcagtggatgctgggcaatggccgcaccttcggcggcacccacttcggcggcaccagcggtggcagcgggctgaacaccaccgcgcgcacgaccctggacgtgctgcccaaggatggcctgaagatcggggtgatcgacggcaccatcaacctgcccggcgtcggccagatcctcaacatgaaggcgctggccaacgcgctgcagagcaagggcggtgccaacatcctgtccacgccgaacctgatgacgctggacaacgaggcggccagcatcatggtcgggcagaccgtgccgtttgtgagcggccgctacgtgaccgacggtggcggcggcagcaacaatccattccagaccatcgtgcgcgaggacgtgggcctgaagctgcgggtacgcccgcagatttccgagggcggcacggtgaagctggacatttaccaggaagtcagcagcatcgatgcgcagagcgcgaacagcacggccggcatcatcaccaacaagcgcgcactggataccagcgtgctgctggacgatggccagatcatggtgctgggtggcctgctggaagacagcgtcagccatggccgtgacgcggtgccggggttggggaagattccggtgctgggtgccttgttccgcagcgacacgcgcaggcgcgccaagaccaacctgatggtgttcctgcgtccgcacgtggtgcgtgacccggccgccggccagcgcctgacccgcgaccgctatgactacatgcgcaacgcgcaggctggcgcgcaaccggtgcagagctgggcattgccggcgctgtcggcaccgcagctgccgccgcaggacctgtctgtactcggccagggcaatgcgcgcgatggccagggccagccgctgcagaacaccagcctggcagcgttgtatccggccggtgacggcgatgcgcagctggtgcagttcgcacaggggctggacccgacccgtgcccgccagggcgtggcgcaggtgcgggcgctgggcctgcaggcctatgccgaggcgacgcctggcgagagtggccagcgcctgcgggtgcggctgccgcgcgacccggcgacgctggacccggcactgcagcaactgcgcgggctgggctacacgccggaactggtgatcggaccgtga

SEQ ID NO: 493244 - DNA, 528 bp, Stenotrophomonas maltophilia
gtgacggcccggaccctgcggctgggcggggggctggccggcctgcagcagcgctggcaacgcctgccaccgcgcgaccggcggatgctgtgggtgatggtggtggcgctgctggtggcgggtctgtggtcgttgtggctggagccactgctgaagcagcgcacgcactggcaggccgagctaccgcggctgcaggcgcagtggcgcgcactggcaccgctgctgcgcgtccgtgagcgccagcagctggcgcagggccagcatccgacactggccgggctgcgcgatggaatcaagaccgccggccttgccgacggcctgcatatcgaaacgcgcgacgggcgctggcacctgcaggtacaggcggtgcccgccgatgcgctatggaactggctgctgccgctgctggccgacccggccatcgagctgcagcagctgcaactgacacgcacaggggacgcgaacatgccggcggcacggatttccggaaacatcgtgatggtggccactgcgggtgcccatccatga

SEQ ID NO: 493245 - DNA, 1164 bp, Stenotrophomonas maltophilia
atgaacgggcagcttcgggtgcgcctgccgacgcttgagggtctgcacgccgacagcgcggtggactgggcgcagctgcacaagggcgaggtgctggcccacggttgcgccacgctggcggcgctgggtctgcggcatccgcgggctgcggtgcatgcctgcctcgatccgagcgacctgatcctgctggaactgcagctgccaccgttgtccgggcgccgcctgcagttggcgttgcagggtgaggtggaggcgatgttgctggatgacctgcaggacgtcgcgctggcccacggtgcgcaggcggctgacggcacggttccggtggcctggctcggccagcaggcggtcctgcaggcgcagcagttgctggcttcgtgcggactgcagctgcaggcactccatccgacgccgctgctgctgccctggcaggacggacaggccaccctgcaggtcagcggcgagcacctgctggtgcgaagcgggcgcgatcgggggttcgtccagtggtatggcggacgtgatgcgtgtgcagtcatgcaggcgctggccgtgcgcctgcgacaggccggcgtgcaggccgtgcaatggatcggcagcgtaccgccggcgtggccggacagcctgccggccaccgccgtcatgaaggaacggcaggcatgtggccctctgccggggtggtcactgccgctgcccggtgcgggtcggcaagcgccacgcctggcaatcggcctcgcgttggcggcagtgctgctggccgcgctcggcctgcagctgcaggtctggcgttggcggatcgagggcgaggcgctgcaacaggacatggcgcggcagttcagcgcacgcttcccggagatcaccgatgtggtggatccggtgctgcaggcaaggcgtgctctggcggtgccgccaccggcgccaccgttgccgccgctgcaacggcaggtagccagcacgctgctggcggttccggaactggccgggcaggtgcgcagcctgcattaccagcccggccagctcgacatggagctggatgccgatgcccaggcattggccgacgatccgcagcggcttgagcactggcagcaggcgctgcaggtgcagggcctgctgctggcgcgcgacgccggtgggcgcctgcgggtgagcggagcgggacagtga

SEQ ID NO: 493246 - DNA, 906 bp, Stenotrophomonas maltophilia
atgtcagcccggatgcggtctgtttcgagtgtccgtcaacgtggcatggcggtgatcgtcgccctgctggtggtggcactggtggcagtgattgccactgcactgctcacccggcagtcggcccagctgcgcgcgctgcgtggtgaccagctgcgcgcacaggtacgcatggccgtggacgcaacgctggaacgtgcggcgcagcagctgcgtgaggacgcaaaggaacagctgaccacggtgcgcagcgggcgctgggcgcgcccattggagctgcaggcgccgttgccggtgcagctgcagctggtcgatgcgcagtcgatgttcaacctgcgcaatctgcttgcgcatggcaggccggaccccgaggcgcggcgcgcgttcatcgcgttgtgtgccgggcaggggctgggccagggcgcctgcacatccgccgcggaccacatccaggcgcgcctgcgcgatggcgacatgcaggcgcaggcgccgctgccgcgcgaatcactgatcgaacaggtgctgccgggtgccgatccggcggcgttgcaggcgctggcgcgacgcaccgtggtgttgccggcacagaccctggtcaatgccaacaccagcgacctgcgcgttctgcaggcggtgacgcctgcggtcgagccggcacggctgcaggcgctgctcggtgagcgcgacgctggccattggctgctcaatcgcggcgacatcgccaaccgactccaactgagcaacgaacagatggcggtacttcccttgggtatccatagcgagtggttcctggctgtcggccgggtgcaggctgacggcagcacggttgatttccgcgcgctgctctggcgcgagtaccgcgacgatggcgtgcgtgtgcaacgcgtgtggacgaggatcggcgcatga

SEQ ID NO: 493247 - DNA, 438 bp, Stenotrophomonas maltophilia
atggcaaggcaggtgggtggtcgcagggctcggcagcagggtttcagcctgatcgagatcatggtggtggtggtgatcatcggcattctcgcggcattgatcgtgccgcgcttgatggaccgtcccgaccaggcgcgcgtggtggcggcgcgccaggacatcgcggcgctgatgcaggcgctgaagttgttcaagctggacaatggtcgctatcccagcgccgagcagggcctgcaggcgctggtgaagccgccgcagggcagtggcgtgatgccggtcacgccctatctggatcgcctgccgaatgacccgtggggccatccgtaccaatatcaggtgcctggcacacatggcgacatcgatgtgttctcgctgggtgcggacagcaggcccggtggcgacgccgggaacgcggacatcggctcgtggcagctgtga

SEQ ID NO: 493248 - DNA, 558 bp, Stenotrophomonas maltophilia
atgctggagctggatcgccacctgagccggtcgctggagcaggcgcggcacacgcccttgaatgtgcaacgctacgggcactcgtgggtctgggtgctttccagtgatgcctgggccgatgcggcgcgctgggcggcactggacagcagcgcgcatccattggcggcgctgcggcgcgcccttgatctgcagctgcggccgtggtccgaagcagccatgaacgcgctgccgcttgacgcaggcgatgcgcggctgctgcaacgtgcggccctgctggtggtcgtgcgtgatctcaacagtgcgcagcgcgtgtacgacgatctgcgctatcaccaggcctaccgcacgttcatcggcctcgaccatggcaccgcgtggtcgccgatgcagtgcgtgcgcctgttgcaggcgtgcgcgcttccgctgctgcgcggctgcatcgacgaaacgctgtccagtgtgccgccacacctgctcgaggcggcacgcgtaccggctgcgccggcgcctgcgcaggcacatgcgcagcgaattgccggcggatgtttatcgtactga

SEQ ID NO: 493249 - DNA, 552 bp, Stenotrophomonas maltophilia
atgcgcaacgagaccatcggtgtgctggatctgcgccgcaatctgtcggcgttgctggaaaccacccagcgacggccgttgatggtgcaccgctacggctcgccatgggtatgcgtggtatcggacgcacagtggcagcaacaggccgtgctgctggacttcgatccgcagtcgcacccgttggcgatgctgttgcgcctgcagcagcaggtgctgccgctggctgaaaccggtgtgttgccgcctgcggcgctggcacgcgcactgctgctgatggacatgcatggcatcagggatctcgcgcagctgcacgagcaggtgctgcaccatcggctgtggcactggttcgtggcgggcacccgcgggctgatggacggctggcagctgccggcggtgcgcattgcgatggcgtcatggtgcgatgacgtggagatgaccgacgcactgatcgcgttcgccgcgcgcagcgacgttgcggtactggcccgccgctgcgggggtgacgcaccgcgcctgcagcgcgaagcctgcaggcggatgacgctgcgataa

SEQ ID NO: 493250 - DNA, 981 bp, Stenotrophomonas maltophilia
atggatcctgacgatcgcccgcaacgcccgctggatgccgtcgagcgccaggcgcacgcgtgggtggtgcggctgacctcgggcgaggctaccgcggccgacgggcgcagcttccgcgcgtggtgcgaggctgatccccgtcatcgcgaagcattcggccgtgcgcgccggcaatgggagcaggtacgcctggccggcgagcagctgcctgccgctgcacgccaaccggtcgtgccgacgccgacccagcgctggagccggcgtgccttcctgggtgccgcgattgccgccccggccagcctggcagtggtggcggcgatccgtccgccgctggggctgtggccctcggtgacggcgatgacggccgacttccacaccggtaccggtgaacggctgcagatcgcaccttcgccacagctgaagatcgagctggatactcagagcagtctgcgccgccgtgcggacacggagggcgaaggcttcgagctggtgcagggccaggccgcgatcgagacccgggccggtctgcgcctggccctgttcgcaggggcgggctgcgtgattgccgatgaaggggcggtgcgcctggacgtgcgcaacacccacggccaggtacgggtgacctgcctgcagggcagcgcccggatcgagcacccgcagggccgcctgcagctgcaggcgggccagcagacccggtacgacgagcgcctcagtggcgtggtggccgaagccgtggcctcggaagtgagtgcctggaccgaaggcatgctggtgttccgccgggcgccgctgcgcgaggtggtggaggagatcaaccgctaccgccgcggcaaggtgctgctgggtgaatcggcattggcgcgcgccccggtcagcggccgcttccgcatcgatgatccggatgcggcgctggagcagctgcgactgacgatgtcgctggatctgcgtcgctttccaggtggcattgccgtccttggttag

SEQ ID NO: 493251 - DNA, 531 bp, Stenotrophomonas maltophilia
atgagcaacggtacggctggcgcagttgacctgatggaccaccttctgggggcctacgacgagctgaaacgccggttggtgcgcaagctgggatcggaggagctggccggtgacgcgctgcaggacacctggatgcgcctgagtgcgcgccgtgaccgcctggacgccgtgcagaaccctgcggcctacctgctgcgcatggcgatgaataccgtgatcgaccgccaacgtgccgaccatcgcctgctgagcctggaagaggtggagacgctgatggacatggccgaccctgcacctgggccggcgcaggcggccgaactggacttcgcgctggaggacatggtgggcctgctgcagcgcatgcccgagcggcgtcgccgcatcctgctggcaatccgcgtcgatggcctgcagcagcgtgacgtcgccgatcacctcggcgtgtcgctgcggctggtgcagcgtgagctgaaggcggcccaggactacctggcagagcgcagcgggcaggggcgccaggtgcggttctga

SEQ ID NO: 493252 - DNA, 681 bp, Stenotrophomonas maltophilia
gtgttctacgtcagggggctgaatggacaccatgcggtcagaacttggaaggtggccatcgtcgcgtggctgctgctgtcctttgccgctgccgggcaggacggagttcatgcctacgacatccctgcgcagccgctggaacaggcggtcgagcgcttcagcgtcatcagcgggtggtcggtgatgtacccgggcgaccttgccgccgggcgcagcagctatccgctgcacgccaacctgccgccgctgccggcactgcaggtgctgttgcaggactccggtatcgaggccgaggtgatcggcgagcagcgtgtggtgctgcgccggggcacgcccttggcgaccggccccgatgttggtgctgaactccctgaggccgagcgtcggcgtcgctacggtggcctgcagcagcgcctgcgtgcggcgttctgtgacgacccggagatcgcgcccggccgctacgccgcgacgctgcgcttccgcatcgacggcgcgggccgggtgcgcgagcccgagctgctgtccggcagtggcagtgcccgccgcgatgcacgcctgctgcaggcgctgcagggcctggtgctggcgaccgaggccgccgcgctggcgcagccggtgaccctgcagatccgtccttccggcaccgaccacgactgtggcgggcgcgcgccccttccatga

SEQ ID NO: 493253 - DNA, 465 bp, Stenotrophomonas maltophilia
atgcagtatcagctcgacaacctcgatcggcgtatcctcgacgccctgcagcgcgacggccgcctgcagaacctggagcttgcccggctggtcgggctgtcgccgtcggcctgcctgcgtcgggtgcggctgctggaggaaggcggctacatcgaccgctacgtggccttgttgaacgaggccaaggtgggccgtggcttcacggtattcgtccgcgtgtggctgcgcgggcaggacgaggacaccaccaattacttcatcaacagcatcaagtcgttcccggaagtgcttgaatgccatctgatggccggtgactgcgatttcctgctgcgggtggcggtggccgaccttgatgcctaccggcagttccagatgcagcacctgaaccggatcgccggcgtgcagaacaccaagaccgagattccgatgcagcggatcaagcagacgacccagctgccgctgtga

SEQ ID NO: 493254 - DNA, 732 bp, Stenotrophomonas maltophilia
atggacgcccgtaccaccctccccctgcccgacacctgcgataccgcgccgcgtgccgaattcctgcgcggcctgcgcgccgccgtgccggtgatgatcggtttcattcccttcgccctggtgctcggcgcgcaggccgcgcagaaaggcctgagcgcactggaagtgccactgatgacgggcctcaacttcgctggcggctcggagttcgccgccgtcgaactgtggacctcgccaccgcacatcgcactgatcgtggcgatcaccgcactggtcaacagccgccatctgctgatgggcgccagcctggccccactgctgcagcacctgccgcgccgccgggtgctgccggcgttgttcttcatgtgtgacgaaagctgggcgatgggcgtggccgatgcgcgccgccgtgcgctcggcttcagcctggcctattacctgggcgtctccgcgggcctctacaccgtctgggtggcctgcaccgcgctgggtgcgatcgtcgggccgctgctgggcgacatccacgcctacggcttcgacatggccttccccgccgtgttcctggtgctgctgcgcggcatgtggcagggcatgaaggccgcgcgcccgtggctggtcagcctagtcgtggccgccgccacctatctgctgatcccgggtgcgtggtacgtggccagcggcgcattggccggcctggccgccgcctggctgctggcggaggacgcagcatga

SEQ ID NO: 493255 - DNA, 315 bp, Stenotrophomonas maltophilia
atgatctgcaacggcctgatccactggtcctcggtgctgaccatcatgctgatggccgccgccacctacctgacccgcatcgtcggcttcctcgcgctgcgcaaccgcacgctgggcaagcgcgcggtgagggtgatggaagccgccccgggctgcgtgctgatctcggtgatcgctccggatttcgtcgccgacaagcccgccgacctggccgcgctggcgatcaccctgctggccgccacgcggctgtcgatgctgccgacggtgctgatcggcgtggcctcggccgggctgctgcgctacctgatgggctga

SEQ ID NO: 493256 - DNA, 2121 bp, Stenotrophomonas maltophilia
atggccagccgtaagtggacgcagacctcgcgcgtgcgcgaaggccggccgttcccgctgggcgcgacgtgggacgggctgggcgtgaactttgcgctgtactcgcggcatgccacccgggtggagctgtgcctgttcgatgcgcgcaaccgtgaagtcgagcgcatcgtcctgcctgagtacaccaacgagatctggcacggctacctgccggacgtgcggcccgggcaacgttatggctatcgggtgcacggcccgtatgcgccggaggaggggcatcgcttcaatcccaacaaactgttgctggacccctacgccaagcagatcgtcggcgagctgaagtgggcgccgcacctgttcggctacaccctgggccaccgcgatggcgatctcagtttcgaccgccgcgacagcgccagctacatgccacgctgcgcggtgatcgatccggccttcagctggggtgtcgaacgtgcacccgcaacgccctgggaccggaccgtgatctacgaagcgcacgtgcgcggactgaccatgcagcaccccgatgttccgcaggccgagcgcggcactttctctgccctgcgccacgacgcggtggtcgaccacctcagccatctgggggtgaccgccatcgagctgctgccggtgcatgcctacgtggatgaccagcagctgctcgaacgcgggctgcgcaactactgggggtacaacaccatcggcttcttcgcgccgcagccacgctacctctcgctgggcaccgtggccgagttcaagcagatggtcgcgcggctgcacagtgccggcatcgaagtgatcctggacgtggtctacaaccacaccgccgaaggcaatgagctgggccccacgctgtccttcaagggcatcgacaatgccagctactaccgcctggccgatgatcgccgctattacatcaacgataccggcaccggcaacacgttcgacctgaccaatgccggcgcgctgcgcatggtgatggactcgctgcgctactgggtgaccgagatgcgggtggatgggttccgtttcgacctggccaccatccttggccgcgagcggcatggcttcgatgcctcgggcagtttccttgatgcggtacgccaggacccgatcctgagccaggtgaagctgattgccgagccatgggacatcggcccgggcggctatcaactgggccagttcccgccgggctgggcggaatggaacgaccgcttccgcgatacggtgcgcgcgctctggcgcggcgatggcggccagttgccggaattcgccacgcgcttcaccggctcggccgacctgttcgaacatcatggcaggcggccctcggccagcatcaacctggtgacggcgcacgatgggttcaccctgcacgatctggtgagctacaacgatcgccacaacgaggccaacggcgaagacaaccgcgatggccactcgcacaacctctccagcaaccacggtgtggagggcgacaccgatgatgcggcgatcctctcgttgcgtgcgcggcagatgcgcaacctgctggccacgctgctgttcgcgcagggcacgccgatgctgctggccggcgatgagttcggccattcgcagcagggcaacaacaatgcctactgccaggacaacccgctgagctggatcgactgggagcgtgcggcatcgccggctgcacaggcgcaggtggcgttcgtacgccgggcgctgtcgctgcgccgacgctatggcctgctgcgcaggaaccggttcctgcgcggcgaatacgatgaagcgctgggcctgcgcgatatcgactggcggcatcctgatggccgcagcatggaggaagcggactggcatgacgcagggctgcgtgcgctgctgatcgtgctggacggccgcagcccggacagcggcctgcgcgagcccgggcggcatgtcagcctggccctgctgttgaacgccggagaccagccgcagcggttcagtgtgtcggatgaagccttgtcgttccggcgcgtactgctgcagaccgacgaaacgccgttggagccggatgaggaaggcgcctggacgctgccgccgcgcagcctgtgcctgctggcggccagcagcagcgcctga

SEQ ID NO: 493257 - DNA, 2574 bp, Stenotrophomonas maltophilia
atgacggggttgcgtgccaccgcgcgcctgcagctgcacgcaggcttcgacctcggagcggctgccgcgcaggtgccgtactacgccgcgctgggcgtcagccacctttacctgtcaccgatcgctgcggcggtgcccgggtcgacgcatggctacgatggcgtcgacccggctcgcatcaatccggaactgggcggtgaagcgggcttcctgcagctggcggaagtgacgcgcgcgcacggcatgggcctgatcctggacatcgtgcccaaccatctggcggcgtccccgcacagccagtggtggagcgatgtgctgatgcacgggcctcgaagcccgcacgcagcttggtttgacatcgagtgggaggcgccgggctgcgagggccggctctggctgccggtactggaccggccgttgcacgacgcggtacgcgacggcgtggtgcgcgtggtggtggacaacgcgcggcccgtgctgcgccaccatggcctggcattgccgttgtcgccgcgcagccatccgctggaacccgcgcagtggccggcgtgggccgaacgctgcaaccgcagcgttgaacggttgcacacgctgctgcagcggcagcactaccgtctggcctggtggcgcacggccggcgatcaggtgaactaccggcgctttttcgatatcaacgaactggccgcgctgcgggtggagcgcgaggatgtgttcgaggcagtgcatgcgctgccgctgcggctggtacgcgagggatgggtggacggcctgcgcatcgaccacgtggatggcctgtcctgcccgggcgcgtacctgcagcgcctgcgtgaatcgctcgacgccgcctgcgcggccggcggtcgtgagccgcagaccgtcagcctgcatgtggagaagatactggccgagggcgagcagctgcccgacggctgggcctgcgacggcaccaccggctatgacttcatggaccaggccggtgcctggttgcacgatccggcggctgcacccgcgctctcgcgcacgtggcaggcgctgggtggtgacccgcgcagcttcgaccggatccagcaggacgcccgcgccatgttgctgcgccagggccttcatgccgacttccagcggctgctgcgcagcgcgcagcaggtcctgcagccgcggctggccgaagccgatatcggagtggctgcgctggcccgcgcattggcttccgtgctggggcattaccgcacctaccggccctattcgctgcagggggcgggtgaacgaaaggcgctggcggacgcttccgccgcagcgtgccaggcactggacggtgccgcacgcgcggcgctggacctgttgctggcagcgcttgccggcgaggcgcaggccgagcgcgtgctgcgtgcgcgtttcggtcaactggccgcgccgttgaatgccaagtcggtggaagacaccgggttctatcgctatttcaggctgctctcgcgcaacgacgtcggcagtgatccgcagcggctgggcatggaggggcgcgcgctgctggaacacgccgccgcgcgcctgcgtcgccatcccagggcgttgcttgcgcttgcgacccacgatcacaagcgcggcgccgacagccgggcacggctggcggttctcagtacctgcacgttcgaatggcgggacgctgtgcggcgctggaaccggatgtcgacccgcgccggcgcgccgatgccgttgccgggtgccgaggcctacgcactgtggcaggcgctcgtggccgcatggccgatgcacggtgcccctggcgccgacttcgcctcgaggatggtgcaatggctgaccaaggcattgcgcgagggcaagcgggtcagcagctggtcagacccggatgtggccgtggaggaggccgccgcgcagtggctgcacgcgctgctggacgcagcgcccttgcagccggtgcgcgaggcgctggcgacgttcgtggcgcgcatcgcgccggccggcgcctgcaacggcctggcgcagctgtgcctgcagcactgcctgcccggcgtgcccgacctctaccagggcggcgaaggctgggacctgagcctggtggacccggacaaccggcgtgccgtggactatccaacgcggcaggcgtggctgcgcgatacgcgcgggtggcccgcgctgctggaagactggcgggacggtggcatcaaggcattcctgctgcggcaattgctggagtgccgccgcaggcacccgcacctgttcctgcatggccagttgcagccgctgtccgcgcctgcgcgctcgccgtggctggcgttcacgcgcaggcatcaggcgcaggtgctgctggtgatcgtgcgccggggttcgcccgccgccgtgcctgggcccagcctgcacgccgcgcacgacgtcggcaccggcgtagcactgcacggtgtgccgacaggccccatgcgcaacctcctggacgggcgcatcgaacatttcaacgcaaccgcggacgtgggcaggcttctggctggcagcccgctggcgatatggatcaacgaggagacaggtagggatggacagcagggaacgacggcagcggattga

SEQ ID NO: 493258 - DNA, 1845 bp, Stenotrophomonas maltophilia
atgaatacggatgcagcggtgcgggagacggcccgccgtgcgggcctgctggtccgctggaccgacgtggccggtgccgcgcgcgaggtcgcgccggacgtgctgcgcgccgtgctggaggggctgcagtgcgaggcggtgcccgagcacgctggcctgcgcacggcctgctgcggacagctgctggtgatgccggaggcagccggcgcagcgtgctgggtggatgagcagggcgcagcgttgcccgcccgtgccgatgcgcagggccgctggcgcgtgccggaccagccgggttactggcagtggcgccggggcgaccagcaacaggcggttgcggtggcgccacagcgtgcctggtggccgcggggcacgctgcgcggctggggcctgtcggcgcaggtctacagcctgcgcgcgcccggtgatgccggcatcggtgacagtgccggctgtgcacgatggagcgagctgctgcaccggcacggcggcgacgcactggcgttgagcccgctgcacgcgggcatgccaccgggcccaggctacagcccctattcgcccagcgaccggcgctggctcgacccgctgcaggtctccctgccgcaggtattgcccgatgccgccaacagcgtgctgggcggggacgaggcgctggcggcggcggtggaagcggggactgccgcacgtcgcatcgactggccgcactcggcggcagtgaagtggcgctggatacggcaggttcgccaatgggttgcagcgcaggcaccgtcgcagcacgcgcagatcgaaacctggcgtgccatgcagggcgatccgctgcggcactattgccagcatgccgccgaccggttcaccggcagcgcggacgaccatgcgtttgcgcagtggttggcacagcagggctgggcgcaggtacacgccacgctgcgcgacgagggcgcttcgatcgggttgattgccgacctggccgtgggctgcgcgccgcagggcgtggaggcacgcaccgggggggctgatctgctgcagggacttgagctgggggcgccgccggacgcgttcaatccgctcggccaggcctggggcatcaccagctggtcaccgatggcgttgctgcgcgagggcttcgccccctaccttcgcgtgctgcgcgccgtgatggccggccgcggaggcctgcgcatcgatcacattctgggcctgctgcggctgtgggtgttgccccgtggcgcgggcgctgggcagggcgtgtacctgcgctatccgttcgatgatctgatcaacctgctggtgctggagtcctggcggcatcgctgcgtgctgatcggcgaagacctgggcgtggttccgccgggcatgcgccagcggctggcagcccggggcattctgggcatcgaggtgctgccgtttgcccgaaacggcgcgcgcttcctgccggcgccgcagtggcgccgcgatgcagtggcgatgccctccacccatgacctgccaccgctggccggctggctgcgcgggcgtgacctgcgctggcgtgcacgcctgggtgagctggcggatctgccagcggcactgcgcgcgcgcgccagcgacgcgcaggcactttctgcggtggccggcggcgagggcgcgccgctggacgccagggcgctgtcactggtcgcccactcggcgtcccggctggcgttgctgccgctggaagacgcgctgggcggtcgcgcacaggtgaacctgccaggcaccgtcggcggccatcccaactggcgccgccgcctgccgccgacgtgggatgctgacgcggccgatgcgcgcgtggcgcgcctgagtgccacgcgccgcaggacctggcaatga

SEQ ID NO: 493259 - DNA, 1719 bp, Stenotrophomonas maltophilia
atgaccacagtggccccgcgcctgggcgcttggccggtggccggtgacggggtggagttccgcgtgtgggcaccggacgcaagaacgatggcgctgtgcctgcaaggcacccagcggccgatgcagcgcgacccggacggctgccactggctgcgaataccggcatcgcatggcgaccgctaccggttccgcctgccttctggccaggacgtgcccgacccggcctcgcgctggcagccggacggcatcgacggcgacagcgcggtggtgctggatacggaggcagcgcggcctgcctggcaggggcatgcctggcaggacctggtgatctatgaggtgcatatcgaggccgggggcggcttcgcggcgttgaccgcgcaactgccgatgctggccgcgctgggcatcaccgccattgaactgatgccggtcgcgcagtatcccggccagcgcaactggggctacgacggcgtgttcccgtatgcgccggcccatgcctatggcgggccggcagcgctgagggccttcatcgaagcggcgcacgatgcagggctgtcggtgctgctggatgtggtctacaaccacttcggaccccagggcaaccacctgcgcgactacgcgcgcgggttcttccgtgacgaccgcagcacgccgtggggcgaggccatcgacttccgccagccctgggtgcggcgctttttcatcgacaacgcgctgatgtggttgcgcgactacggcttcgatggcctgcgcctggacgcggtgcacgccattgacgatgaccatttcctgcagcagctggccgatgaggtacgtgcggtggccccgcacgcgcacctggtgctggagaacgaacgcaaccaggcgcggtggctgcgcggcgcctaccagggacagtggaacgatgactttcacaatgcgctgcacgtgatgctgaccggcgagcaggagggctattacgcgggctatgccggtcgcgccgaagcactgctggcgcgctgcctggccgagggattcgcctggcagggcgaaccggacctgcgcggcgatccccgcggcgaacccagcgccgacctgtcgcccgcgcgttttgtggtattcgcgcagaaccatgaccaggtgggcaaccgcgctttcggcgagcgcctgtcgatgctgaccgatcctgcgccgctgcgcgcggcgctggccctgaccctgctgacgccgatgatcccgctgctgttcatgggcgagccgtggcaggtgcaatcgcccttcctgttcttcaccgactacgcgccgccgctggacgaggcggtgcgtgaagggcgtcgccgtgagttcgctggtttcagcgcctttgccgacgccgccgcgcgcgcgcgtattccggacccgaacgatgcggcgaccctgcaggcgtcgtacacgccgccgcccggcgatgatccctggtcgcagcactggctgcgctgcacgggtgagttcctcggcctgcgcaggcgctatctgcagccgggcctgctgcaggcgcggtcgctgggcgcgcgcgtgctgggccaaggcgcggtgcaggcgggctggcagttgccatcgggccaatggtggatcgcgatcaacgtgggccctgtgccggtggcgcatgcggtgccggccggcgagtgcgtcgtggggccggacgctgccgggatgctgccggcaggcggcggcgtgctggcctgctgggtcgccgcatga

SEQ ID NO: 493260 - DNA, 2235 bp, Stenotrophomonas maltophilia
atgagccacgacagcctgcatctggccgccctggaggatgaagcgatcacggagacgggattggatcagcgtatcgccccggcgctgcaggacctcgtccacgcgcgcccggccgatgcattcgcctggctgggcccgcatcgccagccagaaggcggacgccagctgcgcgtgctggtgccgcatgcgcagcgcgtcgaggtgattgcagacgatgggcggcgctggaacctgtcccctggcccgttgcccggcctgttcgagggcgcggccggtgacgcggcgataccgctgcttgccctgcatttcgaacagggcgtggagcaggtgcacgatgcctatgcgttcggtccactgttggacgaagccctgctgcagcggttccatgccggtgatgccgatgcggcgcggcagctgggtgcggtgccgatgcaggtgcagggcattgcgggcgtgcgcttcgcggtgtgggcgcccaatgcccagcgggtcgccgtggttggcgatttcaacgggtgggacggccgacgccatccgatgcggctgcgtcacaccgccggcgtgtgggagctgttcctgccgggcgtgcaggccggtgcccgctacaaattccgcatcgtcggcgccgacggccgggtgatgcccgacaagttcgatccgatggcgcgctgggccgagctgccaccggcgaccgcatcgcgggtgccttcggctgggcaaatcgagtggcacgatgatgcttggttggcggcccgccgcctggccggaacctgcgcgccgctgtcgatctacgaagtgcatgcgggttcctggcagcgcagcgacgatggtgcgccgctggactgggatgccctggccgaccgtttgattccgtacgtggccggtcttggcttcacccatatcgagctgttgccggtgagcgagcatcccttcggcggttcctggggctatcagccgctggggatctacgcgccgacggcacgccatggcacgccacaggccttcgcacgcttcgtggaccgctgtcaccaggccggcgtgggagtgatcgtggactgggtgagcgcgcacttccccaacgatgcgcatggcctggccgggttcgatggcaccgcgctgtacgagcatgccgacccgcgcgaaggggtgcacgccgactgggacacgctgatctacaactacggccgcaacgaagtggccgcctacctgatcggcagtgcgttggagtgggtggagcgcttccatgtcgacggtctgcgcgtggacgccgtagcgtcgatgctgtaccgggattacagccgtgccgagggggagtgggtacccaacgagcagggcgggcgcgagaacctgcaggcggtcgctttcctgcggcggatgaaccagacgctgcgggagcgcttcccggacgtgctggtgatcgccgaggaatccaccgcgtggccgggggtgaccgcgccggtggaggagggcgggcttggcttcacccacaagtggaacatgggctggatgcacgacaccctgcagtacctggggcgcgatccggtccatcgttcgcatcaccacagccagatcagcttcggcctggtctacgccttctccgaacggttcgtgctgccgctgtcccacgacgaggtggtgcatggcaagggcgcgctgctggccaagatggcgggcgagccggcacagcggctggcccagctgcgcgcgtattacggcttcatgtgggcgcacccgggcagcaaactgctgttcatgggcggcgagttcggccaaggccatgagtggtcgcacgatgcggcactggactgggcacgggcggccagcaacgagggccagggcctgtcgcgcctggtgggcgacctcaataacgtgctccgcgccgaacctgcgttgcatcgcgacgaacgcgacgaacgcggcttcgactggagcgtggcggacgacagtcgcaacagcgtctacgccttcatccgccgggatcctgccggcagcggccgcaccctgctggtggtgagcaacttcaccccgctgcgtcgcgacggctaccgggtcggggtgccgcaaccggggcgctggagcgaacggctcaacaccgacagcgcgtattacggtggcggcaatgcgggaaacctcggcgcagtgcataccgagccgaggccgatgcacggccacgcgcagtcgctgcggctcacgctgccgccgctgtccacgctctacctgcaggttgatgcatga

SEQ ID NO: 493261 - DNA, 1527 bp, Stenotrophomonas maltophilia
atggcccgcgccgcccagtccgcttcacccgttgcgatctctccgctcacgcccgtgccgatcggcactcgccgcggccactcgcaaccgttggatctgccagaactggtgcagcgcgtgctgttcgtcgccaccgagatggccgacttcatcaaggccggcggactgggcgatgtggccgcggcgttgccgcgtgcggtgcgcggtgcatgtgattcgcgcgtgctgctgcccggctacccggaggttctgcagcgcctgccacagctgcgaccggtggggcaggtcagcgcccgagccgggttgcccgcgtgcacgatcggcatggcggtgcaggccgacggccttcctatctacgtgctgctgtcgcctgggctgtacgagcgcgagggctcgccctacgtggatgggcagggacaggagtggaaagacaacgcggtccgcttcgccacgctttcgcatgcggctgcggagattgcggccgggcgcgccgggctggactgggcgccgcagctgctgcacctgaatgactggccggtggccatggctgccgcctacgtacgttgggaccggacagccgtgccgaccctgctgaccatccacaacctggcctaccaggggctgttcccctacgcgcttgcgccggtgctgggcgtgccggccgaacacctggatgaactgcacttccacgggcagatgtcgttcctgcagggcggcatcaccaatgccacgcggctgaacacggtcagcctgcgctacgcgcagcagatcaccgccccggatgacggctgcgggctgcatgacctgttggcgcgccgggcggccggcggacacctgagtggcatcgtcaacggcatcgacgccagctgggatccacgccgcgacatccacctcaaggcccatttcggcatcggcgaatggaccgggcgcgccaccaacgcgcatgcggtgcgcaaggcgttcgggctggcgccgtcgaccggcccgctgttcgcggtggtctcccgcctggtgcaccagaaaggcctggacatcacctgcgacgtggcaccgcagatcgtggcggccggcggccagctggtcatcatcggcggcggcgagccgcaggtggaagcgcaggtgcaggcgctggcccggcgctaccccggacgggtgggcgcattcatcggcttcgaagaggcgctggcccgccagatgtttgccggcgccgacttcctgctgatgccttcacgcttcgaaccctgcgggctgagccagatgtacgcgcagcgcttcggctgcctgcccatcgcacacgcgaccggcgggctggtggataccgtcgaggatggcgtgaccggattcctgttccacggcgccaatgccgatggcctgcgccgctgcgtggaacgggcgatgcgcaccttccgcctgcccggcctgctgcaggccatgcgccgcgccgccatgctgcggccgggtggctgggatgcggccggtcgcgcgtacctggccctgtaccagcagacctgccaggtggccgcatga

SEQ ID NO: 493262 - DNA, 429 bp, Stenotrophomonas maltophilia
atgagctacacccccgacaacgcccagctgctgaacgccatgcagaacgtcatggtgatctccaccaccgacctgcagggcaacatcacctacgccaatgacctgttctgcacgctcaccggcttcgcccgcgaggaactgatcggccagccgcacagcatcgtgcgccacccggacgtgcccaaggccgtctacaaggacatgtgggacaccatcaaggccggcaagacctggaccggcatcgtgcccaaccttggcaaaggcggcgtgctctacgtggtcgacaccaccgtgcagccgctgttcgacgccgacggcaacatcacctcgtacatcagcatccgccgcgtggtgaacgacctgatgcagaactacgacctggtcgagttcagcaaggaaaagttcgacgacttctacgaggccgcgtga

SEQ ID NO: 493263 - DNA, 1530 bp, Stenotrophomonas maltophilia
gtgaacgctctcccgaccagtacgcccttcagccgcctgctggtgggtttcgcgtccgagtcgggcaacgcccgcgccctggcccagcgcctgggcgcgggcctgcagctgcacgggccgcaggtactcccgttcaacgacatcgacgtggccagtctcggccaaggcgatgtgctgctggcaatctccagttcgttcggcgatggcgaaccgccggccaatggcgagcagttcttcgaaacactgcgccagaccccgacgctgcgcggcctgcgctatgcggtgttcggccttggtgacaccggctaccccagtttctgcggcttcaccaaggcgctggatgttgcactgagcgagcgccaggcccagccgctgctgcagcgggtggacgccgacctgggctacgagcagttcttccagcaatggcagccggtgctgggccaggtgctggagggtgacctcagcgctggccagcacctgcacctgcaggtcaccgcctatggcgaagacaatgcctttgccgcgcgcatcctcgaacgccgccgcttgaacagcagcgacccggccgcgtggcacctgcaactggacattgccggcagtggcatggcctatcgcgcgggcgacaccctgcacgtagtgcccgagaacgaccctgccctgctgcaggcattggccacctggtacggcgacaccaccgccgtggccgccctgcatgaccgcgagctgcgcctgctgagcaagggcgtgctgcgcgaactggcccggctgggcggtagtgaggcactgaagggcctgctgaaggtcagccagaagcgcgagctggacgcctacctgcacggcctggacctgctggacgtgctgcaggaccacgccacgccggacagcgtgccgcttgcccggctgcgcgaactgctgtcaccgcggctgccgcgtgcctattcgatcgcctcgcacccgtgcgacgaccagctgagcctgtgcgtgcgcgaagtgcgctacaccctgcgcggccgcgaacgcttcggcactgccaccggcagcctcctgcatggcggcgaccatgcccgtgtgtactgccgctccaaccccggcttccacctgcccgataccggcgaggcaccgctgctgctggtcggtaccggtaccggcatcgcacccttgatgggcctgctgcaggaactgcaggccaacgcctgcgaacgcgaagtgcacctggtgtttggcgagaagcaccgccagcacgactacctgtaccgtgaccagctgctggactggcgtacgcgtggcgtgctggccggcctgcataccgcgttctcgcgcgatggcgccgaaaagatctatgtgcagcatgtgctgcagcagcgcggcgatgaagtgcgcgatgtgctggcccgcggtgggcatctgtacctgtgcggcaacaagcgccatctggagggcgcggtgcgcgaggccatcgatgccatcggcggcgagggacgctgggacgcgctgcgcaatgaaggccgcacgcactgtgagctgtactga

SEQ ID NO: 493264 - DNA, 669 bp, Stenotrophomonas maltophilia
atgtggctttacctgcaggtgcagcgccgcctgcaggcggccggccaggatttcgtgttggacgtatcgctgcagtgcacgcaacgccaggtggtgctgttcgggccctcgggcgcgggcaagagcctgaccttgaaggcggtggccggcctgctgcggccgggccagggccatgtgcgcgtgcagggacagaccctgttcgatgcggccaccggtgtggatctgccgccgcagcgccgccggttgggctacgtgttccaggattacgcgctgttcccgcacctgagcgtgcgccagaacgtggcgttcgggctgcagaagggctggttgaatccgcgcgtgggtcagcgattcgatgcagtggagcagtggttgcacgccttccgcatcgacacggtgggcgatctgctgccatcacagatttccggcggacagcgccagcgtaccgcgctggcgcgcgcgctggtgacacagccgcaggcgctgctgctggatgaaccgttttccgcgctggaccatgatcttcgccatcatctgcgccaggagctggagaccgtgctggacaggaccggcattccgctgctgttgatcagccatgacccgcaggatgtggccatgttcggccagcaggtggcgcgcgtggtggatggccgcatggtcggcaattga

SEQ ID NO: 493265 - DNA, 255 bp, Stenotrophomonas maltophilia
atgccgcgccaggccagcggcaacgtgatgcggaagaacaccgccgcttcggacacacccagcgtgcgtgcggcctgctccagctgcccgtccacttcctcaaacgccgcgcgcgccggcttgaacaccagcggcaacgaagccaccgccgccgcgatcaccgccgcctgccaggtgaacaccaggttgatgccgaaccacgactgcagccacgcgccgatcgggccgttgcgaccgatcagcaccagcaggtaa

SEQ ID NO: 493266 - DNA, 744 bp, Stenotrophomonas maltophilia
atgaagcgagcggcattgttgtggctgggcctgctggccacggtaccggcctgggcggccgacctgacggtgtcggcggcttcgagcctgaccgagagcttccgcgagctgggcgcggcgtatgagagggcgcacccgggaaccaaggtcgatttcaacttcgccgcatccggcgtgctgctgcagcagatcagccgtggcgcaccggtggatgtgttcgcgtcggccgatgaaaccacgatggaccaggcccagcagcaggatctgctggcggccggtacccgcgaggtgttcgcggtgaatgcgctgtgggtggtggtgccgccgcaggccaaggccgcgccgcgtaccttgaaggatctggccggtgccggcgtgcagcgcatcgcactgggcaacccggacagcgtgccggtcggacgctatgccaagggcgcgctggaagcggcaggcctgtggccgtcggtgcagggcaagaccatcaccacgcagaacgtgcgccagtcgctggattacgtggcgcgcggcgaagtggacgccggcttcgtctatgccaccgatgcgcaggcaatgcctgatcgggtgcgccgcgccttcgcggtgccggtggcggggcgcattgcctatccgctggcggtgaccaaggccagcgcgcagcccgccgaagcaaagcgcttcaccaccttcgtgcgttcggcacagggccaggcgatcctggccaagcacgggttcggcaagccctga

SEQ ID NO: 493267 - DNA, 777 bp, Stenotrophomonas maltophilia
atgcctgtgaacccctccgctccctctgcgtcccggccggccacgcccaatccggcagcggccgatgacggagacgcgctgcacttctgcagcacctgtgcgttctccgacgcctgcatgtcgcagggctacgacaagaccgcgctgggcgagctgcatgtgctggtcgaccacgtcggcccgttccaggccggcgactacctgttccgtgccggcgatccgttcgactcgatcgccgcggtgcgtgccggcatggtcaagacgttcgtcgatgacagccagggcaacgagcaggtgctgggtttcagcctgccgggcgaggtgatcgggctcaatgccatccacggcgcgcgcttcccttgcaacgccgtggccctggacaccgtctacctgtgccggatctcgtttccgcgattgagcctgctggccacgcgcatgccggggttgcaggcgcggctgttcagcctgctcagcgccgagatcggcaaggtggccacgctggccgccaaccatcgcactgaggagcgcatggcggcgttcctgctggatctttccgagcgctatgcccggcgcggattctccgccacccgtttcaacctgagcatggcccgcaccgagatcgccaactacctgcggatggcgccggagacggtgagccgggtactgcgccgcttgagcgacgacggtgtgattgcggtgaaccaacgtgagatgctgttgctggacccggaccggctggcggaactggccgtagcccgggacgccggactggactga

SEQ ID NO: 493268 - DNA, 366 bp, Stenotrophomonas maltophilia
atgaaggtccagctgcaacagcaatcgatgcgcctgcgcgtggatgaagaagaactggcaggattgctggccggcgaatcagtggagaacctgacgcgctttggtggcagcggtggctggggcgtggcgctgtcgctgcatgccggcgatcaggcggtgctgctcgatggcgggacattctgccggttggtactgcctcgccaggccgttgagtcgctggcgggcaggctgccctgccgggatgggctgggcttcggtatcgcgttggatgacgacagcatgctgcagctgcagttcgacgtggacgtgcgcgacagcatgcggcagcgtggcccgcagcggcgttccgaacccgcgccagagtag

SEQ ID NO: 493269 - DNA, 567 bp, Stenotrophomonas maltophilia
atgaccatgcgcacgatcacgaacatgcccattgatggcatcgtgctggccggcggcctgtccagtcggatgggccgcgacaaggcgctgctgccctggcacggccgcacgctgctggaacacatgcgcggcctgctgctgcaggccggcgccgggagggtatgggtgagcggcgactacccagcttttggtggcatcccggaccgggtcgcacgctgcggcccactgggcggcctctacagtgtggcgatgcagatgccagacggccccgcctgggtggtgccggtcgatacgccgcgggtgacacccgcgctgttgcagcggctgcaggccgatcaagggcgtgcctgcacggtattcgacgatgaaccgttgccgatgcggttgcagatcgatgatcattgccgccgcgtgctgcaggccttgatcgatgatccgacggcgcgccgttcactgcgcgccctgcaggaacgcctgggcgtgacacggatgccactggcgccggaggatcaggcgttgctgctcaactgcaacaccccgtcggaatgggagtccatcacagcatga

SEQ ID NO: 493270 - DNA, 501 bp, Stenotrophomonas maltophilia
atgagcgagacgatcatcgccaaggtcgtggaccgcgcgcaggcggcaatcgatccggccgagggcatcgcggcggtttccgatccgggcttcggcggcatcgacgtgttcatcgggaaggtgcgcgacgtcaatgtgggccggcgagtgaccgggatcacctacgatctgttcgaaccgctggtgctgaacgaattcaagcggctggccgccgaggtcgaagccacgttcggtccgaagctgaaactgtatgtagcgcatgccaagggccggttgggcatcggcgatgtggcggtggtggtggccgccggcagcccgcaccgtgacgaagcgttccgggcctgccggcagttgattgaagtggtcaagcaccagtgcccgatctggaagcaggagcattacgaggacggcgacagcgcgtggagcgagggttgcagcctgtgccatgcggacggcgaacccggccatgaccatgcgcacgatcacgaacatgcccattga

SEQ ID NO: 493271 - DNA, 261 bp, Stenotrophomonas maltophilia
atgagacaggtgaatctgcaattgttcggtgcgttttccgatctggatgccagccgcgagatcgccgtggatgtagccggtggcaccgtggccgatctgcgccaggcgctgcgagagctgctgccgctgcgttggccgggtttccgcgcgggcctgctggactactcggcattcgccgatcagcaacgcgtgctgcgcgaccacgaggcgctgcccgacgatggccgggtggcgatcctgccgccggtgagcgggggctga

SEQ ID NO: 493272 - DNA, 1254 bp, Stenotrophomonas maltophilia
atgatcccctacagcgatgccttgcagcacctgctggacgcggccacgccgctgccggccgaacgcctgccgctgcacgaggccggcggccgtaccctggccagtgacatccacagcgggcagtcgttgccgccgttcgacaattcggcgatggacggcttcgcgctgcgcgccaacggtacggcgttcgaggccggtaccgaattcgcggtgcagggctggcaggcggccggcgatgccggtgccgaaggcggcgagggtacctgggaaatcatgaccggtgcgcgcatgccggttgggctggatacggtggtgccggtcgagaatgtggagatcctcgccagcgaggacggccgcccgacccgcattgccctgaagggcacggtgaagcccggccagaatgtgcgcctgcgtggcgaggatgtgagcgacggcgagcgcgtgctgcaggccgggcaggtgctggacgtcaacgcgcgcaccttgctgcatgcgatcggcgtgggcgaggtggcggtggtggcgcggccaaaggcagcggtgatcgccaccggcaaggagctggtgaccgaggcggcgcaggcgctggaatccgggcagatccgtgacagcaaccggccatacctggtcggccgccttcaggccgccggtgccgaggtggtctggcagggcacggtgggcgatgaggtggccgccttcaatgccgtactggatgcagcgctggacgcgggtgcgcagctgttgatcagcaccggcgcggtgtcggccggccgctacgatttcattcccgacgcgctgcgtggccgaggtgcgcgcatcgtgttccacaaggtggcgatccgtcctggcaagccgttgctgttcgcggtgctgcccaatggcgcgctgtacttcggcctgccgggcaacccggtgtcggctgcggtgggccagcgcttcttcgtcgagccggtgctgcgccgcctgctggggctggcaccggagcaggtgctgatgttgccgctgcaggccgacgtgcgcacgccgccgggcctgcgcttccatgcgcgggcccgggtggaagtggacgcgcagggccgcctgagtgcgcgcgtgctggctgggcaggagtcgttccgtttgatgtccatgctgcaggccaatgcctgggtggtgctggacggcgagggcggtctcgcccctgccggcacgccagtgcgtgtgcagggctggggtcatcaggaccctgtgcagctggcgagccaggagccgtga

SEQ ID NO: 493273 - DNA, 999 bp, Stenotrophomonas maltophilia
atgagtggggaattgaacgcggccttccacatggccgatgtgcgcaacaagcgcatcagccgccgccgtgcggtggcggtgggcgagctgcatgccggtccagtggcctatccgctgatcgtcgagcgccgcctgccaaagggcgatgcgctggtgatggccgagattgccggtctgcagggcgccaagatggcgtcgatgctgatgccgctgtgccatccgctgccgctggaactggtgcaggtgttctgcgcgccggtaccggaacggcaggcgatccgcgtgtggtgcgagtgcgccagcgaggcgcgcaccggcgtggagatggaggcactggccggcgtcaacgcggcgctgctgaccctgtacgacctgagcaagccggtggaaccggccctgcgcatcgaaggcatccgcctgctgttcaaggagggcggcaagcgcggtgtctggctgcacccggacggcatggacgaggccgagcgtgagcggttcaagccgcgtgcgccgaagggcctggaaggcgcggcctgcgcggtgatcacgctgagcgatcgcgccagcgaaggcacctatgaagatgtctccggcccgaccctggtgaccgggctgaagaagctggggggcgaggtggtggccgccgaggtactgcccgatggcatcgagccgttggcgggccgcctgcaggccttggccgccgagggcgtgcgcctgtgcctgtgtaccggtggtaccgggctgggcccgcgtgacctgaccccggaggcgctgcgttcgttgaatgcgcggccggtgcatggcctggcgcagatggtgcgggcactgagcgcacagcacacgccgatggcctggctgagccgcgccgaggtggtgcagctgggcaacatgctggtgtttgcattgccgggcagcccgaaggcggcggcgcagtgcctggacatcctggcgccggtactgggccacgccctggcgatggtcgagggggatggccacgcatga

SEQ ID NO: 493274 - DNA, 981 bp, Stenotrophomonas maltophilia
atgagccaactcaccgacagcttcggacgcagctttccgtacctgcgcttgtcgctcaccgaagcctgcaacttccggtgcagctactgcctgcccgacgggtaccaggccgatggccacccgcgtttcctgcaggtggaggagatcggccgcctggtgcgggcctttgcggcgctggggatgagcaagatccgcctgaccggtggcgagcccagcctgcgcagggatctggacgagatcatcgccaccgtggcggcggtgccgggcatccgcaaggtggccatcaccaccaatggcacgctgctgccgcggcgcctgccgggctggcaccgggccggcctgaccgcgctgaacgtgagcatggacagcctgcaacgcgagcgtttccacaccatcaccgggcacgaccgcctgccggagatccagcagggcctggcgctggcgcaggcgttgggcctgccggcgatcaagctcaacgcggtactgctgcggggcctgaacgacgacgagctgccgcagtggatggactacctgcgtgaccgccccttcagcgtgcgcttcatcgagctgatgcgcaccggcgacaacgaagcctatttccagcgctaccacctgcgcgccgacgtggtggtcgagcagctgctggccgcgggctggcaccagcgtccgcgcgcggccgacgccggcccggcgcgcgagttcggccaccccgaccatcgcggcagcatcggcatcatcgccccgtattcgcgtgacttctgcaagggctgcaaccgcctgcgggtgaccgccaagggcgacctgcggctgtgcctgttcggcgagttcggcgtaccgctgcgcccgctgctgcagcgcgatgaggaccacgacgcgctgctggcacgcatcaccacccagcttggcctgaaagcggccgggcatggactgcaccagggccagaccgggctgaccccgcacctggcctccatcggaggatga

SEQ ID NO: 493275 - DNA, 375 bp, Stenotrophomonas maltophilia
atgaacgaatcggacttcccgcatctgcacgcctaccgcagcaccgccggcgacgacggttcgccacaggctaagccaacagtggacaggaacaccttcattgccaatctccaccgcatcggctccggtgcggcggccgacggacaaccctggccggagcggcatcagctgcccgggcgctgcctggccctggccgacgccgattgcgcgttgactgggttgcgggtggtgctggaaatgctgctggcagccgaacgcacccggcagaacggcgaacccgggcagtacgtgggcgaccgcgtgatggaggggttggtcatggcctgccagtcgttgtgcgcccaggcggtagggcggttgcagcccgaagggtga

SEQ ID NO: 493276 - DNA, 480 bp, Stenotrophomonas maltophilia
atgatggtgaggatcctgacagcactacttctgattggagtcggacttggattctctggcggcgcatgggctgtaggaaagcggcccttcaagatgatccagttctgcgtgcatgaccaagagggcgtgaatcggttcaagcagaccctcagctctatcgccaaggacgaaggaatgcagttcttcgatggcagcgctgaattggatcgccagcttgccagggcaaaggtggacgtgcaacgccctgtcgtctacatcggagtgaagcgggaagatggctcgggactggaggcggggaacctcggattggatcgcttcgagatagctattggcttctctgaagggaagatgcccgccgaggcatggtcattctctttccgcgtcgaacgcgctttggcagatcgctggaatgtacacgcggttcccccgaacaagggggctgcgccgacggcgtgtcgggcgggaggcgatcctcgctga

SEQ ID NO: 493277 - DNA, 387 bp, Stenotrophomonas maltophilia
atgaaggatttcaacgcgctcgaatggtgtgatgccacgttgctggctatcaacatcgatagaaggaatccaggcgtatgcgatgaggtaaaggtccacgtgcgctggccggacggtcgggagtcaatcgtttgcttcccggaagcgtacgggtgctctgcgctcatgaacttcggcgtactgggggaggagggaatagagttcgccagggtcgacgatgacgagccgggactcgctgatcttcttgatcgttggaaggcggtcggctatccgctgtccggcctgaagtgttttcgtatcgagaccacctcgaccggtagcgtcattctgatctacgccaggacatggcggatcgagcatctgccgatggcgggtgcagtgccctga

SEQ ID NO: 493278 - DNA, 324 bp, Stenotrophomonas maltophilia
atgaaagacaaactgagagaaagagaggcgctgtcgccaactggcttctatgaccaatactatgcggagagtggcctggatcaggaaaccgtagtggagctgctggagcatgttgcagacgaacttcgtttgccctccgggaagctccgtcctggagatcgattttcgaaggaactgtcgcctggtgaagatcatggttgggactcggggtatggggtgttgatattcgagcttcaatcgctcgcaaaaaaacgtggtattgcagtcgatcggcgggtggattcgctcgacgactacattcgtatcatggcgggtatctattga

SEQ ID NO: 493279 - DNA, 441 bp, Stenotrophomonas maltophilia
atgtacgctcccaagctgctcccagtcgtgatgctgtcaatcgcactttctggttgcatggaagttgccagcaccgagtatgcagaccgcaatcaagccgtctcaagacaagcaatcggtgaatcgaaatggttgccttcatggttgcctgaggacgcagtcaacatacgcgagtcgcacgacatggacacaaatgaatcgtggctggttttccgcctgaccagcggggttcttgctttgcccgaagaatgtaggctggtgagcaggccggagatgtccgacgcgcgagtcatgcggagatttcctccgtttgcccgcaacgcgtggtcgcgagcatcaagctatggcggcaagttctatctgtgtccggagggaaatgctggccgctgggtcatgcgcgatgaagagctgggccttgtttacagcggaataaagttatag

SEQ ID NO: 493280 - DNA, 1020 bp, Stenotrophomonas maltophilia
atgaatgcggtgaagcagggcaatgccgtgctggaaagctacggttacaaccatcgcggcgagcgcgtgttgcgctccccggccgccggcgcggctcagatcaccttgtacgacgaggcggggcagtggctgggcaactactcggccacgggccaggcgcagcagcaggcgatctggctggacaactacccggtggcactgatcaacacgccggctaccggcgtgccggagctggcctacgtgcagccggatcatctgggcacgccgcgcgtggtgatcgatccggtacggaatgtctcgatctgggagtggagcaacaagagcgaagtgttcggcaaccagattccgagggctgacccggatggcgatggtgtggcgtttgggcttgcgctgcgcttcccgggccagcaggcgacggatgcgagtgggatgctctacaactaccagcgtgaatacgacccggtggtggggcggtattcgcagagtgatccaattgggcttggtggaggtgttagcacctatacctatgcaatcggcaatacaatttcgcacgttgatccactgggtttgaaagactcccagcctggagtgactgtgacagaaactggcgcatatacggtcgattggcgctattacgtgaataggacattggaagctcttggctttccgggggcatttgtcgcgggagccagcgacttcggcgggcagtatgccaatcaacggtcagccacacacgtggttggtgggtctcataacggatggggtggccaggataggtacttccactgcatggcgaactgcgaggctgcacagaagggtatgggcggatcagctgctgctcagtgcataagcaacgggcgcgagtggttcgatcaaagcatcaagggcgactctgcccctgactccgctgcggatcagttggcaaatcgcctcggacgatcatccggacaaatgagtcgtacggggagttgctcgcagatgtgcgggagctatcgtcccggtggaaacttcccctactga

SEQ ID NO: 493281 - DNA, 4686 bp, Stenotrophomonas maltophilia
atgttggaacgactgaagaccatttcgtgtgccgtgctggcgatcatcgccgttgcctgcttcgcccctgctgtggcgcatgcgcaggaaagcaagatcacctggcgcatttcacagcccggcggcgatgcgacccagtacaagacccagcaggcggcggtggccggcatcaagaacctgccggcgcccagccccttcccgccggagttccagttcggctggcagtacgtcgacaagatcaagtcgaaagtcgtggacttgaacggaaacacgtcgatcacctactggatgggaaggacgcagccctccgaccctgactggacttactacggcgcgggtgatggtggcttcctgtccgaagaggaagtgctggaagcgctcattgcagacttgcaggacatcaatccccagtgtcctggggaaactgctgtgccggaaggagaatggggcccaactgctccagggatggacggaatttcggaggtcagagagtaccgggtcaccggcatgctgggcagcaattcggcggagtctccgtgcgtgcccttcgacgcaggaacgacagggcttgctcgcatgcgacgcttgaactgcccgatccccttcacgcagtggtccaacacacacaacgcctgcgtcagcgaagaattcgttgcaaccattacctcgaagtcgcagaagtgcgacaaggacagcgcgggtccgagttgtccctcgacagaaaaaggtgaggaggcaaacaacgcgccttgcgacggcaccgtaggcaatccgtgcgacgtcaaaacgggcgagaaatacgaaatcgcgccgggcttcgatctgggctggatcgcgctgacgcgcttctatcactccggcatctcgacctcatccggtggcttcggttatggctggacccattcgctgggcgcccacttggcactggatggcgttgacagtgtgggcatcattgaaagtactggtttccagcgtgcattcaagaaggtcagccaagcctatgaggcggacgacgacagtggcgatcgtctggtccagaacggcaactggacactgtactcgaagggctccatctcgaccttcgacgcggacgggcgtctggccgccaagcgcttcgcggatggcacgtcgctgacctatatctacgacgacagcgaccgccttgcggccgttacccacagcagtggccgcacactggagttcgtctaccagtccaacgactatgaggcgctgatcagttcggtgctggtcgaaggcatttcgctcgccacctacacctacacaccgcagaaccaggtcgccacggtgacctatgcgggtgacggtgtgcgcacgtatcactacgagaaccaggacttcccccagcacctgacgggtatcaccgccgaggacggtcgccgctacagcacctttacctacgattccatcggtcgtgtgatctccagtcagcatgccggcggtgccgatggcgtgacactggcctacagccccaatggcggtgcggtggtgaccgacgcgctggggcggcagaccgactacaccctgacacccggcggcgatagcgctccgtcgcgcaaggtgaccggcctgacggattcgcagggaacggtcagccgaacctactacgaccagagtgtcgacttccgccggcgtctggatacctacaccgatcgccgcggcatccagaccaagcacacctatgcgcagggcaccgatccggtaagcggtcgtgccgtcagcatccatacggtgaccgaagcggtcggcttgcccgagcagcgtgtggcgaccacggcgcgcgacgtcgaaaccaatgcggtactgaccacccggatcggtagccgcgaaacccgcacggccttcaattcccgacgccagccgacggccaacacggtgaccgacaccgcttccggtcagacgcgcatcaccagctacacgtactgcgaagccgctgatgtggcagcggcaggcagctgcccggtggaggggctgctgaagagtgtggatggcccgcgcacggatgtggccgatgccgttacctatgcctattactcggcggatgatgcagggtgcgcgatcggaggcgcctgcacctatcgcaagggcgacctgcgcagcgtgaccaatgcgctgggccagacggtcgagactctggcctacgacgcgttcgggcggccgttgtcggtcaaggatgccaacggcgtggtcaccgactacacctaccatgcccgcggctggccaacctcggtcaccgtgcgtggcgcgaccactgccgagaatcgggtcacccagatcagctactggccgaccggccaggtgcaacagatcaccgagcccgacggcagcagcgtttcctatgtctacgatgcggcgctgcgcttgaccgatatcgaggacaacgtaggcaacacgattcactacacgctggacaacgccggcaaccgcctcaaggaggacacgctggataccggcggcaccctgcgccgtaccctggcacggacgttcaacacgctcggccagctgaccgcgctgaaggacgcaggcaatcacgccacaggcttcgcctacgatgccaacggaaacccgcagacgatcaccgacgcactgcagcgcgtgaccagccagcagtacgacccgctgaaccgcctggcgcagacgctgcaggacgtcggcggcgtggcggcggagatccgcagccagtacaacgcgctggaccaggtcacccaggtcaccgacccgaaaggcctgcatacgacctatgcctacaacgggtttggtgacctgaccgggcaggtcagcccggacagcggtgccagcagcttcaccgtggatgccgccggcaaccgcaagacggccaccgatgcacgcggcgtcaccgccacctatcactacgatgggctcaaccgcctgatcggcatcgcctatccgaaccccaatctggacgtgggctacagctatgacgtggcgcctgccgcctgtgccgccgacgagcgcttcgccaagggacggcttgggcaggtgctgcatgccaatggcagcacccagtactgccatgaccgcttcggccaggtcacccgcaaggtacagaccgtcaacggcgttgccagcacgctgcgctacgcctatagcaagtcgggccgcctgaccgcgttgacctaccccgacggcagcgtggctgactacgtgcgcgatacccagggccgcatcagccagatcggcctgacccgccccggccaggcgcgccagatcgtggtgaacaacgtgacctatgcggccttcggcccggcgaccggctggacctacggcaacggccgccagctgcagcgtccgctggatctggattaccgcccgcaggcggtgcatgacccggccgccggtggcctgtcgctgggctatggctacgatcccgtcggttcgatcaccgagctgaagaacggcacaggctcgacggtgctggccaagtacgcctatgacgcgctgggtcgcctgacccagacccaggacggcacgaccggcacgccgatcgaaacctatgcctatgacgccaccggcaatcgcaccgcgctgaccacctcggcaggcacggccagctacacctatcccgcaaccagccaccggctgaccgccgtggacggcgaagcgcgcgaccatgacgcggtgggcaacaccacccgcatcggcggcaagtcgttcatctacaacgatgccaaccgcatgaacgcggtgaagcagggcaatgccgtactggaaagctacacctacaatcatcgcggtgagcgcgtgctgcgtaccccggccggtggcgcagcgcagatcaccttgtacgacgaagcagggcagtggctgggcaactactcggccacaggccaggcggagcagcaggccatctggctggacaactacccggtggcgttgatcaacatgccggctaccggcgtgccggaacttgcctacgtgcagccggatcacctgggcacaccgcgcgtggtgatcgatccggcgcgcgatgtggcgatctgggagtggagcaacaagagcgaagtgttcggcaaccagattccgagtaccgacccggatggtgatggagtggcgttcgagctggcgctgcgcttcccgggccagcaggccacgaatgcgagtgggttgttctacaactatcagcgggaatacgacccggcggtggggcggtattcgcagagtgatcgcattggactcaggggcgggatcagcacatacggatacgttggcggaaattcacttagcttaatagacccgttggggttaaggaacgtgcacaagacagccgtcgcaattgggaatgcgatcaatgctgggcgcttacttgcttcgggtacgctgaggatcgctggaggacttggcatggagggggcagtagtgactgccgcaccgggctccgcaagtattgggctgggcgtctggaacatcactagtggccagaaggcgtgggctcgcgccgagcagcagtgggcggaggcagcctgtgaagacagtagcaactattcgaggggcgacgtcctgaagacatactcgggtttgttgccttggggaactgagtcagatgaccccggtgagcctttttggattgatattatggagaagcacgttaaggaggctgtccataagccaagggaattcttgcaggaagtcggaaccataggactatga

SEQ ID NO: 493282 - DNA, 822 bp, Stenotrophomonas maltophilia
atgaagagcagccgagtgacgatgtgggcgctggccgcggtgatggccgcggcgggcaccgcccacgcaggggaaatccaggtggatcgcggtgcctacgcgctgcaggccgaagagaccggggccggcccgatcaccgtggtctttgaatccggcttcgggcagggtgcgggtgcctggaaggaggtggttgcgggtctggggcgcgattaccacagcatcacctacgcccgcgcagggctcggcaagtccggcagcgacggtcaccccaagcgcatcgatgcgcatctggccgacctcacggccgtgatcgatacgctcgctcccggtcgccgcgttgtgctggtgggtcactcctatggcggcctgctggccacggagtttgcacgccgccatccggagcgcctgcagggcctggtgctggtggacccggccacgatgggtcagcgccatgcgttcaagcaggccgacagtgcccgcgtgcaggcagatgatgcccagctgcgggcgatgctgccgccagccatggccgccgactacgccgtgttgaccgaacagctggatgcacccggtgcggagaccccgcgcacgatgccggacgtaccggttgagctgctgactgcaacccagctggctgccgaacctctgttcttcgaagaaaccgcagcgggcaaggccctctggaaggcgcagcacgccctgctcttctcgggcttcacgcgtggctcgcaccgctacctggcgaccggccacaccctccagcgcgaggaccctgctgcggtggtggccgcgattcaatcggtctccggcacctcgaagtag

SEQ ID NO: 493283 - DNA, 867 bp, Stenotrophomonas maltophilia
atgctagtgatcggccgcactgacgaatttcgctacaatgacaaccaatcgctaaaaccggtcaatgtgagaatggctcgcatttcgctccccggctttgacctggaccctgacgagaccgatcgcccggcggttgccagccgcctgcaggtggccgagcacgacgcggaaattccggtgcatgagcaccgcaagggccagctcattcttgcgctgcatggggcggtgacctgcgaagtcgccaatgcgttgtggatcgtgccgccccagtgtggcgtctggattccgggcggcatgccgcacagcaaccgcgccaccgccaacgcgcgcctgtgctacctgttcgtcgagcccggcatcgtcgacctgccggtgcagtgcgtgacgctggcgatctcgccgatgctgcgcgagatgatcctgcacctggccgacgcgccgctggactatccgcatggcagccacaccgaccgactggcgcgggtgttgctggacgagctggtacagatgccggctgagcatctgtcgctgtcggtcagccatcacccgaaggtgcgtgcgctggctgcggcgctgtcggcggatccggcagaccgcagcaccatcggccagtgggccgtgcgcctggccctgggcgagcgtacgttgacccgcctcatcgaacgggaaacgggcttgtccttcgggcgctggcggcagcagctgcacctgctcatcgccattcgtgaactcgccgcgggcgcaccggtacaacgcgtttccgagacgctgggctatgagtcggtgacggccttcatcacgatgttcaagaaggcgcttggcctttccccagcgcggtacttcgcggtgcgcctgcgcgggcagtag

SEQ ID NO: 493284 - DNA, 1962 bp, Stenotrophomonas maltophilia
atgcacgcccccacccctgcccgtccccacgtgttccaggcatttgcccggttgaaaaacccttccctcagagccgatcaggaagcgctgctgttctcgctcaaatgcctgctcgccgcgtcgctggggctgtatgtctccctgcggatcggcctgaatcgcccattctgggtgatcgggacggtctatctggtgtcgcagcccctttccggggcaacactgagccgcggcctgttccgcctgctcggtaccgtgggcggggccatcgccaccgtcgcgctggtgccacattttgccaatgcccccctggtgctgagcgccgcgctcgccacctggatggcgctgtgcctgtacctggcaatgctcgaccgcacgccacgtgcgtacgcgttcctgctggccggctataccaccagcctgatcgggtttcctgcggtgatggtgccggcagacgtgttcaccatcgccatcacgcgggtgcaggaaatcgccatcggcatcctggccgcaacgctggtacatgcgctggtgctgccgcgccgggtctcgatgcgcgtgcacgcgcgggttgctgccgtgctggatgatgcggaacgatggacgcgcgacatgtgcgccggtgcatcggacacggtgctggcgacggaccgctcgaaagtggcggcggacctgctcgagctgcatgtgctgtcgatccacctgcccttcgacagcgcccacggcgtggcccaggtgcagatcctgcgcgccctgcatgaccggatgctggatgtactgatgctctccagcgcggtggaagattccctcgcacggctgcgctcatcacaggccagcgcgatggattcgtctggctggcgcgagctgatgcagaccggcctcgccgcgcaacaggccgagctcgacctcgcccacgccgattgccgcgtactgcaggcggagctgcacactgcccggcccgactggcgccggcatgtacctgcccgccttgcgcgacatgcgcagggtgcggtacttcaccgggatcatcggcttgccctgcgcagcgcgctgggcgcgttcgtcggcatcctgctgagctgcgtgttgtggatcgttaccggctggtcggacggcgccacggcggtgtccatcatcggcacggcgtgcgtgctgttcggcacgatcgaagcgcctgcgccgcatgtcatgcgctatctggtgggatcgttgatcggcgttggcgtcggcctgctctacggtctgctgatcttccccgcgctgtccgatgtcgtcggcctgattgccgcgctggcgcctgcgctgctgctgtgcggatcgttcctggcccggccgcccttcatcatggctgcgctgggcgtggtgctgacgtttccgctcatcgcgggactgggcgcgaccaatacggtcaacatcgtcggcgcactcaacaacagcgtagcgttgttcgtgggtacgacagtggcactgtgcagcatgcagctgttccagaccgccgatgcgggccgcaaccgcgcacggctggagcgttcgatccgtcgggatatcgcacgacacgccgccggacaaggtggcgtggcccgggcctggctcagccgcatgctggatcgaatcgggctgctcgctccccggttgcggggcggttccagtgccgcagacgacctgcgggcattgtttgcggacgtgcgtgcggtacgtgcatccaaccaactccgcgcactggccaagtgccaggacaacccgcaggtccgggtgcttcatgcggcgctgatcgaacgcgtcgccgcacatttcagggttcgtgcccacgcgccacgcagcgtcgacgcccatcttctggaactgctcgaccgcatgcgcgaggcagcagtggccagcagcggggatgatcgtgagcatctgtcgcacctgctctgcggattgcgccgcgacctgctggcgcctgctctcacccttcggcactga

SEQ ID NO: 493285 - DNA, 210 bp, Stenotrophomonas maltophilia
atgttttctgatctctccattgatggcgtgctgatccccggcctgctcgccgtggccgccgccgcgctggcgctgtcgatgctgacctcgcgcctgctcgccagtctcggtctgtaccgcctgttcgtcgcgcgaccactggtgggcctgtccctgttcgtgatcctggcggagctgatgatccggctctcgcccctgctcgagaaatga

SEQ ID NO: 493286 - DNA, 768 bp, Stenotrophomonas maltophilia
atggacgggtccgcgccgatgtggtgcgcgttgcgtcggacatggggggggctggtcacccaggtgctggtgcacgacaaccagcgggtcagcgccggacaactgctgctggtgctggatcagccacgcctggctgccgcgcttgagaaggccgacgcagcggtcagcagcgcacgcgcgacgctggcgctggcccgccgcgaatcgacgcgggacaacgcactgggcaacctggtcgcctcggagacacgcgaacgcaatgcggccaaggtcgacaccgagctggccgccctggcgcaggcacgggccgaacagcgcgttgcccagctcaacgtgcaacgcaccgaggtgcgcgcgagcaccgacggcatcgtcaccaacctggacctgcatgcgggcgattacctgcaaccgggcgcgcaggcgctggcgctgatcgacaccggcagcctgcgtatcgagggctacttcgaggaaaccaaactgggctgcatcaccgagggcgatgccgccgtggcgcggctgatgggcgacacccgcgatgtccgcggacacgtggagaccatcgccgccggcattgccgacgatcagcgctccaacacgcacaacctgctgcctgccgtagcgccgacctatacctgggtgaggctggcacagcgcatcccggtacgcatccgtatcgatgatgcgccgccggatacgcgcctgatcgtgggtcgcactgcgagtgtgaccatcacgccctcggcaccgggagcctgcaagtga

SEQ ID NO: 493287 - DNA, 1437 bp, Stenotrophomonas maltophilia
gtgagcgtgcggacagtacgtggtgggctgcttgccctgttgctgcccctgacggcctgcgtatccggccccgactatcacctgcctgcgaacgccgtcgcagcttcacaacaggctgcgcgggcgttcgtctcaggccaggacgcatcgttcagccacgacgcgccaccggatcgatggtggcacctgtatggcgacccccagcttgacgcctacgtacgcgaagcactggcggccaataccgacctgcgcgccgccgatgccaaccttcggcgcgccagcgctaccgtgctggagtatcgcgcgcgcggtgccgtgcaggccgacgtggatgcatcgggcacgctcacccatgccggtggctacacccaggcgtcggccgcgccgcagtcgtacgcgctgggccttcacctctcctatccactggatctcgcaggtggcatccgccgcggcatcgaagccgccaacgccgacgcggaggcggtcgctgcggcacgcgaccaggtccgcgtggtcgtcgctgcggccgtcacccgtgcctatctccaggtgtgcacaagcaatcacacgctcgctgcaacccggcaggtgctggcgatacagcgcgccacgctggaggcaacccgacgcctggctgcaggcggacgcggaacggacttcgatgtcagccgtgccggtgcagccgtcaatcgcagcgcggcggcgataccgcacctgctggcggaacggcaggccgcactgttcgaactggccgcactgatgggcagagtcccggcagactatcccaaggaagcagaagggtgcccacagccccctgagctgcagcaagcattgccggtcggtgacggctggcagctgctccagcggcgccctgacgtacgcgcagccgaacgcagcctggccgccgcgactgcaatgatcggtgtcgagacggcgggtctctatccgcagatcaccttgggcgcctcttcgggcgtggccggcacaccggcgcatctgctgtcggccgacggcttcggtgcgagcatcggtcccgtgctgtcatggcactggcccaaccgccgcgtagccaaggcccgcgtcgcagcggccggtgccaacgcagagaccgcgctcgcgtcctttgacggcgtcgtgctgctggcactgcggcagaccgagaccgcgctttctgcctgcacgcaggagcttgaacgcgagcgcagcctggcgcaggcgcgtggggatgcagcgcgggccgccgggcaggcgcagcagctgtaccgttacggcaggatcgatttcctcgatgtgctttcggcccaggccgcgctggcagatgcggagtccgcattggctgcatcgcgcgcggaccgggtcgaccgccagctgggtcttttcctgtcgttgggcggaggctgggccgcaacggattcggccgcgggcggtgcccggtga

SEQ ID NO: 493288 - DNA, 348 bp, Stenotrophomonas maltophilia
atgaagacaacacgtttgctggccatcgccttgaccaccgccaccgctttcgctgcggcccccgcctttgccgatccgccgcaccatgcccgcggcaacggcccgccgccgcatgcaggcggcccgcaccaccgcgatgcgccgccgccgggctggcagaagaaggcctggcgtcgtggcgagcgcctgccgtgggccgaagtggaccgccgctactgggtagacgattacgcgcgctatcacctgcgcgaaccgggccgcgaccggcgttgggtgcgccagtccgataacgagtacctgctggtggagatcgccaccgggctgatcatcgacgccctgcatcgctga

SEQ ID NO: 493289 - DNA, 315 bp, Stenotrophomonas maltophilia
atgcgtatccatcgtcctttcatcttcatcgcaagcctggccctggtggcgtggtgcacgttgatgggcgtactggtgctcatccatggcttcaaggagcagggcctgcgctgcggcaagctgtgctcactgcagatctccatccgcctgctttttggtgatcgaggattcgaattactggtggcgctggggctctttgccgcagcgctgatatgcgggtacatcgcgctgcgggagggcatgcatggcgggccgcagaggcgggcggggcgccgtgggcgcagacaccgccgaccgggacggccccggtcgtaa

SEQ ID NO: 493290 - DNA, 324 bp, Stenotrophomonas maltophilia
atgaggacactgatgtgggggctggtcgggctgttcgtggcgtacgtggccggttgctcggcgatctcggcgtggcattcccacgcgcttgcctcggtcccggtcggggcgagcagggtcgaggtactgcgggcgttggggccccctgacgtagtggagcacgccggtgttccctttacccgctatgccagccgtggatgcagtggtcgctgtgcgcaccgatggtggtatgagaaccggctgggactggataccgaagcctggtcggtggaactggatgcttccgatcgcgtgatcgcaacgtcgcgcctgacatcaccgtag

SEQ ID NO: 493291 - DNA, 447 bp, Stenotrophomonas maltophilia
atgatcagccctgaaggaatgatccggcgcgccatcgtcgtgacgctctgcagtgtgctgtgcgcctgcggcctggtgatggacagttcgttcgacacgctgcgcgaggcgcttgactccgacatggtgaacaagggatggattcccagctgggtgccccacgaggcgaccgacctgcgcgaggtacacgacctcgactcgaacaccagcgcgctggccttctccaagcctcctgcgataccactgcggctgcctgcggattgccaggcaaccacattcaacgacagtgatcctgttgcgttcgatcgatactggtggccgggcgacgggacgctcaagtcgtcgtatcgcgtctttcgctgcgcgcccgaatccggaaaatcagtcttcgtcgccatcaacaggaccgaagaccccgtgctcttctggcgaacctacgcgcggtga

SEQ ID NO: 493292 - DNA, 528 bp, Stenotrophomonas maltophilia
atgcccaacgcacgtgcacgcttcgtcgccctcgccctgttgctcccggcgtggctgccggcctacgccacgcagaatgcccccgccgacgtcaaggcgatcgaacaggtggtcgaagcgttccgcacctcgctgatcaacaaggacaggccgacctacatgggcctgttcttctctgacaaaccggaagacatcggctggcagttcgtttccgaggatgtgcgcctgcaggacatccgcaaggccaagcccgatgcgatcaaggcacggcagattcccgccaacaacttcatcgcgctgatcgacggggcgatggcctcgccgaagccgaaggaggagaagttctccaacacgaagatcgaaacggacggcgatgtggcctcggtctcgtttgactacagcttccacgacgatggggtgaagaccaactggggcaaggaaatgtggcagctggtccgcaccgagcagggctggaagatcttctcggtgatctactcgatccgcgattcacgcagcccgggcgattga

SEQ ID NO: 493293 - DNA, 675 bp, Stenotrophomonas maltophilia
atgacccgcctgctgatcatcgaagacaaccccgagctggttgccaacctgtatgccttctttgaaccgctcggctacgtgctggacgacgcgcgcgacggcgccagtggcctgcgccgggccacgcagcacgactacgacgccatcctgctggacctgatgctgccgcgcctggacggcatgacgctgtgccagaagctgcgccaggagttccagaacccggtgccgatcctgatgctgaccgcacgcgatccggtcgaagaccgcgtgcagggcctggccctgggcgcggatgactacctggtcaaaccgttctcgctgacggaactggatgcacggatcaaggccctcgtacgaagggcacaggggcgccaggtccagagcgtgctggcgtggaaggacctgcaggtggacacgcgctcgccgcaggcctggcggcaaggccgctgcattgcgctgacgcccacgtcgcacaagctgctgatgtgcctggtgcgtgcagctcccgccgtggtgcgcaagcaggagatggaatacctggtctggggcgacgagccaccggacagcggcgcgctgcgaacccacatccatgagctgcgcctgcaggtggaccgcagcttcgacaccgcgctgatcaccacggtgcacagcgtcggctggcgcatgcaggcgtga

SEQ ID NO: 493294 - DNA, 1254 bp, Stenotrophomonas maltophilia
gtgagccctgcctccctctaccgccgcctgagcctgcgcacccgcatcacgatctcgttcgtgctgttgatggccggtgccatgggcttcatcgtactggccgaacaggtcgactacgaccaggtccgggctgctgtcgtcgcacggacccagcacggcgaagtgcaaaggctgcaggccgcgctggatcgtggccaacgccccgccctgccaccagggacccagctgttcgatgcccaggacgtgccattcgtactgcgccagtacggcccgggctaccacggcgaagaggcgcccaacgagtggcacctgcgtgtgttcgacagtcgtggccaacgttactacctgctgcaggacgctgcaccctatggctatctggaacacctgatcaatgcctttgcggcactggtcatttcggtctgcgtactcggcgccttcctgatcggccgcagggtcgctacccacgtcatcgcgcccatcacacgattggccgatgcggtacaggacggccacaagccctttccctaccaggacgcacgcgacgagatcggcgtgctcgcgcgcgcctttgcccgtcatagtgacgagctcgaacggttcctgcatcgcgagcagtgcttcagcggcgatgccagccacgagctgcgcacgcccttggccatcatcggtggtgctgccgaaacgttggcctgccagcttccggccgacagccacctggttcccagcgcggcacgcatcctgcgtaccacccaggagatgcagcgccagctgacctgcctgctgctgctctcgcgtgcccccggcgccgtgccgcgcaacgcggtggccctgcgtccgctgctcgaatcctgcatggagcgctgccagccctggctttccggcaagccggtgaccgttgcgtttgatgcccggcgtgacgccgtgctggtcaccaacgcggatctggcgcacagcatcatctggaatctgctgcgcaatgcctgccagtacaccgaaagcggcgaagtgcggatcaccctccacgacaccgcactcatcgtcgctgacaccggacccggcctgccgtccagcatcgacccacggcagttccagcgcttcgtgcccggtggcgcgcacagcggcgaggggctggggttgtcgatcgtgcagcgcatcgtcgagcacctgggctggacgatgaccgtggaatcctccgggcaggggtgccggttcaccctgcgctggccccgccccccgcatctgacggattcctga

SEQ ID NO: 493295 - DNA, 387 bp, Stenotrophomonas maltophilia
atgcaacaccccaaggacagcggcaagtacccgcacggcaagaccggattgagccgcatcttccacaccctcatccattcgcgcgatggcttcatcgccacctttcgcggcgaggcggcgttccgccagttgttgctgctgcacgcgctgctgatggcggccgcgttcgtgctggacatcagcacggtcgagcgggcgctggtgctggcggtctgtttcatcagcctgctggtggaactgctcaactcggcgattgaagccgtggttgatcgcatctcgctggagcagcacccgctgtccaagaacgccaaggacatgggcagcgccgcgcagaccaccgcgttgttgatggtgggtgcggtgtggggcgtgatcctgctgggctag

SEQ ID NO: 493296 - DNA, 1809 bp, Stenotrophomonas maltophilia
gtgcgtcaatgcctccgtttcccgcggtcccatccaatcgttctggtctgggccgccgcactgttcttcgccacgattggaaaccttgccctctggaagacgctgtgggggctgatcgatctcaacagcctgcgcagcacgctgttcctggccagcctgccgccgctgctgttctgcctgttcaacctgctgctgacgccactgctggcactgccattcctgcgcaggccgctgctggtgctgctcgttgtcgtcagcgccgcgtgcagctacttcatgctgcactacaacgtgctgatcgaccgcagcatggtgcagaacgtgttcgagaccaatcaggccgaactgaacgcctatctgtcgctgccgctgctgctcacgctgctggcgctgggcgtgctccccgctgccgggctcgccctggtgcgcaccacccgcggggccggttcgatacgttcgctgctggtgtggccggccaacgtcctggcgtcgcttgtggtgctgctggtgatcggctttgcgttctacaaggactactcctcgctgctgcgcaacaaccgctacatccgcgaccaggtactgccgttgaacgtggtgcgccatacccacggctacctgaagagcctctacagcacccgccagcaaccgttgcgcccgatcggcacggacgcgcggcgcgttccgggcccgcgcccgaagctggtggtcatggtcgtcggcgagaccgcgcgttcacagaacgtccagctcaacggctacccacgcgcgaccaatccccggctctcgcgcaaggaaggcgtcatcagcttcagtgatgtttcctcatgcggaaccgcaacggcgatttcggtaccgtgcatgttctcgcagatgacccgccagcaatacgacgacgtccgcgcggcgaccgaggagaacgtgctcgacatcctgcagcgtaccggcgtcggcgtgctctggcgcaacaacaacaatggcggctgcaagggcgtgtgcgagcgcgtgccgaccgaggacatgcccgcactcaaggtggccggccagtgcgtcaacgccgacggcacctgctacgacgacgtgctgctgcatcagctcggcgcacgcatcgacgccatccatggcgatgccctggtcgtgctgcatcaactcggcagccatgggccgacctactttgaacggtatcccgcagcgtcgcgggccttcagcccgacctgcgacagcaaccagatccagcactgcagcaacgaggcactggtcaacacctatgacaacaccctggtgcataccgaccaggtgctggcggagaccatcgacctgttgcagggctattcggaccaccgcgacgttgcgctgttctatgtctccgaccatggtgagtcgctcggcgaacgcggcatgtaccttcacggcacgccctacttcatagccccgcgcgaacagacccaggtgccgatggtgatgtggttctcaacggagttcagccgcaacgcgggcctggacatggcctgcctgcgtgggaatgcgctgcaccgcgcctacagccacgacaatgtcttccattccctgctgggcctgttcggtgtcagcagcagcgtgtaccagcgcgatctggatgtcttcgccggctgccgggcgacgaccggcgcgccgctcgccaccgcgccggccaagcggcaccggctgatgccggtcaccgcccggaacgtggcgcgttactgtgcggccagggcgaaatccaggccggcgcataccgccgccacctgggcgtcgttgcattcctgcgggttggtgcgcgggctgtccgggtag

SEQ ID NO: 493297 - DNA, 921 bp, Stenotrophomonas maltophilia
atgactgttgcgcagttctacccgatcggcacccccggacagccctggggcgacgcggaacgcgcacagtggcgggcccgccagcagcgccagcgcagctaccacgacgatgtggtggccgcgcttgaacgcctggacgacagcttcgatgtgatccagtacggtcagctggactacgcgccggaccattacccgctgttcgccgtggtcaatcacgactggaacccggcgctgccgaccgcgctgatcaccggcggcgtgcacggctatgagaccagtggcgtgcatggcgccctgcagttcctggaacagcaggccgagcgctacctgggccggctgaacctgatcgtggcgccgtgcgtcagcccatggggctacgagcgcatccagcgctggaacccggatgccatcgacccgaaccgcagcttccgtgacggcggccagatcgaggaagccgccgcgctgatgcgctgggtggccgagcgcaagccgaacctgctggtgcacctggacctgcacgagaccaccgacagcgacctgcacgagttcgatccggcccgctgcgcccgcgacggcaagccgttcgagcgcgacacgattccggacggcttctacgtgatcggcaacagcgaggatccgcaggccgagttccagaaggccctgatcgccgccgtcgccccggtcacccatatcgccccggccgacgccgagggcaacctggtcggcctgccgttgcagtcgccgggcgtggtctggggcgaatcgcgttcgattggtgcctgcgccggcttcaccgatgcacgctttgccaccaccaccgaggtctacccggacagcccgcgcaccaacccgcaggaatgcaacgacgcccaggtggcggcggtatgcgccggcctggatttcgccctggccgcacagtaa

SEQ ID NO: 493298 - DNA, 654 bp, Stenotrophomonas maltophilia
atggcgaacgcagcgcagccggtcctgggtggaccggagttcctccgcctgctcgcccgtctcagcgacggcgcgatgccggccaccagtcccgccctgaccgatcgcctcggccagtgggtggactggagccgcgccgtggccctgtccggggcgctcggcggacgcctgcccgagcccgatgaagccgccgaagcgctcgaggatgtgctggccgactgcgcgcaggcgcacgccagcctgctggcctcgatcagtgaggatgccgaagccgagcgcctgctggacctggccgaagccgccgctgtacccaacttcgcctcgctgcgccagcgctatcgggtgctgcagcaggccatccagaccgccaccgggcgcctgcgcggccgcctgcgcgaccagctggtgcaggtttcgcccgagctggcgcggctggccgaggtcgatgcggtgatggaacagacccttaccccgcgcgagcacagcctgctggccacggcgccggcggtgctcggcgcccgttttgaacgcgtgcacggccagcccggctggcgcgcggccttccgccatgacatgcgcaccctgctgctcgccgagctgcagctgcgcttccacccgatcgaagggctgcaagacgccctgcgctcccactga

SEQ ID NO: 493299 - DNA, 2265 bp, Stenotrophomonas maltophilia
atgtccagaactgctttccatgtcgttgttttccttgtcggcctgctggccgtgtgctggatcggcattggctacgtttcggtgcatccgctgggtgcagcggtggcggcgatcatcgcggcctgctacatcgccggcggcgtggagctgtaccgctaccgccaagccagcaacggcctgcgcagcgcgctgaacgacctgtccagcgcgaaggaaagcctcgccccctggctggagcgcgtgccggcgggcctgcgcaacgccgtgcgcctgcgcgtggaaggcgagcgcaccgccctgcccgcaccgatgctgaccccgtacctggttggcctgctggtgctgctgggcatgctcggcaccctgctgggcatgatggacacgctgcgtggcaccggcctggcgctgcagagtgcgaccgacatggccgcgatccgcggctcgctggcctcgccggtgcagggcctggcggtggcattcggtacctcgatcgccggtgtggccagctcggccatgctcggcctgctggcggcactgctgcgtcgtgaccgcctgcaggccgtgcagcagctggaccgcgccattgccggcgacctgcatccgtactcgcaggcctggcagcgcgccgaatcgctgcgcctgctgcaggcacagtctgcggcgctgccggcgctggtcgaccgcctgcaggcgatgaccagcacttttgaacagcacagtgcggccgccaatgagcgcctgctggccggccaggccgagttcctgacccagagccaggccctgcaggaacgcctggccgtctcgctgcagcagtcgctgcgcgaaggggccgaagccagcgccgccgccatcggtggtgcgctgcagccgatggccgaaaccaccctggctggcctggcccatcacggcgaagcactgcatgcccgcgtcgagcaggccgtgcagcagcagctggccggcctgagcgagggtttcgagcgcagccgcgtcgccaccgaggccagctgggccagggtggtgagcgagcagacccaggcacaacaggcgctggtcagtgatctgcgccagcacctgcaggccttcagcgatggccaggccacgcatgccgaagcgctggtcacacgtatcggcgagcgcctgcaggccgatgcacaggacaatgcggaggccttgcgtgctgccgccgaacagcagcaggcactgaacagcgcgctggtcgaacgccagcagcaggcgttgatcgtcgccagcgagcatctggacgcgcgtgcgcaggcgctgctgcaggcactggagcagcagcacagcgccagccagtcgctgctgcaggaccacgaactgcaacgttcgcagcagtggcaggccgcccaggccgccgccgccaccgcgcacgccgagctgcaggccagcctggacagccgcgagcagcaacgccaggcgcgctgggacgcggccagcgccgagttgcagcaggcccacgccgccctgcaggcgcagctgcaggccggcgacgaacagcgcctgcagcgctggagcgatgctctgcagcacgtttccaccgagctggccgaacgcctgcaggccaatggcgaacgcctggccgcgcagcagcagcgcgtctgcgacacgctggcggagaccgcacagcagatcggtgaaaacggtcgcgcgcaggccagcgccacgctggccgaagtgtctaccctgctgcagaccgccgcggccgctccgaaggctgctgccgacgtcatcaacgagctgcgcagcacgctgtccgagagcctggtgcgtgacaacgcgatgctggaagagcgcggccgcctgctggccaccgtgcagaccctgctggatgcgatcaatcacgcttcgcacgagcagcgcaccgctgtggacgcactggtcggtggctcggccgagctgctggagcgcgttggcaatcgcttcaccgaccatatcgccgcagagaccggcaagctggatggcattgccgcagcgctcaacggcagcgctgccgaagtgggccagctggccggcacgttcggcgaagcggtcgcgcagttcggcagtgccgccaccgagttgtccggccgcctggaacagatcggcggcgcactggatgcctcgctggcccgcagcgacgagcagctggcctactacgtagcccaggcgcgcgaggtggtcgacctcagcctgctgtcgcagaagcaggtgatggaagaactgcagcagctggccgcgcgccgcggcaaggccggcagcgcatga

SEQ ID NO: 493300 - DNA, 639 bp, Stenotrophomonas maltophilia
atgagcgacgagctggaggtcgacggcggttcgcatgccccgatctgggcagccttcggcgacctgatgtcggtgctgctgggcgcgttcgtgctcatactggtcggtgtggtcgccgtgcagctggagctgtcgcagcgactggaccaggaagtgaaacagcgccaggccgaagccaagcgcctgcagacgctggagcaagcgttggctggaccgctggcggccggtcgcgtgacgctggtggatggccgcatcggcatcagcggcagcgtgttgttcgcgctgaactccgaccagctgcagccggaaggccaggagctgctgcgcagcctggccgcaccgctggccggctacctgggcagccgcgaagagatcctgatgatcagcggcttcaccgatgacgcgccggtacgcgaaggcaaccggcgtttcgccgacaactgggaactgtcggcgcagcgctcgctgaccgtgacccgcaccctgatcgccgatggcgtacccgccgacgccgtgttcgctgccgcgttcggcagcgagcagccggtcagttccaatgccaacgaggaaggccgcgcacgcaaccgtcgcgtagagatcgcgccgattcccaagcccaaggccccggatgccaagtaa

SEQ ID NO: 493301 - DNA, 384 bp, Stenotrophomonas maltophilia
atgccaagtaagccgccagcgctcgaaggcctgcgcgcactggtgcgcgaccttgatgcagggtcgcgctcgctgccgcattacccgcaggtgccgatgctgcagcaggtgcagcgcgagtggtcggagctgcgcagcgaactgcaggtgcgccgctccctgcgcaccgaggccccggctgacggcggcccgctgaactcggcggtgctggtgcagcgcatgctggacacgatgcaggccaccagccccggctacctgcgccacttcatcgactacgtggacaccttgtcctggctgcaggcactgcaggatggcgccgccagcggtgcggatagcgcaaagccgaagcgcacgcgcaagccgcgccagacgccgaaggagtag

SEQ ID NO: 493302 - DNA, 759 bp, Stenotrophomonas maltophilia
atgcaattgaccggttttgatggtcgtgtggcgctggtgaccggcgctgccggcggcatcggcgaggcactggtacggttgctggccgcggccggttgcaccgtggtggcgaccgatcgcgaggcacccatgttcgcggatgcacgtgtgcaggcgtttgctcttgacgtgaccgacagtgcggccgtcgacgccttggtggatcgggtcgagtccagcatcgggccgatcatgctggccgccagcgtggccggtgtgctgcatgtgggcggcgtgaccgagaccggcgatgacgactggcgtcgggtgttcgcggtcaatgccgacggtgtattccatgttgggcgcgcgctggcgcgggtgatgtccgcgcgccggcagggcgcgatcgttaccgtcagctcgaacgctgccggcgtgccgcgacacgggatggccgcctatgcggcatccaaggccgccgccaccatgttcacccgctgcctcgggctggagctggcgccgctgggaatccgctgcaacatcgtcgccccgggatcgacgttgaccccgatgcagaccggcatgtggcgggacgagcacggtgccgagcgggtgatcgccggcagcctggagacctacaaggccggcattccactgcgcaagctggccacccccgaggacatcgcgcactcggtgatgttcctgctctcggaacaggccgggcacgtggcgatgagcgacctgtacgtggacggcggcgccaccctgcgcggctga

SEQ ID NO: 493303 - DNA, 3891 bp, Stenotrophomonas maltophilia
atgaacgccgctgcgctggccacaccggtggcattgaccgaggcccaggccggactgtggttcgcacagcggctggcaccggacaatccgtcattcaataccgcgcacgcggtgtggatcgacggcccgttggacgtggccgcgttcattgcagcggcagaccaggctgcaggcgaggcccaggccttcgcattgcgctttgccgaaggggccgatggccagccgctgcagtggcatgacccggcacacgtgccgctgctttcggtgcgcgatgtttccaccgcggcggatcccgccgctgcggcacgcaacctgatgcacaccgaccgtctgagcccggtcgatcccacccgtgaccggatcagtcagcaggtgttgtttgacctgggcgggcagcgctgggtctggtacctgcgcgtgcatcatctggccgccgatggctacggcatggcgctgttcaccgatcgcgtgtgcgcgttgtacgccggccgcatgggtgagccactgccggggctggcgggcgtgctggccgatgatgccgcttatcgtgccgatccgcgccgcgcgctggccgggcagtggtggcgtgagcacatgaagggcgcaccggcaggcgtgggcctggccggtacgctcgcggccagtgacgacgcgctgcgctgggtgcagccgctcgatgcggccttccgtgagcagctgctgcaggcctcggtgcgttggctgcagccctggccggatgtgctggccgcgttgtcggccgagtacttgcggcggatgagcgccgccgatgaagtggtgctgggcgtgccctacatggggcggctcggcaacgcgtcggcgcgggtgccggcgatggtgatgaatgtgttgccgctgcgcgtggcggccggcgagggcagcgtcgaggccttcacccgcggcctgggccggcagctcagccagggtcgcaagcatggccgttaccgcagtgagcagctgcgccgggacctggggctggtcggcgcgcagcagcgcctgcacggtccgctggtgaatgtgcagccgttctacaagccgctggcgctggccggcgcgcaggcaacgctggaggtgctgtgcaccgggccggtggatgatctgacactgggcttccgtggcgatggccagcaccttctcgatctggagatcgaggccaatcccgcgctgtacagtcgcgaggatgtcggggcgcatgcagcgcggttgctgcatttcgtgtcggcagcattgcaggctgacgatatcgcagccgtgcctttggcgacgcttgaggaggcgcagcaggtgctgcacggtttcaatgccaccgcgcatgcgcttcccgagactaccctggttgaactgctgcagcagggcatggatcgggatccgcacgcgccggcgctggtgttcggcgacactacgctcgactatgcaacgctggaagcacgcagttttgcgcttgccgcacaactgcgcggcatgggcgtcggcccgggcagcgtagtcgcggtggcattgccgcgctcgctggaactggtgctcgcgctggtcgcggtgctgcgcgcaggcgcggcctatcttccgctggaccttgcccatcctgacgagcggttggcacgtattcttgcgtcggcgcagccggtgtgcgtactggctgcgccagacgtatcggtgcgcatggccggtgtgccggtgctcgcgccggagcagtggaccgcgctgagttttgcggcgccatgggcggatcctgcgcccagcgatgccgcctatgtgatctatacctccggttcgaccggcgagcccaagggcgtggtcgtcgaacaccgcgcgatcgtcaatcgcctgctgtggatgcgcgagcactacggcatcggcgccgatgaccgcgtgctgcagaagactccggccaccttcgatgtctcggtctgggaattcttcctgccgctgctgtgcggggcaacgctggtggttgccaggcccgatgcgcatcgcgatcccactgaactggcgcgcttgatccggggccatggcatcaccacggcgcatttcgtgccgtcgatgctcgacgccttcctcgctgcgccggcttcggcagggctgcagctgcgccgcgtattcaccagtggcgaggcgctggacgctgcgttgcgcgaccgcttccatgcgcgcgtgcgcgcagaactgcacaacctgtacggcccgaccgaggccgcagtggatgtcagctattggccggcgtcagcgcaggatcgctcgcggccggtgccgatcggcttcccggtctggaacacccgcctgtacgtgctggacgcccggatgcaggcggtgccggtcggtgtggccggtgacctgtacctgggcggcgtgcagctggcacgcggctatctcggtcgcgacgatctgaccgccgaacgcttccttgccgatcctttcctggcgggcgagcgcatctaccgcaccggcgacgtggcgcgctggcgccgcgatggtgcggtggagtacctgggccgcagcgaccaccaggtgaaactgcgcggcctgcgcatcgagctgggcgagatcgaggcggcactgcgcgagctgcctggcatggagcgggtggaagtgctgctgcgccaggatgctcccggcgatgcgcgtctggtggcctatgttccagcggcgcatgccgacgccgtgacgctgcgcagccacctcgccacgcgtgtgccggactacatggtgccctcggccatcgttggtgtggaccactggccggtgaccgccaacggcaagctcgaccgcaacgcgttgccgaagccaccgcaacgtgaagttgccggcttggcgccgcgcacgccgttggaacaggagctggcgttgctgttcgcacaggcgcttgggcgtgaggcgccggtggcggtggatgcggacttcttcagtctcggcggtgactcgctgtcggcggtgcacctgctgctggcgatcgagcagcgctggcgctgcgatctgggtttgggcgccttgtttgcccagcccaccgtggccgcgctggcggttcgtattgccgcgccacccgcgctggccgatcacgcgctggggccggtgatcgcgctggccgcaaccgacgctgccgggcccacgccgctgttcgtgctgcacccggccggtggcatcgcctggaactaccgcacgctcgcccgggcactgcaaccagcccgcccggtgtatggcctgcagtcgccggcactggacgcgcggctgccactgccgagcagcatcgaggcgatggccaacgactacgtacagcgcgtggtcgcactgcagccgaaggggccggtgcatctgctgggctggtcggtgggcggcatcctggcccaggcgatggcggtgcggctgcatgagatcggccgcgacgttggagagctggtgctgctggacgcctatcccagcgagtgctggcgggccgagcctgaaccggacgccgtcgccgcactgcgggcactactggcgattgccggccatgacccggatgcgcatccggaactggacagtcgtgaacgcatactcgcgttcctgcgtcgcggcggtagtgcactgggcagcctgccggatgtggtgcttgacggcgtggtgcgcgcggtgaccggtaccaatcggctgatccgcgagcacatccaccaaccattcgacggcacgctggtgcacgtccgcgcgggccgggatcaccaggcgcggccacagctgcagtcggcgttgtggcggacccacgcgcgcaaggtgcaggcactggaactgccgttcctgcacgccgaactgaccggccgcgatgcggtggcgcagctggcaccgtggttgtcggcgcggctgcgccactgggacgagcaacaggagaccgcaacatgcaattga

SEQ ID NO: 493304 - DNA, 258 bp, Stenotrophomonas maltophilia
atggccgccacgggtgacgtgctggatctggagaggatgcgtgccgacgtggcgcgcgtgctggaatgtgctccggccgagatcggtgacgacgacaacctgatcgacctggacctggactcgatgcgcatgctcggcctggtcctggcctggggcaacaccggcctgcccattgagttctcgcagctggccgagcacaccacgctgcgccagtggtgggctgtggtgcagcaactgcaggccgcgcagaacgcatga

SEQ ID NO: 493305 - DNA, 633 bp, Stenotrophomonas maltophilia
atggcgctgccccgtatcaccgattaccccttgccgactgccgccgaactgccgcaggcgcgcggcccgtggcgcccccagcgcgatcgtgtcgcgctgctggtgcacgacatgcagcgctatttcctggccgcattcgacgccggcaacgcaccgctgcggccggcagtggacaacatcgcacggctgctggcgcattgccgcgcgcacggcattccggtgttctacaccgcccagcatggcgaccaggaccgccgtgaccgtggcctgcaggccgacctgtggggaccaggcatgcgtcgcagcgccgaccatgaaccaatcatcgaggcactggcaccgcagcctggcgagcacgtgctggtgaagcaccgctacagcgcgttccagcgcagcaacctggagacgctgatgcgggtgcgtggacgcgaccagctgctggtcactggcgtgtatgcgcatataggctgcacggccaccgtggtcgaagccttccagcgcgacatcgaggcgttcatcgcggccgatgcggtagcggatttctcgcgtgccgaccacgatcaggccctgcactggattgcccgcacctgtggcgtaccgatgaccaccgaccagttgctggaggtgctgtga

SEQ ID NO: 493306 - DNA, 1653 bp, Stenotrophomonas maltophilia
atgaacatgcccactgtttcttcccgcctgccactgcagcaggcatggcccgatgcgctggtggcgcgctatcgcgaggcgggctactggcgcggcgagaccttcccggcgttcctgcgtgagcgtgcggaacgctacgctgatgacatcgccgtggtcgctggcgatgtgcgcctgagctacgcgcagctgtggcacgaggccggtcgcatcggtgccggactgctggcactcggcctgcaacccggtgagcgggtgctggtacagctgggcaacaccgccgggttcatcgccaccgtatgcgggctgttccgcgccggcctggtgccggtgtacgcgctgccggcgcaccgcatcaccgagctggtgcacttcgccaacaaggccgaagccagtgcctacatcactgccgacctgcacgatggctttgatcatcgcgggctggcgcgggcgctgcaggccgaggtgccggcgctgcgccacgtggtcatcgatggcgatgcagcagagttcaccgcgctcgaggcgctgcagggagaccgcaaccagctgccggccgacccggacccgcagtcggtggcgttcctgcagatctccggtggcagcaccgggctgtccaagctgattccacgcacccacgacgactacatctactcgttccgtgccagcaatgacctctgcggcatcgaccgcgacagcgtgtatctggtcgcgctgccggccgcgcacaacttccccatgagctcgcccggtttcttcggcgcgctgtatgccggtgcccgcgtggtgctcagccccggtccggggccggacgcggccttcccgctgatcgcgcgcgagcaagtgacctgctgtgggctggtgccgccgctggcgctgttgtgggcacaggccgccgccaccagcaagcacgacctgtccagcctgcaggtactgcaggtaggcggggccaaactggtgccggaagccgcacggcgggtgattgacggcctgggctgcaccctgcagcaggtgttcggcatggccgaaggcctggtgaactacacacggctggatgatccggaagaactgatcgtagcctgccagggccggccgatcagcccggacgacgaggtgcgcgtggtcgatgaccatgaccagccggtgccggaaggcgaggtagggcatctgctgacccgcggcccttacaccatacgtggctaccacaacgatgcggtggccaatgcgcgttcgttcaccgacgacggcttctaccgcaccggcgaccgcgtgcagcagctgcccggaggctacctggtggtgcagggccgtgccggtgaccacatcaaccgggcgggcgagaaaatctccgccgaggagatcgaagatcaccttctggcccaccccggcgtgttcgacgccgccgtggtctccattcctgacgagtatctcggggagcgcagctgcgcgttcgtgatccagcagggtgagccgatcaaggccccggcactgaaggcctggatgcgcgggcgcggcctggcggcgttcaaggtgcccgaccaggtcgtgttcgtcgacagtttcgataccaccgcggtcggcaagatcagccgccgcgaactgcgcgcgcagttgcgtgcgcgtcatctgcaacagacaggaggaacgcgctga

SEQ ID NO: 493307 - DNA, 1194 bp, Stenotrophomonas maltophilia
atgaacgattccctgatgcagggcgcgtggccggaggctgcgcccgcgccgctggagagcactgacgacgcgtcgctgttcctgctgcagcatgcaggccagcatgtgcacgcacgcggttgccgcctcgcgctgccgggtggcacgctggcaaccctggcggagcgcgttgcggccttcttcgcccagcagcgtggcggtccgggcctgctggtcggtgcggtgccattcgaaccgcgtgccgacgacgcgttgtaccagcccgagcgcctgctgccggccctgccgttgcagccacgggcggcgccggcgctgcagggcccgctgcaggcggagcccgcagcgcaggactatgcagctgcggttgccgcggcagtgaaggcgctgcgcgcgcccgaccaggacctgcacaaggtggtgctggcgcgcagcctgctggcgcacagccgccatgcgctgtctccggaggtgctgctggcgcggttgggcgcggatccctcggtggcgacctatgcggtgccgcttccggttgaaccggggcacgcaccggcctggctggtcggcgcaacaccggagctgctgctgcgcaagcgtggcgccgagctgttgtcgcacccgctggccgggtccgcgcgccgcagtgccgatgccgccgaggacgagcgcgccgcgcaggcgctgctggcttcgaacaaggaccatgacgagcaccgccacgtggtcgaggccatcatcgagggcctggcgccgtactgcagccacatcgatgcgcagccgcgcccggtgctgcatgccaccgccagcatgtggcatctcggcacccgcatccacgccaccctgaaggatccgaagacatcggcggccgagctgctggcgcagttgcatccaacgccggcggtctgcggtacaccccggctggcggcactgcagcgtatccgcgagcttgagccggcgccgcgtggcttctatgccggtgcggtcggctggctggatgcgcaaggggatggtgactggtatgtggcgatccgctgcgcacgcctgcagggcacgcagctgcgcctgtacgccggcgccggcatcgttgcccagtcgcagcccgaggccgaggtcgccgaaaccgcggcgaagtttgccgccctgttgaacgcgttgggcgtccacgacgccgcgcctgtcatcgagcctgctgcatga

SEQ ID NO: 493308 - DNA, 1191 bp, Stenotrophomonas maltophilia
atgcacgcacgtcccgtcgttcccggcttgccggcgctggtagtggccgccctgatcggcaccatggcgatgatgtccttcgtcgtcgtgatcggcccggtggtccgcatgctcgggctgtccgagtggcatgccggcctgtcggtcaccgccgcaggcgtgttgtggatgctggccgcgcgcccctggggccagctcagcgaccgcatcggccgcaagcgcgtgctgatgctggcgatgagcgcctacaccgtggtctacatcgcgctggcggtgttcatcgacgttgccctgcaggcggtgccgccggtactggtatcggtgctggtgctggtcggtgcgcgaggcctgatcggcctgttctacgcggcggtgccgcctaccgcagccgcgctcatcgccgacaaggcaccgaccggccaacgtgcgaaattcctcgcccgactgggcagcgccaatgcgctgggcatggtgctcgggccggccgctgccggctggcttgcctataccaacctttcgctggcgctgtacgtggccgcgttgctgccgctgctggcactggcattgctggcttggcggctgccggctacaccgccggtggttggcgcgtccgcacagcgctgcgcgccgatgagccgcctcgacccgcgcctgccgcagctggcggcgctcatcgccatggtctcggtgaccatcgcgcaggtgacggtgggctttttcgcgattgatcgcctgggcctggatgctgccgctggtgcacgcatggccggcatcgcgctgaccgcggtcggcatcggcctgatcctggcgcaggcgctggtgatgaagctggaggtgcatccgcgccgctggatcatcctcggcgcgctgatttccggcattggctttgcttcggtggcgggcgtgcagcagggctggcagttgccggcggcatacgcgctggccgcgttcggcatgggcttcgtattcccctcgttccaggcgctggccgccgacgcggtggaagcgcacgagcagggtgccgcggcgggcacggtcgctgccgcgcaggggctgggcatggtggccgggccgatgctcggcacgctgttgtatcgcggcgggcccagcctgccatatctgctggtcggcgcgctgctgctgttgctgtgcgcgctggctgcagcgcatcggatgaaggagaccccatga

SEQ ID NO: 493309 - DNA, 312 bp, Stenotrophomonas maltophilia
atgcacccgagcggacgcctgttcgccgcggtcgctttcatcgaggccgtgacctgggccggccttctcatcggcatgtggatgaagtacggccccatggccaacgtggcgctggtgaagctgttcggacccctgcacggcgtggcgttcctgctctatgtggcggtgacgctgttcgcggcgctgcgcctgcgctggccgtggtgggccagtgcgctggcgctactggcagccatcccgccgctggtgacgctgccactggaatggtggttcaagcgccgtggcctgttgggcctgcgcggggtgcgctga

SEQ ID NO: 493310 - DNA, 936 bp, Stenotrophomonas maltophilia
atgagtgaattcaatcccgcctacgcttcgttgtttccgcaacagggactgagcctgggcctgatgacgcccgttgcggcgcatgggctgggcgatccgggcgcggcgcggcgcattgcgcggctggccgacgatcttggtttcgccgcgttgtgggcgcgcgatgtcccgttgatggtgccgcagggtccggacgcgacagcaagcgcgctggacgatcccttcctgtggctgggcatgctggccgccgcgaccgggcgcatcgtggtcggtaccgccgccatcgtgctgccgttacgccagccgttgcaggtggcgaagtcggcactgagtctggaccggatcagtgacgggcggttcgtgctgggcctgggttcgggcgaccgcccggaagagttcgccgccttcggtgaggacctggagggcagggcggcaaccttccgtgagcgctggacgttgctgcgcgcggcattgtcaccggaggccgatgcgcggaccgccgtactgcaggccacgggtggcttcgacgtgctgccggcgccggcaacccgcatcccgatgctggtggtgggtaccgcacggcagagcctgcagtggatcgcgcgcgaggccgaaggctgggccacctatcatcgtgaggaggccgcgcaggaggggcgcatcggcctgtggcagcaggcgctggtgcagcgcggtgggccgggcaagccattcgtgcagtcgatgcttctggatctgcaggcagatccgcaggcgccagccgagccgctgccgctgggcctgaaggtcggccgcgatggcctgcgtgactatctgctgcgcgtgcatgggcagggcgtggcgcacgtgatgttcaatctggtcgacaacgggcggccgatggacgcggtgttgcgtgagatcggggagcacgtcctgccatactcgctgcggtag

SEQ ID NO: 493311 - DNA, 450 bp, Stenotrophomonas maltophilia
atgccgaggatccgccccgcccacatcgatgacctgcccgcgatcagcgcggtatgcctggccgcattcactgcggccgtcgcgccctcgctcagcgcggccggcattgctacgttcggcagtgtcgccgccgccgatgcgttcgctgcacgcctgcagggtgacaaccacatcctggtggccgagcaggacggccgcatcctcggcgtggtagagctgaaggaaggccgccacctggcgatgctgttcgtcgatcccgcctgccagggccagggcatcggccatgccctgttcgaagccgtgctgccgcacctgcgcacaccggtgctgaccgtgcgcgcctcgctcaacgcagtgcctacctacctgcgctatggcttcgtgctggacggtgatgtcggcgagttcaacgggctggtgtaccagcagatggtgcggacagccgcctga

SEQ ID NO: 493312 - DNA, 1512 bp, Stenotrophomonas maltophilia
atgcgcgtcgcgctttccgtgttgctgctggcttcggcgctgagcgcctgcaccccggccccggtgtccaccgccagctccgccgaggcgcccgcgccggcgtccgccatcgcctggcgccagggcgatgtggacgatgccttcgccgaggccgccgacagcggaaagccggtgctgctgtactggggcgcggtctggtgcccgccgtgcaaccagctcaaggccggcctgttcaaggacccggcgttcatcgcgttgaccggcaagttcgtgccggtctacctggatggcgacgaggaaggggcacaggcctggggcgaacgcttcggggtgcgcggctatccgaccctgatcgtgctggacccacaacgcaatgagctcacccgcgtggcaggcggcaacgacgcggccgaactgacccgtgcgctgaccgtcgcggccgggcgccgcagcgccatcgccgccaccctggcgacggcactggccacgccggacaggctggccgccgaagactggcaggtgctgggcgattacggctgggaagtcgacgccaaccgcttggccggcgagcgcaagagccaggatgtgctgcgccagctgtccaaggccgcacccgacgcggcgctgcaacgccgcttcgccctgctggccctggccaccgccgacacgcccgccagctcgcccaccgaggtgcgtgagctgctgcaggcagtgctggcgcaacctgccgaagtccgtcgtaaccgcgaactgctgggctacgcgggcgcgacgctggtcaagcaggccagcgccggcccggccaccagcaacacgctggggcagcagctgctggtcgcactggagcgcgcagatgccgagcgcggcaaccgtgccgacgacgcgctgtcgcgtgcgctgaccgaagtgtcgctggcccgtcagcagcagccaaacggcgcactgcccgcggccctggttgagcgggtcaagcagcgcgtggccgctgccgatgccgccgccaccgatgcgcatgcacgccaggccacgatcagcagcgcggtctacgcactgcgccaggtcggcgacgacgcgggcgccgaggcgctgttgctggccgagctgaaacgcagcgaacagccgtactactacatgcccgagctggccgaactggccgagcagcgcggcgacaccgccggtgcgctggagtggctgaagcgcgcctacgatggcgcgcagggcccggccacccgcgtacagtggggcgtgctgtacgtggagggcctgatgaagttggcgccggatgatgcaccacgcatcgagcaggccaccgcctcgctgatcgccgaactggaagcgcagccgtcgggctaccaccagcgtacccgccagcgtttcgagcgcctggccgggcagttgaagacgtggagcggcaagcaccagggcgccgaaacactggcgcggctgcagcagcggatgcagcaggcgtgcggggaacaggttgatggtgcgtgcaaggattggttgagttga

SEQ ID NO: 493313 - DNA, 630 bp, Stenotrophomonas maltophilia
atgtcgtactcgcttcccccgctcccctacgcctacgacgcccttgagccacacttcgatgcgcgcacgatggagatccatcacagcaagcaccaccaggcctacgtcaacaacctcaatgccgccatcgagcaggccggcatcgccgagcagccggtcgaggcgctgatcgccaacctcggtgccgtgcccgaggcgcagcgtggcgcggtccgcaacaacggcggtggccacgccaatcacagcctgttctggaccgtgctcagcaccgacggtggtgcacccgatgaggaactggccaccgccatcgaccgtgacctgggcagcttcgatgccttcaaggacgccttcagcaaggccgcgcagacccgtttcggcagcggctgggcctggctgaccagtgaccgcgacggccgcctgcaggtcgaaagcagcgccaaccaggacagcccgctgatgggtgcaaccgtcggcctgtccggcaataccccgatcctcgcgctggacgtctgggaacacgcctactacctgcactaccagaatcgtcgcccggactacatcggtgcgttcttcaacatcatcaactgggccgaggtcggccggcgctaccgccaggcccgggcctcatga

SEQ ID NO: 493314 - DNA, 579 bp, Stenotrophomonas maltophilia
atgagcggcgagacagtgccgtacgccgggccgtgggcgggggtcttccccgcaccggcgccggtgccgtcggtcgagatgccgccgcgtgccctgcggcggctgctcggccatttcccgaccggcgtggccatcgtctgcgcgcgcgatgcacagggcaagccggtcggcctgaccatcaactcgttcgtaccggtctcgctgcagccaccgctggtgctgtggaacctggcgttgcacgcgcagagcctgtccaccttccagcgcgccacccgctttgcaatcagcgtgctggcggccgaccaggaagcgctggcccggcgcttcgccgatccgcaggtccgcaatcgcttcgacggcctggcattgctggatgacgacgaggacgccccaccccgcatcgccggtgcggtcgcccatctcacctgtacccgccacgcacagtggccggtgggcgatcacctgctgctggccggccgcatcatcgacgtgcacgagaacggcggcgcgccgctgctgttccatcgcggccgcttccagcccggcccggccgaactgctggtggaggtgcgcggatga

SEQ ID NO: 493315 - DNA, 336 bp, Stenotrophomonas maltophilia
atgaacatcgaagctctggaatgcatgctcgccgccggcaaggatggcgcgctgctgcgcttcggcctgggcaagggctggctggatgccggcaacccggtgcgcgcggccacccatctgggccgttgcgtggtgcttgatccgcagtactcggcggcgtggaagctgctgggcaaggcctggctggccagtggccagccgcaggcggcgcgcgaagcctggcagcgcggattgagcgtggccggcagcaagggcgaccagcaggcacgcaaggaaatgcaggtgttcctgcgccgcctggaccgcgagcaggcggagccggcgaaagcgggctga

SEQ ID NO: 493316 - DNA, 1149 bp, Stenotrophomonas maltophilia
atgacccgcgctaccgaccgtgccctgagtactgccgagatgcatgccttcggtgaggaactcgacgcgatccgcgaccgtgtgatcggcagcctcggcgcctccgatacccgctacatccgccgcgtggccgccgccgtgcgctggtttggcgtggggggccgtggcctgctgttcctggcggcgttctcgccgctgttctggatgccgctgctgtggccggccgcgatcaccggcacgctgctgctggcgctgtcgaagatcctggagaacatggagctgggccacaacgtcatgcacggccagttcgactggaccggtgaccccaagctcaacggcaatacctatgagtgggacatcgttgccactgccgacaactggcgcaagacccacaatttccgccaccacacctataccaacgtgcgtggcatggacgatgacatcggttatggcctgctgcgcatcttcccggagcagcgctggaagccgttctacctgctgcagccgatcatcgcgccgatcttcgcgctgctgttccagtggggcgtggccgcgcaggacctgcgcctgggccgctggctgaagggccgcatcagcggccgtgcgatgtggatgcagacccgcccggtggcgcggaaaatggcccgccaggtgctgaaggactacgtgttcttccccctgctggccggcccgttcttcctcaccgtgatgctgggcaacatggtggccaacggactgcgcaacatctggacctacgtgattatcttctgcggccacttcaccgccgaatcggaaaccttcccgaaggaatgcctgcgcaatgaatcgcgcggccactggtacctgcgccagctgcgcggttcatccaacatcagcggcggcttcctgatcaacgtgctgtcgggcaatctcagccaccagatcgagcatcacttctatccggacctgccggccaaccgctatgcggccattgccaaggaagtgaaggacatctgccgtcgctacggccagcactacaacaacggctcgctgccgcgccagttcggccaggtggtctggcgcatcctgcgccacgcgttcccgagcaagccgcgccgcctgccgatgtcggacatcatgtccgcaccggcatcggccaacgcgggctga

SEQ ID NO: 493317 - DNA, 1110 bp, Stenotrophomonas maltophilia
atgtatacacaggtgtatgtgcgcccgtatagttcgcccatgagcgctgtcgtccgtccgtccctgttctctccgtaccgctgggtctcgccgtcgctgttcgatttctgggcaggccagctcaatcccctgtggaccctgcgcgagccggtggcccgcctgatccggcgagagccggccggcgagggcgcggcgaccctggtcctgcgcaccaaccggcactgggccggcatgcgcgccggccagcacgtcaccctgggcgtggagattgaagggcgcctgtggcagcgcagctacagccccaccgcactgggtcggcgcgagctggcgatcaccgtcaaggcgatcgacggcggcctcgtcagccagcacctggtcaaccacgcgcagccgggcgaactgttccgcctcgatgccgccttcggcgagttccacatgccggctgcggcgccggtgttgctgctggctgccggcagtggcatcacgccgatgcgcagcctgttgcgcgacgcctgccagcgcccgctggcagcgccggtggacctgttctactgggaacgcagcgccgcccacctgcagttccgtgatgagctgcaggcgttggccgccagccagccgaacctgcgtgtgcacctgctgaccacccgcgaaggggatgtgcccgccgcacgtatcgatgcccacgacctgcaggtggcgggcgatgacaccccgttggcgcagcgccatgtgctggcctgcggcccggacggcttcgttgccgccgcccgcgaacgcctggcgcaccaggtcgccggtttccaggcggaagcgttcactcctcccgcaccgctgcgtgacgccagcagtgaaggggaggtcgtgctgacgctggcgcgcagtggccgccagctgagcgtgccgcgtggcagctcgctgctggaaagcctggaagcccatggcatcaagcccaggcatggctgccgcatgggcatctgcaacacctgcagctgtgaccgcgtcagtggcgccactcgccacctgcgcaccggcgacctgcagtccgaatcggcgcagccggtacggatctgcgtgagcgcaccgaccaccgacctgaccctggatctctga

SEQ ID NO: 493318 - DNA, 657 bp, Stenotrophomonas maltophilia
atggccgccgccaccgccttgtcgacgcctgaagatgccaacagcccggcccgccgtacggtgagccgcgaggacctgctggccgccgccctgaaactgatcgggccgcaccgcagcctgtccacgctcagcctgcgcgaagtggcacgtgaggccggcatcgcgccgaacagcttctaccggcagttccgcgacatggacgaactggccgtggcgctgatcgacgccgccggccgttcgctgcggaccatcatcggcgaggcccgccagcgtgccacctccaccgccaccagcgtggtgcgggtttcggtggagaccttcatggaacagctgcgcgccgacgacaagctgctgcacgtactgctgcgcgaaggcgcggtgggttcggacgacttcaagcacgcggtcgaacgtgagctgcactatttcgaggaagagctgcagcacgacctggtgcgcctggccgcgctggacggcgccgtgctgcatgccccggaactggtggccaaggccatcacccggctggtgttcgcgatgggtgccaccgccatggacctgccgccggagaaggacccggagctgatcgaagagatctccacgatgatccgcatgatcatcgtcggcgcccgcacgcccgccgcgttccgccgcggctga

SEQ ID NO: 493319 - DNA, 2160 bp, Stenotrophomonas maltophilia
atgcccgttgccacgcccctcttccatcggctgcccctggccgccgccattgccctgaccctgccgctgcctgcactggccgccactccgaaaccgaccgaactggaccgtgtgcaggtcaaggtgagcaccgccacgcgcagcgaacgcctgctgtcggacgtgccgatccgcaccgaggtgctgcgcaaggaagacatcgcgctgcgcgcggccaccgacttctcgcgcgccgccgagctgatcaacggcctgcgcgtggagagcaactgccagaactgcaacaccagcgaagtgcagctgctgggcctgcccggtgcctacaaccagctgctgttcgatggcatcccgctgctgtccacgctgggcagcgtgtacggcctggaacagatcccggccgggttcgtcgaccgcatcgaagtggtcaagggcggtggctcggcgctgtacggcccgggtgcggttgccggtgtgatcaacctgattccgccgctgccggcgcgcagtggtggccatgtgcaggccggcgtgggtgtcctggaaggtacgccgcagaagaacgccgacgtgcggctggacctggtggccaaggaagtagacgccggcctgtccgtgattgcccagcgcaactggaacaacggcatcgactacaacggtgacggctacaccgagatcacccgcaagaacctcaaggtcggcgggctgcaggcctggtacgcgcccacgccgggcacgcggctgcgcctggacctgcaggtgaccgatgaaacccgccgcggcggcaaccgcctggaccagcccgaatacctggccaacatcgccgaatcgctggatacgaaataccggcgcggcagtgtgtcgtgggaccaggagatcactgccgacgtcgatttccgcctggcctacgccttcgccgacatcgaccgcgacagcttctacggcggtctcggcgacgtagtcaccgatccgtccgcacccggctatgacccgtcgcagctggaccgcaacgtggccggcagcgcggcctcgcgttcgtggcgccagtacggccgcacccacaacccgctgcactacatcgacagccagttgaactggcggctgggcgcgcatgcgctggccttcggtgtgcagtacaagcacgaggcgctgcgcgacgacaaccgcaccggtgacgggcagcgtcttgcggtgctggaggatgcgaccttccacaacctgggcgcgttcatccaggacgaatggagcctgcgcgacaacgtcgacctggtgctgggtgcacgcgtggacaagagctcggaactggacaacgcggtgttctcgccgcgcatcgcgctggcctggcaggctacaccgaacctgaaatggcgggcgggcatcgccaccggcttccgtgctccggagatcttcgttgaggatgtgcacgtcgatacgctcggtggcgaacaggtacgcgtgcgcaataccgatggcctgaaggaagagcgcgcgttgaccaccctgttcggcttcgactggcgctcggacccggccaatccggtgtggagctgggatgctaccgcctcctatgcacgcatccgcgataccttcgcgctgggcgagatccagcgcggcgatgacggccagctgagccagctgcgttacaacgcctccggctcggacgtgctgggtgcggaaaccaacctcggctggcagccgtcgctgcagtggcgcctgaccgccggtgcctcgtggtaccgctcgcgctaccgcgagccgcagcgcgtcttcgacgacagcggcgacggtggcgacaccgtgatcgaaagccgcgactacctgaagactccgcgctggaccggcctggcccagctcagctggatgccggccgaaccgtgggaaaccttcgtcgcgctgcgccataccgggccgatgtcggtgctgaacaaccggttgggcgaactgcaccgcacgcgttcgttcctggtcaccgatctcggggcgcgctggcaccgtcacctgggcgcacaggcgcagcaggaagtgtcggtggccgcgggcgtcaagaacgtgttcgatcagcgccagaaggatctggaagtgggcgcgctgcgtgacagcgactatgtctacgggccgcgcttcgcgcgttcgtggtacgtcaacctgcgctatgcgttctga

SEQ ID NO: 493320 - DNA, 522 bp, Stenotrophomonas maltophilia
gtgctggcctgtgccgcgctgccggccgcaccgacggtggctgcggacctgcacgcgcaggtctcggcttcgctgatgcggccggaacagcgctcgctgcggccgatgcagtggacaccgccgccgaagctggtggcgctgtacttcggtgccgactggtgcgcgccctgccatgccttcgtacccaccttgcgcagcgtacgcgacgcgttgcgcgaggccggcgccgataccgaagtggtgtacgtcagcctggatgagagcgacgctgcattgcgccgctacatgcacacgcaggacatgccgtggccggtgctggacccgcgccgcgccgcgcgcatgccggcgctgcaggcattggccgggctggcaccgccgaacctggtactgatcgatgccgacggcacggtgctggccaacggctggcaaggccggcgctatcaaggcctgcagccggtgttgaaggaatggatgaaacgggcgtgtgcgcagcagcaggcgcgctgcccgcccgatctgtag

SEQ ID NO: 493321 - DNA, 471 bp, Stenotrophomonas maltophilia
gtgggcaagaccgacgattcgacatcgctgaaaagcacccccttgatcgaggccgagcgccaggtcgagagcttccggcaagtgcgcgaggcgcaccggatggagctggtggaggactatgtcgagctgatttcggacctgctggccgacggcggcgaggcccgccaggtcgacattgccacccgactgggcgtggcccagcccaccgtggcgaagatgctgcggcgcttggcccgtgatggctgggtggtacagcggccgtaccgtggcgtgttcctgaccccggaaggcgaagcgctggcccacgccagccgccagcgccaccagaccgtggagcgtttcctgctggcgctgggcgtggacgcggataccgcgcggcgcgatgccgagggcatcgagcaccatgtgagcgagcagacgctggcattgttcgaagccttcgtgcgcaaggccgagggcgaggcgccgtaa

SEQ ID NO: 493322 - DNA, 1332 bp, Stenotrophomonas maltophilia
atgaataccttggcgcccagcgacccttcggcctccactccggccagcctgggtgcgctcaacgcctcggtcgcggtgcccgacaggggccattggtggttccgcctgctggccttcctcggcccgggctacatgatctcggtcggccacatggaccctggcaactgggccactgacctcgccggcggctcgcgcttcggctacctgctgctgtcggtcatcctcgtctccaacctgatggcggtgatcctgcaggcgctgtcggcgcggctcggcatcgccaccggcatggacctggcgcaggcctgccgcgcgcgttaccccaagccggtgaacctggcgctgtgggcgctgtgcgaggcggcgatcatcgcctgcgacctggccgaggtgatcggcaccgccatcgcactgaaactgctgttcgatctgccactgctgtggggtgcggtgatcaccgcgctggacacgctgctggtgctgctgctgatgaaccgcggcttccgtgcgctggaagctttcgtgatcgcgctgctgatggtgatcttcgcctgcttcgtggtgcagatcgcgatggctgcgccgccggtgatggcggtgctgggcggcttcattccgcgcgcgcaggtggtgaccgatccgaacgcgctgtacatcgcgatcggcatcattggtgccaccgtgatgccgcacaacctgtacctgcattcgtccatcgtgcagacccgcgcctacccgcgtaccgatgaaggccgccgcagtgcgctgcgctgggcggtcaccgacagcacgctcgcgctgaccctggcgctgttcatcaacgccagcatcctgatcctggcggcggcggtgttccatgccaatggccgatttgatgtggaagacatcgagcaggcgcaccagctgctggcaccgatgctgggtgtgggcgcagcggcgacgttgttcgcggtggccctgctggcctcgggcctgaattcgacggtgaccgccacgctggccggccagatcgtgatggaaggcttcctgcacctgcgaatgccgccgtggctgcgtcggctgatcacgcgtgcgctggccatcatcccggtggtggtggtgatcctgctgttcggcgaccagggcgcggtgaagctgctggtgctgagccaggtggtgctgtcgatgcagttgccgttcgcgatcatcccgctggtacggatcgtgaccgacaaggtgacgatgggcgcgctggtcgcaccgcgctggctgggcgcgatcgcctgggtgatcgcgctggtcatcgtggtgttgaacgtgaagctgctggtggacaccctcaacggcgcatag

SEQ ID NO: 493323 - DNA, 327 bp, Stenotrophomonas maltophilia
atgcagatcatcgacgccaccacgcctgagcagttccagcagctgctggccgaacacccgcgcgtactggtggacttccacaaggaccagtgcccggggtgccggatgctggagatgtcgctgcaccgggtggccaacagcgtcgcggggcagggcaccacgctgctgcgcgtgcagctggaggtgctgggcgaggcgttcttcagggaactgggactgcggcagacgccgacgctctcgctgttccgtgacggggacgaacgtacccgcctggcagggttccagtcgccgcagcagatcgaggccgcgattgcgttgcatttgtag

SEQ ID NO: 493324 - DNA, 543 bp, Stenotrophomonas maltophilia
atgcaagttacaagaagaccaacgtcgacaacggcttcgacgacctctgagtccggcacggcgctgagcatcctgctggtggtggcctcactgagcggcaacacccgcgagcttggccggcagattgccgagcgttgccgcgctgcaggccatgccgtgcactggcgggaggccgacgacctgcagcaggcgccgtccctggcggccgacgaggccgacctggtgctgctgggctgctggaccgacaacgccggccgcacgccttcggagatgaaggcatgggtggctggcatcgccgagcgcggcgagcggccgcggcagctggcggtgttcggtaccggcgagacacagtgggggcaggagtactactgcggtgctgtgcaccggctgatccgctacttccacagcgactatccgccgctggagatcgaacagatgccgcatggcgagcgccatgccgcggccatcgaggcttggaccgatgcggtcctggcccattactggagcaacagcgatgcagatcatcgacgccaccacgcctga

SEQ ID NO: 493325 - DNA, 1041 bp, Stenotrophomonas maltophilia
atggcaacccccctcgaccgcatcaagatcctcgaaccgcgccatcccaaccgcagcaccggcatcatcaacggccgcactagcgggatactgaactggaatgacatcccgtacccgtcgttctatcgggcctacaaggagctgtcgaccaacttctggatccccgacgaggtcgacatgaaggccgatgcgcgccagtacggcgagctgtccgggcgcgaaaagaacgcctacgactcgatcatcggcctgctggccacgctcgactcaccgcagacgcgcttcatctacaacgtggccgagtacatcaccgacccggccgcgcatgccaatgccgcgatcatcggccagcaggaagtgatccacaacgagagttacagctatgtgctggcctcgatcaccgacctgccgaaccagaaccgcgtatttgaactggcgcgcacccatccgaccatcatcaagcgcaacgcgccgatcatgggcgcgtatgacgacttcatgcgcgagaagaccgccgagaccctgttgaagtcgctgatccagtcctcgatcctggagggcatcaacttctattccggatttgcgtacttctacaacatggtgcggcagaaccgcatgaccggcaccggcaagatcatcagtttcatcaaccgcgatgaactggcccataccaagttcatcagcgagctgatccgcgccatcatcggcgagaacccggagctgcagaccaacgagctgaccgcctatgtgcaccaggcgttcgagcacgccatcgaactggaaacccagtggtcatcggaagtactggacggcatcgatggcatcgatgtggaggaaatgacgcgctacgtgaagtaccgcgccaacaagatggccggcatgctcggcatcgagcgcctgtacagcgacaccaccgacaacgtgatgccgtggatcaaggcctacgctgacaacttcaccgagaccaagaccgacttcttcgagatgcgcaatgcaagttacaagaagaccaacgtcgacaacggcttcgacgacctctga

SEQ ID NO: 493326 - DNA, 2364 bp, Stenotrophomonas maltophilia
atgaccgacagtaccttccgcgtggccgatctggccggcgctggcgacgccttgcgcgccggtggcgagcgcgtgccgacctggatcaccaaggaggccggcaaccgccgcctgccattcgacgccgggcgactgcagcgcagtatcgatgcggtgcacgccgagttcccgcagctggatgtgagcgactaccgccgcgtggtgcaggcaatggtcgagcgcaagcccagcatcagcgccgatgaactggtcgatctgctgatccgcgaggccgaatcgcgcgtggacctggtcgcgccggagtgggagcagtttgccgcgcgcatctacctgcgccgcctgtacaagcgtgccagccgcaaccgcttctacgatgtcggcctgaagtacggctcctacgtgggcctgcaggaaagcctggctgaccgcgggatctacagcaacgacatcctgcgctgctactcgaaggaagaactgcagcaggccggcgggatgatcgacccggaacgcgaccgcctgttcgcctacaacggcctgtacctgctggccacgcgctatctggccagcgaccgcagccgcgaggtctatgagctgccgcaggagcgttggctgaccatcgcgctgtacctcatgcaggaagaaaagccgcgcgagcggcgcatgcagctggtcggcgaggcgtactgggcgctgtccaacctgtacatgacggtggccacgccgaccctggccaacgccggcaaggtcggggggcaactgtccagctgcttcatcgacacggtggacgacagcctgcagggcatctatgactccaataccgacatcgcccgcgtgtccaagcacggcggcggcgtgggtgcctatctgggctatgtgcgcagcagcggcgcgccgatacggggcgtgcccaattcctccggcggcgtggtgccgtggatcaagcagctcaacaacaccgcagtgtcggtcgaccagcttggccagcgcaagggcgcggtggcggtgtacctggacatctggcaccgcgacatcgaagccttcatggacctgcgcctcaacaacggcgaccagcgcctgcgcgcgcatgatgtgttcacctcggtgtgcgtgccggacctgttcatggaagcagtcgaacgccgtgccgactggtacctgttcgacccgcacgaggtgaagcaggccaagggctggtacctgcaggacttctacgacgagaagcgcggcgcgggcagcttccgcgaccgctacgccgaactggtggccgacgagcgcatcagccggcgcacggtgaaggcgatcgatcttttcaagcggatcatgctcagccagctggagaccggcaacccgttcctgttctaccgcgacgaggtcaaccgccgtaacccgaacaagcacgccggcatgatctattccagcaacctgtgcaccgagatcctgcagaacatgagcccgacgcggatgatccaggagatcgtcagcggcgaccagatcgtcaccacacgccgcgccggcgacttcgtggtctgcaacctgtcttcgatcaacctcggccgcgcgatccatgcgccggatgacctgctggccaccgatgtgctggagcgcctgatcccgatccaggtgcgcatgctggacaacgtgatcgacctcaacgcactgccggtgccgcaggccacgatcaccaaccgcaagtaccgcgccatcggactgggcacgttcggttggcaccacctgctggcgcagcaggcgatccagtgggattcaccggatgccgaacaactggccgaccgcctgtatgagcgcatcaatttcctgaccatccaggccagcgcgcaactggcgaaggaaaagggcagctatccgatgttcaccggcagcgattggcacaacgggcgttacttccgtgaccgcgactacactggcgccgcatgggacagcctggcgcgcgaggtcgccacgcacggcctgcgcaacggctggctgctggcggtggcgccgaacatgagcaccgcgcagattgccggttccaccgcatcgatcgacccgatctacagcgcgttctactacgaggaaaaaaaggacttccggcggccggtggcagcgccggggttgtcgctggaaacctggccgtactacgagaagggggcgtacaaggtcgaccagttcgccagcgtgcgccagaacgcgcgtcgccagcgccatgttgatcagtcgatcagcttcaacctgtacgtgcccagcacgatccgcgccagcaccctgctggagctgcacctgagcgcctggcgcgagggcctgaagaccacctactacgtgcgctccaacgacatcgacatcagcgaatgcgagtggtgcgccagctga

SEQ ID NO: 493327 - DNA, 978 bp, Stenotrophomonas maltophilia
atgcgcgctgcccagtacccttccttcggcaacccggccgacgtcctcgccattgccgatgccaccctccccgagcccggcccgggcgaggtgcgcatccgcaccgtgctggcctcgatccacaatcacgacctgctgaccgtgcgcggcctctacggctacaagccgacactgccggcgatcggtggcagtgaagcattgggcgtggtcgacgcactcggcgaaggcgtcgacggcctgcagatcggccagcgggttgccgccgcctcggtgcatggcacctgggccgaagcgttcattgcaccggcacgcatggtgattccgatgcccgaggcgatccccgacgaaatggccgcgcagctgatcgccatgccgctgagcgcgctgatgctgctggaattcctgcacgtcgaagcaggccagtggatcgtgcagaacaccgccaatggcgcggtgggcaagtcgctggcgatgctggcgcgggcgcgtggcgtgcatgtggccaacctggtgcgcaatgccgatgccgtcgcgcagttgcaggcgctgggtatcgatcatgtgttcgacacctcggtggagggttggaaggatcgcgtgcgtgaagcgactggcgaagcacaggccgcggccgcggtggattccatcggcggcgacgccagcggtgacctggtcgacctgctcggccaccacggcaccctggtgtcgttcggggtgatgagcggcgagccgatgcgcattcccgccggtggcctgatctacaaggaggccacggtgaagggcttctggggcagcaaagtcagccaggcgatggcggtggaggacaagcgccggctggtcggcgagctgctgaagcgtgcggccagcggcgaactgaccctgccggtggagaagatcttcgcactggacgacatcgcccaggcggcgaaggcgggcgccggttctggccgcaatggcaaggtgctgctgcggccttga

SEQ ID NO: 493328 - DNA, 2628 bp, Stenotrophomonas maltophilia
atgtaccgcaccaccctgaacctgcttgccggcgcgatcgcgctgggcctcaccgccggcgctgccggcgccgctgaatccgccgataccggcaaggacagcaccaccctcggcgccgtgctggtgaccggctccaacatcaagcgcagcgacaccgccgggccgaatccggtgcagatcgtcagccgcgaacagatcgagcagaccggccgctccaccctcaccgacgtgctgcgcaacctgtcggccaatgccggcaacagtttcgacgagcagtacaccggcagcttcgccgccggttctgcatcgatcggcctgcgcggcctgtcgccgaagaacacgctggtgctggtcaacggctatcgcgtgtccaacttcggcttcgcgctcaacacgcaggacaccttcgtcgacctcaacgcgctgccgatcagcgcggtggaacgcattgaagtgctgaaggatggcgcctcggcggtgtacggctccgacgccatcgccggcgtcatcaacatcatcctgcgcaggaacttccagggcgtggaagtcggcggcggcttcggtaccgccacccagggcggcctgaacgagcgcaaggccaacctgctggctggcttcggtgacctcgaacagcagggctggaacgtgctgttcgggctggacctgctcaagcgtgatcgcctcgacgccgaccagcgtgcctacacccgcagcggcgatttccgcgacaagcccggcggccgcctggccggttggtccaccgccggtggcaactggctgtccaacccacgcgcgccgcagccgttcgccaactgccccgacggcagccagctgcgcccgtacagcgacttcggcagcaccctgcccggccaggcctgcgccttcaacgcgcagccgttcaagaccctgcagcccggcgccgagcgcctgcaggcgtcgttgagtgcgacctaccgcttcaatgacagcgtcgaagcgttcgccgacgtgctgtacagccacaacaaggccgaccagatcttcagtgcgccgctgaccgttggcccgggcctgcgtgcctacaacccggccaccggcaccctgatcgacgtgccggcggtgctgccggtcggccacccgaacaacccgggcagcacgccgctgccgttcgagtacaccttcttcgacatcggcccgcgcctgaaggacaacacccaggtgttctaccgtgcactggccggcgtgcgcggcagtggcgagcgctgggactgggaagtggcggcgctgacttcgcagagcgcgcagcgcgagtacgtcgacaacttcgtcaaccgctacgcgttcgaacagatcctgcgcgatggcagttacaacttcctcaacccgtccagcacgccgggcgcgctggatgcactgcgcctgcagaccaagcgaccgggctggtacaagctgcacgcgttgaacgtgaaggcctcgacctcgctgtgggagctgccggccggtgcggtcggcttcgcctggggtgccgagttccgcaaggaatcactggacgcgcgcaccagtgcgcaggtgctgtcgggcaccgagctgcgcccggccatcaacgtggtcaacggcgagcgccaggtcagcgccgcctacgccgaactgagcgtgccgctgcatcgcaccctggagctgcaggtggccggtcgcggcgaccactatgacgacttcggcaacgcgttctcgccgaaggtggcgctgcgctggcagccgctggacagcctgctgctgcgtggttcgttctcgcgtggcttccgcgcaccttcgctgccggagatcgcgccgggccagaccgtcagctacggctcggtgatcgatccgctggacccgctgcagcccggtggcagccgtggcgtgaccaacatccgcaccggcaatccggacctgaaggccgaacgctcgcgcaacttcaacgtgggcgcggtgtggtcgcccaatggcgataccagcatcggcctggactggtaccgcatcgagcaggacaacctggtcaagccggacagcgcgcagttcatcgtcgacaacccgacactgttccccggacgcgtgcagcgtgatgcacaggggcgcatccagttcatcaccaaccagtacgccaaccagggcgagctgaccacctcgggtctggatctggaagccaaccgcaccttccgcaccgaaggctggggcaacttcaccgttgccggcagctggacccacctgctcagcttcaagcagccgctggtggccggccaggcaccgtatgaaggggccggcaacaaccgccacggcgcactgccgcgcacccgcggcaccacctcgttgaactgggcagtgggcgactggagcagcacgctgagcctgcagtacgtgagcggctacgaccagcgcgtggcgacagcgaccagcaaccccggcctgcgtgatcgcatcaagccgtatcaccagctggacctgtacgtggcgtacgaagggattcccaacaccacgctgtcgctgtcggtgctgaacctgaccgacaaggacccgccgttcgacccggccggtggctccaacggtttcgacatcagccagtacaacctgcgcgggcagttcatttcgctgggggcgcgctaccggttctga

SEQ ID NO: 493329 - DNA, 1980 bp, Stenotrophomonas maltophilia
atggatgtactggagccgcaacaatccccggtgcgcacccttcggcctgtgttcgccttcgcggcgatcgttgtcgtggcgttcgcgctgttcgtcagcctgtttccgctcggtgcgggccgcctgctggtcaaggcgcaggactgggccgcactcaatgtcggctggtactacctgctggcgatgaccctgtacctggtgttcgtggtcggtgtggcgctgtccaagtatggtggcatcaagctcggcgccgaccatgatgagccggagttcagctatctttcctgggccggcatgctgttcgccgccggcatcagcatcaccctgttcttcttctgcgtctccgaaccgctgacccactacctgcagccgccgcagggcgaaccggcggcgggcgaggccggggcgcgccaggccatgcagctgctcttcctgcactggggcctgcatggctggggcgtgttcgcactcgcagcgatggcgatggcctacttcgcctatcgccacaacctgccgctggcgctgcgctcggcgctgtatccgctgatcggcaagcgcatcaacgggccgatcggctacaccgtggacgcgctgggcattgtcgccaccgtattcggcatcggcgccgacatgggcttcggcgtgctgcacctcaacgcgggcctgtcgcacctgttcaacatcccgcactccaacctggtgcagatcatcctggtggtcagcatgatgggcgcggcggtggccgtggcggtttcaggcgtggagaagggcgtgcgctggatggccaacatcaacatgctgctggcgatcgcgctggtgctgttcatgctgtgcgccggccccacccagtacctgctgagtacgctgatgcagaacctgggcgactacctgggcagcgtggtcggcaagagtttcgatgtgtacgcctatggcggccggccggaatggctgggcggctggacggtgttctactgggcctggtggatcggctgggcgccgttcgtcggcctgttcatcgcgcgcatctcgcgtggccgcaccatccgcgaattcgtgttcggcgtgctgctgatcccgctgggcttcaccctggcctggctgtcgatcttcggcaacagcgcgctggaccaggtcctgcaccacggccagcagcagttggcacagctggcggtggatgatccaccgacggtgctgtatgcactgctggatggctacccgtggagccgcacggtgatcgcggtgacggtgctggtcagcttcattttctttgtgacctcggccgactcgggggcggtggtgttgtccacgctgtcctcgcatggcggtgcaccggaggatgatggtccgcgttggctgcgtgtgttctggggcacggtgatcgccgtactgaccgccgggctgctgctggctgggagcatcgatgcgctcaaatctgcggtggtgctggcgtcgctgccgttctcggcggtgctgctgctgatgatgtgggggctgacccgcgccttcagtgacgaatcgcaccgcaagcgcgcgctgcagtaccggccctcgccgctgatcggcgacgaccgccaccaccagggctggcgccagcgcctgagccaggccatgcatttcccggtgcgcgaccaggtctaccgcttcatggacgacacggtgaagccagcgatggaagcggtggccgaacagctgcgcgggcagggctgggatgtggccacgcgcttcgaggccggcgacatggagctgacggtcaatcacggcgagcagcaggacttcctgtaccgggtgatcctgagtggctacctgaccccgtcgttcgcggcccagcagctgcgcaaccagcgctactaccgcgccgaggtgcacttgttcgaaggcagccaggactacgacctggtgggctacagccgcaagcagatcatcaacgacatcatcagccagtacgaacggcacctgcagttcctgcacctgagccggtga

SEQ ID NO: 493330 - DNA, 381 bp, Stenotrophomonas maltophilia
atgttcagccacatcaccgttggaacgaacgacatggacgtcgcgcatcgcttctacgatgccctgttcgccgcgatgggggcacgtccgggtgtgttcgacgaaaagggtcggctgctgtacttcaaggatgggcggatgttcggcgtgaccgcgccgatcgatgggcagccagcgtgccatgccaacggcggcaccatcggtttcagtctgggcagtgcagaggccgtgcgtgcctggcaggaagctggcgtggctcacggtggcaccgcaatcgaagatccgcccggcgtccgcaacatgtccggtcggcaggtgtttctggcctatctgcgtgacccggatggcaacaagctgtgtgcggtgcatgtaatgtcgtga

SEQ ID NO: 493331 - DNA, 519 bp, Stenotrophomonas maltophilia
atggctgtgcccgccgcctccagcaccgcgctggcggggttctaccgcgaacaccatggctggctgctgggctggctgcgccgccgcacccacaacgtcgactgcgctgccgacctgacccaggatacgttcctgcgcctgctcagccgtcgcgtcgatccatccgaactgcgcctgccgcgcgcttatctcagcaccatcgcgcacgccctgctggtcaaccactggcagcgcgcggacctggagcgcgcctacctggtcgcactggctgcgcaaccggagccggtgcacccgtctgctgaggagcgcgcgcaggcactgcagctgctgcatgccatcgccgagatgctgtacggcctggccgaacgcccacgccgtgcgttcctgctggcacggctgtctggcctggactatgcggagatcggccaacagctgggcgtgtccgagcgcatggtcaagaagtacatggcgcaggcgatgctgcattgcctgcgcctgtccggcgatgccacggcatga

SEQ ID NO: 493332 - DNA, 945 bp, Stenotrophomonas maltophilia
atgaacgccgccctggcgggcccggcgctggagcaggcggcagagtggttcgcgctgcgccagcaaggctggagtgacggcgaccagcagcgatggcgcgcctggctgcacgccgatacccgtcatgccgatgcgtggcgccgggtcgagtcggtctggcagtcctttgctcccttgtcggcaccggcggcggcaacggcgctcgatgctgccggccgccgtcgccgccgcgcgcttcgcactctcggcggcgccctgggcatcggcgctgtttccctgctcggcctgcatgggctgcgcgaacaacgcggcctgcagacccaacgcactgctgccgggcgcaccggtcattggacgttggccgatggcagtcaactctggctcaacgccgacagcgacgttgccatcgagattggcaacggtcgccgcgccctgcatctgctgcgtggtgagctgctgctgcagaccggccaccaccgtgcattcaccggcctgacgttgaccgtgcatgtgccgggcgcacgcctgcagccgatcggcacccgttttgcggtcgggcgcgaggcagagggcagccgattggatgtgttcgaaggagcggtgcgctgcctgccgcagttcggcgacgcgctcgatgtggctgcgggaggcgcggtgcggatcggcccgatgggcgggctctcaacgctcagtgcggatccactgcgcggcgactggcaggacggacgcctgcaggtgcaggacgcgccgctgatccgggtgatcgacgaactggcccgccaccaccgaggctatctgggctgcgatccggcgctcgccgcattgaatgtgaccgcgatactgccgcgcctggacagcctgcaggcgctgaaactgctggcgcgcgccctgccgatccgcatcgagcagcgctggccatggtggaccgtcgtgcgcccgatctga

SEQ ID NO: 493333 - DNA, 2949 bp, Stenotrophomonas maltophilia
atgaaactaccctgcccttcccctcgcccgctggccatcgcgctgtgcctggccctggccacgccgtgcctgttgccggccgccgcccatgcacaggaagctgccgctgccgttcgctggcagatcccagccggaccgctcgaccaggccttgaccacattcggccagcagtccggcctgtccatcgccgccgatgcgcggctgacccgtggccgccacagcggcggcgtgcaggcctcgctcacggacgaggccgcgctggcgcggctgctggccggtaccggcctgaccttccagcgtgatgccagtggcgtggtactgcaggccgccccggccaccgacgccggcgtgcgccagatcggcaccctccgtgtggccggccaggccagcgaaggcgcttcgccgtggggcctggccgatgccgatgcggtctaccgtgacagcggctcgcgcgtgcacctggatcgccagcagctggagcgcttccgcggccagtcgatcagcgacgtgctggccggcgcggtcggcgtgcacaccggggacgtgcgcaacggtggtgcgctggacgtcaacatccgcggcctgcagggccagaaccgggtgccggtgatcatcgacggtggccagcaggccatcgacgtgtaccgcggctatgccggcgtgcagcagcgcagctacctcgacccggacctgatcagcgcggtcagcatcgagaaggggccgagcctggccgccaacgccgccagcgcgatcggtggcgtggtctgcatggaaacgctgaacgtcgatgacattctcgacgacggccaggcctcgggactgcgtgtgcgcggcggcgtggccgacaacagcatcgaccgcacccgcaccttcaagcagatcgcgcgtggcagcgacaaccgcaacagcctgcgcgacccgcgcgactggaacggcagcgtggccttcgcccagcgcggcgaggactggcagctggtggctgcctatgcgcgacgccgccagggcaactacttcgccggcagcaacggcgcgcatcgctacgacgaccagcacctctccagcggcggtaccggcatgtccagccaggcggtctcggacatgtaccaccccggcgatgaggtgctcaacacgcacaccgacaacgaatcgtcgctgctgaagttcacctggacacccaacccggaccagcgcctggagctgagccatcgctacttcaactccagcttcggcgagatcatgccgtcggcaatcggccgcgtgggcgagtccaacgaatgggtgacctacgtggagaaggccaacaccatgttccagttcgagcccggcaagatgcgggtcaacgccacctcgctgcgccatcgttaccgacccgaggcgcacccgtggctggacctgagcagcacgctgtggttcaccaccgccaccagccgcatgttcaacagcaatatcgccaacacgccgctgttcaaggaaatggcctccgaccagatgcccgacacgctgggcgagacttacggccctgggctgcagtcggacgtaaagacccggcgttggggcgtggacagcagcaacaccacccgcttcagcaatgacctgggcgactggacgctgcgctacggcgcgtccttccagcacgaagacaccgcaccgaactcgcccgtgctgccggtggactacaacaacaaccgctacctgcgctcgggcacgcgccgcgaagccagcgtggtcgcctcgctgcagtggcagccgtgggactggctgtcactgaccgccggcggtcgcttcatcgactaccgcacccgcgaccgcaaccgcgtggcctttgtcagcgaatcgcgcgacctgcgctacaccttcgcgcgcctgagcaagggcggccagttgctgccgggctggtacaaggagtggtacccggacgcacaaggcaattacacctatgactcgctgcgcgccacgccctatggcgacagcacgctgggccaggcctacgatttcgacggattcatccgcgatccgcgtggtgccaatggcttccataccaagcagatccccaccgcctggggctacaagccggcgatccggcgctcgggccacggcttcgcgccgtatgccgaggcgcgcttcaacctcgacgcggacacattcttctacgtgaagtacgcgcagggctggaagatgcccagcctgttcgagtcgacgctgggcaacagcacctcggcgccggtggccggcctgaagccggaaaagaaccgctcctgggacatcggcttcagcctgctgaagcaggatctgtggcgtgacggtgatcgcctggcattcaaggtcgcctggttcaagaacgatatcgacaacgccatcacccgccgcttcgattccagcaactgggcgttctacgtcgacaacgtcgacaactacacggtgtccggttacgagctgcagtccggctatgacgccggcatcgcctacctggacctgtcggccagctactaccagcgcgcgcgcacctgcgatgcggccaccgccaagcgcctgcgcgacgacccgtatgcgaagtggagcaagctggacaccacgccggactgcgtggacggcggcttcggcacctcgttcgtcaatgcgcagaacccgccgaagtactcgatccacagcacactgggcttccgcctgttcgacaagcgactggataccggcatccgacgcacctacaacagcggccctacccatgaactcgacaagccctggaacaccaccggctcgaccggcctgcagaacatctacctgccgaccgcgatctacgacttctatgcacgctggcagttcaccccgcgcagcgaagtggaactggtggtcagcaaccttcgcaacacctactacatggacacgctggcgatgagcctgatgcccggcccgggccgcaccacgcggctgaacttcaccgcacgtttctga

SEQ ID NO: 493334 - DNA, 324 bp, Stenotrophomonas maltophilia
atgaataccctggctctgtttttcgtgatctgttcggcgctgatcgatgtcgccgcgaacatgatggtggccaagtcggagggcttccgccgctggcgctggggcgttggagcgatcgtcatggtctggattgcctttgccctgctgggccaggctgtgcgctacatggacctggccaccgcctacgcgatgtggggggcgatcggcgtgatcggtaccgccacctgcggacgcctgttgttcggcaaccgcctgcgtccgatcggttgggtcggcatcgcattggtgaccgtcgcggtactgctgctgagtaccgcgaagtaa

SEQ ID NO: 493335 - DNA, 354 bp, Stenotrophomonas maltophilia
atgtcccgtactgttcccgcccgtggcgcgctggtcgcctgggcctgcctgaccgtggcgatcgtcgccgaagtggtcggcacctcgttcatggcccacgccgcccgcgatggcggctggaccggttatctgatcatggccggtgcgctggcgctgtcctacttcttcctggcgcagtcggtgcgtcgcatcgcggtgggcgtggcctacgcggtgtgggaaggcctgggcctgaccctgctgaccgtggtcggcctcaccgtgttcggcgagagcctgtcgctgcagcagctggccggcctggtgctggcggtggtgggcatcgtctgcgtcaccctcggggaggcacactga

SEQ ID NO: 493336 - DNA, 852 bp, Stenotrophomonas maltophilia
atgccctattcccctgaatccctacaggccttcgtggaagctgccgcgctgggctcgttctcggccgcggcacggcggctgggcaagacccagtcgaccttcagcaccgccattgcccacctggaagccgacctcggcgtgagcctgttcgaccgcagcgggcgctacccgcggctgaccgaggccgggcgccaggcgctgggccacgcacaggagatcctggccgccgatgcgcgcctgcagcagttgagcgtgcgcctgtccgcgccggtcgagccgcgcctgaccgtggtgttttccgatgtctaccagctggatccggagcagcggatcctgcagcgcttcgccgaagcgttcccggagatcgagctggagtggctggatgccgaaggcgaggacgtgctggagctggtcggcagtggtcgcgccgcgctgggcctgctgcccaggcaggagcgctatcccgatgggctggtggcgcggccgctggcgcaccacagcgaactgtcggtgtacgtggcgcgcggacacccgctggccagcgccgggcgtcgcgccgccgcacaactggcacggcatcggcaggtgcgcctgagcgcggaagtcgatcagacccgcttggtcaccggcctcgcgtggaccgccaccgattacctgatggtgatggagatggccgaggacggcatcggctgggccgaactgccgcgggcgctggtgcagcgctatgaccgtgggcggctggtggaactggtgctgcccggctggccgcggcgcatccacagcgacctgctgtggcgacgcgacacgccgccaggcccagccgcactctggtgggccgacgcgttggggtga

SEQ ID NO: 493337 - DNA, 921 bp, Stenotrophomonas maltophilia
atgtcccaagccgccttctaccccgtcggaactcctggccagccgtggggagcggcggaacgggagctgtggcgtggtcgccagcagcgcctgcgtcgctatgaccaggaggtgctgccgcgcatcgaggcgctggcctcgcgtttcgacaaggtggcctatggcaagctcgactacgctggcgagacctatacgttgttcgccctgcgcagccgcgactggaacccggcgctgcccgccgcgctggttaccggtggcgtgcacggctatgagaccagtggcgtgatgggcgcgctggagttcctcgaaaagcacgccgccgactatgccggcaaggccaacctgctggtggcgccgtgcgtgaatccgtggggcttcgagcgcatcaaccgctggaacttcgatgcgatcgacccgaaccgcaacttccgcgccgatggcccggcccgcgagtcgaccgcgctgatcgagctggttgcaccgatcaagggacagttcgtgctgcacatcgacctgcacgagaccaccgacagtgatgaaagcgagttccgcccggcgctggccgcgcgtgacggcaagccgttcgagccgggcctgattccggatggcttctacctggtggatgacagcgaggccccgcagccggccttccagcaggcggtcattgccgccgtggagaaggtcacccatatcgccgccgccgacgacaaaggcgagatcatcggttcgccggtgatcgcccacggcgtgatcgagtatccgctggtgaagctgggcctgtgcgccggcattaccggcgcgaagtacaccaccaccaccgaggtctacccggacagcccgcgggccaccccgcagcagtgcaacgacgcacaggtggcagcggtgtgcgcggcgctggattacgcgctcgcccatcgctga

SEQ ID NO: 493338 - DNA, 2082 bp, Stenotrophomonas maltophilia
atgcccatccacgccctgcaaccggcccgcctgcccctggccgccgccctcaccctgtgcctgcttccggccgccagcgtcttcgcccaggacggcgctaccacgctcgacagcatccaggtctctggcagctggctgggtaccggcctgcatgacagcgtgaagcgcttcgccggcgcgcgcacggtggtcgaccgccagcgcatcgaggccagcggcgcggccagcatcggcgatgccatgcgccgcatccccggcgtgcaggtcaccgacaactccggtacggccggcagctcggtctcgctgaacatcggcgtgcgcggcctgaccgggcgctactcgccacgctcgaccgtactgctggacggcgtgccgctggcggtagcgccgtatggccagccgcagctgtcgttcgcaccgaccagcctgtccaacatcgaatcgatcgacgtggtgcgaggcggcggcgcggtgcgctacggcccgcagaacgtgggcggcatcatcaacttcagcacccgcgccattcccaccgaggcaggcctgcacggcgaagcgggcgtgcgctacaccgcctacgaccatggcggcggggacagcacccagtacaacgccttcctcggcggtaccggcgacaacggcctgggcgcggccctgctgtactccggccaggatggccgcggctggcgacagggcagcgatgaccgtttcaacgatctcgctctgaagttcgcctacgccatcgacgaacagcaggagctgcgcgccaagctgtcgtactacgacgtgcgctcgctgacgccgggcggcctgacccgcgcccagtacgaggccgacccgttccagaacacccgctccaccgatttctggaagggccaccgcaccggcatcgacctgggctacaccaacacgctgtcggccaacagcgagttcgaggtgctggcctattacaacgaaagcagccgcgccagctcgctgatcaacacggccaatacccagttgaccgtgcagccgcgcgattaccgcgtgcttggcatcgagccgcgctacacccagcgcctgcactggggcgccagcgtgcacgacatcaccgccggctaccgcttcctgcgcgaacgcggcaacgaccgcagctacaccgtcagccgccgcaccggcgtggccagtgccaccacccgtttcgacaacgcgaccgatgcccatgcgttctacatcgacgaccgcatcgcgatcggccagtggcggatcaccccgggcgtgcgcatggaatggatcgacatggaccgccgccaggccggtggcacggcgaccttcagcagccgcaacgacaaggccctgccctcgctcaacatcgcctacctgctgacgccgcggctgactgtgttcggcaactacaccacctcgttcgggccggtgcagaacatccagctcaattcccagaccgccagcaatccgctcaaaccggaagtggcaaagaccgccgaactgggcgcgcgctggcaggacggcgcactgcgcgcggaagtgaccgtgttcaagatgcgcttcgacaaccagatcctgcaggtgccggggatcaccccaccgaccttccagaacatcggcgccaccgaccacaagggcgtggagagcgcgctggagtaccacttcgccgaggacagtgcgctggccgggctggagctgtacgccaactacacctggacccaggcgatccagcagtccggtgacaaccgcggcctggacgtgcccttctactcgcgcgacaccgacagcgtcggcgcccgctacgcactggccggctggaccttcaatgtctccagcacccatcagagcggccagttctccgatgccgccaacacctgggaagaaaccgctgacgcgcgcgtgggccgcgtgccgggcgtgcgcctgtggaacgcgcaggtggcctggcaggtgccggggctggacgacagcgagatcgcgctgggcgtgaacaacctgaccgacaagcgctggtacacccgcaacgtcgatggcaacgccggccgcatggtggctgcgccacgcaccttctacgtgcagggccgctaccgcttctga

SEQ ID NO: 493339 - DNA, 1797 bp, Stenotrophomonas maltophilia
gtggcggcgtatcatgccgccaccatgtcactgcctgtttcgccatcgcgcctgcatctggccttccagggcctgcgcctgcgcctgcgcggcagcgacctgtggttcatcgcgcttgccctgctggtcggcctgatcgccggctacctgaccctgctgcagtccggcatcgcacgctggctgcagggcaccctgtacgggctcgacgacggcatgcgcctgagctccctgcccgcgctgacctggaccgcactgctggtgctgccgctgggtggcctgctggtcggcctggtcagcctggccgcgacccggctcaagcggcccctgctcgatgcggtcgaagccaatgccctgcatggcgggcgcatgtcgatgcgcgacaacctcatcgtgctgacccagaccctgctgtccaatggctgcggcgcctcggtcgggctggaggcttcgtatacgcagatgggagcgggcagcggctcgcagctgggcagggtgatgcgcctgcgccgcaacgacgtgcgcatcctggtcggcgccggtgccgccggtgccatcgcggccgccttcggggcgccactggccggcgcgttctacgccttcgagatcgtcatcggcgcctacaccccggccgcactggcgccggtggcggtggccgcgctggcaggtgcattcgtggccgaccaggccggcatcgagccctacctgctgccggctgcctcgacgattgatgtccgcgccgccgactacgccatttacggcctgcttggctgctgctgcgcgatggtcggcatcgcggtgatgcggctgatcgcctcgatcgaaggcacggtcaagcgcagcccgctgcctgcctggggtcggccggtggtgggcggcctgctgctgattccgctggccctggccagcccgcaggtgctgtcgtccggccatggcgcgctgcacctggacctgaccacgcacctgccgctgatctggatcggcggcctgctgaccctgaagtgcctggcctcgggcatctcgctcgggtttggtttccgcggcggcctgttcttcgcctcgttgttcatgggcaccctggtcggcgccctgttcgccggcctgctggcgatggccactggtgtgccggtgatcgacgccacgtccgccgcgctggctggcatggcagcgttggccgccgccgtggtcggcgcaccgatgaccatggccatgctggtgctggaaggcacccacgacttcctgctgaccagcgtggtgatgagtgcggtgctggtctccagcacgctggtacggcagtggttcggttattcgttctcgacctggcgcatgcacctgcgcggcgagaccatcaagagcgcacgcgacgtgggctgggtgcagaacctcaacgccggccggctgatgcgcaagggcgtggctaccgcgccggccgatctcgatgccgccacgttccgccagcgcttcccgctgggttcgggcagccgggtgatcctgatcgacagcgaaggccattacgcaggcatcgtgcagattccgcgcgtctacggcgacggcgtgaagccggagaccatgatcggcgagctggccgagaaccgtgacgtgtcactgtcaccggccgcggacgtggtcagcgtgatgcagcgcttcgaccagacccaggccgatgaactggccgtggtcgccgccgacggccaggtcctgggcgtggtctctgaagccttcgtccgcaagcgctacgccgaggaactggacaagcgccagcgcgaactgatgggcgagcgcgtcgacgacaccgactga

SEQ ID NO: 493340 - DNA, 717 bp, Stenotrophomonas maltophilia
atgcgcttcattgagaccttccaggccggtcccttcgccgacaccgtggtcagcctgctggccgccttcgtgctgggcacgctgatcggcgccgagcgccagtaccgccaacgcaccgccggcctgcgcaccaacgtgctggtggcagtgggcgccgccgccttcgtcgacctgggcatgcgcatcgccggcagcgccgaggcggtacgggtgatctcctacgtggtctccggtgtaggcttcctcggcgccggcgtgatcatgaaggaaggcatgaacgtgcgcggcctgaacaccgccgccaccctgtggtgctcggcggcggtcggcagctgcaccggcgcggacatgctggccgagggcgtgctgctgaccgtgctgatcatcgccggcaacacgctgctgcggccgctggtgaatgcgatcaaccgcatcccgatcaacgaggcggcgaccgaagccacctacgaagtgcgcctgagcgtggatgccgaagccgtaccgcgggtgcgcgagcgactggtcgatgcgctggaggccgcgcagtatccggtgggcgatgtgcaggtggtcgagcatgccgacgcgcctaccgacgtgatcgcggtgctggtcagtaccgcggtcagtgccgacgagctggatctggtgctggcacggatggagcacgtgccgggggtgctgcatgccacgtgggaagtcagcacccgcgattga

SEQ ID NO: 493341 - DNA, 408 bp, Stenotrophomonas maltophilia
gtgcgtgaactggatatcggcgaagtggtcaagcgcagtggcgtgccggcctcgaccctgcgttactacgaacagcttgggctgctgcaggcagtgggccgtcgcggcctgcgccggcagtacgacgagcaggtgctggagcggctggcactgatcggcctgggccaggcggccgggctgtcgctgcagcagatcggcgcatcgctgccaccgcagcgcggatgccttacgctggatcgtgaggccctgctggcgcaggctgatgtgctgcagcagcagatcatccagctgcaacgggtacgccggcacctgcaacgtgcggcggcctgcccgcaggcacaggatgcccggaagtgcggctcgttccggaagctgctgcgggcacagcagcgcatggcgggtgggtga

SEQ ID NO: 493342 - DNA, 828 bp, Stenotrophomonas maltophilia
atgacccgtacaccccccgttgatcagagcgccctgtggaacggtcctggcggccaggtctgggttgcgcagcaggccattctcgatggcctgttccagcccatggccgacctgctggtggccgaacttccggagaccgtcacgcaactgctggatgtaggctgcggtaccggtgccagcctgctggcatcagccgccgcacgcccggcgacacacagcaccggcctggacatctccgcgccgatgctggcgctggcccgccagcgcgccgaggctgcgggactggacgcggacttcatcgtggcagacgcgcagcgccatcctctgccgtccgcgcacttcgactggatccagtcgcggctgggcgtgatgttcttcgaggacagccaggccgcgttcgccaacctgcatcgtgccgcgacacccggcgctgggctgcgcttcatcgcctggcgcagtgccgacgagaatccattcatgaccacggccgagcgcgccatcggcgatgcactggatctgccgccccgggtacccggcgcgccgggacagttcgccttcgccgacggcgggcaggtacagcggcttgtgcaggccgccggttggaaggatgtggaggtggttgcggtagacctgtcctgctcgatcgcccgcgaagacctgcccacctatgtcggccagctgggcccgttggggctggccctgcgctcaatgccggaagcccgtgccgccgtgcttcgccaccaggcgctggctgcattcgcgccgttcatcgaaggcgaccgcgtacgcgtggatgccgcctgctggctggtccgcgcccgcgcgtag

SEQ ID NO: 493343 - DNA, 291 bp, Stenotrophomonas maltophilia
atgaatgcccaattcctgccactctccatgaagacggaagctacgctcagcgtgtacggccagctcggcaaccatgccgtggtgcgcatcccgggccggcgcctgcccggcctgatcctgcaggccgataccgtggcagggttcctggcccagctgcaggaagcacaggcctgcctgcgcagcggccgcgcacagcgcaccgacgccgagctggacatgctgatcgacgtgctgcagcagtggtacgccttgatcgaatcgcgcctggccgacgccggcgaggcgctgtaa

SEQ ID NO: 493344 - DNA, 843 bp, Stenotrophomonas maltophilia
atgaaacagcatcgcatcgcccgcgccggccaacgtgccgctacgctgggcctgatcctggggatgggcctgctggccgcctgccgcagccatgcgccggccaccgacggtcctgccgaggccaccgccgtgcagttcccggaggcctccagggcctcgttgaaggaaggcatctatccggacgtcgccgacctgcgccgcttcgcgccgggcatgagcaagcggcagttgtacacgctgctgggcacgccgcatttcaacgaaggcatgtggggcgtgcgcgagtggaactacctgttcaacttccgcaccgcgcaaggtgcggagtatttcacctgccagttccaggtccgctttgacagcaagggcatcgcccaggcgggttactggaagccggaatcgtgcgcggccgtgctggagccgccgcggccaccggtcccgccggcaccggcaccggcaccgctgccggaacagccgctgcggctgtcggccgacgcgttgttcggcttcgacagcgcggtgctgagcgcggaagggcagcaggcggtgcagggcatcctggcgcaggtacgcgaagccgcacaggtgcagtcgatcagggtgaccggctataccgaccgtatcggcagcgccagctacaaccaggcgctgtcgcagcgccgcgccgaggccgtgcgcagcgcgctggtgcagggcggcgtgcctgcggccagcatcagcgccgaaggacgcggcgcggctgagccgatcgtgcagtgcgggcagcgcaaccggcgcgagctgattgcctgcctggcgccgaaccggcgcgtgcagatcgccgggatggcacagccccgttga

SEQ ID NO: 493345 - DNA, 6123 bp, Stenotrophomonas maltophilia
atgaaccgcatctaccggcgtgtatggaaccgccagctcaatgctctggttgtggcctcggaactggccaccggcgacagcggcggcggcgccgcacgcgatccgcgcgccttcctgctgatgcccaccgcgctggtcctggcactgctgtgcgcgctggccagcggccacgcaggggcatcggaaaccaatcagtcgctgcgcgacctgcaagcgcttgcggcgaagtatgcgcagccgatgccggtcaaggtcgatgcggaagtggccttggctgccgccgcgcgacaggcgcagagcagccccgcgatcagtgcggacgctcgcctgggcctgcagttgaacaccacatcgctgccggtggtgcgtgacgtattgccggccgccgtgcaggtgaagctggcagcgaacaccacgccgaagcaggtggccgtgccggcgctggcggccgatgtacgcgccactgtcggcctgggcaacactgcgatcaaggcggcacaggtggatgcatcgctggcagcgcacgttgcgccgggcgcgcaggcgccgctgggcgtggctgccgatgcgcgcgccagggccaaggtcggcatcgctggccatcaggtcgcttcgatcgattcgggtgcccaggcggcagcgggcctcagcggttcgtccctgaaggcctctgtcgacggcgacaccgacgcgcatctggcggtggctggccatcacatcgaggggcagggccaggcccgggcgacggcggcggtcacgctgccggccaaggaggaactgccgggtgacacgcatgatcgcgccatcagtgccgcgttcgatgccggcgccgcgggcaaggtgcgcgtgcaggcgccggacggccaggaagtagtcgccgatcgcaacctgaagctggccgggcaggcaaccgtagccgcgcagcacagcgcgctgggcgtcggcggtctggtgggcggagcagtggatgctgtcggcgggacgcttcacggtgccgcgggtgcggtcggtagcacggtgggtggtgcgctgaacggcaccgttggcacggttggcggtgcagtgggcggcgctctgaacggtactgtcggaacagtcggtggcgcagtgggcggtgcactcaacggcacagtcggcgcggtcggcggtgcagtgggtggcgctctgaacggtactgtcggaacagtcggtggcgcagtgggcggtgcactcaacggcacagtcggcgcggtcggcggtgcagtgggtggcgctctgaacggtactgtcggaacagtcggtggcgcagtgggcggtgcactcaacggcacagtcggcgcggtcggcggtgcagtgggtggcgctctgaacggtactgtcggaacagtcggtggcgcagtgggcggtgcactcaacggcacagtcggcgcggtcggcggtgcagtgggcggcacgctcaacaacacagtcggcgtggtcggtggtgcagttggcggtgctctgaacggcacggtcggcacagttggcggcgccgtgagcggcgcgctcaacaacacggtcggtgcggtcggtggtgctgtgggcggagctctgaacggcaccgttggccaggtcggcagcgcagtcggtggtgcagttggcggtgctctgaacggcacggtcggcacagttggcggcgccgtgagcggcgcgctcaacaacacggtcggtgcggtcggtggtgctgtgggcggagctctgaacggcaccgttggccaggtcggcagcgcagtcggtggtgcagttggcggtgctctgaacggcacggtcggcacagttggcggcgcagtcggcggtgcactgaacggcaccgtcggtaccgtcggcggtgcggtgggcggagctctgaacggcaccgttggccaggtcggcggcgcagtgggtggcgctctgaacgggactgtcggtacggtcggcggtgcagtgggcggcacgctcaacaacacggtaggcgcagtcggtggcgctctgaacggcactgtcggtaccgtcggcagtgcggtgggtggcgcactgaacggcactgtcggccaggtcggcggtgcagtgggcggcacgctcaacaacacggtgggcgcagtcggtggcgcattgaacggtaccgtcggcagtgcggtgggtggcgctctgaacggcactgtcggccaggtcggcggtgcagtgggcggcacgctcaacaacacggtgggcgcagtcggtggcgcattgaacggtaccgtcggcagtgcggtgggtggcgctctgaacggcactgtcggccaggtcggcggtgcagtgggcggcacgctcaacaacacggtgggcgcagtcggtggcgcattgaacggtaccgtcggcagtgcggtgggtggcgctctgaacggcactgtcggccaggtcggcggtgcagtgggcggcacgctcaacaacaccgtcggcacggtcggcagcgcagtgggcggcattctcaacggcaccaccggtagccccggcacaggcctgggcggcgtgctgggaagcacgctgggcaacgtaggcagcgcggtgggcaacctgctcaacggcaatctcaatggcaccgtcggcaacctgggcagcgccgtgggtggcctggtgggtggcacgctcggcagtctcggcctgacccagccgtcggcgatcccgccgaccagcccgaaggcaccggcgccggccgacccgaatgccggcctgatcatcggcaccggtggcctggtcggcaatgtcggccagctgatcgggccgaccaccaccagcctgttcggcggcgatggttacgtcagcaacggcaatctcaagctgagcaacgccaacgtcatgcagacctattcggccgtcaacgtgctgggtctgccggtggtcaacctgtcaccggtcggcagcacgctcaacggcctgggtggcgccgccacgggcggcagctcgcacctgaccctgatcggtggcgtcacctccgacagctatatctacaacatcaacaacggcaatcccggtggcctgctgggccttcttctgccgaccgattcgccggcgtgggcggccaagtgcctggacatcgcgctggccgacatctcctgctgggccgtcaacgcggcgcaggactaccaggtgctgatgggtgacggcgccttcgccaacggctccaaggaagtggtgatcggtgccaacgcacggcatgagctgccgaaggtcgatgccaacgtcgccttccccggtgatggcgtgaacgatcccagcaacccgaccggcgtgccgacggccgactatgccgcgcgcatgggccattcggtgatcgtcggcgacagtgccgtcggcaccgccaacgggcagaccctgctgggtgccgagtccacctccaaccaggccaactcggtcgcgctgggctaccgctcggccgcactgcgtggcgcgcaggccagctacagtgcctacggcctcacggcgccgcaggtctcggccggtgaagtatcggtgggcaccgccggcgggggcgagcgccagatcaccaacgtggctgcgggcagcggcaacaccgacgcggtcaacgtagcgcagttgaagggggccatcagcctgatcaatggcgtggccgatgccgcggtgacctacgatctggacgccggcggcaacccgaactaccgccgggtcaccctcggtgcaggcaccggcaccaccaccatcggcaacctcgccgccggtgcggtcaccgcgggcagcctcgaggccgtcaacggtggccagctggcggcaacgaacagcgcgatcgccagcttcttcggtggtcgtgcggccttcgatcctgccagcggcatcttcaccgcaccgctgttcgagatcagcacgatctccaccaccggcgccatcgcccagggcctgtacaccaacgccaccgatgccttcgcggcggtggatggttcgctggtcaacctcaacacgcagatcaccgatatccgcaacggcggtaccaagtacctgcgggtgaactcgaccggtaccgaggccgtggccagcggcgccgattcgatcgcggtcggcaccaatgcgcgggcgacggcagccaacagcatcgcagtgggtgcgggaagccttgccgatcgtgccaacacggtttccatcggtgccgctggcgcagagcgtcaggtcatcaacgtggcggccggtaccgcggccaccgatgcggtcaacgtgggacagctgcaggcctcggagcagggggcactgcgctatgacctcaacgccgatggcagcgtcaactatgccagcgccacgctgggccaggccggcaccgccaccacgctgcgcaatctcggcccgggccaggtcagcgccaccagcagcgaggccatcaacggggcccagctgttcgccgccaaccaggccgtggccacccacctcggcggtggtgctgcggtcagcgccagcggcgtgctgaccgcaccgacgtactcgatcaacaacgtcgccgccaacggcacagtgaccaagggcagctacaacgacgtcggcaccgccttcgatgcggtcagcaactcgctggccaacgttgccgatcagaccggcgagatcgacaagctggccgtgaagtacgatgtcgacggcagtggcaacgtgctcaacagcgtgacgctgacgggcaccggtaccggtgcggtgaagatcaccaacgtcgccgccggcagcatcctggccggcagcagcgatgccatcaccggcgaccagctgttcagcacccacagcaccatcgccaactacttcggtggcaccaccgcctacaacggcaccaccaacgcgtggaccgcgccgacgttcagcatctccagcatcgccaccgatggcactttcaccagcggcgactacaacaatgtcaccgccgccttcactgcggtggacggctcgctgaaggtcctcaaccagcgcatcaccaacggcggcggtggcagtgcctacctggcggtgaactcgacggcagcggccgcaacggcggccggggcggaggcggtggcggtcggcccgcaggccagtgcggccggtgccaacagcgtggcggtcggcaacggcgccagcgccagtgccggcaacagcgtggcactgggtgccggttcggtggccagcgtcggtgcgcagagcggctataccggcgcctacggccaggccggtgccagcaactcggccggtgaggtctcggtcggcagcagcggcagcgagcgcaagatcacccacgttgccgacggctcggacacctacgacgcgaccaacgtcggccagctgaagaacggcgtgaattacgccatcgacgagtcgaagaagtacaccgaccagaagatccagaacatcaccaacgtggcgggcagcttccgcgccaacaacaccaacaacctggccgatccgtccgccagcggcgccaactccgccgccggtggtgcaggctccactgccgccggtgccaactcgaccgcgctcggcaatggttcacaggcgcaggccgacaactcggtggcattgggtgcgggttcggtggcaaaccgggccaacacggtctcggtgggtgccagcggcgccgaacgccaggtggtcaacgtggctgacggctcgcaggccaccgacgcggtcaacgtgcgccagctgcaggcgtcgcagcagggcaccatccgctacgacaccacggtgaacggtgcgaccaactacaacagcgtcaccctgggcagcaccagcagcggcccgaccacggtgcgcaacgttgccgctggcaccgccggtaccgacgcggtcaacgtggatcagctgaagtctggcatggcgcagaccctggactggtccaaggcctacaccgacgagcgcatgggtggcttcgagcgcgacctgcgcaagaccgacaaccgtgcttcggccggtatcgcctcggcgatggccaccgcagcgctgccgcagcccagcgaggccggccgcagcatggcctcgatcgcggctggcagctacaacggcgaatcgggcgtggcgctgggcatctccggtgtctccgaaggcgggcgctggatctacaagttcagcggttcgaccaacagccgtggcgaggccggcgtggccgtcggtgccggcatccagtggtga

SEQ ID NO: 493346 - DNA, 618 bp, Stenotrophomonas maltophilia
atgctgctgccggtggcacgggtgcagcgcaagctgaccgaactgagcctgcgcagcacgcctcccgctggccaggcactgtcactgttcaatctggccagcgaaggcacgccgttggcacgccactaccagcagctgcacctgcagctggggcagggtgcaggcctgcagccggaagaaactgaaaccctgctgcacgagcatgtgcaggcccttctgggtgccggtgcggcggatcgcccgggttgcagccgtgcacggcgtacgcattatctgatcgcacagcgggcagagaacttcatgcggctcaacctgcgccgcaatatctacatgaatgaaatctgcgatgcggctggggtcagcgagcgcggcctgcgttatgcgttcgaggacctgtttggaacctcgcccaaccggtatctctccatgctgcgcctgtgcgcggcctgccgcagcctgtcgatggccgattccagccgtcgctcggtgaaagccatcgccctcagctgcggcctgtgggatctttcgcgcttcgccgacaattaccgcaaggtattcggcgaactgccgcgcgataccctgatgcgcgcgcccgcgcagatcggccaaccggcctga

SEQ ID NO: 493347 - DNA, 357 bp, Stenotrophomonas maltophilia
atggtcgatggtggggtaggagacagcggcgacagcggcctgcggtcgatagacctggccacgctgagcggcgtgcttcgtgtctgtgatgtcgaactgctgctgctcgatggcaatgggccacgtgcggcattcgcttcgcgcgtgcacgaggaagccctgttctgcagcatcagctgcggtttccactgccgcggccgtttcatgctgccgccggactgggcgatgctcgggtacctgcacgccaccgatgagacgctgagctggtgccatggcgtaccgctcacgccggggatggcgttgacgatcatgccggaaggcatcagtgagttcaccctgagcccaggcacgcactga

SEQ ID NO: 493348 - DNA, 189 bp, Stenotrophomonas maltophilia
atgaacgcatcgatccgcaaattcctgaaggaagaagacggtgtcaccgcgctcgagtacgggctgctggctgccgtcatcgctggtgtcctgatcgcggtcggcaacgaccagatcaaggggttcttcgaaacgctgttcaagaacctctccgcactggccaccaaggcgtcgggctcgacgacctga

SEQ ID NO: 493349 - DNA, 546 bp, Stenotrophomonas maltophilia
atgacactgctgggattgttggccatcggcgtatgcctgcggatcgcgatcagtgatctgtatgcccgtcgggtgcccaacgcctggctgatcgccgcttgcgtgatcgccaccgtggtgatcgtcttcggccagttcagtgcgccgcgccagccgtggttgccccacgttgctggcgcggcgctcggcctgttggcgctgctgccgttctatgccctgcgctggatgggcgccggcgacgtgaagttctttgccgtgctggggctgatgctgggctggcaggcgctgctgccggtctggctggtcgccagcctcgccgccgggttgcacgccgtgctggtgctggcgggccggcgcctgggcgtgttgctgcccggccacctgcagatgcaggtgaatcgcaccagcacgcaatggcacgcgcatccggccctgcgcgacatgcaggccgcacgccagggacgacgtggcattccctatgccgcctacctcgcactcgccgccatcggctgggtgctggcaagcatctacggaggtgcacaatga

SEQ ID NO: 493350 - DNA, 477 bp, Stenotrophomonas maltophilia
atgaacatccgcagcccgcgccggcaacgcggcgtcgccagcatcgagttcgccctgatgctgatgctcggcctgttgccgctgctgctgttcaccttctccggggtgatgatcatggcagcacagcagaccctggccaccgcctcggccgaaggcgcgcgcgcctcgctgcgctacggcacggccggcgaacggcgcaccgccgcctgcgtcgccgcacgcacctcgatgcaatggctgctgcagttctccaggcagaacgtggactgcagcgcggggggcagcaatgccatcgtagtgtccgcgcaggcgccctgcgccggcctggccacggcccagtgcatgaccgtgacagtcagctacgactacgccagccatcccttcctgcccggcaccgccacgctctacaagtgggtgatgcaggctcccatccgcagcgtcgcggtcgcccagctcgatctcggcagcggcaactga

SEQ ID NO: 493351 - DNA, 1035 bp, Stenotrophomonas maltophilia
atgctcaagttgacccgcatcgctgccgtcgccctgatcggcctggccgtgctgctggcgctgatcgccttcatgatcgggcgcaaaccggcggcaccggtcacggccgcgccgatcgcgcacaacgaagtgcaggccattgcggtggtggaagccgtggcgcgcctgcccgcgggcgagccgatcagcgccaacgacctgcgcctggcccagcgcacctcccccgtcgccggtgccgccaccagcatcgccgccgtggtcggcaaggtgccggtgcaggacattgccgaaggcagcccggtcagcagcagcgcattggcacagggcttctcgctgcagctgcggccgggcgagcgcgcactggccgtgcccgtggacgaactggttggtgccggcaaccgcatccttcccggtgacttcgtcgacgtcttcctcaacctgcgcaatgcccagcccagcatcaacagccccgccgaagccgcgcagacgcgcctgctgctgtcgcgcctgcgcgtgctgagctatgggcagcaggacatcgtgccggtcgcctcggaagccacctccaatagcgaggccgacacccgcaacgacccgcgcgcggccgacatcaccggcagtggcggcagccacagcagcaatgaagccccgcaacccgcgcgcagcgcggtgctggcggtaccggtggccgacgccaatcgactgctgctgggtgcgcagcagggcaagctgttcctggcgctgcgcaatcccgctgatacgggcctgcccgacctcgcactgttccctcagtcgcgcggcgtgatcgatccgctgcgtgggctcgacgcagagcagcagctggcactgcagcgcccggagaaccacgccttcgccggtatcgacggcgacgcgctggccggccgcggcagtgccccgccacgcagcaacgcggatgcacccgcgcgtgcgccggcgccccgtcgcagcgccccgcgcgcttcgggtatcgagatcatccgtggcgacagttccgccccccgtggctccctttga

SEQ ID NO: 493352 - DNA, 1359 bp, Stenotrophomonas maltophilia
atgaccgaacgtcgccgccgtccacgcctttctccccgccagcggtggctggccctgctgctggtgctgctggcaccggcaacgagcgtggccgccgatgacctggtgctgcaggcccgtgagcagcgtccctggaacctgccggccgacctggaacgggtggccattgccgactccggcgttgccgacatcgtgatgctgcgcggccagcgccaggcgctgctggtgggcaggatgcccggcaccaccaccctgctgctgtggcaccgcaagcaggccgagccgcaacgggtgacagtacgggtgcagagcgccgtacagggtgcggccagcaccggcggcaacgatctggtgttcacccagcaggaccagcagggccttttgcagggaagcactgacagcgtgctctcgcacatgcaggaacaacgcacggcggcgatggcactgggcaaggaaggtgcgcttgccgatacgtccaccatcagcagcggcggtgtggtccaggtcgaggtcaaggtggtcgagttcaacaagaccgcgatgaagcagatcggcatcaactttcagaaccgcaacggcggcttcgcctacggcttcgcgcggcccggcaccgggttgccgggcaacaccggcctgctgcccggcatgaaggaaggcaacagcagcaacgaggccgtctcgccgatttcctcggcattccgccttgttttcggctcgaccaaggggctgtggaacgccgatgtcgaactgctgcaggccaatggcatggcccgcgtactggccgagccgacgctggtggcgctgtccgggcagagcgccagtttcctggccggtggcgaactgccgatcctggaaccgcaggggcttggcactaccaccatcacctacaagccgttcggcatcggcctgaccgtgaccccgaccgtgctggcagcgaaccgcatcgcgctgaaggtagcgcccgaagcgagcgacctggactacagcaatgccattgtgctcaacaacgtgcagattccctcgatcaccacccgccgcgccgacaccaccgtcgagctgggtgatggcgagagtttcgtcatcgggggcctggtcagctccaacatcgtctccaacgtcagcaagattccgctgctgggcgacctgccgatcatcggctcgttcttccgtaacttcgattacaagcgccaggacaaggagctggtgatcatcgtcaccccgcgcctggtgcagccactggcgcgcaacaccgaactgccgctgcccggcgagcgcgaagccaggccgcatctccccgagtggggttcctggttgctgggtccggttagccaggacccggtgcccggattctcgcgctga

SEQ ID NO: 493353 - DNA, 1212 bp, Stenotrophomonas maltophilia
atgaacctggtcctgtacggcatcgaccgcgaactgctgccccggctggccgccaagctgccgccgagcaccgccctgcattggcaggacagcaacgcccccacctccgcccaggacctgcaacgcggcccgcagagcctggtgctgctcgacttccggcccgagcatgcggccgcctcgagcgtgctggcgcagcagctgcagcagacccaaccggacctgccgctggtggccgtgggcgccaccagcgccggccaggtcgaaggcgtggtgatcgcgctgcgcgccggcctgcgcgatgtactggacctggacagtgacgacgcaggcatcgaggcggccttgcggcgcgccctgtctccgcgcccggcagcggttgcccagcacgcacacaaggcacgcctgatcgtgctgctgggtgtgcgcgccggcgtcggcaccagcaccctggccgcacatctttcggtgctggcgcagcagacgcgcgccctggcccagggcgaagccgtgcagcaggacggcctgctgatggagctggcgcagccctccggcgacctcgcgctgtacctcaatctcgacagccgcttccactacgaagacgcgctgcgcaatgccagccgcatcgatgccaccctcgcccgcacggccatggcgcgccatgactccgggctggtgctgctggatcgtgccagtggcagcgatgccgtcccgccctcggatcctggcgcgctgctgcagcgcctgcgcggcgtgttcgccagcgtgctgtgcgatgccggcggctgcccgttgcggcagcttccgcccctgttgctggaccaggccgacgagatctggctggtcaccgatgcctcgatcgccacgctggtttctctggaccaggccctgaagcacctggcgggccagcgtgagcgcgagaagcgcctgcaactggtgatcaaccgccacgatgacagcagcggcatgagcccggaacagatcgcacgccgcttcgaagtaccgctgctggcgacgctgcccgaacgaccgcgcgtgcgcctggccgccagccagggacacctgctgctgcaggatgccccgcgcgacccctatctgcgtgccctcgccccgctcgtgtcgcgcctggatccggccgcctgcccggtccagccgcatggcctgcgggaaagactctcccttgccctgggtggatcgcaatggaagacaaggtaa

SEQ ID NO: 493354 - DNA, 1350 bp, Stenotrophomonas maltophilia
atggaagacaaggtaaccccgttcccgcatgccgttgcccgcccggtactgcccgaatctgccccgggccacctgccgttcgcgcagaccgagcagtaccagaaggtgctgtcggccgcgcatgagcacctgctcaacagcatcgaggacgagcgcatcgacatcgattcctgggccccggacaccatcgcccgctgggtgcaggtgcagaccgtgggcttcatccaggaatggcgcatcccgatcaacgaagaagagatgcaggtggtcgccgagggactggtcaaggagctgaccggtttcggcccgctggacgacctgctccacgacccctccatcgaagacatcctgatcaacggcttcaaggatgtgcacgtttcgcagggcggacagctcaagcgcgccacccagcgcttcaccgatgatacccacctgctgcgcatcctgcgccgcatcctcgccccgctcggccgccggctggatgattccaatccgatggtcgacgcgcgcctgcccaacggtggccgcctcaacgcgatcatctcgccgctggcggtggacggaccgatggtgtccatccgcaagttccgcaaggacccgttcacccccgacgaactgctcgccaagggcaccttcgacgcaccgatgcaggcactgctgaaggcgatggtgctggggcgctgcaacatcctggtctccggcggcaccagctcgggcaagacctcgctgctcaatgccctggccagctacgtgccggccgatgagcgcgtcatcaccgtggaggacaccgccgagctttcgctgaaccatccgcacgtggtgcgcctggagagccgcatcggcggcgccgagggccagggcgcggtcagcatccgcgacctggtgcgcaacagcctgcgcatgcgcccggaccgcatcgtggtcggcgaagtgcgcggcgctgaagtgctggaaatgctgcaggcgatgaacaccggccacgacggatcgatggccaccatccacgccaacacgccgcgcgactgcctgtaccgcatcgagatgctggccgggtttgccggcttccagggcagcgaagacagcctgcgccggcagatcgccagcgccattgatttcatcgtgcagatctcgcgactgggcagcgggcgccgggtgctggtctcgatcaccgagatcaccggggtcagcgacaacctgatcaccacccaggagatgttccgccacgaggtgcagatcgatggcaccggccgcgagaccgaccgctggatcggcctgggcttccatccgcattcgcacaagctggagccgttccgccagcagctgcgcgaatcactctacggggacttctga

SEQ ID NO: 493355 - DNA, 957 bp, Stenotrophomonas maltophilia
atgggcaccggcctgctgctgggcgtgttgagcatcatctcggtgctgctggcgctggccgtctggctgtggggtaccgccagcagccgtgaacagcgccaggcctcgctgcagcacaccgagcagcagctggcacgcggcagcacggccagtgcggtgccggccgggcctgccgttgcggcggcgaacgattcggcccgccccgccagcagtgggagccgcgcattaccctgggatggcgtcctgcagcgcgccggcctgcagccgggctggaagctgccactgatgctgctggtaccgggactggtgcttgcggtcgtggcggcggtgcggctgggcacggcctggatgtttccgctgacccttctgctgtacctgctgggctgctggctgtgggtgatgcgccggatcacgaaactgcgcgcgcagctgctgcaccagatgccggacttcctcgacaacctggtccgcctcaccgcgctgggcaacagcctgcaggccgcgttccaggtgtcttcgatgcagaccagcgcgccactgcgcggcctgctggacaccacggtgcgctatgcgcgcagcggcatggagctggatcgtgcattgagcctggccgcacagccgtaccggatggacgtgctgaaggtgctggcggtggtgatcggggtgagcgtgcgcatcggcgggcgcgccgaccagatcctgcagcgcatgggtgatttcatgcgcgatctggagcaggcccagcaggagctggccgccaccacctcggaaacccgcatgtcggcctgggtattggggctgctgccaccggccagtgcggtgctgatggcgatctccagcccggcgttcttccagccggtgctgcatgacccgctcggccacaggatcctgctgatcgcactgggcctggaactgctcggggcgttgctgctgtaccgcctggccaaatcgctatga

SEQ ID NO: 493356 - DNA, 936 bp, Stenotrophomonas maltophilia
atgagcgccagcgcctggttcgccctttcgctgctggtgctggcagcgggcgtcgccctgctcggcattgccggctgggtgcgcagccatcgcgagcaccgcacctcggccgcgctgaagaccgccctgcagccgcgcgaggaagcccgcgacaccggggccacgcgccgcgactcgctgggctggctcgagcgcttcgggcgctcgctcagtggtggccgcctggaggccgcgctgctggccaacgaggacaggctgctgctggacctggccggctggaacacgcgccgcggcaccgccatctatctcggcctgcgcctgttgcttgcgctgctggtgctggcgctggcgctggcgttcagcagcgcgcacggtctggccagggtgatggtggtgatcggtgcgctggcggccgggctgctgctgcccaagttcgtgctgtcgtcgtgggtcaagcgccgccgccgcgcggtcgagaacgaactgcccttgctgatcgacctgctgcgcctgctgcagggcgtgggcttcagcatggaccagagcctgcagacgctgggcgacaagctgcgcgatgcgttgccggtactgggcggcgaactgcaggaagccaacgtagcctacacccacggccgcacccgcgcgcagtcactgcggcgcttgagcgaggtctacgccgatgacgacctggccagcctgatgcagctgatcctgcaggtgcatgcgcacggcggcgccgtgcaggaaccgctgcgccagttcagcatccgcctgcgcgagcagcgccgcaacacgttgaaggaaaaggtcggcaagctctcggtgaagatgaccgtggtgatgatgctgaccctgttgccggcactgatgctggtgcttgccggtccagcgctggtcgcgctggccaccaccatgtccaagatgggatcgccctga

SEQ ID NO: 493357 - DNA, 891 bp, Stenotrophomonas maltophilia
atgcctgccctgcgcaccccctgcctgctgcttgccgtcgccctcgccaccctggccagtggctgcgcatcgaccacgccgaagtacgtgcgggcgcccagccttgcgccgccggagcccgatccgcaggacagccgcaacacctatctggagctgatcgagcgcatgcagcagcagggcgcctggtatgcctcgctcgcccacgtggaggccttccgccaacgctatggtgatcgccccgccctgcgcctgctgcaggccgacgccctgcgcgagactggccagagcgacgcagcggtcgcgctgtatcgcgagctgtccagtgggccgcaggccgctgcggccgcccacggcctgggcctgatcgctgcacgccgcgatgacgacgccggcagcgaacaggcgctggcgcgcgccacgcaactgcagcccttgaacaccgactacctgggcgacctgggttatgcgcggctgcgcgccggccagttcgaccaggcgcgcgagccgctggccaaggccctggaactgtcgccaggcaacgccaaggccacggccaatctcgcactgtgggcgctcctgcgcggcgaccaggccaccgcggagcgcctggcggcacaggccaacctcaacgacgaaacgcgccgcagcatccagcagcaggcccagcagatccgcacgcgcctgcagcagcggcaggcggcggccgccgtcaacgcccctgcgcctgcgcctgcggccagcagcgaacacggcgcccgtgcgtcgggcagtacccggctggcagccgaaccacgccgcgaagcacgtgacgagcgcgatccgcagcgcctgccaccgtcgatgctggaacgcttcagcaccaccgaacacccgaccggaagcacaccatga

SEQ ID NO: 493358 - DNA, 462 bp, Stenotrophomonas maltophilia
atgactgcgatgcgcctgacccgacgcctgttgcccgtgctgtcctgcctgcttgctgccggtgccgtgcaggcccagcaacagccattgaccggacagatgctaggtggccccttgccgtcggcaccggccgcagcaccgatgcaggccgagccgcttcccaccgtggagctggccgcacccgccgcatccgcggcggtggcagcggtgccaccggcactccccgcaaccgacggtgccccgccggcaacaccgcgtgcgcgcctgcagagcggcgaagccacccgcaacctgtttcgcctgcaggcgtcgggacagcaggccggccagcgcctgccgatcctgggtgaccaggccaccctgagttatgcgcgttacctgaagagctttgaacacgagattccggacttctttgagaccgatgttgcccggtccaaggatgcctcctcctccggacgctga

SEQ ID NO: 493359 - DNA, 2151 bp, Stenotrophomonas maltophilia
atgaaacgcccacgccagttcagtttcggccgcgcacgcggcggcatgtcggtcaccatgatgctggtcatgctggccttgctggcgatgctgggcctgatcgagatcggctatctgttctgggccaagcgcgatgcgcagaaggttgccgatctggccgcactggccggcgcgcagcgactggagttgtgcagcgcggacaacagcgacaacagcgccgcccggcaaagcgcactggcccagaacaggttcgcaggcaccttgcaggtccgctgcggcaactggagtgccagccgcggtaccagcaaccgtttcgtcaccagcgttgatgccagcaacccgcgcaatgcggtgcaggtgatcgccgagcgcagcgtgctgcccttcttcggccagaacaccagcctgccgaccgtcagcgtgcaggcggtcgcccgccgctcggagcccacggcggtgttcgcggtgggctcgcagctgctgcgcaccaatggcgattccgtactgctgtcgaccctgcgcctggtcggcctggatgtcagcaatgccacggtgctgtcctatgacggtctggcgcaggccaacgtcaccccatccggcctgctgaaggcactcaacatcccggtgagcgccaacctcagcgtggccgatttcaaccgcctgctgtcggtcaacaagatctcgctggcgcaactggtcgatgccaccgccaccgtggtcggccgtgactcgacggtgggcgtgcagctgcgcgccctgtccgacctggtcgccacccagctggacatcaacaagctcaacatcgtgctcggcagccaggccggcggcggcgggctgttcgcggaagttgtctcacccgacggcaccgtcggcagcgcactggaatcgaagatcaacgtgctcaacctgatcagcaccgccatctccatcgccaacgatggcaacggcgtgacgatcaaggggctggacctgctgggcatcaacatccagggcggcgtggtcgagccgccgtcgatcgccatcggcggcgtcggcacccgcgcctacaatgcgcaggtgcggctgatggtggacgtggacagcaacaacctgttcgcgcttgggccgctgctgaacctgctcggcacgcgcctgcacctgccgctgcacgtcgacgtggccaacggcatgggtaccctgaccggcatccagtgcggcggcagtccccccaaggccaccatccaggtcgattcatcggtgctgcgtgcctgcgtcggcaacgtcgaccccgcacagcgattctccaaggccaatgtctgcgacgccacgctgcagaacgaacagctgttgaagctgctgggccagccgctgatcaacgacaggataaccctgcccgccctcaccggctcacaggacctgaccctggctgcgggcgagaccggctcgacccggatcaatccgctcgcgatcggtgacgcagtgtcgagcctggtcaacgagctgctgcgggtgctgtcgggcatgctcagctcgccaaagcagggcatgagtgccaacgacacggccaaggcgctggccgatcgttacctgcaggcggcctttcccactggcggacgctacaacgtcgaccaggtcatcccgctgctgcgcgatggcgatccggcacgcaacctcgccccgctgggcaactggacggtgaagaatggcgtccccaagccctgcctgctgggcctgaccacctgctgggaagacggttcggtgtggaccggttacaggacgaccgtcaccggccagggcctgggcctgctcgatggcctgctcggctcgctggccggcggcctgctgatcaaccgctgcgacagcctgctcggcaacctgatcgactacaacggctgcgtgcgcaacaacctggcgtcgtacatccagaccgcgccggcgggtttcctcgatggcgccggtggcagcggcgtcgccaaccccgacggaagcgtcagctgcagcggcctgctgtgcaccgtgctgaagccgatcctggccgcactgcgaccggtgctcaacagtgtcggcactctgctgaccaacctgctggccagcgtgctgggcctggaactgggccggaccgacgtcaacgtgcagtcgatccagtgcagcgcggcacagctggtctattga

SEQ ID NO: 493360 - DNA, 711 bp, Stenotrophomonas maltophilia
atgcgagaaacttcagggggcgcggtcttcgcccggcacgcgcgcaacgcagcagtgctggccgtggccatgatgctggtggcaccggcggcgatggccgcgcgtggcgaccgcgaggctgcagccgaaccggcgcgcagcgcgccggtggtgcgcaataccgtggacgagctcaagcagttgatggattcgcgccagctgaccgagctgcgcaccacctacaacggcaactacggcgccagcctgctgttcaacgccaataccctgacctactacgtcgccctgttccaggagaagaacttctggcgggtgatcaagaccgatgcggtggacaacgccgaacgtgtctaccgcaccttcgcgcagcagtccgagcagctggcccaggtctacatcgacaccacccgcctggaagccggcaagcgctacaccgagcgcctggtggcctacaacgaagaacgcctgcgcaccctgcagcaggaaatggaacagcagcaggcacagtcggcgcaggtcagcgccgccctgcagcaggcccagcagcaggcagtcagcctcagcaccgatgtgcagagcaccaacagccagctggacgccctgcagcgccgcatccagatcctgcaggccgaacagggcaacccggagttgagcctgcccaagccggacagcgtgccctcgccggcaccggccgccaccagcgacggccgctga

SEQ ID NO: 493361 - DNA, 387 bp, Stenotrophomonas maltophilia
atgcccgccacgcgatggtccctgctgttgtgcctgctgttgccgatggccgcgccggctcagaccaatgtctacaaatgcgtggatggaccgcatccggtctaccagcagacaccctgccagggccgggcggcgtggcgctgggatgtcccggcggagcagtcattgtcccgtggggcggtggttcccgcagtcacgccatcgaagccgtcgcgtcgcccgcgtcgtgccgtccgggcgcagggcgcattgatcacgatcagcacggatgcggcggcctgcgagcgtgtgcgccgccagcgcggacaggcgctgctcaaacgtcggcggttggatttcgtgcagcgccggcagctggatgacgcggtctacgacgcctgccagtga

SEQ ID NO: 493362 - DNA, 825 bp, Stenotrophomonas maltophilia
atgagcaacttcgtcaccgtcgccgacggcgcccgcatcttctacaaggattggggcaacggccagccgatcgtgttcgcccacggctggccgctgtcgtccgatgcctgggatccgcagatgctgttcatgggccagaacggttaccgcgtgatcgcccacgaccgccgcagccacggccgttccagccagacctgggacggcaacaacatggacacctacgccgacgatctggctgcagtgatcgaggcgctggacctgaaggacgcgatcctggtcggccattccaccggcggcggcgaagtggcccactacatcggccgccacggcagcacgcgcgtggccaaggtggtgctggtcggcgccgtgccgccgctgatgctcaagaccgccggcaacccggccggcaccccgctggaggtcttcgacggcatccgcaagggcaccggcggcgaccgttcgcagttcttcaaggacctgaccaccccgttcttcggcgccaaccgcgatggcaacaaggtcacccagggcatgcgtgatgcgttctggctgcagggcatgctcggtggcgtcaagggccagtacgactgcgtgcacgaattctcggaagtggattacaccgaagacctgaagaagatcgacgtgccggcactggtcgtgcacggtgatgacgaccagatcgtcccgttcgatgcctcggccaagctctcctcgcagatcatcaagaatgccgaactgaaggtatacgccggtgccccgcacggcctgaccatcacccacgccgagcagttcaacgccgacctgttggcgttcgcgcgcagttga

SEQ ID NO: 493363 - DNA, 1647 bp, Stenotrophomonas maltophilia
atggtgaacgcaaccgcgtcgcaaccccccgcacaggccgcaggcgcctggtccccactgaagatccagatgttccgctcgatctggctggcgatcctggccagcaacatcggcacctgggtcaacgacgtggccgccgcctgggtgatggccgaacgtaccggctcgccgttgatggtggccctggtgcagtcggccaccaccgtgccgatcgtgctgctggcactggccgccggaaccctggccgacatcgttgatcgccgcatgtacctgctggccacgcagggttggatgctgctggtcgccgccgtgatggcggcgctgaccgcaatggacatgctgaccccgcagctgctggtgctgctgaccttctgcatgggctgcggtgcggcgatggcgatgccggcgcaggccgctatcgtgtccgaactggtgccacagccgatgctggcctcggcggtggcgctgaactcgatcggcatcaacatcgcgcgctcgatcggcccggccatcggcggcgtgatcgtcgcccagctcggtgcggtctgggccttcggcttcaacgccatcaccttcgccgcgatgctgttcgtggtgtggggctggaagcgcgacccgaagcagtccagcctgccgccggaaggcttcggtgcgggcctgaaagcgggcctgcgctatgccagccgcgccgggcggttgcaggcggtgttgatcaagtcggtcggcttcttcttcttcgccgcagcgatgaatgcgttgctgccggtggtggtgcgtgggcagatgcagggcggggcgggccagtacggcatgctgctcggctgcatcggcatcggtgcggtgggtggtgcgctgctgctgccgaagctgcgcgcgcagctggatcgcgacctgctggtgctgctggcgaccctgtcgctggccatgagcctggtcgggctggcgctgacccgaagctggtacgtgctgccgctggtgatgctggtcaatggctttgcctggatcaccgtgctgtcgtcgctgcagatcgcggcgcagaccgcagtgccggcgtgggtgcgtgcgcgtgcgctggcgctgtacatcatggtgttctctgccggcatggccgccggcggcctgagctggggcgcactggctcagcgcacctcgccggagctggccctgctggtggctgctgcgggtgcggtcatcggcgggttgctggtgtggcgcgtgcgcatcgccggcaccgaagacctgaacctgcgtccggcggggcactggccagcccccgaactgtcggtaccggtatccaatgatcgaggcccggtgctggtgaccatcgagtaccgcattgacgatgctgatcgcgccgcgttccaggcgcagatgcgcgcactgggcaccatccgccgccgcgatggcgccgtggtctggggcgtggtcgaggatgtggccaccccgggcatccatctggagtatttcgtgaccccgtcgtggctggagcacctgcgccagcacgaacgcatcaccgccgacgacagggcgatccaggaagtgctgcgcggattgcatcgcggtgagcgtgcgccggtggtgcgccacttcgtaggcgggcacaacccgctgcctgccgctgtgccgcatcaccacaccgacatctga

SEQ ID NO: 493364 - DNA, 1284 bp, Stenotrophomonas maltophilia
atgctcgtgcttcgcgttctgagcctggcgctgctggccatgccgtggatggcgctggcctgtgacaccggccgctgcaccgacatgggcggcgggcaactgcaatgggacgcctcgctgcgcttcagggggatgtactacgacccggcccgattcggtatcggcggcagtgaagacggctacggtctgctgcgtgcactggcgtcggccacgtatgtcgaggacaactggcaggcacgggtgcagctgggcgtgcatgccgagactggcaaggcaggtggaccgggtcgtaccgaccgtggcgcgttggacgtgcagcaggcgtactggcgctggcagcgcggtgggttccatctgcaactcggccggcaggaagccggctatggcagctcgcggctgttgtcggtgcgcgatgggccgaacatccggctggcattcgatggtgcccgtgcaggctggaaaggccgcctcggcacgctggacctgatggcgctgcgaccgctggagaaccgacccggcgccttcgatgaccgcggcgaacgcggtgcccacttgtggggcgcgtatgcgaccaccgcgcgtggtcgtggcccaggccaatgggatctgtacctgctggactaccgtcgtgaaggcgcgcgctttgcggcgggctccggtaccgagcgacggcagaccctcggtgcgcgttggttcggccaggctggtgcactggactggaacagcgagctggtggcgcagggcggtgaactgcgaacgaccgctggcacgctcgatatccacgcctggacgctggccaccgatacggggtggcgctggacggacctgccgctgcagccgcgtctggggctgaaggccgacatcgccagtggcgatggcaatctgcacgacggccgcctgggcaccttcaatgccttgttcccgaagtcggcctatttcagcgaggccagcctgctggccccggccaacctgatggacgtccagccgaccctgacactgcgcctgcacgacgcggtgacgacggaactgggcgtacagatggcctggaagcatcgccgcgccgatgcggtctacaccacgccggcaccgctggtggcgttgccgggcagcgccggcggcgcgcgccgcatcggcacgcagtacaaatccgaaacccgctggcaggccagcgaacactggcaatggcagctgcagctggcctgggtcgatgccgggcctgcactgaagcaggccggcggccaggacacgctgttcgcctcgatcgttggagcatggcaatggtga

SEQ ID NO: 493365 - DNA, 1971 bp, Stenotrophomonas maltophilia
atgagtcacgatcccctcgaccacggccgccgcaacgtggtgctggccagcggtgccgcggttgcgctcggcctggccggtcgcgccgctgccgcactcgattccacttccaaggagcgtcgcatgagcacgctggtcatccgcaatgcccgcatcaccaccctcgacccgcagcggccgcacgcgcaggcactggccgtgcaggagggccgcatcgtcgctgtcggcagcgatgaggagatcatgcgcggctggggcaatgaagcgaccctgatcgatgcgcagggccggcgcctgctgcccggcctaaacgacagccatacccatctgatccgcggtggcctgaactacaacctggagctgcgctgggacggtttgcgctcgctgggcgacgcgctggacatgttgaaggcccaggtcgaccgcaccccggcaccgcagtgggtgcgcgtggtcggtggcttcaccgccgcacagttcaacgagaagcgcctgccgacgctgcaggagctcaacgacattgcgccggatacgccggtgttcctgctgcacctgtatgaccgcgcgctgctcaaccgcgccgcgctgcgcgcctgcggctacagcaaggacacgccggatccaccgggcgggcagatcgtgcgtgactcgctgggcaacccgaccgggctgctgctggccaagcccaacgcgctgatcctgtatgcgacgctggccaaggggccacgcctgccgatcgagtaccaggccaactcgacgcgccacttcatgcgcgaactgaaccggctcggcatcacctcggtgatcgacgctggcggtggtttccagaactaccccgaggactaccaggtcatcgagcagctgcatcgcgatgaccagctgacggtgcgcatcgcctacaacctgttcacccagaacaagggcaaggaagtggacgacttccgcggctggagcgagatactgcagccgcgccagggcgatgacctgctgcgccacaacggcgctggcgaaatgctggtgttctccgcggccgacttcgagctgttcaacgagccgcgcccggaactgccgcctgagctggaaccggaactgcacgatgtggtgaaactgctggtcgagaagcgttggccgttccgcatccacgccacctatgacgagagcatcacccgcatcctcgatgtgtacgaacaggtcaaccgcgaggtgccgttcgatggcctgcactggttcatcgaccacgccgagaccatcaccccgcgcaacatcgaacgcatccgcgcgctgggcggcggcatcgccgtgcagcaccgcatggcctaccagggcgaagccttcgtcgagcgctacggcgtgcaggcggcgcggcacacgccgccggtcaagcgcatgctggccgaaggcgtgccggtcggtgccggtaccgatgccacccgcgtggccagctacaacccgtgggtggcgttgtcctggctggtgaccgggcgcaccgtgggcgggctggccctgtatggcgatgagaacctgctcgagcgcgaacaggcgctgcgcctgtggacccagggcagcgcctggttctccggcgacgaagcggtgaagggcacgctgaaggtgggccagctggccgacttcatcctgctctcggccgatttcttccgggtcgatgacgcgcagatcgctgacatcaccagcgtgctgaccgtggtcggcgggcgcatcgtgcatgccgacgccgactatgcagggcttgcgccgcagctgccgccggcaatgccggactggtcgccggtcaaccggttcggtggttaccacgttggcggtgctgccaccggattggccgccgcgcatcgccaccatcacggcgtggcctgtagtacgcatggtgctcacggccatgccgcgcagcacgcggcgcccaccgacgacctgagcgccttctggggtgcgatgggatgctcgtgcttcgcgttctga

SEQ ID NO: 493366 - DNA, 426 bp, Stenotrophomonas maltophilia
atgctggccggccacggcctcgacctggccctgctgatgctgcgggtggcggcaggcggcttcctgctgcctcacgcgctgggcaagctgtttggctggttcggcggaccggggctggccggcttcgccaccgagctgcgcggtttcgggctgccggcagtggcgccgttgccgctgctgttgtccctgctgcaggtgctgtccgggctggccgtgctgctgggctggcagacccgcatcgccgcgcttgccgccgctgccttcatcggcttcaccgtcctgttggccttgcccaggggctggttctggatgcgcggcggcagtgagtacccgctgatgtggaccacggtgctgctggccatcgccctggccgggccgggggcctgggcgctggacggtccacgacttccgggagctttcgcatga

SEQ ID NO: 493367 - DNA, 657 bp, Stenotrophomonas maltophilia
atgagccttgccaccgccacgcccgccccggccctgctgtcgcccaccgaccatgccctggtgctgatcgacttccagtcgcagatggcatttgctacccacacgatcgacatctccgcgctgcgcaacaacgtgtcgctgatcagcaagggggccaaggggttcaacgtgccggtcgtgttgaccacggtggccgagacgtcattctccggcccgatgttcccggaactgccgcagatcttcccgggccagccggtgttcgaccgcacttcgatgaatacctgggaagaccagccggtaatcgatgagatcaaccgcatcggcaagcgccggctggttcttgccggcctgtggaccagtgtctgcatcgtgggtccggcgctgtcggcgctggcgcagggcttcgaggtccacgtgatcaccgatgcctgtggcgatgtcagcgaagaagcgcacgagcgtgcgatcacccgcatggtgcaggccggcgcggtgccgatgaccagcgtgcagtacctgcttgaactgcagcgtgactgggcacgcggtgaaacctacgacctgaccaccggcatcgcccgcgaccacgccggcggctatggcatcggcatccagtacgccaagcgcatgttcggcgcgcaggaaggcgggcactga

SEQ ID NO: 493368 - DNA, 417 bp, Stenotrophomonas maltophilia
atggccaccgtcagtccgtccgatccgtccgccaccccgcttgccccgcagcaggccgccgcactgcagcgcgccctgcgctatgtcgatgagcacctgtcgcagccgctgcgggtgaccgagctggcgcaggctgcctgtgtcagccgcttccacctggtgcgcctgttccgtagcggcaccggtgccagcccgctgcgctacgtgcgccgccgccgcatccagcgtgcctgccaactgctgcccagcgcgcagttgccgatggcgtgcctggcccagcagctgggcttcttcgaccagagccatttcgtccgcagcttccgcgccgagaccggctgcagccccggccagtatcgggccggcgatgcggccctgctgcttccccctgatcatgtttcccacggagtccacccatga

SEQ ID NO: 493369 - DNA, 333 bp, Stenotrophomonas maltophilia
atgcagcgcctgttcgtgatgttccctgatcgcggtccgggcatcggcctgctgtggctgcggctgtgcctggccgccgcgctgtgcgcgcctggcacgcatgctggttggggggcggtgctgtgcgggctggcggcggccatgctcgtgctgggcgtgttgacgccgctggcgaccctgatggcagccgcgaccatgttcgcgcagcaggcaccgtggccgctggtggcgttgcctgcggcgctgctgatgctggggccgggcgcctactcggtggatgcgcgcttgttcgggcgccgcctgctcggccgtcggcctcccccattcgggtag

SEQ ID NO: 493370 - DNA, 3021 bp, Stenotrophomonas maltophilia
atgcgtggccgccccttcctgttgcaacgtcacctgcggacgctgctgacctgcctgctgctgttgaccgccctgcccgcccttgccgtgcagcgcccgccggtgagcggcgggttgcccgattacgagcacacggcctggcgcgtcggccagggcgcccccggtgacatctgggacatcacccaggaccgcgatggcctgttgtggctggccaccggctcagggctgtaccgcttcgacggtcgtcgctttgaacgccaggccgctcccgcgggcagccatttcccgtccaccaacatggtcacccttgcgcggggccgcgacgatgcactgtggatcggctacttccaggccggcatcagtcagtttgcgcgcggccagctgcacaactacggccgcgaccagggcgtgccggtgggtgtggtgccacacttcagccaggaccttgacggccggctgtgggccgcgatcaatggtggactacgccaattcactggccaacgctggcagccgctgcccgctggcatgggggtgccggaacatcgcgtgcaatggctgctgcacgacagccgcggcaccttctgggtactggccgacctgaagatctgggtgcgcgcggccggccaggcggccttcaaggacaccggcatcgccgtttcgcagatggcgacgctggccgaaagtccgcagggggaagtgtggctggccgaccgcgtgcgcggtacgtcgccgctggccaacgcacgaggcctgctgccggacagcgagcgcgaggcacggcggttgccggagctggtggcggcgcgcctgcagttcactgccgatggcgcgctgtgggcaacgatgagcccgcatggcggtgtcgcccgggtcaccttcgatggcgaccgcgccatacgcatggagcgcttcgattcgccgcacgggctgaccgccacctcggccgtgccgatcatcgttgatcgcgaaggcaatctctgggtcggcaccaatctcggcctcaaccgcttccgcgcgcgcagcgtgcacacgctggcggttggtcccagtgatccctaccgctcgctggtgcgggccagcgatggccatgtgtatggctatggcgaagacctcaagccctacgacctcgagcgcaccctgctcgatggcagcgccacgcagctgcaggccgccgcgcgccaggcagctgccccgatctggcagttcgactgggtcaaccttgcgcgcaccgtggccggccgcaccacgcggattccgctgcctgcgccgttcaccgggcaaccactgcatgccctgctgttccccgacgacgaacaggcctgggtctgcaccggcgaacggggggtgctgcactaccagcagggccagtggcaacgcgaacgccgcctgcccgaacaggcctgctcgtcactggcgctggatgccaacggccagctgctgctcggctatgcagacggccggctgcgccgcatgggggcgacgcagatcgaaaccttcgacgccagccacggcctgtcggtcgggccgatcacggcggtactcgatcatcaggacctcctgctggtagccggcgaggccggattggccgtgcgcccgggcaatggccggttcgttcaggtgagcaccgacatggccggcgtcatggaaggcatcaccggcatggtggccgatgcgaatggctacctctggctcaatggcagtcgtggcttggtccggctcgggagcgatcagctgcggcgcgcactgcgcagccggcagccggtgacgccccgcctgttcgatgcggtggatggcatgccgggcatcgccctgcagagcggaccgatctccaccaccgcgctggccagcgatggcctgttgtggctggccaccaaccagggcctggcctggctggacaccacccgctcgcacgtcaacaccatggcgcccagcgtgcgcatcggcgacgtgctgtacggcagtgaacaccagccactgcgcgacggcctgcgccttccggccggcaccagccaattgcagatcgattacgtggcgctgtcgttggcgcgcccggagcgcaaccgctaccgctatcgcctgtccggggtcgacgacggctggcaggatgccggcagcagcacgcgcgcgtattacaccaacctcgcaccgggcaattaccggttcgaggtggaagccgccaacgaagacggcatctggagcactgcacccgccagccgcaccttccgcatcgcccctaccttcatgcagaccctgtggttcaagctgctgtgcgccgccgcggtgcttgcgctgctggtcctggcggtgcgcatccgcagcgggcagctggctgcactgttccgtgcgcgcctgcaggaacgccatggcgaacgcgaacgcattgcccgcgacctgcacgacacgctgctgcagggcagccagggcctgatcctgcggctgcacgcgatcagccagtcgccgcagaccccggacagggtgcgcggccagctggaatcggcgatgcagctggccgaacgcaacctggccgagggccgggagcgggtcaacgcactgcgcgacggtcctttcgcgggccgcgacctcgcttcggcgctggccgatgttcacgccgaatacgccgggcacggcaccaatccgctgcgcctgactgtggaaggcgcaacaccagcgctgcaggccgatgccgccgaggaagtgttcctgatcggccgcgaggccatccgcaatgcactgcgccacgccaatgccagcgccatcgaggtagagctgtcctacggcgcgcggtgcttcctgctgcacgtgcgcgacgatggcgtcggcatcgccgacgaaaatgccgggcatggccattggggcctgcagggcatgcgtgagcgcgcgcagcgcctcggcgcggagctgcggctgtggacccgccccgggctgggcactgaagtcgcgctggcggttcccgcccgtcgcctgtatcaccgccgcccatcgcgttggcgctggccctggagtagaagccaccatgactga

SEQ ID NO: 493371 - DNA, 654 bp, Stenotrophomonas maltophilia
atgactgagtcccctgccccgatcggcgtgctggtggtcgacgaccaccctctgctgcgtgacggcctggccgcgctgctgggcgcccattccgacctgcgcctgctcggcgaggccgccgatggcgaggaagccattgagcgctatcagcagctgcagccggacgtggtgctgatggacctgcagatgccacgcctggatggtgtggaagccatcgtgcggatccgcgcgatggacccgcgtgcgcgcatcatcgtgctgaccacctatcgcggtgacgtgcgtgcggtacgggcgctgcaggccggcgccagtgcgtacctgttgaaggacatgctgcgccacgagctggtcgatacgatccgcatggtcgctggcggccggcgcgcaccgataccaccggcagtcgctgcgagcattgccgcacatgtggtggaggaccggttgtcgccgcgcgagaccgaggtgctgcggcatgtggccggtggcctgtcgaacaagcgcatcggcgagcgcatgcagatttccgagcagacggtgaaggcgcacatgaagagcctgatggacaagctcggggtgggtgatcgcacgcacgcggtgacccaggcgctgcggcgcggcatcatcagcctggacgacagcggtcacgattag

SEQ ID NO: 493372 - DNA, 1191 bp, Stenotrophomonas maltophilia
atgtctaccccttcgctgtccgtcgtcgcacccgcgaacgcgccttccaccccgctggtgctggcgatggcggccggcgccggcttttcggtcgcctcgctgtactacagccagccgatgctgggcctgatcgcgcaggaccttggcgcaggtgagcgcgccgccgggctggtgccgaccctgacccagctcggctacgcgctgggcatcctgctgctggcaccgttgggcgaccgcttcgaccgccgccacctgatcctgttgaagtccgcgctgctggcgttggcactgggcgccgcagcgatggccgggcacctgccgggcctgctgatggccagcctgctggtcgggttgatggccacgctggcgcaggacatcgtgccggccgctgcggtgctggcgccggatgcacagcgcggccagatcgtcggccgggtaatgaccggcctgctgctcggcatcctgctgtcgcgcgtggtcagtggcgtggtggccgaggcatggggttggcgcacgcagttcgtgctggccgcggtatcggtggcggcgatgggcgcagtgatggcgcgtgcgctgccgcgtttcgcaccgaccagcacgctgcgctatccggcgttgctgggctcgttgctggcgttgtggcgcgagcagccgcagctgcgccgcgcggtggcgagccagtcgttgctggcggtcggcttcagcgcattctggtcgacgttggcgctgatgctgcatgcccgcctgggcctgggcagtgcggcggcgggtgcgttcggtattgcgggtgcggccggtgcgctggccgcaccgttcgcaggacgtttcgctgatcgcctgggttgccatgccgtggcgcggttggcgatcgcggtggcgctgctgggcttcggcctgctgctggccgaagcctggctgccggccgccgcgctgctgccgctgctggtggtgagtgcgctgctgttcgacttcggtttccagtcggcgctggtggcgcaccagacgctggtctatggcctggtgccgccggcacgcagccggctcaacgcgctgctgttcaccggcatgttcatcggcatggccgctggcggtgcgctgggcagcctggcgctggcgcagtgggggtggcacggcgtggcctggctggcggtgatgtgcgcgggcggcagtctgctgctgcgtttgaagtag

SEQ ID NO: 493373 - DNA, 930 bp, Stenotrophomonas maltophilia
atgaatgacctcgccaccggcgccgatcgcctggatctgctgcgcaccttcctgcgcatcgtcgatgccggcagcctgtctgccgccgccgtgcagctgggcaccacccagccgacggtcagccggcgccttcaggcactggagcggcagctcggcctgcgcctgctgcagcgctccacccatggcctgcagctgaccgaagatggcctgcgctgccagcgccatgcgcaacgcgtggtcgacgaatgggagtcgctgcaggccgaactgcacggcgaaccggaaacgctgcgcggacgcctgcgggtgatggtgccgcatgccttcggccaggcgcagctgctgccgaccatgctcgccttcctcgcccagcacccacagctgagcctggagtggatcctggaagatcgccgcccggatttcatcgccgaaggcatcgactgcgcagtgcgggtaggccccgtcgacgaaccgcgcatggtcgcactgccgctcgccgaagtgccgcgcatcgtcgtggcagcgccctcgctggtgcaggccaccgcgatcagcacaccagaacaggcgcaggcactgccgtggatttcactggtcacctactaccgcgaacgcctgctgctgcatgacgcacaggggcgtgcgcataccctttcgatcagcccgcgcctgctcagcgacaacctgttcgtggtgcaacaggccgcatgtgctgggctgggtgcagcggtggtctcggcctggctggtggccggagacctcgcacaagggcggctggtgcagctgctgccggactggcaggcgccggcgctgccggtacacgtggtatttcccgccgcgcgccagcagccgccacggctgcgcgccttcatcgatgcgatgaaggccgcactgccgcagctgcacggaatgcggccggcaccgcgctag

SEQ ID NO: 493374 - DNA, 1458 bp, Stenotrophomonas maltophilia
atgttccgttcccgtccgttgtctcttgccatcctccttgcggtggcaccgctgtcggcgtctgccgccgagcgcgccgacctgctgatccgcaatgccaccgtggtcgatgtcgagcacgccagtacccgggccgggcagagcgtggtgatccgtggcgaggacatcgtcgcggtcggtccggatgcgcagctgcgcagccagtggagcgcggcccgccagatagatgccaagggcaagtacctgatcccgggcctgtgggacatgcatgtgcactttggtggtggcccggcgctgatcgaagagaacaaggcactgctgccgctgtacatcgcgcacggcatcaccacggtgcgtgactgttccggcgacctgcccgagcaggtgctgcagtggcgcggggaaattgccaagggcacgctgttcggtccgcggctgctcagctcgggcgcgaagatcgaaggcctcaagccggtctggaagggcacgatcgaagtgggcagcaaggccgacgtcgacaaggcgatcacccgcctgcagcacgacaaggtcgatttcgtgaagatcaccgacagcacgctgaagccggaactgttcctgtactcggccagtgccgcgcgcaatgctggattcaaggcgtcggggcacatcccgatggcgctgaccgtggagcaggcggtcgatgccggcctggcctcgatcgagcatctggactacgcattcaaggccggcagcaaggacgaagcgcagattgccgccgacttcggtgccggccgcatcgaccgcgccgaagccaaccgccgcctcgacgccagcttcgaccgcgatacggcgatgcatgcctaccgcgatttcgccaggcgcggcgtgttcgtgaccccgaccctcaacggtggccgcatcctcgacttccttgaccaggatgaccacgccaacgatccgtacctggcctacatcggccctggcctgcgcgcgacctaccagtggcgcgtggaccgcgcagccaaggccacgccggcgcagattgaagcgcgccatgcgcagtaccaccaggtggccgccgtgctgccgatgctgcaggaagccggcgtgacgatcatcgccggcaccgatgcgggcttcctcaactcgttcaacttcccgggcatcgccctgcaccaggaactgcagctgttcgtgaaggagggcttgagcgcgccgcaggcgctgtcggcggcgacccgttccggcccggcctggttcggccagatgaatcgttacgggggtgttgctcaaggcaaggccgccgatctggtgctgctgaccgccaacccgctgcaggacattgccgccaccgaaaagatcgacagcgtgatcctgcgtggcaacgtgtatgaccgcgccgcgctggacaagatgctggccgacaccagggccaaggtcgcggcgtggaatgccgaggcggcgaaggcgcagtga

SEQ ID NO: 493375 - DNA, 702 bp, Stenotrophomonas maltophilia
atgcgcgtccatcattccgctggctggcctgcgccgttcacgcgcgtgctgctgttgtgcctgctggccatggtcacccccgcctgcaccgccacgtcccgggccgacgcagacgcgcgcctgcgggatgctgccagccgcggcgacgccgacgcggtgcggcaggcgatcgaggatggcgccacgctggaggcgcgcgatggccagggtcgcacggcgttgctgctggccacgcagggcaacaacgtggatgccgcgcgcgagctgatcgacgccggtgccgacgtcaatgccaaggacgccatgcaggacagcgcctacctgtacgccggcgcgcggggcctggatgagatcctggcgatgaccctggcgcatggcgccgatctgcgcagcaccaaccgctatggcggcaccgcgctgattccggccgccgagcgtggccacgtcgccaccgtacgtacgctgctgcgcgcgggcgtggcggtcgatcatgtgaaccgcctgcactggaccgcgctgctggaagcaatcctgctcggcgatggcggtgcgcgccacctgcagatcgtgcagttgctgctggaggccggtgccgacccggagctggccgacggcgacggcgtgacgccgctggcgcatgcgcgccagcgcggctataccggaattgagaccctgctgcgccagcacggcgcggtgcgctga

SEQ ID NO: 493376 - DNA, 882 bp, Stenotrophomonas maltophilia
atgcaagacagtgccaaatcgaatagaaccctgttcgaactggacctgctgcgggcgctggtgatggtggccgactgcggcagcttcaccacggccgccacgcgcctgcattcgacccagtccacggtcagccagaaggtgcgccggctggaggaactggccgggcatcgcctgctcgagcgcggccaccgcgacgtgcaccccaccgacgccggccacaccctgctcggctatgcgcgccgcatgctcgacctgaacgaggaaatggcacaggcgctggccggcgccaccgtggaaaccgcggtgcgcatcggtgtccccgaggacttcgtcaacgcgcagaccacacgcatgctggccgctttcagccgccgtcacccgcaggtgaagctggaaatcagcagcggcctcagccgcgacctggcgcacggcttcgaccacggtgaactggatcttgtgctggtcaagcagcggcgcaacagccgtcaggcggtgcactgccgccgcgagccgatgcactggatcgacagcctgcgcagcagctgcctgcagcaggacccgctgccgctggtcaccttcccgccgcgcgggctgtaccgcgacgagatgatccacgccgtggaagcgctgggcctgcgctggcgcatcgccttcaccagctcgtcgctgagtggcatccagggcgccgtggccgatggcatcggcatcagcctgctgccccgccgcgcggtcgcccgcgatcatcgcatcatcgatggtgagcgcgacctgccggtgatcgacaactacgaaatcggcctgctgcatcgtgcggacgccgacgatgcggtgcgcgcgctggccagcgagctgtggcggcaggtgcagcgcgaaccggattga

SEQ ID NO: 493377 - DNA, 438 bp, Stenotrophomonas maltophilia
atgtccgacgaaatccccgcccgcttcgaccccctgcccgccgccctgcagacgcacctgcagcaccagcgctcgctgatcgccgcgcgcgtcgccgccggcttcccgacgctgccggtgcaatggccgctggcggccagcacgctgcagcgcgtgatcgatgccgagctgatcgagcctgacgactgcgatggctgggaagcgctgggcgtggcgttcggcgataccctggcccaacgcgtgccgggcctggcctggatgcaggtcaccgacgcctggggcatcgatgcagtgctgcgctatgccgacagcagcctgcagatcggcgccagcacactgctgctcaagcgcgtcgaacagggcgaagtcatcgacatcgcccacctgcttgcgtggctggaagcgttcgtcgctacccgcgccgacgattacgcctga

SEQ ID NO: 493378 - DNA, 1161 bp, Stenotrophomonas maltophilia
atgacgcttcagttcgtccatggcgcggttgatcgcgagggcgcgccgctgcatttccacatccacaacggtcgtatcagtggtctcaacggtgatgctgcgccgcgcgagggtgcggaacccatcgacttgcagggctgtgccgtcctgccgggcctggtcgacggccatattcatctggacaagagcttcgtcggcgaccgctggcacccgcatcagccggtgaacagcctgcgagagcggctggcggtggagaaggccgcggtggcgggcgcggcgccaatggtggaccgtgccgaggccttgatccgccagtgcagccgcttcggcacggtggcgatgcgctgtcacgtcgatgtcgacggcagcaccggcctgcgtcatctcgaagcagtgcgcgaggccgcgctgcgctgcgccgacatcatgcggatccagctggtggcgttcccgcaggccggggtgatgtcctgtcccggcaccgccgccgtactggagcaggcccttgccgcaggggtggaggtgctgggtggcatcgatccgaccacgctcgacggcgatgccgaaggccagctggccctgctgttcggcctggccgagcgctatggcgtgcagctggacatccacctgcatgagccccgcgaaaccggactggcccagctgctgcgcatcgccgcacgcacccgtgccgccggcctgcagggacgtgttgcggtcagccatgcctactcgctgggcgacgtgccgctggcgcgcgcgctgcaggtgggtgaagcgctggccacggcgggcgttgcgatcatgagcaacgcgccgggcgaccatccgttcccgccgctgcgtgcattgcatgacgccggcgtgcgcgtgttcgccggcaatgacaacatccgcgactgctggtggccgtatggcaatggggacctgctgcagcgcgcgatgctgctgggctaccgctcgggcttctacaccgatggcgacctgatgctggcgctggacatggtcaccacccatgccgcgcgggtgatcgggctgccgcagcacggcatcgccgaaggccggccggcgacgttcgtggccgtgcgtgcagaccatggcccggcggccgtggcaggggtgccggtggagcgccgggtggtggttgacggccgctggttgtag

SEQ ID NO: 493379 - DNA, 642 bp, Stenotrophomonas maltophilia
atgggcccgtccgaccgccacgatcgtctccgccgctggcaggccgcgtccctgctggctgctgccccgatggccagcctgtccgccactgatgcggccgccaccgcgccgctgcaggcgccgcctggccaacagcgcatcgccccggcggcgctggtcgagcggctgcaccagcgtgtgctttccgggcagagcgccaccgccaccctggaacactggtgcgccgaacacggcctggccgaacaggcgcgggtgcgcgcggtgcgtgtacacggccaggacaagacagcaccggccgacgtgctgcaggcactgggtgcgaaacccggcaccgcccttcgctaccgccgtgtgcagctggtctgtggcagccgcgtactctccgaggccgacaactggtacctgccggaccacctcagtcccgccatgaaccaggtgctggacagcaccgacgaaccctttggccgcgtggttggcccgctcggcttccagcgccagacactggctgaccagaccttctggccaccgcgtggcgaaggcgaccgcagcgtgatcctggaagtgcgcgccctgctgcgcgatcgccagcagcagcccttcagctacgtcatcgagtcgtacctgcagcaggcactgccctag

SEQ ID NO: 493380 - DNA, 2727 bp, Stenotrophomonas maltophilia
atgtccgcctcccacaaggcgatgcgcccgcgtccgctggtgctcgcgctgtcgtccctgatgctggcctcgctgccggccttcgcgcaggaaagcgcgcccaccacattgcaggaagtgaaggtcaccggctcgcgcattccacgtgccagtgtcgagggaccctcgccggtgacggtgatcagccgcgagcagatcgacgcacagggctaccgcaatgccttcgacgccctcagcgcgctgaccgagaacaccggcaacgtgcagggcgaggatttcggcaatacgttcacgccggccgccaacaccatcaatctgcgcgggctgggtccgaaccgcacgctggtgctggtcaacggccgtcgccaggccgactacccgctggcctacgaaggctcggtgaacgttgtcaacctggccaacattcccagcgccctgatcgaacgcatcgaagtgctggctgccggtgcgtcggcggtgtacggctccgacgccattgccggtgtggtcaacatcatcctcaaggaccgctttgaaggcgtggacatgaacgtgcgcgccggcggcacccagcagggcggcggtgacaaccagcgcgtgcaggtggtgggcggcagttccggcgagcgctgggacggcctgttcggtttcgagttcgacgtgcgcaaggcgatccacgcgcgccagcgcgacttcatggattcgctggacgatgacccggccggcaaggcgccgcaggcgaccgcgatcgcctatcggcgcaatgctgccaccggccgcaacatcgatccgggcgtcaacggctgcgacgccgcgtcggacatctatggcggcagcgtgttccgtgccaacaacccgcgccagggctggtactgcggcagcaacgaggccgccgccagctactggaccgtgcagacccagaagcgcaatctcaacggctacggtctgctgaccttccacgtcaacgagaccaccgacctgttcgccgatgtcgccgtgggcagcgcgcggatctacaacaacacgcgtgcaccgacctggacctcggcccgcaactacttctacaaccagaccaccggcaacctggaaagctggtaccgccgcttcgcgccggaggaaatcggcggcctgccgcgcaatgccaaccgcttcctggaaaactcgtggtcgttcaatgtcggcgcacgtggccagatcggcgacagcggttgggattacgaagcggtctacagccgctcgcgttacgagaaccgcacccgccgaccggtactgctggccggcatcaacgaatacctgctgggcccgaagctgggcgtacgcaacggcgtggaggtctatgcgcccgacccggcacgcctgttcaaaccattgaccccgggcgaatacgagggcctgtccggctaccaggaaagccgcaatgcggcgtggctgcagaccttcagcgccagcgtcaacggccgtttgttcgcgctgcccggtggcgacgctgcattggcggcggtggtcgaggccggcagccagggctaccgcaaccgcccggacccgcgactgggcacgggcgagttctggaacaccagcgccggtatcggtgccggcggtgatcgtgaccgctatgcggccggcgtggagctgcagttgccgttgctgaaatcgctgaccacgacgctggccggtcgctatgaccagtatcgcgccggtggcgagcacatcggcaaggcgacctggagcttcggcgtcgagttccgcccgatcgagagcctgttgatccgcggctctgctgcgaccagcttccgtgcgccggacatgaactacgtgttcgcgaccgagacccgcggctacaacccgggcatgaccgactactggcgctgccgcaccgcaggccagtcgtacgacaactgcgactacaacggcctgtcgatcgactacagcaaccgcgccaacgcgcagctgcagccggaaaccgcgaaatcctatggtttcggcgtggtctggtcgccgctgtccggcctggatttcagtgccgactactacgacatccgcatcgacaacgaggtcaccagcctcgataccagccgcatcctgcgcgacgaagccgattgccgcctgggccgcacgctgggtggcgaagcgcgcgatatcggttcaccgctgtgccaggacgcgctgtcgcgggtgatccgcaacccgtctactgcaaccgtgcagccggaccaggtgacccgcgtgctgatcaatccgatcaacgcggcctccgaatcggtgcgtggcctggacctgaagggtaactggcgtttcgatgccggccgctatggccgcttcactacgcgcctggcctataccgtggtgctggagcacacgtaccggcagttctccgatgatccggagcgggacatccgcaattcgctggatgactaccagtggcgcagcaaggccaatggcagcatcacctggaaccagggtgactggaccaccacgctgtacggcaaccgcttcggctcgctgccgaagaccgatggcagtggccgcatcgcgccgtacatgacctacaacgccagcgtgttccgccagttcggcgagaacctgtcggtgggcgtgatcgtcaacaacctgcgtgacagccgcccgccggcggacaggaacggtggcggctggccgttctatccggttggcaactacgacccgtatggccgccagtactggctgcagctggactaccggttccgctga

SEQ ID NO: 493381 - DNA, 636 bp, Stenotrophomonas maltophilia
atggcctggcgcgtcggtgatgcgcatcgtgccgggatgaccaacagcgccccttccacccacttcgccccactacgacccgtcctgcgccgccacttgctccacctccaggccacgcccatcaccctgcgttcgttccagcgcaccgacctgccacgctggcgcgccttcgacgaccgtcgccagcgcggccaacggccgtcctacggcattgatgaagaggcgcggttcctcgccagcgtctatcgttcacgcctgcaggaagacaacgacctgctggtgctgggtgtgttcgacgacgtgcagggcgtactgcacgaccagctgcatatccgcctgcagtcgctgcactcgcgctgcgccgagctgcaatcgctgcagcaccggcacccccatccgcaggcggcactgcgggcactgttcccgttcctgttcgacgatgtcggcctgcaccgcctcttcgttctactgccgccaagctgcaccagcccgtttgcccaggcgctgcaggcccatgggttcatccgcgaagggatcctgcgcgactaccatctggacgcgcagggatggcatgaccgtcagctgctggcgctgaccgcgtcggcctggcgcagctgccagcagccgatcggctag

SEQ ID NO: 493382 - DNA, 780 bp, Stenotrophomonas maltophilia
gtgtccctgcgccctttgctgctgtcgtccctgctgctgttgtccgcctgcgccagcgcgccacctccaccgtcggcccattccgatgcgctgtggcgcttgatcgagcgtgactgcaaggcggtggaaggaccgcgtggcagttgcctgcgggtggagacggcggccgaccgccgcgacgtgctggtcaaggatgcgcacggtgactaccagttcctgctgatgccgctggacaaggtcagtggcatcgagagccacggcctgtaccagcgtggggtacccaactattttgcggccgcctggcaggcgcgcgggcataccgaacaggccctgggccggccgctgccgcgcagcgtggccagcctggcactgaattcgccgcacggtcgctcgcagcaccaactgcatatccatgtcgactgcctgcgcgcggatgtgctgcaggcactggatgcacatgccggtgcgctcggtccgcgctggtcaccgtttccggtgccgctgcgcgggcatcagtaccaggcctatctgctgcccggtgcagaactgaccgccaatccgctcaatctgctggcctatggcctgagcggcgtgggcgatgtgggccagtggagcctggtggtggccgggcgcggcgaggtgcagggcggccccggcttcatcctgctggctacccgcgtggatgccgccagcggcaacgatgccagcggcgaggaactacaggaccatgcctgcacggtcttgaccggtgccggtgcggcactggagcgggtgcgctag

SEQ ID NO: 493383 - DNA, 660 bp, Stenotrophomonas maltophilia
atgacggcagacagtttccgcgacaagcgcagggcgatgacggtacttgcagtatcggtgctggccgtggcgtgtgccgccactgccgccgagccagtgccggccgcagccgcggaaacgccggtgttcggcgcgtggcgcaaccttcagaccgaggccggctacgcgccggcccagcgcaatctggccttcgccatgctgccgcaggcggcgacccgcggcgaccgtttcgccgtcctcgaccgtgaaggcaagcgggcggtgtgttgcctgcaggtggccagcccgtcgctgggcgtggccgcgctgcgcgagcagtaccacctgccgcaggcctgggtgaccgacctgagcaatggccgcagcccggcgcgtccttatctgccgcatgtctatgcgatgcagcgtgtggacgaactggcagactacggcttcgccgatgtgcccggggcctacagcgacctgggtgggctgctgatccccgagggcgccgccctggaggacgatggcagtgccgtcctgctgggcgacaaccgttattccctgcatttccagcgccagccgcacgccgatgatgatggcgcgctggaccgctacaccctgcagggcggcgacagcgaggccccgttcgtggttgaagtgccgttcggcacctactga

SEQ ID NO: 493384 - DNA, 297 bp, Stenotrophomonas maltophilia
atgtccgccttccgtctgtccctgttgctacccgcgtcggccctgctgctgtcggcctgcgtcagcacccccggtccgcaggtcaagggtaccggccactgcgacgccagccagctgggctgggcaatcggccagcctgccaatgagcccaacatccgccgcctgtccagcgaaagcggtgccggcctggtcaacccgatcggccccaacaccatcaccaccaaggacatccgccacgaccgcctgcgtgtgtacgtggacaaggacaacatcatcaccgccacccgctgcgagtag

SEQ ID NO: 493385 - DNA, 885 bp, Stenotrophomonas maltophilia
atgcccaccatcgttgcccgcgcgaccctgtgcgctgcattgctggcaacaccgctgctggtgctggcgcagtctgcgatcctgccgcagcagcgcgacgccgccggcaacgtgatggagccgctggggcaggtgctggaacagggagggcagggcgaagcacgcatgcagtactgcaccctcgatcgtgcctggtgcgtgcgtgtgcagccggtggccgaggacggcgatcggccgacgacgctggaagtctctgaacgggaggccggcgaaagcgagccgcacgtctaccacgtcagcatcgacgtgccgcaggaaagcgagctttcgctgtggccgtggatcgtgcggcttgcgcctggcgttggcagcgatgaggcagtgagcgacccgcggcagcgcgcccgccagaacgtgctggtgggcggtatcgtcaaattcagcacgatgtactcaggcggtggtgccgacgcgtccacgctgcagctggcgcgcgtgcgtcacctgcaggatgacatccaggtggacgacgacgtgctgaccctgccatggctgggcaacgcgatgatccgcgcctgtttcagcgagcaggacatgaagcagcgcgcaggcgcctgccacgacgagtacgggttctcggcaaggctggcgctggataccgccgccgggggcatgccggtgctgcgctaccagacggtggcgacgcggttcccggccggtgtctcacgcttcgaggattcgctggccaaggggccgttgaagaagaaggacctgcgcaccgagcaggacccggcgtgcagctacacgcggttgttccgcttcagtgatggggtgttccaccccgaccaggcgctgccggactgcgcggggtataccgagccctga

SEQ ID NO: 493386 - DNA, 1701 bp, Stenotrophomonas maltophilia
atgagtggccatgacgccgtgctggcgcagttgcgcgacgcggtcggcagccgccatgtgttgaccggcgacaaggccacgcgccgcttccgtcgtggctaccgcttcggcgatggcccggtgctggcggtggtgcgcccaggtaccttgctggaactgtggtatgtgctgcaggcagcggtgcagggcggagcggcgatcatcctgcaggcggccaataccggcctgaccggtggctcgaccccggatggggacgactatgggcgcccgatcgtgctggtcagcacgctgcgcctgaccggcatccagctgttgaacgagggccgccaggtgctgtgcctgcccggcgccacgctcgaccgcctggagcagaccctggcaccgctgggccgcgaaccgcattcggtgatcggctcctcctgcatcggcgcctcggtgctgggcggcatctgcaacaactccggcggcgcgctggtgcgccgtggcccggcctataccgagctggcgctgtatgcgcaggtcgatgcgcagggccagttgcagctggtcaaccacctcggcatcgcgctgggtgatacgcccgagcagatcctgcagcgcctgcaggccggtgactatgccgctgacgacgtgggtgacggcgatggccgcgccgcgtctgatccacgctacgccgaggaagtgcgccgggtcgatgccgatacgccggcacgcttcaacgccgaccccagccgccacttcgaagcggccggttcggccggcaagctggcggtgttcgcggtgcgcctggataccttcgaaaaggagcccgccgaggtcttctacatcggcagcaaccgcaccgacagcctcactgcgatccgacgccagctgctgaccggcttcgagcgcctgccgattgccggcgagtacatccaccgcgatgcctatgacatcggcgagcgctacggcaaggacagcttcctgttgatcgaccgcctcggcacttcccgtgtgcccgccgcgttcgcattgaagagccgggtcgatggatggttcgaacggctgggcctgcgcggggtaaccgaccgggtgatgcagatgctgaccggcctgctgccctcgcacctgccgaggcgcatgggtgaattccgccagcgctacgagcatcacctgttgctgaaggtctccgcacaggacgcggcggcaaccgaggcctggctgcgcggcttcttcgccgatcatgagggtggttacttccactgcacggccgatgaggggcgcaaggcgttcctgcatcgcttcgcggtggccggcgcggcggtgcgctaccgcgaagtgcatcgggaccaggtgcaggatatcgtggcgctggacatcgccctgcgccgcgatgatgccgactggttcgagcagttgccggccgatatcgatggacgcctgctgcacaagctgtattacgggcacttcctgtgccatgtgttccaccaggactacatcgcacgcaagggcgaagacccgatggcgatcgagcacgcgatgtgggcgctgctggaccagcgcggcgccgagtatccggccgagcacaatgtcggccacctgtacccggccaagcctgccctggccgggttctatcggcagctggacccgagcaatacgttcaatccgggcatcggccagacctcgaaggaaaaagggtggggtggctgcgactgcggatga

SEQ ID NO: 493387 - DNA, 1140 bp, Stenotrophomonas maltophilia
atgatcatctccgcctccaccgattaccgtgccgcagcgcaacgccggctgccgccgttcctgttccactacatcgatggcggcgcgtatgccgagcacacgctgaagcgcaacgtttccgacctgtccgacatcgcgctgcgccagcgcatcctgcgcaacatgtccgacctgagcctggaaaccgagctgttcggcgaaacgctggcaatgccggtggcgctggcgccggtcggcctgaccggcatgtatgcccgccgcggtgaagtgcaggcggcgcgcgcggccgacagccggggcatcccgttcaccctgtccaccgtatcggtgtgcccgatcgaggaagtggcaccggccatccagcggccgatgtggttccagctgtacgtgctgcgcgaccgtggcttcatgcgcaatgcgctggagcgggcacaggccgccggcgtgaccacgctggtgttcaccgtggacatgccggtgccgggcgcgcgctaccgtgacgcacactccggcatgagcggcccgaatgcctcgctgcgccgcatcggccaggccgtcacccatccgcactgggcgtgggacgtcggcctgttcggccgtccgcatgacctgggcaacatctccacctaccgcggcaacccgaccgggctggaggattacatcggctggctgggcagcaacttcgatccgtccatttcgtggaaggacctggagtggatccgcgagttctggaagggcccgatggtgatcaagggcatcctcgacccggatgatgcgcgcgatgcggtcaggttcggtgccgatggcatcgtggtctccaaccacggtggtcgccagctggatggcgtgctgtctaccgcacgtgcattgccggccatcgccgatgcggtgcagggcgacctgaagatcctcgccgattcgggcatccgtaccggcctggacgtggtgcgcatgctggcgctgggggccgataccgtgctgctggggcgcgccttcgtctatgcgctggccgcgcagggcgaggccggcgtggccaacctgctggacctgatcgccaaggagatgcgcgtggcgatgacactgaccggcgcgcaccgtattgccgacatcgggcgcgattcgctggtcaacctgccatga

SEQ ID NO: 493388 - DNA, 765 bp, Stenotrophomonas maltophilia
atgagcacgcaacgtatttcggacagggtggccgcgcagctgcgcggcctggtgcaggaacagcggctgcggccgggcgaccggttgcccgccgagcgcaccctggcggtgcagctgggggtctcgcgcaccgcgctgcgcgaggcgatcgcgcagctggccagccagggcctgctgactgcacgcatcggtggcggcacctacgtggccgaaccggcggcgcgcgcgcggcaggcgctggatgaaccgctggcgccgtacctgccgctgttccagggcgacccggaataccgttttgacgtgctggagatccgccacgcgctggaaggtgccactgcctggcatgcggcgctgcgagccaccgatgaggaccgtacgcgcatcgcgcaggccttccagaccatgatggacgcgcacggcaaggacgaccccaccggtgaagcagaggctgacgcggccttccacctgtccatcgccgaggcctcccacaacctggtgctgctgcaggtgatgcgcggcctgttcgaactgctgcagaccaacatctcgcagagccgcgagaagctctacacctcggcgaggaccttctcgcccctgtccgaccagcaccgcgaaatgatggatgcggtgctggccggcgaccccgaacgcgcgcgcgccgccgcgcatgcccacctcgagttcgtgcacaccacgctgcgcacgctcgatgacaacgaagcccggcgtgcgcgggcctcgcgcctgccttccccacacggttga

SEQ ID NO: 493389 - DNA, 1659 bp, Stenotrophomonas maltophilia
atgcagccctggcaacacctgtacgaccccgccggcaacctgtggttgtccagcctgatcgcgctgctgccgatcgcgttcttcttcattgccctggccgtgctgcgcatgaagggctggctggccggcacgatcaccgtggccatcgcgcttggcgtggccctgttgttctaccgcatgccgttgagccaggcgctgggcgcggccggtttcggcttcgtctacggcctgtggccgatcgcctggatcatcatcggcgcggtgttcctctacaaggtctcggtcaagaccggtcagttcgacatcatccgcgcctcgatcctgtcggtgaccgaagaccagcgcctgcagatgctgatggtcggtttcgcgtttggtgccttcctggaaggcgcggccggcttcggtgcgccggtggcgatcacggcggcgctgctggtcgggctgggcttcaagccactgtatgccgccggcctgtgcctgatcgtcaacactgcgccggtggcgttcggtgcgatgggcatcccgatcatcgtggccgggcaggtcaccggcctggatgcattcgagatcggccagatggccggccgccagctgccgttcctgactgtgatcgtgctgttctggatcatggccatcatggatggctggcgtggcgtcaaggaaacctggccggcggtgctggtggccggtggctcgttcgccatcgcgcagtacctgacctcgaacttcatcggcccggagctgccggacatcaccgcctcgctggcgtcgctggtgtgcctgaccctgttcctgcgccgctggaagccggcacggatcttccgcttcgataccgaaaccagcgccgaggcggccgcgcaggcactggaggcaccacgctacagcgtcggccagatcgccaaggcgtggtcgccgttcctgatcctcaccgcgatggtcacgctgtggagcatcaagccgttcaagtcgcttttcgcggcaggcggcccgttggaaggctgggtgctcaagctcccggtgccgggcctggaccagagggtgcagaagatgccgccgatcgtcgacgcgccgctcagctatgaggcgatctacaaattcgactggttctcggccaccggcaccgcgatcttccttgcggcggtgatcgcgatcatcgcactgcgcatgccggcccgctcggcgctgcagaccttcggcgaaaccgtgcgtgagctgcgcatgccgatctactcgatcggcatggtgctcgccttcgccttcatcgccaactactcgggcctgtcggcaacactggcgctggcattggcgcacaccggcgatgcgttcccgttcttctcgccgttcctgggctggctgggcgtgttcctgaccggttcggatacctcgtccaatgcgctgttctcggcgctgcaggccaccaccgcgcaacagatcggcgtatccgacgtgctgctggtggcggccaacaccaccggtggcgttaccggcaagatgatctcgccgcagtcgatcgccattgcctgcgcggcggtcggcctggccggcaaggagtcggacctgttccgcttcacggtcaagcacagcctgattttcaccacgatggtcggcctgatcaccctggcccaggcctactggctgacctggatgattccctga

SEQ ID NO: 493390 - DNA, 453 bp, Stenotrophomonas maltophilia
atggaactcacccaggatgtctcgatcctgctgcgcgtagccgcagcgatgctgtttggcggcgtgctgggcgtcgagcgcgagatgggcaagcacgccgctggcctgcgtacgcacatgctgatcgcgggggccgctgcgctgatcgtcggcctcggcgactcggtggccgagcatttccagcaggagcgctaccgcgacctgctgcaggtcgatccggtgcgcctgatcgaagcggtggtggcctgtgtcggcttcgttgccgctggcagcatcctgcgtgggtcacgcgaggaccaggtcagcggcctgaccacggccagctcgctgatcatggcagcggccatcgggattgcggtggggatcagcaagtacgtgatcgccatcggggtgagcgtgctctgcgtgctggtgctggcggtgatgcggcggttggagaaacggatctcgtag

SEQ ID NO: 493391 - DNA, 759 bp, Stenotrophomonas maltophilia
atgattgattaccagctgaccggcaagaccgcgatcgtgaccggcggcgtgtcgggcatcggcctggccgtggcacagacgctggccgcatccggtgcccgtatttcggtctgggacctcaagcaggatgcggtggatgccaccgtggcgcagttgcgcagcaccggcgcacaggccatcggcatcgcgctggacgtcaccgacgatgcagcggtggaggcggcggtgcagcgcacggtcaaggaacttgacggcctgcatgtggcggtcaacaacgccggtatcggcgggcccgcggccagcagcggcgactatccgatcgagggctggcagcgggtcatcgacgtcaacctcaccagtgtgttcctgtgccagcgtgcgcagatccaggcaatgcgggccgctggaaccggcggcagcatcatcaacatggcctcgatcctgggccaggtgggctatgccggttccaccgcttatgcggcggccaagcacggcgtggtcgggctgacccagaccgccgcgtgggaacatgcggccgacggcatccgtgtcaacgcggtgggtccgggtttcatcagcacgccgctgctggagaagatggacccgaaggtgcgcgccacgctggaaggacggcacgcgctgaagcgactgggcacggccgaggaagtggcggcattggtggcctggttggccagcgacgacgcctcgtttgcgaccggcgcgtactacgccatcgatggtggctacctggcgcagtga

SEQ ID NO: 493392 - DNA, 954 bp, Stenotrophomonas maltophilia
atgtcccgatacttcacctttgccgattaccgccgcttcggccaacgccacggcttcgattaccgcgctgatccggaacacctgcgtgacgaccagtgggccggccgcggcgaagtcaacgaacagttcatgcgcggtggcatgaccctgatcgcctccgacgtgcataaccggttcccctatgtggcgaccgcgcaacagcggcccgggctcgccatccgcgtgatgctgcagggtcaggtcgacgtgcgtatcccgcgacgcggaagtttcaccctgcgtgccggcaccgcgatgaccgcccaccatcgcgaccagatcgagatgaccggcgcgcaccccggcgaaacgcgcctgcgcggggtcagcgtgatcgtgccgggtggcatcgacgcggatgttttccagatgccacagttggaaaaagcgcttggcacgcacctggaatgccgccactgggccattccccacgccatgctgccggtgctgggccagttgttcgacagcccgtggcaggacggcatcgacgcgctgtggcgcgaaggcgtggcattgcagctcctggccctcggcctgcaggccgaggatctgcagaccgacccggtgcgcacgctgcgtgccggccagcgcgagcgcctggaacgggtacgcagttacctgcatgacgaccccagccatgcacacagcctggtcgagctggcccggctggcctgcatgagccccagctcattgcgccgccattttgcccagcagtatggaagttcggtgttcgactacctgcatgaacagcgcatgcgccatgccgaacagggcctgcgcgaaaacggatggacggttgagcaggccgccgccgccagcggctaccgccaccccagcaacttcgccgccgcgttccgcaagcgcttcggcctggtccccagccgctggcgtacgggcccctcgaaggtggggtga

SEQ ID NO: 493393 - DNA, 288 bp, Stenotrophomonas maltophilia
gtgttccctcatgcttatgtcgacctatggtccgtcgccagcatcattcagctcaaccgcagctaccagatccggcgttatcttggcgactccctgatgggcattggaacggacggtggatcgacgctcatcgcgctggttctctgcccgctcagtcgcggacagatcgtctcattcgatctgggcgatctcgacatcagccggggaaagcccatcgccgaatctatcgccgaactctttcggaagttcgacagcgggctgctgacgagcgacaacatttatccttga

SEQ ID NO: 493394 - DNA, 1911 bp, Stenotrophomonas maltophilia
atgcgtgtgcgtgccgtcgctgtagccattgccctttgcctgtccagcgccgtgctggccgccgataccccgccgatgaccccggacatcagcggcaagcccttcgttgcccccgatgtcggtcgtgactacgacaagcgcgtggtgatggtgccgatgcgtgatggcaccaagctgtatacggtgatcgtggtgcccaagggtgcccgcaatgccccgatcctgctgacccgcaccccctacgacgctgctggccgtgccaaccgcagtgactcgccgcgcatgcgcgacctgctgccacagggcgacgaggtgttcgtcgacggcggctacatccgcgtgttccaggacatccgtggcaagtacggctccgaaggcgattacgtgatgacccggccgctgcgcgggccgttgaacaacaccagggtggatcactccaccgacgcctgggacagcatcgactggctggtgaagaacgtgccggagagtaacggcaaggtcggcatgctcggctcgtcgtacgagggtttcaccgtggtgatggcgctgaccgacccgcacccggcactgaaggtggccgcgccgcagagcccgatggtcgatggctggatgggtgacgactggctcaactacggtgcgttccgccaggtcaacttcaactatttcgcaatgcagaccgagaagcgcggcaagggcacgccgctgcccagcctcggctatgacgactacagcaccttcctgcgcctcggttcggccggtgactacgcgcgtttcaccggcgtggaccagctgacctggtggaagaagctggtcgagcacccggcctatgatggcttctggcagggccaggcgttggacgcggtgatggccaagacaccgttgaaggtgccgaccatgtggctgcagggcctgtgggaccaggaagacatgtggggtgccaaccacgcctaccaggcgatggaagggcgcgacagcggcaacaaccgcaactatctggtgatgggcccgtggcggcacagccaggtgaactacggcggcagcgagctgggtgcgctgaagtttgatggcgataccgcgctacagttccgtcgcgatgtgctcaagccgttcttcgaccaatacctggtggatggcgcgccgaaggccgatacgccgccggtgctgatctacaacaccggcgaaaaccactgggaccgcctgaagggtttgccgcgcagctgcgacaagggctgtgccgccagcagcaagccgctgtacctgcgcgccggcggcaagctggcgttccaggcaccggcggcgggcgagggggacttcgaggaatacgtgtccgacccggccaagccggtaccgttcgtgccgcgcccggtccgcttcggcgaccgcgacatgtggaccacctggctggtgaaggaccagcgcttcgtcgatggccgcccggacgtgttgaccttcatcaccgaaccgctgacggcgccgctgcgcatcggcggcgcaccggtggttcacctgcaggcctcgaccagtggcaccgacagcgactgggtggtgaagctgatcgacgtgtatccggaccaggaagcgtcgacgccggagatgggtggctacgagctgccggtgtcgctggcgatcttccgtggccgttaccgcgaaagcttcagcgatccgaagccgctggccgccaaccaggtgctgccgtaccgcttcgacctgcccaacgccaaccacaccttccagaagggccatcgggtgatggtgcaggtgcagtccagcctgttccccctgtatgaccgcaatccgcagacctacgtgccgaacatctacctggccaagccgggcgattaccagaaggccacgcagcgggtctggcacagcgcagcgcaggccagttacatcgatctgccggtgtattga

SEQ ID NO: 493395 - DNA, 387 bp, Stenotrophomonas maltophilia
atggataccaccgcagaacatgaaatccaccacctgcacgacaagctgcaggcctggttccgtgccgatgtcggcgccgatgcgctggaggatctgatggcgcacttcagcgcggacttcagcatggtcggcatcgcgggtcgccgattggatcggcaagccgtgcaggcgttgttcgcgggcggttacggggcgcgccccgggctgcggatttccatcgacgccgtgcacgcggtggaagcgccttcaccgctggcggtgctgcgctatcgcgaagggcattcgatcgatggcggcacgcctgcatggcgggagtcactggcggtgctgcggcaggaaaccgggcgctggcgctggctggccctgcatgaagtgccggtagcctga

SEQ ID NO: 493396 - DNA, 1359 bp, Stenotrophomonas maltophilia
atgccgcccccccgcctgcgccatgaggcgatcttcctgctggtgttcgccctggatctggtcaacatgttcatcgccacggtggcctatccggcactggcagcggaactgcacgctgatgtcggtaccctggcctgggtgggcaccgcctacatgctgggcctgagcgtggtgattccgctggcgccctggttggccgcgcgctgtggtgagcgtcgcctgctgctggtggcgttgctgttgttcgcggttgccgctgtgctggccggcgccgcaccgggtatcggctggctgctgggctggcgcctgctgcagggcctggccggtggcctgctgattccggtggcacaggcggcagcgtaccgacagtgcacgccggaccagcgtggcgcgctgacccgccgcatcctgctggtggcgctgctggtgccggcactggcgccggcgctgggcgggttgctggtgcagtggttgtcctggcgcggcgtgctctgggccagcctgccgttggcggtggtggcgatcggcctggtgctggcctggatgccggccgatggcgcgcgcagtgcgccgcgcctgcaggcctatgcgctgtccaccgcgatgctggcgctgggcgcgctgctgctggcgttgacctggctgggtgaacccggccatcgggccgccggtgccgtactgctgttgatcgcaatgctgttggcggcggcccacctgcggcatgcacggcagcaggcgcagcccctgctgcgctggtcgctgctgtcccatcggggcctgcgcctggcgatgctggtctatctggcagtgcccggagtgttcatcggcagccagctggtcagtaccctgcagctgcaccaggccggttacagcgcggcacgcatcggcgcgttgatgctgccctgggcgctggcctcggccattgcgatcacggccagcaagcgcctgctggcgcgcttcggcccggccacggtactgcgtacgggcatgctcctgcaggccagcggcctgctgttgatggcgctgctgccgcagccggccttcgcgttggccgggctgctgttcgcgctgatgggcgccggcggcagcctgtgcagcagcaccgcgcagacgctggccttccatggggtcgagggcgaagcattgggcgatgccagcgcactctggaacctcaaccgccagctcagcttctgcctgggcaccgcggccatcgcgctgctgctggcattggccatgcaatggctgccggcccacgccaccggcatggcgctgggtctggccgcggtactgaccctgctgccgatggcgctgctgcgccggccgcagttgctcaccctttcgcaaccggagaacatctga

SEQ ID NO: 493397 - DNA, 897 bp, Stenotrophomonas maltophilia
atggtcagcctcgatcgcttcgatatcttccgtgccgtggtcgaggccggcagcctgaccgcagcggccgatcggctcggcctgagtcgtgcggtggtcagcttcaacctgaagcggctggagcaggaactgggcgtgaccctgctgctgcgcagtacccgccacctggccctgaccgacgctggcgagcagttcctgcagcactgcatacaggcgctggatgccgcgcaggcggcaatcgatgccgcgcggcgcgaccagcaccagctgcagggtgtgctgcgcctgaccaccaccccggagtacgcgcagcttcgcctgattcccgcactggaagccttccgtgcgcggcatccggccctgcagctgcacctgtccacgtctcccgcgccggcagacctgattcccgagcgcttcgacctggcgatccgtctcggccgtctgcccgattcgggcctgcatgccagtgaactggaacggcacccgctgtgcgcggtggcggctccgtccctgctggcacgcctgccctctgccgatgcggccaacgaccccgtgcaactgggcaccctgccccgcctgggttacccgcgcctggccgacgtgccggtggtcgcgcccgacggcagcgatgccttgtttgccaccaacccgggcaatgcagtggtgcgcgtggatggtgccagcagcctgcgcgccttcgccgtggccggcgccggggtcactgtgctgccacgctggctgatcgaggacgacctggcccaggaccgcctgcgcccggtgctgcgccagcaccgcttcccgcagcagagcgtgtacgcggtctacccgcacagcacgcagccctcgccgaaggtgcggcagctgatcgatttcctgcgcgggtggttcgccatatga

SEQ ID NO: 493398 - DNA, 2820 bp, Stenotrophomonas maltophilia
ttggcaacggaattacgcctgccgatgaaaacgtttacaaaaccgcttgcactgtctctggccctgtctgccgcactggccgctccggcctgggccgacccggccgcgttcactgtgctgaccctggaacaggcgcccaacgccgaggcgatgccggcgctggccgcgcaactcaagagcctgaaggtggacgcggtgagcgtgcgccaggtgcagcgcggcatcggccaggtcgatccgctgcaggtgctggccgatggcctgggctacgagtaccgcttcattgccgccggcaaggacgatggccagacccagcgcggccaggctgttctgacccggctgccgatcgccgctgaatccggccccgaccagccgggcctgaactacctgcgcctggacgatggccgccacactgtggcggtctataccgatgccggtgcaggtgcggcgcagctgccggcgctggtcacccgttcgcggctgggtgcaccggcggtgctgctcggcgcggtggccggtgaatcggccaaggccgcaggcttcgatccggcgcgtgtggcgctggaagccgatgccagctatttcagcgacggcttccaggccgccagcagcgcgccgttcaaggtggaaggcagcacgctgcgtgccaccctgctgaccctggcctatgccgccgacaagcacggcgacacgccgtggatggacaccacgctcaacgccgatgcgcgcgctgcgctgctgctgaaggcgatgaccgaggatgagaagttccagatgctgcacagctacttcgggctgggcaaggacggcggcccgctgccggaaggtgcggtcggttcggccggcttcgtgccgggcgtaccgcggctgggcatcccgtcgcagcagtcggccgatgccggtgtcggcgtgaccaatccggggggcatccgcccgggcgacttcgccacggcaatgccatcgggcccgtccaccgcatcgagctggaaccgcgaagttgccttcgccggtggcgccacgatgggccgcgaggcgtggcagcagcgcttcaatatcctgctgtcgggcagcgtcaacctgcagcgtgacccgcgcaacggccgcaacttcgagtacgccggcgaagacccgctgctggccggctcgatggttggcgcgctgatccagggcgtgcagagccagcacgtgatctcctcgatgaagcacttcgcgctgaacgacatggagacccgtcgcaacttccacgacgtgcgcatcggcgaacaggccatgcacgagtcggacctgttggccttcgagatcgcgctggatgccggtcgcccgggcgtggcgatgtgctcgtacaacaagatcaacggcacctacggctgcgagaacggctacctgatgaaccaggtgctgaagcaggaatggaagttccccggtttcgtgatgtccgactggggtggcgtgcacagtggctcgaaggctgcgctggccggcctggaccagcagtcggccggtgaggtgttcgacgcggcggtgttcttcgatgaaccgctgcgcctggccgtgcatggcggcgtggtgccgcaggcgcgcctgaacgacatggtggcgcgcatcctgcgcacgatgttcctgcatggcaacttcgacaacccgccgcagcaccagaaggtggatgccgaggccggcttcgccgttgcccagcgcacggtggaggagggcagcgtgctgctgcgcaatgagggcaacctgttgccgctggccgacagcgtgaagcgcatcgtcatcatcggcggccatgccgacaagggcgtgatcggtggcggtggttcatcgatggtgggcgtgaccgccaagggcaccaacgcggtgcccggcgtgatgccgaccacctggccgggcccggtgatcttccatccgtcctcgccgctggaatcgctgcgtgcggcgcgcccggacacgactatcacgtatgtggatggcaccaacgccgctgctgcggccaaggcggccgcgcaggcggatgtggccatcgtgtttgccacgcagtgggctgccgaatcggtggacctgccggacatgcagctgccggacaaccaggatgccctgatctcggcagtggccaaggccaacccgaagaccgtgctggtgctggaaaccaacggcccggtgcgcacaccgtggctggcgcaggtgccggcgatgctgcaggcctggtacccgggcatccgcggtggcgaaggcattgccgcactgctgaccggccaggtcaatccgtcgggtcgcctgccggtgacctgggtgacggacgaatcgcagctgccgcgcccgcacatcgacggcctcggcttcaagccggccaagccgttcggtgatgtgttcgatttcgatatcgaaggtgccaacgtcggctacaagtggatggcggccaagggcctgaccccgaccttcgcctttggccatggcctgtcctacacctcgttcgcctatgacaacctgaaggtgagcgtggaaggttcgcgcctggtcgccagcgtcgacatccgcaacaccggcaagcgcgccggtgccgacgtggcccagctgtacctgaagctgccggccggcagcaccacgccgatccgcctgatcggctatgacaaggtgaccctgcagccgggcgaacagcgccgcatccgcatcgaagccgagccgaagacgctggcccactacgatgcacaggcgcgccagtggaagatcgacggtggcacctaccaggtgcagctgtcgcgcaacgccgccgaaccgctgcagacggtggacgtgcagctggtggagcaggtgctgcgctga

SEQ ID NO: 493399 - DNA, 435 bp, Stenotrophomonas maltophilia
atgaccgtacatcgcgacttcgatcatctctggcgcgaccgatgtgacacctccagccagcgcgcaccgcgcgtgctgatccgggtgttcgtggccccgggcgagctggagcgcagcgtggcgttctacgagcagttgcagggcgtggtagccgatgcggggttcccgttcccggaagccgggctgcgcctggcgatggtcggcgccttcctgctgatcgaaggcagccaggcggcactggccccgttcacctcgaccacggggacactgctggtcgatgatgttcggccctatcacgacaaactggtcgccgccggcgccgagatcatcttcccgctgcaggtagtcccgaccggggcggcgttcaatgcggtgcatcccgatggcaccgtggttgaatacgtgcatcaccggccggatccgcacggccggtga

SEQ ID NO: 493400 - DNA, 705 bp, Stenotrophomonas maltophilia
atggcgtggatctacaatccctcaatgtcctcccccaccctgccctggaatggcacgttgctgctggatgctcacgtggccgtgctgcagggtcatgccggtgacagcgccgcgcacgcgcactacgcccatcaactgctgctcagcgacggcgcagcctggaaggtcgaggtcgatggcgtgcagcagcaaggccagcggctgtggctgccgtcattccagccgcacgcgatcctgttagcgccagaagcaggctgcacggtgttccttgagccgacgcatgccaatcccgcacagatccagcaatacctgcacgcactgccgggcaacgcgctggaactgcacggctggctgccacggctgagccgcccgcaaccgctggaccgccgcgtgcaggcggcattggcccgtatcgcccagcacctgcccggcccggtgccggccgccgatatcgccggggcggcgcacctgtcgaccagccagctgcaccggcgtttccagtctgatctggcggtgaccctgcgcggctgggtgctgtggcagcggctgcgccgcgcactcatgcatcatctgcgcgggcacaccctgaccgacagtgcgcatgccgctggattcgccgatctggcccatctgtcgcgcagcctgcgccgcatgttcggtatcggtgccgcgcagctgcagggcctgcagcttcacgcggcctga

SEQ ID NO: 493401 - DNA, 891 bp, Stenotrophomonas maltophilia
atgaaacactggatcctccgcctgtatgccccgttgttcctgctcggtttcgttgccgccgccgtcgtctgggtcggccacctccatggcgatccgctatggctgctggccttgctggcggtcgccatcgcggtttcgttcgctgccgaacgtgcctggccgtatgaccccgcgttcaaccacgaccacggcgacagtctgcgtgacaccctgcatgcactggtcaacgaaagcctgaacctgctgtcgatcgctgcggtgccgctgctggcagcgctccttccgtggcagctgtggccgctgcagtggccgttcgttctgcaggtactgctggccatcgtctgcgccgaccttggcattaccttggtgcactacgccagccatcgcgtcggctggctgtggcggttgcacgcggtgcatcacagcgtcacccgcatgtacggcttcaacggcttgatgaagcatccgttgcaccaggcggccgaagcagtgggcggcgtactgccgctgctgctgttgggcctgccgatgccggtggctgcggtgctggccttcgccattgccatccagctgctgctgcagcactccaacgtggacatgcgcccgggcctgctgggccgggtgatggcgtgggcgccgctgcaccgcttccaccacatgcgttacggcaccgctggcgacgtcaacttcggcttgttcctgaccgtctgggatcacctgctggggaccgccttcgatgcgccgggctatcggctgcagcagcgcgacctcggcatcggcagccaaccggactatccgcgcgattatccggaacagctgctggcgccgttccgcgaactgccgcatggcgaggtgccggagctgccggaaggtctgcgcaggcgcggatga

SEQ ID NO: 493402 - DNA, 1056 bp, Stenotrophomonas maltophilia
atgctggcgcggcacgacggttgcgggcttgaacaaacggcgcaacccgccccgcctcggtggatatcccccctttggccgacaccgcgtttcccccacccacggatggcgtggatctacaatggcgccctcatcgcgcccggtaccggcatggattccttcaacctgatgcgcgccttccgccgcatcgtcgaacgcggcgggctggcccgcgctgccgaagacctgggcatgtcgccggccgggctgagcaagcagttgcgcgcgctggaaacgcacctgggcgtggtgctgctgcagcggaccacgcggcgcatgagcctgaccgagaccggccacgcctattaccgcgaatgctgccgcctgctcgacgaattggacgcattggaacgtggcatcgccgaacagcgtggcgaggtggccgggcgcctgcgtgtcaatgcaccgcagtcgttcgcactgagcacgctgtcgccgctgctgccacgcttcctgcaacagcatccacagctgtcgctggacctggtgatggaagatcgcctgctcgatgcggtcggtgagggtttcgatgtgtcgttgcggctgcgtgccgagctggacgactcgcgactggtggcgcgccggcttgcctcgctgcaacaggtgctgtgcgctgccccgtcctacctgcggcagcgtccagcaccgcagtcggtggacgatctgcaggtgcacagtgtgctggcctacagcctgtccgactcccccggcagctggccgctgctcggcccggatgggcaggtgaccatcaccctgccggcacgcgtcaccgtcaacaacagcctgctgctgcgcgacctgctggtggccggcatgggcatcggcgccctgccctcgttcctggcggcaccagcgctggcccgtggcgaactccaacaggtgctgcccgaccaccgctatccgccacgcttcgtgcatgcggtctatcccacgtcgcgccacctgcaacccaaggtgcgtgccttcatcgatttcctgcacgccgagctgccccgctgcgccggcctggattcgtaa

SEQ ID NO: 493403 - DNA, 651 bp, Stenotrophomonas maltophilia
atgtctcccgttccttcccccgccaccgccgcgccggtggtcgacttcttccacgacgtggtctgcggctggtgcttcgtgctggccccgcgcctgcagcaggtctcggccgaactcggcatccaggtgcgccatcgcagcttcgtgctgcaggactcgcgcgcgcagatggtcgaggtgttcggctcgatggagcgcgccaaggcgatcatcctgcgccactggaccgactgcgccgcgcatgaagacagcgcgcgcatcgatatcgaaggcatgcgcgcacaggacttcgaatatccctccggctggctcggcgcactggcctgccaggccgcagggttgatcggcggcaatgatgcccatggcgcaatgttcgacgcggtgcaatgggcgcacctgcaccagcaccgcaacatcggcgacgccgaagtgctgctggatatcgccgaatcactgggccatccccgtggtgccttcgctgaccacatgtgcagcgacgcagtacgccagcgcgtgcaggccgatcgtgccgacgccgctgccctcggcatccgctccattcccaccgtgatcggcggcaacggcctgcgcctgcagaccctgccgctgccgcaactgcgccaggccctggcgcccctggtcgcggcctga

SEQ ID NO: 493404 - DNA, 1008 bp, Stenotrophomonas maltophilia
atgaccccacgtatcctggccagcgcgctggccctgctgctggccggcaccgcggcgtccaccaccgtgtccgcgcacgaacgcgttccctccggccagcaggtcggcaccagcccctgggggccgaaggacgagatcggccggctcaacctgatcaccgaagcctcgcgtgcggcgatcctgtcgcgggtcagcggcggcaaggcctatgacctggccaccgactactacgtcggcatgcccagctggcaggacgccggcgacccgcactaccagttctggatgacccacaccccgcgcggcacggtgatggacgacccgatgggcgtgggcgagaccatgaacctcacccgcagctacaccggcaccgcgttctcgatgtacagccacaccggcacccacatcgatgcgctgaaccactttggcatccacggaaagatctggaacggcttcgaggccgacaagcatctcggcgatcgtggctggaatgtcaccggcatcgagaaattcccgccgctgatcgcgcgtggcgtactgatcgacgtggccgccgccaagggcgtggacatgctgccggacagctaccgcgtcacccgccaggacctgaaggatgcgctggcacgccagcgggtgaagctgcagcagggcgatgtggtgctgatccgtaccggccgcatgcgcctgttcgaacagcccaaggcctacatggccaacccgccgggcatgggcctggacgcggcgcgcttcctggttgaggacagcggcgcgatgatcgtcggcgccgacaacctgagcttcgagaccttcccctcggaggtggctgacgactacgtgccgctgcacacctacctgctggcccagcagggcgcgccgatcatcgaactggtggcgctggatgaactggcccgcgacaaggtctacgagttcgccttcatcggcggcccgctgaagatccgcggcggcgatgccgcgccgctgcgcccggtcgcgctgccggtccgcccgtaa

SEQ ID NO: 493405 - DNA, 615 bp, Stenotrophomonas maltophilia
atgggcgccgtcgtcgccctcgaccggctgctggacggccgccagttgtggcgcggcccggcccgccaggggccggccagcgaccacctggccagcggccacccggcgctggacgcacgcctgcccggcggcggctggccggccagcgggctgtgcgaggtgctgcaggcggcgccgggcgttggcgaactggccctggtctggccggcgctggccaggctgagccagcgcgaccgcccgatcgtgctggtcgccccaccctatcgcccgcatgccccggcctgggccgcggccgggctggatctggcccagctgcagatcatccacgctgcgccgaagcaggcgctgtgggcggccgaacaatgcctgcgctctgcggcctgcgcggcggtgctgtgctggccgcaccaggccgacgatcgcgccctgcgccggctgcaggtcgccgccgacagcggccagtgcctgggcttcgtgttccgcgaggcgcaggcagcgcgcaacccctccccggccagcctgcgcctgcagctcgaccacggccaggtaagggtgctgaagtgccgtggcggcctgccacccgcgcagccgttgccactggccatcacccactga

SEQ ID NO: 493406 - DNA, 1410 bp, Stenotrophomonas maltophilia
atgcactgggcctgcctgttgttgccgcagctggcgctggacagcgtgctgcgcctgcagccggacccccagcggccactggtgctgctgcagggcccagcgcagcgccgcgtgctgcgtgcggtcagcccggccgcgcgcgcagcagggctgcgcccgggcatgctgctgtcggccgcgcaggtgctggtgcaggacatgcacctgcacgactacgaccctgacgcggaacagcacacccggcagctgctggccagctgggcctacgcctacagctcgcaggtcagcctcgatttcccgcatgcactggtgctggagatcggcgccagccgtgccctgttcggtgactggctgacgatcgaaaagcgcctgcgcaacgaactgcatgaactcggtttccgccaccgcctggtggccgcgcccacggcgcatgccgcgcgcgtgctggccaacgtccacgacggcctcggcatcgatgcgcagcagctgccagcggcactggcgcagctacccttgccgcgctgcggcctgcccagcgacgcggtgaccgtgctcggccgttccggcctgcgcacgctgggtgcggtgctcgagctgccgcgtgacagcctggcccggcgcttcgcaccggaggtactgcagcagctggaagcactgcgcggcctgcccaccgcgccgctgcgctactaccagccaccggaccgtttcgatgcgcgcatcgaattcgaatacgagatcgaatccagccaggccctgctgttcccgctgcgccgcctgctgctggacctggccgccttcctgtgttcgcgcgatggcggcgtgcagcgcttcgacctgcatttcgagcacgacctgctgccggccagcgtgctgaccatcggcctgctggcccccgaacgcgatcctgcgctgctgttcgagatcgcacgcaaccgcatggaagcgttcgccctgccggccggcagccgcgcactgcgcctgcaggccgagcagctgccaccgttcgtgcccgccgcgcgcgacctgttcgatacccggccggcgcaggcgatgccctggaaccagctgcgcgagcgcctgcgtgcgcggctgggtgatgacgccgtgcagccgctggcggtgcaggccgaccatcgccccgaacgcgccagtggcacccagccaccggccaagcccccgtcgtactggccactgcgccccggctggttgctggacaccccacaaccgttgcgtgacccgcgcctgcgcatcgtcgccgggccggagcggatcgaatcgggctggtgggaccaggccgacgcacgccgcgactactacgtggtggaaaccgcacacggccagcgcggctgggccttccgtgagcgcagcgatccgcatgcgccgtggatgctgcacggctggttcggctga

SEQ ID NO: 493407 - DNA, 3111 bp, Stenotrophomonas maltophilia
atgcacagcgaactgcccggctacgccgaactgcactgcctgtcggccttcagtttccagcgcggtgcttcgatcgccgaagaactgttcgcgcgcgccgctggccagggttaccgggcactggcgatcaccgacgaatgctcgctggccggcatcgtgcgcgcctggcaggcggcgaaggcgcatggcgtggcgctgatcgtcggcgccgaattccaggtcgaggacgggccgaagctggccctgctgtgcaccgaccaggccgcctatgccgggctctgccagttgatcaccacctgccggcggcgcgcagccaagggcgagtaccgctgcctgcgcgaggatctgctcggcctgcccgacggcctgctgtgcctgtggctggaccggcaaccggccgccaccgacctggaactgctgcgcgccggcttcaatgatcggctgtggttggcggtggagctgcaccacgaacacgacgacgcacgccgcctgcagcagctgcaggccttcggccaacgccaccgcctgccgctggtcgccagtggcgacgtgcacatgcacgtgcgccgccgccgcgccctgcaggacaccctgaccgcgatccgccaccgctgcagcgtggccgaggctggctggcgcctgttccccaacggcgagcgccatctgcgtccgcgcaccgcgctggcccaactgtatccgcccgaattgctggccgagaccctgcgcatcgccgagcgctgccacttcaccctggaacagctgcagtacacctacccacgcgagctggtgcccgaggggcatgacccggacagctggctgcgcgtgctggtcgagcgtggcatcccctcgcgctggaaaggcggcatcgaaccgaaacaacgcgaacagatcgaacacgaactggcgttgatcaagcagaagaactacgcctcgtacttcctcaccgtgcaggacatcgtgcgcttcgcgcgcagccaggacatcctctgccagggccgcggctcggcggccaactccgcggtgtgcttcgtgctgggcgtgaccgagatcgacccggcacgcagcaacctgctgttcgagcgtttcatctccgccgagcgcgacgagccaccggatatcgacatcgatttcgagcacgagcgccgcgaggaagtgctgcagtacgtgttcaagcgctatggccgcgagcgcgccgcactgaccgcggtggcaatcagctaccgtggccgcagcgcgatccgcgacgtggcgcgtgcacttggcctgccgatggaccaggtcaacgaactgggcgcggcgatggaccactggggcggcaacatcccattgccggaaaccctgcgcgagcgcggtttcgatccggacacgcccttgatgcggcgcctgctggcgctgaccgccgagctgatcgacttcccgcgccacctgtcgcagcaccccggcggtttcgtgatttccgaacatcccctgtcgaccctggtgccggtggaaaacgcggcgatggccgaccgcaccgtcatccaatgggacaaggacgatctggatgccaccggcctgatgaaagtcgactgcctggcgctgggcatgcttaccgccatccgcaagtgcctggccatgctgaaacagcatggcctgcatgaaggacgcatggatgcgatcccgcccaaggatgcaaagaccttcgacatgatctgcgccgccgacaccatcggcgtgttccagatcgaatcgcgcgcacagatggcgatgctgccgcgcatgcagccacgcacgttctatgacctggtgatcgaggtggcaatcgtgcgccctggcccgatccagggcgacatggtgcacccctatctggagcggcgccggatcctgcgcgaacagggaccggacgcgttgaacgacccggacaacccgctctacccaccgcagctggaacgcgtgttcgcacgcacgctgggcgtgccattgttccaggaacaggtgatgcagctggcggtcgaagcagccggttacacgcctggccaggccgatgccctgcgccgttcgatggcggcctggaaacgccgtggcggcttggaaccgcatcgtgaaaaactgctggcaggcatgttgaaaaacggcttcagccgcgaatacggtgagcacctgttcgagcagatcaaagggttcggtgattacggtttcccggaaagccacgccgccagcttcgccctgctgacctataacagctgctggctgaaatgccaccatccggccgcgttcaccgccagcctgatcaacagccagccgctgggtttctacagccccgaccagctgctgcaggacgcgcgccggcatggcatcagcgtgcttcccgtggacgtgcgccacagcgactgggactgcacgctggatttcagcaggggcgcggccgcgatccggctcggcctgcgcctggtcgacggctgcaatgaagcggctgtacaggccatcatgcgcgaacgtgcacggcgcccgttcgacgatgtgggcgacctgtgccagcgcaccgccctggatcgccgccagcagggcctgctggccgatgccggtgcgctgcgcgggctcagcggccatcgccatcgtgcacgctgggatatctccggcgtggagaaccggctgccgctgttcgaccaggcccgcgccaccgctgaagcacgtgtgccgctgcccctgcccagcgcctgggaggacatgcaggccgattaccgcagcatcggcaccaccctcggccgccacccgatctcgttcctgcgcacgcagctgcgcagccgcggctgcctggatgccgcgcagcttgcgggccacggccatggccgtcgcgtgcgcatcgccggcctggtccgcatgcgccagcgcccgcagaccgccagtggcgttaccttcctcacccttgaagacgagaccggcatggtcaatgccgtggtctggcggcacctggccgatcgccagcaccgggtcctggtcgatacccggctgatgcagatcgacggccgcctggaacgcgtcgatggcgtgcagcatgtcatcgtgcagcgcatgcactgcctggatgaactgttgcaggggttgcgcagccacagccgcgatttccattga

SEQ ID NO: 493408 - DNA, 507 bp, Stenotrophomonas maltophilia
atgccgcgcgcactgctgctgaccacgctggtggtctccacactcgccctgctggtttccggctggaccgcctggagcctgcatcgcagccaatcgccacagcgcatcatcgaagcgcgcgggctgatcatccacgatggcacgggccaaccccgggtgatcctaggcgcgccggtgcccgaccccctcagccggggccgtatccaggggccgcgcgccaccgccctgtccggcctgatcctgctcggcccggatggctccgaacgcgggggctatggcaccagcgatcgcggcggtgaagccgtgctgaccctggacgatgccaatggcaccacggaagtgttcaaggtggtggccaacccggaccgtggtgccagcctgatggtcaagcaccagaacaacaccggcgccatgctcacctcatggcagggcaagccggaactgatgttcgtcgatgacagcggccagtcctactacgtgcgcccgggcgccaacgccgcgccctga

SEQ ID NO: 493409 - DNA, 1287 bp, Stenotrophomonas maltophilia
atgaaaatcaccgggtacagcgccgagtcgatcttcgacagcatccgcgacggcatcggcaagggccgcctgccggccggtagcgtgctgccgccggtgcgtgaactggccgagcagctgggcgtgaaccgcaacaccgtggctgctgcctacaagcgcctggatgcggcgggactggccagcacggcgggccgccgcggcacggtggtgcgtggcctgccgccgccgctggcgcgcgagggcagcaccccggggctggcgctgcaggacctggccggtggcaacccggatccgcgcctgctgccgaacctgcgcctgaccccggcggcgccgcggctgtatggcgtgggtacggtcgacacgaggttgcaggcgctggcacgcgcctcgctggatgcggattgccccgagggatatgcgctggagctgacccatggcgccgtcgatggcatcgagcgcctgctggcggcgtggctgctgccgggtgatcgcatcgcggtggaggatccatgctttctcggcagcctcaatgtgctcaatgcgtcgggtcatgcgccgttgccggtggcggtggatgcccagggcatgcaggtcgaatcgctgcggcaggcgctggaggctggtgcacgtgcggtgctgctcaccccccgggcgcacaatccgaccggggccagcctggatgcgaagcgggcgcgggcgttgcggcagttgttggcggcgtacccgcaggtagcagtgctgatcgacgatcactatgcgctgctctcgcagcaggcctatcactcggtactgccgctggatgggcggcgctgggcgctgctgcgttcgttgtccaaaccgctcggccccgacctgcggctggcctggctggcctgcgatgaagaaaccgcgatgcggttgcggctgcgattggcatccggtatcggctgggtcagtcacctgctgcaggacgcggcaacctcggtgctggcgtcgtcaacgcagcgggcgaagatcgcctcggcaggcgagcgttaccagcagcgcctgcagtcgctgcaggaactgctgcgcgcgcgtggcgtgccgacgccgctgccgatggagggattgaacctgtggctgccgttgccgggcgacagccatccgcaggtgctggcgctggccgcgcgcggatggcatgtgcgcgctggcgaggtgttcgcggtggcggcgccggcacatggcctgcgcatcacctgcgcggcgctgggcgcggcgcaactgcggccgctggctgacgacctggcggcggtgtgcggtctgtag

SEQ ID NO: 493410 - DNA, 774 bp, Stenotrophomonas maltophilia
atgccccttgccgctgccgactggcccgtcgcccagtccgttgaacagatcgccgccaacctggtcacggtgcgccaacgcatcgccgatgcttgcgcccgcgtcggccgtgacccggccagcgtgcgcctgctgccggtcagcaagaccgtcgatgacgcccgcatccgcatggcggtggccgccggttgccgcgagctgggcgagaacaaggtgcaggaggcgcaacgcaaggccgagacgatggccgatcttggcgtgcactggtcggtgatcgggcatctgcagaccaacaaggcgcgctacgtggcgcgcttcgccagcgagttccaggcgctggacagcctgcgcgtggccgaagcactgcagcagcgcctgcagctggaagaccgcacgctggatgtgttcgtgcaggtcaacacctccgccgaacccagcaagtatggcctggaacccgctgccgtcgaggcctttgtgcagcagcttccagcgttcgatcgcctgcgcgtacgcggcctgatgacgctggccatattcaccccggaggtcgaacgcgtgcgtgcctgcttcgtgcgcctgcgcgaactgcgcgaccagctgcagcgcactgcacctcccgtcatggacctttcgcagttgtccatgggcatgtccggagacttcgaagtggcgatcgaggaaggtgccaccgtggtccgcgtcgggcaggccatcttcggcgcacgcgccaccccggacagtttctactggcccagcaatggagcccccgcatga

SEQ ID NO: 493411 - DNA, 702 bp, Stenotrophomonas maltophilia
atgaagcacgcggtcgtcctgcaacacgtcgcctttgaagacctcggcatcctgcagccactgctgtcggcacagggctggcagctgcaggtgctgcaggccggtatcgacgcgctcgactccgccgaaaccgccgacctgctggtcgtgctgggcggcccggtcagcgtcaacgatgttgatcgctatcccttcctcaacgacagcatcgcgttgttgcaacgtcggctgcagcagcaacggcccacgctgggcatctgcctcggcgcgcagctgatggcgcgcgcactcggtgccgacgtcgccgccagtggtggcaaggagatcggctttgcgccactgctgctgactgatgaaggccagcgttctccgctgcagtccctgcagggcattccggtactgcattggcacggcgaggcattcgaactcccggccggtgcacgccgcctggccagcacgccggcctgccgccatcaggccttcgccatgggcagccatgcgctggccctgcaatgccacccggaactggatgcccgccagttcgaacgctggctgatcggccacaccctggagctggcgcaggccggcatcgatccgaacgatcttcgcgcccaggcacgccgttacggtgcaccgctggcggcggcggccaccgcgatgttcgaccattggctgcaggagctgccggagacaccgcaatga

SEQ ID NO: 493412 - DNA, 225 bp, Stenotrophomonas maltophilia
atgaactaccgattgcagatccaccgcgatggcgcccactggggccacttcgactgcagcggccccgatgccatgcaacgcatggacaccatcgccgcgcagctgcctgccgaacagggcttccagctgaaacggcagaaaggtgtcggcgaagagcgcatcctgtccagcaatgccgacggcctgcgcgtactggcttcgcagatccagtaccgcgacatctga

SEQ ID NO: 493413 - DNA, 507 bp, Stenotrophomonas maltophilia
atgctgaccctgcaacgcggcagccaccacgggctgctggtcgccccgcgctggccctccacccatatccaactggaagaagaggtactgcaacgcctgctcgatgcgcaggcaatgctgcctgtcgggctgcgactgctgctcacgcgcggcttcgaacccggccacagccggctcggcagcttccgtcgtggcgtgcgttggctcggtatcgcgttgttccgggcctgctatccgcaacgccatgatgaggtcgatgccatcttcggcgccaacggccacgacatcgatggccgtcatatcgatgtctcgctggtactgcacggcaagcggctacggctgctgcccgtgggcgtattcaccccgccacgctggcaggatcgtcgcgtcgcccgccatgccgaagcggtcgcgcgggtgaagcgcagcctgcagcgctgcggcttcgagctgcatcacaaccccaccgaagccctgcagatccactgcgattatcgcccgcgctga

SEQ ID NO: 493414 - DNA, 510 bp, Stenotrophomonas maltophilia
gtgtccacgcctgtcgaaccgacggatgtcgcgcagctgtgcgcggcccattaccggccgctgcacgcccatgtccgccgtaaactcccgcaacgcagcgacgccgatgacgtcgtccaggaaacctggctgcgtgtcatcaaggtcgccgccagcggcctgctgagcaacggccgcgcctacctgtaccgcgtcgcccacaatctgatcgccgatcactaccggcaacgccagcgccgtcgtgaggaagcgctggatgacgcccaactgcacgccctcgccgatcctgcaccgctgccggagcagcacctgctggacgccgaacagctgcgccatctcgacgcgatcatcgccgcgctgccaccgcgctcgcgccaggtattcctgctggcccgggtggagcagatggcactggccgagatcggccgccggctcggcatcagccggcagaccgcgcacggccatctgctgcgtgcgctggtggcggtgcagcaggtacccggcgcatga

SEQ ID NO: 493415 - DNA, 927 bp, Stenotrophomonas maltophilia
atgagcccggaggcgatcgcgcgcgaggccgcgcgctggtggctggacggccacgacggcggccgcgacgagcgtgccttcaaccagtggtactacgccgattgccgccacgccgcgcagtaccagcacctgcaggcgctctggcaggccggtgatgccacgcccagcctgcagcggcatcagcgcaagcggcagcgccggcacctgcgcgacgccggcactgccgtgctgctgctttgcgccttgggcctgtatacccgccaggccgcaccaccggccgcgcaggtgatgcgcacggcggcaggcgagatccgtgaagaagtactgccggacggctcgcacgtgctgctgtcacccggaagcgaagtccatgtccgcatcgatgcacagcgccgccagctgcagctgcagcacggccaagcctggttcaaggtagccgccgatgcgcagcatccgttccaggtgcatacgacgcacggcatggtcaccgcgctcggtacggccttcgaccttgccgtgcaggacaacgacagcgtggtcaccgtcactgagcatcgcgtccgtgtggacagcggcacccgcagtgagcaggccatcgaagggcagcagctgcgcttcgatggacaggcaccgatcatcggcctggccgccagccacagtgccctggcctggcgcgagcgtcgcctgcattgggtctccacgcccttggccgaggtcacccagggcctggatcgctggcatagcggccacacctggatcatcggcgcacacctgcgccagcagccggtcaccctgctcggcagtgcagacggtgcggcgcgcagccgcgaccagctggccacgcagctgcatgtacgcgtgctgcgcctgggcgcgggcgtgcaggtgtggctgccgccacgcagggaacatcgcgatgcaccctga

SEQ ID NO: 493416 - DNA, 2472 bp, Stenotrophomonas maltophilia
atgctgtttcaccgtccccttgtcctcgccctgtcactggcctgcgccagtccgcttccgttgttacctgccagcgcacacgcgcaggccgcctcccgtcacttcgatcttcctgcgcaatcgctggccagcgcgctggatgcctacagccggctgaccggtgtcgatctggtgatcggcgcggcattgccaggcggccagacggcgccggcactacgcggacggttcgacgacgcgcaggccctgtcacgcctgctggccggtagcgggctgcgcccccgtttcatcgacgcgcgccgcgccaccctggaaccggcgccggccgccccctccgatggcagccgtcgaaccggcccgctgcgcgtacagggcgatatcgcacacggccattcccccggtgcaggcgccagccagtatgtcccggcggcccgcgatggctttgcgcccgccgtcggcagcgagcgcgtggcgatggccgaacgccaggacggcaacagcctgctgcgttcgatgcccggcacccacagtttccactcgcgcagccagcccggcctgcaggtcaacatccgcggcatgaccggcgccgggcgggtcaacaccatgatcgatggtgtcacccagaccttccgcaacaacgcgggccatggctccggtggtccgttcgcctacgtcgacccattcctgctggccggtgtggacgtgcaacgcggtgcggtcgccggtggtgatggtgccggcacgctggccggcagtgccaatttccgcacgctggacatcgacgacctgcttggcgaaggtcgtgactggggcctgcgcgcgggttaccgccatggcaacaacggctacggcaatggccgtacctttgccggtgcctggcgccacagcgaggatggcggcgaccgccagttcggcctgctggccgctgccagcagcagccgcagcggcgaatacgccaccgcgcgcgggcagaagaacaccgccgatccgggcagccagcagcccagcagctggctgttgaaagcacgcctgcagcccagtgaccagcatcggctggacctgagccacatgcgctacgaaaacgacttttaccacaactacccgtggcagatttccgcacgcaaccagcgcgccagctaccactacacgccctacacgccgtggatcgacctgcgcgcgaccttcgccggcaacaagacccggctgttctatccgcccgtggaggattccagctacatcggtcgccgcacccacagcagcctgagcagctggacgctcgacaacaccagccgcttcgacatcggtgcactgcaggcacgctggaacaccggcatcaagcaccagtcggacgtctacgtggccgacacccccatcctgcgcggcgccaacccgcagggccgcagccagctggacagcgtgttcagcacgctggaactgcagtacgacatctacgcgctgactgcaggcctgcgccaggatcgctatggcatccgcggccacgtcccggtgtgctcggatgtgcccggccagtgcgccgagatcaacggcggcggcatcgacgtgcgccgtacccagcgcgcactcagccccagcctggcggtctcgtggcaggccaccgactggctgcaactgttcgccgaagcctcgcgtacttcccgcccgccgcgcgtgcaggagatgttcttcgagaagatcccgctggaaggcatgagcgatgccgatggcgtgggtgccaacccgttcctgcgccgagagcgctcgcgcaacctgcagttcggcgccaacctcagcgcctcctcgctgctgaccgacggtgacctggcgcagctgcgcgtcacccgcttcgacaaccgcatccgcgactacatcaagccgcagtacctgctgatcgtgcacccgccggaggtggggcctttcgtggtaccgatcgacagcgatcagcagctcactgcctggaccgatgcgctggacgtggacgacttcagcaccactacgcgctggatgaaccaccccggcgtggtgcgcatgcgcggtatcgagctggaagcgcactacgccagcgcgcactaccacgccacgctgagctggacccgctcgcgcaccagtgcgcctgccatcgaattcgtcaacctggaagacatcaccgccctgcccgaccgcttctggacgttggatgtcggcggccgctggtggcagcagcgcgtgcaggccggcctgcgcgccgaatactccgggcccaccgaagaaggctacgacttcttccagacccgcaggaccggcggtaccggtgtactgctcgacttctacgccagcttcaagccccagcccaacaccacgctgtggctgaacatcgaaaacctgcagaacaaggcctatgacaacaatgcctcgatcgacagcatcttcagcccgaccctggaccgcggcaacggccgtggccgcaccgtctcgatgggcgtcaatgtggcgttctag

SEQ ID NO: 493417 - DNA, 801 bp, Stenotrophomonas maltophilia
atgtggcgttctagccgccgctggctgccgctgtgcctgctcgcactggccgcaacggccagcgcgcagcctatgcccggcacggtgatcgacctggccagcgggcagcgcctggacgaagccgcgttcgtgaagcgtgcagcgaacgccccgcggctgctgctgggcgaacgccacgacctggccggtgaccacgccgcccagcgctggctgctgcacgcgctgcaacggcagcgtccacaaggcgcgctggtgatggagatgatcgccagtgaacgccaaccgcgcctgcagcgggtgcagcgctggctggccaagggcaaccatgccgatggtgcgcgcctgcaggcgctgctgggctgggatacacgctggccgtgggccacctatggcgggctggtacaggacgccaccgccgccggcatccccctgttcggcggcaacctgtcgcgtgccgaggtcaatgcgttgcttgcctccaacacgtcggtgcggtttccgatgcccaccgcccggcaacgcctgtcagccgtggtgctggcccagcacgcagacgccgcaccgatgctggaagggatgctggccgtgcaacaggcccgcgacacccgcatggcacaggcactgaccgcagcccctgcacccgcgctgctggtggccggccgctggcatgtactgcgcggcaccggcgtgccgggctacctgccatcggaggtaccggcactggtgatcgcgcttgcgtcacccgacgaaggcgtcgatgcggtcgacgccgatctgctgtgggtgccgggcgatgagtga

SEQ ID NO: 493418 - DNA, 750 bp, Stenotrophomonas maltophilia
atgcggtcgacgccgatctgctgtgggtgccgggcgatgagtgaacgcggccaacactggcaggcgattgccatcagcatcggcctgcacctgttgcccttgctgctgttggtgcactggatggccgcgccaccgttgctgccgccgcctgagcaggatgtgcgcatcagcctgcgcctgctggcaccggctacgcctccccagccggtcgaagagcgcctggccgacacccccagccaggcgcagcaggcgcgcgcgtcgcaaccggcgaagtcgccccctccgccaaagcccaccgccgcgcgcgagggcgaggtggccgccagcgagctcggtggccctggccggcaagccctgccggtcgccccgcctgcggccgtgaccgatgccagtcccgcaccggcatcgatcacggccgcgccgcccgctcccgacgcaccaccggcggacttccaggccggcgccgccagcgaccagtgggaagcccgcctgatggcgcgcctggagcgttatcgctactaccccgccgtcgcgcgctcgcgccggcagcagggaacgacctgggtcagggccagcatcgatcgcgagggacgcctgcaggccctgcggctggagcagtccagcggccaaccgatgctcgacgacgccgcactgcagacgttccgccgcgcgcagccgctgccgcccattcccatggaaatgaaggcaccgcaggaactggtggtgccggtggagtactacctgcgctag

SEQ ID NO: 493419 - DNA, 435 bp, Stenotrophomonas maltophilia
atgaacctgctgaccaccccggacctgggccacggcctgctggaactgttcaatcctgcggggctttacgatccctcggccaacggctactcgcacgtggcggtggtgcgccttcccgcccgggtgatccatatcgccgggcagggcggtgaggatgccgatggtcatctctcccccggcttcggggaacaggtcgagcaggcactggacaacctgcagatcgcattgcgttcggcgcaggccagcctggccgatgtcgcgcggttgcgcatcctggtggtcgaccacgacgaggaccggctgggcatcatcgcccggcaggtacggcggcgttggccgaacggcgcagcgccgacctgcaccctgattcctgtgccacggctggcgctggacggcatgctgttcgagatcgaggcggaggcctacgccgcctag

SEQ ID NO: 493420 - DNA, 903 bp, Stenotrophomonas maltophilia
atggataccgcgcgcgagcaacgcatcctgacgttctcgatcggggtcacccttgcggtgagcgcggtcggcttcggcggtggcctgctggtgggatcgcaggccatcctgttcgacggcgtgtacagcctggtcgacgtcgccctgaccctggtgtcgttgtcggtgctgcggctggtggcgcgggaacaaagcccgcgcttccagtacggctactggcatctggagccgatggtcgaagcgctgggtggtgtgatcctgtcgctggcctgcgtgtatgcgctggccaacgcggtgatcggcctgaccacgggcgggcacgaagtgaaattcgggcccgcgctgtggtgggcggtgctgctgagtgccagcaacctggcgatggcggcgttcgttgcgcagcgggcgcggcatctgcgctcggcgctgttatggctggatgtgcgtggctggctgctgggcgggttgatgagcctggcagtggtgctggccttcgtgttggcgctggtcctgcacggtggtgagtggcaccattgggtgccgtacctggattcgatcgtgctggcattgatcagcctggcgatgctgccggtgccggcgcgcagcgcgtggaaggccatgcgcgaagtgctgcaggtggcgccggatgttctggaccggcgcgtgcagcaggtgatgcaggcgttcgtggccgagcgtggctatgccggtttcaccagccatgtggcgaagatggggcggatgcgcttcatcgagatccatgtattggctgacccgatcacgccgctggggtcggtaggcgaagtcgatgcgatgcgcgatgagatcgcggtgcggctggatgcgcgggccagtactttctggttgaccatcgatttcacggcggatccggcgtggacgtga

SEQ ID NO: 493421 - DNA, 2289 bp, Stenotrophomonas maltophilia
gtgtacttcaagtccctggactacccggtcattgtcatcgacaacgactacgagtcgccgcgcatcggtggcatcctgatccgtgcgctggtggaagagctgcgcagcaacgaccagcgcgtgctgtgcgggctgaacctggatgacgcccgggccggtgcccgcacctacgtggcggcctcggccgtgctgatctccatcgatggcagcgaagaggtggatggcgagttccagcgcctgaccgccttcctgcgcgagcagagcgcgcgccgtgccaatctgccggtgttcctgtacggcgagcgccgcaccatcgagaaggtgccgagcaagctgctcaagtacatccacggcttcatcttcctgttcgaagacaccaagagcttcatctcgcggcaggtgatgcgcgcggccgaagactacatgaagaacctgctgccgccgttcttcaaggcgctgatccatcatgcggccgagtcgaactattcctggcatacgccgggccatgccggcggcgtggcgttcaccaagtcgccggtcggccgcgcattccatcagttctacggcgagaacaccctgcgcagcgatctgtcgatctcggtgccggagctgggctcgctgctcgatcacaccggcccgatcaaggatgccgagaacgaggcggcacgcaacttcggtgccgaccacaccttcttcgtcaccaatggcacctccaccgccaacaagatcgtctggcatggcacggtggcccgcggcgacgtggtgttcgttgaccgcaactgccacaagtcgctgctgcacgcgctgatcatgacgggtgcggtgccggtgtacttcacgcccagccgcaatgcgcacgggatcatcggcccgatcagcctggaccagttcacgccggagtcgctgcagcagcgcatcgccgccaatccgctggccagccaggcctacaaggccggctccaagccgcgcatcgcggtggtcaccaactcgacctatgacggcctgtgctacaacgccgagaagatcgccgacgagatcggcagcgcagttgatttcctgcatttcgacgaagcctggtacgcctacgccgcgttccacccgttctacgagaaccactacggcatggccaagggcaagccgcgtgagcaggatgcgatcattttcaccacgcattccacccacaagctgctggctgcgttctcgcaggcgtcgatgatccacgtccgcaactcggcgcaacgcaaccttgatgccgagcgcttcaatgagtcgttcatgatgcacacctcgaccagcccgcactacggcgtgattgccgcctgtgacgtggcctcgaagatgatggaaggcgatgccgggcgctcgctggtgcaggaaatgcatgacgaggcaattgccttccgccgcgcgatgctgcacgtccgcgatgatctcggtcgcgacgactggtggttcagcgtgtggcagccaacccaggtcgagcgcagcctggacaagggcgatacgccggcaccgctggtggccaagcgcgaggagtggtacctgcggccggacgcgcactggcacggcttcgagaacctggttgacgactatgtgttgatcgatccgatcaaggtgaccctgctgaccccgggcctggcaatggacggcagcatgggcaggctgggcatcccggcggcggtgctgagcaagttcctgtggggccgcggcatcaccgtggaaaagaccaacctgtactcggtgctgttcctgttctcgatgggcatcaccaagggcaagtggagcaccctggtcaccgagctgatggcgttcaaggaactgtacgaccgcaatgcgccgctgagccaggcactgccgacgctggccgccgattatccgaatgcctacgccggctggggcctgcgtgacctgtgcgacgcgctgcatgcgttcaaccaggaatttgccgtggccaaggtgatgcgcgagatgtacgtggacctgccgacgccggtgatgaccccggccgatgcctacaaccacctggtcaagggcgagatcgagcgggtcgacatcgagcagatcagtggccgcatcgcggcgaccatgctggtgccgtacccgccgggcatcccgaccatcatgccgggcgagcgcttcggcgacagcgacgagccgatcatccagtcgctgcgcatcgcccgcgagcagaacgcccgtttcccgggcttcgaatcggacgtgcacgggctcatcatcgagcaggagggtgatgcggtctcgtacaaggtggaggtgctgaaggcctga

SEQ ID NO: 493422 - DNA, 1353 bp, Stenotrophomonas maltophilia
atggcagaagcaaagaaaatcggggtggtcggagccaccttcctcgtcgccggcaacatgatgggctcaggcgtgttcctgttgccgtccagcctggccaagatcggtaccgcctcgatctggggctggctgatcaccaccgccggtgcgctgctgctggccttcgtgttcgccaagctgggcaagctcgcacccaaggcgggcggtccctatgcctacgcgcgcgactggttcgggccgtacatgggcttccagaccaacaccatctactggttcgccaactggatcggcaacgtcgccattccgatcgcggcggtgggctatttcagctatttcttcccgatcctgtccgagccgctggtgcgttgcatcgcggtgctggtgctggtgtgggcactgagctttgccaacgtgatcggtccggccttcgtcagccgcgtgcagacggtcaccaccagctttgcgttggtgccgatcctgggcatcgccattttcggctggttcttcttcgatgccgacatcttcaagggcgcctacaacgtgtctggcgagtcgaacttcggtgcgatctcgagcgctgcggcactgaccctgtgggccttcatcggcgtcgagtctgcatcggtgactgccggtgtggtcgaaaatccggagaagaacgtcgcccgcgcgacgctggccggcgtgttcctggctgccatcgcctacatcgccagttcgtcggtgatcatgggcatggtgccgaacgcggaactgcaggtgtccgacgcaccgttcgcgctggcggcggccaaggcggtcggtggctggggcggcgcgctggtcagcctgtgcgccttcatcggtgccgccggctcgctgggtggctggatcctgctgaccgcgcagagtgccaaggcagcgtcggatgacggcctgttcccgagcatcttcagcaagaccaacaaggacgacgtgccggtcaagggcgtgctgatcgtggcggtgctgatgaccctggcggtgctggtgacctccacctcggaaaccgcgtcggcccagttcgacgtgatcacgtcggcggccgtggtgctgaccctgctgccctacatctactcgtgcgtggcgtgctacttcgtggtcgagcgttcgcacaccctggtccacaccggtgcgttctggacgctgaccagcctgaccgtcgtgtactgcctgtgggcgatctacggctcctcggggaccatcgtgcagtacgccttcctgttcgtgctgttcatcaccgtgttctatcccttcttcagcgaggagcgccgccagcagcggcagcgcgcccgcgaggcctcggcgatcagcgccggcgcccggcaatcctga

SEQ ID NO: 493423 - DNA, 1434 bp, Stenotrophomonas maltophilia
atgcgcttggcggtactgagtctggcctgttcgaccgcactggcgatcgcgccagcgtatgcgcagcagcatggccaggaagatgcgcaggcgttgcggcaggaaatcgctgccatgcgccaggcattggaaggcatgcagcagcgcctggatcggcttgagcagcgcgagggctcagcgcctgccgccgtggcgcaggccccgaccctggcagcaacggcgggcggcagcgccagcatgctgcacccgacccaggtgccgggcgtggcgcaaccggtgctgccgcagcgcgaatcggtggccgatccctcaacggcggcgtcgcgtcccgacagtgcagccggtccgaccgaccccgatctgaaaggcttcttcgccattcccggcaccgatacggtgatccgcatcggcggctacgccaagctggatgcgattgccgattcgcgtgcggccggtgacgaagatcagttcattccgtcgtcgatgccggtgggtggcagccatcgcgatgtctccaatttcaacatccatgccaagcagacccgcttcagcttcgaggcgcggcgcccgaccacgcacggcaacctgcgtttctacctggagaacgatttcttcggcagcagtgaggggtatgagttccgcctgcgacacgcctatgggcagcttggcaacacctatgccggctatggctactccagcttcatggacccggacagcctgccggacacactggatttcgcagggcctggcggtgcaggatacctgctggtggcgggcatccaccacagctttgcgataggcaagggcaacaccctgaccgtcgccgctgaagacccgaagactgaactcgccggcgccagcgatgctcgcacggcagtcaaccgcctgcccgatgtgaccgtgaccgcgcgcctggagcgcgactggggccacctgcagttgggcgcggtggcacgcagcctggcctacgacggcgatggcgagcgcgaccggcgcatggccggtggcctgcagctgagcggctcggcgtcagtgggcgagcgcgacctgctgctgttcggcgtactcggcgggcgcggcctcagtcgctacaccgccgatctgaccggttccggactggacgcggtggtcggtgccgatggccgcctcgccgcgttggacctgcacggcggtttcgtcggctacacccattactggtccgcgctgtggcgctccaacctgatctttggccagctgaccctggagcgcaacgccgcactcgccgctgatgcattccggcagagccgctacggcgtgttcaacctgatctggagcccggcgccgtcctggacgatgggcatggagctgctgtacggccggctggaacagcagggcggcgcacgcggcgacacggtccgggtgcagggcagcctgcaatacaacttcatcaaatag

SEQ ID NO: 493424 - DNA, 843 bp, Stenotrophomonas maltophilia
atgttgtcgacttccctgcgcatcgctccggcggtgctgttgctgccggtcatgctggcattggccgcctgcagccaggcccagaccccgccgggcaagacggcggcagcgccggccgccggcgctccggccaccgcggcaaagggcgaccgtcccgcagtgctgaaaggcatcgagaagcacggcttcgaagtcgttgccgagtttgatgcaccgggtggcctgcgtggcttcgccggcgtggtgggggggcagcagcccgccgccgcgtacgtgaccgccgacggcaagcatgtgctggtgggcagcctgttcgatgccgaaggcaacgatgtggccgccgaggcggtggagaagctggtcgctgcaccgatgtcggccaagatgtggaccaagctggaagccagcgcctgggtgcgtgacggcaaggccgatgcaccgcgtgtggtctataccttcagcgatgccaactgcccgtactgccacaagttctgggaagcggcgcgtccgtgggttgacgccggcaaggtgcagttgcgccacatcatggttggcgtgatccgcgaggacagcccggccaaggccgccgccatcctcgccgcgcgtgatccgagcgcggcgctgctggagaatgagcaccagttcgaccgtggcggcatcaaggcgctaccgagcatcagccgcgagatcgcaggcaagcttgatgccaaccaggtcctgatgatcgagatgggcttccagggcacgccgggcatcctgttccaggatgcacaggggcaggtgcagcgtcgcgcgggcctgccgcagggcgccgacctgcagacggtgctgggtccgcgctga

SEQ ID NO: 493425 - DNA, 804 bp, Stenotrophomonas maltophilia
atgtcgagtgtgggaccggtgccgatgccggtggtgttgatcctgatgtgcgtgctgctggccatggcggtagcacgcctgtggccgcgtcggaaagacgggatggcagtgccttccgcggccagcctggttctggacatgttgctgatcggcctgctgtgcggacgcatcagcttcgtcgccttgaacttcgcgctttaccgtgaggccccgtggagcatcctgcagatcgccgacggtgggtatcaccttgcagtcgtgctggctgcgggcctggcgtggggcacctggcggctgcggctctggcgcgcgttgcgtgcgccggtgctggcgggcgcactggtgggcgtggtgtcgtgggtggtgggcagccacctgctgtcagcctggcaggagcagcggatgccgctgccggcggtgcaggtggccgatctgcaggggcgcgtgatcgacctgcagcagttccggggcaagccactggtgctgaatctctgggccagctggtgtgggccctgccggcgcgagatgccggtgctggcatccgcacagcagacccacaccgacgtgcagttcgtgttcctcaaccagggggaaaccctggacgaagtgaagggtttcattgcatccgaacagctccggctgggcaatgtactgctggacgataccgcctcggcgtcaaccgtgctgggtgtgcaggcctatccgtcgacgctgttcttcgacgccgaaggtcgcctgcgtgaactgcaccttggcgaactgacggcggcgggtcttgaacacaaactgcgccggctgcggtag

SEQ ID NO: 493426 - DNA, 1065 bp, Stenotrophomonas maltophilia
gtggaaggattcaggaacgaaggattcgtcgaggtcgcggtggtcgaatacccgggaggcgacccgtcggccgcctccgtgctgaccgagatggcacatgtcgccaaccggcttgcccagcagcgccgtccgttcaagcgtgtcctggtgacccgctggatcgtgccggccagccagaccggcgtgcatcgcattgccggcgcggagatgctcgaggcggacatccccgccgtgatcgccgtgcctggccagatcagccagggcgtctgcctgcgcgccgatgaggtgctgctggattggctgcgcgcgcattacgacggtggcagtctgctggctgccgccagcgacggtgtcagcatgctggcacgcgccggtctgctggctgggcgcaccgtcagtggtccggacctcgggcgccatccgggcctgcaggggcagtcggccagctgggtacccagcgagcgcgcgctggtcgatgacggcgacctgctgacggtggccggttcccaggcctggcgcttcctcgccctgcgcctgctgtaccggctgcacggccagggcgtggcgagttccgtggcgcagcagctggggatcacggttccggcggcgatccagcaggatctcgagcgtttcagtgccaacttcgcccacggcgatcgcgacgtactgaaggcgcaacgctggctgcataccaccgctgcgcgcggcgccacgctcggtgcgatctgtgagatttccgggctggagccgcgaaccctgcagcggcgcttcctgaaggccaccggcctgcgcccgatcgagtattgccagcggttgcgtatcgccaaggcgcagacgctgttgcagcagggggcgggcatcgatgaagtggcctggggcgtgggctatgccgaccagagcgcattccgtcgcctgttcctgcgcattgttggaatgacgccggccaactatcgccggctggtcaacaacaagcggcgcgagcggccgctgttgtcatcggtggcaggcagcctgcgcgggctgcaaccggcgcccggcatgcagatgccgcgcagcgtggcctga

SEQ ID NO: 493427 - DNA, 399 bp, Stenotrophomonas maltophilia
atgaacattggtcaactggcacgccaggccggcgtgccgatcgatacggtgcgctactacgaacgccagcagttgctgcccacggcggcacgctcggccgggggctaccgcatcttcggtgagcaggacctgcgccggctgcgcttcatccgccgcgccaagacgctgggcttcagcctggaagaaatcgccgaactgctggcgctcagtgaccgccactcacaggacatgggcagtgtgcgcgacacggcgcaggcccgactgcaggacattgcacaacgcatggccgaactgcagcgcatgcacaccgcgctttctcagctggtcgacgcctgccccggccacggcacgctggatcagtgcccgatcctggcggcgctgaccgacgacgcggcataa

SEQ ID NO: 493428 - DNA, 417 bp, Stenotrophomonas maltophilia
atgactgattccatcacctgccagttccgcgaagccgtgcccacggtcgaggactactgccgattgcgcgtgcttgcaggcctcagtgccaaggcccgggaagcggccgcccgcgcgctgcccaatacgctgttcggcgtatgtgcctaccagggcactgagctggtggcgatgggccgtatcgtcggcgatggcggctgccacctgcaggtctgtgatatcgcggtgctgccgcggttgcaggggcagggcctgggcaaggaagtgatgcggcgcctggatggctggatgcaggccaacctgccgccatcggcgtacgtcagcctgctggccgatggcgaggcgcatcggttgtacgcacagtttggtttcgcgcccacggcaccggcatcgatcgggatgtatcggcggttctga

SEQ ID NO: 493429 - DNA, 957 bp, Stenotrophomonas maltophilia
atgtgctattccgccctgatccgcgctgactacgccaagctggtacgcgagttcggcgccatcctgtcgctggaggagttcgccgaactgtacgcacacgatccaggcaagaagcggccgaagacgccgaaggcgatggatgacgggttcgccggtgcgcgtaccgaacagggccgggacatcgtggcgaagatccagcaatggcatgcgcaggagcagcaggcgctggaggctgaactggtccggcagcgcgaacgacgcgatattgcccatgccacgctggccacccggcccacgcagaaagcgcgcaatgacctgcgcgtggccggcaaccgcatcgagcgcgcgcaggcccggctggacgacctgcatcgggtgcagctgctgccgcgcgacaaccgcattttccccggcacctacgcaccggtgatggtcagcgagaacggccggcgcgtgatcaagccgatgcgctaccagtgccggttgccggacaagccggcgcgcaacgacgtgctgtaccccggcacctacaacgcgcggcgcgacagcctggaaggttactggcggggtgcgttcggactgcgccacggcgtggtggtggtgcaggctttctacgagcacgtgccccgccacgccatcgccggccgcagcctcggtgccgacgaaaaggagcaggacgtggtgctcgaattccgccccgatccaccccgcgacctgctgctggcctgcctctgggcggaatgggaaggaccggaaggccgcctgctttcgtttgccacgatcaccgacacaccgcccagcgacgtcgccgctgccgggcatgaccgcggcgtggtaccgatccgcagggaacacctggacgcctggctcaaccccgaaccggatgatctggcgcgccagtaccgcatcctcgatgaccgcgaggaaatccgttacgtgtacgaggaagcgggctga

SEQ ID NO: 493430 - DNA, 381 bp, Stenotrophomonas maltophilia
atgacagtgttgcaggacctgagggtgctggtggtcgagaacgacgagatgagtgcggccctgctgcagatgcagctggtgcatgccggtgcgactgtggtcgggcttgccgcgagtgtgtccgaggccctgcggctgctggagcagagcactcctgacgtggccctgctggattaccggctggcccgcaacgagaccagtgaaccagtggctgcagcgctttcggcgcgtggcattccgttcgtgctggccaccgggatgctggccgagcagctgcctgcgccgatgctggccggcctgttgctggtcaagccgtacctgtcggccgatctgtcgcgggcgctggcgcgtgcggtgggacgctccagcgccaaggcctga

SEQ ID NO: 493431 - DNA, 1440 bp, Stenotrophomonas maltophilia
atgacgttgcgtgcggcactgtttttcatggtcacgcacgcgctcgtcattgccttgatcggcccgcaggacccggttggctcctacctgatgctgatcaccgccccccttctggccgctctggcctgcgtgcgacgcgcgcgcgacagccaggcggcctgcaagtggcgaacgctgggcgctgccgtcggcctgttctcgctggccctgctggccctgctgtatcgcaatgtggccggcctcagccctgcgcagatgaccgcctcgtcgctgatcctgtatgtgttctaccggattccgctgacctacgttgccgccagcccaggcggcggcaaccgctgtatccgtgcggtggacctggcggtcatcgcgctgctgtgggtgctgtacttcgtgcatacgcgggcggtggcacacctcaacaccgcattgtggacgcaatgcctgcataccctgagcaacgtgcagaacagcctggtgttctgcttcgcgctgatccgcttcctggccgaggacaatgccgaccgccgcgacttcttccgcacgttgacgatctacgcgctgggctacttcctgatggcgctctacatcaatacctggcagccgcaggtacccgatggtggctggggcgacctgctgatcagcgggctgttcgtgctgctggcagtgctggccggcagcacgtaccgcccaccggcggtggctgtgccgcgcaacctccgccgcatcgtcgatgccggtgtgccgctgatgctgccgttgctgctgatgatggtggcgctgctggtggcacgcctgcagccgaccctggccaccgtggggttcatcggtgccatgctcggctatgccctgcgcagcgtgctcacccaggtgcagatccagcgtgagcgcgacgagctggcgctgctggcccggcgcgatccgttgaccgggctcggcaaccggcgcaacttcgatgaagcgctcggcagcgcgcacggccgcgcccgtcgccagggcgtggggctggcggtgctgatgatcgatatcgaccacttcaagcgactcaacgacacctacgggcatccggaaggtgatcgccgcctgcaggcggtcgccgcgatcctcgacggctgcctgcaacgcggtgatgacctgctggcccgctacggcggcgaggagttcatcgccgccctgcccgcgcccgacatcggccacgccctgggcctgggcgagcgcctgcgcgccgccgtggaagccgccgccctgcccgccgcccaggcccacgtgaccatcagcatcggcgtggcctggcaggccgcgcatgatgagggtgacccgcgcagcctggtcgagcgtgccgaccaggccctgtaccgggccaagcatgccggccgcaactgcgtgcacgccgccccggccgtcgaggccggggaacaacacgccgaccgccgcgcctag

SEQ ID NO: 493432 - DNA, 1827 bp, Stenotrophomonas maltophilia
atgctcattccaggctttacggcgggcgcgcaggcgccggccgagctgcatacccgttggtcgccgtggcgcgccctgctgggcgcgctggcaccgcagcaccgcagcggcgtcgaggcggcggccgatggccgtgccgagctggaggcgcaggtcgcggcgctgcaccgggtccaggcggtcatcgagttcgccctcgatggcaccatcctgcaggccaacgagaacttcctgcaggcgatgggttaccggctggaggagatccagggcaagcatcattccctgttcgtcgaccccgagcaggcgcgcagcgccggataccgtgacctctgggcgcggctgggtcgtggcgaatatgacgcgggccagtaccggcgttttggcaagaaccagcgcgagatctggatccaggcctcgtacaacccggtgctggaccggcaggggcgtccgtacaaggtggtcaagttcgccactgacatcactgcgcagaagctgcaggcggccgactcggccggccagctggcggcgatcgacaagtcgcaggcggtgatcgagttcagcatggatggccgcatcctgtcggccaacgacaacttcctggctgccaccggttacagcctggatgatgtgcgtggccagcaccactcgctgttcgtcgaacctgagtatcgcagcagtgccgagtatcggcagttctgggaaaagctcggccgtggcgaatatgatgccggccagtaccggcgcctcggcaagggcggacgcgaggtctggatccaggcgtcctacaacccgatcctggacctcaacgggaagccgttcaaggtggtcaagtacgccaccgacatcaccgcgcaggtgcatgagaaccaggccatgcagcgtgccgtggcgcagacccgtgaagtggtggcggccgccaaggagggcgacctgacccggcgcgtggccaccgccgacaagaacgggccgatcgccgagctgtgcgaaggggtgaattcgctggtcgaggcgatggccgcgatcatcggccagatcaagttcgccgctgacaccatcgccgtcggcgccaccgagatcgcgcagggcaacagcgatctgtcgcagcgcaccgagcagcaggcagcgtcgctggaggagaccgcggtgtcgatgaagggcctggccgagaccgtgcagcgcaccgcgaccaacgcacggcaggccagtcagctggccggtggtgccgccgatgtcgccgcgcgcggcggtaacgtagtgcacgaagtggtggaaaccatggcggtgatcaacgcgtcctcgcgccgcatcgtcgacatcatcggcgtgatcgacggcatcgccttccagaccaacatccttgccctgaacgccgcggtggaagccgcgcgtgcgggcgaacacgggcgtggcttcgccgtggtcgccaccgagatccgggaactgtcgcagcgctcggccagtgccgccaaggagatcaagcagctgatcgatgcgtcggtggccaatgtcggtgccggtaccgcgcaggttgagagcgccggccgcaccatggacgagattgtggtcaacgtgcgccgggtcagcgacctgatgtccgagatcagcacggccgcgcagcagcagagcgacgacatccagcagatgaaccatgccgtcgatctgatcgaccagggcacccagcagaacgccgcgctggtcgaggaagcttcggccgcggcgcgcagcatggaagaacagtcggcgcagctgctgcagacggtggccagcttccgcgtgcagggtggggcggggcacctgcatggtgcggcggtgctgcgcgcggtctag

SEQ ID NO: 493433 - DNA, 1089 bp, Stenotrophomonas maltophilia
atgttcccacgcctggccagtttcctcatcctgggcctgtgcagcagcggcgccttcgctgccgacgccacctaccgccccagcttccatcccgaccagctgaagggcccgcctgccgggcgcccgaacgaagtgctggtactgggcaccacccacttgtccggcctgcccaagtccttccagcccgccttgcttgaaccgttgctgcagcgactggtcgcctggaagcccgagctgatcgccaccgaagacctgtcaggcctgcagtgcgatttcatgcgtcgctacccggcacgctatgcggagagcgtggccacctactgcttcgacaccaccgctgcgcaggctgcgaccggactggacgtgcctacggcgaacacccaggccgagcacctgcttgcgacctggccggacgagccgacgcccgcccagcgtcgtcggctcgcagcattgttcctggcagcgggtgaacgcggctcggcgcaggtgcagtggctgcgcctgcctgcgtccgagcgcaaaggcggtgatggactgacacctgccctggtcgagatcctcgaaaaaggcctggttcgccgcaatgaaacccacctgatcgccgccgaggtcgccgcccgcctcgggcaggaacgcctgtgggccgtggacgaccacacggccgattcgcccacgcccgccgaggatgaagcggcggccagcgcggccatcaccggtgcctggaacaatacgcactcgcgcgcgcggcgggaggccgatgaacgcctcgtggccggtctggacaagcccggcggcgtcatggcgctgtatcgggactacaacagcccggcggcggcgatggccgcctaccagagcgacttcggcgcgacgctcgtcgagccgtcctccaaggcgttcggccggatgtacgtcggttactgggaaacccgcaacctgcgcatggtcgccaacatccgcgacgtgctgagccagcatcctggcagacgcatgctggccatcgtgggtgcctcgcacaagggctactacgaggcctacctcaatcagatgcatgacgtgcggctggtcagtgcggacacggtattgcgttga

SEQ ID NO: 493434 - DNA, 270 bp, Stenotrophomonas maltophilia
atgctgaaagtgatcgccgaggatttcatccatcccgatgcggtggacaccgtgcttcccctgtaccgggagctggtcgcgtgcacgctgcgcgagccgcgctgcctcggctatgaactgttcgtcgaccagaaggatccggccacttcatcttcatcgagctgtggcccgaccgcgccgcgctcgacctgcactgtgccagcgaacacttccagcgccttgtgccacagatcaatgccttccagtgtgcgccgtgccggttcctgctga

SEQ ID NO: 493435 - DNA, 303 bp, Stenotrophomonas maltophilia
atgaatgcctggaacccggttgcggtacgcaagttcattccggccctgatcggctggtgcctggcgctggccgcctgtctacgcgccgaacagctgcgcggcgacctgcacgcacgggcgttgttgcccgtgttgcagcaaggtgcggtcgcgctgctggtcctgagcctgtcctgcacggttgcggcctgcctgttgctgtggcggcatggccgcagcgatcatgtgcatcccgctgcaggcactacacccgtacggcatccatcagcaggaaccggcacggcgcacactggaaggcattga

SEQ ID NO: 493436 - DNA, 2190 bp, Stenotrophomonas maltophilia
atgccgggccagggcacccacggcaatggactgctggagcgccgcctgcaggcgttggcggaagagcgtcgccggctggcgatgatcatcgacggtaccgctgcgggtacctgggaatggaacgtgcagaccggcgagatgcgggtcaatgcgcgctgggccgagattgtcggttatcgcctggatgagctggaaccgatctgccagaagacgttcctgaagctggtccatcccgatgacattgcgctgtccgatgcagcgctggacgatcatttcgaagggcgcagcgacaactacgcctgcctgctgcgcatgcgccacaggaacggccagtggatctggatccaggaccgtggccgggtctttgaatgggacgggcacggcaagccgctgtggatggccggtgcccatgccgatgtcaccgagctgcagcaggcaaggcaggacgcggccgagacccggcaacgcctgcaggccgtggtcgatgcgtccgatgaggtggcggtgatcgccaccgataccgatggcaccatcaccctgttcaacacgggggcggagcgcctgctgggctacagcgcggcggaggtggtcggccagcgccggctcgacgccttccacgatccagccgaactgaaagcgtggttgcagccgctggctgatgctgatggcaatcttcccggcgtgttcgaggcgctgagcgcgcgtgccgacgggcagacctactcgcggcagtggacgctgctgcgcaaggatggccagtcacgccaggtacgcctgtcgatcagccgcatggagagtgccgatggaacgcgcatcggctacgtcggcatggccatcgacattaccgagatcctgcaggcacgcgccgaagcacgactgtcggcagagaagttcgctggcgcgttcacctccgccgcactgggcatggcactggtgtcgctggaaggacgctggctggatgtcaacgacgcgctgtgccggatactgggctacccgcgagaagagctgctgcaggtcgatttccagcgcctgacccatcccgatgacctgcagaccgacctggccctggtacaggacctgttggccgggcgacgcagccactatcacctggaaaagcgctacctcgaccgcgacggccgcatcatctgggcgcggctgtcggtgtcgctggtgcgcaacgagcatggcgaaccgctgcatttcgtgtcgcagatccaggacatcaccgcccagcgcagcagcgagcagcgcctgttcgagagtgaacaacgcagccgaatcacgctggatgcggtggccgacctggtgctcagcgtcagccttgatggccgcatcgactacgccaacgcggctgcggtgcgcaccctggccggtgatggcgcattgtcgctggccgggcacaaggttcaggacgtgctggcgctgaccaccgagtacgcgcccggttcggtactggatgtgacggtgctgctggacccggagagcaacgcggtggacctgcacgccgacctgctgctgcgcctgggcacggcaacggtgccggtggacctgacccgcgcctggctgcgcgatgacgaaggccacgtgcgcggcgcggtgtgggtgctgcgcgacgacacccagcagcgggcacgccagcgcgaagcccgccacctggccgagatcgatccgctcaccgaactgagcaaccgccgcggtttcgaggtacacctgcagcaggcgatcacccgcgtggagcgcaccggccaggctgcctcgctgatgtacatcgatctggaccgcttcaagccggtcaacgacacctggggccatctggccggcgatgccgtgctatgggcggtggccagcgtgctgcgccatggcgtgcgcgattcggacgtggtggcgcggttgggcggtgatgaattcgcggtcatcctgtccggttgcacgccgcggcgtgcggcccgcatcgggggcgagctgctgcacaccctggccgcgctgtccattccgtgggaccaggaccggctgcggatcggtgccagcatcggtatcgcgccgctggccggcggcatgagcgtggaccaggcggtggctgcggccgatgcccagtgctaccgggccaaggcgatggggcgcaacaacgtgcaggtgcagggcgagttgtcccagcttccgggtgacgatcccgacgccgcggaggactga

SEQ ID NO: 493437 - DNA, 2388 bp, Stenotrophomonas maltophilia
atgcacgacgccaagaacgcccagagcgcgctcgcccagcagatcgcccagaccatcgccgacgagatcggtgcccagtccgcccaggtacgcgccgccgtcggcctgctcgacgagggcgccagcgttccgttcatcgcgcgctaccgcaaggaagtgaccggtggcctggacgacacccagctgcgcaacctggaaacccggctgacctacctgcgcgagctggaggaccgccgtgcggcggtgctggccagcatcggcgagcagggcaagctcagcgacgagctgcgcaatgacatcctggccgccgataccaagagccggctggaagacctgtacctgccttacaagcccaagcgacgtacccgcgcccagatcgcccgcgaggccggtctggagccgctggccgatggcctgctggccgatccgacgcaggacccgcagacgttcgcggccaccttcgtcgataccgacaagggtgtggccgacaccaaggccgcgctggaaggcgcccgcgcgatcctgatggagcgctggggcgaagatgccgcgttggttggcgagctgcgcacctggctgggcgagaccggcgtgatccgtgcccgcgtggccgagggcaaggaaaccgaaggcgccaagtaccgcgactatttcgaacatgccgaatctctggcgaagattccctcgcaccggttgctggcgctgttccgcgcgcgccgcgaagagatcctgttcctggaactggacccgggcagcgatgccgaagcgggccaccagtacgccgagggtcgggtggcacgcaaggccggcatcgccgaccgggggcgtgccgccgaccgctggctgctggatgcctgccgcctgacctggcgcgccaagctgcacacccatcttctgctggacctgttcaaccaggcccgcgaaaaggccgaagccgaagccatcgcggtgttcggcgacaacctgaaggacctgctgctggccgcaccggccggcccgaagaccgtactcggcctggacccgggcatccgtactggctgcaagatcgccgtggtcgatgccaccggcaagctggtcgccaccgacaccatctacccgcatgagccacgtcgccagtgggagcagtcggtgcagacgatcaagcagctgtgcgccaagcacaacgtggagctgatcgcgatcggcaatggcaccgccagccgcgaaaccgacaagctggccggcgaagcgatcaaggctgccgccaacccgaagctgcagaaggtcgtggtcagcgaggcgggcgcctcggtgtactcggcctccgagttcgcggccaaggagttcccggggctggacgtgtcgctgcgtggcgcggtatcgatcgctcgtcgcctgcaggacccgctggccgaactggtcaagatcgaacccaaggcgatcggtgtcggccagtaccagcacgacgtggaccagtaccgcctggcgcgggcgctggacgcgcgcgtggaggactgcgtgaacgccgtgggcgtgtacgtgaacaccgcctcggccgcgctgctgtcccgggtgtccggcctgtcggccacggtggccgagaacatcgtgcgccatcgcgacgacaacggcccgttcaagcgccgcaaggacctgctgaaggtcgcgcgcctgggcgagaagaccttcgagcagtgcgccggcttcctgcgcatcgccgatggcgaccagccgctggacgcctcggcggtacaccccgaagcctatccggtggttgagcgcatcgtggccagcaccgcgcgcccgatcaaggcgctgatcggtgacggcagcttcctgcgtggcctgaaggcagaacagttcaccgacgacacctttggcgtcccgaccgtgcgcgacatcctgaaggaactggaaaagccgggccgcgacccgcgcccggagttcaaggcggcgcgcttcgccgagggcgtcgaggacatcaaggacctgcgcgagggcatggtgctggagggcgtggtcagcaacgtggccgccttcggggcctttgtcgatatcggcgtgcaccaggacggcctgatccacatctcggcgctcgccgataccttcgtgaaggacccgcgcgacgtggtcaaggccggtgacatcgtcaaggtgaaggtgctggaggtggacgtggcgcgcaagcgcatcgccctgacccggcgcctggacgataccccgggccaggccaccagccgcccgggccagcgcgatgagcggggccagggccaagggccgcgccgtgacgctggcggccagaaccgtggaccgaaccgcggccagggcgctggcggccgtccggcccagtctgcgccgccggccaacaatgccctggccgaggcctttgcccgggccaagcgcagctga

SEQ ID NO: 493438 - DNA, 216 bp, Stenotrophomonas maltophilia
atggcaatcgttctttatgtcggtggtagcaaggatggcgagaagggcgtggtgccctacggcttcagcaaatcccgcgccgacaccgcgctggggccggagttctacacggagcggttcatggaactgcagggtgtcggcaaggtccgcctgatggccctggaaggcatgcgtgacgagatcgtcatgcagcgcgccgcccgccactaccgctga

SEQ ID NO: 493439 - DNA, 732 bp, Stenotrophomonas maltophilia
gtgagggtagtcatcgccgatgacgaaccactggcgcgtgagcgcctgcgcagcctgttggccgcacaggacggcgtggacgtggtggccgaggccggcaacggcgagcaggccctgcacgcgtgcgcggagctgcagccggacctggtcctgctggacatcgcaatgcctgggctggacggcctggaagcagcccgccacctggccagcttcgaaccgcggccggcggtggtgttctgcactgcctacgatgcgcatgcgctgtcggccttcgaagcggcagccatcgattacctgatgaagccggtgcgcgccgaacgcctggcagcggcgattgcacgggcacgcacgttcctggccggtcgcgatggccagccgcaggcgcacagcgggcagcaggcacgcagcgtactgtgcgcacgcctgcgcggcagcctgcggctgattccgctggacgacatccactacctgcaggccgaagagaagtacgtggtggtgcaccacgcgcgcggcgaggacctgatcgaggaatcgctgaagtcgctggaagaagagttcgccagccgcttcatccgcatccatcgcaactgcctggtggcgcggcacgagctggtggagctgcggcgcggctccggcgggcaggtgcaggcggtgctgcggcatggcaggcagccgctggaagtcagccgccgctgtgtggcgacgctgaagcaggaactgcggcatctgtga

SEQ ID NO: 493440 - DNA, 1044 bp, Stenotrophomonas maltophilia
atgcccctggccagcccatcgccgtggatgccggaactgtgccgcctgccgcggctggcggcgatgctgggcctggccgagctggtggtggtggtgctggccctggccccggatggcagccgccactggaccgttggcgagctgctgtcggccagcggcttcgcgctgtggctggcgctggccgtgaccgccagcctgtgcctgctgcggcaggcgctgtccaggctgccgcaggtgatgggggcggtcgctgccatcgcactggcggccctgatcgcggtcgtctgcgccggcatcgtgcacgcgctgtacgcggtgctgggtgacagcttcgccaacggcatcagcttctggcgcttcaccctcggcagcgccgccaccaccgcgctgatcagcgcgctggcgctgcgctacttctatgtcagcgaccgctgggcggcccaggtgcaggccaatgcgcgcgcgcaggccgatgcgctgcaggcgcgcatccgcccgcatttcctgttcaacagcatgaacctcatcgccagcctgctgcatcgggacccggcggtggccgagcgtgccgtgctcgacctgtccgatctgttccgtgctgcgctcggtgcaggcgagggcgattccaccctgcgcgacgaatgcgaactggccgagcgctacctgtcgatcgaatcgctgcgcctgggcgaacgcctgcaggtgcgctggcagcgtgacgagccgctgccgtgggacctgccattgccaaggctggtactgcagccgctggtggaaaacgccgtgctgcatggcatttcgcgcctgcccgagggcggcaccatcgagctgcagctgctgcgcgagggcaacgatctgcagatccgcgtgcgcaatcccgcgcctgatccgcaggcgcccgggctggccctggcgcggggggccggccatgcccagcacagcatcggccatcggctggcctggcgctttggcagtgccgcgcggatgacggctggctggagcgagggctactatgcctgccaagtgacagtgccgatccagtga

SEQ ID NO: 493441 - DNA, 660 bp, Stenotrophomonas maltophilia
atgctgcaaacggtggaacaggaaaccggcgcctcgccgcagtggtcggtgatctggctgcacggcctcggcgccgatggccatgatttcgcgccgatcgtgccggagctggtgcggccgcactggccggcgctgcgcttcgtgttcccgcacgcaccggtgcggccgatcacgatcaacaacggcgtgcccatgcgcggctggtacgacatcgtcggcatggacttccggtcgcgtgccgacatggccggcgtgcaggaatcggtggtgcagctggacgcgctgatcgcgcgcgagatcgagcgtggcgtcgcggcggagaagatcttcctggccggcttctcgcagggtggtgcgatcatcctgactgctgcgctgtcgcgtaccgcgccgctggccggcctgatcgccctgtccacctatctgcccgaagccgacagtgccacgcgcgttgaaggcgcggtgcaggtgccggtgttcatggcccatggcagtggcgacccggtgatcccgcaggccgtggcggcccacagcgcacaggcgctgcgtacgctgggcctggacgtggcgtggcacagctacccgatggcccaccaggtctgtgccgaggaaatccaggcactgggtgactggctgcaggaacggctgggcgcggcctga

SEQ ID NO: 493442 - DNA, 1926 bp, Stenotrophomonas maltophilia
atgggggtgcagaccatccatgcggaagcagaaacgccccggctcgacgccggctgggcgctgctgcccgctgaatctccgttgcagatgcccgaacagaccctgcgcgaaggtgcactgaaggtccggcggcatcgcacgtcgccgcgcctgatcggcctgcgccggctgtacatcttcggtggcacgctcggcatgaccgccgtggccacgcggatgatgtggcgggtgctgtcggccaatggcatcagcgtgctcgaagcctgcctgctggtgctgttcgttggcctgtttgcctggatcgcgctgtctttcgccagcgccctggccggcttcctgaccgccgtgttcgaccgtggctatcgcctcggcatcgacccggacaagccgctgccgaccgtgcacagccgcaccgcgctgctgatgccgacctacaacgaagacccgcgccgcctgctggcgggcctgcaggcgatctacgagtcggtggcggccaccggccagctcggccgattcgatttcttcgtgctcagcgatacccgtcgcgaggacatcgccgctgccgaggagcgggtgttcggcgagctgcgcgagcgggtgccggacgggcagatccgcctgttctaccgccgccgtggtgacaacagcgggcgcaaggccggcaacatcgccgactgggtccgtcgcttcggcggtgcctacccgcagatgctgatcctcgacgccgacagcctgatgaccggcgacagcatcgtgcgcctggtggccggcatggagcacaacgccgacgtcggcctgatccagaccctgccgtcggtgatcggcggccgcaccctgttcgcacgcatgcagcagttcggtggccgcgtgtacgggccggtgatcgcccgtggcgtggcctggtggcatggcgccgagagcaactactggggccacaacgccatcatccgtacccgcgccttcgccgaccacgccggcctgccggcgctgccggggcgcaagccgttcggcggccacgtgctcagccatgacttcgtcgaagcagcgttgatgcgtcgtggcggctgggccgcgcacatggtgccctacctcggtggcagctatgaagagggcccgccgacgctgaccgatctgctggttcgcgaccgccgctggtgccagggcaacctgcagcacggcaaggtcgtgggcagccgcggcctgcactggatcagccgcacgcacatgctgatcggcatcggccactatttcaccgcaccgatgtgggcaatgctgatgctgatcggcatcgccatcccgctgttccaggagggcatcgacttcaatgccctgctgcacctgtcgcccagcgtgtactggcgcgcacaggacgaagagcaggtggtgcgcctgttcgccgccacgatggcggtactgctgctgcccaaggtgctcggttacctggcgatgctgctggacccggtcgaccgccgtggctgcggcggtgcgatccgtgccttcgtgtcgatgctggtggaaaccgtgctggccgcgctgatggcgccggtggtgatgtacgtgcagtcgcggggcgtggccgaagtgttgtccggccgcgattccggctgggatgcgcagcagcgtgacgacggcggcatctcgtggctggcactgatccgcggctacggtggcctgggtgtgttcggcgccttcatgggcgtgctggcctgggccgtgtcgccgtcgctggcggcgtggatggcgccggtggtgatcggcatggtgttggccattccggtggtggcgctgacctcctcgcgtggtccgggcgccttcctgcatcgcctgggcctgctggacattcccgaagagaacatcccgccaccggtactggtccgcgccgcgcagctgcggcgcgaagcggccgagcaaccgccgctgtactga

SEQ ID NO: 493443 - DNA, 2046 bp, Stenotrophomonas maltophilia
atgtccccatcgtcccgttcccgttccgcgcgcctgccgcgcacccgcctggcccctgccctggcctccgcctgcctgctggccctgccaggcctggccgctgcagaggccggcgccgatgcctccaccaaggatctggataccgtggtggtcaccgcctcgggcagccagcaatggatcaaggatgccccggccagcatcagcgtgatcagccgtgaggacatcgagcgccagccggttcccgacctggccaccctgctcagccgcgtgccgggcgtgaccggcggcctcagcgccgtcggcgaacagtccaagatcaagctgcgcggcatgccgtccaactacacgctggtgctggtggacggcaagcgcatgggcagctcggccgcgaccaactaccgccccgacctcggccgccaggacctgaactggatctcgcccgaccagatcgaacgcatcgaagtggtgcgtgggccgatgtcctcgctgtacggctccgacgccatgggcggggtgatcaacatcatcacccggcgcatcggcgacgaatggaacggcagcgccacccacagctacacccgtcccggtgatggcaagcgcggcgatacccagcagatcggcgcgaccttctccggcccactgggcgaacgcttcggcctgcgcatcggtgccaacagcatgcgccgtgattcggaccagtccaaccacggtgtctacggcaatgcctacgccggcgagaaggaccgcactgtcgatgcgctgctgcagtggaagctgagcgacgcacaggaactgtcgctggaagccggccatggcgtgcagcaggccttcatcgatgcgtcgctggaaaagcaggacgaaggcgcctggggagccagtgagctcaagcgcagctcgctggcgctcaaccacgatggcacgtggagcttcggcacctccaggctcagcgcgtactggaccgaatacaagaacgacatcggcgccaccggccgctcagaggccaccgacacgatcatcgaaggcagcctgaccacgccgttcaccctgggcgttgaacaccagtttgccgtgggtgggcagtggaagcgccaggaactgaccaacaccgataccatcggccgcgcgccgatcgactacgccggcaacgccgtcagcggctccagcctggaagtggatacctgggcgctgtttgtcgaagacgaactgaagctgcaccgcaccctggccctgaccgtgggcgcgcgcctggaccaccatgagaagttcggcggccacgtcagcccgcgtgcgtacctggtctggcatccggccgaacagtggaccatccgcggtggcgtctccaaggggttccgtgcgcccagcctgaccgagaattcggccaccgctgccacccagtccggcggccgtggctgcacctcgctgatcccgctgggttatacccgcggcgggtgctacatggccggcaacccggacctggatccggaaaccagcaccaaccgcgagatcggcatcagcttcgacaatgacctgatcgatgttggcgtgacctacttccacaccgacttccggaacaagatcgaatacgcaccgctgggccgcttcaacggcatctggtggacgcgcatgagcaacgtgcagcgcgcgcgcaccagcggcatggaaggcaacttcaacgtccgcttcggcgagcagtggcgctggcgcacctcggcaacctggatgaaggaagccaggaacctgaccaccggccgcaacctgatcgatacgccggaattctccggctactcgtcgctggactggtcgccgaatacggtgttctccggcagcctgtcggcgcagtacaccggcaagcagaccggcaccgccacgaccttcctcaaggcctacaccctgtatgacctgaccgtcgcatggaacgtcaacgaggtgctgaccctgcgcggtggcgtcagcaacctggccgacaggaagctgtatgcggaaggctccaccgactacttcgtcgccgggcgcagctacttcctcagcatgaccgcgcgcttctga

SEQ ID NO: 493444 - DNA, 171 bp, Stenotrophomonas maltophilia
atgaccacacctgctacaccggaaaacgcaccgggaccggtgctcctgccgacacctgaagtggtgcaggcacaacaactgctcgcacgccagcaactggcggtggcgatggaccgtgcgcgcacggccgccacgcgggacgcggcaccggccgcgctggaaagcgagtaa

SEQ ID NO: 493445 - DNA, 387 bp, Stenotrophomonas maltophilia
atgaataccactgacctgtcccagttcagcccgaagtggcagttccgcttcaacttcttccgccagcatggcgcgcccaagaatcccggtttcaagcaggcctggaaggcgctgtcgttcggtgaccgcctgaagatcaacctgaacttcttcgcgttgttcttcggtgcgatctacctgttgatcctgggcatgtggcgcaaggcgctggtggtcatcggcatcaacatcgcgctggccatcgtcagcatgttccttcccgacgtcgtcgggcgcatgctgttcatcgcgatgaatctgctggtcgcctccagcaccaactacagctactacctggagaaggtggaaggtcgcgccagctggaacccgtttgaaggaatgttctaa

SEQ ID NO: 493446 - DNA, 2532 bp, Stenotrophomonas maltophilia
atgccttcttcccgttccgccgctgcccgccgcccgggcagcatcgcccacaagctgatgctgggcaccgccgcgatcgcgctgctgtgcttcggcctgaccgcgttcctgatctaccgacaggccagcgccagcctgatcagcgcctcgcgccagaccatgaccagcgaggcgaccgctgaggcgcgccaggtggcggccgatctgggcaccgcctttgccagcaacgatgccatggttgaaagcgtgctggcccagcgcgcccgtggtgacgtgcccgaccgcgccagcttggcggcggtgctgggcgagcagctgcgcgcccatcccgaatggctgggcaagagcaccatgtgggagcccgatgccttcgacggcaaggatgccgagttcgtcaacaccgaggcgcacgatgccaccggccgctacatgagctactgggcctggcaggagggcaagccgcagcagtcggtgatgaccgattacaccgagaccgccagcggttccggtgactggtacatggtgcccagccgcgacaagctgccgaaagtgagcgaaccgtatgcctatgacatcgccgggcagcaggtgctgatgagtacgctgagcacgccgatcatcgagaacgacaggttcctcggtgtcttcaccgtcgacttctcgctggcagcgttgcagaagcacctggccacgctgaagccgatgggggccggccgcgtcgaactgctgtcgccgaagggcgtggtgctggcctcggccaatgccgccgaaatcggcaagcctcgcaacgacgcactgacccgcagcatgctggccgagatcgccgccgaccgccccttcgaggccttcagccccgatgcggccggcaacgtgcgcgtgtatgtgccgctgcgcgtgggcgatgccccgcagcgcttcgcgctgggcgtggtgatgccgcatgcggtgatcgtggccgaagcgcgccagctgctgtggctgaccctgctggtcggcgtgatcgccgcgctgaccctcagcgccggtgtctacatactgctgcgccgcctggcgatccgcccgctggccgaagcggtgcgcgtggccggtgacgtcgccgccggcaagctggacagcaccctgccggcgcgcagcaacgacgaagtggggcgcctgctggacgcgatgcagggcatgcgcggccagctgcaggcggtgatggctgcgcaggccgaaatggcgcgccgccacgatgccggtgaactcagctaccgcatggatgccgcggcgttcccgggcgagtacggccgcatggtggccgacagcaaccagctggtggcctccagcaacgcggtcacccagcgcctggttgaagtgatgcagcgctatgccgtcggcgacctcagcgtggacatggaagcactgccgggcgagaaggcggtgttcaccgctgcgatggcaaccaccaagcgcaacctggccgcgatcaacgagcagatccagcagcttgccgctgcggccgccgccggtgacttcgccgtgcgcggtgatgcactgcgcttcgaccacgatttccgccgcatggtggagaccctcaacaccatgatggaagtcagcgaccacaacctggccgcactgtcgacgctgctgcgcgcgatcgccggcggtgacctcagtacccgcatgcagggtgacttccatggggtatttgcggtgatgcgcgacgatgccaacagcaccgtgcagcacctgacccagatcgtcggccagatccagcagtcggcagccagcatccgcctggccgccggtgagatcgctgccggcaacagcgacctgtcgcgccgtaccgaacagcaggctgccaacctggaagaaaccgccgcgtcgatggaagaactgacctccaccgtgcgccagaacgccgaccacgcgctgcaggccaacgcgctggccggttccgcggcgggcgtggccagcgaaggcggccaggtggtcagccaggtggtgcacaccatggagcagatcgaggcgtcttcgcagcgcatcgccgagatcatctcggtgatcgatgggattgcgttccagaccaacatcctggcgttgaacgcagcagtggaagcggcgcgcgccggtgagcagggccgtggcttcgccgtggttgccagtgaagtgcgcgcgttggcgcagcgttcggcgggtgctgcgaaggagatcaaggagctgatcgacgcctcggtggcccaggtcggtgccggtgcgcagctggtgcacggcgcggggcgcaccatgcaggacatcgtcggtcaggtcggtcgggtcaacgagatcatggccgagatctcggccgcgtcgcgcgaacaatcggccggcatcgagcaggtcaaccagactgtggtgcagatggacgaaaccacccagcagaacgccgcgctggtggaggaagccagtgccgccgcgcgtgcgatggaggagcaggccgagcagctggcggtggcggtgtcgcgcttccgcctgcaggccgagccggcggccgtggcacgccgcgcggcctga

SEQ ID NO: 493447 - DNA, 894 bp, Stenotrophomonas maltophilia
atgaagattctgttgaccggcagttccgggcgcatcgggcgcgcgatcttcggtgcgttggcggccgcccacgaagtggtggggctggaccgcagcccgttcgccaccacgcgcatcattgccgatgtcaccgatcgccaggcggtcacgcgtgcggtgcagggcgtggacgcggtcatccataccgcggccctgcatgctccgcatgtcggcctggtgccggacgcggtattccagcagatcaacgtggaggcaaccgcgcacctgctgcaggccgcacgcgaagccggcgcacggcgtttcgtgctgaccagcaccaccgccctgtacggccatgccgtggtagccggtggctgccgttggatcgatgaagacaccgagccgctgccgcgcacgatctaccatcgcaccaagctgcaggccgagaccctggctgaagctgccgccacgccgggcttcagcgttcgcgtgctgcgcatgggccggtgcttcccggaaccgcccgagcgcatggcgatgttccgcctgcatcgcggcatcgacgcccgcgatgtggccagcgcacacgctgcactgctgctcgacgaaggcgcccgattcgcccgctatctcgcctgcgcaccgacgccgttccggcgcgaggactgcctggaactggccacccacccgcgcagcgtgctggcccgtcgcgcgccgcagctgctggccgagttcgaacgccgtggctggccgctgccattgagcatcgaccgtgtctacgacagtgcccgcctgcgcagtgagctgggctggcaaccgtgcttcgggccggatgacgtgctgcagcagtatgccgtcggcagcatcgaggtactgccgcgcgcgcagtggatcaaggaccgcgtggccgagtga

SEQ ID NO: 493448 - DNA, 954 bp, Stenotrophomonas maltophilia
atgatatataagcgcttatatatcctcaatgcggggtggatgatggcggtctcctggatgctcggcgcgctgctggcgacggcctgcccggcgcaggatgcggtgctgcaggcggccgccagcgccgtgcaggcgcagtacctggacgaggcggaggccgcccgcatcgccgatgccctgcgcagctggtcggcgcagcagcgctatgcggacagctgttcggatcctgctgcgttcagcgcacgcctgaaccaggacctggacatgttcgatggccacttccacgttgagcgcgtggacgcagctgccggccaggacgactggttgatggcctggcgtgccgatgcccgcagcaatggtgccggtgtgcgcgaggtgcgggtgctggaaggcaacattggctacctgcggttgagtaccttctatccgctggatctggcgcggccgaagttcgctgcggccttcacgctgctggccgacaccgatggcctggtgctggatctgcgccagaacgggggaggcgacgatgcaagtgccgacctgctggtgcgcacgctgctggacgcgaagatcggcgcggtgcagcagctggaccagcgtggccggcgcacgccggtaccgctgccgcctgccagcctgcctgtgtacctgaagccgctggtggtgctgatcgaccggcgtaccggttcggcggccgagttcgtcgcctattcgctgcaggccctgggccgcgcgcgcattgtcggcacgcgcagtggcggtgccgcgcatatgtttggtgatcctgtgctgctgcccgatggctatcagatcagcattcccgaccggcaaccgatcaatctgcgcaccggcggcaattgggaaggcaccggcgtgaggcctgatgtggccggcggcgacgatccgctgttcatcgcgcggcaactgctggcgcctgcgaagtcgtctagatga

SEQ ID NO: 493449 - DNA, 465 bp, Stenotrophomonas maltophilia
atggatctccaacacgccacactgggtaccctgctgcgcgccctgctcgaccagctggacccggccgtcgagcaggcctaccggcacctgcaactggactaccggccgcgctacacgccggtgctgcgcacgctgatggcgcagggcccctgccggatcaaggacctcgcgctggcctgcgggctcagccattcggcgctcagccagaccgtggcggcgatggtgcgcgatggttggctgcacactgccaatggtgacgacgggcgcgaacgcatcctgcagttgagcccgcgcgcgcagcgcgcgatgcctgtgctgcaggcgcaatggcaggccaccgcagtggcggcacgcagcctcgatgccgatctggggcagtcgttggagcaggtgctgcgcaaagcactggtggcgctcgaacaacggcccttcgcacagcgcctgcaggacgcccgccggcgctga

SEQ ID NO: 493450 - DNA, 1512 bp, Stenotrophomonas maltophilia
atgaccgcccagacaggaaaggacgccgtgaacagattcggatggcttgtactgctggcctgcgctgcaccggcccatgcggacactgcgctgctgagcggcagtttcgttcacttcggttactcgtccaccgatgagcagctgccagcggcgcagctgccgctgttcctcgacgaactgcgggacctgggcaacgacacgctcatcatcggccagacccgcgccacccgtgccggcgtgggctgcgccagcagcgcgcaggatttcgaatggatcgccggcttcccggccaagctgggcacggtgctggacgcggccgcagcgcgtgggatgaaggtcgtggtcggcaccacctacagttcgggccagtgtgcggcattctggcagggctcgaacgctgcagcggtggcgcaggacgcagcgcagtcgatggcgcagctggcccagcagtacgcgatgcatccggcattcgccggctggtacatcaccgatgagcccgcgcaggtaccggccgagcgtgcgtcgttctatcgttcaatcgtttccacactgaaagcggcgacgccgtccaggccggtgatggtggcgccctatctggcatcctccagcgtcgacccggccagcgtggccagtgctgcgctacggtttcgctctgccacgggggtcgacgtgcagatctggcaggacggcatcggcgcggcgtcgcacgcgaaactgttccagtgggatcgaccgggctattccaccgagcagtactaccaggcgttgtcggcgcagctgggcgccagcgctgtgtgggccgacatcgagctgttcaaccatggcagcccgctgttccttgataccggtaacggcctgtccggtgcataccggtcggcgtcggtgcagcgcatcaaccagcaattgtggagcgcgcgttcggctggcaagcgcgttgcctggctcaaccagtaccacatgtccgaagtggttggccccggccagggctacggcgaggcgccgcggatgatgaacacctatcgcgggttgtacgggttgggtgcctcgtacctcgtcgatccggtgcagaccacctatcactacagcgtggcgccggcgaccagctatcccgacggcagcggccatgagctgttcgaccgccgggtaggcgacccgcgcaatccgatggacgcgggttgggtaggcgtgcacggcaacgtcagcatcaccatcgacctgggccagcgccgacgggtggactggatcggcctgcacacgatgacccgcccggcctggggcatcgtcacgccgacgtcggtggaggtgatgtgcgccgagcccggaactgccgccgtaacgatcggcacgctgtcggcacccttcacccagtccggcgtgatgggctcgaccgaagaggagtacgtgctcggcaatgcagcccccctggctgcgcaatgccgcacgctggagctgcgcgtggccaacggcagctggacattcctcagcgagatcgagatggctgcagagcagtaa

SEQ ID NO: 493451 - DNA, 306 bp, Stenotrophomonas maltophilia
atggctgaccagcatcacggcacctcccatcgcggcttcgcttcgatggaccgggacaagcagcgcgcgattgccgcaaagggtggacgcgccgcgcatgcgtccggcaatgcacatgagttcagcccggccgaggcacgcgtggcaggccgcaagggcggcgaggcgatcagccgcaatcgccagcacatggcagcgatcggccgcgaaggcgggcacgcgcgccacgccaatgcacggcaacagcggcagcacgcggccgaacccgcgccgacgaaggaagggccgcaacgccagcagggctga

SEQ ID NO: 493452 - DNA, 1473 bp, Stenotrophomonas maltophilia
atgcaacgcttccgacggccggccctggtgctggcggcctacctgggcaccttcctcgcctcgctggacatcagcatcgtcaacgtcgcgctgccgacgctgcagcaggcactgcacaccgacatggccgggctgcagtgggtgatcaacgcctatgccattgccctgtccgcagtgatgctgtcggcggggccgctgggtgaccgctatggccaccgccgcatgtggctgctcagcgtggcgaccttcaccgtgggctcgctgctgtgtgcctgcgcaggcagtctttccgcactggtggcggggcgggcggtgcagggggtggccggcgccctgctgatcccgagtgcgatgccgatcctcagccatgcattccctgatccgcgccagcgtgcacgcgcgatcgggggctggtcggcgttcagcgcgctggcgctggtgctggggccgctgctgggaggcgaactggtgcagcgcgcaggttggcccagcatcttcctgatcaacctgccgctgggcctgcttgcactcgcgctgggagcctggggcattcctgagcgacggcatccgcagcacgccgcgctggacccggccgggcagctgctcagcatcgtcgcgctgggtgcactcagttacggcctgatcgcgatcggcgagcacggcctgctggcaccttcgaccctgctggcgctcggcatcgcagcatccggcctggcgctgttcgcgtgggtcgagcgccgcgtggcgcggccgctgctgccgctggacctgttggcgaagccgggtttcggcatgctcaacctggcctcgttcgggcttggattcaccgcttatgcgagcctgttcttcctgtcgctgttcttccagcaggcgcagggacatggggctgcgcaggccggtgcgcagctggtaccgcagttcgtgctgatggcggtggtgtcgctgctgttcggccgtctggcggcgtggttcgggctgcatgccgcgctggtgacgggctatgcaatgacaggcatggcgctgtgtgcgattgccacgttcgagccgactacagcgcacggccaggccagcgcactgctgatgctgctcggcactggcatgggactggcggtacctgcgaccggcatggcggtgatgtcatgcgtaccggccgagcgtgccggcattgcgtcggccacgatgaacgcgctgcgccaggcgggcatgagcctgggcatcgcgctgctgggcagcctgatgggcctgcgcgcggtacgccagttcactgcgaccgcgcaggcggcagggcagcccgcagtggccgcacaggcgcgcacgctgatcctgcagccgtcgtcactgctgccggggacacagatactggcctggtaccgcggcgcgatggccagcggtttcggctgggcgatggctgtcgcgggcgtgctggccctgttggcggcgctcgccctgtaccgccagtgcaggcgcgcctga

SEQ ID NO: 493453 - DNA, 630 bp, Stenotrophomonas maltophilia
atgcagattcccgcagtcgccaggccccgcaccaaacccgctgaaacccgccaggaagagctgatggacgccgcgcaggcgctgttcctgtcacagggcgtggaagcgaccaccatcagtgacatcgtggccgccgccgacgtggccaagggcacgttctatacctacttcgcctcgcgcaccgagatcctgcaggcgctggcgcagcgctacacgctgcagttcatggccgaggtcgaccatgccgttcagcagcagcctgcccacgatggcgtggcgcgactgtgcgcctggatccgcgccaacatcgagacctatgtgcgcacgcacgcactgcacgacgtcgtctacgccaaccatcaccaccaccagcgcggcaatgccgagcgcaacgccatccagcagcagctgctcgacatcctcgaggcgggcacccgtgcaggcctgtggcagctgccggcaccgcagatcacggcctcgctgatctatgccggcgtacatggcgccaccgatgacctgatcgctgcgcccacgcaggacgccgacaccttcattgcggcggtggtggccgattgcctgcgcatggtcggcgtgtcgccggcgccgaagcgtggcggcacccgtcgctga

SEQ ID NO: 493454 - DNA, 351 bp, Stenotrophomonas maltophilia
atggccgtcatgcgtgtcgtcgccaacatcgccacgtctgatcccgcccgcgccgctgcattctatggcgagctgctcggcatgccggtggtgatggaccatggctggatcgtcacccatggcgggcagggcagtgcgctggcgcaggtcagctttgccagcgaagggggttccggcgcaccggtgccggacctgtctatcgaagtggacaacctgcaggaggtgctggaacgcatgcacgcggctggcatcgcgctggactatgggccggccgacgagccctggggcgtgcggcgcttcttcgtccgcgacccgttcggccggctgttgaacatcctcgcccacgcctga

SEQ ID NO: 493455 - DNA, 201 bp, Stenotrophomonas maltophilia
atgcgtactttcaggaaagtgatcgccggtgttgtgttcgcgttggcctgcagcggctcggtggccgtggccggaccggtccagccctgcgattttccctgctggaaggcctaccaggcgtgtgtagccggtgggggtgatgccatggaatgccagtacgaatacgatcgatgcgtcatggagcgctgcggcgcggtgtaa

SEQ ID NO: 493456 - DNA, 414 bp, Stenotrophomonas maltophilia
atgcgtaccgcattccgtaaaccaccgttggcgatattgggcggggccgatcctggcagcgacgcgttcgagcgcgcagctggtggccaggtgcccagcgtcatcccggaaggcagcatgccgccggccgactggccggccacggtggtggtgccctgtggcatgggggatgcgcgcaacctgatcatggcccttgccggtgatgcctgcatcgtcagcggtgggcgcgcctgcacgatctcggaggtttggctgcacaagcggccgctgctgccgcttgcaggggcaggtggcgggtccgacgcgctgccggacaccccgccggacgagcgcggcaattcgccgatcctgccgtggcgcaacagtgatgagctggccgggcaactgcgtgtcctgggaatgctgcaacactga

SEQ ID NO: 493457 - DNA, 3351 bp, Stenotrophomonas maltophilia
atgaatcacccgctgtacggccgttcgtcccgctccctgtcgcatcgcccgctggcgcttgccgtcgccagctcgctgctgctggccaccgcactgccagccatggccagcgaatcactcgaggcctggcagcagcagcgccagctgcaggccgcgtgggcgcagcccgctgccagcaccgcacctgcaaccacggccacggcagctgccgccagcagcaacgccgttcttggcaatcccggcgatccggccagctggcgcagcgacgaattcaacgccgattggggcctgggcgcgatgggcgcggactacgcctatgcgcgcggcctgaccggcaagggcgtacgcctggcgctgttcgactcgggctccgcactggcgcatccggagtttgcaggacgcaatacctccagcatcaccatcggtgccgactgtgcgacgccgggcgtggtcgcaggggcgggcgcctgcgggcagacccgcggcgaacagcccggctacaactactacggactgggcgccggcgttccggcctcactggcggcacgcctgatcgccgccggccagccctatggcttcagctacgccgatcacggcacgcatgtgcttggcaccatcggcgccaaccgcaatggcaccggcatgcatggcgtggcctttggtgcggatcttaccgccgcccgcgtgttcggtgacacctactacgagtggcgcctggacccggacaggttctatcgtccgcgcgcggtgtaccgcaccgatccggatgatgccgccacgctggacatgtatgcgcagatccaggcgcagggtgtacgcgccatcaatcacagctggggcatttccacgcgcaacatgaccgccgccgcgctggaccagcagtacgccagcatcggtgccgactacggcgtgtacggcagcatctacgccaacaacggcgatgccccgggctccactctcatccaggtgtggtcggctggcaacggcagcggtgcggttgccggcatcaccgcctcgatgccgcgctggaagcccgaactggaaccgtactggctggcggtcgccaatgtccgccggcccgacgccgccgcaggtgaaaccgactacgtgatcgatggcagttccagcatctgcggggttgccgccaactggtgcatctcggcccccggtaccgatatcgtcagcaccatcgtctccggcgatatccagggccgcatcgagaacacctccgcctacgtgcggctgatcatcgacagcgagagcaccaactacgtctacggcaccaagaccggcacgtcgatggccgccccccatatcaccggcgccctcggcctgctgatggagcgcttcccgtacctggacaacgcccaggtccgcgacgtgctgctgaccaccgcacgcgatctcggcgcgccaggcatcgatgcaatctacggctggggcatggtcgacctgcgcaaggccatcgaaggctatggctcgctgcgcgtggacaccaacgtggtgatgaaccagagggccggcggcctgaaggtctgggaaggcgatgcgtgggacaactggaccaacgacatcggcggccccggcaagctgaccaaatccggtatcggttggctgcgcctgagcggcaacaacagcttcaacggcgccgtggtgcaggacggcatgctggagttgaacggcgccaacacgctcacctcggcggtcgaggtccagggtggccggctgctgctcaacggcagcctggtctccaccgccctgaccaccaccggcggcgtcagcacggtcagcaccagcggcgtgctggataacagcaacctggtggtcaacggcggcgtggtgtccttcaacggcacgcaggccggtggcaccaccaccgtcggcgccaatggcctgctgaagggcgtcggcacgctcggcaacacccgcgtggacggcatcattgcgccgggcaactcgatcggcacgctgaccatcaacggcaactacgtgcagggcgccaccggcgtgtatgcggcggagctggcaccgggtggtcgcagtgaccagctgcacgtgaccggcaccgccaccctcggcggcaccctggtcgccctgccggaaccgggcgtgtattacctcggcgaacagttcaacgtcctgcgtgccgacggtggcatcagcggccagttcgccaagaccgacttcagtgcgttctcgcccttcctgcagttcagcctggcctacggcgccaatggcacgcgcatcgacgtggcccgtggcgcttcgctggccacggctgccaacacgcccaaccagtgtgcggtggcggccgccgccgacctgctgccgatcgcccagggcctgcccaagccgctgacccagctgttcccgcagcaggtcggtggcgtgctcgatggcctcagcggcgagctgcatccggccacggccatcgccctggtcgagggcagccgctacgtgcgcgatgccgcgttgtcacgccgtgccggcgccaccgcgcccggcagcgacgtgggtgatgcgacgggtgcatgggtgcaggccatcggtggcaacagcaggctggacggtgacttcaacaccgcccgcaccgaggccaacagcaacggcctgctggtcggcatcgaccgcgagttctccggctggcaggtcggcgtgctggccggtaccggccgtaccgacgtcaagcagcaggaccgccgcgccaagtcgaagatcgacaacacgcacttcggtgcctatgccagccacacctggggcggcttcggcctgcgcggtggtgtggcgtggagcaagcacgaggtgaagagcacgcgtgaagtcgccttcgcaggtttcagtgacagcctgagcgcgcgttacgacgcccgcacccgccaggccttcatcgaagctggttatcgcttcggtggccccgaagccgggctggagccgtacctgcaggtggcgcgcgtggaagtggacctcaagcgcatcagcgaacgcggtggagcagcggcgctgcagggcaaggtggacgacaccggaaccacgatcgccagcgccggcgtgcgcttcgacaaggggctgaaggcttcgttccagcaggacagctggctgcacctgcgcgggggcgtcggctatcgtcgtgcctcgggggatcgcagccaggtcgccaaccttgcgtttgccaatggcagctccacgttcgcggtcaacggcgcgccgatcgccgacaacgcggtggtggccgaactgggcctgtcggcgtggctcacctcgcgccagcagctggagctgggctacagcggccagttcggcagcgagagccgtgaccatggtgcgaatgcacgctggtccgtgcgtttctga

SEQ ID NO: 493458 - DNA, 696 bp, Stenotrophomonas maltophilia
atgctcaggatgcaaggcgtcagcaaagtgttccaggtgggtgaagtcatgacccatgcattgcgctccatcgacctgtcggtgcaggagggcgatttcctgtcgattaccggcccttccggctccggcaagtccacactgctgaacatcctcggtctgctcgagggcttttccggcggccactacgcgatcggcggcgtggatgttggcggcatgcgcgacgcggcgctcagcgcgctgcgcaacgagaagatcggcttcgtgttccaggcgttcaacctgattccggacctgaccatccaggccaatgtggaggtgccgctgcgctaccgtggcatggcggcagccgaatgcaggcagcgtgtggtctcggcactggcccaggtcggactgggcagccgcatgtcgcactatcccggcgaactgtcgggcgggcagcagcagcgcgtggcgatcgcccgcgccatcgcgggtacgccggccctgctgctggctgacgagccgaccggaaacctggactcgcagatgtcgcagggggtcatggagattctgcgtgagctcaaccagggcggcatgaccatcatcatggtgacgcatgacaaggagctggcggcatgcgcgggtcgcagcgtccacatcgtggatgggcagatcgtcgaggtcacagcgcaggccatgcaggcgctgtgcgcctga

SEQ ID NO: 493459 - DNA, 1215 bp, Stenotrophomonas maltophilia
atgcagatcggcatcgtactttcggccctgcgccggcaccgcctggcgaccttcctcatcgcgatggagatcgcattggcctgcgccgtgctgtgcaacgcgatcttcctgatgatcgagcggaacgctgcaatgcagctggtcagtggcctggacgagtcacggctgggggtgatccagctcgacggcatcgatgccgagcgcgccaacgatgtcaacgcgcgggtcgttggtgcattgcgggggctgagcggcgtgacggcggccgggctggtcagtgccatgccgttcggcagcccgggtatacgcgccggcgtcaacctggacgaggaccagcaggtgcccggcggtgttctggatttctacctggccgatgccgtggccctggacgcgctgcagttgcacctggtcggtgggcgcatgcccggtgcggacgagttcgcaccgaccgatgaactggtgccggccaatcccccggcgctggtcacccaggagctggcccaacgctactggcccggcgaaaacgccgtgggcaagagcctgtgggcgatggatacccggctgcgggtgatcggcgtggtcgagcacatggccgtatcccgccccggccgcggtgaagccaagggctcggactggtcggtgatcgtgcccgcatcgcaggggccgcgcctgaccggccgctatctggtgcgcgccgaggccggcgacatgaaccgcgtgatgcgcgatgcgcagcaggcaatccgccgtgtcgcgccggacgtggtgttcgatgtcgaaggcagccggcgcatctccgaactgcgcgagcgccatttcgaaggtgaccgggtcatgatggggctgctgggcggtgtcatcatcgcactactggctgccactgccctgggcattgtcggactggccagttactgggtggagcaacgtcgcaagcagatcggcatccgccgcgcgctgggggccacgcgcaccgatgtgatgcgctatttccagatcgagaacctgctgattgtctccatcggcatcgcggccggggctctgctggcctacgcgatgaacctgaccctgatgcgcttctacgaactgccgcgcctgccactgctgtacctgccggtgagtgcggtgatcctgctgctgctgggccaggcggcggtactgctgccggcgctgcgtgccgcggccatcgcgccggtgtcggccatccgttcgttgtga

SEQ ID NO: 493460 - DNA, 1362 bp, Stenotrophomonas maltophilia
atgaagtcgatacagggtgcagaaaagggtgcgggcatgcgcaggctggtctactgcgcgcaggtggcgctgcacaatacactgcggagcaaggccatcaccgccctgatggtgctggccatcgcggtgggcattggggccagcatgaccaccttgaccgtggtctacctgctgtccggcgatcccttgcccgggcgcagcggtgacctctactacccccagctggatgccaacccgaactcgaagggccgcgagccgtacgacgtgctggactatcgttcggcctacgacctgtggtcgtccgggcgcgcggaccggcagacactgctggtcaccaatccggtcaagctgcggcccgatcagggcagcgcgccaccggtcatccgctcatcgatctccaccaccaccgacttcgcgacgatgttcgcggtgccgctggcgcatggacgctggtggtcgcgcgaggaggatgacgcgcgcgcacgtgtggtggtgatctcgtcggagctcaacgagcagatgttcggtgggggcgacagtgtggggcagacactgcgggtcaaggacaccgcgatgcgcatcgtgggcgtgctcgcgccctggcggccctcgccgctgttctacaaggtgcggggcggccgcttcagcggcggcaacacgtcgggcttcttcgcctcggccgatgatctgttcatgccgctgacctccagcctggagatcaatgacggcgacttcgtgccgttcacctgctggtccacgccggaggagcgcggccggctgcagaccgcgccgtgtgtctgggtacacctgtgggtcaagctggacagcgccgccaaggtggccgcctatcagcggttcctgcagaactatgccgctgagcagaaggccctgggccggatcagccacgccgacaacacgcggctgcgctcattgatgcagtggctcgatttcaaccaggtggtacccagcgacgtgaagctgcaggccatcctggccttcgccttcctcgggatctgcattgccaatgtggtcggtctgctgctggcgaagttcctgcgctacagcggcgagatcggcttgcgtcgcgcactgggcgcaagccgcgcggcgatcttcctgcagtgcgtggtcgaggccgcgctggtgggggcactgggtggcacgctgggcctgttgctgacctggctcggcctgagcgcggtgcgcagccagccggtggcctatgcggacctggcgcggcttgataccaccatgctgctgttcaccctggcgctgtcggtgctggccagcctgctggcgagcctgattcccgcgatccgtgccagtgcggtccagcccatcgcccaactgaagcttctgtag

SEQ ID NO: 493461 - DNA, 1644 bp, Stenotrophomonas maltophilia
atgaatgcgcgcccgcacccggccggacagccacttcagcgcgagcagaccgcgcagcggcacagtgtgcgcgccatcctcgccagcttcgcgatcctgctcggccccctccgcgggcgctaccttgcggtggccgccaccaccgcgatgttcggcggactgggcgggctgctgcatccgctgctgatccgcgcgatcttcgacgaggccgccagccggcaggatttcaatcgcttcctgctgcttaccggtgcatatctgctgctgtgcctggtgaccaacctgggcaactacagctgcgcgctgtggcagcagcgcgtggataaccgcatcgtggagcggatcgggacctcgttgctgaccgcctactatggccgcagttatgacgaggtggtgcagaagggggctggctactatgtggcgcggatccgctcggacgtgaaggatggcgtggtgccgatgctgtcggtcgcacgcaccaccctgacccaggcggtgacattcgtcgccttgatcgcagccctgctgatcatctcctggcgtgcgttcctggtgctgatggccatcattcccatcgccaccacggtcagcgtgctggtcggccgacgcatccgcgagctgaccgtggtggagcgtgaccgcgaggccgaactggtttctttgctgacccgggccgtgtctgccttcaagatggtctgcacgttcggcctgggccccaggacggtgcaggcccatgaccgcagcctgcgcgaggtgctggattcgacctaccagcgcttcagggtggtgaggaccctgcagggtgcgagcgacctgacgatggtgatctcggatgtctgctcgatcttcgtcggcgcactgttcgtgttccgccaacagatgacactgggttcgttcatcgccttcatgaacgccttctggcgctcagccacgacgctcatcggcatcttcaagaacattgccgagatgcacagccacggtgtggtggtggtgcgggtggcggagttcatgaccgcgccggcagccgcggcgtcggccacgcacatcgagggtggtctgctggcgacgtcgatcggctacggctacggcgccactcccgtgttttcggatttcaccctggccctttcacccggtgaacgtgcactggtgattggcgacaatggcagcggcaagacgaccctggccaacgtcctggccgggtacttccagcccgtcgccggccagctgctgcgaccggcgcgtatccgcgccatcacgcttcctctgcagttccctccgctgaaggtgcgcgacctcggcgccgatccggtgctgctggcgcgactggggatggacggcgacgggatcgccgacagcctgccggaaaccctgtcggcagggcagcagcagaagatcgccctggcgatggtgctgggcgaggacgccgacctctacattcttgatgagccggtcgccaacctcgatacggccagccgcgagattgcgatggacgcgatcttcgcacgcagccatggccgcatgctggtgatgatcatgcacggcgccgaggcctaccgcgcccgattcgatcacgtacacgaacttggcaggtccatgtggcaaccggcacgggtcacgcccgtgcacgtccggggagaggcatga

SEQ ID NO: 493462 - DNA, 2802 bp, Stenotrophomonas maltophilia
atgcatccatcgcgcatgtgcgaggcgttcgcggatgtgtgcaccgggcaaatgagccgtggaaccgaccagggagagacgatgtcagcgcgtcaacgatcactgcgtgaagcacgccacatggacaaggccgcctatgtggggggcgacgagcggttctacgaattgagctacaaccagtaccggcccagcgaggatttccgcagtatcgttgaagcggagatcgaggcggccggcatggcgtggacgatccatcgcatcggtgtctggtcgcacctggcgacgcatggcgacccggtcgccggcaacctgccgccgcaaggctggaagatccacgtttcagccacgcagcaaaactgccagcgggtgctgcgcaccgtcacccggatggccctggccgagcgcgtgaagttcaagttcgcaaatgacatgaacacgatgcgcatgatgagctccaagcgttggccacgcggtggctcaggcaagttcatcacgctctatccgctggaccttgcggtcttcacgcgcttcatcgagcagctgcatggggcgctgaaggacgaagatggctcgtacatcctgtccgatcgacgctacaaggactgccgctgcctgtattaccgctatggcggcatgcgccaggtgtaccggcttgatttcatcggccagaaggtgccgatgctggtcgcgcccgacggcagccatgttcccgacctgcgcaatccctatttcgaggtgcctgcctgggaaaccgacccgttccccagcgaggatgatcccggcgagatgacgttgaaggagggccgctatcaggtgcaggccgcgcttgggttctccaacacgggcggggtctacctggcgttggaccaggtcaccggggaggaagtggtcatcaaggaggcgcggccccatgtggaaatgcacggggaagggctcgacgccaccagccgcctggcacgcgaacgacgcaatctggagttgctgggcccggtgggcgcctcgccgcgctgcctggaagcattcaccgattgggaaaacagctatctggtggaagagcgcctggatgcattcgatcttcgcgagctgatgctcaagcattcgccgctgatgaaggcccgtcccagcgcacgcgatggtagtgactactacgggatgtgcgtgaccatcttcaccggtctgcttcgcgcggtcgaccgcgcacacaagatgggagtggtgatcggtgacatctcgccgtccaacatcatggtcgaccgcagcgacatgcgtgtgcgcctgatcgatctggaggccgcgttcctggacggcagcgatgagtgggatgacatccacacgcccggattccgccggatcatgaaagggcgcaagcgcgccagctgtttcagggatgaccgttacgcgaccgcagtggtgatgttctactgcctgttcccgctgatggccatggcctacatccgcaccgacctgttccagaaggtgctgccggtgatgatggaggacatcggctggcagcacacgccagtggccgaggtcatccaggcgctggtggacgaccgtatcgacctggaagaggccgcacagctgctgcagcagccggcgaccctgcaggcgccgttctcgtcgccgcagcgcccgttgccggcgccgcgccagtgtatccggcggctgctcgcgttcatggatgcacacagccggctgcagccggagcggacgctgttcccacttgatccgttctcgcactccaccaacacgatgagccttggtctgggggcgaccggtgtgatccacgccttccatggggtgggtcatcagccgtcgccggcggtgatggagcgctatgcgcaggagctgcaggccctggatcgcacatcgctaccgccggggttcctcaccggccttgccggcatcgcctggtcggcgctgctgcgtggcgaggtggaactggcccgcagcctgctcgacagcgctgacggcagtgacctgttgcatgcgcatcactcgctgtatcacggcatggcgggtatcggaatggcgcacctggccatgcatcacgcgaccggcctgcccgggcatctcgacagggcgctgtcgctggcgcggcggcttgcagacaccgtccaccacggagagcggggtgcctactggcaggacgaaggtggcgtccgcatcggcatgggttacggccaggccggcgtggcgctgttcctgctgaggctgtcgcagctcagtggtgatccggcatggcgcgtgcttggcgagcaggcactgcgacacgatctctcctacggcttcgagctggagaccggggtgaccaccttccccagctcaccggaagaggtcaacacctatgaaccctatctggagcaggggactgcgggcatcgccaaggtcgcgatccgttacggcctgtggcaggacgtgaatcggctggtggatgacttccatcgcaagtattccggcttctgcggcctgttgtatggcctgtcgggcatgctggatgtgtttgtcgacgcccatctctactccggtgacccgaggtacctgcagatggcggagcgaccgtaccagggcatcgtcgatctgtatctgttcgaggaggaggagggaatggcggcggtgccgggcgagaatctgttccgcatttccttcgaccacggtaccggcatcgccggagtgatccgcgccctgcatcggtacgacacgctggcgccggatgagttcttcctggatgcactcgatgtgcatggcgcggtggtacgggaagtggacgcagccggggtggggcaggcggcggttgcatga

SEQ ID NO: 493463 - DNA, 672 bp, Stenotrophomonas maltophilia
atgcgcatcctcgtggccatggacgacgccgaacttgcacaggcgcttcgcaacgtattgcagagccgcaacatgctggtggacctcgtggcaacctggtcactggccaaggccgcggtacaggccgtggagtaccgcgccctcattctcgaccgctggctgcccgaaggcgattcactgaagctggtgcagatcgtgcgcggcttgcgtacctggctgcccattctgctgttggggcgccacaaccacgctgccgactgcatcgcctgcctggatgccggtgccgatgactacctgcccacgccgttcgagttcgacgaactggccgcgcggctgcgcgcgattacccggcgcctcgacgctgatgccggccacattctgagaatcggcaatttcacgttcgatttttccaaccgcatggcattggtaggcggtgcgcccctgagcctgccgcgcagccagctgctgctgctggaagcgctttgcgcccgccagggccggatcgtccgccatgaagtgctgagtgctgccgtgcacctggccggcgccgacggcggtaccaccgtgttggatccgcacgtatcacgcctgcgccgtgccctgcgctcggccagtgtcagcatcgagtccaagcgtgggctgggctacatgctgaacgacgacgcggcctga

SEQ ID NO: 493464 - DNA, 453 bp, Stenotrophomonas maltophilia
atgagcacccagtccaccatcgaacatcgcctcaacgacctgatcgaaatcgcccgcgatggcaagtcgttctatgaagaagcggccaccaaggtcaaggatgccgagctgtcggcactgttcacccgcatcgctggcgtcaagggccgcatcgtggcggcgttgagcggctcagtggccgccagcggtggcaagccggccgaacatggcaccgtggtcggttcgatgcagcagttctacggcaaggttcgagccgctttcggtgacaccaactatggctacgtggctgaacttgaagaatccgaggaccgcctgctgggcgcgttcaaggatgtgctgcaggacaacgagctgccgccggccgtgcgccaggaagtgacccagctgctgccggaagtgcaggagtgccacaacgtcatgcgtgcgcgaaagcacgcaatgaaggccgcctga

SEQ ID NO: 493465 - DNA, 261 bp, Stenotrophomonas maltophilia
gtggccgagaacgcgcagcggcctcacatgagcgtgcgcacgctggagcgcatggcgcgcagtgaaccgggcatgtcactcggcgactggcgtgggcgtgtgaagttcgtgcgcgccaccgaggcgctgtgcacacgcaagccgatcagccgcatcgccggggagcttggctattcaggcgtcagcgcgtttgccgaaatgttcaagcggcacgcgcagtgcacgcccgatcagtatcgggagcagcatcgggccgggtga

SEQ ID NO: 493466 - DNA, 642 bp, Stenotrophomonas maltophilia
atgccaccgatcctcaccgccttcgccacctcccccgaccgcggccagggcctggcccgtgacatgcgcgtgcgctgggcgctggaggaactggccgtggcctatgacgtacaactgctcagcttcgccgagctgaagcagcccgcgcacctggcacggaatccgttcgggcagattcccacgtggcaggagggcgaccggaccctgttcgaatccggcgccatcgccctgcacctggccgaacagcaccccggcctgctgccgcgcgatccggacgcccgcatgcgcgcgatcatgtgggtgttcgctgcgctgaacacggtggagccccccatcgtcgagcgctccatggcttgggtgcttgagcgcgagcaaccctggtacgcgcaacggctgccaatgctcgatgagcgggtccggacgcggctggcccaactatcgacgtggttggccagggcaacgtggctggacggcgaattcagcgtgggcgacctgatgatggtctcggtgctgctgcgcctgaagagcagcggcctgctcgacgagtacccacaggtcgccgcctatgtggcccgggccacgcagcggcccgcctaccagcgtgcgttcgctgcgcagctggcggttttccaggacgcctag

SEQ ID NO: 493467 - DNA, 690 bp, Stenotrophomonas maltophilia
atgccgtcgcacaggatcctctacatactgaatccatcgggcaacatggcacgaaagttcagcgtcatgcgtgatcgtgaaggcggcatccgttgcgacaaaatggaacccggcgcgatggattgcgaacccttcgtcatcatcgacgagctcccggtcgagcaaccggcgatcaactatcttcagttcaagcgcatagtcgctcaatcggtgatcagcctgtctgagcccggctacccgaccaatgtgtacgatgacatccagaatccgcagagaagggatgcggtcagccagcatctggggcagcgtttcgagacttacatctacctggcttctggcgcgtactcgcttggcatcgatgtctgggcgccgcagaagatccgctatgctgacgggtctaccgcttcctacaactacagcatgatcaaccgtcgctgggagcccaacgccctcctttacaaggacaggttcggtaactccattccgcttagcgttacacagttgagcgaggggcgaggcggcgttacgcatcgcttcgaattcccgaatggcaatgccaccgatatgggaagcttcgtcaatgcgctcaacaacatcggtgtcccggtgacgggggcaggcaatcagtctgtcacctgcaccagcacgatcaggctgaccgaggtcaaggtgacctgcaaccggaactga

SEQ ID NO: 493468 - DNA, 408 bp, Stenotrophomonas maltophilia
atggcacacgatgcaggcaggacgatcacgcccacgatgctgtatatcgccgcggccgcggccgtgctggtcagccttctggcctgggcggtggaatggagcgggatggcctatgtctgcccatattgccgcgtgcaacgcacggtcatcggcgtgctgggcctgctgacgctgttcgcgcgcccgggcggcatcgtcgtgccctggctgtcgtacagcgcgggcgccttcgcgttcgtggtggcggcgatgcagcacttcaacggttggaagcgcatttccgccggcgacttcagtttcaacgaacagtggtacatcgatccgtggctgctgtcgggctgcgcgatgctggtcctggtggcgcagctgatgctggtgcaggccgcctgccggcgcaggttgcactga

SEQ ID NO: 493469 - DNA, 420 bp, Stenotrophomonas maltophilia
atgacgatcgatattgaatcgctcagcctgcgggagctgggcgccttggtggttgccgctgaacagcggaagcagctgatttccaaccgccgtcctgccagcgcggtgcggcgtatgctgaaagccgccgcggcggaagcgggatataccctcgaagaactctttggcgatgaagccatcgaagcgggcgcacccagccggaaaccggcacggcgcagaaccggcaaagtggccgccaaataccgagacccggaatacaagcggctgacctggtccggccgcgggcgcatgccgcgttggctcgcttccaggatccagaagggccacaaggtcaccgacttcctgattcccgggttggcgcgaccgacggcgcgcaagggcagcccgatcggcaagcgcacggtcttcaagaaggattga

SEQ ID NO: 493470 - DNA, 393 bp, Stenotrophomonas maltophilia
gtgagcacctcatcgcattcgcttgcctacctgcttgcgcgcatcctgctgatggcgctgttcctggtctccgggctgggcaagctcggcgatctcagcggcacccaggcctatatggaagccatgggcgtgcccggcatcctgctgtggccaacggtcgccttcgagatcggcagtggcctgtccatcctgctcggcttccagacccggctggtgtcgatcgtgctggtgggcttcagcctggtcaccgctttcatcttccaccacaacttcgccgaccagacccagcagatcatgttcctgaagaacctggggctggccggtgggttcctgctgctggcctgcaccggggccgggcgctacagcatcgacgggcgcggtcggcgcgggtaa

SEQ ID NO: 493471 - DNA, 252 bp, Stenotrophomonas maltophilia
atgagtcataccggcatttttcagatcaccgatctcacctacaaggctggggagcagggcgacctggcccgcgcactgcagatcgtcgccacctgcaccgcctgcggatcgacgagcgtgtgggacgagcatgagatggaacacgttgccggtggaaccgtgctctcatgccgtggctgtggtgtccgccaggccatcagcaacgcgcgcctttctggctgcccatccgacatccgccatccgcgccgctga

SEQ ID NO: 493472 - DNA, 498 bp, Stenotrophomonas maltophilia
atgagcttcgccgccagtaccgtgatggtcggcggggcggaaatgtatcccaccaggaccatcgtccagaacgccatcaactccaaggaccacacgaccctggtcgctgcggtcaaggcagcgggcctggtcgataccctcaatggcgccggccccttcaccgtcttcgcgcccaccaatgcagccttcaccaagctgcccgcaggtacggtcgatacgctggtgaaacctgaaaacaaggcacaactgaccaagatcctgacctaccacgtggtgccaggcaattacagttcagcgcagctgatggccgatgccaggaagcacggcggcaaggccacgctgaagaccgttgaaggtgaatccctcaccgtcgcactgcatgacggcaagctgtgggtcatcgatgccaagggcggcaaggcggggatcagcattgccgacgtcggccagtccaatggcgtgatccacgtgatcgacaccgtgttgatgccgaagtag

SEQ ID NO: 493473 - DNA, 240 bp, Stenotrophomonas maltophilia
gtgggttctcgaattggtacgaagaccctcttcgacgcgcaggtcaggggggcggcccacaatctggtggtgcatctcctggataccccgcatgacattcgtcgtgatcgcgtccgcgagcgcaatcgcgagaaaggcacaacgttccccatggaggtacccgctgccttccttgagctggcgagcgagcattgggaaccgatggacccaaccgaatgcgagatctacgacgtcaggtaa

SEQ ID NO: 493474 - DNA, 570 bp, Stenotrophomonas maltophilia
atgcaactggaagacatcgagcgcataggcgactacgtcatgccggagcgccctgcagtacgctcagatctcgcactgatcttcggaactcggcacggagtggaggatttctgccaggcagtagtcaccctgtggcacaagagaatgttccggaaggcagtcgtttccggtggcatgaccgcaggtcttcacgattcagaagccgaaaccatggctacccgcctcatggagttgggagttccagagcatgtgctcatcatcgagccgttcgccatgaacactggtgagaacgtatggcgctcgcgcgagcttgccgagcgcatgctgcctctcgaagagagacggagcgtcattgccatcggaaaaatctgttccgcgcgtcgatatctgatgacactggcccgtcattggccagggccaaccgttaccgcgcagtgggtcaactatttcgcagtagacaagagtgactggcacctggatccggagttcgccgaacgcgtcagggccgagtacgtgaagatcccgcactacataaggaggggattcctgatcgagcttccagaaagctga

SEQ ID NO: 493475 - DNA, 312 bp, Stenotrophomonas maltophilia
atgaatgatgtggagcacgatgttcccgagcccgtgcaaaccgatttcccgccgctgctggactgggatgaggtgatgcgggatgagtgcgaggatcgattgggatttgcacgccgtacgacgtatgcgctgctgacgctgtcggaggccggattgcttgccggcttcagcggcgacaaccaacagggactggaggagatcagaaggatggttgcgttgttccaggcatgcctgaggcggcaggtatggctcgcagaagcggcggagaggcggctggggcgtatttcggaggcgtttgccgctgccgggtag

SEQ ID NO: 493476 - DNA, 1854 bp, Stenotrophomonas maltophilia
atggccaacgaacgtcctgcccaatccgaaatcaagcaactgatcagcaagggcctggaacagggctacctgacctacgccgaagtcaatgaccatctgccggacgacatggtcgacccggaacagatcgaagacatcatcggcatgatcaacggcatgggcatcgatgtccatgaagttgcgccggatgtggaaaccctgcttctcaacgacggcaacaccggtaaccgcgaagtcgatgacaccgcggccgaagaagctgccgccgcgctgagcgcgctcgacaccgaaggtggccgtaccaccgacccggtgcgcatgtacatgcgcgaaatgggcacggtcgagctgctgacccgcgaaggcgaaatcgccatcgccaagcgcatcgaggaaggcctttcgcaggtccaggccgccctgggccagttcccggtttcggtcgaatcgctgctgaccgactacgaggcccacaaggaaggcaagaagcgcctggccgaagtgatcgtcggcttcaacgacctggccgacgaagagccggcgccgccggcggtcgctgccgatgacagcagcgatgccgacgcagaaggcgacgaggacgaggacgatgacgtcgagggtggcgaggaagaagccgcaccgaccggtccggatccggaggaagtcgctgcgcgcatgcaggcgctgagcgatgctttcaatgccttcaagaaggcggcgaccaagggcgacaagaagaacctgccgcgcctgcgcgaagagatgtcggcggtgttcgtcactctgaagctgccgctgccgctgaccgacgtgctgaccaagcagctgcgcgacaccatggcgtcgatcaaggcccatgagcgacgcgtgctgaacctggccaccgtcaccgcgcgcatgccgcgcaaggacttcatccgctcctgggaaggcaaccagaccaacctggagtgggtggaagacgcactgaagcgcaagcagaagtggtcgtcggccctgcgcgaagtgaaggatcagatcatcgccgaacagcaggcgacgatcgacatcgagaagctgacccagctggacctggaagagctgaaggaaatcagccgtgccatggcctacggtgaagccaaggcgcgcaaggccaagaaggaaatggtcgaggccaacctgcgcctggtgatctcgatcgccaagaagtacaccaaccgtggcctgcagttcctcgacctgatccaggaaggcaacatcggcctgatgaaggccgtggacaagttcgagtaccgccgcggttacaagttctcgacctacgccacctggtggatccgccaggcgatcacccgctcgattgccgaccaggcgcgcaccatccgtattccggtgcacatgatcgagacgatcaacaagttgaaccgcatttcccgccagatgctccagcagtacggccgcgaggccacgccggaggagctggccaaggaaatggacatgccggaagacaagatccgcaaggtgatgaagatcgccaaggagccgatctcgatggaaaccccgatcggcgacgacgaggattcccatctgggcgacttcatcgaggacaccaacgtggagtccccgatcgagaacaccaccaacatcaacctgtctgaaaccgtgcgcgacgtgctggccggcctcaccccgagggaagccaaggtgctgcgcatgcgcttcggcatcgacatgaacaccgaccacacgctggaagaagtcggcaagcagttcgacgtgacccgcgagcgcatccgccagatcgaagcgaaggcgctgcgcaagctgcgtcatccgagccgctcggagcagctgcgcagcttcctggatatcgattga

SEQ ID NO: 493477 - DNA, 441 bp, Stenotrophomonas maltophilia
atgctcgtcctgatccagcgtgtcagccaggccgccgtccatgtcgacgaggaggtggtggggcagatcggccccggcttgctggccctggtcggcatggaaccgggggatagcgaggcccagctgcggcggatggccgaacgcctgctgggttaccgggtgttcgccgacgaggccgggaagatgaaccggtcgctgcgcgacaccggtggcggcctgctgctggtcagccagttcaccctggcggccgatacccgttcgggcatgcggccgagtttcaccagcgccgcaccgccggacgaggctgaacgcgggttcaatcgatttgtcgacatctgccgtgaaaatcatgcgccaggggtggaaacgggccggtttggtgcccatatggtcgtcagcctggtcaacgacggtcccgtgaccttccttctcaggccctag

SEQ ID NO: 493478 - DNA, 921 bp, Stenotrophomonas maltophilia
atgaatccgcaacgcaaagcccggctggtctaccgcgccaccaccctgttcgcccgcctgccctggccgctgctgcgggggttcgcacacgccctggcgtggacgtgggttcgtgtcaatgcccgtgagagccgcgttacccggcgcaacctcgaactggcctacccggagctggacggtcctgcacgcgaccgtctgcaccgcgaactgctgcgctccactgcgctgcaggccatcgagaccctgcgtttgtggagccggcagccggccgacaacctgcggctgcacctgaagcagcgccacggcgaagccctgtacgacgcggccctggccagcggcaagggcgtgatcgtggccgcaccgcacttcggcaactgggagctgctgaaccagtggctggcctcgcgcgggcagatcgccatcgtctacaagccgccggaagacgaggccagcgacgccttcctgcagctggtgcgcggcggccagaacgtgcagcaggtacgcgccgagggcccggccgtgcgccagctgttcaaggtgctcaaggacggcggcgccaccggcatcctgcccgaccagcagcccaaggccggcgatggcgtgttcgtgccgttcttcggcgtgcaggcgctgaccatgaccctggtcaaccggctggccgagcgcaccggcgccaccgtgctgtatggctggtgcgagcgcatcgggccggacatggaattcgccctgcacatcgagccgaccgacccggccgtggccgatccggacccgcaggtggccgccaccgcgctcaatgccggcatcgagcgcatcgcccgccgcgacccgacgcagtaccagtggacctacaagcgctatacgctgcggccaccgggcagcggcgaggaagatccgtatgcgaccgaagagcatccgcactga

SEQ ID NO: 493479 - DNA, 1137 bp, Stenotrophomonas maltophilia
atgtccgcctcccccggtcccgccatgcctgctgcctcttccctgttcggcgaccccgccgcgatccgctgcgaacgcgcggtggccgaactgcgtgccggtcgcccggtactgctccacgatgggcagggccagcgcctggcggtgattgcactggacagcgccactgccagcagcttcgctgccttcgccgctgccgcacgcgagcgccattacctgttcctgaccgccacccgcgcccgcgtgctcggcgtggaggcaccggcaggcgcgcgcctgccgctggcgggggttgccttcgatgccctgccctcgctgggctacctgcgcgagcccggcccgatgccggacgactggacggccggcgacgccttcgatgccggcgcggtggagctggcccgcctgggcctgctgctgccggcgatggtggcggtgcgcctggatgcagaggacatgacctttgcgggtgcggccgaagtggcgttgtgcgacctggccgagggcgcggcacacgccgcccacgattacgaactggtcgcccgttcgccggtaccgctgcgcgacgtcggcgtgaccaccttcgcggtgttccgcggcggcgtggcccagcgcgaccaggtcgcgatcatcgtcggcgaaccggacctgtcggcggtggtgccggtacgcgtgcactcctcgtgcctgaccggcgacctgttcggctcactcaagtgcgactgcggcgaccagctgcggcgcggcctgcgcaagctgaaggaactgggcggcggcgtgctgctgtacctggaccaggaaggccgcggcaccggcatcgccgccaagatgcgcgcctacggctaccagcacgacggcctggacaccatcgatgccgatgcacagctgggcttcggtgccgacgagcgccgctacggcagtgcggtggcgatgctgcatggcctgggcatttcgcgcgtggccctgctcagcaacaacccgaccaaggcacagcgtctgcgcaacgccggcatcgaggtgctggactgcattccggtcaccggcgagatcactgccgagaacgaacactacctgcgcaccaaggccgatcgtgccggccacatgctggatgtggacgcgctgatccaggctgcccagtag

SEQ ID NO: 493480 - DNA, 501 bp, Stenotrophomonas maltophilia
gtgatcgacgttcccctgacctccccgcctgccgatgcctggcagtcgctgccgcagcgcgccgcccgcctggccgcactggaaggcgccttcggcggactgttcgtgccgggcctgccgctggccgcggccgcgtggttcttcgagctgcccggcggcctgtggacggccgcccttgggctgctgatcggcatcgtcttcggcgcgtggcttggccaccggcgcttgacccgcacccgctggcggctggatacccaagggctgggcctgcgccgcgacctgatgtggcagctggaaacgcgcatccccatttcgcgcgtgcagcacctggatctgcgccgcggcccgctggaacgccgtgccggcctggccacgctgatcgtgcacaccgccgggacccgcatgagcgcagtgaccgtgagcggcctggacgaggccgacgccgagcgcctgcgtgacaccctgtcgcatcagctcgaccaggacgccgacgccctgtga

SEQ ID NO: 493481 - DNA, 1539 bp, Stenotrophomonas maltophilia
gtgagcctgccgccgcccctgcccgcatcgctgcctgccggtggcgaggaccatcgcctgcacccgtggtcgtggctgttcgtgctgctgatgcagctgcgtcactacttcctgccgctggtggcgctgctggtgttcggccagcgcggtgaccgcgacccgatgtgggcgcagctgattccgctgtcggcgattgccgcgctggtgctggtctcggtgctgcagtacctcagctaccgctaccgcatcggcagcgacgcgatcaccgtgcgcagcggactgctggcgcgcaaccgccgcgagatcccgttcgcccgcatccacaacgtggaagtgcggcagaacccgctgcaccgcctgttcggcgtggccgagctgcgccttgaatcggccggcggcgtgcgtccggaagccgaaatgcgcgtgctgaagctggaccaggcgttggcgctggaacgactggtgcgccagcgtgggcaggcaccgcaggccgccgacgtcgtggccgcccactcgatcaccgacgccgacaccgaacaggtgctgctgcgcctgtcgagctgggacgtggtgcgcatgggcctgctgtccaaccgcggctgggcattggcgatcgccgccttcggcgtgctgttccagaccgtgccgcggccggtgatggacgcggccatccagcgtggcggccgggaagccttcggctacgcaagccacctgcatcccggcgtggccggcgccttcctgctgctggccgcagccttgctgctgggctggctggcgctgcgtgcgctgtcggtggtgctgaccctgctgcgctatcacggcttcaccctcagcgagcaggatcgccgcctgaccgtctcggccggcctgctcagccgtacccgcagcagtgtcgcgcgtcgccgcatccaggcctggacgctgcgcgaaaccaccctgcatcgctggttcggcctgcgccagctgcgcattgacagcgctgccggcggcccctcgcgcgacgaagaccgcgccctgcgcgagctggcaccgctggcaccggcaatacgctgcgagcagctggtgcagcacctgttgcctcaactgcggtggccgccagcgcaatggcagtccattccgcagcgtggctggtggcggctgtgcctgggcgcgctgctgctggtgccggtgctggcagcggccgcgtactggcgctggggatcatggggcctgatcgtgctggcctggctgccggtggcgctgctggtggcacatcggcagatggcgcgcatgggctggtatctggatgcccattacgtggccgtgcgcggcggctggtggaagcgctggtggcgctgggccgagctggacaaggtgcagggcctgcgcctgcagcgttcaccgctggacaagctgctcggcaccagcagcctgcagctggatacggccggtgcgcacggtgatgtggcgttgaccctgcgccacctgccgcaggcgcaggcgcaacacgtgatggagcagctggccgcggcgctggcgcggcgcaagttgcgctggtaa

SEQ ID NO: 493482 - DNA, 1056 bp, Stenotrophomonas maltophilia
atggccgggtacctgttgtttgcgacggagcgctatgcgctgcctattctcgccccgttggcgcaggccttgcacgcctccgggcaggaggtggcggcctggttcgaggacggcgcggccgccagcaggctgccgggcgtgcccaacatcggactgaaacaggccctggcgatgcggccgcgtgccgtgttcagcgccgcgaactgggtgccgaccttcctgtccggcgccaaggtacagctgttccatggcttcaacgtagagaagcgcgacagtgcgcgcggccacttccgggtgcgcggcatgttcgacctgtactgcacgcaggggccggccaccaccgcgccgttccgtgagatcgccgccctgcagggccatttcgccgtagccgagaccggctggccgaagctcgacccgctgttccgcgacgacggtggcgagagcgccgcgctgcgcgcagcggcgggcgggcgcccggtgatcctgttcggttcgaccttcaccgagcgcctgagcgcagcgccccacctgcatgcgcagatcgccgccgatatcgctggcggtgagcgctactggctgctgaccctgcacccgaagtgcccaccggaactgttcgagcgctaccgcgcgctggccggtgcccatgcccgcttcatcgagccggagcaggtgatggccgcgcagcgcgccgccgatgtgctggtgtcggacacctcgtcgatcgtttcggagttcatcgtccagcacaagccggtggtgaccttccgcaaccgcgtgcccaagccgcacatgatcgacttcgacgacccggcgcagctgccggcgatgctgcagcgcgcgctgcatcccgacgccgcgctgcaggcggagatcgtgcgctacgccgacgccatccatccgtaccgcgatggcctgtccagcgagcgggtgatcgccgccaccgaggatttcctgtccggtgaaatgggcgtgctgcggcgcaagcccttcggcagctgggtgcgcgacctgcagatccgcaaggacctgggatattgggggccgtcgcagcgctga

SEQ ID NO: 493483 - DNA, 807 bp, Stenotrophomonas maltophilia
atgtcctccacgaccgctcccatcgaacggcctcgcatctcggcctgcattatcgcgttcaacgaggccggccgcatcggcgactgcctggcctcgctggccttctgcgatgagatcatcgtcgtggactcgtactccaccgatgccaccctggccatcgccgaggccgcaggcgcccgcgtgctgcagcgcgcgttcgatggcttccgtagccagaaggcctactgcgtcgagcaggcaagccacgactgggtgctgtgcctggacgccgatgagcggatcagcccggaactgcgcgcagccatcgaacaggcccgcgacggtggcttcgccggccatgccggctatcgcttcgcgcgcctgtcggagtacttcggcaggttcctgcgccatggcaacgcctacccggaccgggtgatgcgcctgttcgaccgccgccgcggcggctggcgcggcaagcgcgagatccacgaggcggccagcgtcgacggcagcgtcggcaccctgcgcggcgacctggtccattacccgtaccgctccctgcagcagcagctggccaagaccgagaagtacgcgcggatgatggccgagcacgagttcgcacgcggcaagcgggccacgctgggcaagctggtgctggcgccggcctggcggttctggcgcggcttcgtgttccgtggcggcttccgcgacggctggcacggcctggtctacgcctacgtgcgcgccaactacgtgcggcagaagaccatcatgctgtggatgctgggcaacggccagcccgtggccgacccgccgaacccctga

SEQ ID NO: 493484 - DNA, 1260 bp, Stenotrophomonas maltophilia
atggccggcgacccgctgggcgttcccgtcggtgggcgtcacggggttgcacacgggctggcccagctggggctgttctgcctgccggcactggtgctgaccgtgccgatcaacctgttgccgtatggtctcctgctgctgctcagcaccctgctggcgccggagctgctgtggcgcgcgcggggcatggccggccagccggtgaaagtgctggtctggctgatgctggcggtgctggcgctcggcgtactgtcggtggtgctgttcgaacagggcctgcgtgacgtcgacaaccgttcgcggttcgtggtgatcccatggatcgcgctgtggatctgcgcgctgcgtcccagcctgcggtggctctggtacggctcgttgaccggcctgctcgccaccttcgtgatgtcgctgtggcaggtgctgggcggtgccccgcgcgcggagctgttcaccaacgccatcgtgctggccgacatcgtgatggtgttgatggtgctgctggtgttctgccggccgtcgcggcgctggtcgctggtgatcctcggcatggccgccggttgcggcaccatcgtgctgaccggcagccgcggtgtgttcgccgccttgctggcgctgctggtggtgctggcgctgagcctgcgctggcgtaccggtgcggcgcgcctgtcggtgctggccgggatgctggcgatcggtgcgacgctgctgctgtcggtgccggagctgcgccaccaggtccgcctgagcgagctgcacagcgacgtgcagcggatggagctgggcgacagtgattcttccgccggtgcccgcgtcgagcgcctgcaggtagcctggcagaccttcctcgatcatccgctggtgggtgttggcatcggtcatttcgacagcgcgatgcagcgcgtgccggtctgccgggagaacccggaagagttgcgctgccacctggggcatgcccacaacgacgtggccgaatgggcggcgacccagggtgtaccgggcctgctgctgttgctggcggtgtatggcatcccgctgtggttgttcgtgcgcctgcatcgccgcagcggacgagcgaccttccgcgggccggccgctgccggcgtcatgctggtgatcacctacgcgttgtgcgggctgacccagtcgatgttcgcgcaccagatgacggccagtttctacgtgaccctggtcgggctgctgaccggcctgtcgatcgtcgaaggcgcgcgccaccgggcgatcaccggcggctcgtga

SEQ ID NO: 493485 - DNA, 1710 bp, Stenotrophomonas maltophilia
atgctgaaatcccgcgcgtcgcgcgagacgtggttgttcgtggtgatggccctgctggtgctgggggccgggctgggccttcgtgatccgtggccgtcggacgagccgcgcttcgcgctggtggccaagcagatgttcgacagcggccactggctgttcccgcaccgcgggaccgagctgtactcggacaagccgccgatgctgatgtggtggcaggccacgctgtacagcctggtcgggcagtggcgcgtggccttcctgctgccgtcgctgctggcggcactgggcacgctgtggtgcgtggtcgacctgggccggcggctgtggacgcggcgggtggggctgtatgccggctgggcgctgctgttcgcgctgcagttcaccttccaggcgaagaaggggcagatcgatcccctgctgctgctgttcatcaccctggccaactacggcctgctgcgccacctgctgctggggcctgcctggcgctggtggtggctgggctggttcttcgccggcatcggcgtgatcaccaagggcgtgggcatgctggcgctgctgatgatcgtgcccgcggcaatcgccacggcgctgcggtggccacgggtgggcctgcacgcgcgcgacgcgcgcttctggctggcgccgctggccttcctgctggcggtgtcgttgtggctggcgccgatgctgctggccggctttgccaccggctcggacgaatatcgcgcctacatggacgatatcctgttccagcagacggcgcggcgctacacccattcctgggatcaccaccagcccgcctggtacttcctggcgacgatgccgctgatgtggatcccggcattcctggccatgccctgggcgattccggcctggcgccgccggctgcaacgccgcgacgcgcgctatctgctgccgctggcctggtggctgatggtggtgctgttcttctcgattcccgccggcaagcgcgacgtctacatcctgccggcgctgccgatgttctgcctggtgctggcaccgctgttgccggggttgctgaagcgacgcgatgtgcaggccgtggtcgggctgttcaccggcctgctgtcattgggcctggccgtggctggcgcgatggcggtgctgggtgacccggccttcgagctgcgcctgacccatagccgcgggctcgcccccggggccgtcgacgcgctggcgtggacgatcctggcgatgggcctgtggggcggattgagcctgctggcctgtggccgtcgccggcagcttgcgctggtgtcgaccctggcggtggtctgggtgctgtacagcctggtcggctacccgctgctgaacgattccagttcggcccgtggcctgatgcgcacggtcggtacccgcctgggccccgatgccgagctggggttggtggcctggaaggaacagcacctgctgctggccgaccgtcccgccgcgaccttcggtttcgagactgactgggacgagcagctggtggcggccacgcgctggcagcggctggcgcccggacgtcgttggctgctggtccacgagtacgcgatgctgtcgtgcgtcgaccgcaaccgctccgaactggccggcgtgtccaaccggcggcgctggtggctggtgccggcggcggcggtgacggtgccgtgcgtggtcactgccgaggagcgggaacgtgaacggcgtttgcaggaacatgactag

SEQ ID NO: 493486 - DNA, 1332 bp, Stenotrophomonas maltophilia
gtgtcgaagcagaatgatttctccgtcgccaaggcggcgccgggcgcggccacccgcatgctggccgcacgcgtactggcgcaggtgttcacccgtggccgctcgctgaaggcggaactggcctgggcactgcccaagctggccgacagtcgtgatcgggccttgctggaagcgctgtgctttgcagtcctgcgccgccgcagtacctacgacgctgccttgcagtcgtggatgcagaagccgctgtcggcgcgtgatgccgacctgcgcacgttgctgatggtgggcttcgcgcagctggacgtgctggaactgccggcgcatgcggccctgtcggccacggtcgacgccgcccgcgcgctgggccgtgagcgccaggccgggctggtcaacgcgatcctgcgccgcgcgcagcgcgaggggttcccggagcagcctgcgcgtgacgcctttccggcgtggctggccgatgccgtcgagcgcgactggccgtcccaggcccaggcgatctttgctgccagcctgcagccggcgccgctgtggctgcgtgccaaccgccagcagggggggcgtgacaaggcgctggccacgctggccgaggccggcattgctgccgacgccagcccgctcagcgccgacgcgctgcgcctggtggcgcccatcgcggtgaaccagttgccggggttcgccgacggtgcgctgtcggtgcaggacctgtcggcgcaatgtgcggcggacgcgctggcaccggcgtccggcgcccgcgttctggacgcctgcgcggcaccgggtggcaagtcggcgcacctgctggagcgtgacccgagcctgcgtctgctggcgctggatatcgatgcgcgtcgcctggcgcgtgcccgcgatacctacacccgcaccggtgtaggtgagggcgcgcagacccgggtggccgatgccagcgaccccggtgcgtggtgggatggcacaccgttcgacgccatcctgctggatgcgccgtgttcggccaccggcgtgatccgccgccagccggacgtgatgttccaccgccgcgccgaggatatcgatgcgctggtcggcgtgcaggcccgcctgctggaggcctgctggtcgatgctgcgcccgggcggcgtgctgctgtacgccacctgttcgatcctgcgcgccgagaacatcgatcaggtgcgggccttcctgaagtggcatccggacgcggtggcacagccgctggatgacagattcggcctggactgcgaggggatcgcgcgccagcgactgccgggtgacagcgatgctgacggtttcttttacgcgcgtctgctaaaaacggcctga

SEQ ID NO: 493487 - DNA, 924 bp, Stenotrophomonas maltophilia
atgaggattgtctttgccggtacgccggaattcgcggtgtcgtcgctgcgcgccgcggcgcgccaccacgaggtcgtggccgtctatacccagcctgatcgcccggccgggcgcggccgtggcctggcaccgtcgccggtcaagctcgaagccgtggcccgtggcattccggtctaccagcccgaatcgctgaaggatgaagctgcccagcggcagctgcgcgacctgcagccggacctgatggtggtggtcgcctacggcctgatcctgcccagggcggtactggcgatcccgacccacggctgctggaacgtgcatgcctcgctgctgccacgctggcgcggtgccgcgccgatccagcgcgcgatccaggccggtgacgcaaagaccggcgtgtgcctgatgcagatggaagccggcctggataccggcccggtgctgctgcaccaggagctgccgatcgcggccaccgataccggcggccagttgcatgacaagctggccgaactgggcgcacaggtgctgtccgacggcctgggcctgctgcgtgccggcatcaagccgatcgcgcggccgcagcccgagcagggcgtgacctacgcgcacaagctggacaaggccgaagcccgcctggactgggcgcaggacgccgatgccctggcgcgcaccgtgcgcgccttcaatccgtggccgatcgccgaggccacgctggccggcgagcgcgtgcgcatccacggcgcggtcgctcttgacctggcccacggccaggcgccgggggcggtgctggcggccagccgcgatggtatcgacatcgcctgcggccagggcgcgctgcgcctgcgcacgctgcagcgcgaaggcggcaaggcgatcaccgccgccgactacctcaatgcccgccgcgacctgcacgtgggggcatag

SEQ ID NO: 493488 - DNA, 513 bp, Stenotrophomonas maltophilia
atggcccttctccccattctcgagttccccgatccgcgcctgcgtaccaaggctgcgttgatcgacgccgccgaagtcaccacgccggccttccaggaactgatcgacaacatgttcctgaccatgtacgacgccccgggcatcggcctggccgccacccaggtggacgtgcacaagcgcttcatggtcatcgatgtcagcgaagagaagaatgaaccgcatgtgttcatcaacccggaaatcgtcgccaaggacgggggccgggtgtaccaggagggctgcctgtcggtcccgggcatcttcgccgacgtgacccgcgctgacaccatcaccgtgaagtacctggaccgcaacggccaggagcagcagctggaggccggtgaagtgctggccacctgcatccagcacgagatggaccacctggacggcaagctgttcatcgactatctgtcgccgctcaagcgcgagatggtccgcaagaagctggccaagcagcgcaagcacgtggcgtga
